United States Patent Application Publication US 2014/0004565 A1 - sequence listing, part 109

SEQ ID NO: 2722078 - RNA, 19 nt, Artificial Sequence
  Description of Artificial Sequence: Synthetic oligonucleotide
ucuacaguugggaaaccua

SEQ ID NO: 2722079 - RNA, 19 nt, Artificial Sequence
  Description of Artificial Sequence: Synthetic oligonucleotide
accuagagcucccugucuc

SEQ ID NO: 2722080 - RNA, 19 nt, Artificial Sequence
  Description of Artificial Sequence: Synthetic oligonucleotide
cagucugugaccuucauua

SEQ ID NO: 2722081 - RNA, 19 nt, Artificial Sequence
  Description of Artificial Sequence: Synthetic oligonucleotide
acugagagagugccuggcg

SEQ ID NO: 2722082 - RNA, 19 nt, Artificial Sequence
  Description of Artificial Sequence: Synthetic oligonucleotide
uuuccuagugggauuccga

SEQ ID NO: 2722083 - RNA, 19 nt, Artificial Sequence
  Description of Artificial Sequence: Synthetic oligonucleotide
uuccgucucugcaucauca

SEQ ID NO: 2722084 - RNA, 19 nt, Artificial Sequence
  Description of Artificial Sequence: Synthetic oligonucleotide
gcgacuuuauuucucaccc

SEQ ID NO: 2722085 - RNA, 19 nt, Artificial Sequence
  Description of Artificial Sequence: Synthetic oligonucleotide
uuccagaugucuucgugga

SEQ ID NO: 2722086 - RNA, 19 nt, Artificial Sequence
  Description of Artificial Sequence: Synthetic oligonucleotide
uggauauuggagguacugc

SEQ ID NO: 2722087 - RNA, 19 nt, Artificial Sequence
  Description of Artificial Sequence: Synthetic oligonucleotide
ucgaaggaaccguugguac

SEQ ID NO: 2722088 - RNA, 19 nt, Artificial Sequence
  Description of Artificial Sequence: Synthetic oligonucleotide
gaaaugcaauuuccuucgg

SEQ ID NO: 2722089 - RNA, 19 nt, Artificial Sequence
  Description of Artificial Sequence: Synthetic oligonucleotide
ugucauugccaccugucuc

SEQ ID NO: 2722090 - RNA, 19 nt, Artificial Sequence
  Description of Artificial Sequence: Synthetic oligonucleotide
cuaucugucaaagugcaca

SEQ ID NO: 2722091 - RNA, 19 nt, Artificial Sequence
  Description of Artificial Sequence: Synthetic oligonucleotide
aucgauacugagagagugc

SEQ ID NO: 2722092 - RNA, 19 nt, Artificial Sequence
  Description of Artificial Sequence: Synthetic oligonucleotide
cugucgaaggaaccguugg

SEQ ID NO: 2722093 - RNA, 19 nt, Artificial Sequence
  Description of Artificial Sequence: Synthetic oligonucleotide
ucaugacaguucauccugc

SEQ ID NO: 2722094 - RNA, 19 nt, Artificial Sequence
  Description of Artificial Sequence: Synthetic oligonucleotide
uugguacauuugauucugg

SEQ ID NO: 2722095 - RNA, 19 nt, Artificial Sequence
  Description of Artificial Sequence: Synthetic oligonucleotide
auucuugcacuggauauug

SEQ ID NO: 2722096 - RNA, 19 nt, Artificial Sequence
  Description of Artificial Sequence: Synthetic oligonucleotide
caucgauacugagagagug

SEQ ID NO: 2722097 - RNA, 19 nt, Artificial Sequence
  Description of Artificial Sequence: Synthetic oligonucleotide
gaggcggcgacuuuauuuc

SEQ ID NO: 2722098 - RNA, 19 nt, Artificial Sequence
  Description of Artificial Sequence: Synthetic oligonucleotide
uucggaaucucgucgcgga

SEQ ID NO: 2722099 - RNA, 19 nt, Artificial Sequence
  Description of Artificial Sequence: Synthetic oligonucleotide
gauaugggugaggucggcg

SEQ ID NO: 2722100 - RNA, 19 nt, Artificial Sequence
  Description of Artificial Sequence: Synthetic oligonucleotide
auaugggugaggucggcgu

SEQ ID NO: 2722101 - RNA, 19 nt, Artificial Sequence
  Description of Artificial Sequence: Synthetic oligonucleotide
cugcacaagcccuaacccc

SEQ ID NO: 2722102 - RNA, 19 nt, Artificial Sequence
  Description of Artificial Sequence: Synthetic oligonucleotide
uggguuacccucacaggca

SEQ ID NO: 2722103 - RNA, 19 nt, Artificial Sequence
  Description of Artificial Sequence: Synthetic oligonucleotide
ugcccuguaucuacaguug

SEQ ID NO: 2722104 - RNA, 19 nt, Artificial Sequence
  Description of Artificial Sequence: Synthetic oligonucleotide
ucaucuuccgucucugcau

SEQ ID NO: 2722105 - RNA, 19 nt, Artificial Sequence
  Description of Artificial Sequence: Synthetic oligonucleotide
auuccgaauaguagaaaug

SEQ ID NO: 2722106 - RNA, 19 nt, Artificial Sequence
  Description of Artificial Sequence: Synthetic oligonucleotide
gauuccgaauaguagaaau

SEQ ID NO: 2722107 - RNA, 19 nt, Artificial Sequence
  Description of Artificial Sequence: Synthetic oligonucleotide
uccuucggaaucucgucgc

SEQ ID NO: 2722108 - RNA, 19 nt, Artificial Sequence
  Description of Artificial Sequence: Synthetic oligonucleotide
uucuugcacuggauauugg

SEQ ID NO: 2722109 - RNA, 19 nt, Artificial Sequence
  Description of Artificial Sequence: Synthetic oligonucleotide
cucgucgcggauaugggug

SEQ ID NO: 2722110 - RNA, 19 nt, Artificial Sequence
  Description of Artificial Sequence: Synthetic oligonucleotide
caguugggaaaccuagagc

SEQ ID NO: 2722111 - RNA, 19 nt, Artificial Sequence
  Description of Artificial Sequence: Synthetic oligonucleotide
gccaucgauacugagagag

SEQ ID NO: 2722112 - RNA, 19 nt, Artificial Sequence
  Description of Artificial Sequence: Synthetic oligonucleotide
uugcccuguaucuacaguu

SEQ ID NO: 2722113 - RNA, 19 nt, Artificial Sequence
  Description of Artificial Sequence: Synthetic oligonucleotide
uauuggagguacugcagau

SEQ ID NO: 2722114 - RNA, 19 nt, Artificial Sequence
  Description of Artificial Sequence: Synthetic oligonucleotide
gcaaugacaacucgccuag

SEQ ID NO: 2722115 - RNA, 19 nt, Artificial Sequence
  Description of Artificial Sequence: Synthetic oligonucleotide
ucacaggcaaugacaacuc

SEQ ID NO: 2722116 - RNA, 19 nt, Artificial Sequence
  Description of Artificial Sequence: Synthetic oligonucleotide
uuuccuucggaaucucguc

SEQ ID NO: 2722117 - RNA, 19 nt, Artificial Sequence
  Description of Artificial Sequence: Synthetic oligonucleotide
acacccucaugacaguuca

SEQ ID NO: 2722118 - RNA, 19 nt, Artificial Sequence
  Description of Artificial Sequence: Synthetic oligonucleotide
cucucugcagucugugacc

SEQ ID NO: 2722119 - RNA, 19 nt, Artificial Sequence
  Description of Artificial Sequence: Synthetic oligonucleotide
uugaaguguuugcacugac

SEQ ID NO: 2722120 - RNA, 19 nt, Artificial Sequence
  Description of Artificial Sequence: Synthetic oligonucleotide
acccucaugacaguucauc

SEQ ID NO: 2722121 - RNA, 19 nt, Artificial Sequence
  Description of Artificial Sequence: Synthetic oligonucleotide
cuagugcuugcacuugccc

SEQ ID NO: 2722122 - RNA, 19 nt, Artificial Sequence
  Description of Artificial Sequence: Synthetic oligonucleotide
ucucugcaucaucaaguug

SEQ ID NO: 2722123 - RNA, 19 nt, Artificial Sequence
  Description of Artificial Sequence: Synthetic oligonucleotide
ggauauuggagguacugca

SEQ ID NO: 2722124 - RNA, 19 nt, Artificial Sequence
  Description of Artificial Sequence: Synthetic oligonucleotide
acgaauguuccagaugucu

SEQ ID NO: 2722125 - RNA, 19 nt, Artificial Sequence
  Description of Artificial Sequence: Synthetic oligonucleotide
uaggagggcugcacaagcc

SEQ ID NO: 2722126 - RNA, 19 nt, Artificial Sequence
  Description of Artificial Sequence: Synthetic oligonucleotide
gaauaguagaaaugcaauu

SEQ ID NO: 2722127 - RNA, 19 nt, Artificial Sequence
  Description of Artificial Sequence: Synthetic oligonucleotide
gaaaccuagagcucccugu

SEQ ID NO: 2722128 - RNA, 19 nt, Artificial Sequence
  Description of Artificial Sequence: Synthetic oligonucleotide
cuugcacuugcccuguauc

SEQ ID NO: 2722129 - RNA, 19 nt, Artificial Sequence
  Description of Artificial Sequence: Synthetic oligonucleotide
uacauuugauucuggccau

SEQ ID NO: 2722130 - RNA, 19 nt, Artificial Sequence
  Description of Artificial Sequence: Synthetic oligonucleotide
cuagugggauuccgaauag

SEQ ID NO: 2722131 - RNA, 19 nt, Artificial Sequence
  Description of Artificial Sequence: Synthetic oligonucleotide
guggaugaagguguugaag

SEQ ID NO: 2722132 - RNA, 19 nt, Artificial Sequence
  Description of Artificial Sequence: Synthetic oligonucleotide
aaccuagagcucccugucu

SEQ ID NO: 2722133 - RNA, 19 nt, Artificial Sequence
  Description of Artificial Sequence: Synthetic oligonucleotide
uuccuagugggauuccgaa

SEQ ID NO: 2722134 - RNA, 19 nt, Artificial Sequence
  Description of Artificial Sequence: Synthetic oligonucleotide
auuuccuucggaaucucgu

SEQ ID NO: 2722135 - RNA, 19 nt, Artificial Sequence
  Description of Artificial Sequence: Synthetic oligonucleotide
aucuaucugucaaagugca

SEQ ID NO: 2722136 - RNA, 19 nt, Artificial Sequence
  Description of Artificial Sequence: Synthetic oligonucleotide
ucuaucugucaaagugcac

SEQ ID NO: 2722137 - RNA, 19 nt, Artificial Sequence
  Description of Artificial Sequence: Synthetic oligonucleotide
agugcacagggaccucugg

SEQ ID NO: 2722138 - RNA, 19 nt, Artificial Sequence
  Description of Artificial Sequence: Synthetic oligonucleotide
acaugcugucgaaggaacc

SEQ ID NO: 2722139 - RNA, 19 nt, Artificial Sequence
  Description of Artificial Sequence: Synthetic oligonucleotide
guuacccucacaggcaaug

SEQ ID NO: 2722140 - RNA, 19 nt, Artificial Sequence
  Description of Artificial Sequence: Synthetic oligonucleotide
cagaugccacgaauguucc

SEQ ID NO: 2722141 - RNA, 19 nt, Artificial Sequence
  Description of Artificial Sequence: Synthetic oligonucleotide
cuggauauuggagguacug

SEQ ID NO: 2722142 - RNA, 19 nt, Artificial Sequence
  Description of Artificial Sequence: Synthetic oligonucleotide
uacacccucaugacaguuc

SEQ ID NO: 2722143 - RNA, 19 nt, Artificial Sequence
  Description of Artificial Sequence: Synthetic oligonucleotide
cacuggauauuggagguac

SEQ ID NO: 2722144 - RNA, 19 nt, Artificial Sequence
  Description of Artificial Sequence: Synthetic oligonucleotide
acaagcccuaaccccagca

SEQ ID NO: 2722145 - RNA, 19 nt, Artificial Sequence
  Description of Artificial Sequence: Synthetic oligonucleotide
acagggaccucuggguuac

SEQ ID NO: 2722146 - RNA, 19 nt, Artificial Sequence
  Description of Artificial Sequence: Synthetic oligonucleotide
gucuucguggaugaaggug

SEQ ID NO: 2722147 - RNA, 19 nt, Artificial Sequence
  Description of Artificial Sequence: Synthetic oligonucleotide
agagccaucgauacugaga

SEQ ID NO: 2722148 - RNA, 19 nt, Artificial Sequence
  Description of Artificial Sequence: Synthetic oligonucleotide
ggcgacuuuauuucucacc

SEQ ID NO: 2722149 - RNA, 19 nt, Artificial Sequence
  Description of Artificial Sequence: Synthetic oligonucleotide
ggaugaagguguugaagug

SEQ ID NO: 2722150 - RNA, 19 nt, Artificial Sequence
  Description of Artificial Sequence: Synthetic oligonucleotide
gugaggucggcguugccug

SEQ ID NO: 2722151 - RNA, 19 nt, Artificial Sequence
  Description of Artificial Sequence: Synthetic oligonucleotide
cuaacaugcugucgaagga

SEQ ID NO: 2722152 - RNA, 19 nt, Artificial Sequence
  Description of Artificial Sequence: Synthetic oligonucleotide
acucgccuagugcuugcac

SEQ ID NO: 2722153 - RNA, 19 nt, Artificial Sequence
  Description of Artificial Sequence: Synthetic oligonucleotide
cacaggcaaugacaacucg

SEQ ID NO: 2722154 - RNA, 19 nt, Artificial Sequence
  Description of Artificial Sequence: Synthetic oligonucleotide
guuugcacugacgagaagu

SEQ ID NO: 2722155 - RNA, 19 nt, Artificial Sequence
  Description of Artificial Sequence: Synthetic oligonucleotide
ggcugcacaagcccuaacc

SEQ ID NO: 2722156 - RNA, 19 nt, Artificial Sequence
  Description of Artificial Sequence: Synthetic oligonucleotide
ucucgucgcggauaugggu

SEQ ID NO: 2722157 - RNA, 19 nt, Artificial Sequence
  Description of Artificial Sequence: Synthetic oligonucleotide
acgagaagucaucuuccgu

SEQ ID NO: 2722158 - RNA, 19 nt, Artificial Sequence
  Description of Artificial Sequence: Synthetic oligonucleotide
gcugcacaagcccuaaccc

SEQ ID NO: 2722159 - RNA, 19 nt, Artificial Sequence
  Description of Artificial Sequence: Synthetic oligonucleotide
auuggagguacugcagaug

SEQ ID NO: 2722160 - RNA, 19 nt, Artificial Sequence
  Description of Artificial Sequence: Synthetic oligonucleotide
cuggcgcggaacuggaggc

SEQ ID NO: 2722161 - RNA, 19 nt, Artificial Sequence
  Description of Artificial Sequence: Synthetic oligonucleotide
uguuugcacugacgagaag

SEQ ID NO: 2722162 - RNA, 19 nt, Artificial Sequence
  Description of Artificial Sequence: Synthetic oligonucleotide
gccaccugucuccugaggg

SEQ ID NO: 2722163 - RNA, 19 nt, Artificial Sequence
  Description of Artificial Sequence: Synthetic oligonucleotide
gucugugaccuucauuaca

SEQ ID NO: 2722164 - RNA, 19 nt, Artificial Sequence
  Description of Artificial Sequence: Synthetic oligonucleotide
agcccuaaccccagcaggg

SEQ ID NO: 2722165 - RNA, 19 nt, Artificial Sequence
  Description of Artificial Sequence: Synthetic oligonucleotide
aaguugcaguaguugucau

SEQ ID NO: 2722166 - RNA, 19 nt, Artificial Sequence
  Description of Artificial Sequence: Synthetic oligonucleotide
caaguugcaguaguuguca

SEQ ID NO: 2722167 - RNA, 19 nt, Artificial Sequence
  Description of Artificial Sequence: Synthetic oligonucleotide
gacuuuauuucucacccuu

SEQ ID NO: 2722168 - RNA, 19 nt, Artificial Sequence
  Description of Artificial Sequence: Synthetic oligonucleotide
gagggcuaacaugcugucg

SEQ ID NO: 2722169 - RNA, 19 nt, Artificial Sequence
  Description of Artificial Sequence: Synthetic oligonucleotide
gaugaagguguugaagugu

SEQ ID NO: 2722170 - RNA, 19 nt, Artificial Sequence
  Description of Artificial Sequence: Synthetic oligonucleotide
agggaccucuggguuaccc

SEQ ID NO: 2722171 - RNA, 19 nt, Artificial Sequence
  Description of Artificial Sequence: Synthetic oligonucleotide
guagaaaugcaauuuccuu

SEQ ID NO: 2722172 - RNA, 19 nt, Artificial Sequence
  Description of Artificial Sequence: Synthetic oligonucleotide
agugggauuccgaauagua

SEQ ID NO: 2722173 - RNA, 19 nt, Artificial Sequence
  Description of Artificial Sequence: Synthetic oligonucleotide
gagagagugccuggcgcgg

SEQ ID NO: 2722174 - RNA, 19 nt, Artificial Sequence
  Description of Artificial Sequence: Synthetic oligonucleotide
uugcaguaguugucauugc

SEQ ID NO: 2722175 - RNA, 19 nt, Artificial Sequence
  Description of Artificial Sequence: Synthetic oligonucleotide
gaagcaaggaccagguccu

SEQ ID NO: 2722176 - RNA, 19 nt, Artificial Sequence
  Description of Artificial Sequence: Synthetic oligonucleotide
cauaggagggcugcacaag

SEQ ID NO: 2722177 - RNA, 19 nt, Artificial Sequence
  Description of Artificial Sequence: Synthetic oligonucleotide
cuucggaaucucgucgcgg

SEQ ID NO: 2722178 - RNA, 19 nt, Artificial Sequence
  Description of Artificial Sequence: Synthetic oligonucleotide
aucuacaguugggaaaccu

SEQ ID NO: 2722179 - RNA, 19 nt, Artificial Sequence
  Description of Artificial Sequence: Synthetic oligonucleotide
ugaggucggcguugccugg

SEQ ID NO: 2722180 - RNA, 19 nt, Artificial Sequence
  Description of Artificial Sequence: Synthetic oligonucleotide
gcagaugccacgaauguuc

SEQ ID NO: 2722181 - RNA, 19 nt, Artificial Sequence
  Description of Artificial Sequence: Synthetic oligonucleotide
aguugcaguaguugucauu

SEQ ID NO: 2722182 - RNA, 19 nt, Artificial Sequence
  Description of Artificial Sequence: Synthetic oligonucleotide
accucuggguuacccucac

SEQ ID NO: 2722183 - RNA, 19 nt, Artificial Sequence
  Description of Artificial Sequence: Synthetic oligonucleotide
cugugaccuucauuacacc

SEQ ID NO: 2722184 - RNA, 19 nt, Artificial Sequence
  Description of Artificial Sequence: Synthetic oligonucleotide
ugucuucguggaugaaggu

SEQ ID NO: 2722185 - RNA, 19 nt, Artificial Sequence
  Description of Artificial Sequence: Synthetic oligonucleotide
ucuggccauaggagggcug

SEQ ID NO: 2722186 - RNA, 19 nt, Artificial Sequence
  Description of Artificial Sequence: Synthetic oligonucleotide
acaacucgccuagugcuug

SEQ ID NO: 2722187 - RNA, 19 nt, Artificial Sequence
  Description of Artificial Sequence: Synthetic oligonucleotide
caucaucaaguugcaguag

SEQ ID NO: 2722188 - RNA, 19 nt, Artificial Sequence
  Description of Artificial Sequence: Synthetic oligonucleotide
aggcaaugacaacucgccu

SEQ ID NO: 2722189 - RNA, 19 nt, Artificial Sequence
  Description of Artificial Sequence: Synthetic oligonucleotide
caggagcagaagcaaggac

SEQ ID NO: 2722190 - RNA, 19 nt, Artificial Sequence
  Description of Artificial Sequence: Synthetic oligonucleotide
uccuagugggauuccgaau

SEQ ID NO: 2722191 - RNA, 19 nt, Artificial Sequence
  Description of Artificial Sequence: Synthetic oligonucleotide
ucgcggauaugggugaggu

SEQ ID NO: 2722192 - RNA, 19 nt, Artificial Sequence
  Description of Artificial Sequence: Synthetic oligonucleotide
uugcacugacgagaaguca

SEQ ID NO: 2722193 - RNA, 19 nt, Artificial Sequence
  Description of Artificial Sequence: Synthetic oligonucleotide
cuggccauaggagggcugc

SEQ ID NO: 2722194 - RNA, 19 nt, Artificial Sequence
  Description of Artificial Sequence: Synthetic oligonucleotide
cagaugucuucguggauga

SEQ ID NO: 2722195 - RNA, 19 nt, Artificial Sequence
  Description of Artificial Sequence: Synthetic oligonucleotide
cccucaugacaguucaucc

SEQ ID NO: 2722196 - RNA, 19 nt, Artificial Sequence
  Description of Artificial Sequence: Synthetic oligonucleotide
aggucggcguugccuggcc

SEQ ID NO: 2722197 - RNA, 19 nt, Artificial Sequence
  Description of Artificial Sequence: Synthetic oligonucleotide
uuacccucacaggcaauga

SEQ ID NO: 2722198 - RNA, 19 nt, Artificial Sequence
  Description of Artificial Sequence: Synthetic oligonucleotide
ucgucgcggauauggguga

SEQ ID NO: 2722199 - RNA, 19 nt, Artificial Sequence
  Description of Artificial Sequence: Synthetic oligonucleotide
uaugggugaggucggcguu

SEQ ID NO: 2722200 - RNA, 19 nt, Artificial Sequence
  Description of Artificial Sequence: Synthetic oligonucleotide
guugccuggccacgcaaac

SEQ ID NO: 2722201 - RNA, 19 nt, Artificial Sequence
  Description of Artificial Sequence: Synthetic oligonucleotide
guugaaguguuugcacuga

SEQ ID NO: 2722202 - RNA, 19 nt, Artificial Sequence
  Description of Artificial Sequence: Synthetic oligonucleotide
caaggaccagguccucugc

SEQ ID NO: 2722203 - RNA, 19 nt, Artificial Sequence
  Description of Artificial Sequence: Synthetic oligonucleotide
ucgccuagugcuugcacuu

SEQ ID NO: 2722204 - RNA, 19 nt, Artificial Sequence
  Description of Artificial Sequence: Synthetic oligonucleotide
ugccacgaauguuccagau

SEQ ID NO: 2722205 - RNA, 19 nt, Artificial Sequence
  Description of Artificial Sequence: Synthetic oligonucleotide
gcccuguaucuacaguugg

SEQ ID NO: 2722206 - RNA, 19 nt, Artificial Sequence
  Description of Artificial Sequence: Synthetic oligonucleotide
ggcaaugacaacucgccua

SEQ ID NO: 2722207 - RNA, 19 nt, Artificial Sequence
  Description of Artificial Sequence: Synthetic oligonucleotide
acccucacaggcaaugaca

SEQ ID NO: 2722208 - RNA, 19 nt, Artificial Sequence
  Description of Artificial Sequence: Synthetic oligonucleotide
augaagguguugaaguguu

SEQ ID NO: 2722209 - RNA, 19 nt, Artificial Sequence
  Description of Artificial Sequence: Synthetic oligonucleotide
uaucuacaguugggaaacc

SEQ ID NO: 2722210 - RNA, 19 nt, Artificial Sequence
  Description of Artificial Sequence: Synthetic oligonucleotide
cccuguaucuacaguuggg

SEQ ID NO: 2722211 - RNA, 19 nt, Artificial Sequence
  Description of Artificial Sequence: Synthetic oligonucleotide
ccgaauaguagaaaugcaa

SEQ ID NO: 2722212 - RNA, 19 nt, Artificial Sequence
  Description of Artificial Sequence: Synthetic oligonucleotide
aaccguugguacauuugau

SEQ ID NO: 2722213 - RNA, 19 nt, Artificial Sequence
  Description of Artificial Sequence: Synthetic oligonucleotide
ggaaaccuagagcucccug

SEQ ID NO: 2722214 - RNA, 19 nt, Artificial Sequence
  Description of Artificial Sequence: Synthetic oligonucleotide
cagagccaucgauacugag

SEQ ID NO: 2722215 - RNA, 19 nt, Artificial Sequence
  Description of Artificial Sequence: Synthetic oligonucleotide
ugcacuugcccuguaucua

SEQ ID NO: 2722216 - RNA, 19 nt, Artificial Sequence
  Description of Artificial Sequence: Synthetic oligonucleotide
ugccauucuugcacuggau

SEQ ID NO: 2722217 - RNA, 19 nt, Artificial Sequence
  Description of Artificial Sequence: Synthetic oligonucleotide
uucguggaugaagguguug

SEQ ID NO: 2722218 - RNA, 19 nt, Artificial Sequence
  Description of Artificial Sequence: Synthetic oligonucleotide
uccgucucugcaucaucaa

SEQ ID NO: 2722219 - RNA, 19 nt, Artificial Sequence
  Description of Artificial Sequence: Synthetic oligonucleotide
aucucgucgcggauauggg

SEQ ID NO: 2722220 - RNA, 19 nt, Artificial Sequence
  Description of Artificial Sequence: Synthetic oligonucleotide
ccagaugucuucguggaug

SEQ ID NO: 2722221 - RNA, 19 nt, Artificial Sequence
  Description of Artificial Sequence: Synthetic oligonucleotide
ccuggcgcggaacuggagg

SEQ ID NO: 2722222 - RNA, 19 nt, Artificial Sequence
  Description of Artificial Sequence: Synthetic oligonucleotide
agcucccugucucucugca

SEQ ID NO: 2722223 - RNA, 19 nt, Artificial Sequence
  Description of Artificial Sequence: Synthetic oligonucleotide
gcaaggaccagguccucug

SEQ ID NO: 2722224 - RNA, 19 nt, Artificial Sequence
  Description of Artificial Sequence: Synthetic oligonucleotide
ugcugucgaaggaaccguu

SEQ ID NO: 2722225 - RNA, 19 nt, Artificial Sequence
  Description of Artificial Sequence: Synthetic oligonucleotide
uccagaugucuucguggau

SEQ ID NO: 2722226 - RNA, 19 nt, Artificial Sequence
  Description of Artificial Sequence: Synthetic oligonucleotide
ccuggccacgcaaacagac

SEQ ID NO: 2722227 - RNA, 19 nt, Artificial Sequence
  Description of Artificial Sequence: Synthetic oligonucleotide
augccacgaauguuccaga

SEQ ID NO: 2722228 - RNA, 19 nt, Artificial Sequence
  Description of Artificial Sequence: Synthetic oligonucleotide
gaaggaaccguugguacau

SEQ ID NO: 2722229 - RNA, 19 nt, Artificial Sequence
  Description of Artificial Sequence: Synthetic oligonucleotide
uccugagggcuaacaugcu

SEQ ID NO: 2722230 - RNA, 19 nt, Artificial Sequence
  Description of Artificial Sequence: Synthetic oligonucleotide
ucggcguugccuggccacg

SEQ ID NO: 2722231 - RNA, 19 nt, Artificial Sequence
  Description of Artificial Sequence: Synthetic oligonucleotide
aggaaccguugguacauuu

SEQ ID NO: 2722232 - RNA, 19 nt, Artificial Sequence
  Description of Artificial Sequence: Synthetic oligonucleotide
uagugggauuccgaauagu

SEQ ID NO: 2722233 - RNA, 19 nt, Artificial Sequence
  Description of Artificial Sequence: Synthetic oligonucleotide
auguuccagaugucuucgu

SEQ ID NO: 2722234 - RNA, 19 nt, Artificial Sequence
  Description of Artificial Sequence: Synthetic oligonucleotide
gagguacugcagaugccac

SEQ ID NO: 2722235 - RNA, 19 nt, Artificial Sequence
  Description of Artificial Sequence: Synthetic oligonucleotide
gugccuggcgcggaacugg

SEQ ID NO: 2722236 - RNA, 19 nt, Artificial Sequence
  Description of Artificial Sequence: Synthetic oligonucleotide
ggaaccguugguacauuug

SEQ ID NO: 2722237 - RNA, 19 nt, Artificial Sequence
  Description of Artificial Sequence: Synthetic oligonucleotide
agaugccacgaauguucca

SEQ ID NO: 2722238 - RNA, 19 nt, Artificial Sequence
  Description of Artificial Sequence: Synthetic oligonucleotide
caacucgccuagugcuugc

SEQ ID NO: 2722239 - RNA, 19 nt, Artificial Sequence
  Description of Artificial Sequence: Synthetic oligonucleotide
guugggaaaccuagagcuc

SEQ ID NO: 2722240 - RNA, 19 nt, Artificial Sequence
  Description of Artificial Sequence: Synthetic oligonucleotide
ugcagaugccacgaauguu

SEQ ID NO: 2722241 - RNA, 19 nt, Artificial Sequence
  Description of Artificial Sequence: Synthetic oligonucleotide
uuacacccucaugacaguu

SEQ ID NO: 2722242 - RNA, 19 nt, Artificial Sequence
  Description of Artificial Sequence: Synthetic oligonucleotide
cacgaauguuccagauguc

SEQ ID NO: 2722243 - RNA, 19 nt, Artificial Sequence
  Description of Artificial Sequence: Synthetic oligonucleotide
uggcgcggaacuggaggcg

SEQ ID NO: 2722244 - RNA, 19 nt, Artificial Sequence
  Description of Artificial Sequence: Synthetic oligonucleotide
cuuccgucucugcaucauc

SEQ ID NO: 2722245 - RNA, 19 nt, Artificial Sequence
  Description of Artificial Sequence: Synthetic oligonucleotide
ucggaaucucgucgcggau

SEQ ID NO: 2722246 - RNA, 19 nt, Artificial Sequence
  Description of Artificial Sequence: Synthetic oligonucleotide
augcugucgaaggaaccgu

SEQ ID NO: 2722247 - RNA, 19 nt, Artificial Sequence
  Description of Artificial Sequence: Synthetic oligonucleotide
ucuuccgucucugcaucau

SEQ ID NO: 2722248 - RNA, 19 nt, Artificial Sequence
  Description of Artificial Sequence: Synthetic oligonucleotide
gccacgaauguuccagaug

SEQ ID NO: 2722249 - RNA, 19 nt, Artificial Sequence
  Description of Artificial Sequence: Synthetic oligonucleotide
cuaaccccagcagggucag

SEQ ID NO: 2722250 - RNA, 19 nt, Artificial Sequence
  Description of Artificial Sequence: Synthetic oligonucleotide
ccacgaauguuccagaugu

SEQ ID NO: 2722251 - RNA, 19 nt, Artificial Sequence
  Description of Artificial Sequence: Synthetic oligonucleotide
gccacgcaaacagacuggg

SEQ ID NO: 2722252 - RNA, 19 nt, Artificial Sequence
  Description of Artificial Sequence: Synthetic oligonucleotide
gcacuugcccuguaucuac

SEQ ID NO: 2722253 - RNA, 19 nt, Artificial Sequence
  Description of Artificial Sequence: Synthetic oligonucleotide
gucggcguugccuggccac

SEQ ID NO: 2722254 - RNA, 19 nt, Artificial Sequence
  Description of Artificial Sequence: Synthetic oligonucleotide
aacucgccuagugcuugca

SEQ ID NO: 2722255 - RNA, 19 nt, Artificial Sequence
  Description of Artificial Sequence: Synthetic oligonucleotide
ugccuggcgcggaacugga

SEQ ID NO: 2722256 - RNA, 19 nt, Artificial Sequence
  Description of Artificial Sequence: Synthetic oligonucleotide
ccuagugcuugcacuugcc

SEQ ID NO: 2722257 - RNA, 19 nt, Artificial Sequence
  Description of Artificial Sequence: Synthetic oligonucleotide
uucuggccauaggagggcu

SEQ ID NO: 2722258 - RNA, 19 nt, Artificial Sequence
  Description of Artificial Sequence: Synthetic oligonucleotide
ccuagugggauuccgaaua

SEQ ID NO: 2722259 - RNA, 19 nt, Artificial Sequence
  Description of Artificial Sequence: Synthetic oligonucleotide
agcaaggaccagguccucu

SEQ ID NO: 2722260 - RNA, 19 nt, Artificial Sequence
  Description of Artificial Sequence: Synthetic oligonucleotide
agguccucugcagagccau

SEQ ID NO: 2722261 - RNA, 19 nt, Artificial Sequence
  Description of Artificial Sequence: Synthetic oligonucleotide
gagcucccugucucucugc

SEQ ID NO: 2722262 - RNA, 19 nt, Artificial Sequence
  Description of Artificial Sequence: Synthetic oligonucleotide
acuggaggcggcgacuuua

SEQ ID NO: 2722263 - RNA, 19 nt, Artificial Sequence
  Description of Artificial Sequence: Synthetic oligonucleotide
gucgcggauaugggugagg

SEQ ID NO: 2722264 - RNA, 19 nt, Artificial Sequence
  Description of Artificial Sequence: Synthetic oligonucleotide
guguuugcacugacgagaa

SEQ ID NO: 2722265 - RNA, 19 nt, Artificial Sequence
  Description of Artificial Sequence: Synthetic oligonucleotide
cacaagcccuaaccccagc

SEQ ID NO: 2722266 - RNA, 19 nt, Artificial Sequence
  Description of Artificial Sequence: Synthetic oligonucleotide
agugccuggcgcggaacug

SEQ ID NO: 2722267 - RNA, 19 nt, Artificial Sequence
  Description of Artificial Sequence: Synthetic oligonucleotide
ccaccugucuccugagggc

SEQ ID NO: 2722268 - RNA, 19 nt, Artificial Sequence
  Description of Artificial Sequence: Synthetic oligonucleotide
aggcggcgacuuuauuucu

SEQ ID NO: 2722269 - RNA, 19 nt, Artificial Sequence
  Description of Artificial Sequence: Synthetic oligonucleotide
gccuagugcuugcacuugc

SEQ ID NO: 2722270 - RNA, 19 nt, Artificial Sequence
  Description of Artificial Sequence: Synthetic oligonucleotide
acuggauauuggagguacu

SEQ ID NO: 2722271 - RNA, 19 nt, Artificial Sequence
  Description of Artificial Sequence: Synthetic oligonucleotide
ggccacgcaaacagacugg

SEQ ID NO: 2722272 - RNA, 19 nt, Artificial Sequence
  Description of Artificial Sequence: Synthetic oligonucleotide
cucgccuagugcuugcacu

SEQ ID NO: 2722273 - RNA, 19 nt, Artificial Sequence
  Description of Artificial Sequence: Synthetic oligonucleotide
aacuggaggcggcgacuuu

SEQ ID NO: 2722274 - RNA, 19 nt, Artificial Sequence
  Description of Artificial Sequence: Synthetic oligonucleotide
ccuguaucuacaguuggga

SEQ ID NO: 2722275 - RNA, 19 nt, Artificial Sequence
  Description of Artificial Sequence: Synthetic oligonucleotide
gaggucggcguugccuggc

SEQ ID NO: 2722276 - RNA, 19 nt, Artificial Sequence
  Description of Artificial Sequence: Synthetic oligonucleotide
agccaucgauacugagaga

SEQ ID NO: 2722277 - RNA, 19 nt, Artificial Sequence
  Description of Artificial Sequence: Synthetic oligonucleotide
ccugccauucuugcacugg

SEQ ID NO: 2722278 - RNA, 19 nt, Artificial Sequence
  Description of Artificial Sequence: Synthetic oligonucleotide
gaccucuggguuacccuca

SEQ ID NO: 2722279 - RNA, 19 nt, Artificial Sequence
  Description of Artificial Sequence: Synthetic oligonucleotide
gacaguucauccugccauu

SEQ ID NO: 2722280 - RNA, 19 nt, Artificial Sequence
  Description of Artificial Sequence: Synthetic oligonucleotide
ccuucggaaucucgucgcg

SEQ ID NO: 2722281 - RNA, 19 nt, Artificial Sequence
  Description of Artificial Sequence: Synthetic oligonucleotide
ccuaaccccagcaggguca

SEQ ID NO: 2722282 - RNA, 19 nt, Artificial Sequence
  Description of Artificial Sequence: Synthetic oligonucleotide
gggauuccgaauaguagaa

SEQ ID NO: 2722283 - RNA, 19 nt, Artificial Sequence
  Description of Artificial Sequence: Synthetic oligonucleotide
gccauucuugcacuggaua

SEQ ID NO: 2722284 - RNA, 19 nt, Artificial Sequence
  Description of Artificial Sequence: Synthetic oligonucleotide
ccgucucugcaucaucaag

SEQ ID NO: 2722285 - RNA, 19 nt, Artificial Sequence
  Description of Artificial Sequence: Synthetic oligonucleotide
gcugucgaaggaaccguug

SEQ ID NO: 2722286 - RNA, 19 nt, Artificial Sequence
  Description of Artificial Sequence: Synthetic oligonucleotide
cugcagaugccacgaaugu

SEQ ID NO: 2722287 - RNA, 19 nt, Artificial Sequence
  Description of Artificial Sequence: Synthetic oligonucleotide
gcggcgacuuuauuucuca

SEQ ID NO: 2722288 - RNA, 19 nt, Artificial Sequence
  Description of Artificial Sequence: Synthetic oligonucleotide
ggcgcggaacuggaggcgg

SEQ ID NO: 2722289 - RNA, 19 nt, Artificial Sequence
  Description of Artificial Sequence: Synthetic oligonucleotide
cacuugcccuguaucuaca

SEQ ID NO: 2722290 - RNA, 19 nt, Artificial Sequence
  Description of Artificial Sequence: Synthetic oligonucleotide
cauugccaccugucuccug

SEQ ID NO: 2722291 - RNA, 19 nt, Artificial Sequence
  Description of Artificial Sequence: Synthetic oligonucleotide
gccauaggagggcugcaca

SEQ ID NO: 2722292 - RNA, 19 nt, Artificial Sequence
  Description of Artificial Sequence: Synthetic oligonucleotide
ccacgcaaacagacugggg

SEQ ID NO: 2722293 - RNA, 19 nt, Artificial Sequence
  Description of Artificial Sequence: Synthetic oligonucleotide
aaggaaccguugguacauu

SEQ ID NO: 2722294 - RNA, 19 nt, Artificial Sequence
  Description of Artificial Sequence: Synthetic oligonucleotide
cacagggaccucuggguua

SEQ ID NO: 2722295 - RNA, 19 nt, Artificial Sequence
  Description of Artificial Sequence: Synthetic oligonucleotide
ggaaucucgucgcggauau

SEQ ID NO: 2722296 - RNA, 19 nt, Artificial Sequence
  Description of Artificial Sequence: Synthetic oligonucleotide
gagagugccuggcgcggaa

SEQ ID NO: 2722297 - RNA, 19 nt, Artificial Sequence
  Description of Artificial Sequence: Synthetic oligonucleotide
gucuccugagggcuaacau

SEQ ID NO: 2722298 - RNA, 19 nt, Artificial Sequence
  Description of Artificial Sequence: Synthetic oligonucleotide
ggaggcggcgacuuuauuu

SEQ ID NO: 2722299 - RNA, 19 nt, Artificial Sequence
  Description of Artificial Sequence: Synthetic oligonucleotide
ggguuacccucacaggcaa

SEQ ID NO: 2722300 - RNA, 19 nt, Artificial Sequence
  Description of Artificial Sequence: Synthetic oligonucleotide
gaaucucgucgcggauaug

SEQ ID NO: 2722301 - RNA, 19 nt, Artificial Sequence
  Description of Artificial Sequence: Synthetic oligonucleotide
gagugccuggcgcggaacu

SEQ ID NO: 2722302 - RNA, 19 nt, Artificial Sequence
  Description of Artificial Sequence: Synthetic oligonucleotide
cggauaugggugaggucgg

SEQ ID NO: 2722303 - RNA, 19 nt, Artificial Sequence
  Description of Artificial Sequence: Synthetic oligonucleotide
caaagugcacagggaccuc

SEQ ID NO: 2722304 - RNA, 19 nt, Artificial Sequence
  Description of Artificial Sequence: Synthetic oligonucleotide
cccucacaggcaaugacaa

SEQ ID NO: 2722305 - RNA, 19 nt, Artificial Sequence
  Description of Artificial Sequence: Synthetic oligonucleotide
ggauaugggugaggucggc

SEQ ID NO: 2722306 - RNA, 19 nt, Artificial Sequence
  Description of Artificial Sequence: Synthetic oligonucleotide
uggaggcggcgacuuuauu

SEQ ID NO: 2722307 - RNA, 19 nt, Artificial Sequence
  Description of Artificial Sequence: Synthetic oligonucleotide
cuggccacgcaaacagacu

SEQ ID NO: 2722308 - RNA, 19 nt, Artificial Sequence
  Description of Artificial Sequence: Synthetic oligonucleotide
ggauuccgaauaguagaaa

SEQ ID NO: 2722309 - RNA, 19 nt, Artificial Sequence
  Description of Artificial Sequence: Synthetic oligonucleotide
ccucacaggcaaugacaac

SEQ ID NO: 2722310 - RNA, 19 nt, Artificial Sequence
  Description of Artificial Sequence: Synthetic oligonucleotide
ggugaggucggcguugccu

SEQ ID NO: 2722311 - RNA, 19 nt, Artificial Sequence
  Description of Artificial Sequence: Synthetic oligonucleotide
cauucuugcacuggauauu

SEQ ID NO: 2722312 - RNA, 19 nt, Artificial Sequence
  Description of Artificial Sequence: Synthetic oligonucleotide
ccauaggagggcugcacaa

SEQ ID NO: 2722313 - RNA, 19 nt, Artificial Sequence
  Description of Artificial Sequence: Synthetic oligonucleotide
ccucaugacaguucauccu

SEQ ID NO: 2722314 - RNA, 19 nt, Artificial Sequence
  Description of Artificial Sequence: Synthetic oligonucleotide
cgucucugcaucaucaagu

SEQ ID NO: 2722315 - RNA, 19 nt, Artificial Sequence
  Description of Artificial Sequence: Synthetic oligonucleotide
gagggcugcacaagcccua

SEQ ID NO: 2722316 - RNA, 19 nt, Artificial Sequence
  Description of Artificial Sequence: Synthetic oligonucleotide
agaugucuucguggaugaa

SEQ ID NO: 2722317 - RNA, 19 nt, Artificial Sequence
  Description of Artificial Sequence: Synthetic oligonucleotide
ugcuugcacuugcccugua

SEQ ID NO: 2722318 - RNA, 19 nt, Artificial Sequence
  Description of Artificial Sequence: Synthetic oligonucleotide
cacugacgagaagucaucu

SEQ ID NO: 2722319 - RNA, 19 nt, Artificial Sequence
  Description of Artificial Sequence: Synthetic oligonucleotide
agggcugcacaagcccuaa

SEQ ID NO: 2722320 - RNA, 19 nt, Artificial Sequence
  Description of Artificial Sequence: Synthetic oligonucleotide
ggccauaggagggcugcac

SEQ ID NO: 2722321 - RNA, 19 nt, Artificial Sequence
  Description of Artificial Sequence: Synthetic oligonucleotide
gacaacucgccuagugcuu

SEQ ID NO: 2722322 - RNA, 19 nt, Artificial Sequence
  Description of Artificial Sequence: Synthetic oligonucleotide
cccuaaccccagcaggguc

SEQ ID NO: 2722323 - RNA, 19 nt, Artificial Sequence
  Description of Artificial Sequence: Synthetic oligonucleotide
ggcggcgacuuuauuucuc

SEQ ID NO: 2722324 - RNA, 19 nt, Artificial Sequence
  Description of Artificial Sequence: Synthetic oligonucleotide
gggcuaacaugcugucgaa

SEQ ID NO: 2722325 - RNA, 19 nt, Artificial Sequence
  Description of Artificial Sequence: Synthetic oligonucleotide
caccugucuccugagggcu

SEQ ID NO: 2722326 - RNA, 19 nt, Artificial Sequence
  Description of Artificial Sequence: Synthetic oligonucleotide
gggaccucuggguuacccu

SEQ ID NO: 2722327 - RNA, 19 nt, Artificial Sequence
  Description of Artificial Sequence: Synthetic oligonucleotide
ccaggagcagaagcaagga

SEQ ID NO: 2722328 - RNA, 19 nt, Artificial Sequence
  Description of Artificial Sequence: Synthetic oligonucleotide
cugucuccugagggcuaac

SEQ ID NO: 2722329 - RNA, 19 nt, Artificial Sequence
  Description of Artificial Sequence: Synthetic oligonucleotide
cuucguggaugaagguguu

SEQ ID NO: 2722330 - RNA, 19 nt, Artificial Sequence
  Description of Artificial Sequence: Synthetic oligonucleotide
gcagagccaucgauacuga

SEQ ID NO: 2722331 - RNA, 19 nt, Artificial Sequence
  Description of Artificial Sequence: Synthetic oligonucleotide
ggagggcugcacaagcccu

SEQ ID NO: 2722332 - RNA, 19 nt, Artificial Sequence
  Description of Artificial Sequence: Synthetic oligonucleotide
ggcguugccuggccacgca

SEQ ID NO: 2722333 - RNA, 19 nt, Artificial Sequence
  Description of Artificial Sequence: Synthetic oligonucleotide
cggaacuggaggcggcgac

SEQ ID NO: 2722334 - RNA, 19 nt, Artificial Sequence
  Description of Artificial Sequence: Synthetic oligonucleotide
ggucggcguugccuggcca

SEQ ID NO: 2722335 - RNA, 19 nt, Artificial Sequence
  Description of Artificial Sequence: Synthetic oligonucleotide
ggaacuggaggcggcgacu

SEQ ID NO: 2722336 - RNA, 19 nt, Artificial Sequence
  Description of Artificial Sequence: Synthetic oligonucleotide
accugucuccugagggcua

SEQ ID NO: 2722337 - RNA, 19 nt, Artificial Sequence
  Description of Artificial Sequence: Synthetic oligonucleotide
gcuugcacuugcccuguau

SEQ ID NO: 2722338 - RNA, 19 nt, Artificial Sequence
  Description of Artificial Sequence: Synthetic oligonucleotide
gggcugcacaagcccuaac

SEQ ID NO: 2722339 - RNA, 19 nt, Artificial Sequence
  Description of Artificial Sequence: Synthetic oligonucleotide
gcagucugugaccuucauu

SEQ ID NO: 2722340 - RNA, 19 nt, Artificial Sequence
  Description of Artificial Sequence: Synthetic oligonucleotide
ccuagagcucccugucucu

SEQ ID NO: 2722341 - RNA, 19 nt, Artificial Sequence
  Description of Artificial Sequence: Synthetic oligonucleotide
cggcgacuuuauuucucac

SEQ ID NO: 2722342 - RNA, 19 nt, Artificial Sequence
  Description of Artificial Sequence: Synthetic oligonucleotide
cgaauguuccagaugucuu

SEQ ID NO: 2722343 - RNA, 19 nt, Artificial Sequence
  Description of Artificial Sequence: Synthetic oligonucleotide
gugcuugcacuugcccugu

SEQ ID NO: 2722344 - RNA, 19 nt, Artificial Sequence
  Description of Artificial Sequence: Synthetic oligonucleotide
gcacagggaccucuggguu

SEQ ID NO: 2722345 - RNA, 19 nt, Artificial Sequence
  Description of Artificial Sequence: Synthetic oligonucleotide
cgcggaacuggaggcggcg

SEQ ID NO: 2722346 - RNA, 19 nt, Artificial Sequence
  Description of Artificial Sequence: Synthetic oligonucleotide
cagggaccucuggguuacc

SEQ ID NO: 2722347 - RNA, 19 nt, Artificial Sequence
  Description of Artificial Sequence: Synthetic oligonucleotide
gcguugccuggccacgcaa

SEQ ID NO: 2722348 - RNA, 19 nt, Artificial Sequence
  Description of Artificial Sequence: Synthetic oligonucleotide
cgcggauaugggugagguc

SEQ ID NO: 2722349 - RNA, 19 nt, Artificial Sequence
  Description of Artificial Sequence: Synthetic oligonucleotide
gcggaacuggaggcggcga

SEQ ID NO: 2722350 - RNA, 19 nt, Artificial Sequence
  Description of Artificial Sequence: Synthetic oligonucleotide
cguugccuggccacgcaaa

SEQ ID NO: 2722351 - RNA, 19 nt, Artificial Sequence
  Description of Artificial Sequence: Synthetic oligonucleotide
gcgcggaacuggaggcggc

SEQ ID NO: 2722352 - RNA, 19 nt, Artificial Sequence
  Description of Artificial Sequence: Synthetic oligonucleotide
gggaaaccuagagcucccu

SEQ ID NO: 2722353 - RNA, 19 nt, Artificial Sequence
  Description of Artificial Sequence: Synthetic oligonucleotide
gccuggcgcggaacuggag

SEQ ID NO: 2722354 - RNA, 19 nt, Artificial Sequence
  Description of Artificial Sequence: Synthetic oligonucleotide
cacccucaugacaguucau

SEQ ID NO: 2722355 - RNA, 19 nt, Artificial Sequence
  Description of Artificial Sequence: Synthetic oligonucleotide
cgacuuuauuucucacccu

SEQ ID NO: 2722356 - RNA, 19 nt, Artificial Sequence
  Description of Artificial Sequence: Synthetic oligonucleotide
gccuggccacgcaaacaga

SEQ ID NO: 2722357 - RNA, 19 nt, Artificial Sequence
  Description of Artificial Sequence: Synthetic oligonucleotide
cgccuagugcuugcacuug

SEQ ID NO: 2722358 - RNA, 19 nt, Artificial Sequence
  Description of Artificial Sequence: Synthetic oligonucleotide
ccucugcagagccaucgau

SEQ ID NO: 2722359 - RNA, 19 nt, Artificial Sequence
  Description of Artificial Sequence: Synthetic oligonucleotide
cgauacugagagagugccu

SEQ ID NO: 2722360 - RNA, 19 nt, Artificial Sequence
  Description of Artificial Sequence: Synthetic oligonucleotide
ccucuggguuacccucaca

SEQ ID NO: 2722361 - RNA, 19 nt, Artificial Sequence
  Description of Artificial Sequence: Synthetic oligonucleotide
cgucgcggauaugggugag

SEQ ID NO: 2722362 - RNA, 19 nt, Artificial Sequence
  Description of Artificial Sequence: Synthetic oligonucleotide
cggaaucucgucgcggaua

SEQ ID NO: 2722363 - RNA, 19 nt, Artificial Sequence
  Description of Artificial Sequence: Synthetic oligonucleotide
gcccuaaccccagcagggu

SEQ ID NO: 2722364 - RNA, 19 nt, Artificial Sequence
  Description of Artificial Sequence: Synthetic oligonucleotide
gguuacccucacaggcaau

SEQ ID NO: 2722365 - RNA, 19 nt, Artificial Sequence
  Description of Artificial Sequence: Synthetic oligonucleotide
cggcguugccuggccacgc

SEQ ID NO: 2722366 - RNA, 19 nt, Artificial Sequence
  Description of Artificial Sequence: Synthetic oligonucleotide
agaucuucggguuagaucc

SEQ ID NO: 2722367 - RNA, 19 nt, Artificial Sequence
  Description of Artificial Sequence: Synthetic oligonucleotide
aaguuguauaucuaggcgc

SEQ ID NO: 2722368 - RNA, 19 nt, Artificial Sequence
  Description of Artificial Sequence: Synthetic oligonucleotide
gaaaucaugagcuuggagc

SEQ ID NO: 2722369 - RNA, 19 nt, Artificial Sequence
  Description of Artificial Sequence: Synthetic oligonucleotide
uucagaauaguucugaucu

SEQ ID NO: 2722370 - RNA, 19 nt, Artificial Sequence
  Description of Artificial Sequence: Synthetic oligonucleotide
uccacuugcgguaagaacg

SEQ ID NO: 2722371 - RNA, 19 nt, Artificial Sequence
  Description of Artificial Sequence: Synthetic oligonucleotide
gaagcaguaauuuauucag

SEQ ID NO: 2722372 - RNA, 19 nt, Artificial Sequence
  Description of Artificial Sequence: Synthetic oligonucleotide
ucaaguucagaaaucauga

SEQ ID NO: 2722373 - RNA, 19 nt, Artificial Sequence
  Description of Artificial Sequence: Synthetic oligonucleotide
aaaauggguacuguggucg

SEQ ID NO: 2722374 - RNA, 19 nt, Artificial Sequence
  Description of Artificial Sequence: Synthetic oligonucleotide
cucacauugaguuuucugg

SEQ ID NO: 2722375 - RNA, 19 nt, Artificial Sequence
  Description of Artificial Sequence: Synthetic oligonucleotide
ucagaaaucaugagcuugg

SEQ ID NO: 2722376 - RNA, 19 nt, Artificial Sequence
  Description of Artificial Sequence: Synthetic oligonucleotide
uuuauucaguucuucagag

SEQ ID NO: 2722377 - RNA, 19 nt, Artificial Sequence
  Description of Artificial Sequence: Synthetic oligonucleotide
uguuaauccuuccacacca

SEQ ID NO: 2722378 - RNA, 19 nt, Artificial Sequence
  Description of Artificial Sequence: Synthetic oligonucleotide
uuggaaaucaaguucagaa

SEQ ID NO: 2722379 - RNA, 19 nt, Artificial Sequence
  Description of Artificial Sequence: Synthetic oligonucleotide
uauucaguucuucagagaa

SEQ ID NO: 2722380 - RNA, 19 nt, Artificial Sequence
  Description of Artificial Sequence: Synthetic oligonucleotide
uuuguuuucauuuccucca

SEQ ID NO: 2722381 - RNA, 19 nt, Artificial Sequence
  Description of Artificial Sequence: Synthetic oligonucleotide
gauauguuaauccuuccac

SEQ ID NO: 2722382 - RNA, 19 nt, Artificial Sequence
  Description of Artificial Sequence: Synthetic oligonucleotide
ugaaccaaaugaagcaggg

SEQ ID NO: 2722383 - RNA, 19 nt, Artificial Sequence
  Description of Artificial Sequence: Synthetic oligonucleotide
aaaacagagucuuggaaau

SEQ ID NO: 2722384 - RNA, 19 nt, Artificial Sequence
  Description of Artificial Sequence: Synthetic oligonucleotide
guuuucauuuccuccaacg

SEQ ID NO: 2722385 - RNA, 19 nt, Artificial Sequence
  Description of Artificial Sequence: Synthetic oligonucleotide
ugcaaguuguauaucuagg

SEQ ID NO: 2722386 - RNA, 19 nt, Artificial Sequence
  Description of Artificial Sequence: Synthetic oligonucleotide
uuuucauuuccuccaacgc

SEQ ID NO: 2722387 - RNA, 19 nt, Artificial Sequence
  Description of Artificial Sequence: Synthetic oligonucleotide
aaccaaaugaagcagggua

SEQ ID NO: 2722388 - RNA, 19 nt, Artificial Sequence
  Description of Artificial Sequence: Synthetic oligonucleotide
acucauucagaauaguucu

SEQ ID NO: 2722389 - RNA, 19 nt, Artificial Sequence
  Description of Artificial Sequence: Synthetic oligonucleotide
ugcugguuuaaucuguugc

SEQ ID NO: 2722390 - RNA, 19 nt, Artificial Sequence
  Description of Artificial Sequence: Synthetic oligonucleotide
caaguuguauaucuaggcg

SEQ ID NO: 2722391 - RNA, 19 nt, Artificial Sequence
  Description of Artificial Sequence: Synthetic oligonucleotide
uauguuaauccuuccacac

SEQ ID NO: 2722392 - RNA, 19 nt, Artificial Sequence
  Description of Artificial Sequence: Synthetic oligonucleotide
uaugguaacugggaagucg

SEQ ID NO: 2722393 - RNA, 19 nt, Artificial Sequence
  Description of Artificial Sequence: Synthetic oligonucleotide
auuuauucaguucuucaga

SEQ ID NO: 2722394 - RNA, 19 nt, Artificial Sequence
  Description of Artificial Sequence: Synthetic oligonucleotide
auucagaauaguucugauc

SEQ ID NO: 2722395 - RNA, 19 nt, Artificial Sequence
  Description of Artificial Sequence: Synthetic oligonucleotide
aauaguucugaucuccuuu

SEQ ID NO: 2722396 - RNA, 19 nt, Artificial Sequence
  Description of Artificial Sequence: Synthetic oligonucleotide
aaauggguacuguggucgc

SEQ ID NO: 2722397 - RNA, 19 nt, Artificial Sequence
  Description of Artificial Sequence: Synthetic oligonucleotide
aguuguauaucuaggcgcc

SEQ ID NO: 2722398 - RNA, 19 nt, Artificial Sequence
  Description of Artificial Sequence: Synthetic oligonucleotide
ucugaggaacuccaccgcg

SEQ ID NO: 2722399 - RNA, 19 nt, Artificial Sequence
  Description of Artificial Sequence: Synthetic oligonucleotide
uuagauccgcgucugagga

SEQ ID NO: 2722400 - RNA, 19 nt, Artificial Sequence
  Description of Artificial Sequence: Synthetic oligonucleotide
uugcaaguuguauaucuag

SEQ ID NO: 2722401 - RNA, 19 nt, Artificial Sequence
  Description of Artificial Sequence: Synthetic oligonucleotide
caagacuaugguaacuggg

SEQ ID NO: 2722402 - RNA, 19 nt, Artificial Sequence
  Description of Artificial Sequence: Synthetic oligonucleotide
acauugaguuuucuggcgg

SEQ ID NO: 2722403 - RNA, 19 nt, Artificial Sequence
  Description of Artificial Sequence: Synthetic oligonucleotide
ucaagacuaugguaacugg

SEQ ID NO: 2722404 - RNA, 19 nt, Artificial Sequence
  Description of Artificial Sequence: Synthetic oligonucleotide
uggauagugucacugcuca

SEQ ID NO: 2722405 - RNA, 19 nt, Artificial Sequence
  Description of Artificial Sequence: Synthetic oligonucleotide
ugcugaaccaaaugaagca

SEQ ID NO: 2722406 - RNA, 19 nt, Artificial Sequence
  Description of Artificial Sequence: Synthetic oligonucleotide
agacaagucgagcagcauc

SEQ ID NO: 2722407 - RNA, 19 nt, Artificial Sequence
  Description of Artificial Sequence: Synthetic oligonucleotide
ugguuuaaucuguugccgg

SEQ ID NO: 2722408 - RNA, 19 nt, Artificial Sequence
  Description of Artificial Sequence: Synthetic oligonucleotide
uucagcuuuacagucacug

SEQ ID NO: 2722409 - RNA, 19 nt, Artificial Sequence
  Description of Artificial Sequence: Synthetic oligonucleotide
ucacauugaguuuucuggc

SEQ ID NO: 2722410 - RNA, 19 nt, Artificial Sequence
  Description of Artificial Sequence: Synthetic oligonucleotide
uucaagacuaugguaacug

SEQ ID NO: 2722411 - RNA, 19 nt, Artificial Sequence
  Description of Artificial Sequence: Synthetic oligonucleotide
aacuccaccgcgauccucc

SEQ ID NO: 2722412 - RNA, 19 nt, Artificial Sequence
  Description of Artificial Sequence: Synthetic oligonucleotide
aacagagucuuggaaauca

SEQ ID NO: 2722413 - RNA, 19 nt, Artificial Sequence
  Description of Artificial Sequence: Synthetic oligonucleotide
gaugcuucggacuacucuc

SEQ ID NO: 2722414 - RNA, 19 nt, Artificial Sequence
  Description of Artificial Sequence: Synthetic oligonucleotide
ucagugaggagauauguua

SEQ ID NO: 2722415 - RNA, 19 nt, Artificial Sequence
  Description of Artificial Sequence: Synthetic oligonucleotide
ugccaacucauucagaaua

SEQ ID NO: 2722416 - RNA, 19 nt, Artificial Sequence
  Description of Artificial Sequence: Synthetic oligonucleotide
gacuaugguaacugggaag

SEQ ID NO: 2722417 - RNA, 19 nt, Artificial Sequence
  Description of Artificial Sequence: Synthetic oligonucleotide
auauguuaauccuuccaca

SEQ ID NO: 2722418 - RNA, 19 nt, Artificial Sequence
  Description of Artificial Sequence: Synthetic oligonucleotide
uucagaaaucaugagcuug

SEQ ID NO: 2722419 - RNA, 19 nt, Artificial Sequence
  Description of Artificial Sequence: Synthetic oligonucleotide
uaucuaggcgccauucaag

SEQ ID NO: 2722420 - RNA, 19 nt, Artificial Sequence
  Description of Artificial Sequence: Synthetic oligonucleotide
cugaaccaaaugaagcagg

SEQ ID NO: 2722421 - RNA, 19 nt, Artificial Sequence
  Description of Artificial Sequence: Synthetic oligonucleotide
agauauguuaauccuucca

SEQ ID NO: 2722422 - RNA, 19 nt, Artificial Sequence
  Description of Artificial Sequence: Synthetic oligonucleotide
cugcugaaccaaaugaagc

SEQ ID NO: 2722423 - RNA, 19 nt, Artificial Sequence
  Description of Artificial Sequence: Synthetic oligonucleotide
uccucagacaagucgagca

SEQ ID NO: 2722424 - RNA, 19 nt, Artificial Sequence
  Description of Artificial Sequence: Synthetic oligonucleotide
guuagauccgcgucugagg

SEQ ID NO: 2722425 - RNA, 19 nt, Artificial Sequence
  Description of Artificial Sequence: Synthetic oligonucleotide
uuuaaucuguugccggaga

SEQ ID NO: 2722426 - RNA, 19 nt, Artificial Sequence
  Description of Artificial Sequence: Synthetic oligonucleotide
aagacuaugguaacuggga

SEQ ID NO: 2722427 - RNA, 19 nt, Artificial Sequence
  Description of Artificial Sequence: Synthetic oligonucleotide
uauaucuaggcgccauuca

SEQ ID NO: 2722428 - RNA, 19 nt, Artificial Sequence
  Description of Artificial Sequence: Synthetic oligonucleotide
ucugcuugcaaguuguaua

SEQ ID NO: 2722429 - RNA, 19 nt, Artificial Sequence
  Description of Artificial Sequence: Synthetic oligonucleotide
ugaugcuucggacuacucu

SEQ ID NO: 2722430 - RNA, 19 nt, Artificial Sequence
  Description of Artificial Sequence: Synthetic oligonucleotide
uggaaaucaaguucagaaa

SEQ ID NO: 2722431 - RNA, 19 nt, Artificial Sequence
  Description of Artificial Sequence: Synthetic oligonucleotide
acuaugguaacugggaagu

SEQ ID NO: 2722432 - RNA, 19 nt, Artificial Sequence
  Description of Artificial Sequence: Synthetic oligonucleotide
uucaguucuucagagaauc

SEQ ID NO: 2722433 - RNA, 19 nt, Artificial Sequence
  Description of Artificial Sequence: Synthetic oligonucleotide
uuaaucuguugccggagac

SEQ ID NO: 2722434 - RNA, 19 nt, Artificial Sequence
  Description of Artificial Sequence: Synthetic oligonucleotide
ugucacugcucacauugag

SEQ ID NO: 2722435 - RNA, 19 nt, Artificial Sequence
  Description of Artificial Sequence: Synthetic oligonucleotide
cacauugaguuuucuggcg

SEQ ID NO: 2722436 - RNA, 19 nt, Artificial Sequence
  Description of Artificial Sequence: Synthetic oligonucleotide
ugcuccucagacaagucga

SEQ ID NO: 2722437 - RNA, 19 nt, Artificial Sequence
  Description of Artificial Sequence: Synthetic oligonucleotide
augcuccucagacaagucg

SEQ ID NO: 2722438 - RNA, 19 nt, Artificial Sequence
  Description of Artificial Sequence: Synthetic oligonucleotide
agaaaucaugagcuuggag

SEQ ID NO: 2722439 - RNA, 19 nt, Artificial Sequence
  Description of Artificial Sequence: Synthetic oligonucleotide
cuugcgguaagaacgccag

SEQ ID NO: 2722440 - RNA, 19 nt, Artificial Sequence
  Description of Artificial Sequence: Synthetic oligonucleotide
uuaauccuuccacaccaug

SEQ ID NO: 2722441 - RNA, 19 nt, Artificial Sequence
  Description of Artificial Sequence: Synthetic oligonucleotide
cuucggacuacucuccugc

SEQ ID NO: 2722442 - RNA, 19 nt, Artificial Sequence
  Description of Artificial Sequence: Synthetic oligonucleotide
cuccuuaugcuccucagac

SEQ ID NO: 2722443 - RNA, 19 nt, Artificial Sequence
  Description of Artificial Sequence: Synthetic oligonucleotide
agcaguaauuuauucaguu

SEQ ID NO: 2722444 - RNA, 19 nt, Artificial Sequence
  Description of Artificial Sequence: Synthetic oligonucleotide
aagucgaggugccaacuca

SEQ ID NO: 2722445 - RNA, 19 nt, Artificial Sequence
  Description of Artificial Sequence: Synthetic oligonucleotide
ucagacaagucgagcagca

SEQ ID NO: 2722446 - RNA, 19 nt, Artificial Sequence
  Description of Artificial Sequence: Synthetic oligonucleotide
ugcgauguccacuugcggu

SEQ ID NO: 2722447 - RNA, 19 nt, Artificial Sequence
  Description of Artificial Sequence: Synthetic oligonucleotide
gauccucccgaacucggcg

SEQ ID NO: 2722448 - RNA, 19 nt, Artificial Sequence
  Description of Artificial Sequence: Synthetic oligonucleotide
uaaagcugaagcaguaauu

SEQ ID NO: 2722449 - RNA, 19 nt, Artificial Sequence
  Description of Artificial Sequence: Synthetic oligonucleotide
ucuggcggcgccuucguag

SEQ ID NO: 2722450 - RNA, 19 nt, Artificial Sequence
  Description of Artificial Sequence: Synthetic oligonucleotide
cagaauaguucugaucucc

SEQ ID NO: 2722451 - RNA, 19 nt, Artificial Sequence
  Description of Artificial Sequence: Synthetic oligonucleotide
uuauucaguucuucagaga

SEQ ID NO: 2722452 - RNA, 19 nt, Artificial Sequence
  Description of Artificial Sequence: Synthetic oligonucleotide
ucgccauucuuguugaggu

SEQ ID NO: 2722453 - RNA, 19 nt, Artificial Sequence
  Description of Artificial Sequence: Synthetic oligonucleotide
ugaguuuucuggcggcgcc

SEQ ID NO: 2722454 - RNA, 19 nt, Artificial Sequence
  Description of Artificial Sequence: Synthetic oligonucleotide
uuaugcuccucagacaagu

SEQ ID NO: 2722455 - RNA, 19 nt, Artificial Sequence
  Description of Artificial Sequence: Synthetic oligonucleotide
aauggguacuguggucgcc

SEQ ID NO: 2722456 - RNA, 19 nt, Artificial Sequence
  Description of Artificial Sequence: Synthetic oligonucleotide
agagucuuggaaaucaagu

SEQ ID NO: 2722457 - RNA, 19 nt, Artificial Sequence
  Description of Artificial Sequence: Synthetic oligonucleotide
gauagugucacugcucaca

SEQ ID NO: 2722458 - RNA, 19 nt, Artificial Sequence
  Description of Artificial Sequence: Synthetic oligonucleotide
agauccgcgucugaggaac

SEQ ID NO: 2722459 - RNA, 19 nt, Artificial Sequence
  Description of Artificial Sequence: Synthetic oligonucleotide
gcaaguuguauaucuaggc

SEQ ID NO: 2722460 - RNA, 19 nt, Artificial Sequence
  Description of Artificial Sequence: Synthetic oligonucleotide
gagauauguuaauccuucc

SEQ ID NO: 2722461 - RNA, 19 nt, Artificial Sequence
  Description of Artificial Sequence: Synthetic oligonucleotide
uagaucuucggguuagauc

SEQ ID NO: 2722462 - RNA, 19 nt, Artificial Sequence
  Description of Artificial Sequence: Synthetic oligonucleotide
aaacagagucuuggaaauc

SEQ ID NO: 2722463 - RNA, 19 nt, Artificial Sequence
  Description of Artificial Sequence: Synthetic oligonucleotide
uacuugaugcuucggacua

SEQ ID NO: 2722464 - RNA, 19 nt, Artificial Sequence
  Description of Artificial Sequence: Synthetic oligonucleotide
gagguucagcuuuacaguc

SEQ ID NO: 2722465 - RNA, 19 nt, Artificial Sequence
  Description of Artificial Sequence: Synthetic oligonucleotide
cugguuuaaucuguugccg

SEQ ID NO: 2722466 - RNA, 19 nt, Artificial Sequence
  Description of Artificial Sequence: Synthetic oligonucleotide
ggagacuucugcuugcaag

SEQ ID NO: 2722467 - RNA, 19 nt, Artificial Sequence
  Description of Artificial Sequence: Synthetic oligonucleotide
accaaaugaagcaggguag

SEQ ID NO: 2722468 - RNA, 19 nt, Artificial Sequence
  Description of Artificial Sequence: Synthetic oligonucleotide
auaucuaggcgccauucaa

SEQ ID NO: 2722469 - RNA, 19 nt, Artificial Sequence
  Description of Artificial Sequence: Synthetic oligonucleotide
caacgcuugcuccagcugc

SEQ ID NO: 2722470 - RNA, 19 nt, Artificial Sequence
  Description of Artificial Sequence: Synthetic oligonucleotide
cauucaagacuaugguaac

SEQ ID NO: 2722471 - RNA, 19 nt, Artificial Sequence
  Description of Artificial Sequence: Synthetic oligonucleotide
aucuaggcgccauucaaga

SEQ ID NO: 2722472 - RNA, 19 nt, Artificial Sequence
  Description of Artificial Sequence: Synthetic oligonucleotide
acuacucuccugcaguggu

SEQ ID NO: 2722473 - RNA, 19 nt, Artificial Sequence
  Description of Artificial Sequence: Synthetic oligonucleotide
caguaauuuauucaguucu

SEQ ID NO: 2722474 - RNA, 19 nt, Artificial Sequence
  Description of Artificial Sequence: Synthetic oligonucleotide
uuuucuggcggcgccuucg

SEQ ID NO: 2722475 - RNA, 19 nt, Artificial Sequence
  Description of Artificial Sequence: Synthetic oligonucleotide
aaucuguugccggagacuu

SEQ ID NO: 2722476 - RNA, 19 nt, Artificial Sequence
  Description of Artificial Sequence: Synthetic oligonucleotide
cauugaguuuucuggcggc

SEQ ID NO: 2722477 - RNA, 19 nt, Artificial Sequence
  Description of Artificial Sequence: Synthetic oligonucleotide
guggucgccauucuuguug

SEQ ID NO: 2722478 - RNA, 19 nt, Artificial Sequence
  Description of Artificial Sequence: Synthetic oligonucleotide
ucggcgaccacugcgaugu

SEQ ID NO: 2722479 - RNA, 19 nt, Artificial Sequence
  Description of Artificial Sequence: Synthetic oligonucleotide
aaucaugagcuuggagcuc

SEQ ID NO: 2722480 - RNA, 19 nt, Artificial Sequence
  Description of Artificial Sequence: Synthetic oligonucleotide
agcuacuugaugcuucgga

SEQ ID NO: 2722481 - RNA, 19 nt, Artificial Sequence
  Description of Artificial Sequence: Synthetic oligonucleotide
ucuguugccggagacuucu

SEQ ID NO: 2722482 - RNA, 19 nt, Artificial Sequence
  Description of Artificial Sequence: Synthetic oligonucleotide
ucuucggguuagauccgcg

SEQ ID NO: 2722483 - RNA, 19 nt, Artificial Sequence
  Description of Artificial Sequence: Synthetic oligonucleotide
cuucagagaaucccagaac

SEQ ID NO: 2722484 - RNA, 19 nt, Artificial Sequence
  Description of Artificial Sequence: Synthetic oligonucleotide
ugcgguaagaacgccaggu

SEQ ID NO: 2722485 - RNA, 19 nt, Artificial Sequence
  Description of Artificial Sequence: Synthetic oligonucleotide
cugaagcaguaauuuauuc

SEQ ID NO: 2722486 - RNA, 19 nt, Artificial Sequence
  Description of Artificial Sequence: Synthetic oligonucleotide
ucggguuagauccgcgucu

SEQ ID NO: 2722487 - RNA, 19 nt, Artificial Sequence
  Description of Artificial Sequence: Synthetic oligonucleotide
uguugccggagacuucugc

SEQ ID NO: 2722488 - RNA, 19 nt, Artificial Sequence
  Description of Artificial Sequence: Synthetic oligonucleotide
aagaacgccaggugcuccu

SEQ ID NO: 2722489 - RNA, 19 nt, Artificial Sequence
  Description of Artificial Sequence: Synthetic oligonucleotide
uuucuguuguccagguaaa

SEQ ID NO: 2722490 - RNA, 19 nt, Artificial Sequence
  Description of Artificial Sequence: Synthetic oligonucleotide
auugaguuuucuggcggcg

SEQ ID NO: 2722491 - RNA, 19 nt, Artificial Sequence
  Description of Artificial Sequence: Synthetic oligonucleotide
gcugguuuaaucuguugcc

SEQ ID NO: 2722492 - RNA, 19 nt, Artificial Sequence
  Description of Artificial Sequence: Synthetic oligonucleotide
uguuuucauuuccuccaac

SEQ ID NO: 2722493 - RNA, 19 nt, Artificial Sequence
  Description of Artificial Sequence: Synthetic oligonucleotide
ugcuggauagugucacugc

SEQ ID NO: 2722494 - RNA, 19 nt, Artificial Sequence
  Description of Artificial Sequence: Synthetic oligonucleotide
guaacugggaagucgaggu

SEQ ID NO: 2722495 - RNA, 19 nt, Artificial Sequence
  Description of Artificial Sequence: Synthetic oligonucleotide
ucgaggugccaacucauuc

SEQ ID NO: 2722496 - RNA, 19 nt, Artificial Sequence
  Description of Artificial Sequence: Synthetic oligonucleotide
gaggagauauguuaauccu

SEQ ID NO: 2722497 - RNA, 19 nt, Artificial Sequence
  Description of Artificial Sequence: Synthetic oligonucleotide
accgcgauccucccgaacu

SEQ ID NO: 2722498 - RNA, 19 nt, Artificial Sequence
  Description of Artificial Sequence: Synthetic oligonucleotide
uucuucagagaaucccaga

SEQ ID NO: 2722499 - RNA, 19 nt, Artificial Sequence
  Description of Artificial Sequence: Synthetic oligonucleotide
ucggacuacucuccugcag

SEQ ID NO: 2722500 - RNA, 19 nt, Artificial Sequence
  Description of Artificial Sequence: Synthetic oligonucleotide
uaacugggaagucgaggug

SEQ ID NO: 2722501 - RNA, 19 nt, Artificial Sequence
  Description of Artificial Sequence: Synthetic oligonucleotide
cucauucagaauaguucug

SEQ ID NO: 2722502 - RNA, 19 nt, Artificial Sequence
  Description of Artificial Sequence: Synthetic oligonucleotide
guuuaaucuguugccggag

SEQ ID NO: 2722503 - RNA, 19 nt, Artificial Sequence
  Description of Artificial Sequence: Synthetic oligonucleotide
cacaccaugcuggauagug

SEQ ID NO: 2722504 - RNA, 19 nt, Artificial Sequence
  Description of Artificial Sequence: Synthetic oligonucleotide
ucguagaucuucggguuag

SEQ ID NO: 2722505 - RNA, 19 nt, Artificial Sequence
  Description of Artificial Sequence: Synthetic oligonucleotide
uucggguuagauccgcguc

SEQ ID NO: 2722506 - RNA, 19 nt, Artificial Sequence
  Description of Artificial Sequence: Synthetic oligonucleotide
ucagaauaguucugaucuc

SEQ ID NO: 2722507 - RNA, 19 nt, Artificial Sequence
  Description of Artificial Sequence: Synthetic oligonucleotide
uuggagcucucagugagga

SEQ ID NO: 2722508 - RNA, 19 nt, Artificial Sequence
  Description of Artificial Sequence: Synthetic oligonucleotide
ugccggagacuucugcuug

SEQ ID NO: 2722509 - RNA, 19 nt, Artificial Sequence
  Description of Artificial Sequence: Synthetic oligonucleotide
uuguuuucauuuccuccaa

SEQ ID NO: 2722510 - RNA, 19 nt, Artificial Sequence
  Description of Artificial Sequence: Synthetic oligonucleotide
agacuaugguaacugggaa

SEQ ID NO: 2722511 - RNA, 19 nt, Artificial Sequence
  Description of Artificial Sequence: Synthetic oligonucleotide
uccuuaugcuccucagaca

SEQ ID NO: 2722512 - RNA, 19 nt, Artificial Sequence
  Description of Artificial Sequence: Synthetic oligonucleotide
agugaggagauauguuaau

SEQ ID NO: 2722513 - RNA, 19 nt, Artificial Sequence
  Description of Artificial Sequence: Synthetic oligonucleotide
gucgccauucuuguugagg

SEQ ID NO: 2722514 - RNA, 19 nt, Artificial Sequence
  Description of Artificial Sequence: Synthetic oligonucleotide
ugcuccuuaugcuccucag

SEQ ID NO: 2722515 - RNA, 19 nt, Artificial Sequence
  Description of Artificial Sequence: Synthetic oligonucleotide
cuuggagcucucagugagg

SEQ ID NO: 2722516 - RNA, 19 nt, Artificial Sequence
  Description of Artificial Sequence: Synthetic oligonucleotide
gguaacugggaagucgagg

SEQ ID NO: 2722517 - RNA, 19 nt, Artificial Sequence
  Description of Artificial Sequence: Synthetic oligonucleotide
uccuccaacgcuugcucca

SEQ ID NO: 2722518 - RNA, 19 nt, Artificial Sequence
  Description of Artificial Sequence: Synthetic oligonucleotide
ccauucaagacuaugguaa

SEQ ID NO: 2722519 - RNA, 19 nt, Artificial Sequence
  Description of Artificial Sequence: Synthetic oligonucleotide
acugcucacauugaguuuu

SEQ ID NO: 2722520 - RNA, 19 nt, Artificial Sequence
  Description of Artificial Sequence: Synthetic oligonucleotide
uaggcgccauucaagacua

SEQ ID NO: 2722521 - RNA, 19 nt, Artificial Sequence
  Description of Artificial Sequence: Synthetic oligonucleotide
gaagcaggguagcuggguc

SEQ ID NO: 2722522 - RNA, 19 nt, Artificial Sequence
  Description of Artificial Sequence: Synthetic oligonucleotide
gcuuuacagucacugcugg

SEQ ID NO: 2722523 - RNA, 19 nt, Artificial Sequence
  Description of Artificial Sequence: Synthetic oligonucleotide
ggagauauguuaauccuuc

SEQ ID NO: 2722524 - RNA, 19 nt, Artificial Sequence
  Description of Artificial Sequence: Synthetic oligonucleotide
aucuucggguuagauccgc

SEQ ID NO: 2722525 - RNA, 19 nt, Artificial Sequence
  Description of Artificial Sequence: Synthetic oligonucleotide
uccaacgcuugcuccagcu

SEQ ID NO: 2722526 - RNA, 19 nt, Artificial Sequence
  Description of Artificial Sequence: Synthetic oligonucleotide
uaguucugaucuccuuucu

SEQ ID NO: 2722527 - RNA, 19 nt, Artificial Sequence
  Description of Artificial Sequence: Synthetic oligonucleotide
cucagacaagucgagcagc

SEQ ID NO: 2722528 - RNA, 19 nt, Artificial Sequence
  Description of Artificial Sequence: Synthetic oligonucleotide
ggugccaacucauucagaa

SEQ ID NO: 2722529 - RNA, 19 nt, Artificial Sequence
  Description of Artificial Sequence: Synthetic oligonucleotide
ugguaacugggaagucgag

SEQ ID NO: 2722530 - RNA, 19 nt, Artificial Sequence
  Description of Artificial Sequence: Synthetic oligonucleotide
gaagucgaggugccaacuc

SEQ ID NO: 2722531 - RNA, 19 nt, Artificial Sequence
  Description of Artificial Sequence: Synthetic oligonucleotide
cacugcgauguccacuugc

SEQ ID NO: 2722532 - RNA, 19 nt, Artificial Sequence
  Description of Artificial Sequence: Synthetic oligonucleotide
aagcaguaauuuauucagu

SEQ ID NO: 2722533 - RNA, 19 nt, Artificial Sequence
  Description of Artificial Sequence: Synthetic oligonucleotide
ucuaggcgccauucaagac

SEQ ID NO: 2722534 - RNA, 19 nt, Artificial Sequence
  Description of Artificial Sequence: Synthetic oligonucleotide
uugcgguaagaacgccagg

SEQ ID NO: 2722535 - RNA, 19 nt, Artificial Sequence
  Description of Artificial Sequence: Synthetic oligonucleotide
cuuaugcuccucagacaag

SEQ ID NO: 2722536 - RNA, 19 nt, Artificial Sequence
  Description of Artificial Sequence: Synthetic oligonucleotide
cuggauagugucacugcuc

SEQ ID NO: 2722537 - RNA, 19 nt, Artificial Sequence
  Description of Artificial Sequence: Synthetic oligonucleotide
accacugcgauguccacuu

SEQ ID NO: 2722538 - RNA, 19 nt, Artificial Sequence
  Description of Artificial Sequence: Synthetic oligonucleotide
gcuacuugaugcuucggac

SEQ ID NO: 2722539 - RNA, 19 nt, Artificial Sequence
  Description of Artificial Sequence: Synthetic oligonucleotide
gacuacucuccugcagugg

SEQ ID NO: 2722540 - RNA, 19 nt, Artificial Sequence
  Description of Artificial Sequence: Synthetic oligonucleotide
uccugcagugguuuguuuu

SEQ ID NO: 2722541 - RNA, 19 nt, Artificial Sequence
  Description of Artificial Sequence: Synthetic oligonucleotide
auucaagacuaugguaacu

SEQ ID NO: 2722542 - RNA, 19 nt, Artificial Sequence
  Description of Artificial Sequence: Synthetic oligonucleotide
agcuuuacagucacugcug

SEQ ID NO: 2722543 - RNA, 19 nt, Artificial Sequence
  Description of Artificial Sequence: Synthetic oligonucleotide
uuccuccaacgcuugcucc

SEQ ID NO: 2722544 - RNA, 19 nt, Artificial Sequence
  Description of Artificial Sequence: Synthetic oligonucleotide
uugaguuuucuggcggcgc

SEQ ID NO: 2722545 - RNA, 19 nt, Artificial Sequence
  Description of Artificial Sequence: Synthetic oligonucleotide
augcuucggacuacucucc

SEQ ID NO: 2722546 - RNA, 19 nt, Artificial Sequence
  Description of Artificial Sequence: Synthetic oligonucleotide
aacgccaggugcuccuuau

SEQ ID NO: 2722547 - RNA, 19 nt, Artificial Sequence
  Description of Artificial Sequence: Synthetic oligonucleotide
uaagaacgccaggugcucc

SEQ ID NO: 2722548 - RNA, 19 nt, Artificial Sequence
  Description of Artificial Sequence: Synthetic oligonucleotide
augguaacugggaagucga

SEQ ID NO: 2722549 - RNA, 19 nt, Artificial Sequence
  Description of Artificial Sequence: Synthetic oligonucleotide
uucguagaucuucggguua

SEQ ID NO: 2722550 - RNA, 19 nt, Artificial Sequence
  Description of Artificial Sequence: Synthetic oligonucleotide
gcaguaauuuauucaguuc

SEQ ID NO: 2722551 - RNA, 19 nt, Artificial Sequence
  Description of Artificial Sequence: Synthetic oligonucleotide
guauaucuaggcgccauuc

SEQ ID NO: 2722552 - RNA, 19 nt, Artificial Sequence
  Description of Artificial Sequence: Synthetic oligonucleotide
uggucgccauucuuguuga

SEQ ID NO: 2722553 - RNA, 19 nt, Artificial Sequence
  Description of Artificial Sequence: Synthetic oligonucleotide
augcuggauagugucacug

SEQ ID NO: 2722554 - RNA, 19 nt, Artificial Sequence
  Description of Artificial Sequence: Synthetic oligonucleotide
uaugcuccucagacaaguc

SEQ ID NO: 2722555 - RNA, 19 nt, Artificial Sequence
  Description of Artificial Sequence: Synthetic oligonucleotide
gcugaaccaaaugaagcag

SEQ ID NO: 2722556 - RNA, 19 nt, Artificial Sequence
  Description of Artificial Sequence: Synthetic oligonucleotide
agaauaguucugaucuccu

SEQ ID NO: 2722557 - RNA, 19 nt, Artificial Sequence
  Description of Artificial Sequence: Synthetic oligonucleotide
gcugcugaaccaaaugaag

SEQ ID NO: 2722558 - RNA, 19 nt, Artificial Sequence
  Description of Artificial Sequence: Synthetic oligonucleotide
gccuucguagaucuucggg

SEQ ID NO: 2722559 - RNA, 19 nt, Artificial Sequence
  Description of Artificial Sequence: Synthetic oligonucleotide
gucugaggaacuccaccgc

SEQ ID NO: 2722560 - RNA, 19 nt, Artificial Sequence
  Description of Artificial Sequence: Synthetic oligonucleotide
guaaagcugaagcaguaau

SEQ ID NO: 2722561 - RNA, 19 nt, Artificial Sequence
  Description of Artificial Sequence: Synthetic oligonucleotide
uuguauaucuaggcgccau

SEQ ID NO: 2722562 - RNA, 19 nt, Artificial Sequence
  Description of Artificial Sequence: Synthetic oligonucleotide
gaucuucggguuagauccg

SEQ ID NO: 2722563 - RNA, 19 nt, Artificial Sequence
  Description of Artificial Sequence: Synthetic oligonucleotide
gugaggagauauguuaauc

SEQ ID NO: 2722564 - RNA, 19 nt, Artificial Sequence
  Description of Artificial Sequence: Synthetic oligonucleotide
aacucggcgaccacugcga

SEQ ID NO: 2722565 - RNA, 19 nt, Artificial Sequence
  Description of Artificial Sequence: Synthetic oligonucleotide
acuugaugcuucggacuac

SEQ ID NO: 2722566 - RNA, 19 nt, Artificial Sequence
  Description of Artificial Sequence: Synthetic oligonucleotide
gguuagauccgcgucugag

SEQ ID NO: 2722567 - RNA, 19 nt, Artificial Sequence
  Description of Artificial Sequence: Synthetic oligonucleotide
gguacuguggucgccauuc

SEQ ID NO: 2722568 - RNA, 19 nt, Artificial Sequence
  Description of Artificial Sequence: Synthetic oligonucleotide
ugaagcaggguagcugggu

SEQ ID NO: 2722569 - RNA, 19 nt, Artificial Sequence
  Description of Artificial Sequence: Synthetic oligonucleotide
gguuuaaucuguugccgga

SEQ ID NO: 2722570 - RNA, 19 nt, Artificial Sequence
  Description of Artificial Sequence: Synthetic oligonucleotide
gcucacauugaguuuucug

SEQ ID NO: 2722571 - RNA, 19 nt, Artificial Sequence
  Description of Artificial Sequence: Synthetic oligonucleotide
uucugcuugcaaguuguau

SEQ ID NO: 2722572 - RNA, 19 nt, Artificial Sequence
  Description of Artificial Sequence: Synthetic oligonucleotide
gauguccacuugcgguaag

SEQ ID NO: 2722573 - RNA, 19 nt, Artificial Sequence
  Description of Artificial Sequence: Synthetic oligonucleotide
cgucugaggaacuccaccg

SEQ ID NO: 2722574 - RNA, 19 nt, Artificial Sequence
  Description of Artificial Sequence: Synthetic oligonucleotide
acuccaccgcgauccuccc

SEQ ID NO: 2722575 - RNA, 19 nt, Artificial Sequence
  Description of Artificial Sequence: Synthetic oligonucleotide
cagugaggagauauguuaa

SEQ ID NO: 2722576 - RNA, 19 nt, Artificial Sequence
  Description of Artificial Sequence: Synthetic oligonucleotide
ggagcucucagugaggaga

SEQ ID NO: 2722577 - RNA, 19 nt, Artificial Sequence
  Description of Artificial Sequence: Synthetic oligonucleotide
ugggaagucgaggugccaa

SEQ ID NO: 2722578 - RNA, 19 nt, Artificial Sequence
  Description of Artificial Sequence: Synthetic oligonucleotide
cuaggcgccauucaagacu

SEQ ID NO: 2722579 - RNA, 19 nt, Artificial Sequence
  Description of Artificial Sequence: Synthetic oligonucleotide
uucggacuacucuccugca

SEQ ID NO: 2722580 - RNA, 19 nt, Artificial Sequence
  Description of Artificial Sequence: Synthetic oligonucleotide
agcugggucugucugcaaa

SEQ ID NO: 2722581 - RNA, 19 nt, Artificial Sequence
  Description of Artificial Sequence: Synthetic oligonucleotide
uccgcgucugaggaacucc

SEQ ID NO: 2722582 - RNA, 19 nt, Artificial Sequence
  Description of Artificial Sequence: Synthetic oligonucleotide
cugcgauguccacuugcgg

SEQ ID NO: 2722583 - RNA, 19 nt, Artificial Sequence
  Description of Artificial Sequence: Synthetic oligonucleotide
uuguugagguucagcuuua

SEQ ID NO: 2722584 - RNA, 19 nt, Artificial Sequence
  Description of Artificial Sequence: Synthetic oligonucleotide
gguagcugggucugucugc

SEQ ID NO: 2722585 - RNA, 19 nt, Artificial Sequence
  Description of Artificial Sequence: Synthetic oligonucleotide
acuugcgguaagaacgcca

SEQ ID NO: 2722586 - RNA, 19 nt, Artificial Sequence
  Description of Artificial Sequence: Synthetic oligonucleotide
uggagcucucagugaggag

SEQ ID NO: 2722587 - RNA, 19 nt, Artificial Sequence
  Description of Artificial Sequence: Synthetic oligonucleotide
agcugcugaaccaaaugaa

SEQ ID NO: 2722588 - RNA, 19 nt, Artificial Sequence
  Description of Artificial Sequence: Synthetic oligonucleotide
aacgcuugcuccagcugcu

SEQ ID NO: 2722589 - RNA, 19 nt, Artificial Sequence
  Description of Artificial Sequence: Synthetic oligonucleotide
aggagauauguuaauccuu

SEQ ID NO: 2722590 - RNA, 19 nt, Artificial Sequence
  Description of Artificial Sequence: Synthetic oligonucleotide
ugcagugguuuguuuucau

SEQ ID NO: 2722591 - RNA, 19 nt, Artificial Sequence
  Description of Artificial Sequence: Synthetic oligonucleotide
uugaugcuucggacuacuc

SEQ ID NO: 2722592 - RNA, 19 nt, Artificial Sequence
  Description of Artificial Sequence: Synthetic oligonucleotide
cuacuugaugcuucggacu

SEQ ID NO: 2722593 - RNA, 19 nt, Artificial Sequence
  Description of Artificial Sequence: Synthetic oligonucleotide
cugcugguuuaaucuguug

SEQ ID NO: 2722594 - RNA, 19 nt, Artificial Sequence
  Description of Artificial Sequence: Synthetic oligonucleotide
ccuuaugcuccucagacaa

SEQ ID NO: 2722595 - RNA, 19 nt, Artificial Sequence
  Description of Artificial Sequence: Synthetic oligonucleotide
auccucccgaacucggcga

SEQ ID NO: 2722596 - RNA, 19 nt, Artificial Sequence
  Description of Artificial Sequence: Synthetic oligonucleotide
uugccggagacuucugcuu

SEQ ID NO: 2722597 - RNA, 19 nt, Artificial Sequence
  Description of Artificial Sequence: Synthetic oligonucleotide
auggguacuguggucgcca

SEQ ID NO: 2722598 - RNA, 19 nt, Artificial Sequence
  Description of Artificial Sequence: Synthetic oligonucleotide
gccaacucauucagaauag

SEQ ID NO: 2722599 - RNA, 19 nt, Artificial Sequence
  Description of Artificial Sequence: Synthetic oligonucleotide
uccucccgaacucggcgac

SEQ ID NO: 2722600 - RNA, 19 nt, Artificial Sequence
  Description of Artificial Sequence: Synthetic oligonucleotide
aggguagcugggucugucu

SEQ ID NO: 2722601 - RNA, 19 nt, Artificial Sequence
  Description of Artificial Sequence: Synthetic oligonucleotide
cugaggaacuccaccgcga

SEQ ID NO: 2722602 - RNA, 19 nt, Artificial Sequence
  Description of Artificial Sequence: Synthetic oligonucleotide
ccaaaugaagcaggguagc

SEQ ID NO: 2722603 - RNA, 19 nt, Artificial Sequence
  Description of Artificial Sequence: Synthetic oligonucleotide
ccacuugcgguaagaacgc

SEQ ID NO: 2722604 - RNA, 19 nt, Artificial Sequence
  Description of Artificial Sequence: Synthetic oligonucleotide
ggacuacucuccugcagug

SEQ ID NO: 2722605 - RNA, 19 nt, Artificial Sequence
  Description of Artificial Sequence: Synthetic oligonucleotide
agcaggguagcugggucug

SEQ ID NO: 2722606 - RNA, 19 nt, Artificial Sequence
  Description of Artificial Sequence: Synthetic oligonucleotide
uacucuccugcagugguuu

SEQ ID NO: 2722607 - RNA, 19 nt, Artificial Sequence
  Description of Artificial Sequence: Synthetic oligonucleotide
uguugagguucagcuuuac

SEQ ID NO: 2722608 - RNA, 19 nt, Artificial Sequence
  Description of Artificial Sequence: Synthetic oligonucleotide
guugccggagacuucugcu

SEQ ID NO: 2722609 - RNA, 19 nt, Artificial Sequence
  Description of Artificial Sequence: Synthetic oligonucleotide
guaagaacgccaggugcuc

SEQ ID NO: 2722610 - RNA, 19 nt, Artificial Sequence
  Description of Artificial Sequence: Synthetic oligonucleotide
gcgucugaggaacuccacc

SEQ ID NO: 2722611 - RNA, 19 nt, Artificial Sequence
  Description of Artificial Sequence: Synthetic oligonucleotide
agguucagcuuuacaguca

SEQ ID NO: 2722612 - RNA, 19 nt, Artificial Sequence
  Description of Artificial Sequence: Synthetic oligonucleotide
ccucagacaagucgagcag

SEQ ID NO: 2722613 - RNA, 19 nt, Artificial Sequence
  Description of Artificial Sequence: Synthetic oligonucleotide
auucaguucuucagagaau

SEQ ID NO: 2722614 - RNA, 19 nt, Artificial Sequence
  Description of Artificial Sequence: Synthetic oligonucleotide
acucuccugcagugguuug

SEQ ID NO: 2722615 - RNA, 19 nt, Artificial Sequence
  Description of Artificial Sequence: Synthetic oligonucleotide
gaauaguucugaucuccuu

SEQ ID NO: 2722616 - RNA, 19 nt, Artificial Sequence
  Description of Artificial Sequence: Synthetic oligonucleotide
gccauucuuguugagguuc

SEQ ID NO: 2722617 - RNA, 19 nt, Artificial Sequence
  Description of Artificial Sequence: Synthetic oligonucleotide
uagauccgcgucugaggaa

SEQ ID NO: 2722618 - RNA, 19 nt, Artificial Sequence
  Description of Artificial Sequence: Synthetic oligonucleotide
cgguaagaacgccaggugc

SEQ ID NO: 2722619 - RNA, 19 nt, Artificial Sequence
  Description of Artificial Sequence: Synthetic oligonucleotide
ccugcagugguuuguuuuc

SEQ ID NO: 2722620 - RNA, 19 nt, Artificial Sequence
  Description of Artificial Sequence: Synthetic oligonucleotide
cugcuugcaaguuguauau

SEQ ID NO: 2722621 - RNA, 19 nt, Artificial Sequence
  Description of Artificial Sequence: Synthetic oligonucleotide
ggguagcugggucugucug

SEQ ID NO: 2722622 - RNA, 19 nt, Artificial Sequence
  Description of Artificial Sequence: Synthetic oligonucleotide
gcgguaagaacgccaggug

SEQ ID NO: 2722623 - RNA, 19 nt, Artificial Sequence
  Description of Artificial Sequence: Synthetic oligonucleotide
acagucacugcugguuuaa

SEQ ID NO: 2722624 - RNA, 19 nt, Artificial Sequence
  Description of Artificial Sequence: Synthetic oligonucleotide
gaggaacuccaccgcgauc

SEQ ID NO: 2722625 - RNA, 19 nt, Artificial Sequence
  Description of Artificial Sequence: Synthetic oligonucleotide
cuaugguaacugggaaguc

SEQ ID NO: 2722626 - RNA, 19 nt, Artificial Sequence
  Description of Artificial Sequence: Synthetic oligonucleotide
ugcuugcaaguuguauauc

SEQ ID NO: 2722627 - RNA, 19 nt, Artificial Sequence
  Description of Artificial Sequence: Synthetic oligonucleotide
ugcucacauugaguuuucu

SEQ ID NO: 2722628 - RNA, 19 nt, Artificial Sequence
  Description of Artificial Sequence: Synthetic oligonucleotide
gguaagaacgccaggugcu

SEQ ID NO: 2722629 - RNA, 19 nt, Artificial Sequence
  Description of Artificial Sequence: Synthetic oligonucleotide
accaugcuggauaguguca

SEQ ID NO: 2722630 - RNA, 19 nt, Artificial Sequence
  Description of Artificial Sequence: Synthetic oligonucleotide
gccauucaagacuauggua

SEQ ID NO: 2722631 - RNA, 19 nt, Artificial Sequence
  Description of Artificial Sequence: Synthetic oligonucleotide
auccgcgucugaggaacuc

SEQ ID NO: 2722632 - RNA, 19 nt, Artificial Sequence
  Description of Artificial Sequence: Synthetic oligonucleotide
guuguauaucuaggcgcca

SEQ ID NO: 2722633 - RNA, 19 nt, Artificial Sequence
  Description of Artificial Sequence: Synthetic oligonucleotide
agguaaagcugaagcagua

SEQ ID NO: 2722634 - RNA, 19 nt, Artificial Sequence
  Description of Artificial Sequence: Synthetic oligonucleotide
uguggucgccauucuuguu

SEQ ID NO: 2722635 - RNA, 19 nt, Artificial Sequence
  Description of Artificial Sequence: Synthetic oligonucleotide
cauucagaauaguucugau

SEQ ID NO: 2722636 - RNA, 19 nt, Artificial Sequence
  Description of Artificial Sequence: Synthetic oligonucleotide
cucggcgaccacugcgaug

SEQ ID NO: 2722637 - RNA, 19 nt, Artificial Sequence
  Description of Artificial Sequence: Synthetic oligonucleotide
acagagucuuggaaaucaa

SEQ ID NO: 2722638 - RNA, 19 nt, Artificial Sequence
  Description of Artificial Sequence: Synthetic oligonucleotide
agucgaggugccaacucau

SEQ ID NO: 2722639 - RNA, 19 nt, Artificial Sequence
  Description of Artificial Sequence: Synthetic oligonucleotide
aucuguugccggagacuuc

SEQ ID NO: 2722640 - RNA, 19 nt, Artificial Sequence
  Description of Artificial Sequence: Synthetic oligonucleotide
cuucguagaucuucggguu

SEQ ID NO: 2722641 - RNA, 19 nt, Artificial Sequence
  Description of Artificial Sequence: Synthetic oligonucleotide
ggcgccauucaagacuaug

SEQ ID NO: 2722642 - RNA, 19 nt, Artificial Sequence
  Description of Artificial Sequence: Synthetic oligonucleotide
acgccaggugcuccuuaug

SEQ ID NO: 2722643 - RNA, 19 nt, Artificial Sequence
  Description of Artificial Sequence: Synthetic oligonucleotide
gggaagucgaggugccaac

SEQ ID NO: 2722644 - RNA, 19 nt, Artificial Sequence
  Description of Artificial Sequence: Synthetic oligonucleotide
gcuucggacuacucuccug

SEQ ID NO: 2722645 - RNA, 19 nt, Artificial Sequence
  Description of Artificial Sequence: Synthetic oligonucleotide
ggcgccuucguagaucuuc

SEQ ID NO: 2722646 - RNA, 19 nt, Artificial Sequence
  Description of Artificial Sequence: Synthetic oligonucleotide
acugcugguuuaaucuguu

SEQ ID NO: 2722647 - RNA, 19 nt, Artificial Sequence
  Description of Artificial Sequence: Synthetic oligonucleotide
ccgaacucggcgaccacug

SEQ ID NO: 2722648 - RNA, 19 nt, Artificial Sequence
  Description of Artificial Sequence: Synthetic oligonucleotide
gguaaagcugaagcaguaa

SEQ ID NO: 2722649 - RNA, 19 nt, Artificial Sequence
  Description of Artificial Sequence: Synthetic oligonucleotide
cacuugcgguaagaacgcc

SEQ ID NO: 2722650 - RNA, 19 nt, Artificial Sequence
  Description of Artificial Sequence: Synthetic oligonucleotide
gucacugcucacauugagu

SEQ ID NO: 2722651 - RNA, 19 nt, Artificial Sequence
  Description of Artificial Sequence: Synthetic oligonucleotide
agacuucugcuugcaaguu

SEQ ID NO: 2722652 - RNA, 19 nt, Artificial Sequence
  Description of Artificial Sequence: Synthetic oligonucleotide
uggguacuguggucgccau

SEQ ID NO: 2722653 - RNA, 19 nt, Artificial Sequence
  Description of Artificial Sequence: Synthetic oligonucleotide
cuuuacagucacugcuggu

SEQ ID NO: 2722654 - RNA, 19 nt, Artificial Sequence
  Description of Artificial Sequence: Synthetic oligonucleotide
cuccaccgcgauccucccg

SEQ ID NO: 2722655 - RNA, 19 nt, Artificial Sequence
  Description of Artificial Sequence: Synthetic oligonucleotide
gcgccuucguagaucuucg

SEQ ID NO: 2722656 - RNA, 19 nt, Artificial Sequence
  Description of Artificial Sequence: Synthetic oligonucleotide
cagaaaucaugagcuugga

SEQ ID NO: 2722657 - RNA, 19 nt, Artificial Sequence
  Description of Artificial Sequence: Synthetic oligonucleotide
guucagaaaucaugagcuu

SEQ ID NO: 2722658 - RNA, 19 nt, Artificial Sequence
  Description of Artificial Sequence: Synthetic oligonucleotide
uagugucacugcucacauu

SEQ ID NO: 2722659 - RNA, 19 nt, Artificial Sequence
  Description of Artificial Sequence: Synthetic oligonucleotide
ggauagugucacugcucac

SEQ ID NO: 2722660 - RNA, 19 nt, Artificial Sequence
  Description of Artificial Sequence: Synthetic oligonucleotide
cuucggguuagauccgcgu

SEQ ID NO: 2722661 - RNA, 19 nt, Artificial Sequence
  Description of Artificial Sequence: Synthetic oligonucleotide
cuggcggcgccuucguaga

SEQ ID NO: 2722662 - RNA, 19 nt, Artificial Sequence
  Description of Artificial Sequence: Synthetic oligonucleotide
aguuuucuggcggcgccuu

SEQ ID NO: 2722663 - RNA, 19 nt, Artificial Sequence
  Description of Artificial Sequence: Synthetic oligonucleotide
gcuccuuaugcuccucaga

SEQ ID NO: 2722664 - RNA, 19 nt, Artificial Sequence
  Description of Artificial Sequence: Synthetic oligonucleotide
guuuucuggcggcgccuuc

SEQ ID NO: 2722665 - RNA, 19 nt, Artificial Sequence
  Description of Artificial Sequence: Synthetic oligonucleotide
gaacuccaccgcgauccuc

SEQ ID NO: 2722666 - RNA, 19 nt, Artificial Sequence
  Description of Artificial Sequence: Synthetic oligonucleotide
cuguugccggagacuucug

SEQ ID NO: 2722667 - RNA, 19 nt, Artificial Sequence
  Description of Artificial Sequence: Synthetic oligonucleotide
acucggcgaccacugcgau

SEQ ID NO: 2722668 - RNA, 19 nt, Artificial Sequence
  Description of Artificial Sequence: Synthetic oligonucleotide
gcgauguccacuugcggua

SEQ ID NO: 2722669 - RNA, 19 nt, Artificial Sequence
  Description of Artificial Sequence: Synthetic oligonucleotide
caggguagcugggucuguc

SEQ ID NO: 2722670 - RNA, 19 nt, Artificial Sequence
  Description of Artificial Sequence: Synthetic oligonucleotide
gccggagacuucugcuugc

SEQ ID NO: 2722671 - RNA, 19 nt, Artificial Sequence
  Description of Artificial Sequence: Synthetic oligonucleotide
cgaggugccaacucauuca

SEQ ID NO: 2722672 - RNA, 19 nt, Artificial Sequence
  Description of Artificial Sequence: Synthetic oligonucleotide
gcuccucagacaagucgag

SEQ ID NO: 2722673 - RNA, 19 nt, Artificial Sequence
  Description of Artificial Sequence: Synthetic oligonucleotide
cugcagugguuuguuuuca

SEQ ID NO: 2722674 - RNA, 19 nt, Artificial Sequence
  Description of Artificial Sequence: Synthetic oligonucleotide
gcgauccucccgaacucgg

SEQ ID NO: 2722675 - RNA, 19 nt, Artificial Sequence
  Description of Artificial Sequence: Synthetic oligonucleotide
cucccgaacucggcgacca

SEQ ID NO: 2722676 - RNA, 19 nt, Artificial Sequence
  Description of Artificial Sequence: Synthetic oligonucleotide
ucccgaacucggcgaccac

SEQ ID NO: 2722677 - RNA, 19 nt, Artificial Sequence
  Description of Artificial Sequence: Synthetic oligonucleotide
ggcgaccacugcgaugucc

SEQ ID NO: 2722678 - RNA, 19 nt, Artificial Sequence
  Description of Artificial Sequence: Synthetic oligonucleotide
gaacgccaggugcuccuua

SEQ ID NO: 2722679 - RNA, 19 nt, Artificial Sequence
  Description of Artificial Sequence: Synthetic oligonucleotide
guagaucuucggguuagau

SEQ ID NO: 2722680 - RNA, 19 nt, Artificial Sequence
  Description of Artificial Sequence: Synthetic oligonucleotide
gugucacugcucacauuga

SEQ ID NO: 2722681 - RNA, 19 nt, Artificial Sequence
  Description of Artificial Sequence: Synthetic oligonucleotide
ccaacgcuugcuccagcug

SEQ ID NO: 2722682 - RNA, 19 nt, Artificial Sequence
  Description of Artificial Sequence: Synthetic oligonucleotide
caugagcuuggagcucuca

SEQ ID NO: 2722683 - RNA, 19 nt, Artificial Sequence
  Description of Artificial Sequence: Synthetic oligonucleotide
gaguuuucuggcggcgccu

SEQ ID NO: 2722684 - RNA, 19 nt, Artificial Sequence
  Description of Artificial Sequence: Synthetic oligonucleotide
caugcuggauagugucacu

SEQ ID NO: 2722685 - RNA, 19 nt, Artificial Sequence
  Description of Artificial Sequence: Synthetic oligonucleotide
acaagucgagcagcaucuu

SEQ ID NO: 2722686 - RNA, 19 nt, Artificial Sequence
  Description of Artificial Sequence: Synthetic oligonucleotide
gugccaacucauucagaau

SEQ ID NO: 2722687 - RNA, 19 nt, Artificial Sequence
  Description of Artificial Sequence: Synthetic oligonucleotide
gagcucucagugaggagau

SEQ ID NO: 2722688 - RNA, 19 nt, Artificial Sequence
  Description of Artificial Sequence: Synthetic oligonucleotide
ggucgccauucuuguugag

SEQ ID NO: 2722689 - RNA, 19 nt, Artificial Sequence
  Description of Artificial Sequence: Synthetic oligonucleotide
caccgcgauccucccgaac

SEQ ID NO: 2722690 - RNA, 19 nt, Artificial Sequence
  Description of Artificial Sequence: Synthetic oligonucleotide
aggugccaacucauucaga

SEQ ID NO: 2722691 - RNA, 19 nt, Artificial Sequence
  Description of Artificial Sequence: Synthetic oligonucleotide
uagcugggucugucugcaa

SEQ ID NO: 2722692 - RNA, 19 nt, Artificial Sequence
  Description of Artificial Sequence: Synthetic oligonucleotide
cuucugcuugcaaguugua

SEQ ID NO: 2722693 - RNA, 19 nt, Artificial Sequence
  Description of Artificial Sequence: Synthetic oligonucleotide
acgcuugcuccagcugcug

SEQ ID NO: 2722694 - RNA, 19 nt, Artificial Sequence
  Description of Artificial Sequence: Synthetic oligonucleotide
gcucucagugaggagauau

SEQ ID NO: 2722695 - RNA, 19 nt, Artificial Sequence
  Description of Artificial Sequence: Synthetic oligonucleotide
guuaauccuuccacaccau

SEQ ID NO: 2722696 - RNA, 19 nt, Artificial Sequence
  Description of Artificial Sequence: Synthetic oligonucleotide
guacuguggucgccauucu

SEQ ID NO: 2722697 - RNA, 19 nt, Artificial Sequence
  Description of Artificial Sequence: Synthetic oligonucleotide
uggcggcgccuucguagau

SEQ ID NO: 2722698 - RNA, 19 nt, Artificial Sequence
  Description of Artificial Sequence: Synthetic oligonucleotide
agaacgccaggugcuccuu

SEQ ID NO: 2722699 - RNA, 19 nt, Artificial Sequence
  Description of Artificial Sequence: Synthetic oligonucleotide
ccuccaacgcuugcuccag

SEQ ID NO: 2722700 - RNA, 19 nt, Artificial Sequence
  Description of Artificial Sequence: Synthetic oligonucleotide
gccaggugcuccuuaugcu

SEQ ID NO: 2722701 - RNA, 19 nt, Artificial Sequence
  Description of Artificial Sequence: Synthetic oligonucleotide
ggaagucgaggugccaacu

SEQ ID NO: 2722702 - RNA, 19 nt, Artificial Sequence
  Description of Artificial Sequence: Synthetic oligonucleotide
gcggcgccuucguagaucu

SEQ ID NO: 2722703 - RNA, 19 nt, Artificial Sequence
  Description of Artificial Sequence: Synthetic oligonucleotide
cgcgauccucccgaacucg

SEQ ID NO: 2722704 - RNA, 19 nt, Artificial Sequence
  Description of Artificial Sequence: Synthetic oligonucleotide
cacugcucacauugaguuu

SEQ ID NO: 2722705 - RNA, 19 nt, Artificial Sequence
  Description of Artificial Sequence: Synthetic oligonucleotide
ggguuagauccgcgucuga

SEQ ID NO: 2722706 - RNA, 19 nt, Artificial Sequence
  Description of Artificial Sequence: Synthetic oligonucleotide
ccgcgucugaggaacucca

SEQ ID NO: 2722707 - RNA, 19 nt, Artificial Sequence
  Description of Artificial Sequence: Synthetic oligonucleotide
cgaacucggcgaccacugc

SEQ ID NO: 2722708 - RNA, 19 nt, Artificial Sequence
  Description of Artificial Sequence: Synthetic oligonucleotide
cuacucuccugcagugguu

SEQ ID NO: 2722709 - RNA, 19 nt, Artificial Sequence
  Description of Artificial Sequence: Synthetic oligonucleotide
gauccgcgucugaggaacu

SEQ ID NO: 2722710 - RNA, 19 nt, Artificial Sequence
  Description of Artificial Sequence: Synthetic oligonucleotide
ggcggcgccuucguagauc

SEQ ID NO: 2722711 - RNA, 19 nt, Artificial Sequence
  Description of Artificial Sequence: Synthetic oligonucleotide
agcucucagugaggagaua

SEQ ID NO: 2722712 - RNA, 19 nt, Artificial Sequence
  Description of Artificial Sequence: Synthetic oligonucleotide
cggguuagauccgcgucug

SEQ ID NO: 2722713 - RNA, 19 nt, Artificial Sequence
  Description of Artificial Sequence: Synthetic oligonucleotide
cgcgucugaggaacuccac

SEQ ID NO: 2722714 - RNA, 19 nt, Artificial Sequence
  Description of Artificial Sequence: Synthetic oligonucleotide
cgccauucaagacuauggu

SEQ ID NO: 2722715 - RNA, 19 nt, Artificial Sequence
  Description of Artificial Sequence: Synthetic oligonucleotide
ccucccgaacucggcgacc

SEQ ID NO: 2722716 - RNA, 19 nt, Artificial Sequence
  Description of Artificial Sequence: Synthetic oligonucleotide
ccaacucauucagaauagu

SEQ ID NO: 2722717 - RNA, 19 nt, Artificial Sequence
  Description of Artificial Sequence: Synthetic oligonucleotide
cagacaagucgagcagcau

SEQ ID NO: 2722718 - RNA, 19 nt, Artificial Sequence
  Description of Artificial Sequence: Synthetic oligonucleotide
ccacugcgauguccacuug

SEQ ID NO: 2722719 - RNA, 19 nt, Artificial Sequence
  Description of Artificial Sequence: Synthetic oligonucleotide
cuccugcagugguuuguuu

SEQ ID NO: 2722720 - RNA, 19 nt, Artificial Sequence
  Description of Artificial Sequence: Synthetic oligonucleotide
cgaccacugcgauguccac

SEQ ID NO: 2722721 - RNA, 19 nt, Artificial Sequence
  Description of Artificial Sequence: Synthetic oligonucleotide
cuuccacaccaugcuggau

SEQ ID NO: 2722722 - RNA, 19 nt, Artificial Sequence
  Description of Artificial Sequence: Synthetic oligonucleotide
ccggagacuucugcuugca

SEQ ID NO: 2722723 - RNA, 19 nt, Artificial Sequence
  Description of Artificial Sequence: Synthetic oligonucleotide
cagucacugcugguuuaau

SEQ ID NO: 2722724 - RNA, 19 nt, Artificial Sequence
  Description of Artificial Sequence: Synthetic oligonucleotide
aggcgccauucaagacuau

SEQ ID NO: 2722725 - RNA, 19 nt, Artificial Sequence
  Description of Artificial Sequence: Synthetic oligonucleotide
cguagaucuucggguuaga

SEQ ID NO: 2722726 - RNA, 19 nt, Artificial Sequence
  Description of Artificial Sequence: Synthetic oligonucleotide
cccgaacucggcgaccacu

SEQ ID NO: 2722727 - RNA, 19 nt, Artificial Sequence
  Description of Artificial Sequence: Synthetic oligonucleotide
ggguacuguggucgccauu

SEQ ID NO: 2722728 - RNA, 19 nt, Artificial Sequence
  Description of Artificial Sequence: Synthetic oligonucleotide
cgauguccacuugcgguaa

SEQ ID NO: 2722729 - RNA, 19 nt, Artificial Sequence
  Description of Artificial Sequence: Synthetic oligonucleotide
ccaccgcgauccucccgaa

SEQ ID NO: 2722730 - RNA, 19 nt, Artificial Sequence
  Description of Artificial Sequence: Synthetic oligonucleotide
ccacaccaugcuggauagu

SEQ ID NO: 2722731 - RNA, 19 nt, Artificial Sequence
  Description of Artificial Sequence: Synthetic oligonucleotide
cggcgaccacugcgauguc

SEQ ID NO: 2722732 - RNA, 19 nt, Artificial Sequence
  Description of Artificial Sequence: Synthetic oligonucleotide
cggcgccuucguagaucuu

SEQ ID NO: 2722733 - RNA, 19 nt, Artificial Sequence
  Description of Artificial Sequence: Synthetic oligonucleotide
aacguguacacacaugccc

SEQ ID NO: 2722734 - RNA, 19 nt, Artificial Sequence
  Description of Artificial Sequence: Synthetic oligonucleotide
uuuauuaacguguacacac

SEQ ID NO: 2722735 - RNA, 19 nt, Artificial Sequence
  Description of Artificial Sequence: Synthetic oligonucleotide
accacguggacuuugaugc

SEQ ID NO: 2722736 - RNA, 19 nt, Artificial Sequence
  Description of Artificial Sequence: Synthetic oligonucleotide
uuaacguguacacacaugc

SEQ ID NO: 2722737 - RNA, 19 nt, Artificial Sequence
  Description of Artificial Sequence: Synthetic oligonucleotide
aaucggaagcuuuggauac

SEQ ID NO: 2722738 - RNA, 19 nt, Artificial Sequence
  Description of Artificial Sequence: Synthetic oligonucleotide
gacaaggcuacgcagaugc

SEQ ID NO: 2722739 - RNA, 19 nt, Artificial Sequence
  Description of Artificial Sequence: Synthetic oligonucleotide
uuugaugccagcaaauguc

SEQ ID NO: 2722740 - RNA, 19 nt, Artificial Sequence
  Description of Artificial Sequence: Synthetic oligonucleotide
aucugcauguuuccaaugc

SEQ ID NO: 2722741 - RNA, 19 nt, Artificial Sequence
  Description of Artificial Sequence: Synthetic oligonucleotide
aguuuuauuaacguguaca

SEQ ID NO: 2722742 - RNA, 19 nt, Artificial Sequence
  Description of Artificial Sequence: Synthetic oligonucleotide
acuaguuuuauuaacgugu

SEQ ID NO: 2722743 - RNA, 19 nt, Artificial Sequence
  Description of Artificial Sequence: Synthetic oligonucleotide
guguggaugaucuugcucc

SEQ ID NO: 2722744 - RNA, 19 nt, Artificial Sequence
  Description of Artificial Sequence: Synthetic oligonucleotide
ucuuggauggugaacugcc

SEQ ID NO: 2722745 - RNA, 19 nt, Artificial Sequence
  Description of Artificial Sequence: Synthetic oligonucleotide
aaaucggaagcuuuggaua

SEQ ID NO: 2722746 - RNA, 19 nt, Artificial Sequence
  Description of Artificial Sequence: Synthetic oligonucleotide
uuuugccuuucuuggaugg

SEQ ID NO: 2722747 - RNA, 19 nt, Artificial Sequence
  Description of Artificial Sequence: Synthetic oligonucleotide
uuugguuguucucucgaag

SEQ ID NO: 2722748 - RNA, 19 nt, Artificial Sequence
  Description of Artificial Sequence: Synthetic oligonucleotide
guugcuccgaacuagcgag

SEQ ID NO: 2722749 - RNA, 19 nt, Artificial Sequence
  Description of Artificial Sequence: Synthetic oligonucleotide
cacaaagugugccucaugc

SEQ ID NO: 2722750 - RNA, 19 nt, Artificial Sequence
  Description of Artificial Sequence: Synthetic oligonucleotide
guacuuguccaccacgugg

SEQ ID NO: 2722751 - RNA, 19 nt, Artificial Sequence
  Description of Artificial Sequence: Synthetic oligonucleotide
aggauggugaucugggagg

SEQ ID NO: 2722752 - RNA, 19 nt, Artificial Sequence
  Description of Artificial Sequence: Synthetic oligonucleotide
aagggacgggccuauuugg

SEQ ID NO: 2722753 - RNA, 19 nt, Artificial Sequence
  Description of Artificial Sequence: Synthetic oligonucleotide
uuggcaagcaucugcaugu

SEQ ID NO: 2722754 - RNA, 19 nt, Artificial Sequence
  Description of Artificial Sequence: Synthetic oligonucleotide
caguacaugcccuucuugg

SEQ ID NO: 2722755 - RNA, 19 nt, Artificial Sequence
  Description of Artificial Sequence: Synthetic oligonucleotide
uuauuaacguguacacaca

SEQ ID NO: 2722756 - RNA, 19 nt, Artificial Sequence
  Description of Artificial Sequence: Synthetic oligonucleotide
ugguucuggcaacagaggc

SEQ ID NO: 2722757 - RNA, 19 nt, Artificial Sequence
  Description of Artificial Sequence: Synthetic oligonucleotide
uauuugguuguucucucga

SEQ ID NO: 2722758 - RNA, 19 nt, Artificial Sequence
  Description of Artificial Sequence: Synthetic oligonucleotide
uuggaaaucggaagcuuug

SEQ ID NO: 2722759 - RNA, 19 nt, Artificial Sequence
  Description of Artificial Sequence: Synthetic oligonucleotide
uugguacuuguccaccacg

SEQ ID NO: 2722760 - RNA, 19 nt, Artificial Sequence
  Description of Artificial Sequence: Synthetic oligonucleotide
gaugccagcaaaugucuug

SEQ ID NO: 2722761 - RNA, 19 nt, Artificial Sequence
  Description of Artificial Sequence: Synthetic oligonucleotide
aaccggaacucacagggca

SEQ ID NO: 2722762 - RNA, 19 nt, Artificial Sequence
  Description of Artificial Sequence: Synthetic oligonucleotide
ucacuaguuuuauuaacgu

SEQ ID NO: 2722763 - RNA, 19 nt, Artificial Sequence
  Description of Artificial Sequence: Synthetic oligonucleotide
caaagugugccucaugcug

SEQ ID NO: 2722764 - RNA, 19 nt, Artificial Sequence
  Description of Artificial Sequence: Synthetic oligonucleotide
uuuuauuaacguguacaca

SEQ ID NO: 2722765 - RNA, 19 nt, Artificial Sequence
  Description of Artificial Sequence: Synthetic oligonucleotide
aaugucuuggcaggcauga

SEQ ID NO: 2722766 - RNA, 19 nt, Artificial Sequence
  Description of Artificial Sequence: Synthetic oligonucleotide
cucaugcugguucuggugg

SEQ ID NO: 2722767 - RNA, 19 nt, Artificial Sequence
  Description of Artificial Sequence: Synthetic oligonucleotide
uuccccuugguacuugucc

SEQ ID NO: 2722768 - RNA, 19 nt, Artificial Sequence
  Description of Artificial Sequence: Synthetic oligonucleotide
aaggguguggaugaucuug

SEQ ID NO: 2722769 - RNA, 19 nt, Artificial Sequence
  Description of Artificial Sequence: Synthetic oligonucleotide
aacagaggcgaagggacgg

SEQ ID NO: 2722770 - RNA, 19 nt, Artificial Sequence
  Description of Artificial Sequence: Synthetic oligonucleotide
uauuaacguguacacacau

SEQ ID NO: 2722771 - RNA, 19 nt, Artificial Sequence
  Description of Artificial Sequence: Synthetic oligonucleotide
uacuuguccaccacgugga

SEQ ID NO: 2722772 - RNA, 19 nt, Artificial Sequence
  Description of Artificial Sequence: Synthetic oligonucleotide
aguuugcgcaagcagaaga

SEQ ID NO: 2722773 - RNA, 19 nt, Artificial Sequence
  Description of Artificial Sequence: Synthetic oligonucleotide
ucugcauguuuccaaugca

SEQ ID NO: 2722774 - RNA, 19 nt, Artificial Sequence
  Description of Artificial Sequence: Synthetic oligonucleotide
caugaguuugcgcaagcag

SEQ ID NO: 2722775 - RNA, 19 nt, Artificial Sequence
  Description of Artificial Sequence: Synthetic oligonucleotide
ugaguuugcgcaagcagaa

SEQ ID NO: 2722776 - RNA, 19 nt, Artificial Sequence
  Description of Artificial Sequence: Synthetic oligonucleotide
uugaugccagcaaaugucu

SEQ ID NO: 2722777 - RNA, 19 nt, Artificial Sequence
  Description of Artificial Sequence: Synthetic oligonucleotide
gaagggacgggccuauuug

SEQ ID NO: 2722778 - RNA, 19 nt, Artificial Sequence
  Description of Artificial Sequence: Synthetic oligonucleotide
uuccaaugcaguacaugcc

SEQ ID NO: 2722779 - RNA, 19 nt, Artificial Sequence
  Description of Artificial Sequence: Synthetic oligonucleotide
ggaagcuuuggauaccagg

SEQ ID NO: 2722780 - RNA, 19 nt, Artificial Sequence
  Description of Artificial Sequence: Synthetic oligonucleotide
ugucuuggcaggcaugagu

SEQ ID NO: 2722781 - RNA, 19 nt, Artificial Sequence
  Description of Artificial Sequence: Synthetic oligonucleotide
ucucgaaggguguggauga

SEQ ID NO: 2722782 - RNA, 19 nt, Artificial Sequence
  Description of Artificial Sequence: Synthetic oligonucleotide
cuauuugguuguucucucg

SEQ ID NO: 2722783 - RNA, 19 nt, Artificial Sequence
  Description of Artificial Sequence: Synthetic oligonucleotide
ccaaccggaacucacaggg

SEQ ID NO: 2722784 - RNA, 19 nt, Artificial Sequence
  Description of Artificial Sequence: Synthetic oligonucleotide
cacuaguuuuauuaacgug

SEQ ID NO: 2722785 - RNA, 19 nt, Artificial Sequence
  Description of Artificial Sequence: Synthetic oligonucleotide
uuggggaucuggaggaagc

SEQ ID NO: 2722786 - RNA, 19 nt, Artificial Sequence
  Description of Artificial Sequence: Synthetic oligonucleotide
uuuuaucagucacuaguuu

SEQ ID NO: 2722787 - RNA, 19 nt, Artificial Sequence
  Description of Artificial Sequence: Synthetic oligonucleotide
cugcauguuuccaaugcag

SEQ ID NO: 2722788 - RNA, 19 nt, Artificial Sequence
  Description of Artificial Sequence: Synthetic oligonucleotide
agcuccaccacaaagugug

SEQ ID NO: 2722789 - RNA, 19 nt, Artificial Sequence
  Description of Artificial Sequence: Synthetic oligonucleotide
cauguuuccaaugcaguac

SEQ ID NO: 2722790 - RNA, 19 nt, Artificial Sequence
  Description of Artificial Sequence: Synthetic oligonucleotide
uaacguguacacacaugcc

SEQ ID NO: 2722791 - RNA, 19 nt, Artificial Sequence
  Description of Artificial Sequence: Synthetic oligonucleotide
uggaaaucggaagcuuugg

SEQ ID NO: 2722792 - RNA, 19 nt, Artificial Sequence
  Description of Artificial Sequence: Synthetic oligonucleotide
aggaaguacuggcacagcu

SEQ ID NO: 2722793 - RNA, 19 nt, Artificial Sequence
  Description of Artificial Sequence: Synthetic oligonucleotide
aguacuggcacagcuccac

SEQ ID NO: 2722794 - RNA, 19 nt, Artificial Sequence
  Description of Artificial Sequence: Synthetic oligonucleotide
caagcaucugcauguuucc

SEQ ID NO: 2722795 - RNA, 19 nt, Artificial Sequence
  Description of Artificial Sequence: Synthetic oligonucleotide
guacaugcccuucuuggcc

SEQ ID NO: 2722796 - RNA, 19 nt, Artificial Sequence
  Description of Artificial Sequence: Synthetic oligonucleotide
ugguacuuguccaccacgu

SEQ ID NO: 2722797 - RNA, 19 nt, Artificial Sequence
  Description of Artificial Sequence: Synthetic oligonucleotide
aacugccucaagauuucac

SEQ ID NO: 2722798 - RNA, 19 nt, Artificial Sequence
  Description of Artificial Sequence: Synthetic oligonucleotide
augcccacaggccaaccgg

SEQ ID NO: 2722799 - RNA, 19 nt, Artificial Sequence
  Description of Artificial Sequence: Synthetic oligonucleotide
gaugcgguuggggaucugg

SEQ ID NO: 2722800 - RNA, 19 nt, Artificial Sequence
  Description of Artificial Sequence: Synthetic oligonucleotide
agcaaaugucuuggcaggc

SEQ ID NO: 2722801 - RNA, 19 nt, Artificial Sequence
  Description of Artificial Sequence: Synthetic oligonucleotide
ugaacugccucaagauuuc

SEQ ID NO: 2722802 - RNA, 19 nt, Artificial Sequence
  Description of Artificial Sequence: Synthetic oligonucleotide
augccagcaaaugucuugg

SEQ ID NO: 2722803 - RNA, 19 nt, Artificial Sequence
  Description of Artificial Sequence: Synthetic oligonucleotide
gaggaagcccaccuugccc

SEQ ID NO: 2722804 - RNA, 19 nt, Artificial Sequence
  Description of Artificial Sequence: Synthetic oligonucleotide
caaggcuacgcagaugcgg

SEQ ID NO: 2722805 - RNA, 19 nt, Artificial Sequence
  Description of Artificial Sequence: Synthetic oligonucleotide
agcgagaggaggaugaugu

SEQ ID NO: 2722806 - RNA, 19 nt, Artificial Sequence
  Description of Artificial Sequence: Synthetic oligonucleotide
ggugguucuggcaacagag

SEQ ID NO: 2722807 - RNA, 19 nt, Artificial Sequence
  Description of Artificial Sequence: Synthetic oligonucleotide
uccaccacaaagugugccu

SEQ ID NO: 2722808 - RNA, 19 nt, Artificial Sequence
  Description of Artificial Sequence: Synthetic oligonucleotide
gaucugggagggcagguac

SEQ ID NO: 2722809 - RNA, 19 nt, Artificial Sequence
  Description of Artificial Sequence: Synthetic oligonucleotide
guuugcgcaagcagaagag

SEQ ID NO: 2722810 - RNA, 19 nt, Artificial Sequence
  Description of Artificial Sequence: Synthetic oligonucleotide
cuggcaacagaggcgaagg

SEQ ID NO: 2722811 - RNA, 19 nt, Artificial Sequence
  Description of Artificial Sequence: Synthetic oligonucleotide
gaugucauuuucuuccccu

SEQ ID NO: 2722812 - RNA, 19 nt, Artificial Sequence
  Description of Artificial Sequence: Synthetic oligonucleotide
augaguuugcgcaagcaga

SEQ ID NO: 2722813 - RNA, 19 nt, Artificial Sequence
  Description of Artificial Sequence: Synthetic oligonucleotide
uuugcgcaagcagaagagc

SEQ ID NO: 2722814 - RNA, 19 nt, Artificial Sequence
  Description of Artificial Sequence: Synthetic oligonucleotide
uuucuuggauggugaacug

SEQ ID NO: 2722815 - RNA, 19 nt, Artificial Sequence
  Description of Artificial Sequence: Synthetic oligonucleotide
aggguguggaugaucuugc

SEQ ID NO: 2722816 - RNA, 19 nt, Artificial Sequence
  Description of Artificial Sequence: Synthetic oligonucleotide
acaaagugugccucaugcu

SEQ ID NO: 2722817 - RNA, 19 nt, Artificial Sequence
  Description of Artificial Sequence: Synthetic oligonucleotide
gaaaucggaagcuuuggau

SEQ ID NO: 2722818 - RNA, 19 nt, Artificial Sequence
  Description of Artificial Sequence: Synthetic oligonucleotide
acaagggcaccuuggcaag

SEQ ID NO: 2722819 - RNA, 19 nt, Artificial Sequence
  Description of Artificial Sequence: Synthetic oligonucleotide
uuggcaggcaugaguuugc

SEQ ID NO: 2722820 - RNA, 19 nt, Artificial Sequence
  Description of Artificial Sequence: Synthetic oligonucleotide
gcaggcaugaguuugcgca

SEQ ID NO: 2722821 - RNA, 19 nt, Artificial Sequence
  Description of Artificial Sequence: Synthetic oligonucleotide
uucuuggauggugaacugc

SEQ ID NO: 2722822 - RNA, 19 nt, Artificial Sequence
  Description of Artificial Sequence: Synthetic oligonucleotide
ugugccucaugcugguucu

SEQ ID NO: 2722823 - RNA, 19 nt, Artificial Sequence
  Description of Artificial Sequence: Synthetic oligonucleotide
aaggcuacgcagaugcggu

SEQ ID NO: 2722824 - RNA, 19 nt, Artificial Sequence
  Description of Artificial Sequence: Synthetic oligonucleotide
uccccuugguacuugucca

SEQ ID NO: 2722825 - RNA, 19 nt, Artificial Sequence
  Description of Artificial Sequence: Synthetic oligonucleotide
caacagaggcgaagggacg

SEQ ID NO: 2722826 - RNA, 19 nt, Artificial Sequence
  Description of Artificial Sequence: Synthetic oligonucleotide
uacuccuggcacaggaagu

SEQ ID NO: 2722827 - RNA, 19 nt, Artificial Sequence
  Description of Artificial Sequence: Synthetic oligonucleotide
uguggaugaucuugcucca

SEQ ID NO: 2722828 - RNA, 19 nt, Artificial Sequence
  Description of Artificial Sequence: Synthetic oligonucleotide
uacgcagaugcgguugggg

SEQ ID NO: 2722829 - RNA, 19 nt, Artificial Sequence
  Description of Artificial Sequence: Synthetic oligonucleotide
caccacguggacuuugaug

SEQ ID NO: 2722830 - RNA, 19 nt, Artificial Sequence
  Description of Artificial Sequence: Synthetic oligonucleotide
aagugugccucaugcuggu

SEQ ID NO: 2722831 - RNA, 19 nt, Artificial Sequence
  Description of Artificial Sequence: Synthetic oligonucleotide
auuaacguguacacacaug

SEQ ID NO: 2722832 - RNA, 19 nt, Artificial Sequence
  Description of Artificial Sequence: Synthetic oligonucleotide
cacaagggcaccuuggcaa

SEQ ID NO: 2722833 - RNA, 19 nt, Artificial Sequence
  Description of Artificial Sequence: Synthetic oligonucleotide
uacuggcacagcuccacca

SEQ ID NO: 2722834 - RNA, 19 nt, Artificial Sequence
  Description of Artificial Sequence: Synthetic oligonucleotide
agcaucugcauguuuccaa

SEQ ID NO: 2722835 - RNA, 19 nt, Artificial Sequence
  Description of Artificial Sequence: Synthetic oligonucleotide
caggcugcagccuccuucc

SEQ ID NO: 2722836 - RNA, 19 nt, Artificial Sequence
  Description of Artificial Sequence: Synthetic oligonucleotide
ucaugcugguucugguggc

SEQ ID NO: 2722837 - RNA, 19 nt, Artificial Sequence
  Description of Artificial Sequence: Synthetic oligonucleotide
aaaugucuuggcaggcaug

SEQ ID NO: 2722838 - RNA, 19 nt, Artificial Sequence
  Description of Artificial Sequence: Synthetic oligonucleotide
acuagcgagaggaggauga

SEQ ID NO: 2722839 - RNA, 19 nt, Artificial Sequence
  Description of Artificial Sequence: Synthetic oligonucleotide
cuaguuuuauuaacgugua

SEQ ID NO: 2722840 - RNA, 19 nt, Artificial Sequence
  Description of Artificial Sequence: Synthetic oligonucleotide
auuugguuguucucucgaa

SEQ ID NO: 2722841 - RNA, 19 nt, Artificial Sequence
  Description of Artificial Sequence: Synthetic oligonucleotide
uccgaacuagcgagaggag

SEQ ID NO: 2722842 - RNA, 19 nt, Artificial Sequence
  Description of Artificial Sequence: Synthetic oligonucleotide
cucucgaaggguguggaug

SEQ ID NO: 2722843 - RNA, 19 nt, Artificial Sequence
  Description of Artificial Sequence: Synthetic oligonucleotide
ugaggauggugaucuggga

SEQ ID NO: 2722844 - RNA, 19 nt, Artificial Sequence
  Description of Artificial Sequence: Synthetic oligonucleotide
cuccgaacuagcgagagga

SEQ ID NO: 2722845 - RNA, 19 nt, Artificial Sequence
  Description of Artificial Sequence: Synthetic oligonucleotide
aggaggaugaugucauuuu

SEQ ID NO: 2722846 - RNA, 19 nt, Artificial Sequence
  Description of Artificial Sequence: Synthetic oligonucleotide
aucggaagcuuuggauacc

SEQ ID NO: 2722847 - RNA, 19 nt, Artificial Sequence
  Description of Artificial Sequence: Synthetic oligonucleotide
gguucuggcaacagaggcg

SEQ ID NO: 2722848 - RNA, 19 nt, Artificial Sequence
  Description of Artificial Sequence: Synthetic oligonucleotide
acuuguccaccacguggac

SEQ ID NO: 2722849 - RNA, 19 nt, Artificial Sequence
  Description of Artificial Sequence: Synthetic oligonucleotide
aacuagcgagaggaggaug

SEQ ID NO: 2722850 - RNA, 19 nt, Artificial Sequence
  Description of Artificial Sequence: Synthetic oligonucleotide
cuugguacuuguccaccac

SEQ ID NO: 2722851 - RNA, 19 nt, Artificial Sequence
  Description of Artificial Sequence: Synthetic oligonucleotide
uguucucucgaagggugug

SEQ ID NO: 2722852 - RNA, 19 nt, Artificial Sequence
  Description of Artificial Sequence: Synthetic oligonucleotide
uggugaucugggagggcag

SEQ ID NO: 2722853 - RNA, 19 nt, Artificial Sequence
  Description of Artificial Sequence: Synthetic oligonucleotide
cacacaugcccacaggcca

SEQ ID NO: 2722854 - RNA, 19 nt, Artificial Sequence
  Description of Artificial Sequence: Synthetic oligonucleotide
ucggaagcuuuggauacca

SEQ ID NO: 2722855 - RNA, 19 nt, Artificial Sequence
  Description of Artificial Sequence: Synthetic oligonucleotide
ugcuccgaacuagcgagag

SEQ ID NO: 2722856 - RNA, 19 nt, Artificial Sequence
  Description of Artificial Sequence: Synthetic oligonucleotide
ugguucugguggcuuuugc

SEQ ID NO: 2722857 - RNA, 19 nt, Artificial Sequence
  Description of Artificial Sequence: Synthetic oligonucleotide
agaggcgaagggacgggcc

SEQ ID NO: 2722858 - RNA, 19 nt, Artificial Sequence
  Description of Artificial Sequence: Synthetic oligonucleotide
gcgguuggggaucuggagg

SEQ ID NO: 2722859 - RNA, 19 nt, Artificial Sequence
  Description of Artificial Sequence: Synthetic oligonucleotide
gucagggugguucuggcaa

SEQ ID NO: 2722860 - RNA, 19 nt, Artificial Sequence
  Description of Artificial Sequence: Synthetic oligonucleotide
guucucucgaagggugugg

SEQ ID NO: 2722861 - RNA, 19 nt, Artificial Sequence
  Description of Artificial Sequence: Synthetic oligonucleotide
cuuuggauaccagggugug

SEQ ID NO: 2722862 - RNA, 19 nt, Artificial Sequence
  Description of Artificial Sequence: Synthetic oligonucleotide
caagcagaagagcugccca

SEQ ID NO: 2722863 - RNA, 19 nt, Artificial Sequence
  Description of Artificial Sequence: Synthetic oligonucleotide
ugucagggugguucuggca

SEQ ID NO: 2722864 - RNA, 19 nt, Artificial Sequence
  Description of Artificial Sequence: Synthetic oligonucleotide
augcaguacaugcccuucu

SEQ ID NO: 2722865 - RNA, 19 nt, Artificial Sequence
  Description of Artificial Sequence: Synthetic oligonucleotide
ugcccacaggccaaccgga

SEQ ID NO: 2722866 - RNA, 19 nt, Artificial Sequence
  Description of Artificial Sequence: Synthetic oligonucleotide
uaucagucacuaguuuuau

SEQ ID NO: 2722867 - RNA, 19 nt, Artificial Sequence
  Description of Artificial Sequence: Synthetic oligonucleotide
cuuugaugccagcaaaugu

SEQ ID NO: 2722868 - RNA, 19 nt, Artificial Sequence
  Description of Artificial Sequence: Synthetic oligonucleotide
gcaacagaggcgaagggac

SEQ ID NO: 2722869 - RNA, 19 nt, Artificial Sequence
  Description of Artificial Sequence: Synthetic oligonucleotide
uucucucgaagggugugga

SEQ ID NO: 2722870 - RNA, 19 nt, Artificial Sequence
  Description of Artificial Sequence: Synthetic oligonucleotide
ggacgggccuauuugguug

SEQ ID NO: 2722871 - RNA, 19 nt, Artificial Sequence
  Description of Artificial Sequence: Synthetic oligonucleotide
aagggcaccuuggcaagca

SEQ ID NO: 2722872 - RNA, 19 nt, Artificial Sequence
  Description of Artificial Sequence: Synthetic oligonucleotide
cuccaccacaaagugugcc

SEQ ID NO: 2722873 - RNA, 19 nt, Artificial Sequence
  Description of Artificial Sequence: Synthetic oligonucleotide
gugugccucaugcugguuc

SEQ ID NO: 2722874 - RNA, 19 nt, Artificial Sequence
  Description of Artificial Sequence: Synthetic oligonucleotide
gcaagcaucugcauguuuc

SEQ ID NO: 2722875 - RNA, 19 nt, Artificial Sequence
  Description of Artificial Sequence: Synthetic oligonucleotide
caggccaaccggaacucac

SEQ ID NO: 2722876 - RNA, 19 nt, Artificial Sequence
  Description of Artificial Sequence: Synthetic oligonucleotide
ggaggaugaugucauuuuc

SEQ ID NO: 2722877 - RNA, 19 nt, Artificial Sequence
  Description of Artificial Sequence: Synthetic oligonucleotide
gaguuugcgcaagcagaag

SEQ ID NO: 2722878 - RNA, 19 nt, Artificial Sequence
  Description of Artificial Sequence: Synthetic oligonucleotide
uuggcccgggacaaggcua

SEQ ID NO: 2722879 - RNA, 19 nt, Artificial Sequence
  Description of Artificial Sequence: Synthetic oligonucleotide
ugcccaguguaggugguga

SEQ ID NO: 2722880 - RNA, 19 nt, Artificial Sequence
  Description of Artificial Sequence: Synthetic oligonucleotide
cagucacuaguuuuauuaa

SEQ ID NO: 2722881 - RNA, 19 nt, Artificial Sequence
  Description of Artificial Sequence: Synthetic oligonucleotide
uuugccuuucuuggauggu

SEQ ID NO: 2722882 - RNA, 19 nt, Artificial Sequence
  Description of Artificial Sequence: Synthetic oligonucleotide
uagcgagaggaggaugaug

SEQ ID NO: 2722883 - RNA, 19 nt, Artificial Sequence
  Description of Artificial Sequence: Synthetic oligonucleotide
ugcagccuccuuccggcac

SEQ ID NO: 2722884 - RNA, 19 nt, Artificial Sequence
  Description of Artificial Sequence: Synthetic oligonucleotide
ggauggugaucugggaggg

SEQ ID NO: 2722885 - RNA, 19 nt, Artificial Sequence
  Description of Artificial Sequence: Synthetic oligonucleotide
cacagcuccaccacaaagu

SEQ ID NO: 2722886 - RNA, 19 nt, Artificial Sequence
  Description of Artificial Sequence: Synthetic oligonucleotide
ugaugccagcaaaugucuu

SEQ ID NO: 2722887 - RNA, 19 nt, Artificial Sequence
  Description of Artificial Sequence: Synthetic oligonucleotide
uggcaggcaugaguuugcg

SEQ ID NO: 2722888 - RNA, 19 nt, Artificial Sequence
  Description of Artificial Sequence: Synthetic oligonucleotide
ggaaaucggaagcuuugga

SEQ ID NO: 2722889 - RNA, 19 nt, Artificial Sequence
  Description of Artificial Sequence: Synthetic oligonucleotide
uggcccgggacaaggcuac

SEQ ID NO: 2722890 - RNA, 19 nt, Artificial Sequence
  Description of Artificial Sequence: Synthetic oligonucleotide
gcuacgcagaugcgguugg

SEQ ID NO: 2722891 - RNA, 19 nt, Artificial Sequence
  Description of Artificial Sequence: Synthetic oligonucleotide
acagaggcgaagggacggg

SEQ ID NO: 2722892 - RNA, 19 nt, Artificial Sequence
  Description of Artificial Sequence: Synthetic oligonucleotide
uugcuccgaacuagcgaga

SEQ ID NO: 2722893 - RNA, 19 nt, Artificial Sequence
  Description of Artificial Sequence: Synthetic oligonucleotide
guggacuuugaugccagca

SEQ ID NO: 2722894 - RNA, 19 nt, Artificial Sequence
  Description of Artificial Sequence: Synthetic oligonucleotide
ugccagcaaaugucuuggc

SEQ ID NO: 2722895 - RNA, 19 nt, Artificial Sequence
  Description of Artificial Sequence: Synthetic oligonucleotide
gguguggaugaucuugcuc

SEQ ID NO: 2722896 - RNA, 19 nt, Artificial Sequence
  Description of Artificial Sequence: Synthetic oligonucleotide
ucugguggcuuuugccuuu

SEQ ID NO: 2722897 - RNA, 19 nt, Artificial Sequence
  Description of Artificial Sequence: Synthetic oligonucleotide
uccggguugcuccgaacua

SEQ ID NO: 2722898 - RNA, 19 nt, Artificial Sequence
  Description of Artificial Sequence: Synthetic oligonucleotide
gggugugggugucagggug

SEQ ID NO: 2722899 - RNA, 19 nt, Artificial Sequence
  Description of Artificial Sequence: Synthetic oligonucleotide
guacuggcacagcuccacc

SEQ ID NO: 2722900 - RNA, 19 nt, Artificial Sequence
  Description of Artificial Sequence: Synthetic oligonucleotide
aucagucacuaguuuuauu

SEQ ID NO: 2722901 - RNA, 19 nt, Artificial Sequence
  Description of Artificial Sequence: Synthetic oligonucleotide
gguugcuccgaacuagcga

SEQ ID NO: 2722902 - RNA, 19 nt, Artificial Sequence
  Description of Artificial Sequence: Synthetic oligonucleotide
gugaacugccucaagauuu

SEQ ID NO: 2722903 - RNA, 19 nt, Artificial Sequence
  Description of Artificial Sequence: Synthetic oligonucleotide
ggccaaccggaacucacag

SEQ ID NO: 2722904 - RNA, 19 nt, Artificial Sequence
  Description of Artificial Sequence: Synthetic oligonucleotide
agcagaagagcugcccagu

SEQ ID NO: 2722905 - RNA, 19 nt, Artificial Sequence
  Description of Artificial Sequence: Synthetic oligonucleotide
ccuauuugguuguucucuc

SEQ ID NO: 2722906 - RNA, 19 nt, Artificial Sequence
  Description of Artificial Sequence: Synthetic oligonucleotide
acaugcccacaggccaacc

SEQ ID NO: 2722907 - RNA, 19 nt, Artificial Sequence
  Description of Artificial Sequence: Synthetic oligonucleotide
aggcaugaguuugcgcaag

SEQ ID NO: 2722908 - RNA, 19 nt, Artificial Sequence
  Description of Artificial Sequence: Synthetic oligonucleotide
gcaguacaugcccuucuug

SEQ ID NO: 2722909 - RNA, 19 nt, Artificial Sequence
  Description of Artificial Sequence: Synthetic oligonucleotide
auaccaggguguggguguc

SEQ ID NO: 2722910 - RNA, 19 nt, Artificial Sequence
  Description of Artificial Sequence: Synthetic oligonucleotide
uggauaccagggugugggu

SEQ ID NO: 2722911 - RNA, 19 nt, Artificial Sequence
  Description of Artificial Sequence: Synthetic oligonucleotide
gauggugaucugggagggc

SEQ ID NO: 2722912 - RNA, 19 nt, Artificial Sequence
  Description of Artificial Sequence: Synthetic oligonucleotide
ggacuuugaugccagcaaa

SEQ ID NO: 2722913 - RNA, 19 nt, Artificial Sequence
  Description of Artificial Sequence: Synthetic oligonucleotide
acguggacuuugaugccag

SEQ ID NO: 2722914 - RNA, 19 nt, Artificial Sequence
  Description of Artificial Sequence: Synthetic oligonucleotide
cauuuucuuccccuuggua

SEQ ID NO: 2722915 - RNA, 19 nt, Artificial Sequence
  Description of Artificial Sequence: Synthetic oligonucleotide
accggaacucacagggcag

SEQ ID NO: 2722916 - RNA, 19 nt, Artificial Sequence
  Description of Artificial Sequence: Synthetic oligonucleotide
ccgaacuagcgagaggagg

SEQ ID NO: 2722917 - RNA, 19 nt, Artificial Sequence
  Description of Artificial Sequence: Synthetic oligonucleotide
ucgaaggguguggaugauc

SEQ ID NO: 2722918 - RNA, 19 nt, Artificial Sequence
  Description of Artificial Sequence: Synthetic oligonucleotide
acaaggcuacgcagaugcg

SEQ ID NO: 2722919 - RNA, 19 nt, Artificial Sequence
  Description of Artificial Sequence: Synthetic oligonucleotide
aaguacuggcacagcucca

SEQ ID NO: 2722920 - RNA, 19 nt, Artificial Sequence
  Description of Artificial Sequence: Synthetic oligonucleotide
ggaaguacuggcacagcuc

SEQ ID NO: 2722921 - RNA, 19 nt, Artificial Sequence
  Description of Artificial Sequence: Synthetic oligonucleotide
gcaagcagaagagcugccc

SEQ ID NO: 2722922 - RNA, 19 nt, Artificial Sequence
  Description of Artificial Sequence: Synthetic oligonucleotide
acuccuggcacaggaagua

SEQ ID NO: 2722923 - RNA, 19 nt, Artificial Sequence
  Description of Artificial Sequence: Synthetic oligonucleotide
gccaaccggaacucacagg

SEQ ID NO: 2722924 - RNA, 19 nt, Artificial Sequence
  Description of Artificial Sequence: Synthetic oligonucleotide
ggcaacagaggcgaaggga

SEQ ID NO: 2722925 - RNA, 19 nt, Artificial Sequence
  Description of Artificial Sequence: Synthetic oligonucleotide
ggcaugaguuugcgcaagc

SEQ ID NO: 2722926 - RNA, 19 nt, Artificial Sequence
  Description of Artificial Sequence: Synthetic oligonucleotide
ggaugaucuugcuccacaa

SEQ ID NO: 2722927 - RNA, 19 nt, Artificial Sequence
  Description of Artificial Sequence: Synthetic oligonucleotide
cuuccccuugguacuuguc

SEQ ID NO: 2722928 - RNA, 19 nt, Artificial Sequence
  Description of Artificial Sequence: Synthetic oligonucleotide
cgaacuagcgagaggagga

SEQ ID NO: 2722929 - RNA, 19 nt, Artificial Sequence
  Description of Artificial Sequence: Synthetic oligonucleotide
gggaucuggaggaagccca

SEQ ID NO: 2722930 - RNA, 19 nt, Artificial Sequence
  Description of Artificial Sequence: Synthetic oligonucleotide
gacuuugaugccagcaaau

SEQ ID NO: 2722931 - RNA, 19 nt, Artificial Sequence
  Description of Artificial Sequence: Synthetic oligonucleotide
gcgcaagcagaagagcugc

SEQ ID NO: 2722932 - RNA, 19 nt, Artificial Sequence
  Description of Artificial Sequence: Synthetic oligonucleotide
gaggcgaagggacgggccu

SEQ ID NO: 2722933 - RNA, 19 nt, Artificial Sequence
  Description of Artificial Sequence: Synthetic oligonucleotide
cagaggcgaagggacgggc

SEQ ID NO: 2722934 - RNA, 19 nt, Artificial Sequence
  Description of Artificial Sequence: Synthetic oligonucleotide
cuacgcagaugcgguuggg

SEQ ID NO: 2722935 - RNA, 19 nt, Artificial Sequence
  Description of Artificial Sequence: Synthetic oligonucleotide
caggaaguacuggcacagc

SEQ ID NO: 2722936 - RNA, 19 nt, Artificial Sequence
  Description of Artificial Sequence: Synthetic oligonucleotide
caaaugucuuggcaggcau

SEQ ID NO: 2722937 - RNA, 19 nt, Artificial Sequence
  Description of Artificial Sequence: Synthetic oligonucleotide
agggugguucuggcaacag

SEQ ID NO: 2722938 - RNA, 19 nt, Artificial Sequence
  Description of Artificial Sequence: Synthetic oligonucleotide
gcuccgaacuagcgagagg

SEQ ID NO: 2722939 - RNA, 19 nt, Artificial Sequence
  Description of Artificial Sequence: Synthetic oligonucleotide
ccucaugcugguucuggug

SEQ ID NO: 2722940 - RNA, 19 nt, Artificial Sequence
  Description of Artificial Sequence: Synthetic oligonucleotide
gaacugccucaagauuuca

SEQ ID NO: 2722941 - RNA, 19 nt, Artificial Sequence
  Description of Artificial Sequence: Synthetic oligonucleotide
caagggcaccuuggcaagc

SEQ ID NO: 2722942 - RNA, 19 nt, Artificial Sequence
  Description of Artificial Sequence: Synthetic oligonucleotide
ggggaucuggaggaagccc

SEQ ID NO: 2722943 - RNA, 19 nt, Artificial Sequence
  Description of Artificial Sequence: Synthetic oligonucleotide
ggcuacgcagaugcgguug

SEQ ID NO: 2722944 - RNA, 19 nt, Artificial Sequence
  Description of Artificial Sequence: Synthetic oligonucleotide
ggcuuuugccuuucuugga

SEQ ID NO: 2722945 - RNA, 19 nt, Artificial Sequence
  Description of Artificial Sequence: Synthetic oligonucleotide
acucacagggcaggcugca

SEQ ID NO: 2722946 - RNA, 19 nt, Artificial Sequence
  Description of Artificial Sequence: Synthetic oligonucleotide
caggcaugaguuugcgcaa

SEQ ID NO: 2722947 - RNA, 19 nt, Artificial Sequence
  Description of Artificial Sequence: Synthetic oligonucleotide
cacaggccaaccggaacuc

SEQ ID NO: 2722948 - RNA, 19 nt, Artificial Sequence
  Description of Artificial Sequence: Synthetic oligonucleotide
ggguugcuccgaacuagcg

SEQ ID NO: 2722949 - RNA, 19 nt, Artificial Sequence
  Description of Artificial Sequence: Synthetic oligonucleotide
gacgggccuauuugguugu

SEQ ID NO: 2722950 - RNA, 19 nt, Artificial Sequence
  Description of Artificial Sequence: Synthetic oligonucleotide
ggcaggcaugaguuugcgc

SEQ ID NO: 2722951 - RNA, 19 nt, Artificial Sequence
  Description of Artificial Sequence: Synthetic oligonucleotide
gucuuggcaggcaugaguu

SEQ ID NO: 2722952 - RNA, 19 nt, Artificial Sequence
  Description of Artificial Sequence: Synthetic oligonucleotide
aggccaaccggaacucaca

SEQ ID NO: 2722953 - RNA, 19 nt, Artificial Sequence
  Description of Artificial Sequence: Synthetic oligonucleotide
agggacgggccuauuuggu

SEQ ID NO: 2722954 - RNA, 19 nt, Artificial Sequence
  Description of Artificial Sequence: Synthetic oligonucleotide
aucugggagggcagguacu

SEQ ID NO: 2722955 - RNA, 19 nt, Artificial Sequence
  Description of Artificial Sequence: Synthetic oligonucleotide
gggccuauuugguuguucu

SEQ ID NO: 2722956 - RNA, 19 nt, Artificial Sequence
  Description of Artificial Sequence: Synthetic oligonucleotide
cuuggauggugaacugccu

SEQ ID NO: 2722957 - RNA, 19 nt, Artificial Sequence
  Description of Artificial Sequence: Synthetic oligonucleotide
augcccuucuuggcccggg

SEQ ID NO: 2722958 - RNA, 19 nt, Artificial Sequence
  Description of Artificial Sequence: Synthetic oligonucleotide
uucuggcaacagaggcgaa

SEQ ID NO: 2722959 - RNA, 19 nt, Artificial Sequence
  Description of Artificial Sequence: Synthetic oligonucleotide
cugguucugguggcuuuug

SEQ ID NO: 2722960 - RNA, 19 nt, Artificial Sequence
  Description of Artificial Sequence: Synthetic oligonucleotide
ccuuucuuggauggugaac

SEQ ID NO: 2722961 - RNA, 19 nt, Artificial Sequence
  Description of Artificial Sequence: Synthetic oligonucleotide
gcuccacaagggcaccuug

SEQ ID NO: 2722962 - RNA, 19 nt, Artificial Sequence
  Description of Artificial Sequence: Synthetic oligonucleotide
ccgggacaaggcuacgcag

SEQ ID NO: 2722963 - RNA, 19 nt, Artificial Sequence
  Description of Artificial Sequence: Synthetic oligonucleotide
guggaugaucuugcuccac

SEQ ID NO: 2722964 - RNA, 19 nt, Artificial Sequence
  Description of Artificial Sequence: Synthetic oligonucleotide
gcaaaugucuuggcaggca

SEQ ID NO: 2722965 - RNA, 19 nt, Artificial Sequence
  Description of Artificial Sequence: Synthetic oligonucleotide
gccuauuugguuguucucu

SEQ ID NO: 2722966 - RNA, 19 nt, Artificial Sequence
  Description of Artificial Sequence: Synthetic oligonucleotide
augcgguuggggaucugga

SEQ ID NO: 2722967 - RNA, 19 nt, Artificial Sequence
  Description of Artificial Sequence: Synthetic oligonucleotide
ggccuauuugguuguucuc

SEQ ID NO: 2722968 - RNA, 19 nt, Artificial Sequence
  Description of Artificial Sequence: Synthetic oligonucleotide
cucacagggcaggcugcag

SEQ ID NO: 2722969 - RNA, 19 nt, Artificial Sequence
  Description of Artificial Sequence: Synthetic oligonucleotide
acaggccaaccggaacuca

SEQ ID NO: 2722970 - RNA, 19 nt, Artificial Sequence
  Description of Artificial Sequence: Synthetic oligonucleotide
ccaguguagguggugagga

SEQ ID NO: 2722971 - RNA, 19 nt, Artificial Sequence
  Description of Artificial Sequence: Synthetic oligonucleotide
caugcccuucuuggcccgg

SEQ ID NO: 2722972 - RNA, 19 nt, Artificial Sequence
  Description of Artificial Sequence: Synthetic oligonucleotide
gcagaugcgguuggggauc

SEQ ID NO: 2722973 - RNA, 19 nt, Artificial Sequence
  Description of Artificial Sequence: Synthetic oligonucleotide
cuccggguugcuccgaacu

SEQ ID NO: 2722974 - RNA, 19 nt, Artificial Sequence
  Description of Artificial Sequence: Synthetic oligonucleotide
ggugaacugccucaagauu

SEQ ID NO: 2722975 - RNA, 19 nt, Artificial Sequence
  Description of Artificial Sequence: Synthetic oligonucleotide
gggugguucuggcaacaga

SEQ ID NO: 2722976 - RNA, 19 nt, Artificial Sequence
  Description of Artificial Sequence: Synthetic oligonucleotide
ccggaacucacagggcagg

SEQ ID NO: 2722977 - RNA, 19 nt, Artificial Sequence
  Description of Artificial Sequence: Synthetic oligonucleotide
gcccaguguagguggugag

SEQ ID NO: 2722978 - RNA, 19 nt, Artificial Sequence
  Description of Artificial Sequence: Synthetic oligonucleotide
gaacuagcgagaggaggau

SEQ ID NO: 2722979 - RNA, 19 nt, Artificial Sequence
  Description of Artificial Sequence: Synthetic oligonucleotide
gcaugaguuugcgcaagca

SEQ ID NO: 2722980 - RNA, 19 nt, Artificial Sequence
  Description of Artificial Sequence: Synthetic oligonucleotide
gguuguucucucgaagggu

SEQ ID NO: 2722981 - RNA, 19 nt, Artificial Sequence
  Description of Artificial Sequence: Synthetic oligonucleotide
ccggguugcuccgaacuag

SEQ ID NO: 2722982 - RNA, 19 nt, Artificial Sequence
  Description of Artificial Sequence: Synthetic oligonucleotide
uaccaggguguggguguca

SEQ ID NO: 2722983 - RNA, 19 nt, Artificial Sequence
  Description of Artificial Sequence: Synthetic oligonucleotide
gcuuuggauaccagggugu

SEQ ID NO: 2722984 - RNA, 19 nt, Artificial Sequence
  Description of Artificial Sequence: Synthetic oligonucleotide
aggcuacgcagaugcgguu

SEQ ID NO: 2722985 - RNA, 19 nt, Artificial Sequence
  Description of Artificial Sequence: Synthetic oligonucleotide
caaugcaguacaugcccuu

SEQ ID NO: 2722986 - RNA, 19 nt, Artificial Sequence
  Description of Artificial Sequence: Synthetic oligonucleotide
uggcaagcaucugcauguu

SEQ ID NO: 2722987 - RNA, 19 nt, Artificial Sequence
  Description of Artificial Sequence: Synthetic oligonucleotide
cuuguccaccacguggacu

SEQ ID NO: 2722988 - RNA, 19 nt, Artificial Sequence
  Description of Artificial Sequence: Synthetic oligonucleotide
ccccuugguacuuguccac

SEQ ID NO: 2722989 - RNA, 19 nt, Artificial Sequence
  Description of Artificial Sequence: Synthetic oligonucleotide
cggguugcuccgaacuagc

SEQ ID NO: 2722990 - RNA, 19 nt, Artificial Sequence
  Description of Artificial Sequence: Synthetic oligonucleotide
cugcccaguguagguggug

SEQ ID NO: 2722991 - RNA, 19 nt, Artificial Sequence
  Description of Artificial Sequence: Synthetic oligonucleotide
gaaggguguggaugaucuu

SEQ ID NO: 2722992 - RNA, 19 nt, Artificial Sequence
  Description of Artificial Sequence: Synthetic oligonucleotide
augcugguucugguggcuu

SEQ ID NO: 2722993 - RNA, 19 nt, Artificial Sequence
  Description of Artificial Sequence: Synthetic oligonucleotide
gcgagaggaggaugauguc

SEQ ID NO: 2722994 - RNA, 19 nt, Artificial Sequence
  Description of Artificial Sequence: Synthetic oligonucleotide
gggacaaggcuacgcagau

SEQ ID NO: 2722995 - RNA, 19 nt, Artificial Sequence
  Description of Artificial Sequence: Synthetic oligonucleotide
gccuuucuuggauggugaa

SEQ ID NO: 2722996 - RNA, 19 nt, Artificial Sequence
  Description of Artificial Sequence: Synthetic oligonucleotide
cgggacaaggcuacgcaga

SEQ ID NO: 2722997 - RNA, 19 nt, Artificial Sequence
  Description of Artificial Sequence: Synthetic oligonucleotide
cgcaagcagaagagcugcc

SEQ ID NO: 2722998 - RNA, 19 nt, Artificial Sequence
  Description of Artificial Sequence: Synthetic oligonucleotide
gggcaccuuggcaagcauc

SEQ ID NO: 2722999 - RNA, 19 nt, Artificial Sequence
  Description of Artificial Sequence: Synthetic oligonucleotide
ccacaggccaaccggaacu

SEQ ID NO: 2723000 - RNA, 19 nt, Artificial Sequence
  Description of Artificial Sequence: Synthetic oligonucleotide
gugccucaugcugguucug

SEQ ID NO: 2723001 - RNA, 19 nt, Artificial Sequence
  Description of Artificial Sequence: Synthetic oligonucleotide
ggcacagcuccaccacaaa

SEQ ID NO: 2723002 - RNA, 19 nt, Artificial Sequence
  Description of Artificial Sequence: Synthetic oligonucleotide
gcuccaccacaaagugugc

SEQ ID NO: 2723003 - RNA, 19 nt, Artificial Sequence
  Description of Artificial Sequence: Synthetic oligonucleotide
ccaaugcaguacaugcccu

SEQ ID NO: 2723004 - RNA, 19 nt, Artificial Sequence
  Description of Artificial Sequence: Synthetic oligonucleotide
ugugggugucagggugguu

SEQ ID NO: 2723005 - RNA, 19 nt, Artificial Sequence
  Description of Artificial Sequence: Synthetic oligonucleotide
agugugccucaugcugguu

SEQ ID NO: 2723006 - RNA, 19 nt, Artificial Sequence
  Description of Artificial Sequence: Synthetic oligonucleotide
gcccgggacaaggcuacgc

SEQ ID NO: 2723007 - RNA, 19 nt, Artificial Sequence
  Description of Artificial Sequence: Synthetic oligonucleotide
agaugcgguuggggaucug

SEQ ID NO: 2723008 - RNA, 19 nt, Artificial Sequence
  Description of Artificial Sequence: Synthetic oligonucleotide
caugcugguucugguggcu

SEQ ID NO: 2723009 - RNA, 19 nt, Artificial Sequence
  Description of Artificial Sequence: Synthetic oligonucleotide
cguggacuuugaugccagc

SEQ ID NO: 2723010 - RNA, 19 nt, Artificial Sequence
  Description of Artificial Sequence: Synthetic oligonucleotide
caguguagguggugaggau

SEQ ID NO: 2723011 - RNA, 19 nt, Artificial Sequence
  Description of Artificial Sequence: Synthetic oligonucleotide
ggguguggaugaucuugcu

SEQ ID NO: 2723012 - RNA, 19 nt, Artificial Sequence
  Description of Artificial Sequence: Synthetic oligonucleotide
gccucaugcugguucuggu

SEQ ID NO: 2723013 - RNA, 19 nt, Artificial Sequence
  Description of Artificial Sequence: Synthetic oligonucleotide
ccuccggguugcuccgaac

SEQ ID NO: 2723014 - RNA, 19 nt, Artificial Sequence
  Description of Artificial Sequence: Synthetic oligonucleotide
cuagcgagaggaggaugau

SEQ ID NO: 2723015 - RNA, 19 nt, Artificial Sequence
  Description of Artificial Sequence: Synthetic oligonucleotide
gggacgggccuauuugguu

SEQ ID NO: 2723016 - RNA, 19 nt, Artificial Sequence
  Description of Artificial Sequence: Synthetic oligonucleotide
gggugucagggugguucug

SEQ ID NO: 2723017 - RNA, 19 nt, Artificial Sequence
  Description of Artificial Sequence: Synthetic oligonucleotide
ggcccgggacaaggcuacg

SEQ ID NO: 2723018 - RNA, 19 nt, Artificial Sequence
  Description of Artificial Sequence: Synthetic oligonucleotide
cagaugcgguuggggaucu

SEQ ID NO: 2723019 - RNA, 19 nt, Artificial Sequence
  Description of Artificial Sequence: Synthetic oligonucleotide
acgggccuauuugguuguu

SEQ ID NO: 2723020 - RNA, 19 nt, Artificial Sequence
  Description of Artificial Sequence: Synthetic oligonucleotide
cgggccuauuugguuguuc

SEQ ID NO: 2723021 - RNA, 19 nt, Artificial Sequence
  Description of Artificial Sequence: Synthetic oligonucleotide
cucgaaggguguggaugau

SEQ ID NO: 2723022 - RNA, 19 nt, Artificial Sequence
  Description of Artificial Sequence: Synthetic oligonucleotide
gcccacaggccaaccggaa

SEQ ID NO: 2723023 - RNA, 19 nt, Artificial Sequence
  Description of Artificial Sequence: Synthetic oligonucleotide
gcugguucugguggcuuuu

SEQ ID NO: 2723024 - RNA, 19 nt, Artificial Sequence
  Description of Artificial Sequence: Synthetic oligonucleotide
ggcgaagggacgggccuau

SEQ ID NO: 2723025 - RNA, 19 nt, Artificial Sequence
  Description of Artificial Sequence: Synthetic oligonucleotide
gcugcccaguguagguggu

SEQ ID NO: 2723026 - RNA, 19 nt, Artificial Sequence
  Description of Artificial Sequence: Synthetic oligonucleotide
cgaagggacgggccuauuu

SEQ ID NO: 2723027 - RNA, 19 nt, Artificial Sequence
  Description of Artificial Sequence: Synthetic oligonucleotide
ggcaggcugcagccuccuu

SEQ ID NO: 2723028 - RNA, 19 nt, Artificial Sequence
  Description of Artificial Sequence: Synthetic oligonucleotide
gcccuccggguugcuccga

SEQ ID NO: 2723029 - RNA, 19 nt, Artificial Sequence
  Description of Artificial Sequence: Synthetic oligonucleotide
gcgaagggacgggccuauu

SEQ ID NO: 2723030 - RNA, 19 nt, Artificial Sequence
  Description of Artificial Sequence: Synthetic oligonucleotide
ccuugcccuccggguugcu

SEQ ID NO: 2723031 - RNA, 19 nt, Artificial Sequence
  Description of Artificial Sequence: Synthetic oligonucleotide
auucguaucuuugugaucg

SEQ ID NO: 2723032 - RNA, 19 nt, Artificial Sequence
  Description of Artificial Sequence: Synthetic oligonucleotide
uguuucuuggcaaagcgca

SEQ ID NO: 2723033 - RNA, 19 nt, Artificial Sequence
  Description of Artificial Sequence: Synthetic oligonucleotide
cuugguuugaaccuugggc

SEQ ID NO: 2723034 - RNA, 19 nt, Artificial Sequence
  Description of Artificial Sequence: Synthetic oligonucleotide
cuugcuucaaguuuauuug

SEQ ID NO: 2723035 - RNA, 19 nt, Artificial Sequence
  Description of Artificial Sequence: Synthetic oligonucleotide
uugguuugaaccuugggcu

SEQ ID NO: 2723036 - RNA, 19 nt, Artificial Sequence
  Description of Artificial Sequence: Synthetic oligonucleotide
uucuauggggucuucacag

SEQ ID NO: 2723037 - RNA, 19 nt, Artificial Sequence
  Description of Artificial Sequence: Synthetic oligonucleotide
aaaccuuuucuaugggguc

SEQ ID NO: 2723038 - RNA, 19 nt, Artificial Sequence
  Description of Artificial Sequence: Synthetic oligonucleotide
uaagagauucguaucuuug

SEQ ID NO: 2723039 - RNA, 19 nt, Artificial Sequence
  Description of Artificial Sequence: Synthetic oligonucleotide
gaaccuugggcuuugguug

SEQ ID NO: 2723040 - RNA, 19 nt, Artificial Sequence
  Description of Artificial Sequence: Synthetic oligonucleotide
uucuuguuguguuucuugg

SEQ ID NO: 2723041 - RNA, 19 nt, Artificial Sequence
  Description of Artificial Sequence: Synthetic oligonucleotide
uuggggugagcaaugaaag

SEQ ID NO: 2723042 - RNA, 19 nt, Artificial Sequence
  Description of Artificial Sequence: Synthetic oligonucleotide
agaaaccuuuucuaugggg

SEQ ID NO: 2723043 - RNA, 19 nt, Artificial Sequence
  Description of Artificial Sequence: Synthetic oligonucleotide
uuggcaaagcgcauguucc

SEQ ID NO: 2723044 - RNA, 19 nt, Artificial Sequence
  Description of Artificial Sequence: Synthetic oligonucleotide
aagagauucguaucuuugu

SEQ ID NO: 2723045 - RNA, 19 nt, Artificial Sequence
  Description of Artificial Sequence: Synthetic oligonucleotide
gagcaaugaaagcaaggcg

SEQ ID NO: 2723046 - RNA, 19 nt, Artificial Sequence
  Description of Artificial Sequence: Synthetic oligonucleotide
uuggacuuggccaugucug

SEQ ID NO: 2723047 - RNA, 19 nt, Artificial Sequence
  Description of Artificial Sequence: Synthetic oligonucleotide
gaucgagguuucuugaugc

SEQ ID NO: 2723048 - RNA, 19 nt, Artificial Sequence
  Description of Artificial Sequence: Synthetic oligonucleotide
aucaccugcagauagcgug

SEQ ID NO: 2723049 - RNA, 19 nt, Artificial Sequence
  Description of Artificial Sequence: Synthetic oligonucleotide
aaugaaagcaaggcggcug

SEQ ID NO: 2723050 - RNA, 19 nt, Artificial Sequence
  Description of Artificial Sequence: Synthetic oligonucleotide
uguggugugguucuuggac

SEQ ID NO: 2723051 - RNA, 19 nt, Artificial Sequence
  Description of Artificial Sequence: Synthetic oligonucleotide
aacggcacagggcaugauc

SEQ ID NO: 2723052 - RNA, 19 nt, Artificial Sequence
  Description of Artificial Sequence: Synthetic oligonucleotide
auuguuugccugcaucuuc

SEQ ID NO: 2723053 - RNA, 19 nt, Artificial Sequence
  Description of Artificial Sequence: Synthetic oligonucleotide
caugaucaccugcagauag

SEQ ID NO: 2723054 - RNA, 19 nt, Artificial Sequence
  Description of Artificial Sequence: Synthetic oligonucleotide
uuccucagaaacuuggggu

SEQ ID NO: 2723055 - RNA, 19 nt, Artificial Sequence
  Description of Artificial Sequence: Synthetic oligonucleotide
ugguucuuggacuuggcca

SEQ ID NO: 2723056 - RNA, 19 nt, Artificial Sequence
  Description of Artificial Sequence: Synthetic oligonucleotide
ugcgcgugcacucauggcc

SEQ ID NO: 2723057 - RNA, 19 nt, Artificial Sequence
  Description of Artificial Sequence: Synthetic oligonucleotide
agagauucguaucuuugug

SEQ ID NO: 2723058 - RNA, 19 nt, Artificial Sequence
  Description of Artificial Sequence: Synthetic oligonucleotide
aaagcaaggcggcugaguu

SEQ ID NO: 2723059 - RNA, 19 nt, Artificial Sequence
  Description of Artificial Sequence: Synthetic oligonucleotide
aggcgugucacaccagucc

SEQ ID NO: 2723060 - RNA, 19 nt, Artificial Sequence
  Description of Artificial Sequence: Synthetic oligonucleotide
auggggucuucacaggggc

SEQ ID NO: 2723061 - RNA, 19 nt, Artificial Sequence
  Description of Artificial Sequence: Synthetic oligonucleotide
ucuucacacuggaagaaac

SEQ ID NO: 2723062 - RNA, 19 nt, Artificial Sequence
  Description of Artificial Sequence: Synthetic oligonucleotide
ugaucaccugcagauagcg

SEQ ID NO: 2723063 - RNA, 19 nt, Artificial Sequence
  Description of Artificial Sequence: Synthetic oligonucleotide
uucuaauccgcuucccaag

SEQ ID NO: 2723064 - RNA, 19 nt, Artificial Sequence
  Description of Artificial Sequence: Synthetic oligonucleotide
ucuaauccgcuucccaagc

SEQ ID NO: 2723065 - RNA, 19 nt, Artificial Sequence
  Description of Artificial Sequence: Synthetic oligonucleotide
uauggggucuucacagggg

SEQ ID NO: 2723066 - RNA, 19 nt, Artificial Sequence
  Description of Artificial Sequence: Synthetic oligonucleotide
ugaucgagguuucuugaug

SEQ ID NO: 2723067 - RNA, 19 nt, Artificial Sequence
  Description of Artificial Sequence: Synthetic oligonucleotide
caacuugggcuucacaagg

SEQ ID NO: 2723068 - RNA, 19 nt, Artificial Sequence
  Description of Artificial Sequence: Synthetic oligonucleotide
uucuugaugccauuucugu

SEQ ID NO: 2723069 - RNA, 19 nt, Artificial Sequence
  Description of Artificial Sequence: Synthetic oligonucleotide
uccaucugucuucacacug

SEQ ID NO: 2723070 - RNA, 19 nt, Artificial Sequence
  Description of Artificial Sequence: Synthetic oligonucleotide
aacuaggucuugcuucaag

SEQ ID NO: 2723071 - RNA, 19 nt, Artificial Sequence
  Description of Artificial Sequence: Synthetic oligonucleotide
ucugcgcgugcacucaugg

SEQ ID NO: 2723072 - RNA, 19 nt, Artificial Sequence
  Description of Artificial Sequence: Synthetic oligonucleotide
cauguagcuucuaauccgc

SEQ ID NO: 2723073 - RNA, 19 nt, Artificial Sequence
  Description of Artificial Sequence: Synthetic oligonucleotide
uuucuauggggucuucaca

SEQ ID NO: 2723074 - RNA, 19 nt, Artificial Sequence
  Description of Artificial Sequence: Synthetic oligonucleotide
uugugaucgagguuucuug

SEQ ID NO: 2723075 - RNA, 19 nt, Artificial Sequence
  Description of Artificial Sequence: Synthetic oligonucleotide
ugugccacuuccuggacug

SEQ ID NO: 2723076 - RNA, 19 nt, Artificial Sequence
  Description of Artificial Sequence: Synthetic oligonucleotide
ugaguuugcggcuggggcc

SEQ ID NO: 2723077 - RNA, 19 nt, Artificial Sequence
  Description of Artificial Sequence: Synthetic oligonucleotide
accaacuugggcuucacaa

SEQ ID NO: 2723078 - RNA, 19 nt, Artificial Sequence
  Description of Artificial Sequence: Synthetic oligonucleotide
agauucguaucuuugugau

SEQ ID NO: 2723079 - RNA, 19 nt, Artificial Sequence
  Description of Artificial Sequence: Synthetic oligonucleotide
cuucacacuggaagaaacc

SEQ ID NO: 2723080 - RNA, 19 nt, Artificial Sequence
  Description of Artificial Sequence: Synthetic oligonucleotide
uggaagaaaccuuuucuau

SEQ ID NO: 2723081 - RNA, 19 nt, Artificial Sequence
  Description of Artificial Sequence: Synthetic oligonucleotide
ucuauggggucuucacagg

SEQ ID NO: 2723082 - RNA, 19 nt, Artificial Sequence
  Description of Artificial Sequence: Synthetic oligonucleotide
aucgagguuucuugaugcc

SEQ ID NO: 2723083 - RNA, 19 nt, Artificial Sequence
  Description of Artificial Sequence: Synthetic oligonucleotide
acuaggucuugcuucaagu

SEQ ID NO: 2723084 - RNA, 19 nt, Artificial Sequence
  Description of Artificial Sequence: Synthetic oligonucleotide
cucugccuugguuugaacc

SEQ ID NO: 2723085 - RNA, 19 nt, Artificial Sequence
  Description of Artificial Sequence: Synthetic oligonucleotide
ugaaccuugggcuuugguu

SEQ ID NO: 2723086 - RNA, 19 nt, Artificial Sequence
  Description of Artificial Sequence: Synthetic oligonucleotide
aagcgcauguuccucagaa

SEQ ID NO: 2723087 - RNA, 19 nt, Artificial Sequence
  Description of Artificial Sequence: Synthetic oligonucleotide
ugugaucgagguuucuuga

SEQ ID NO: 2723088 - RNA, 19 nt, Artificial Sequence
  Description of Artificial Sequence: Synthetic oligonucleotide
uucacacuggaagaaaccu

SEQ ID NO: 2723089 - RNA, 19 nt, Artificial Sequence
  Description of Artificial Sequence: Synthetic oligonucleotide
ucuuguuguguuucuuggc

SEQ ID NO: 2723090 - RNA, 19 nt, Artificial Sequence
  Description of Artificial Sequence: Synthetic oligonucleotide
acagggcaugaucaccugc

SEQ ID NO: 2723091 - RNA, 19 nt, Artificial Sequence
  Description of Artificial Sequence: Synthetic oligonucleotide
cuauggggucuucacaggg

SEQ ID NO: 2723092 - RNA, 19 nt, Artificial Sequence
  Description of Artificial Sequence: Synthetic oligonucleotide
gaaacuuggggucgacccc

SEQ ID NO: 2723093 - RNA, 19 nt, Artificial Sequence
  Description of Artificial Sequence: Synthetic oligonucleotide
uugaugccauuucugugcc

SEQ ID NO: 2723094 - RNA, 19 nt, Artificial Sequence
  Description of Artificial Sequence: Synthetic oligonucleotide
gagauucguaucuuuguga

SEQ ID NO: 2723095 - RNA, 19 nt, Artificial Sequence
  Description of Artificial Sequence: Synthetic oligonucleotide
ggaagaaaccuuuucuaug

SEQ ID NO: 2723096 - RNA, 19 nt, Artificial Sequence
  Description of Artificial Sequence: Synthetic oligonucleotide
cuuggcaaagcgcauguuc

SEQ ID NO: 2723097 - RNA, 19 nt, Artificial Sequence
  Description of Artificial Sequence: Synthetic oligonucleotide
guagcuucuaauccgcuuc

SEQ ID NO: 2723098 - RNA, 19 nt, Artificial Sequence
  Description of Artificial Sequence: Synthetic oligonucleotide
ugcagauagcguguaggcg

SEQ ID NO: 2723099 - RNA, 19 nt, Artificial Sequence
  Description of Artificial Sequence: Synthetic oligonucleotide
gagccugcgacccuuggcc

SEQ ID NO: 2723100 - RNA, 19 nt, Artificial Sequence
  Description of Artificial Sequence: Synthetic oligonucleotide
uuugggaaccugagcagga

SEQ ID NO: 2723101 - RNA, 19 nt, Artificial Sequence
  Description of Artificial Sequence: Synthetic oligonucleotide
aggcggcugaguuugcggc

SEQ ID NO: 2723102 - RNA, 19 nt, Artificial Sequence
  Description of Artificial Sequence: Synthetic oligonucleotide
gaugccauuucugugccac

SEQ ID NO: 2723103 - RNA, 19 nt, Artificial Sequence
  Description of Artificial Sequence: Synthetic oligonucleotide
uccucagaaacuugggguc

SEQ ID NO: 2723104 - RNA, 19 nt, Artificial Sequence
  Description of Artificial Sequence: Synthetic oligonucleotide
uuaagagauucguaucuuu

SEQ ID NO: 2723105 - RNA, 19 nt, Artificial Sequence
  Description of Artificial Sequence: Synthetic oligonucleotide
auguuccucagaaacuugg

SEQ ID NO: 2723106 - RNA, 19 nt, Artificial Sequence
  Description of Artificial Sequence: Synthetic oligonucleotide
cugcagauagcguguaggc

SEQ ID NO: 2723107 - RNA, 19 nt, Artificial Sequence
  Description of Artificial Sequence: Synthetic oligonucleotide
cuuugggaaccugagcagg

SEQ ID NO: 2723108 - RNA, 19 nt, Artificial Sequence
  Description of Artificial Sequence: Synthetic oligonucleotide
cuucgcauuguuugccugc

SEQ ID NO: 2723109 - RNA, 19 nt, Artificial Sequence
  Description of Artificial Sequence: Synthetic oligonucleotide
uaggucuugcuucaaguuu

SEQ ID NO: 2723110 - RNA, 19 nt, Artificial Sequence
  Description of Artificial Sequence: Synthetic oligonucleotide
cuuugguuggcagagccug

SEQ ID NO: 2723111 - RNA, 19 nt, Artificial Sequence
  Description of Artificial Sequence: Synthetic oligonucleotide
aaccuuuucuauggggucu

SEQ ID NO: 2723112 - RNA, 19 nt, Artificial Sequence
  Description of Artificial Sequence: Synthetic oligonucleotide
guaucuuugugaucgaggu

SEQ ID NO: 2723113 - RNA, 19 nt, Artificial Sequence
  Description of Artificial Sequence: Synthetic oligonucleotide
ccauguagcuucuaauccg

SEQ ID NO: 2723114 - RNA, 19 nt, Artificial Sequence
  Description of Artificial Sequence: Synthetic oligonucleotide
cuuggggugagcaaugaaa

SEQ ID NO: 2723115 - RNA, 19 nt, Artificial Sequence
  Description of Artificial Sequence: Synthetic oligonucleotide
augaaagcaaggcggcuga

SEQ ID NO: 2723116 - RNA, 19 nt, Artificial Sequence
  Description of Artificial Sequence: Synthetic oligonucleotide
agcaaggcggcugaguuug

SEQ ID NO: 2723117 - RNA, 19 nt, Artificial Sequence
  Description of Artificial Sequence: Synthetic oligonucleotide
ugcuucaaguuuauuugua

SEQ ID NO: 2723118 - RNA, 19 nt, Artificial Sequence
  Description of Artificial Sequence: Synthetic oligonucleotide
gaaaccuuuucuauggggu

SEQ ID NO: 2723119 - RNA, 19 nt, Artificial Sequence
  Description of Artificial Sequence: Synthetic oligonucleotide
ugggaaccugagcaggagc

SEQ ID NO: 2723120 - RNA, 19 nt, Artificial Sequence
  Description of Artificial Sequence: Synthetic oligonucleotide
ucaccugcagauagcgugu

SEQ ID NO: 2723121 - RNA, 19 nt, Artificial Sequence
  Description of Artificial Sequence: Synthetic oligonucleotide
aauccgcuucccaagcuug

SEQ ID NO: 2723122 - RNA, 19 nt, Artificial Sequence
  Description of Artificial Sequence: Synthetic oligonucleotide
acucauggccuucgcauug

SEQ ID NO: 2723123 - RNA, 19 nt, Artificial Sequence
  Description of Artificial Sequence: Synthetic oligonucleotide
uuugguuggcagagccugc

SEQ ID NO: 2723124 - RNA, 19 nt, Artificial Sequence
  Description of Artificial Sequence: Synthetic oligonucleotide
gccauguagcuucuaaucc

SEQ ID NO: 2723125 - RNA, 19 nt, Artificial Sequence
  Description of Artificial Sequence: Synthetic oligonucleotide
uggggugagcaaugaaagc

SEQ ID NO: 2723126 - RNA, 19 nt, Artificial Sequence
  Description of Artificial Sequence: Synthetic oligonucleotide
cuucaggccuuucuuguug

SEQ ID NO: 2723127 - RNA, 19 nt, Artificial Sequence
  Description of Artificial Sequence: Synthetic oligonucleotide
uugguuggcagagccugcg

SEQ ID NO: 2723128 - RNA, 19 nt, Artificial Sequence
  Description of Artificial Sequence: Synthetic oligonucleotide
uuggcuggagccgaggccu

SEQ ID NO: 2723129 - RNA, 19 nt, Artificial Sequence
  Description of Artificial Sequence: Synthetic oligonucleotide
augaucaccugcagauagc

SEQ ID NO: 2723130 - RNA, 19 nt, Artificial Sequence
  Description of Artificial Sequence: Synthetic oligonucleotide
ggcaucuugggcuucacca

SEQ ID NO: 2723131 - RNA, 19 nt, Artificial Sequence
  Description of Artificial Sequence: Synthetic oligonucleotide
uuggcagagccugcgaccc

SEQ ID NO: 2723132 - RNA, 19 nt, Artificial Sequence
  Description of Artificial Sequence: Synthetic oligonucleotide
aagccggggccuuggcugg

SEQ ID NO: 2723133 - RNA, 19 nt, Artificial Sequence
  Description of Artificial Sequence: Synthetic oligonucleotide
ugcacucauggccuucgca

SEQ ID NO: 2723134 - RNA, 19 nt, Artificial Sequence
  Description of Artificial Sequence: Synthetic oligonucleotide
uguagcuucuaauccgcuu

SEQ ID NO: 2723135 - RNA, 19 nt, Artificial Sequence
  Description of Artificial Sequence: Synthetic oligonucleotide
gauucguaucuuugugauc

SEQ ID NO: 2723136 - RNA, 19 nt, Artificial Sequence
  Description of Artificial Sequence: Synthetic oligonucleotide
uaauccgcuucccaagcuu

SEQ ID NO: 2723137 - RNA, 19 nt, Artificial Sequence
  Description of Artificial Sequence: Synthetic oligonucleotide
uuugugaucgagguuucuu

SEQ ID NO: 2723138 - RNA, 19 nt, Artificial Sequence
  Description of Artificial Sequence: Synthetic oligonucleotide
aaaacggcacagggcauga

SEQ ID NO: 2723139 - RNA, 19 nt, Artificial Sequence
  Description of Artificial Sequence: Synthetic oligonucleotide
cugucuucacacuggaaga

SEQ ID NO: 2723140 - RNA, 19 nt, Artificial Sequence
  Description of Artificial Sequence: Synthetic oligonucleotide
ucgagguuucuugaugcca

SEQ ID NO: 2723141 - RNA, 19 nt, Artificial Sequence
  Description of Artificial Sequence: Synthetic oligonucleotide
uucaggccuuucuuguugu

SEQ ID NO: 2723142 - RNA, 19 nt, Artificial Sequence
  Description of Artificial Sequence: Synthetic oligonucleotide
ucuuugugaucgagguuuc

SEQ ID NO: 2723143 - RNA, 19 nt, Artificial Sequence
  Description of Artificial Sequence: Synthetic oligonucleotide
ucguaucuuugugaucgag

SEQ ID NO: 2723144 - RNA, 19 nt, Artificial Sequence
  Description of Artificial Sequence: Synthetic oligonucleotide
gugguucuuggacuuggcc

SEQ ID NO: 2723145 - RNA, 19 nt, Artificial Sequence
  Description of Artificial Sequence: Synthetic oligonucleotide
cuucuaauccgcuucccaa

SEQ ID NO: 2723146 - RNA, 19 nt, Artificial Sequence
  Description of Artificial Sequence: Synthetic oligonucleotide
caucuugggcuucaccaac

SEQ ID NO: 2723147 - RNA, 19 nt, Artificial Sequence
  Description of Artificial Sequence: Synthetic oligonucleotide
aaagcgcauguuccucaga

SEQ ID NO: 2723148 - RNA, 19 nt, Artificial Sequence
  Description of Artificial Sequence: Synthetic oligonucleotide
cuggaagaaaccuuuucua

SEQ ID NO: 2723149 - RNA, 19 nt, Artificial Sequence
  Description of Artificial Sequence: Synthetic oligonucleotide
caaagcgcauguuccucag

SEQ ID NO: 2723150 - RNA, 19 nt, Artificial Sequence
  Description of Artificial Sequence: Synthetic oligonucleotide
ugucuucacacuggaagaa

SEQ ID NO: 2723151 - RNA, 19 nt, Artificial Sequence
  Description of Artificial Sequence: Synthetic oligonucleotide
cacuggaagaaaccuuuuc

SEQ ID NO: 2723152 - RNA, 19 nt, Artificial Sequence
  Description of Artificial Sequence: Synthetic oligonucleotide
guguaggcgugucacacca

SEQ ID NO: 2723153 - RNA, 19 nt, Artificial Sequence
  Description of Artificial Sequence: Synthetic oligonucleotide
cuugggcuuugguuggcag

SEQ ID NO: 2723154 - RNA, 19 nt, Artificial Sequence
  Description of Artificial Sequence: Synthetic oligonucleotide
uugaaccuugggcuuuggu

SEQ ID NO: 2723155 - RNA, 19 nt, Artificial Sequence
  Description of Artificial Sequence: Synthetic oligonucleotide
agcuucuaauccgcuuccc

SEQ ID NO: 2723156 - RNA, 19 nt, Artificial Sequence
  Description of Artificial Sequence: Synthetic oligonucleotide
guguuucuuggcaaagcgc

SEQ ID NO: 2723157 - RNA, 19 nt, Artificial Sequence
  Description of Artificial Sequence: Synthetic oligonucleotide
cguaucuuugugaucgagg

SEQ ID NO: 2723158 - RNA, 19 nt, Artificial Sequence
  Description of Artificial Sequence: Synthetic oligonucleotide
gcgcauguuccucagaaac

SEQ ID NO: 2723159 - RNA, 19 nt, Artificial Sequence
  Description of Artificial Sequence: Synthetic oligonucleotide
gaguuugcggcuggggccc

SEQ ID NO: 2723160 - RNA, 19 nt, Artificial Sequence
  Description of Artificial Sequence: Synthetic oligonucleotide
auagcguguaggcguguca

SEQ ID NO: 2723161 - RNA, 19 nt, Artificial Sequence
  Description of Artificial Sequence: Synthetic oligonucleotide
uggccuucgcauuguuugc

SEQ ID NO: 2723162 - RNA, 19 nt, Artificial Sequence
  Description of Artificial Sequence: Synthetic oligonucleotide
uguaggcgugucacaccag

SEQ ID NO: 2723163 - RNA, 19 nt, Artificial Sequence
  Description of Artificial Sequence: Synthetic oligonucleotide
uucgcauuguuugccugca

SEQ ID NO: 2723164 - RNA, 19 nt, Artificial Sequence
  Description of Artificial Sequence: Synthetic oligonucleotide
uggcaaagcgcauguuccu

SEQ ID NO: 2723165 - RNA, 19 nt, Artificial Sequence
  Description of Artificial Sequence: Synthetic oligonucleotide
aacuugggcuucacaaggu

SEQ ID NO: 2723166 - RNA, 19 nt, Artificial Sequence
  Description of Artificial Sequence: Synthetic oligonucleotide
guuguguguggugugguuc

SEQ ID NO: 2723167 - RNA, 19 nt, Artificial Sequence
  Description of Artificial Sequence: Synthetic oligonucleotide
uugggaaccugagcaggag

SEQ ID NO: 2723168 - RNA, 19 nt, Artificial Sequence
  Description of Artificial Sequence: Synthetic oligonucleotide
cagauagcguguaggcgug

SEQ ID NO: 2723169 - RNA, 19 nt, Artificial Sequence
  Description of Artificial Sequence: Synthetic oligonucleotide
ggccauguagcuucuaauc

SEQ ID NO: 2723170 - RNA, 19 nt, Artificial Sequence
  Description of Artificial Sequence: Synthetic oligonucleotide
uggccauguagcuucuaau

SEQ ID NO: 2723171 - RNA, 19 nt, Artificial Sequence
  Description of Artificial Sequence: Synthetic oligonucleotide
uagcguguaggcgugucac

SEQ ID NO: 2723172 - RNA, 19 nt, Artificial Sequence
  Description of Artificial Sequence: Synthetic oligonucleotide
ggggugagcaaugaaagca

SEQ ID NO: 2723173 - RNA, 19 nt, Artificial Sequence
  Description of Artificial Sequence: Synthetic oligonucleotide
ggcuucaccaacuugggcu

SEQ ID NO: 2723174 - RNA, 19 nt, Artificial Sequence
  Description of Artificial Sequence: Synthetic oligonucleotide
acaagguccuugauggccu

SEQ ID NO: 2723175 - RNA, 19 nt, Artificial Sequence
  Description of Artificial Sequence: Synthetic oligonucleotide
cugguuguguguggugugg

SEQ ID NO: 2723176 - RNA, 19 nt, Artificial Sequence
  Description of Artificial Sequence: Synthetic oligonucleotide
ugguuugaaccuugggcuu

SEQ ID NO: 2723177 - RNA, 19 nt, Artificial Sequence
  Description of Artificial Sequence: Synthetic oligonucleotide
cuggacugguugugugugg

SEQ ID NO: 2723178 - RNA, 19 nt, Artificial Sequence
  Description of Artificial Sequence: Synthetic oligonucleotide
uccgcuucccaagcuuggg

SEQ ID NO: 2723179 - RNA, 19 nt, Artificial Sequence
  Description of Artificial Sequence: Synthetic oligonucleotide
ccaacuugggcuucacaag

SEQ ID NO: 2723180 - RNA, 19 nt, Artificial Sequence
  Description of Artificial Sequence: Synthetic oligonucleotide
cagggcaugaucaccugca

SEQ ID NO: 2723181 - RNA, 19 nt, Artificial Sequence
  Description of Artificial Sequence: Synthetic oligonucleotide
acggcacagggcaugauca

SEQ ID NO: 2723182 - RNA, 19 nt, Artificial Sequence
  Description of Artificial Sequence: Synthetic oligonucleotide
uuugaaccuugggcuuugg

SEQ ID NO: 2723183 - RNA, 19 nt, Artificial Sequence
  Description of Artificial Sequence: Synthetic oligonucleotide
aagcaaggcggcugaguuu

SEQ ID NO: 2723184 - RNA, 19 nt, Artificial Sequence
  Description of Artificial Sequence: Synthetic oligonucleotide
uucguaucuuugugaucga

SEQ ID NO: 2723185 - RNA, 19 nt, Artificial Sequence
  Description of Artificial Sequence: Synthetic oligonucleotide
caccuuugggaaccugagc

SEQ ID NO: 2723186 - RNA, 19 nt, Artificial Sequence
  Description of Artificial Sequence: Synthetic oligonucleotide
uggacugguuguguguggu

SEQ ID NO: 2723187 - RNA, 19 nt, Artificial Sequence
  Description of Artificial Sequence: Synthetic oligonucleotide
ccugcagauagcguguagg

SEQ ID NO: 2723188 - RNA, 19 nt, Artificial Sequence
  Description of Artificial Sequence: Synthetic oligonucleotide
auggccucugcgcgugcac

SEQ ID NO: 2723189 - RNA, 19 nt, Artificial Sequence
  Description of Artificial Sequence: Synthetic oligonucleotide
caguccaucugucuucaca

SEQ ID NO: 2723190 - RNA, 19 nt, Artificial Sequence
  Description of Artificial Sequence: Synthetic oligonucleotide
acuuccuggacugguugug

SEQ ID NO: 2723191 - RNA, 19 nt, Artificial Sequence
  Description of Artificial Sequence: Synthetic oligonucleotide
uaggcgugucacaccaguc

SEQ ID NO: 2723192 - RNA, 19 nt, Artificial Sequence
  Description of Artificial Sequence: Synthetic oligonucleotide
aagcuuggggugagcaaug

SEQ ID NO: 2723193 - RNA, 19 nt, Artificial Sequence
  Description of Artificial Sequence: Synthetic oligonucleotide
ucacaccaguccaucuguc

SEQ ID NO: 2723194 - RNA, 19 nt, Artificial Sequence
  Description of Artificial Sequence: Synthetic oligonucleotide
ucuucaggccuuucuuguu

SEQ ID NO: 2723195 - RNA, 19 nt, Artificial Sequence
  Description of Artificial Sequence: Synthetic oligonucleotide
ucugugccacuuccuggac

SEQ ID NO: 2723196 - RNA, 19 nt, Artificial Sequence
  Description of Artificial Sequence: Synthetic oligonucleotide
gcagauagcguguaggcgu

SEQ ID NO: 2723197 - RNA, 19 nt, Artificial Sequence
  Description of Artificial Sequence: Synthetic oligonucleotide
aggucuugcuucaaguuua

SEQ ID NO: 2723198 - RNA, 19 nt, Artificial Sequence
  Description of Artificial Sequence: Synthetic oligonucleotide
ucaggccuuucuuguugug

SEQ ID NO: 2723199 - RNA, 19 nt, Artificial Sequence
  Description of Artificial Sequence: Synthetic oligonucleotide
ggcaugaucaccugcagau

SEQ ID NO: 2723200 - RNA, 19 nt, Artificial Sequence
  Description of Artificial Sequence: Synthetic oligonucleotide
cagaaacuuggggucgacc

SEQ ID NO: 2723201 - RNA, 19 nt, Artificial Sequence
  Description of Artificial Sequence: Synthetic oligonucleotide
accugcagauagcguguag

SEQ ID NO: 2723202 - RNA, 19 nt, Artificial Sequence
  Description of Artificial Sequence: Synthetic oligonucleotide
aggccucugccuugguuug

SEQ ID NO: 2723203 - RNA, 19 nt, Artificial Sequence
  Description of Artificial Sequence: Synthetic oligonucleotide
ggcccuucggcaucuuggg

SEQ ID NO: 2723204 - RNA, 19 nt, Artificial Sequence
  Description of Artificial Sequence: Synthetic oligonucleotide
gauagcguguaggcguguc

SEQ ID NO: 2723205 - RNA, 19 nt, Artificial Sequence
  Description of Artificial Sequence: Synthetic oligonucleotide
ugguuggcagagccugcga

SEQ ID NO: 2723206 - RNA, 19 nt, Artificial Sequence
  Description of Artificial Sequence: Synthetic oligonucleotide
guuugaaccuugggcuuug

SEQ ID NO: 2723207 - RNA, 19 nt, Artificial Sequence
  Description of Artificial Sequence: Synthetic oligonucleotide
caaggcggcugaguuugcg

SEQ ID NO: 2723208 - RNA, 19 nt, Artificial Sequence
  Description of Artificial Sequence: Synthetic oligonucleotide
gaggccucugccuugguuu

SEQ ID NO: 2723209 - RNA, 19 nt, Artificial Sequence
  Description of Artificial Sequence: Synthetic oligonucleotide
cgacccuuggccauguagc

SEQ ID NO: 2723210 - RNA, 19 nt, Artificial Sequence
  Description of Artificial Sequence: Synthetic oligonucleotide
agcguguaggcgugucaca

SEQ ID NO: 2723211 - RNA, 19 nt, Artificial Sequence
  Description of Artificial Sequence: Synthetic oligonucleotide
cuuuucuauggggucuuca

SEQ ID NO: 2723212 - RNA, 19 nt, Artificial Sequence
  Description of Artificial Sequence: Synthetic oligonucleotide
uucccaagcuuggggugag

SEQ ID NO: 2723213 - RNA, 19 nt, Artificial Sequence
  Description of Artificial Sequence: Synthetic oligonucleotide
cuuggacuuggccaugucu

SEQ ID NO: 2723214 - RNA, 19 nt, Artificial Sequence
  Description of Artificial Sequence: Synthetic oligonucleotide
gacugguuguguguggugu

SEQ ID NO: 2723215 - RNA, 19 nt, Artificial Sequence
  Description of Artificial Sequence: Synthetic oligonucleotide
cccuuaagagauucguauc

SEQ ID NO: 2723216 - RNA, 19 nt, Artificial Sequence
  Description of Artificial Sequence: Synthetic oligonucleotide
agcgcauguuccucagaaa

SEQ ID NO: 2723217 - RNA, 19 nt, Artificial Sequence
  Description of Artificial Sequence: Synthetic oligonucleotide
ccuugguuugaaccuuggg

SEQ ID NO: 2723218 - RNA, 19 nt, Artificial Sequence
  Description of Artificial Sequence: Synthetic oligonucleotide
uucggcaucuugggcuuca

SEQ ID NO: 2723219 - RNA, 19 nt, Artificial Sequence
  Description of Artificial Sequence: Synthetic oligonucleotide
ucagaaacuuggggucgac

SEQ ID NO: 2723220 - RNA, 19 nt, Artificial Sequence
  Description of Artificial Sequence: Synthetic oligonucleotide
gcgacccuuggccauguag

SEQ ID NO: 2723221 - RNA, 19 nt, Artificial Sequence
  Description of Artificial Sequence: Synthetic oligonucleotide
uugcggcuggggcccuucg

SEQ ID NO: 2723222 - RNA, 19 nt, Artificial Sequence
  Description of Artificial Sequence: Synthetic oligonucleotide
gucuucacaggggccuggg

SEQ ID NO: 2723223 - RNA, 19 nt, Artificial Sequence
  Description of Artificial Sequence: Synthetic oligonucleotide
gggcccuucggcaucuugg

SEQ ID NO: 2723224 - RNA, 19 nt, Artificial Sequence
  Description of Artificial Sequence: Synthetic oligonucleotide
gcuucuaauccgcuuccca

SEQ ID NO: 2723225 - RNA, 19 nt, Artificial Sequence
  Description of Artificial Sequence: Synthetic oligonucleotide
auccgcuucccaagcuugg

SEQ ID NO: 2723226 - RNA, 19 nt, Artificial Sequence
  Description of Artificial Sequence: Synthetic oligonucleotide
guaggcgugucacaccagu

SEQ ID NO: 2723227 - RNA, 19 nt, Artificial Sequence
  Description of Artificial Sequence: Synthetic oligonucleotide
gcauuguuugccugcaucu

SEQ ID NO: 2723228 - RNA, 19 nt, Artificial Sequence
  Description of Artificial Sequence: Synthetic oligonucleotide
gcaaagcgcauguuccuca

SEQ ID NO: 2723229 - RNA, 19 nt, Artificial Sequence
  Description of Artificial Sequence: Synthetic oligonucleotide
accuugggcuuugguuggc

SEQ ID NO: 2723230 - RNA, 19 nt, Artificial Sequence
  Description of Artificial Sequence: Synthetic oligonucleotide
ccucagaaacuuggggucg

SEQ ID NO: 2723231 - RNA, 19 nt, Artificial Sequence
  Description of Artificial Sequence: Synthetic oligonucleotide
cugcgcgugcacucauggc

SEQ ID NO: 2723232 - RNA, 19 nt, Artificial Sequence
  Description of Artificial Sequence: Synthetic oligonucleotide
gacccuuggccauguagcu

SEQ ID NO: 2723233 - RNA, 19 nt, Artificial Sequence
  Description of Artificial Sequence: Synthetic oligonucleotide
ggcgugucacaccagucca

SEQ ID NO: 2723234 - RNA, 19 nt, Artificial Sequence
  Description of Artificial Sequence: Synthetic oligonucleotide
gcuucccaagcuuggggug

SEQ ID NO: 2723235 - RNA, 19 nt, Artificial Sequence
  Description of Artificial Sequence: Synthetic oligonucleotide
ccuuaagagauucguaucu

SEQ ID NO: 2723236 - RNA, 19 nt, Artificial Sequence
  Description of Artificial Sequence: Synthetic oligonucleotide
gguucuuggacuuggccau

SEQ ID NO: 2723237 - RNA, 19 nt, Artificial Sequence
  Description of Artificial Sequence: Synthetic oligonucleotide
cagagccugcgacccuugg

SEQ ID NO: 2723238 - RNA, 19 nt, Artificial Sequence
  Description of Artificial Sequence: Synthetic oligonucleotide
gaaagcaaggcggcugagu

SEQ ID NO: 2723239 - RNA, 19 nt, Artificial Sequence
  Description of Artificial Sequence: Synthetic oligonucleotide
agccugcgacccuuggcca

SEQ ID NO: 2723240 - RNA, 19 nt, Artificial Sequence
  Description of Artificial Sequence: Synthetic oligonucleotide
cuucccaagcuugggguga

SEQ ID NO: 2723241 - RNA, 19 nt, Artificial Sequence
  Description of Artificial Sequence: Synthetic oligonucleotide
cuaggucuugcuucaaguu

SEQ ID NO: 2723242 - RNA, 19 nt, Artificial Sequence
  Description of Artificial Sequence: Synthetic oligonucleotide
caagguccuugauggccuc

SEQ ID NO: 2723243 - RNA, 19 nt, Artificial Sequence
  Description of Artificial Sequence: Synthetic oligonucleotide
ugauggccucugcgcgugc

SEQ ID NO: 2723244 - RNA, 19 nt, Artificial Sequence
  Description of Artificial Sequence: Synthetic oligonucleotide
gucuucacacuggaagaaa

SEQ ID NO: 2723245 - RNA, 19 nt, Artificial Sequence
  Description of Artificial Sequence: Synthetic oligonucleotide
cucugcgcgugcacucaug

SEQ ID NO: 2723246 - RNA, 19 nt, Artificial Sequence
  Description of Artificial Sequence: Synthetic oligonucleotide
ucgcauuguuugccugcau

SEQ ID NO: 2723247 - RNA, 19 nt, Artificial Sequence
  Description of Artificial Sequence: Synthetic oligonucleotide
ggcaccuuugggaaccuga

SEQ ID NO: 2723248 - RNA, 19 nt, Artificial Sequence
  Description of Artificial Sequence: Synthetic oligonucleotide
ucaccaacuugggcuucac

SEQ ID NO: 2723249 - RNA, 19 nt, Artificial Sequence
  Description of Artificial Sequence: Synthetic oligonucleotide
agcuuggggugagcaauga

SEQ ID NO: 2723250 - RNA, 19 nt, Artificial Sequence
  Description of Artificial Sequence: Synthetic oligonucleotide
caagcuuggggugagcaau

SEQ ID NO: 2723251 - RNA, 19 nt, Artificial Sequence
  Description of Artificial Sequence: Synthetic oligonucleotide
ggacugguuguguguggug

SEQ ID NO: 2723252 - RNA, 19 nt, Artificial Sequence
  Description of Artificial Sequence: Synthetic oligonucleotide
uggccucugcgcgugcacu

SEQ ID NO: 2723253 - RNA, 19 nt, Artificial Sequence
  Description of Artificial Sequence: Synthetic oligonucleotide
cucagaaacuuggggucga

SEQ ID NO: 2723254 - RNA, 19 nt, Artificial Sequence
  Description of Artificial Sequence: Synthetic oligonucleotide
agccgaggccucugccuug

SEQ ID NO: 2723255 - RNA, 19 nt, Artificial Sequence
  Description of Artificial Sequence: Synthetic oligonucleotide
gugaucgagguuucuugau

SEQ ID NO: 2723256 - RNA, 19 nt, Artificial Sequence
  Description of Artificial Sequence: Synthetic oligonucleotide
gggcuucaccaacuugggc

SEQ ID NO: 2723257 - RNA, 19 nt, Artificial Sequence
  Description of Artificial Sequence: Synthetic oligonucleotide
cacaccaguccaucugucu

SEQ ID NO: 2723258 - RNA, 19 nt, Artificial Sequence
  Description of Artificial Sequence: Synthetic oligonucleotide
ccuucgcauuguuugccug

SEQ ID NO: 2723259 - RNA, 19 nt, Artificial Sequence
  Description of Artificial Sequence: Synthetic oligonucleotide
gggugagcaaugaaagcaa

SEQ ID NO: 2723260 - RNA, 19 nt, Artificial Sequence
  Description of Artificial Sequence: Synthetic oligonucleotide
gcggcuggggcccuucggc

SEQ ID NO: 2723261 - RNA, 19 nt, Artificial Sequence
  Description of Artificial Sequence: Synthetic oligonucleotide
gcguguaggcgugucacac

SEQ ID NO: 2723262 - RNA, 19 nt, Artificial Sequence
  Description of Artificial Sequence: Synthetic oligonucleotide
ggccuucgcauuguuugcc

SEQ ID NO: 2723263 - RNA, 19 nt, Artificial Sequence
  Description of Artificial Sequence: Synthetic oligonucleotide
cuuaagagauucguaucuu

SEQ ID NO: 2723264 - RNA, 19 nt, Artificial Sequence
  Description of Artificial Sequence: Synthetic oligonucleotide
gcacucauggccuucgcau

SEQ ID NO: 2723265 - RNA, 19 nt, Artificial Sequence
  Description of Artificial Sequence: Synthetic oligonucleotide
cuaauccgcuucccaagcu

SEQ ID NO: 2723266 - RNA, 19 nt, Artificial Sequence
  Description of Artificial Sequence: Synthetic oligonucleotide
cgcauuguuugccugcauc

SEQ ID NO: 2723267 - RNA, 19 nt, Artificial Sequence
  Description of Artificial Sequence: Synthetic oligonucleotide
uuugcggcuggggcccuuc

SEQ ID NO: 2723268 - RNA, 19 nt, Artificial Sequence
  Description of Artificial Sequence: Synthetic oligonucleotide
ccgcuucccaagcuugggg

SEQ ID NO: 2723269 - RNA, 19 nt, Artificial Sequence
  Description of Artificial Sequence: Synthetic oligonucleotide
aaacggcacagggcaugau

SEQ ID NO: 2723270 - RNA, 19 nt, Artificial Sequence
  Description of Artificial Sequence: Synthetic oligonucleotide
ggcaaagcgcauguuccuc

SEQ ID NO: 2723271 - RNA, 19 nt, Artificial Sequence
  Description of Artificial Sequence: Synthetic oligonucleotide
ggucuucacaggggccugg

SEQ ID NO: 2723272 - RNA, 19 nt, Artificial Sequence
  Description of Artificial Sequence: Synthetic oligonucleotide
ggugugguucuuggacuug

SEQ ID NO: 2723273 - RNA, 19 nt, Artificial Sequence
  Description of Artificial Sequence: Synthetic oligonucleotide
agauagcguguaggcgugu

SEQ ID NO: 2723274 - RNA, 19 nt, Artificial Sequence
  Description of Artificial Sequence: Synthetic oligonucleotide
cguguaggcgugucacacc

SEQ ID NO: 2723275 - RNA, 19 nt, Artificial Sequence
  Description of Artificial Sequence: Synthetic oligonucleotide
uguguguggugugguucuu

SEQ ID NO: 2723276 - RNA, 19 nt, Artificial Sequence
  Description of Artificial Sequence: Synthetic oligonucleotide
ccccuuaagagauucguau

SEQ ID NO: 2723277 - RNA, 19 nt, Artificial Sequence
  Description of Artificial Sequence: Synthetic oligonucleotide
gugccacuuccuggacugg

SEQ ID NO: 2723278 - RNA, 19 nt, Artificial Sequence
  Description of Artificial Sequence: Synthetic oligonucleotide
caccaacuugggcuucaca

SEQ ID NO: 2723279 - RNA, 19 nt, Artificial Sequence
  Description of Artificial Sequence: Synthetic oligonucleotide
aucugucuucacacuggaa

SEQ ID NO: 2723280 - RNA, 19 nt, Artificial Sequence
  Description of Artificial Sequence: Synthetic oligonucleotide
gccugggcaccuuugggaa

SEQ ID NO: 2723281 - RNA, 19 nt, Artificial Sequence
  Description of Artificial Sequence: Synthetic oligonucleotide
uggcuggagccgaggccuc

SEQ ID NO: 2723282 - RNA, 19 nt, Artificial Sequence
  Description of Artificial Sequence: Synthetic oligonucleotide
ucggcaucuugggcuucac

SEQ ID NO: 2723283 - RNA, 19 nt, Artificial Sequence
  Description of Artificial Sequence: Synthetic oligonucleotide
caaugaaagcaaggcggcu

SEQ ID NO: 2723284 - RNA, 19 nt, Artificial Sequence
  Description of Artificial Sequence: Synthetic oligonucleotide
gcauguuccucagaaacuu

SEQ ID NO: 2723285 - RNA, 19 nt, Artificial Sequence
  Description of Artificial Sequence: Synthetic oligonucleotide
gagccgaggccucugccuu

SEQ ID NO: 2723286 - RNA, 19 nt, Artificial Sequence
  Description of Artificial Sequence: Synthetic oligonucleotide
cgugcacucauggccuucg

SEQ ID NO: 2723287 - RNA, 19 nt, Artificial Sequence
  Description of Artificial Sequence: Synthetic oligonucleotide
ggcugaguuugcggcuggg

SEQ ID NO: 2723288 - RNA, 19 nt, Artificial Sequence
  Description of Artificial Sequence: Synthetic oligonucleotide
ggagccgaggccucugccu

SEQ ID NO: 2723289 - RNA, 19 nt, Artificial Sequence
  Description of Artificial Sequence: Synthetic oligonucleotide
gcccuucggcaucuugggc

SEQ ID NO: 2723290 - RNA, 19 nt, Artificial Sequence
  Description of Artificial Sequence: Synthetic oligonucleotide
gccgaggccucugccuugg

SEQ ID NO: 2723291 - RNA, 19 nt, Artificial Sequence
  Description of Artificial Sequence: Synthetic oligonucleotide
ccugggcaccuuugggaac

SEQ ID NO: 2723292 - RNA, 19 nt, Artificial Sequence
  Description of Artificial Sequence: Synthetic oligonucleotide
cugugccacuuccuggacu

SEQ ID NO: 2723293 - RNA, 19 nt, Artificial Sequence
  Description of Artificial Sequence: Synthetic oligonucleotide
gcggcugaguuugcggcug

SEQ ID NO: 2723294 - RNA, 19 nt, Artificial Sequence
  Description of Artificial Sequence: Synthetic oligonucleotide
gcacagggcaugaucaccu

SEQ ID NO: 2723295 - RNA, 19 nt, Artificial Sequence
  Description of Artificial Sequence: Synthetic oligonucleotide
gcuuggggugagcaaugaa

SEQ ID NO: 2723296 - RNA, 19 nt, Artificial Sequence
  Description of Artificial Sequence: Synthetic oligonucleotide
ggggcccuucggcaucuug

SEQ ID NO: 2723297 - RNA, 19 nt, Artificial Sequence
  Description of Artificial Sequence: Synthetic oligonucleotide
cacucauggccuucgcauu

SEQ ID NO: 2723298 - RNA, 19 nt, Artificial Sequence
  Description of Artificial Sequence: Synthetic oligonucleotide
ggccucugcgcgugcacuc

SEQ ID NO: 2723299 - RNA, 19 nt, Artificial Sequence
  Description of Artificial Sequence: Synthetic oligonucleotide
cauggccuucgcauuguuu

SEQ ID NO: 2723300 - RNA, 19 nt, Artificial Sequence
  Description of Artificial Sequence: Synthetic oligonucleotide
cauuguuugccugcaucuu

SEQ ID NO: 2723301 - RNA, 19 nt, Artificial Sequence
  Description of Artificial Sequence: Synthetic oligonucleotide
cuuugugaucgagguuucu

SEQ ID NO: 2723302 - RNA, 19 nt, Artificial Sequence
  Description of Artificial Sequence: Synthetic oligonucleotide
cuucggcaucuugggcuuc

SEQ ID NO: 2723303 - RNA, 19 nt, Artificial Sequence
  Description of Artificial Sequence: Synthetic oligonucleotide
gggucuucacaggggccug

SEQ ID NO: 2723304 - RNA, 19 nt, Artificial Sequence
  Description of Artificial Sequence: Synthetic oligonucleotide
ccaagcuuggggugagcaa

SEQ ID NO: 2723305 - RNA, 19 nt, Artificial Sequence
  Description of Artificial Sequence: Synthetic oligonucleotide
cgugucacaccaguccauc

SEQ ID NO: 2723306 - RNA, 19 nt, Artificial Sequence
  Description of Artificial Sequence: Synthetic oligonucleotide
ugcgacccuuggccaugua

SEQ ID NO: 2723307 - RNA, 19 nt, Artificial Sequence
  Description of Artificial Sequence: Synthetic oligonucleotide
ccucugccuugguuugaac

SEQ ID NO: 2723308 - RNA, 19 nt, Artificial Sequence
  Description of Artificial Sequence: Synthetic oligonucleotide
aguuugcggcuggggcccu

SEQ ID NO: 2723309 - RNA, 19 nt, Artificial Sequence
  Description of Artificial Sequence: Synthetic oligonucleotide
gccuucgcauuguuugccu

SEQ ID NO: 2723310 - RNA, 19 nt, Artificial Sequence
  Description of Artificial Sequence: Synthetic oligonucleotide
gguuugaaccuugggcuuu

SEQ ID NO: 2723311 - RNA, 19 nt, Artificial Sequence
  Description of Artificial Sequence: Synthetic oligonucleotide
cucauggccuucgcauugu

SEQ ID NO: 2723312 - RNA, 19 nt, Artificial Sequence
  Description of Artificial Sequence: Synthetic oligonucleotide
gguuguguguggugugguu

SEQ ID NO: 2723313 - RNA, 19 nt, Artificial Sequence
  Description of Artificial Sequence: Synthetic oligonucleotide
gggcuuugguuggcagagc

SEQ ID NO: 2723314 - RNA, 19 nt, Artificial Sequence
  Description of Artificial Sequence: Synthetic oligonucleotide
gcaugaucaccugcagaua

SEQ ID NO: 2723315 - RNA, 19 nt, Artificial Sequence
  Description of Artificial Sequence: Synthetic oligonucleotide
ccugcgacccuuggccaug

SEQ ID NO: 2723316 - RNA, 19 nt, Artificial Sequence
  Description of Artificial Sequence: Synthetic oligonucleotide
gcuuugguuggcagagccu

SEQ ID NO: 2723317 - RNA, 19 nt, Artificial Sequence
  Description of Artificial Sequence: Synthetic oligonucleotide
gcagagccugcgacccuug

SEQ ID NO: 2723318 - RNA, 19 nt, Artificial Sequence
  Description of Artificial Sequence: Synthetic oligonucleotide
cggcacagggcaugaucac

SEQ ID NO: 2723319 - RNA, 19 nt, Artificial Sequence
  Description of Artificial Sequence: Synthetic oligonucleotide
cugccuugguuugaaccuu

SEQ ID NO: 2723320 - RNA, 19 nt, Artificial Sequence
  Description of Artificial Sequence: Synthetic oligonucleotide
caccugcagauagcgugua

SEQ ID NO: 2723321 - RNA, 19 nt, Artificial Sequence
  Description of Artificial Sequence: Synthetic oligonucleotide
gccucugccuugguuugaa

SEQ ID NO: 2723322 - RNA, 19 nt, Artificial Sequence
  Description of Artificial Sequence: Synthetic oligonucleotide
gcaaggcggcugaguuugc

SEQ ID NO: 2723323 - RNA, 19 nt, Artificial Sequence
  Description of Artificial Sequence: Synthetic oligonucleotide
ggucuugcuucaaguuuau

SEQ ID NO: 2723324 - RNA, 19 nt, Artificial Sequence
  Description of Artificial Sequence: Synthetic oligonucleotide
cgcuucccaagcuuggggu

SEQ ID NO: 2723325 - RNA, 19 nt, Artificial Sequence
  Description of Artificial Sequence: Synthetic oligonucleotide
cggcugaguuugcggcugg

SEQ ID NO: 2723326 - RNA, 19 nt, Artificial Sequence
  Description of Artificial Sequence: Synthetic oligonucleotide
gcgcgugcacucauggccu

SEQ ID NO: 2723327 - RNA, 19 nt, Artificial Sequence
  Description of Artificial Sequence: Synthetic oligonucleotide
ccggggccuuggcuggagc

SEQ ID NO: 2723328 - RNA, 19 nt, Artificial Sequence
  Description of Artificial Sequence: Synthetic oligonucleotide
ccuugggcuuugguuggca

SEQ ID NO: 2723329 - RNA, 19 nt, Artificial Sequence
  Description of Artificial Sequence: Synthetic oligonucleotide
agccggggccuuggcugga

SEQ ID NO: 2723330 - RNA, 19 nt, Artificial Sequence
  Description of Artificial Sequence: Synthetic oligonucleotide
gcgugcacucauggccuuc

SEQ ID NO: 2723331 - RNA, 19 nt, Artificial Sequence
  Description of Artificial Sequence: Synthetic oligonucleotide
gccggggccuuggcuggag

SEQ ID NO: 2723332 - RNA, 19 nt, Artificial Sequence
  Description of Artificial Sequence: Synthetic oligonucleotide
ggcagagccugcgacccuu

SEQ ID NO: 2723333 - RNA, 19 nt, Artificial Sequence
  Description of Artificial Sequence: Synthetic oligonucleotide
gccugcgacccuuggccau

SEQ ID NO: 2723334 - RNA, 19 nt, Artificial Sequence
  Description of Artificial Sequence: Synthetic oligonucleotide
gccacuuccuggacugguu

SEQ ID NO: 2723335 - RNA, 19 nt, Artificial Sequence
  Description of Artificial Sequence: Synthetic oligonucleotide
cugcgacccuuggccaugu

SEQ ID NO: 2723336 - RNA, 19 nt, Artificial Sequence
  Description of Artificial Sequence: Synthetic oligonucleotide
uggggcccuucggcaucuu

SEQ ID NO: 2723337 - RNA, 19 nt, Artificial Sequence
  Description of Artificial Sequence: Synthetic oligonucleotide
gcgugucacaccaguccau

SEQ ID NO: 2723338 - RNA, 19 nt, Artificial Sequence
  Description of Artificial Sequence: Synthetic oligonucleotide
guuugcggcuggggcccuu

SEQ ID NO: 2723339 - RNA, 19 nt, Artificial Sequence
  Description of Artificial Sequence: Synthetic oligonucleotide
ccucugcgcgugcacucau

SEQ ID NO: 2723340 - RNA, 19 nt, Artificial Sequence
  Description of Artificial Sequence: Synthetic oligonucleotide
cgaggccucugccuugguu

SEQ ID NO: 2723341 - RNA, 19 nt, Artificial Sequence
  Description of Artificial Sequence: Synthetic oligonucleotide
cgcgugcacucauggccuu

SEQ ID NO: 2723342 - RNA, 19 nt, Artificial Sequence
  Description of Artificial Sequence: Synthetic oligonucleotide
ccgaggccucugccuuggu

SEQ ID NO: 2723343 - RNA, 19 nt, Artificial Sequence
  Description of Artificial Sequence: Synthetic oligonucleotide
uuuauuuuaaauaucaucu

SEQ ID NO: 2723344 - RNA, 19 nt, Artificial Sequence
  Description of Artificial Sequence: Synthetic oligonucleotide
agaacaauaagcuagcccg

SEQ ID NO: 2723345 - RNA, 19 nt, Artificial Sequence
  Description of Artificial Sequence: Synthetic oligonucleotide
uuaaauaucaucuacuaca

SEQ ID NO: 2723346 - RNA, 19 nt, Artificial Sequence
  Description of Artificial Sequence: Synthetic oligonucleotide
uuauuuauaauaaagguaa

SEQ ID NO: 2723347 - RNA, 19 nt, Artificial Sequence
  Description of Artificial Sequence: Synthetic oligonucleotide
aauaaagguaaagaaaggc

SEQ ID NO: 2723348 - RNA, 19 nt, Artificial Sequence
  Description of Artificial Sequence: Synthetic oligonucleotide
aauaucaucuacuacaaga

SEQ ID NO: 2723349 - RNA, 19 nt, Artificial Sequence
  Description of Artificial Sequence: Synthetic oligonucleotide
ucuaaacuaaauaagagac

SEQ ID NO: 2723350 - RNA, 19 nt, Artificial Sequence
  Description of Artificial Sequence: Synthetic oligonucleotide
aagauaccaaguuauaaac

SEQ ID NO: 2723351 - RNA, 19 nt, Artificial Sequence
  Description of Artificial Sequence: Synthetic oligonucleotide
aaguuauaaacauaacagg

SEQ ID NO: 2723352 - RNA, 19 nt, Artificial Sequence
  Description of Artificial Sequence: Synthetic oligonucleotide
caaguuauaaacauaacag

SEQ ID NO: 2723353 - RNA, 19 nt, Artificial Sequence
  Description of Artificial Sequence: Synthetic oligonucleotide
agacagaaaacauauauuc

SEQ ID NO: 2723354 - RNA, 19 nt, Artificial Sequence
  Description of Artificial Sequence: Synthetic oligonucleotide
ucuacuacaagauaccaag

SEQ ID NO: 2723355 - RNA, 19 nt, Artificial Sequence
  Description of Artificial Sequence: Synthetic oligonucleotide
ugaagaauuagauagcuga

SEQ ID NO: 2723356 - RNA, 19 nt, Artificial Sequence
  Description of Artificial Sequence: Synthetic oligonucleotide
aaugugaugauccauaauu

SEQ ID NO: 2723357 - RNA, 19 nt, Artificial Sequence
  Description of Artificial Sequence: Synthetic oligonucleotide
auaauaaagguaaagaaag

SEQ ID NO: 2723358 - RNA, 19 nt, Artificial Sequence
  Description of Artificial Sequence: Synthetic oligonucleotide
uuuauaauaaagguaaaga

SEQ ID NO: 2723359 - RNA, 19 nt, Artificial Sequence
  Description of Artificial Sequence: Synthetic oligonucleotide
aaaacauauauuccaaccu

SEQ ID NO: 2723360 - RNA, 19 nt, Artificial Sequence
  Description of Artificial Sequence: Synthetic oligonucleotide
agaauuagauagcugacac

SEQ ID NO: 2723361 - RNA, 19 nt, Artificial Sequence
  Description of Artificial Sequence: Synthetic oligonucleotide
uuuauuuauaauaaaggua

SEQ ID NO: 2723362 - RNA, 19 nt, Artificial Sequence
  Description of Artificial Sequence: Synthetic oligonucleotide
gaaaacauauauuccaacc

SEQ ID NO: 2723363 - RNA, 19 nt, Artificial Sequence
  Description of Artificial Sequence: Synthetic oligonucleotide
aauuagauagcugacacca

SEQ ID NO: 2723364 - RNA, 19 nt, Artificial Sequence
  Description of Artificial Sequence: Synthetic oligonucleotide
uucacagucaguuuuauac

SEQ ID NO: 2723365 - RNA, 19 nt, Artificial Sequence
  Description of Artificial Sequence: Synthetic oligonucleotide
aguuuuauacuugucaagc

SEQ ID NO: 2723366 - RNA, 19 nt, Artificial Sequence
  Description of Artificial Sequence: Synthetic oligonucleotide
ucuucuaaacuaaauaaga

SEQ ID NO: 2723367 - RNA, 19 nt, Artificial Sequence
  Description of Artificial Sequence: Synthetic oligonucleotide
uaaagaaaggcacaguaga

SEQ ID NO: 2723368 - RNA, 19 nt, Artificial Sequence
  Description of Artificial Sequence: Synthetic oligonucleotide
uuuauacuugucaagcucc

SEQ ID NO: 2723369 - RNA, 19 nt, Artificial Sequence
  Description of Artificial Sequence: Synthetic oligonucleotide
aaacauaacagguuuauuu

SEQ ID NO: 2723370 - RNA, 19 nt, Artificial Sequence
  Description of Artificial Sequence: Synthetic oligonucleotide
aaauaagagacagaaaaca

SEQ ID NO: 2723371 - RNA, 19 nt, Artificial Sequence
  Description of Artificial Sequence: Synthetic oligonucleotide
aaucuguuuucuucuaaac

SEQ ID NO: 2723372 - RNA, 19 nt, Artificial Sequence
  Description of Artificial Sequence: Synthetic oligonucleotide
cauaauuuccccaauguac

SEQ ID NO: 2723373 - RNA, 19 nt, Artificial Sequence
  Description of Artificial Sequence: Synthetic oligonucleotide
cuaaauaagagacagaaaa

SEQ ID NO: 2723374 - RNA, 19 nt, Artificial Sequence
  Description of Artificial Sequence: Synthetic oligonucleotide
uaauaaagguaaagaaagg

SEQ ID NO: 2723375 - RNA, 19 nt, Artificial Sequence
  Description of Artificial Sequence: Synthetic oligonucleotide
uuuacaaacuguuucuuca

SEQ ID NO: 2723376 - RNA, 19 nt, Artificial Sequence
  Description of Artificial Sequence: Synthetic oligonucleotide
uaagagacagaaaacauau

SEQ ID NO: 2723377 - RNA, 19 nt, Artificial Sequence
  Description of Artificial Sequence: Synthetic oligonucleotide
uucuaaacuaaauaagaga

SEQ ID NO: 2723378 - RNA, 19 nt, Artificial Sequence
  Description of Artificial Sequence: Synthetic oligonucleotide
acagaaaacauauauucca

SEQ ID NO: 2723379 - RNA, 19 nt, Artificial Sequence
  Description of Artificial Sequence: Synthetic oligonucleotide
acuuccuugauacaauuuc

SEQ ID NO: 2723380 - RNA, 19 nt, Artificial Sequence
  Description of Artificial Sequence: Synthetic oligonucleotide
uucaagacuuccuugauac

SEQ ID NO: 2723381 - RNA, 19 nt, Artificial Sequence
  Description of Artificial Sequence: Synthetic oligonucleotide
ucagguaaugcaugcaugg

SEQ ID NO: 2723382 - RNA, 19 nt, Artificial Sequence
  Description of Artificial Sequence: Synthetic oligonucleotide
aaaaccauacagcuggccu

SEQ ID NO: 2723383 - RNA, 19 nt, Artificial Sequence
  Description of Artificial Sequence: Synthetic oligonucleotide
uuauaaacauaacagguuu

SEQ ID NO: 2723384 - RNA, 19 nt, Artificial Sequence
  Description of Artificial Sequence: Synthetic oligonucleotide
aucaucuacuacaagauac

SEQ ID NO: 2723385 - RNA, 19 nt, Artificial Sequence
  Description of Artificial Sequence: Synthetic oligonucleotide
uuucauagccuuaaauuca

SEQ ID NO: 2723386 - RNA, 19 nt, Artificial Sequence
  Description of Artificial Sequence: Synthetic oligonucleotide
cuuucauagccuuaaauuc

SEQ ID NO: 2723387 - RNA, 19 nt, Artificial Sequence
  Description of Artificial Sequence: Synthetic oligonucleotide
uuuaaauaucaucuacuac

SEQ ID NO: 2723388 - RNA, 19 nt, Artificial Sequence
  Description of Artificial Sequence: Synthetic oligonucleotide
ugaugauccauaauuuccc

SEQ ID NO: 2723389 - RNA, 19 nt, Artificial Sequence
  Description of Artificial Sequence: Synthetic oligonucleotide
agaaaacauauauuccaac

SEQ ID NO: 2723390 - RNA, 19 nt, Artificial Sequence
  Description of Artificial Sequence: Synthetic oligonucleotide
agagacagaaaacauauau

SEQ ID NO: 2723391 - RNA, 19 nt, Artificial Sequence
  Description of Artificial Sequence: Synthetic oligonucleotide
acaauuucauuucuucuuc

SEQ ID NO: 2723392 - RNA, 19 nt, Artificial Sequence
  Description of Artificial Sequence: Synthetic oligonucleotide
ucuguuuucuucuaaacua

SEQ ID NO: 2723393 - RNA, 19 nt, Artificial Sequence
  Description of Artificial Sequence: Synthetic oligonucleotide
uuuuaaauaucaucuacua

SEQ ID NO: 2723394 - RNA, 19 nt, Artificial Sequence
  Description of Artificial Sequence: Synthetic oligonucleotide
gguuuauuuauaauaaagg

SEQ ID NO: 2723395 - RNA, 19 nt, Artificial Sequence
  Description of Artificial Sequence: Synthetic oligonucleotide
caugggaaugugaugaucc

SEQ ID NO: 2723396 - RNA, 19 nt, Artificial Sequence
  Description of Artificial Sequence: Synthetic oligonucleotide
uuuuauacuugucaagcuc

SEQ ID NO: 2723397 - RNA, 19 nt, Artificial Sequence
  Description of Artificial Sequence: Synthetic oligonucleotide
cugcagaacaauaagcuag

SEQ ID NO: 2723398 - RNA, 19 nt, Artificial Sequence
  Description of Artificial Sequence: Synthetic oligonucleotide
auuuauaauaaagguaaag

SEQ ID NO: 2723399 - RNA, 19 nt, Artificial Sequence
  Description of Artificial Sequence: Synthetic oligonucleotide
aaauucaugaagaauuaga

SEQ ID NO: 2723400 - RNA, 19 nt, Artificial Sequence
  Description of Artificial Sequence: Synthetic oligonucleotide
cuugauacaauuucauuuc

SEQ ID NO: 2723401 - RNA, 19 nt, Artificial Sequence
  Description of Artificial Sequence: Synthetic oligonucleotide
ucuuucauagccuuaaauu

SEQ ID NO: 2723402 - RNA, 19 nt, Artificial Sequence
  Description of Artificial Sequence: Synthetic oligonucleotide
auuuacaaacuguuucuuc

SEQ ID NO: 2723403 - RNA, 19 nt, Artificial Sequence
  Description of Artificial Sequence: Synthetic oligonucleotide
uaaauaucaucuacuacaa

SEQ ID NO: 2723404 - RNA, 19 nt, Artificial Sequence
  Description of Artificial Sequence: Synthetic oligonucleotide
aguuauaaacauaacaggu

SEQ ID NO: 2723405 - RNA, 19 nt, Artificial Sequence
  Description of Artificial Sequence: Synthetic oligonucleotide
uuagauagcugacaccaca

SEQ ID NO: 2723406 - RNA, 19 nt, Artificial Sequence
  Description of Artificial Sequence: Synthetic oligonucleotide
aaacauauauuccaaccuu

SEQ ID NO: 2723407 - RNA, 19 nt, Artificial Sequence
  Description of Artificial Sequence: Synthetic oligonucleotide
uucauuucuucuuccauug

SEQ ID NO: 2723408 - RNA, 19 nt, Artificial Sequence
  Description of Artificial Sequence: Synthetic oligonucleotide
ucaucuacuacaagauacc

SEQ ID NO: 2723409 - RNA, 19 nt, Artificial Sequence
  Description of Artificial Sequence: Synthetic oligonucleotide
cuuggagucuccuuucucg

SEQ ID NO: 2723410 - RNA, 19 nt, Artificial Sequence
  Description of Artificial Sequence: Synthetic oligonucleotide
cugacugcuggcaauauag

SEQ ID NO: 2723411 - RNA, 19 nt, Artificial Sequence
  Description of Artificial Sequence: Synthetic oligonucleotide
uucaggagacaucuuuugg

SEQ ID NO: 2723412 - RNA, 19 nt, Artificial Sequence
  Description of Artificial Sequence: Synthetic oligonucleotide
ucaguuuuauacuugucaa

SEQ ID NO: 2723413 - RNA, 19 nt, Artificial Sequence
  Description of Artificial Sequence: Synthetic oligonucleotide
aauguacugagaaagcacu

SEQ ID NO: 2723414 - RNA, 19 nt, Artificial Sequence
  Description of Artificial Sequence: Synthetic oligonucleotide
guuuauuuauaauaaaggu

SEQ ID NO: 2723415 - RNA, 19 nt, Artificial Sequence
  Description of Artificial Sequence: Synthetic oligonucleotide
uuaaauucaugaagaauua

SEQ ID NO: 2723416 - RNA, 19 nt, Artificial Sequence
  Description of Artificial Sequence: Synthetic oligonucleotide
uacaaacuguuucuucagg

SEQ ID NO: 2723417 - RNA, 19 nt, Artificial Sequence
  Description of Artificial Sequence: Synthetic oligonucleotide
uccauaauuuccccaaugu

SEQ ID NO: 2723418 - RNA, 19 nt, Artificial Sequence
  Description of Artificial Sequence: Synthetic oligonucleotide
auaggcaugcaccaccagg

SEQ ID NO: 2723419 - RNA, 19 nt, Artificial Sequence
  Description of Artificial Sequence: Synthetic oligonucleotide
agaaaggcacaguagagga

SEQ ID NO: 2723420 - RNA, 19 nt, Artificial Sequence
  Description of Artificial Sequence: Synthetic oligonucleotide
cuuaaauucaugaagaauu

SEQ ID NO: 2723421 - RNA, 19 nt, Artificial Sequence
  Description of Artificial Sequence: Synthetic oligonucleotide
aaaucuguuuucuucuaaa

SEQ ID NO: 2723422 - RNA, 19 nt, Artificial Sequence
  Description of Artificial Sequence: Synthetic oligonucleotide
aacggcuuccccugucucc

SEQ ID NO: 2723423 - RNA, 19 nt, Artificial Sequence
  Description of Artificial Sequence: Synthetic oligonucleotide
uaugaaacggcuuccccug

SEQ ID NO: 2723424 - RNA, 19 nt, Artificial Sequence
  Description of Artificial Sequence: Synthetic oligonucleotide
aagcuccuggcuaagagac

SEQ ID NO: 2723425 - RNA, 19 nt, Artificial Sequence
  Description of Artificial Sequence: Synthetic oligonucleotide
aaauaucaucuacuacaag

SEQ ID NO: 2723426 - RNA, 19 nt, Artificial Sequence
  Description of Artificial Sequence: Synthetic oligonucleotide
ucuccuuucucguucaaga

SEQ ID NO: 2723427 - RNA, 19 nt, Artificial Sequence
  Description of Artificial Sequence: Synthetic oligonucleotide
aauaagcuagcccgggacu

SEQ ID NO: 2723428 - RNA, 19 nt, Artificial Sequence
  Description of Artificial Sequence: Synthetic oligonucleotide
aaagaaaggcacaguagag

SEQ ID NO: 2723429 - RNA, 19 nt, Artificial Sequence
  Description of Artificial Sequence: Synthetic oligonucleotide
auacagcuggccuuuacuc

SEQ ID NO: 2723430 - RNA, 19 nt, Artificial Sequence
  Description of Artificial Sequence: Synthetic oligonucleotide
aauaagagacagaaaacau

SEQ ID NO: 2723431 - RNA, 19 nt, Artificial Sequence
  Description of Artificial Sequence: Synthetic oligonucleotide
ucaggagacaucuuuugga

SEQ ID NO: 2723432 - RNA, 19 nt, Artificial Sequence
  Description of Artificial Sequence: Synthetic oligonucleotide
cuggcuaagagacugcagc

SEQ ID NO: 2723433 - RNA, 19 nt, Artificial Sequence
  Description of Artificial Sequence: Synthetic oligonucleotide
uuacaaacuguuucuucag

SEQ ID NO: 2723434 - RNA, 19 nt, Artificial Sequence
  Description of Artificial Sequence: Synthetic oligonucleotide
uuuggauucacagucaguu

SEQ ID NO: 2723435 - RNA, 19 nt, Artificial Sequence
  Description of Artificial Sequence: Synthetic oligonucleotide
uagauagcugacaccacag

SEQ ID NO: 2723436 - RNA, 19 nt, Artificial Sequence
  Description of Artificial Sequence: Synthetic oligonucleotide
cuggccuuuacucacaaug

SEQ ID NO: 2723437 - RNA, 19 nt, Artificial Sequence
  Description of Artificial Sequence: Synthetic oligonucleotide
acccaaaucuguuuucuuc

SEQ ID NO: 2723438 - RNA, 19 nt, Artificial Sequence
  Description of Artificial Sequence: Synthetic oligonucleotide
auaaagguaaagaaaggca

SEQ ID NO: 2723439 - RNA, 19 nt, Artificial Sequence
  Description of Artificial Sequence: Synthetic oligonucleotide
caccacaguauuuacaaac

SEQ ID NO: 2723440 - RNA, 19 nt, Artificial Sequence
  Description of Artificial Sequence: Synthetic oligonucleotide
uuuucuuggagucuccuuu

SEQ ID NO: 2723441 - RNA, 19 nt, Artificial Sequence
  Description of Artificial Sequence: Synthetic oligonucleotide
uuauuuuaaauaucaucua

SEQ ID NO: 2723442 - RNA, 19 nt, Artificial Sequence
  Description of Artificial Sequence: Synthetic oligonucleotide
ugcagaacaauaagcuagc

SEQ ID NO: 2723443 - RNA, 19 nt, Artificial Sequence
  Description of Artificial Sequence: Synthetic oligonucleotide
aagaauuagauagcugaca

SEQ ID NO: 2723444 - RNA, 19 nt, Artificial Sequence
  Description of Artificial Sequence: Synthetic oligonucleotide
acugagaaagcacugcaga

SEQ ID NO: 2723445 - RNA, 19 nt, Artificial Sequence
  Description of Artificial Sequence: Synthetic oligonucleotide
auacaauuucauuucuucu

SEQ ID NO: 2723446 - RNA, 19 nt, Artificial Sequence
  Description of Artificial Sequence: Synthetic oligonucleotide
uaaauucaugaagaauuag

SEQ ID NO: 2723447 - RNA, 19 nt, Artificial Sequence
  Description of Artificial Sequence: Synthetic oligonucleotide
gucaguuuuauacuuguca

SEQ ID NO: 2723448 - RNA, 19 nt, Artificial Sequence
  Description of Artificial Sequence: Synthetic oligonucleotide
aucuguuuucuucuaaacu

SEQ ID NO: 2723449 - RNA, 19 nt, Artificial Sequence
  Description of Artificial Sequence: Synthetic oligonucleotide
agcacugcagaacaauaag

SEQ ID NO: 2723450 - RNA, 19 nt, Artificial Sequence
  Description of Artificial Sequence: Synthetic oligonucleotide
aacaauaagcuagcccggg

SEQ ID NO: 2723451 - RNA, 19 nt, Artificial Sequence
  Description of Artificial Sequence: Synthetic oligonucleotide
acagcuggccuuuacucac

SEQ ID NO: 2723452 - RNA, 19 nt, Artificial Sequence
  Description of Artificial Sequence: Synthetic oligonucleotide
gaauuagauagcugacacc

SEQ ID NO: 2723453 - RNA, 19 nt, Artificial Sequence
  Description of Artificial Sequence: Synthetic oligonucleotide
ugugaugauccauaauuuc

SEQ ID NO: 2723454 - RNA, 19 nt, Artificial Sequence
  Description of Artificial Sequence: Synthetic oligonucleotide
gagaaagcacugcagaaca

SEQ ID NO: 2723455 - RNA, 19 nt, Artificial Sequence
  Description of Artificial Sequence: Synthetic oligonucleotide
ugauccauaauuuccccaa

SEQ ID NO: 2723456 - RNA, 19 nt, Artificial Sequence
  Description of Artificial Sequence: Synthetic oligonucleotide
acaaacuguuucuucagga

SEQ ID NO: 2723457 - RNA, 19 nt, Artificial Sequence
  Description of Artificial Sequence: Synthetic oligonucleotide
uauauuccaaccuuucauu

SEQ ID NO: 2723458 - RNA, 19 nt, Artificial Sequence
  Description of Artificial Sequence: Synthetic oligonucleotide
gacaccacaguauuuacaa

SEQ ID NO: 2723459 - RNA, 19 nt, Artificial Sequence
  Description of Artificial Sequence: Synthetic oligonucleotide
caaacuguuucuucaggag

SEQ ID NO: 2723460 - RNA, 19 nt, Artificial Sequence
  Description of Artificial Sequence: Synthetic oligonucleotide
uucagguaaugcaugcaug

SEQ ID NO: 2723461 - RNA, 19 nt, Artificial Sequence
  Description of Artificial Sequence: Synthetic oligonucleotide
gauaccaaguuauaaacau

SEQ ID NO: 2723462 - RNA, 19 nt, Artificial Sequence
  Description of Artificial Sequence: Synthetic oligonucleotide
cagaacaauaagcuagccc

SEQ ID NO: 2723463 - RNA, 19 nt, Artificial Sequence
  Description of Artificial Sequence: Synthetic oligonucleotide
caauguacugagaaagcac

SEQ ID NO: 2723464 - RNA, 19 nt, Artificial Sequence
  Description of Artificial Sequence: Synthetic oligonucleotide
gaugauccauaauuucccc

SEQ ID NO: 2723465 - RNA, 19 nt, Artificial Sequence
  Description of Artificial Sequence: Synthetic oligonucleotide
caguagaggauauagaaaa

SEQ ID NO: 2723466 - RNA, 19 nt, Artificial Sequence
  Description of Artificial Sequence: Synthetic oligonucleotide
gugaugauccauaauuucc

SEQ ID NO: 2723467 - RNA, 19 nt, Artificial Sequence
  Description of Artificial Sequence: Synthetic oligonucleotide
aaagguaaagaaaggcaca

SEQ ID NO: 2723468 - RNA, 19 nt, Artificial Sequence
  Description of Artificial Sequence: Synthetic oligonucleotide
uauaaacauaacagguuua

SEQ ID NO: 2723469 - RNA, 19 nt, Artificial Sequence
  Description of Artificial Sequence: Synthetic oligonucleotide
acuacaagauaccaaguua

SEQ ID NO: 2723470 - RNA, 19 nt, Artificial Sequence
  Description of Artificial Sequence: Synthetic oligonucleotide
uguacugagaaagcacugc

SEQ ID NO: 2723471 - RNA, 19 nt, Artificial Sequence
  Description of Artificial Sequence: Synthetic oligonucleotide
uacuacaagauaccaaguu

SEQ ID NO: 2723472 - RNA, 19 nt, Artificial Sequence
  Description of Artificial Sequence: Synthetic oligonucleotide
guaaagaaaggcacaguag

SEQ ID NO: 2723473 - RNA, 19 nt, Artificial Sequence
  Description of Artificial Sequence: Synthetic oligonucleotide
gacugcuggcaauauaggc

SEQ ID NO: 2723474 - RNA, 19 nt, Artificial Sequence
  Description of Artificial Sequence: Synthetic oligonucleotide
uuccccaauguacugagaa

SEQ ID NO: 2723475 - RNA, 19 nt, Artificial Sequence
  Description of Artificial Sequence: Synthetic oligonucleotide
uuuucuuucauagccuuaa

SEQ ID NO: 2723476 - RNA, 19 nt, Artificial Sequence
  Description of Artificial Sequence: Synthetic oligonucleotide
uggccuuuacucacaaugc

SEQ ID NO: 2723477 - RNA, 19 nt, Artificial Sequence
  Description of Artificial Sequence: Synthetic oligonucleotide
uggauucacagucaguuuu

SEQ ID NO: 2723478 - RNA, 19 nt, Artificial Sequence
  Description of Artificial Sequence: Synthetic oligonucleotide
auaauuuccccaauguacu

SEQ ID NO: 2723479 - RNA, 19 nt, Artificial Sequence
  Description of Artificial Sequence: Synthetic oligonucleotide
aaugcaugcaugggaaugu

SEQ ID NO: 2723480 - RNA, 19 nt, Artificial Sequence
  Description of Artificial Sequence: Synthetic oligonucleotide
uucuuucauagccuuaaau

SEQ ID NO: 2723481 - RNA, 19 nt, Artificial Sequence
  Description of Artificial Sequence: Synthetic oligonucleotide
caucuuuuggauuucuuca

SEQ ID NO: 2723482 - RNA, 19 nt, Artificial Sequence
  Description of Artificial Sequence: Synthetic oligonucleotide
ucguucaagacuuccuuga

SEQ ID NO: 2723483 - RNA, 19 nt, Artificial Sequence
  Description of Artificial Sequence: Synthetic oligonucleotide
uccuuucucguucaagacu

SEQ ID NO: 2723484 - RNA, 19 nt, Artificial Sequence
  Description of Artificial Sequence: Synthetic oligonucleotide
auagccuuaaauucaugaa

SEQ ID NO: 2723485 - RNA, 19 nt, Artificial Sequence
  Description of Artificial Sequence: Synthetic oligonucleotide
uaaugcaugcaugggaaug

SEQ ID NO: 2723486 - RNA, 19 nt, Artificial Sequence
  Description of Artificial Sequence: Synthetic oligonucleotide
ugacugcuggcaauauagg

SEQ ID NO: 2723487 - RNA, 19 nt, Artificial Sequence
  Description of Artificial Sequence: Synthetic oligonucleotide
ggcaauauaggcaugcacc

SEQ ID NO: 2723488 - RNA, 19 nt, Artificial Sequence
  Description of Artificial Sequence: Synthetic oligonucleotide
cuaaacuaaauaagagaca

SEQ ID NO: 2723489 - RNA, 19 nt, Artificial Sequence
  Description of Artificial Sequence: Synthetic oligonucleotide
aaaccauacagcuggccuu

SEQ ID NO: 2723490 - RNA, 19 nt, Artificial Sequence
  Description of Artificial Sequence: Synthetic oligonucleotide
ucacagucaguuuuauacu

SEQ ID NO: 2723491 - RNA, 19 nt, Artificial Sequence
  Description of Artificial Sequence: Synthetic oligonucleotide
uucauagccuuaaauucau

SEQ ID NO: 2723492 - RNA, 19 nt, Artificial Sequence
  Description of Artificial Sequence: Synthetic oligonucleotide
aaaggcacaguagaggaua

SEQ ID NO: 2723493 - RNA, 19 nt, Artificial Sequence
  Description of Artificial Sequence: Synthetic oligonucleotide
caagauaccaaguuauaaa

SEQ ID NO: 2723494 - RNA, 19 nt, Artificial Sequence
  Description of Artificial Sequence: Synthetic oligonucleotide
ugagaaagcacugcagaac

SEQ ID NO: 2723495 - RNA, 19 nt, Artificial Sequence
  Description of Artificial Sequence: Synthetic oligonucleotide
cacaguagaggauauagaa

SEQ ID NO: 2723496 - RNA, 19 nt, Artificial Sequence
  Description of Artificial Sequence: Synthetic oligonucleotide
caguuuuauacuugucaag

SEQ ID NO: 2723497 - RNA, 19 nt, Artificial Sequence
  Description of Artificial Sequence: Synthetic oligonucleotide
auucaugaagaauuagaua

SEQ ID NO: 2723498 - RNA, 19 nt, Artificial Sequence
  Description of Artificial Sequence: Synthetic oligonucleotide
aauuuccccaauguacuga

SEQ ID NO: 2723499 - RNA, 19 nt, Artificial Sequence
  Description of Artificial Sequence: Synthetic oligonucleotide
uuauacuugucaagcuccu

SEQ ID NO: 2723500 - RNA, 19 nt, Artificial Sequence
  Description of Artificial Sequence: Synthetic oligonucleotide
auaaacauaacagguuuau

SEQ ID NO: 2723501 - RNA, 19 nt, Artificial Sequence
  Description of Artificial Sequence: Synthetic oligonucleotide
augcaugggaaugugauga

SEQ ID NO: 2723502 - RNA, 19 nt, Artificial Sequence
  Description of Artificial Sequence: Synthetic oligonucleotide
gaagaauuagauagcugac

SEQ ID NO: 2723503 - RNA, 19 nt, Artificial Sequence
  Description of Artificial Sequence: Synthetic oligonucleotide
acauauauuccaaccuuuc

SEQ ID NO: 2723504 - RNA, 19 nt, Artificial Sequence
  Description of Artificial Sequence: Synthetic oligonucleotide
agguaaugcaugcauggga

SEQ ID NO: 2723505 - RNA, 19 nt, Artificial Sequence
  Description of Artificial Sequence: Synthetic oligonucleotide
acugcagcuuuucuuggag

SEQ ID NO: 2723506 - RNA, 19 nt, Artificial Sequence
  Description of Artificial Sequence: Synthetic oligonucleotide
gaacaauaagcuagcccgg

SEQ ID NO: 2723507 - RNA, 19 nt, Artificial Sequence
  Description of Artificial Sequence: Synthetic oligonucleotide
acauaacagguuuauuuau

SEQ ID NO: 2723508 - RNA, 19 nt, Artificial Sequence
  Description of Artificial Sequence: Synthetic oligonucleotide
auccauaauuuccccaaug

SEQ ID NO: 2723509 - RNA, 19 nt, Artificial Sequence
  Description of Artificial Sequence: Synthetic oligonucleotide
uaauuuccccaauguacug

SEQ ID NO: 2723510 - RNA, 19 nt, Artificial Sequence
  Description of Artificial Sequence: Synthetic oligonucleotide
uccgcaggguaugaaacgg

SEQ ID NO: 2723511 - RNA, 19 nt, Artificial Sequence
  Description of Artificial Sequence: Synthetic oligonucleotide
ugacaccacaguauuuaca

SEQ ID NO: 2723512 - RNA, 19 nt, Artificial Sequence
  Description of Artificial Sequence: Synthetic oligonucleotide
aaacggcuuccccugucuc

SEQ ID NO: 2723513 - RNA, 19 nt, Artificial Sequence
  Description of Artificial Sequence: Synthetic oligonucleotide
caauaagcuagcccgggac

SEQ ID NO: 2723514 - RNA, 19 nt, Artificial Sequence
  Description of Artificial Sequence: Synthetic oligonucleotide
auuucuucagguaaugcau

SEQ ID NO: 2723515 - RNA, 19 nt, Artificial Sequence
  Description of Artificial Sequence: Synthetic oligonucleotide
gauagcugacaccacagua

SEQ ID NO: 2723516 - RNA, 19 nt, Artificial Sequence
  Description of Artificial Sequence: Synthetic oligonucleotide
ugcagcuuuucuuggaguc

SEQ ID NO: 2723517 - RNA, 19 nt, Artificial Sequence
  Description of Artificial Sequence: Synthetic oligonucleotide
uaucaucuacuacaagaua

SEQ ID NO: 2723518 - RNA, 19 nt, Artificial Sequence
  Description of Artificial Sequence: Synthetic oligonucleotide
uucucguucaagacuuccu

SEQ ID NO: 2723519 - RNA, 19 nt, Artificial Sequence
  Description of Artificial Sequence: Synthetic oligonucleotide
uacagcuggccuuuacuca

SEQ ID NO: 2723520 - RNA, 19 nt, Artificial Sequence
  Description of Artificial Sequence: Synthetic oligonucleotide
aacauauauuccaaccuuu

SEQ ID NO: 2723521 - RNA, 19 nt, Artificial Sequence
  Description of Artificial Sequence: Synthetic oligonucleotide
auaagcuagcccgggacuc

SEQ ID NO: 2723522 - RNA, 19 nt, Artificial Sequence
  Description of Artificial Sequence: Synthetic oligonucleotide
ucuucaggagacaucuuuu

SEQ ID NO: 2723523 - RNA, 19 nt, Artificial Sequence
  Description of Artificial Sequence: Synthetic oligonucleotide
uuuuggauucacagucagu

SEQ ID NO: 2723524 - RNA, 19 nt, Artificial Sequence
  Description of Artificial Sequence: Synthetic oligonucleotide
acugcuggcaauauaggca

SEQ ID NO: 2723525 - RNA, 19 nt, Artificial Sequence
  Description of Artificial Sequence: Synthetic oligonucleotide
acaagauaccaaguuauaa

SEQ ID NO: 2723526 - RNA, 19 nt, Artificial Sequence
  Description of Artificial Sequence: Synthetic oligonucleotide
auauuccaaccuuucauuu

SEQ ID NO: 2723527 - RNA, 19 nt, Artificial Sequence
  Description of Artificial Sequence: Synthetic oligonucleotide
ccuuuacucacaaugcccc

SEQ ID NO: 2723528 - RNA, 19 nt, Artificial Sequence
  Description of Artificial Sequence: Synthetic oligonucleotide
uguuucuucaggagacauc

SEQ ID NO: 2723529 - RNA, 19 nt, Artificial Sequence
  Description of Artificial Sequence: Synthetic oligonucleotide
ccaaguuauaaacauaaca

SEQ ID NO: 2723530 - RNA, 19 nt, Artificial Sequence
  Description of Artificial Sequence: Synthetic oligonucleotide
gguaaagaaaggcacagua

SEQ ID NO: 2723531 - RNA, 19 nt, Artificial Sequence
  Description of Artificial Sequence: Synthetic oligonucleotide
caggguaugaaacggcuuc

SEQ ID NO: 2723532 - RNA, 19 nt, Artificial Sequence
  Description of Artificial Sequence: Synthetic oligonucleotide
cuuccuugauacaauuuca

SEQ ID NO: 2723533 - RNA, 19 nt, Artificial Sequence
  Description of Artificial Sequence: Synthetic oligonucleotide
aggguaugaaacggcuucc

SEQ ID NO: 2723534 - RNA, 19 nt, Artificial Sequence
  Description of Artificial Sequence: Synthetic oligonucleotide
uuucucguucaagacuucc

SEQ ID NO: 2723535 - RNA, 19 nt, Artificial Sequence
  Description of Artificial Sequence: Synthetic oligonucleotide
ucucguucaagacuuccuu

SEQ ID NO: 2723536 - RNA, 19 nt, Artificial Sequence
  Description of Artificial Sequence: Synthetic oligonucleotide
acaguauuuacaaacuguu

SEQ ID NO: 2723537 - RNA, 19 nt, Artificial Sequence
  Description of Artificial Sequence: Synthetic oligonucleotide
ggcacaguagaggauauag

SEQ ID NO: 2723538 - RNA, 19 nt, Artificial Sequence
  Description of Artificial Sequence: Synthetic oligonucleotide
uacaagauaccaaguuaua

SEQ ID NO: 2723539 - RNA, 19 nt, Artificial Sequence
  Description of Artificial Sequence: Synthetic oligonucleotide
auaagagacagaaaacaua

SEQ ID NO: 2723540 - RNA, 19 nt, Artificial Sequence
  Description of Artificial Sequence: Synthetic oligonucleotide
uauuccaaccuuucauuuu

SEQ ID NO: 2723541 - RNA, 19 nt, Artificial Sequence
  Description of Artificial Sequence: Synthetic oligonucleotide
cauauauuccaaccuuuca

SEQ ID NO: 2723542 - RNA, 19 nt, Artificial Sequence
  Description of Artificial Sequence: Synthetic oligonucleotide
uggcuaagagacugcagcu

SEQ ID NO: 2723543 - RNA, 19 nt, Artificial Sequence
  Description of Artificial Sequence: Synthetic oligonucleotide
acugcagaacaauaagcua

SEQ ID NO: 2723544 - RNA, 19 nt, Artificial Sequence
  Description of Artificial Sequence: Synthetic oligonucleotide
agauaccaaguuauaaaca

SEQ ID NO: 2723545 - RNA, 19 nt, Artificial Sequence
  Description of Artificial Sequence: Synthetic oligonucleotide
acuccgcaggguaugaaac

SEQ ID NO: 2723546 - RNA, 19 nt, Artificial Sequence
  Description of Artificial Sequence: Synthetic oligonucleotide
cucguucaagacuuccuug

SEQ ID NO: 2723547 - RNA, 19 nt, Artificial Sequence
  Description of Artificial Sequence: Synthetic oligonucleotide
uagcccgggacuccgcagg

SEQ ID NO: 2723548 - RNA, 19 nt, Artificial Sequence
  Description of Artificial Sequence: Synthetic oligonucleotide
uugucaagcuccuggcuaa

SEQ ID NO: 2723549 - RNA, 19 nt, Artificial Sequence
  Description of Artificial Sequence: Synthetic oligonucleotide
accaaguuauaaacauaac

SEQ ID NO: 2723550 - RNA, 19 nt, Artificial Sequence
  Description of Artificial Sequence: Synthetic oligonucleotide
guacugagaaagcacugca

SEQ ID NO: 2723551 - RNA, 19 nt, Artificial Sequence
  Description of Artificial Sequence: Synthetic oligonucleotide
caugcaugggaaugugaug

SEQ ID NO: 2723552 - RNA, 19 nt, Artificial Sequence
  Description of Artificial Sequence: Synthetic oligonucleotide
cuccgcaggguaugaaacg

SEQ ID NO: 2723553 - RNA, 19 nt, Artificial Sequence
  Description of Artificial Sequence: Synthetic oligonucleotide
auuagauagcugacaccac

SEQ ID NO: 2723554 - RNA, 19 nt, Artificial Sequence
  Description of Artificial Sequence: Synthetic oligonucleotide
ucauagccuuaaauucaug

SEQ ID NO: 2723555 - RNA, 19 nt, Artificial Sequence
  Description of Artificial Sequence: Synthetic oligonucleotide
uccuugauacaauuucauu

SEQ ID NO: 2723556 - RNA, 19 nt, Artificial Sequence
  Description of Artificial Sequence: Synthetic oligonucleotide
uauuuacaaacuguuucuu

SEQ ID NO: 2723557 - RNA, 19 nt, Artificial Sequence
  Description of Artificial Sequence: Synthetic oligonucleotide
auagcugacaccacaguau

SEQ ID NO: 2723558 - RNA, 19 nt, Artificial Sequence
  Description of Artificial Sequence: Synthetic oligonucleotide
acaauaagcuagcccggga

SEQ ID NO: 2723559 - RNA, 19 nt, Artificial Sequence
  Description of Artificial Sequence: Synthetic oligonucleotide
uggauuucuucagguaaug

SEQ ID NO: 2723560 - RNA, 19 nt, Artificial Sequence
  Description of Artificial Sequence: Synthetic oligonucleotide
cuacaagauaccaaguuau

SEQ ID NO: 2723561 - RNA, 19 nt, Artificial Sequence
  Description of Artificial Sequence: Synthetic oligonucleotide
uuggagucuccuuucucgu

SEQ ID NO: 2723562 - RNA, 19 nt, Artificial Sequence
  Description of Artificial Sequence: Synthetic oligonucleotide
aaagcacugcagaacaaua

SEQ ID NO: 2723563 - RNA, 19 nt, Artificial Sequence
  Description of Artificial Sequence: Synthetic oligonucleotide
acggcuuccccugucuccc

SEQ ID NO: 2723564 - RNA, 19 nt, Artificial Sequence
  Description of Artificial Sequence: Synthetic oligonucleotide
ugcaccaccaggccaccca

SEQ ID NO: 2723565 - RNA, 19 nt, Artificial Sequence
  Description of Artificial Sequence: Synthetic oligonucleotide
uucuuggagucuccuuucu

SEQ ID NO: 2723566 - RNA, 19 nt, Artificial Sequence
  Description of Artificial Sequence: Synthetic oligonucleotide
cacaguauuuacaaacugu

SEQ ID NO: 2723567 - RNA, 19 nt, Artificial Sequence
  Description of Artificial Sequence: Synthetic oligonucleotide
agauagcugacaccacagu

SEQ ID NO: 2723568 - RNA, 19 nt, Artificial Sequence
  Description of Artificial Sequence: Synthetic oligonucleotide
ucaagacuuccuugauaca

SEQ ID NO: 2723569 - RNA, 19 nt, Artificial Sequence
  Description of Artificial Sequence: Synthetic oligonucleotide
accacaguauuuacaaacu

SEQ ID NO: 2723570 - RNA, 19 nt, Artificial Sequence
  Description of Artificial Sequence: Synthetic oligonucleotide
ucuuggagucuccuuucuc

SEQ ID NO: 2723571 - RNA, 19 nt, Artificial Sequence
  Description of Artificial Sequence: Synthetic oligonucleotide
gcaauauaggcaugcacca

SEQ ID NO: 2723572 - RNA, 19 nt, Artificial Sequence
  Description of Artificial Sequence: Synthetic oligonucleotide
uagcugacaccacaguauu

SEQ ID NO: 2723573 - RNA, 19 nt, Artificial Sequence
  Description of Artificial Sequence: Synthetic oligonucleotide
aagcacugcagaacaauaa

SEQ ID NO: 2723574 - RNA, 19 nt, Artificial Sequence
  Description of Artificial Sequence: Synthetic oligonucleotide
guaugaaacggcuuccccu

SEQ ID NO: 2723575 - RNA, 19 nt, Artificial Sequence
  Description of Artificial Sequence: Synthetic oligonucleotide
cuccuuucucguucaagac

SEQ ID NO: 2723576 - RNA, 19 nt, Artificial Sequence
  Description of Artificial Sequence: Synthetic oligonucleotide
aagacuuccuugauacaau

SEQ ID NO: 2723577 - RNA, 19 nt, Artificial Sequence
  Description of Artificial Sequence: Synthetic oligonucleotide
augaagaauuagauagcug

SEQ ID NO: 2723578 - RNA, 19 nt, Artificial Sequence
  Description of Artificial Sequence: Synthetic oligonucleotide
uauacuugucaagcuccug

SEQ ID NO: 2723579 - RNA, 19 nt, Artificial Sequence
  Description of Artificial Sequence: Synthetic oligonucleotide
guuuuauacuugucaagcu

SEQ ID NO: 2723580 - RNA, 19 nt, Artificial Sequence
  Description of Artificial Sequence: Synthetic oligonucleotide
augggaaugugaugaucca

SEQ ID NO: 2723581 - RNA, 19 nt, Artificial Sequence
  Description of Artificial Sequence: Synthetic oligonucleotide
gguaugaaacggcuucccc

SEQ ID NO: 2723582 - RNA, 19 nt, Artificial Sequence
  Description of Artificial Sequence: Synthetic oligonucleotide
cugacaccacaguauuuac

SEQ ID NO: 2723583 - RNA, 19 nt, Artificial Sequence
  Description of Artificial Sequence: Synthetic oligonucleotide
acagucaguuuuauacuug

SEQ ID NO: 2723584 - RNA, 19 nt, Artificial Sequence
  Description of Artificial Sequence: Synthetic oligonucleotide
cagguaaugcaugcauggg

SEQ ID NO: 2723585 - RNA, 19 nt, Artificial Sequence
  Description of Artificial Sequence: Synthetic oligonucleotide
uuccccugucucccgggcg

SEQ ID NO: 2723586 - RNA, 19 nt, Artificial Sequence
  Description of Artificial Sequence: Synthetic oligonucleotide
acaguagaggauauagaaa

SEQ ID NO: 2723587 - RNA, 19 nt, Artificial Sequence
  Description of Artificial Sequence: Synthetic oligonucleotide
uaaacauaacagguuuauu

SEQ ID NO: 2723588 - RNA, 19 nt, Artificial Sequence
  Description of Artificial Sequence: Synthetic oligonucleotide
agucaguuuuauacuuguc

SEQ ID NO: 2723589 - RNA, 19 nt, Artificial Sequence
  Description of Artificial Sequence: Synthetic oligonucleotide
guuauaaacauaacagguu

SEQ ID NO: 2723590 - RNA, 19 nt, Artificial Sequence
  Description of Artificial Sequence: Synthetic oligonucleotide
aagcuagcccgggacuccg

SEQ ID NO: 2723591 - RNA, 19 nt, Artificial Sequence
  Description of Artificial Sequence: Synthetic oligonucleotide
uccccaauguacugagaaa

SEQ ID NO: 2723592 - RNA, 19 nt, Artificial Sequence
  Description of Artificial Sequence: Synthetic oligonucleotide
agacuuccuugauacaauu

SEQ ID NO: 2723593 - RNA, 19 nt, Artificial Sequence
  Description of Artificial Sequence: Synthetic oligonucleotide
ugaaacggcuuccccuguc

SEQ ID NO: 2723594 - RNA, 19 nt, Artificial Sequence
  Description of Artificial Sequence: Synthetic oligonucleotide
ggccuuuacucacaaugcc

SEQ ID NO: 2723595 - RNA, 19 nt, Artificial Sequence
  Description of Artificial Sequence: Synthetic oligonucleotide
cugagaaagcacugcagaa

SEQ ID NO: 2723596 - RNA, 19 nt, Artificial Sequence
  Description of Artificial Sequence: Synthetic oligonucleotide
uaagcuagcccgggacucc

SEQ ID NO: 2723597 - RNA, 19 nt, Artificial Sequence
  Description of Artificial Sequence: Synthetic oligonucleotide
cuugucaagcuccuggcua

SEQ ID NO: 2723598 - RNA, 19 nt, Artificial Sequence
  Description of Artificial Sequence: Synthetic oligonucleotide
uuggauucacagucaguuu

SEQ ID NO: 2723599 - RNA, 19 nt, Artificial Sequence
  Description of Artificial Sequence: Synthetic oligonucleotide
ccccaauguacugagaaag

SEQ ID NO: 2723600 - RNA, 19 nt, Artificial Sequence
  Description of Artificial Sequence: Synthetic oligonucleotide
caugaagaauuagauagcu

SEQ ID NO: 2723601 - RNA, 19 nt, Artificial Sequence
  Description of Artificial Sequence: Synthetic oligonucleotide
cagguuuauuuauaauaaa

SEQ ID NO: 2723602 - RNA, 19 nt, Artificial Sequence
  Description of Artificial Sequence: Synthetic oligonucleotide
caauauaggcaugcaccac

SEQ ID NO: 2723603 - RNA, 19 nt, Artificial Sequence
  Description of Artificial Sequence: Synthetic oligonucleotide
caagcuccuggcuaagaga

SEQ ID NO: 2723604 - RNA, 19 nt, Artificial Sequence
  Description of Artificial Sequence: Synthetic oligonucleotide
uccccugucucccgggcga

SEQ ID NO: 2723605 - RNA, 19 nt, Artificial Sequence
  Description of Artificial Sequence: Synthetic oligonucleotide
augugaugauccauaauuu

SEQ ID NO: 2723606 - RNA, 19 nt, Artificial Sequence
  Description of Artificial Sequence: Synthetic oligonucleotide
agcuuuucuuggagucucc

SEQ ID NO: 2723607 - RNA, 19 nt, Artificial Sequence
  Description of Artificial Sequence: Synthetic oligonucleotide
aucuacuacaagauaccaa

SEQ ID NO: 2723608 - RNA, 19 nt, Artificial Sequence
  Description of Artificial Sequence: Synthetic oligonucleotide
aaccauacagcuggccuuu

SEQ ID NO: 2723609 - RNA, 19 nt, Artificial Sequence
  Description of Artificial Sequence: Synthetic oligonucleotide
gguaaugcaugcaugggaa

SEQ ID NO: 2723610 - RNA, 19 nt, Artificial Sequence
  Description of Artificial Sequence: Synthetic oligonucleotide
uccuggcuaagagacugca

SEQ ID NO: 2723611 - RNA, 19 nt, Artificial Sequence
  Description of Artificial Sequence: Synthetic oligonucleotide
gacuccgcaggguaugaaa

SEQ ID NO: 2723612 - RNA, 19 nt, Artificial Sequence
  Description of Artificial Sequence: Synthetic oligonucleotide
caaaucuguuuucuucuaa

SEQ ID NO: 2723613 - RNA, 19 nt, Artificial Sequence
  Description of Artificial Sequence: Synthetic oligonucleotide
cucagcuuccugacugcug

SEQ ID NO: 2723614 - RNA, 19 nt, Artificial Sequence
  Description of Artificial Sequence: Synthetic oligonucleotide
guucaagacuuccuugaua

SEQ ID NO: 2723615 - RNA, 19 nt, Artificial Sequence
  Description of Artificial Sequence: Synthetic oligonucleotide
gcacugcagaacaauaagc

SEQ ID NO: 2723616 - RNA, 19 nt, Artificial Sequence
  Description of Artificial Sequence: Synthetic oligonucleotide
cccaauguacugagaaagc

SEQ ID NO: 2723617 - RNA, 19 nt, Artificial Sequence
  Description of Artificial Sequence: Synthetic oligonucleotide
ugggaaugugaugauccau

SEQ ID NO: 2723618 - RNA, 19 nt, Artificial Sequence
  Description of Artificial Sequence: Synthetic oligonucleotide
caucuacuacaagauacca

SEQ ID NO: 2723619 - RNA, 19 nt, Artificial Sequence
  Description of Artificial Sequence: Synthetic oligonucleotide
caccaggccacccaaaucu

SEQ ID NO: 2723620 - RNA, 19 nt, Artificial Sequence
  Description of Artificial Sequence: Synthetic oligonucleotide
gccuuuacucacaaugccc

SEQ ID NO: 2723621 - RNA, 19 nt, Artificial Sequence
  Description of Artificial Sequence: Synthetic oligonucleotide
ggagucuccuuucucguuc

SEQ ID NO: 2723622 - RNA, 19 nt, Artificial Sequence
  Description of Artificial Sequence: Synthetic oligonucleotide
aggagacaucuuuuggauu

SEQ ID NO: 2723623 - RNA, 19 nt, Artificial Sequence
  Description of Artificial Sequence: Synthetic oligonucleotide
gcuggcaauauaggcaugc

SEQ ID NO: 2723624 - RNA, 19 nt, Artificial Sequence
  Description of Artificial Sequence: Synthetic oligonucleotide
ucccgggcgacccggcugc

SEQ ID NO: 2723625 - RNA, 19 nt, Artificial Sequence
  Description of Artificial Sequence: Synthetic oligonucleotide
ggauuucuucagguaaugc

SEQ ID NO: 2723626 - RNA, 19 nt, Artificial Sequence
  Description of Artificial Sequence: Synthetic oligonucleotide
gagacagaaaacauauauu

SEQ ID NO: 2723627 - RNA, 19 nt, Artificial Sequence
  Description of Artificial Sequence: Synthetic oligonucleotide
ggaaugugaugauccauaa

SEQ ID NO: 2723628 - RNA, 19 nt, Artificial Sequence
  Description of Artificial Sequence: Synthetic oligonucleotide
gucuccuuucucguucaag

SEQ ID NO: 2723629 - RNA, 19 nt, Artificial Sequence
  Description of Artificial Sequence: Synthetic oligonucleotide
agguaaagaaaggcacagu

SEQ ID NO: 2723630 - RNA, 19 nt, Artificial Sequence
  Description of Artificial Sequence: Synthetic oligonucleotide
ccacaguauuuacaaacug

SEQ ID NO: 2723631 - RNA, 19 nt, Artificial Sequence
  Description of Artificial Sequence: Synthetic oligonucleotide
gaaagcacugcagaacaau

SEQ ID NO: 2723632 - RNA, 19 nt, Artificial Sequence
  Description of Artificial Sequence: Synthetic oligonucleotide
aagagacagaaaacauaua

SEQ ID NO: 2723633 - RNA, 19 nt, Artificial Sequence
  Description of Artificial Sequence: Synthetic oligonucleotide
ugcuggcaauauaggcaug

SEQ ID NO: 2723634 - RNA, 19 nt, Artificial Sequence
  Description of Artificial Sequence: Synthetic oligonucleotide
cagcuuuucuuggagucuc

SEQ ID NO: 2723635 - RNA, 19 nt, Artificial Sequence
  Description of Artificial Sequence: Synthetic oligonucleotide
ugucaagcuccuggcuaag

SEQ ID NO: 2723636 - RNA, 19 nt, Artificial Sequence
  Description of Artificial Sequence: Synthetic oligonucleotide
ccuugauacaauuucauuu

SEQ ID NO: 2723637 - RNA, 19 nt, Artificial Sequence
  Description of Artificial Sequence: Synthetic oligonucleotide
agacaucuuuuggauuucu

SEQ ID NO: 2723638 - RNA, 19 nt, Artificial Sequence
  Description of Artificial Sequence: Synthetic oligonucleotide
gaaacggcuuccccugucu

SEQ ID NO: 2723639 - RNA, 19 nt, Artificial Sequence
  Description of Artificial Sequence: Synthetic oligonucleotide
aaggcacaguagaggauau

SEQ ID NO: 2723640 - RNA, 19 nt, Artificial Sequence
  Description of Artificial Sequence: Synthetic oligonucleotide
cuucagguaaugcaugcau

SEQ ID NO: 2723641 - RNA, 19 nt, Artificial Sequence
  Description of Artificial Sequence: Synthetic oligonucleotide
augaaacggcuuccccugu

SEQ ID NO: 2723642 - RNA, 19 nt, Artificial Sequence
  Description of Artificial Sequence: Synthetic oligonucleotide
cagucaguuuuauacuugu

SEQ ID NO: 2723643 - RNA, 19 nt, Artificial Sequence
  Description of Artificial Sequence: Synthetic oligonucleotide
cuagcccgggacuccgcag

SEQ ID NO: 2723644 - RNA, 19 nt, Artificial Sequence
  Description of Artificial Sequence: Synthetic oligonucleotide
cauacagcuggccuuuacu

SEQ ID NO: 2723645 - RNA, 19 nt, Artificial Sequence
  Description of Artificial Sequence: Synthetic oligonucleotide
cuuucucguucaagacuuc

SEQ ID NO: 2723646 - RNA, 19 nt, Artificial Sequence
  Description of Artificial Sequence: Synthetic oligonucleotide
cuuccccugucucccgggc

SEQ ID NO: 2723647 - RNA, 19 nt, Artificial Sequence
  Description of Artificial Sequence: Synthetic oligonucleotide
augcaugcaugggaaugug

SEQ ID NO: 2723648 - RNA, 19 nt, Artificial Sequence
  Description of Artificial Sequence: Synthetic oligonucleotide
agcccgggacuccgcaggg

SEQ ID NO: 2723649 - RNA, 19 nt, Artificial Sequence
  Description of Artificial Sequence: Synthetic oligonucleotide
uuccugacugcuggcaaua

SEQ ID NO: 2723650 - RNA, 19 nt, Artificial Sequence
  Description of Artificial Sequence: Synthetic oligonucleotide
uggagucuccuuucucguu

SEQ ID NO: 2723651 - RNA, 19 nt, Artificial Sequence
  Description of Artificial Sequence: Synthetic oligonucleotide
cugcuggcaauauaggcau

SEQ ID NO: 2723652 - RNA, 19 nt, Artificial Sequence
  Description of Artificial Sequence: Synthetic oligonucleotide
cuacuacaagauaccaagu

SEQ ID NO: 2723653 - RNA, 19 nt, Artificial Sequence
  Description of Artificial Sequence: Synthetic oligonucleotide
agcuuccugacugcuggca

SEQ ID NO: 2723654 - RNA, 19 nt, Artificial Sequence
  Description of Artificial Sequence: Synthetic oligonucleotide
caggagacaucuuuuggau

SEQ ID NO: 2723655 - RNA, 19 nt, Artificial Sequence
  Description of Artificial Sequence: Synthetic oligonucleotide
ccaauguacugagaaagca

SEQ ID NO: 2723656 - RNA, 19 nt, Artificial Sequence
  Description of Artificial Sequence: Synthetic oligonucleotide
cacagucaguuuuauacuu

SEQ ID NO: 2723657 - RNA, 19 nt, Artificial Sequence
  Description of Artificial Sequence: Synthetic oligonucleotide
gcugacaccacaguauuua

SEQ ID NO: 2723658 - RNA, 19 nt, Artificial Sequence
  Description of Artificial Sequence: Synthetic oligonucleotide
gauccauaauuuccccaau

SEQ ID NO: 2723659 - RNA, 19 nt, Artificial Sequence
  Description of Artificial Sequence: Synthetic oligonucleotide
gggaaugugaugauccaua

SEQ ID NO: 2723660 - RNA, 19 nt, Artificial Sequence
  Description of Artificial Sequence: Synthetic oligonucleotide
agaaagcacugcagaacaa

SEQ ID NO: 2723661 - RNA, 19 nt, Artificial Sequence
  Description of Artificial Sequence: Synthetic oligonucleotide
gcaugcaccaccaggccac

SEQ ID NO: 2723662 - RNA, 19 nt, Artificial Sequence
  Description of Artificial Sequence: Synthetic oligonucleotide
ggguaugaaacggcuuccc

SEQ ID NO: 2723663 - RNA, 19 nt, Artificial Sequence
  Description of Artificial Sequence: Synthetic oligonucleotide
aggccacccaaaucuguuu

SEQ ID NO: 2723664 - RNA, 19 nt, Artificial Sequence
  Description of Artificial Sequence: Synthetic oligonucleotide
augcaccaccaggccaccc

SEQ ID NO: 2723665 - RNA, 19 nt, Artificial Sequence
  Description of Artificial Sequence: Synthetic oligonucleotide
agcuggccuuuacucacaa

SEQ ID NO: 2723666 - RNA, 19 nt, Artificial Sequence
  Description of Artificial Sequence: Synthetic oligonucleotide
gcagaacaauaagcuagcc

SEQ ID NO: 2723667 - RNA, 19 nt, Artificial Sequence
  Description of Artificial Sequence: Synthetic oligonucleotide
caguauuuacaaacuguuu

SEQ ID NO: 2723668 - RNA, 19 nt, Artificial Sequence
  Description of Artificial Sequence: Synthetic oligonucleotide
cagcuuccugacugcuggc

SEQ ID NO: 2723669 - RNA, 19 nt, Artificial Sequence
  Description of Artificial Sequence: Synthetic oligonucleotide
ccuggcuaagagacugcag

SEQ ID NO: 2723670 - RNA, 19 nt, Artificial Sequence
  Description of Artificial Sequence: Synthetic oligonucleotide
guaaugcaugcaugggaau

SEQ ID NO: 2723671 - RNA, 19 nt, Artificial Sequence
  Description of Artificial Sequence: Synthetic oligonucleotide
accaggccacccaaaucug

SEQ ID NO: 2723672 - RNA, 19 nt, Artificial Sequence
  Description of Artificial Sequence: Synthetic oligonucleotide
ccauaauuuccccaaugua

SEQ ID NO: 2723673 - RNA, 19 nt, Artificial Sequence
  Description of Artificial Sequence: Synthetic oligonucleotide
cuggcaauauaggcaugca

SEQ ID NO: 2723674 - RNA, 19 nt, Artificial Sequence
  Description of Artificial Sequence: Synthetic oligonucleotide
cugucucccgggcgacccg

SEQ ID NO: 2723675 - RNA, 19 nt, Artificial Sequence
  Description of Artificial Sequence: Synthetic oligonucleotide
cccaaaucuguuuucuucu

SEQ ID NO: 2723676 - RNA, 19 nt, Artificial Sequence
  Description of Artificial Sequence: Synthetic oligonucleotide
gaaaggcacaguagaggau

SEQ ID NO: 2723677 - RNA, 19 nt, Artificial Sequence
  Description of Artificial Sequence: Synthetic oligonucleotide
ggcuuccccugucucccgg

SEQ ID NO: 2723678 - RNA, 19 nt, Artificial Sequence
  Description of Artificial Sequence: Synthetic oligonucleotide
gcuuccccugucucccggg

SEQ ID NO: 2723679 - RNA, 19 nt, Artificial Sequence
  Description of Artificial Sequence: Synthetic oligonucleotide
agcuagcccgggacuccgc

SEQ ID NO: 2723680 - RNA, 19 nt, Artificial Sequence
  Description of Artificial Sequence: Synthetic oligonucleotide
gcuaagagacugcagcuuu

SEQ ID NO: 2723681 - RNA, 19 nt, Artificial Sequence
  Description of Artificial Sequence: Synthetic oligonucleotide
cucccgggcgacccggcug

SEQ ID NO: 2723682 - RNA, 19 nt, Artificial Sequence
  Description of Artificial Sequence: Synthetic oligonucleotide
gcacaguagaggauauaga

SEQ ID NO: 2723683 - RNA, 19 nt, Artificial Sequence
  Description of Artificial Sequence: Synthetic oligonucleotide
uccugacugcuggcaauau

SEQ ID NO: 2723684 - RNA, 19 nt, Artificial Sequence
  Description of Artificial Sequence: Synthetic oligonucleotide
ccuuucucguucaagacuu

SEQ ID NO: 2723685 - RNA, 19 nt, Artificial Sequence
  Description of Artificial Sequence: Synthetic oligonucleotide
agucuccuuucucguucaa

SEQ ID NO: 2723686 - RNA, 19 nt, Artificial Sequence
  Description of Artificial Sequence: Synthetic oligonucleotide
cuuuucuuggagucuccuu

SEQ ID NO: 2723687 - RNA, 19 nt, Artificial Sequence
  Description of Artificial Sequence: Synthetic oligonucleotide
ccgcaggguaugaaacggc

SEQ ID NO: 2723688 - RNA, 19 nt, Artificial Sequence
  Description of Artificial Sequence: Synthetic oligonucleotide
gacuuccuugauacaauuu

SEQ ID NO: 2723689 - RNA, 19 nt, Artificial Sequence
  Description of Artificial Sequence: Synthetic oligonucleotide
gccacccaaaucuguuuuc

SEQ ID NO: 2723690 - RNA, 19 nt, Artificial Sequence
  Description of Artificial Sequence: Synthetic oligonucleotide
ggauucacagucaguuuua

SEQ ID NO: 2723691 - RNA, 19 nt, Artificial Sequence
  Description of Artificial Sequence: Synthetic oligonucleotide
gucaagcuccuggcuaaga

SEQ ID NO: 2723692 - RNA, 19 nt, Artificial Sequence
  Description of Artificial Sequence: Synthetic oligonucleotide
gcaugggaaugugaugauc

SEQ ID NO: 2723693 - RNA, 19 nt, Artificial Sequence
  Description of Artificial Sequence: Synthetic oligonucleotide
cuaagagacugcagcuuuu

SEQ ID NO: 2723694 - RNA, 19 nt, Artificial Sequence
  Description of Artificial Sequence: Synthetic oligonucleotide
gacaucuuuuggauuucuu

SEQ ID NO: 2723695 - RNA, 19 nt, Artificial Sequence
  Description of Artificial Sequence: Synthetic oligonucleotide
gcuuccugacugcuggcaa

SEQ ID NO: 2723696 - RNA, 19 nt, Artificial Sequence
  Description of Artificial Sequence: Synthetic oligonucleotide
gcaugcaugggaaugugau

SEQ ID NO: 2723697 - RNA, 19 nt, Artificial Sequence
  Description of Artificial Sequence: Synthetic oligonucleotide
cugcagcuuuucuuggagu

SEQ ID NO: 2723698 - RNA, 19 nt, Artificial Sequence
  Description of Artificial Sequence: Synthetic oligonucleotide
ccauacagcuggccuuuac

SEQ ID NO: 2723699 - RNA, 19 nt, Artificial Sequence
  Description of Artificial Sequence: Synthetic oligonucleotide
cuuccugacugcuggcaau

SEQ ID NO: 2723700 - RNA, 19 nt, Artificial Sequence
  Description of Artificial Sequence: Synthetic oligonucleotide
cccagccucagcuuccuga

SEQ ID NO: 2723701 - RNA, 19 nt, Artificial Sequence
  Description of Artificial Sequence: Synthetic oligonucleotide
agcuccuggcuaagagacu

SEQ ID NO: 2723702 - RNA, 19 nt, Artificial Sequence
  Description of Artificial Sequence: Synthetic oligonucleotide
ccugucucccgggcgaccc

SEQ ID NO: 2723703 - RNA, 19 nt, Artificial Sequence
  Description of Artificial Sequence: Synthetic oligonucleotide
cagcuggccuuuacucaca

SEQ ID NO: 2723704 - RNA, 19 nt, Artificial Sequence
  Description of Artificial Sequence: Synthetic oligonucleotide
cuguuucuucaggagacau

SEQ ID NO: 2723705 - RNA, 19 nt, Artificial Sequence
  Description of Artificial Sequence: Synthetic oligonucleotide
agcugacaccacaguauuu

SEQ ID NO: 2723706 - RNA, 19 nt, Artificial Sequence
  Description of Artificial Sequence: Synthetic oligonucleotide
ccaaaucuguuuucuucua

SEQ ID NO: 2723707 - RNA, 19 nt, Artificial Sequence
  Description of Artificial Sequence: Synthetic oligonucleotide
gcuagcccgggacuccgca

SEQ ID NO: 2723708 - RNA, 19 nt, Artificial Sequence
  Description of Artificial Sequence: Synthetic oligonucleotide
caggccacccaaaucuguu

SEQ ID NO: 2723709 - RNA, 19 nt, Artificial Sequence
  Description of Artificial Sequence: Synthetic oligonucleotide
ccaccaggccacccaaauc

SEQ ID NO: 2723710 - RNA, 19 nt, Artificial Sequence
  Description of Artificial Sequence: Synthetic oligonucleotide
aggcacaguagaggauaua

SEQ ID NO: 2723711 - RNA, 19 nt, Artificial Sequence
  Description of Artificial Sequence: Synthetic oligonucleotide
cgggcgacccggcugcacg

SEQ ID NO: 2723712 - RNA, 19 nt, Artificial Sequence
  Description of Artificial Sequence: Synthetic oligonucleotide
cacccaaaucuguuuucuu

SEQ ID NO: 2723713 - RNA, 19 nt, Artificial Sequence
  Description of Artificial Sequence: Synthetic oligonucleotide
gcagcuuuucuuggagucu

SEQ ID NO: 2723714 - RNA, 19 nt, Artificial Sequence
  Description of Artificial Sequence: Synthetic oligonucleotide
ggccacccaaaucuguuuu

SEQ ID NO: 2723715 - RNA, 19 nt, Artificial Sequence
  Description of Artificial Sequence: Synthetic oligonucleotide
gcaccaccaggccacccaa

SEQ ID NO: 2723716 - RNA, 19 nt, Artificial Sequence
  Description of Artificial Sequence: Synthetic oligonucleotide
gcuuuucuuggagucuccu

SEQ ID NO: 2723717 - RNA, 19 nt, Artificial Sequence
  Description of Artificial Sequence: Synthetic oligonucleotide
accauacagcuggccuuua

SEQ ID NO: 2723718 - RNA, 19 nt, Artificial Sequence
  Description of Artificial Sequence: Synthetic oligonucleotide
ggcuaagagacugcagcuu

SEQ ID NO: 2723719 - RNA, 19 nt, Artificial Sequence
  Description of Artificial Sequence: Synthetic oligonucleotide
gggacuccgcaggguauga

SEQ ID NO: 2723720 - RNA, 19 nt, Artificial Sequence
  Description of Artificial Sequence: Synthetic oligonucleotide
ccacccaaaucuguuuucu

SEQ ID NO: 2723721 - RNA, 19 nt, Artificial Sequence
  Description of Artificial Sequence: Synthetic oligonucleotide
cgcaggguaugaaacggcu

SEQ ID NO: 2723722 - RNA, 19 nt, Artificial Sequence
  Description of Artificial Sequence: Synthetic oligonucleotide
ccaggccacccaaaucugu

SEQ ID NO: 2723723 - RNA, 19 nt, Artificial Sequence
  Description of Artificial Sequence: Synthetic oligonucleotide
cagccucagcuuccugacu

SEQ ID NO: 2723724 - RNA, 19 nt, Artificial Sequence
  Description of Artificial Sequence: Synthetic oligonucleotide
cgggacuccgcaggguaug

SEQ ID NO: 2723725 - RNA, 19 nt, Artificial Sequence
  Description of Artificial Sequence: Synthetic oligonucleotide
ggacuccgcaggguaugaa

SEQ ID NO: 2723726 - RNA, 19 nt, Artificial Sequence
  Description of Artificial Sequence: Synthetic oligonucleotide
gcaggguaugaaacggcuu

SEQ ID NO: 2723727 - RNA, 19 nt, Artificial Sequence
  Description of Artificial Sequence: Synthetic oligonucleotide
cggcuuccccugucucccg

SEQ ID NO: 2723728 - RNA, 19 nt, Artificial Sequence
  Description of Artificial Sequence: Synthetic oligonucleotide
cguucaagacuuccuugau

SEQ ID NO: 2723729 - RNA, 19 nt, Artificial Sequence
  Description of Artificial Sequence: Synthetic oligonucleotide
gcuggccuuuacucacaau

SEQ ID NO: 2723730 - RNA, 19 nt, Artificial Sequence
  Description of Artificial Sequence: Synthetic oligonucleotide
cccugucucccgggcgacc

SEQ ID NO: 2723731 - RNA, 19 nt, Artificial Sequence
  Description of Artificial Sequence: Synthetic oligonucleotide
gggcgacccggcugcacgu

SEQ ID NO: 2723732 - RNA, 19 nt, Artificial Sequence
  Description of Artificial Sequence: Synthetic oligonucleotide
ccccugucucccgggcgac

SEQ ID NO: 2723733 - RNA, 19 nt, Artificial Sequence
  Description of Artificial Sequence: Synthetic oligonucleotide
ccgggcgacccggcugcac

SEQ ID NO: 2723734 - RNA, 19 nt, Artificial Sequence
  Description of Artificial Sequence: Synthetic oligonucleotide
ccgggacuccgcaggguau

SEQ ID NO: 2723735 - RNA, 19 nt, Artificial Sequence
  Description of Artificial Sequence: Synthetic oligonucleotide
gcccgggacuccgcagggu

SEQ ID NO: 2723736 - RNA, 19 nt, Artificial Sequence
  Description of Artificial Sequence: Synthetic oligonucleotide
ggcgacccggcugcacguu

SEQ ID NO: 2723737 - RNA, 19 nt, Artificial Sequence
  Description of Artificial Sequence: Synthetic oligonucleotide
cccgggcgacccggcugca

SEQ ID NO: 2723738 - RNA, 19 nt, Artificial Sequence
  Description of Artificial Sequence: Synthetic oligonucleotide
aaugacaugguugacaacc

SEQ ID NO: 2723739 - RNA, 19 nt, Artificial Sequence
  Description of Artificial Sequence: Synthetic oligonucleotide
aucaaaauuauuuagauaa

SEQ ID NO: 2723740 - RNA, 19 nt, Artificial Sequence
  Description of Artificial Sequence: Synthetic oligonucleotide
aauuauuuagauaaaagca

SEQ ID NO: 2723741 - RNA, 19 nt, Artificial Sequence
  Description of Artificial Sequence: Synthetic oligonucleotide
ucuucuucgaccaaaaugu

SEQ ID NO: 2723742 - RNA, 19 nt, Artificial Sequence
  Description of Artificial Sequence: Synthetic oligonucleotide
aaugcauuaauacuuacau

SEQ ID NO: 2723743 - RNA, 19 nt, Artificial Sequence
  Description of Artificial Sequence: Synthetic oligonucleotide
aaugaagcaauuucacagg

SEQ ID NO: 2723744 - RNA, 19 nt, Artificial Sequence
  Description of Artificial Sequence: Synthetic oligonucleotide
ugcauuaauacuuacauau

SEQ ID NO: 2723745 - RNA, 19 nt, Artificial Sequence
  Description of Artificial Sequence: Synthetic oligonucleotide
uuagaaaaggaauuguucu

SEQ ID NO: 2723746 - RNA, 19 nt, Artificial Sequence
  Description of Artificial Sequence: Synthetic oligonucleotide
aagacuacuaacuuuugca

SEQ ID NO: 2723747 - RNA, 19 nt, Artificial Sequence
  Description of Artificial Sequence: Synthetic oligonucleotide
uuuagauaaaagcagcagu

SEQ ID NO: 2723748 - RNA, 19 nt, Artificial Sequence
  Description of Artificial Sequence: Synthetic oligonucleotide
uuugauaucccacccauga

SEQ ID NO: 2723749 - RNA, 19 nt, Artificial Sequence
  Description of Artificial Sequence: Synthetic oligonucleotide
uucuaaaaugcauuaauac

SEQ ID NO: 2723750 - RNA, 19 nt, Artificial Sequence
  Description of Artificial Sequence: Synthetic oligonucleotide
auuauuuagauaaaagcag

SEQ ID NO: 2723751 - RNA, 19 nt, Artificial Sequence
  Description of Artificial Sequence: Synthetic oligonucleotide
aaaggaauuguucucuucu

SEQ ID NO: 2723752 - RNA, 19 nt, Artificial Sequence
  Description of Artificial Sequence: Synthetic oligonucleotide
aacauuucucaaugcagac

SEQ ID NO: 2723753 - RNA, 19 nt, Artificial Sequence
  Description of Artificial Sequence: Synthetic oligonucleotide
aaaaugcauuaauacuuac

SEQ ID NO: 2723754 - RNA, 19 nt, Artificial Sequence
  Description of Artificial Sequence: Synthetic oligonucleotide
uugaagaagacuacuaacu

SEQ ID NO: 2723755 - RNA, 19 nt, Artificial Sequence
  Description of Artificial Sequence: Synthetic oligonucleotide
acauaucaaaauuauuuag

SEQ ID NO: 2723756 - RNA, 19 nt, Artificial Sequence
  Description of Artificial Sequence: Synthetic oligonucleotide
aauaaagggaugaaugaag

SEQ ID NO: 2723757 - RNA, 19 nt, Artificial Sequence
  Description of Artificial Sequence: Synthetic oligonucleotide
agacuaacgauacacagug

SEQ ID NO: 2723758 - RNA, 19 nt, Artificial Sequence
  Description of Artificial Sequence: Synthetic oligonucleotide
uauuauuagaaaaggaauu

SEQ ID NO: 2723759 - RNA, 19 nt, Artificial Sequence
  Description of Artificial Sequence: Synthetic oligonucleotide
gaagacuaacgauacacag

SEQ ID NO: 2723760 - RNA, 19 nt, Artificial Sequence
  Description of Artificial Sequence: Synthetic oligonucleotide
uguguauuggagcagccag

SEQ ID NO: 2723761 - RNA, 19 nt, Artificial Sequence
  Description of Artificial Sequence: Synthetic oligonucleotide
aauuguucucuucuugaag

SEQ ID NO: 2723762 - RNA, 19 nt, Artificial Sequence
  Description of Artificial Sequence: Synthetic oligonucleotide
guuaccagagucuucuucg

SEQ ID NO: 2723763 - RNA, 19 nt, Artificial Sequence
  Description of Artificial Sequence: Synthetic oligonucleotide
uuagauaaaagcagcagua

SEQ ID NO: 2723764 - RNA, 19 nt, Artificial Sequence
  Description of Artificial Sequence: Synthetic oligonucleotide
uaauacuuacauaucaaaa

SEQ ID NO: 2723765 - RNA, 19 nt, Artificial Sequence
  Description of Artificial Sequence: Synthetic oligonucleotide
aaaaggaauuguucucuuc

SEQ ID NO: 2723766 - RNA, 19 nt, Artificial Sequence
  Description of Artificial Sequence: Synthetic oligonucleotide
ucuucgaccaaaauguggu

SEQ ID NO: 2723767 - RNA, 19 nt, Artificial Sequence
  Description of Artificial Sequence: Synthetic oligonucleotide
ugugagaagacuaacgaua

SEQ ID NO: 2723768 - RNA, 19 nt, Artificial Sequence
  Description of Artificial Sequence: Synthetic oligonucleotide
uauuuagauaaaagcagca

SEQ ID NO: 2723769 - RNA, 19 nt, Artificial Sequence
  Description of Artificial Sequence: Synthetic oligonucleotide
aacagauugacgucuucag

SEQ ID NO: 2723770 - RNA, 19 nt, Artificial Sequence
  Description of Artificial Sequence: Synthetic oligonucleotide
aaugcagacaucuucuaaa

SEQ ID NO: 2723771 - RNA, 19 nt, Artificial Sequence
  Description of Artificial Sequence: Synthetic oligonucleotide
auaaagggaugaaugaagc

SEQ ID NO: 2723772 - RNA, 19 nt, Artificial Sequence
  Description of Artificial Sequence: Synthetic oligonucleotide
auuagaaaaggaauuguuc

SEQ ID NO: 2723773 - RNA, 19 nt, Artificial Sequence
  Description of Artificial Sequence: Synthetic oligonucleotide
agacuacuaacuuuugcac

SEQ ID NO: 2723774 - RNA, 19 nt, Artificial Sequence
  Description of Artificial Sequence: Synthetic oligonucleotide
auuauuagaaaaggaauug

SEQ ID NO: 2723775 - RNA, 19 nt, Artificial Sequence
  Description of Artificial Sequence: Synthetic oligonucleotide
uaacgauacacagugauga

SEQ ID NO: 2723776 - RNA, 19 nt, Artificial Sequence
  Description of Artificial Sequence: Synthetic oligonucleotide
uggaauaggcgucuacugg

SEQ ID NO: 2723777 - RNA, 19 nt, Artificial Sequence
  Description of Artificial Sequence: Synthetic oligonucleotide
uauuuugcugacauuuggc

SEQ ID NO: 2723778 - RNA, 19 nt, Artificial Sequence
  Description of Artificial Sequence: Synthetic oligonucleotide
uuaauacuuacauaucaaa

SEQ ID NO: 2723779 - RNA, 19 nt, Artificial Sequence
  Description of Artificial Sequence: Synthetic oligonucleotide
cagauugacgucuucaggc

SEQ ID NO: 2723780 - RNA, 19 nt, Artificial Sequence
  Description of Artificial Sequence: Synthetic oligonucleotide
uucuucgaccaaaaugugg

SEQ ID NO: 2723781 - RNA, 19 nt, Artificial Sequence
  Description of Artificial Sequence: Synthetic oligonucleotide
uuucacaggguauuauuag

SEQ ID NO: 2723782 - RNA, 19 nt, Artificial Sequence
  Description of Artificial Sequence: Synthetic oligonucleotide
ugauaucccacccaugaga

SEQ ID NO: 2723783 - RNA, 19 nt, Artificial Sequence
  Description of Artificial Sequence: Synthetic oligonucleotide
uuuguuaccagagucuucu

SEQ ID NO: 2723784 - RNA, 19 nt, Artificial Sequence
  Description of Artificial Sequence: Synthetic oligonucleotide
cauaucaaaauuauuuaga

SEQ ID NO: 2723785 - RNA, 19 nt, Artificial Sequence
  Description of Artificial Sequence: Synthetic oligonucleotide
cuugaagaagacuacuaac

SEQ ID NO: 2723786 - RNA, 19 nt, Artificial Sequence
  Description of Artificial Sequence: Synthetic oligonucleotide
uugggaaugacaugguuga

SEQ ID NO: 2723787 - RNA, 19 nt, Artificial Sequence
  Description of Artificial Sequence: Synthetic oligonucleotide
ucacuauugucacugcacc

SEQ ID NO: 2723788 - RNA, 19 nt, Artificial Sequence
  Description of Artificial Sequence: Synthetic oligonucleotide
uauuagaaaaggaauuguu

SEQ ID NO: 2723789 - RNA, 19 nt, Artificial Sequence
  Description of Artificial Sequence: Synthetic oligonucleotide
caggguauuauuagaaaag

SEQ ID NO: 2723790 - RNA, 19 nt, Artificial Sequence
  Description of Artificial Sequence: Synthetic oligonucleotide
augaagcaauuucacaggg

SEQ ID NO: 2723791 - RNA, 19 nt, Artificial Sequence
  Description of Artificial Sequence: Synthetic oligonucleotide
gagaagacuaacgauacac

SEQ ID NO: 2723792 - RNA, 19 nt, Artificial Sequence
  Description of Artificial Sequence: Synthetic oligonucleotide
gucacugcaccucagaaug

SEQ ID NO: 2723793 - RNA, 19 nt, Artificial Sequence
  Description of Artificial Sequence: Synthetic oligonucleotide
ucuugaagaagacuacuaa

SEQ ID NO: 2723794 - RNA, 19 nt, Artificial Sequence
  Description of Artificial Sequence: Synthetic oligonucleotide
ugaaugaagcaauuucaca

SEQ ID NO: 2723795 - RNA, 19 nt, Artificial Sequence
  Description of Artificial Sequence: Synthetic oligonucleotide
gaugaaugaagcaauuuca

SEQ ID NO: 2723796 - RNA, 19 nt, Artificial Sequence
  Description of Artificial Sequence: Synthetic oligonucleotide
aaacauuucucaaugcaga

SEQ ID NO: 2723797 - RNA, 19 nt, Artificial Sequence
  Description of Artificial Sequence: Synthetic oligonucleotide
auuuagauaaaagcagcag

SEQ ID NO: 2723798 - RNA, 19 nt, Artificial Sequence
  Description of Artificial Sequence: Synthetic oligonucleotide
gucuucuucgaccaaaaug

SEQ ID NO: 2723799 - RNA, 19 nt, Artificial Sequence
  Description of Artificial Sequence: Synthetic oligonucleotide
acuaacgauacacagugau

SEQ ID NO: 2723800 - RNA, 19 nt, Artificial Sequence
  Description of Artificial Sequence: Synthetic oligonucleotide
aauuucacaggguauuauu

SEQ ID NO: 2723801 - RNA, 19 nt, Artificial Sequence
  Description of Artificial Sequence: Synthetic oligonucleotide
aggguauuauuagaaaagg

SEQ ID NO: 2723802 - RNA, 19 nt, Artificial Sequence
  Description of Artificial Sequence: Synthetic oligonucleotide
uugacaaccucacuauugu

SEQ ID NO: 2723803 - RNA, 19 nt, Artificial Sequence
  Description of Artificial Sequence: Synthetic oligonucleotide
cuugcauucuguauggcuc

SEQ ID NO: 2723804 - RNA, 19 nt, Artificial Sequence
  Description of Artificial Sequence: Synthetic oligonucleotide
uucgaccaaaauguggugg

SEQ ID NO: 2723805 - RNA, 19 nt, Artificial Sequence
  Description of Artificial Sequence: Synthetic oligonucleotide
agcagcucuccuuuguuac

SEQ ID NO: 2723806 - RNA, 19 nt, Artificial Sequence
  Description of Artificial Sequence: Synthetic oligonucleotide
gauaucccacccaugagag

SEQ ID NO: 2723807 - RNA, 19 nt, Artificial Sequence
  Description of Artificial Sequence: Synthetic oligonucleotide
uuauuagaaaaggaauugu

SEQ ID NO: 2723808 - RNA, 19 nt, Artificial Sequence
  Description of Artificial Sequence: Synthetic oligonucleotide
uuugcugacauuuggcuua

SEQ ID NO: 2723809 - RNA, 19 nt, Artificial Sequence
  Description of Artificial Sequence: Synthetic oligonucleotide
uggcucgucuuucugagag

SEQ ID NO: 2723810 - RNA, 19 nt, Artificial Sequence
  Description of Artificial Sequence: Synthetic oligonucleotide
agcagcaguauuuugcuga

SEQ ID NO: 2723811 - RNA, 19 nt, Artificial Sequence
  Description of Artificial Sequence: Synthetic oligonucleotide
accaaaaugugguggugcg

SEQ ID NO: 2723812 - RNA, 19 nt, Artificial Sequence
  Description of Artificial Sequence: Synthetic oligonucleotide
augaaugaagcaauuucac

SEQ ID NO: 2723813 - RNA, 19 nt, Artificial Sequence
  Description of Artificial Sequence: Synthetic oligonucleotide
acagauugacgucuucagg

SEQ ID NO: 2723814 - RNA, 19 nt, Artificial Sequence
  Description of Artificial Sequence: Synthetic oligonucleotide
aaaugcauuaauacuuaca

SEQ ID NO: 2723815 - RNA, 19 nt, Artificial Sequence
  Description of Artificial Sequence: Synthetic oligonucleotide
uaacuuuugcacagcaacu

SEQ ID NO: 2723816 - RNA, 19 nt, Artificial Sequence
  Description of Artificial Sequence: Synthetic oligonucleotide
uuuugcacagcaacuauuu

SEQ ID NO: 2723817 - RNA, 19 nt, Artificial Sequence
  Description of Artificial Sequence: Synthetic oligonucleotide
aagaagacuacuaacuuuu

SEQ ID NO: 2723818 - RNA, 19 nt, Artificial Sequence
  Description of Artificial Sequence: Synthetic oligonucleotide
aaccucacuauugucacug

SEQ ID NO: 2723819 - RNA, 19 nt, Artificial Sequence
  Description of Artificial Sequence: Synthetic oligonucleotide
uauggcucgucuuucugag

SEQ ID NO: 2723820 - RNA, 19 nt, Artificial Sequence
  Description of Artificial Sequence: Synthetic oligonucleotide
ugaagaagacuacuaacuu

SEQ ID NO: 2723821 - RNA, 19 nt, Artificial Sequence
  Description of Artificial Sequence: Synthetic oligonucleotide
aacgauacacagugaugag

SEQ ID NO: 2723822 - RNA, 19 nt, Artificial Sequence
  Description of Artificial Sequence: Synthetic oligonucleotide
gcagacaucuucuaaaaug

SEQ ID NO: 2723823 - RNA, 19 nt, Artificial Sequence
  Description of Artificial Sequence: Synthetic oligonucleotide
acuauugucacugcaccuc

SEQ ID NO: 2723824 - RNA, 19 nt, Artificial Sequence
  Description of Artificial Sequence: Synthetic oligonucleotide
uugcauucuguauggcucg

SEQ ID NO: 2723825 - RNA, 19 nt, Artificial Sequence
  Description of Artificial Sequence: Synthetic oligonucleotide
gaagcaauuucacagggua

SEQ ID NO: 2723826 - RNA, 19 nt, Artificial Sequence
  Description of Artificial Sequence: Synthetic oligonucleotide
acaggguauuauuagaaaa

SEQ ID NO: 2723827 - RNA, 19 nt, Artificial Sequence
  Description of Artificial Sequence: Synthetic oligonucleotide
acagugaugaguccugugu

SEQ ID NO: 2723828 - RNA, 19 nt, Artificial Sequence
  Description of Artificial Sequence: Synthetic oligonucleotide
ucacaggguauuauuagaa

SEQ ID NO: 2723829 - RNA, 19 nt, Artificial Sequence
  Description of Artificial Sequence: Synthetic oligonucleotide
uaucccacccaugagagcu

SEQ ID NO: 2723830 - RNA, 19 nt, Artificial Sequence
  Description of Artificial Sequence: Synthetic oligonucleotide
ugcccauuggaauaggcgu

SEQ ID NO: 2723831 - RNA, 19 nt, Artificial Sequence
  Description of Artificial Sequence: Synthetic oligonucleotide
aaaaugugguggugcgauc

SEQ ID NO: 2723832 - RNA, 19 nt, Artificial Sequence
  Description of Artificial Sequence: Synthetic oligonucleotide
uccuuuguuaccagagucu

SEQ ID NO: 2723833 - RNA, 19 nt, Artificial Sequence
  Description of Artificial Sequence: Synthetic oligonucleotide
uuggaauaggcgucuacug

SEQ ID NO: 2723834 - RNA, 19 nt, Artificial Sequence
  Description of Artificial Sequence: Synthetic oligonucleotide
uagaaaaggaauuguucuc

SEQ ID NO: 2723835 - RNA, 19 nt, Artificial Sequence
  Description of Artificial Sequence: Synthetic oligonucleotide
uucacaggguauuauuaga

SEQ ID NO: 2723836 - RNA, 19 nt, Artificial Sequence
  Description of Artificial Sequence: Synthetic oligonucleotide
gaugaguccuguguauugg

SEQ ID NO: 2723837 - RNA, 19 nt, Artificial Sequence
  Description of Artificial Sequence: Synthetic oligonucleotide
aguccuguguauuggagca

SEQ ID NO: 2723838 - RNA, 19 nt, Artificial Sequence
  Description of Artificial Sequence: Synthetic oligonucleotide
agaaaaggaauuguucucu

SEQ ID NO: 2723839 - RNA, 19 nt, Artificial Sequence
  Description of Artificial Sequence: Synthetic oligonucleotide
ugguguuucugccucugag

SEQ ID NO: 2723840 - RNA, 19 nt, Artificial Sequence
  Description of Artificial Sequence: Synthetic oligonucleotide
aaaugugguggugcgaucu

SEQ ID NO: 2723841 - RNA, 19 nt, Artificial Sequence
  Description of Artificial Sequence: Synthetic oligonucleotide
gggaaaacauuucucaaug

SEQ ID NO: 2723842 - RNA, 19 nt, Artificial Sequence
  Description of Artificial Sequence: Synthetic oligonucleotide
uguuucugccucugagugg

SEQ ID NO: 2723843 - RNA, 19 nt, Artificial Sequence
  Description of Artificial Sequence: Synthetic oligonucleotide
auugacgucuucaggcugc

SEQ ID NO: 2723844 - RNA, 19 nt, Artificial Sequence
  Description of Artificial Sequence: Synthetic oligonucleotide
augcucuucucuugcauuc

SEQ ID NO: 2723845 - RNA, 19 nt, Artificial Sequence
  Description of Artificial Sequence: Synthetic oligonucleotide
augguugacaaccucacua

SEQ ID NO: 2723846 - RNA, 19 nt, Artificial Sequence
  Description of Artificial Sequence: Synthetic oligonucleotide
uugauaucccacccaugag

SEQ ID NO: 2723847 - RNA, 19 nt, Artificial Sequence
  Description of Artificial Sequence: Synthetic oligonucleotide
cuaacgauacacagugaug

SEQ ID NO: 2723848 - RNA, 19 nt, Artificial Sequence
  Description of Artificial Sequence: Synthetic oligonucleotide
aagacuaacgauacacagu

SEQ ID NO: 2723849 - RNA, 19 nt, Artificial Sequence
  Description of Artificial Sequence: Synthetic oligonucleotide
ugaugaguccuguguauug

SEQ ID NO: 2723850 - RNA, 19 nt, Artificial Sequence
  Description of Artificial Sequence: Synthetic oligonucleotide
uucccguugggaaugacau

SEQ ID NO: 2723851 - RNA, 19 nt, Artificial Sequence
  Description of Artificial Sequence: Synthetic oligonucleotide
aggaauuguucucuucuug

SEQ ID NO: 2723852 - RNA, 19 nt, Artificial Sequence
  Description of Artificial Sequence: Synthetic oligonucleotide
acccaugagagcugccugc

SEQ ID NO: 2723853 - RNA, 19 nt, Artificial Sequence
  Description of Artificial Sequence: Synthetic oligonucleotide
gacuacuaacuuuugcaca

SEQ ID NO: 2723854 - RNA, 19 nt, Artificial Sequence
  Description of Artificial Sequence: Synthetic oligonucleotide
gaguccuguguauuggagc

SEQ ID NO: 2723855 - RNA, 19 nt, Artificial Sequence
  Description of Artificial Sequence: Synthetic oligonucleotide
gguauuauuagaaaaggaa

SEQ ID NO: 2723856 - RNA, 19 nt, Artificial Sequence
  Description of Artificial Sequence: Synthetic oligonucleotide
uccgauuucccguugggaa

SEQ ID NO: 2723857 - RNA, 19 nt, Artificial Sequence
  Description of Artificial Sequence: Synthetic oligonucleotide
cucuccuuuguuaccagag

SEQ ID NO: 2723858 - RNA, 19 nt, Artificial Sequence
  Description of Artificial Sequence: Synthetic oligonucleotide
acgucuucaggcugcaguc

SEQ ID NO: 2723859 - RNA, 19 nt, Artificial Sequence
  Description of Artificial Sequence: Synthetic oligonucleotide
guguuucugccucugagug

SEQ ID NO: 2723860 - RNA, 19 nt, Artificial Sequence
  Description of Artificial Sequence: Synthetic oligonucleotide
uuucccguugggaaugaca

SEQ ID NO: 2723861 - RNA, 19 nt, Artificial Sequence
  Description of Artificial Sequence: Synthetic oligonucleotide
uguuaccagagucuucuuc

SEQ ID NO: 2723862 - RNA, 19 nt, Artificial Sequence
  Description of Artificial Sequence: Synthetic oligonucleotide
uuuugauaucccacccaug

SEQ ID NO: 2723863 - RNA, 19 nt, Artificial Sequence
  Description of Artificial Sequence: Synthetic oligonucleotide
agauaaaagcagcaguauu

SEQ ID NO: 2723864 - RNA, 19 nt, Artificial Sequence
  Description of Artificial Sequence: Synthetic oligonucleotide
cucuucuugaagaagacua

SEQ ID NO: 2723865 - RNA, 19 nt, Artificial Sequence
  Description of Artificial Sequence: Synthetic oligonucleotide
aauaggcgucuacuggugu

SEQ ID NO: 2723866 - RNA, 19 nt, Artificial Sequence
  Description of Artificial Sequence: Synthetic oligonucleotide
guugacaaccucacuauug

SEQ ID NO: 2723867 - RNA, 19 nt, Artificial Sequence
  Description of Artificial Sequence: Synthetic oligonucleotide
cugcccauuggaauaggcg

SEQ ID NO: 2723868 - RNA, 19 nt, Artificial Sequence
  Description of Artificial Sequence: Synthetic oligonucleotide
ucuacugguguuucugccu

SEQ ID NO: 2723869 - RNA, 19 nt, Artificial Sequence
  Description of Artificial Sequence: Synthetic oligonucleotide
gauacacagugaugagucc

SEQ ID NO: 2723870 - RNA, 19 nt, Artificial Sequence
  Description of Artificial Sequence: Synthetic oligonucleotide
uguauggcucgucuuucug

SEQ ID NO: 2723871 - RNA, 19 nt, Artificial Sequence
  Description of Artificial Sequence: Synthetic oligonucleotide
uguauuggagcagccagcu

SEQ ID NO: 2723872 - RNA, 19 nt, Artificial Sequence
  Description of Artificial Sequence: Synthetic oligonucleotide
ugaagcaauuucacagggu

SEQ ID NO: 2723873 - RNA, 19 nt, Artificial Sequence
  Description of Artificial Sequence: Synthetic oligonucleotide
auuggaauaggcgucuacu

SEQ ID NO: 2723874 - RNA, 19 nt, Artificial Sequence
  Description of Artificial Sequence: Synthetic oligonucleotide
ucugaguggcccagggaag

SEQ ID NO: 2723875 - RNA, 19 nt, Artificial Sequence
  Description of Artificial Sequence: Synthetic oligonucleotide
auuaauacuuacauaucaa

SEQ ID NO: 2723876 - RNA, 19 nt, Artificial Sequence
  Description of Artificial Sequence: Synthetic oligonucleotide
ucgucuuucugagagcagc

SEQ ID NO: 2723877 - RNA, 19 nt, Artificial Sequence
  Description of Artificial Sequence: Synthetic oligonucleotide
ugcgaucugguccuuugug

SEQ ID NO: 2723878 - RNA, 19 nt, Artificial Sequence
  Description of Artificial Sequence: Synthetic oligonucleotide
ucgaccaaaaugugguggu

SEQ ID NO: 2723879 - RNA, 19 nt, Artificial Sequence
  Description of Artificial Sequence: Synthetic oligonucleotide
agauugacgucuucaggcu

SEQ ID NO: 2723880 - RNA, 19 nt, Artificial Sequence
  Description of Artificial Sequence: Synthetic oligonucleotide
aaugugguggugcgaucug

SEQ ID NO: 2723881 - RNA, 19 nt, Artificial Sequence
  Description of Artificial Sequence: Synthetic oligonucleotide
uucucugcaugccaccaac

SEQ ID NO: 2723882 - RNA, 19 nt, Artificial Sequence
  Description of Artificial Sequence: Synthetic oligonucleotide
cagaaugcucuucucuugc

SEQ ID NO: 2723883 - RNA, 19 nt, Artificial Sequence
  Description of Artificial Sequence: Synthetic oligonucleotide
ucccuuaaugcugucuucc

SEQ ID NO: 2723884 - RNA, 19 nt, Artificial Sequence
  Description of Artificial Sequence: Synthetic oligonucleotide
gauugacgucuucaggcug

SEQ ID NO: 2723885 - RNA, 19 nt, Artificial Sequence
  Description of Artificial Sequence: Synthetic oligonucleotide
acaugguugacaaccucac

SEQ ID NO: 2723886 - RNA, 19 nt, Artificial Sequence
  Description of Artificial Sequence: Synthetic oligonucleotide
agggaagcgaccggguugc

SEQ ID NO: 2723887 - RNA, 19 nt, Artificial Sequence
  Description of Artificial Sequence: Synthetic oligonucleotide
ucuccuuuguuaccagagu

SEQ ID NO: 2723888 - RNA, 19 nt, Artificial Sequence
  Description of Artificial Sequence: Synthetic oligonucleotide
aaggaauuguucucuucuu

SEQ ID NO: 2723889 - RNA, 19 nt, Artificial Sequence
  Description of Artificial Sequence: Synthetic oligonucleotide
cuucuaaaaugcauuaaua

SEQ ID NO: 2723890 - RNA, 19 nt, Artificial Sequence
  Description of Artificial Sequence: Synthetic oligonucleotide
cuccuuuguuaccagaguc

SEQ ID NO: 2723891 - RNA, 19 nt, Artificial Sequence
  Description of Artificial Sequence: Synthetic oligonucleotide
ugagaagacuaacgauaca

SEQ ID NO: 2723892 - RNA, 19 nt, Artificial Sequence
  Description of Artificial Sequence: Synthetic oligonucleotide
uucuguauggcucgucuuu

SEQ ID NO: 2723893 - RNA, 19 nt, Artificial Sequence
  Description of Artificial Sequence: Synthetic oligonucleotide
aagggaugaaugaagcaau

SEQ ID NO: 2723894 - RNA, 19 nt, Artificial Sequence
  Description of Artificial Sequence: Synthetic oligonucleotide
ggugugagaagacuaacga

SEQ ID NO: 2723895 - RNA, 19 nt, Artificial Sequence
  Description of Artificial Sequence: Synthetic oligonucleotide
ugguugacaaccucacuau

SEQ ID NO: 2723896 - RNA, 19 nt, Artificial Sequence
  Description of Artificial Sequence: Synthetic oligonucleotide
ugcagucccuuaaugcugu

SEQ ID NO: 2723897 - RNA, 19 nt, Artificial Sequence
  Description of Artificial Sequence: Synthetic oligonucleotide
gacaugguugacaaccuca

SEQ ID NO: 2723898 - RNA, 19 nt, Artificial Sequence
  Description of Artificial Sequence: Synthetic oligonucleotide
uagauaaaagcagcaguau

SEQ ID NO: 2723899 - RNA, 19 nt, Artificial Sequence
  Description of Artificial Sequence: Synthetic oligonucleotide
uacgcugggaaaacauuuc

SEQ ID NO: 2723900 - RNA, 19 nt, Artificial Sequence
  Description of Artificial Sequence: Synthetic oligonucleotide
cuuucugagagcagcucuc

SEQ ID NO: 2723901 - RNA, 19 nt, Artificial Sequence
  Description of Artificial Sequence: Synthetic oligonucleotide
ggaaaacauuucucaaugc

SEQ ID NO: 2723902 - RNA, 19 nt, Artificial Sequence
  Description of Artificial Sequence: Synthetic oligonucleotide
agugaugaguccuguguau

SEQ ID NO: 2723903 - RNA, 19 nt, Artificial Sequence
  Description of Artificial Sequence: Synthetic oligonucleotide
uaaugcugucuuccgauuu

SEQ ID NO: 2723904 - RNA, 19 nt, Artificial Sequence
  Description of Artificial Sequence: Synthetic oligonucleotide
auacacagugaugaguccu

SEQ ID NO: 2723905 - RNA, 19 nt, Artificial Sequence
  Description of Artificial Sequence: Synthetic oligonucleotide
auugucacugcaccucaga

SEQ ID NO: 2723906 - RNA, 19 nt, Artificial Sequence
  Description of Artificial Sequence: Synthetic oligonucleotide
agucccuuaaugcugucuu

SEQ ID NO: 2723907 - RNA, 19 nt, Artificial Sequence
  Description of Artificial Sequence: Synthetic oligonucleotide
ugucacugcaccucagaau

SEQ ID NO: 2723908 - RNA, 19 nt, Artificial Sequence
  Description of Artificial Sequence: Synthetic oligonucleotide
acaggcaguacgcugggaa

SEQ ID NO: 2723909 - RNA, 19 nt, Artificial Sequence
  Description of Artificial Sequence: Synthetic oligonucleotide
ggaauuguucucuucuuga

SEQ ID NO: 2723910 - RNA, 19 nt, Artificial Sequence
  Description of Artificial Sequence: Synthetic oligonucleotide
uccuguguauuggagcagc

SEQ ID NO: 2723911 - RNA, 19 nt, Artificial Sequence
  Description of Artificial Sequence: Synthetic oligonucleotide
ggaaugacaugguugacaa

SEQ ID NO: 2723912 - RNA, 19 nt, Artificial Sequence
  Description of Artificial Sequence: Synthetic oligonucleotide
acaucuucuaaaaugcauu

SEQ ID NO: 2723913 - RNA, 19 nt, Artificial Sequence
  Description of Artificial Sequence: Synthetic oligonucleotide
cauuucucaaugcagacau

SEQ ID NO: 2723914 - RNA, 19 nt, Artificial Sequence
  Description of Artificial Sequence: Synthetic oligonucleotide
gcugucuuccgauuucccg

SEQ ID NO: 2723915 - RNA, 19 nt, Artificial Sequence
  Description of Artificial Sequence: Synthetic oligonucleotide
ugugguggugcgaucuggu

SEQ ID NO: 2723916 - RNA, 19 nt, Artificial Sequence
  Description of Artificial Sequence: Synthetic oligonucleotide
gucuacugguguuucugcc

SEQ ID NO: 2723917 - RNA, 19 nt, Artificial Sequence
  Description of Artificial Sequence: Synthetic oligonucleotide
uuucugagagcagcucucc

SEQ ID NO: 2723918 - RNA, 19 nt, Artificial Sequence
  Description of Artificial Sequence: Synthetic oligonucleotide
augcagacaucuucuaaaa

SEQ ID NO: 2723919 - RNA, 19 nt, Artificial Sequence
  Description of Artificial Sequence: Synthetic oligonucleotide
ugcagacaucuucuaaaau

SEQ ID NO: 2723920 - RNA, 19 nt, Artificial Sequence
  Description of Artificial Sequence: Synthetic oligonucleotide
gucuucaggcugcaguccc

SEQ ID NO: 2723921 - RNA, 19 nt, Artificial Sequence
  Description of Artificial Sequence: Synthetic oligonucleotide
agcaauuucacaggguauu

SEQ ID NO: 2723922 - RNA, 19 nt, Artificial Sequence
  Description of Artificial Sequence: Synthetic oligonucleotide
acauuucucaaugcagaca

SEQ ID NO: 2723923 - RNA, 19 nt, Artificial Sequence
  Description of Artificial Sequence: Synthetic oligonucleotide
gaauaggcgucuacuggug

SEQ ID NO: 2723924 - RNA, 19 nt, Artificial Sequence
  Description of Artificial Sequence: Synthetic oligonucleotide
augccaccaacagauugac

SEQ ID NO: 2723925 - RNA, 19 nt, Artificial Sequence
  Description of Artificial Sequence: Synthetic oligonucleotide
cugcagucccuuaaugcug

SEQ ID NO: 2723926 - RNA, 19 nt, Artificial Sequence
  Description of Artificial Sequence: Synthetic oligonucleotide
auuucacaggguauuauua

SEQ ID NO: 2723927 - RNA, 19 nt, Artificial Sequence
  Description of Artificial Sequence: Synthetic oligonucleotide
acgcugggaaaacauuucu

SEQ ID NO: 2723928 - RNA, 19 nt, Artificial Sequence
  Description of Artificial Sequence: Synthetic oligonucleotide
augcauuaauacuuacaua

SEQ ID NO: 2723929 - RNA, 19 nt, Artificial Sequence
  Description of Artificial Sequence: Synthetic oligonucleotide
cccguugggaaugacaugg

SEQ ID NO: 2723930 - RNA, 19 nt, Artificial Sequence
  Description of Artificial Sequence: Synthetic oligonucleotide
agaaugcucuucucuugca

SEQ ID NO: 2723931 - RNA, 19 nt, Artificial Sequence
  Description of Artificial Sequence: Synthetic oligonucleotide
ugacaugguugacaaccuc

SEQ ID NO: 2723932 - RNA, 19 nt, Artificial Sequence
  Description of Artificial Sequence: Synthetic oligonucleotide
uggcccagggaagcgaccg

SEQ ID NO: 2723933 - RNA, 19 nt, Artificial Sequence
  Description of Artificial Sequence: Synthetic oligonucleotide
accucagaaugcucuucuc

SEQ ID NO: 2723934 - RNA, 19 nt, Artificial Sequence
  Description of Artificial Sequence: Synthetic oligonucleotide
cuacugguguuucugccuc

SEQ ID NO: 2723935 - RNA, 19 nt, Artificial Sequence
  Description of Artificial Sequence: Synthetic oligonucleotide
gcgaucugguccuuugugg

SEQ ID NO: 2723936 - RNA, 19 nt, Artificial Sequence
  Description of Artificial Sequence: Synthetic oligonucleotide
acgauacacagugaugagu

SEQ ID NO: 2723937 - RNA, 19 nt, Artificial Sequence
  Description of Artificial Sequence: Synthetic oligonucleotide
ugccaccaacagauugacg

SEQ ID NO: 2723938 - RNA, 19 nt, Artificial Sequence
  Description of Artificial Sequence: Synthetic oligonucleotide
uuaaugcugucuuccgauu

SEQ ID NO: 2723939 - RNA, 19 nt, Artificial Sequence
  Description of Artificial Sequence: Synthetic oligonucleotide
caucuucuaaaaugcauua

SEQ ID NO: 2723940 - RNA, 19 nt, Artificial Sequence
  Description of Artificial Sequence: Synthetic oligonucleotide
cauuggaauaggcgucuac

SEQ ID NO: 2723941 - RNA, 19 nt, Artificial Sequence
  Description of Artificial Sequence: Synthetic oligonucleotide
gccaccaacagauugacgu

SEQ ID NO: 2723942 - RNA, 19 nt, Artificial Sequence
  Description of Artificial Sequence: Synthetic oligonucleotide
guauggcucgucuuucuga

SEQ ID NO: 2723943 - RNA, 19 nt, Artificial Sequence
  Description of Artificial Sequence: Synthetic oligonucleotide
cucugaguggcccagggaa

SEQ ID NO: 2723944 - RNA, 19 nt, Artificial Sequence
  Description of Artificial Sequence: Synthetic oligonucleotide
gaagcgaccggguugcccu

SEQ ID NO: 2723945 - RNA, 19 nt, Artificial Sequence
  Description of Artificial Sequence: Synthetic oligonucleotide
cuucgaccaaaauguggug

SEQ ID NO: 2723946 - RNA, 19 nt, Artificial Sequence
  Description of Artificial Sequence: Synthetic oligonucleotide
gacgucuucaggcugcagu

SEQ ID NO: 2723947 - RNA, 19 nt, Artificial Sequence
  Description of Artificial Sequence: Synthetic oligonucleotide
gguccuuugugggaggcgg

SEQ ID NO: 2723948 - RNA, 19 nt, Artificial Sequence
  Description of Artificial Sequence: Synthetic oligonucleotide
ucuguauggcucgucuuuc

SEQ ID NO: 2723949 - RNA, 19 nt, Artificial Sequence
  Description of Artificial Sequence: Synthetic oligonucleotide
gaucugguccuuuguggga

SEQ ID NO: 2723950 - RNA, 19 nt, Artificial Sequence
  Description of Artificial Sequence: Synthetic oligonucleotide
aagcaauuucacaggguau

SEQ ID NO: 2723951 - RNA, 19 nt, Artificial Sequence
  Description of Artificial Sequence: Synthetic oligonucleotide
ugaguggcccagggaagcg

SEQ ID NO: 2723952 - RNA, 19 nt, Artificial Sequence
  Description of Artificial Sequence: Synthetic oligonucleotide
cuuaaugcugucuuccgau

SEQ ID NO: 2723953 - RNA, 19 nt, Artificial Sequence
  Description of Artificial Sequence: Synthetic oligonucleotide
cuauugucacugcaccuca

SEQ ID NO: 2723954 - RNA, 19 nt, Artificial Sequence
  Description of Artificial Sequence: Synthetic oligonucleotide
cagggaagcgaccggguug

SEQ ID NO: 2723955 - RNA, 19 nt, Artificial Sequence
  Description of Artificial Sequence: Synthetic oligonucleotide
ugcccucuucucugcaugc

SEQ ID NO: 2723956 - RNA, 19 nt, Artificial Sequence
  Description of Artificial Sequence: Synthetic oligonucleotide
accggguugcccucuucuc

SEQ ID NO: 2723957 - RNA, 19 nt, Artificial Sequence
  Description of Artificial Sequence: Synthetic oligonucleotide
gcaugccaccaacagauug

SEQ ID NO: 2723958 - RNA, 19 nt, Artificial Sequence
  Description of Artificial Sequence: Synthetic oligonucleotide
augugguggugcgaucugg

SEQ ID NO: 2723959 - RNA, 19 nt, Artificial Sequence
  Description of Artificial Sequence: Synthetic oligonucleotide
uuccgauuucccguuggga

SEQ ID NO: 2723960 - RNA, 19 nt, Artificial Sequence
  Description of Artificial Sequence: Synthetic oligonucleotide
cuacuaacuuuugcacagc

SEQ ID NO: 2723961 - RNA, 19 nt, Artificial Sequence
  Description of Artificial Sequence: Synthetic oligonucleotide
aucuucuaaaaugcauuaa

SEQ ID NO: 2723962 - RNA, 19 nt, Artificial Sequence
  Description of Artificial Sequence: Synthetic oligonucleotide
cugggaaaacauuucucaa

SEQ ID NO: 2723963 - RNA, 19 nt, Artificial Sequence
  Description of Artificial Sequence: Synthetic oligonucleotide
guguauuggagcagccagc

SEQ ID NO: 2723964 - RNA, 19 nt, Artificial Sequence
  Description of Artificial Sequence: Synthetic oligonucleotide
caacagauugacgucuuca

SEQ ID NO: 2723965 - RNA, 19 nt, Artificial Sequence
  Description of Artificial Sequence: Synthetic oligonucleotide
cugaguggcccagggaagc

SEQ ID NO: 2723966 - RNA, 19 nt, Artificial Sequence
  Description of Artificial Sequence: Synthetic oligonucleotide
auucuguauggcucgucuu

SEQ ID NO: 2723967 - RNA, 19 nt, Artificial Sequence
  Description of Artificial Sequence: Synthetic oligonucleotide
auaggcgucuacugguguu

SEQ ID NO: 2723968 - RNA, 19 nt, Artificial Sequence
  Description of Artificial Sequence: Synthetic oligonucleotide
cacagugaugaguccugug

SEQ ID NO: 2723969 - RNA, 19 nt, Artificial Sequence
  Description of Artificial Sequence: Synthetic oligonucleotide
ugucuuccgauuucccguu

SEQ ID NO: 2723970 - RNA, 19 nt, Artificial Sequence
  Description of Artificial Sequence: Synthetic oligonucleotide
cacaggguauuauuagaaa

SEQ ID NO: 2723971 - RNA, 19 nt, Artificial Sequence
  Description of Artificial Sequence: Synthetic oligonucleotide
aagcgaccggguugcccuc

SEQ ID NO: 2723972 - RNA, 19 nt, Artificial Sequence
  Description of Artificial Sequence: Synthetic oligonucleotide
ugccugcccauuggaauag

SEQ ID NO: 2723973 - RNA, 19 nt, Artificial Sequence
  Description of Artificial Sequence: Synthetic oligonucleotide
uccuuugugggaggcggug

SEQ ID NO: 2723974 - RNA, 19 nt, Artificial Sequence
  Description of Artificial Sequence: Synthetic oligonucleotide
ugguccuuugugggaggcg

SEQ ID NO: 2723975 - RNA, 19 nt, Artificial Sequence
  Description of Artificial Sequence: Synthetic oligonucleotide
ggguauuauuagaaaagga

SEQ ID NO: 2723976 - RNA, 19 nt, Artificial Sequence
  Description of Artificial Sequence: Synthetic oligonucleotide
ucccguugggaaugacaug

SEQ ID NO: 2723977 - RNA, 19 nt, Artificial Sequence
  Description of Artificial Sequence: Synthetic oligonucleotide
agucuucuucgaccaaaau

SEQ ID NO: 2723978 - RNA, 19 nt, Artificial Sequence
  Description of Artificial Sequence: Synthetic oligonucleotide
ggaauaggcgucuacuggu

SEQ ID NO: 2723979 - RNA, 19 nt, Artificial Sequence
  Description of Artificial Sequence: Synthetic oligonucleotide
augacaugguugacaaccu

SEQ ID NO: 2723980 - RNA, 19 nt, Artificial Sequence
  Description of Artificial Sequence: Synthetic oligonucleotide
caguauuuugcugacauuu

SEQ ID NO: 2723981 - RNA, 19 nt, Artificial Sequence
  Description of Artificial Sequence: Synthetic oligonucleotide
gcugacauuuggcuuaaaa

SEQ ID NO: 2723982 - RNA, 19 nt, Artificial Sequence
  Description of Artificial Sequence: Synthetic oligonucleotide
cacccaugagagcugccug

SEQ ID NO: 2723983 - RNA, 19 nt, Artificial Sequence
  Description of Artificial Sequence: Synthetic oligonucleotide
cauucuguauggcucgucu

SEQ ID NO: 2723984 - RNA, 19 nt, Artificial Sequence
  Description of Artificial Sequence: Synthetic oligonucleotide
cugucuuccgauuucccgu

SEQ ID NO: 2723985 - RNA, 19 nt, Artificial Sequence
  Description of Artificial Sequence: Synthetic oligonucleotide
gaaugcucuucucuugcau

SEQ ID NO: 2723986 - RNA, 19 nt, Artificial Sequence
  Description of Artificial Sequence: Synthetic oligonucleotide
cggugugagaagacuaacg

SEQ ID NO: 2723987 - RNA, 19 nt, Artificial Sequence
  Description of Artificial Sequence: Synthetic oligonucleotide
ugcaccucagaaugcucuu

SEQ ID NO: 2723988 - RNA, 19 nt, Artificial Sequence
  Description of Artificial Sequence: Synthetic oligonucleotide
cccuuaaugcugucuuccg

SEQ ID NO: 2723989 - RNA, 19 nt, Artificial Sequence
  Description of Artificial Sequence: Synthetic oligonucleotide
auuucccguugggaaugac

SEQ ID NO: 2723990 - RNA, 19 nt, Artificial Sequence
  Description of Artificial Sequence: Synthetic oligonucleotide
aguacgcugggaaaacauu

SEQ ID NO: 2723991 - RNA, 19 nt, Artificial Sequence
  Description of Artificial Sequence: Synthetic oligonucleotide
gugugagaagacuaacgau

SEQ ID NO: 2723992 - RNA, 19 nt, Artificial Sequence
  Description of Artificial Sequence: Synthetic oligonucleotide
gcauuaauacuuacauauc

SEQ ID NO: 2723993 - RNA, 19 nt, Artificial Sequence
  Description of Artificial Sequence: Synthetic oligonucleotide
gucccuuaaugcugucuuc

SEQ ID NO: 2723994 - RNA, 19 nt, Artificial Sequence
  Description of Artificial Sequence: Synthetic oligonucleotide
gagucuucuucgaccaaaa

SEQ ID NO: 2723995 - RNA, 19 nt, Artificial Sequence
  Description of Artificial Sequence: Synthetic oligonucleotide
gcagcaguauuuugcugac

SEQ ID NO: 2723996 - RNA, 19 nt, Artificial Sequence
  Description of Artificial Sequence: Synthetic oligonucleotide
cucagaaugcucuucucuu

SEQ ID NO: 2723997 - RNA, 19 nt, Artificial Sequence
  Description of Artificial Sequence: Synthetic oligonucleotide
ucccacccaugagagcugc

SEQ ID NO: 2723998 - RNA, 19 nt, Artificial Sequence
  Description of Artificial Sequence: Synthetic oligonucleotide
aggcaguacgcugggaaaa

SEQ ID NO: 2723999 - RNA, 19 nt, Artificial Sequence
  Description of Artificial Sequence: Synthetic oligonucleotide
cuucuugaagaagacuacu

SEQ ID NO: 2724000 - RNA, 19 nt, Artificial Sequence
  Description of Artificial Sequence: Synthetic oligonucleotide
uugacgucuucaggcugca

SEQ ID NO: 2724001 - RNA, 19 nt, Artificial Sequence
  Description of Artificial Sequence: Synthetic oligonucleotide
aggcgucuacugguguuuc

SEQ ID NO: 2724002 - RNA, 19 nt, Artificial Sequence
  Description of Artificial Sequence: Synthetic oligonucleotide
ugggaaugacaugguugac

SEQ ID NO: 2724003 - RNA, 19 nt, Artificial Sequence
  Description of Artificial Sequence: Synthetic oligonucleotide
uaggcgucuacugguguuu

SEQ ID NO: 2724004 - RNA, 19 nt, Artificial Sequence
  Description of Artificial Sequence: Synthetic oligonucleotide
gacuaacgauacacaguga

SEQ ID NO: 2724005 - RNA, 19 nt, Artificial Sequence
  Description of Artificial Sequence: Synthetic oligonucleotide
acacagugaugaguccugu

SEQ ID NO: 2724006 - RNA, 19 nt, Artificial Sequence
  Description of Artificial Sequence: Synthetic oligonucleotide
cuguguauuggagcagcca

SEQ ID NO: 2724007 - RNA, 19 nt, Artificial Sequence
  Description of Artificial Sequence: Synthetic oligonucleotide
gcagcucuccuuuguuacc

SEQ ID NO: 2724008 - RNA, 19 nt, Artificial Sequence
  Description of Artificial Sequence: Synthetic oligonucleotide
auggcucgucuuucugaga

SEQ ID NO: 2724009 - RNA, 19 nt, Artificial Sequence
  Description of Artificial Sequence: Synthetic oligonucleotide
ccugcccauuggaauaggc

SEQ ID NO: 2724010 - RNA, 19 nt, Artificial Sequence
  Description of Artificial Sequence: Synthetic oligonucleotide
gguguuucugccucugagu

SEQ ID NO: 2724011 - RNA, 19 nt, Artificial Sequence
  Description of Artificial Sequence: Synthetic oligonucleotide
gccucugaguggcccaggg

SEQ ID NO: 2724012 - RNA, 19 nt, Artificial Sequence
  Description of Artificial Sequence: Synthetic oligonucleotide
ccuguguauuggagcagcc

SEQ ID NO: 2724013 - RNA, 19 nt, Artificial Sequence
  Description of Artificial Sequence: Synthetic oligonucleotide
guauuggagcagccagcuc

SEQ ID NO: 2724014 - RNA, 19 nt, Artificial Sequence
  Description of Artificial Sequence: Synthetic oligonucleotide
gcucgucuuucugagagca

SEQ ID NO: 2724015 - RNA, 19 nt, Artificial Sequence
  Description of Artificial Sequence: Synthetic oligonucleotide
gguggugcgaucugguccu

SEQ ID NO: 2724016 - RNA, 19 nt, Artificial Sequence
  Description of Artificial Sequence: Synthetic oligonucleotide
cuucucuugcauucuguau

SEQ ID NO: 2724017 - RNA, 19 nt, Artificial Sequence
  Description of Artificial Sequence: Synthetic oligonucleotide
uugcugacauuuggcuuaa

SEQ ID NO: 2724018 - RNA, 19 nt, Artificial Sequence
  Description of Artificial Sequence: Synthetic oligonucleotide
cugccugcccauuggaaua

SEQ ID NO: 2724019 - RNA, 19 nt, Artificial Sequence
  Description of Artificial Sequence: Synthetic oligonucleotide
gagcugccugcccauugga

SEQ ID NO: 2724020 - RNA, 19 nt, Artificial Sequence
  Description of Artificial Sequence: Synthetic oligonucleotide
uuguuaccagagucuucuu

SEQ ID NO: 2724021 - RNA, 19 nt, Artificial Sequence
  Description of Artificial Sequence: Synthetic oligonucleotide
cacuauugucacugcaccu

SEQ ID NO: 2724022 - RNA, 19 nt, Artificial Sequence
  Description of Artificial Sequence: Synthetic oligonucleotide
ugcaugccaccaacagauu

SEQ ID NO: 2724023 - RNA, 19 nt, Artificial Sequence
  Description of Artificial Sequence: Synthetic oligonucleotide
gauuucccguugggaauga

SEQ ID NO: 2724024 - RNA, 19 nt, Artificial Sequence
  Description of Artificial Sequence: Synthetic oligonucleotide
caggcaguacgcugggaaa

SEQ ID NO: 2724025 - RNA, 19 nt, Artificial Sequence
  Description of Artificial Sequence: Synthetic oligonucleotide
gaccggguugcccucuucu

SEQ ID NO: 2724026 - RNA, 19 nt, Artificial Sequence
  Description of Artificial Sequence: Synthetic oligonucleotide
agggaugaaugaagcaauu

SEQ ID NO: 2724027 - RNA, 19 nt, Artificial Sequence
  Description of Artificial Sequence: Synthetic oligonucleotide
ccaccaacagauugacguc

SEQ ID NO: 2724028 - RNA, 19 nt, Artificial Sequence
  Description of Artificial Sequence: Synthetic oligonucleotide
guacgcugggaaaacauuu

SEQ ID NO: 2724029 - RNA, 19 nt, Artificial Sequence
  Description of Artificial Sequence: Synthetic oligonucleotide
gcgucuacugguguuucug

SEQ ID NO: 2724030 - RNA, 19 nt, Artificial Sequence
  Description of Artificial Sequence: Synthetic oligonucleotide
uucaggcugcagucccuua

SEQ ID NO: 2724031 - RNA, 19 nt, Artificial Sequence
  Description of Artificial Sequence: Synthetic oligonucleotide
ggcucgucuuucugagagc

SEQ ID NO: 2724032 - RNA, 19 nt, Artificial Sequence
  Description of Artificial Sequence: Synthetic oligonucleotide
ccuuaaugcugucuuccga

SEQ ID NO: 2724033 - RNA, 19 nt, Artificial Sequence
  Description of Artificial Sequence: Synthetic oligonucleotide
gaggcggugugagaagacu

SEQ ID NO: 2724034 - RNA, 19 nt, Artificial Sequence
  Description of Artificial Sequence: Synthetic oligonucleotide
caguacgcugggaaaacau

SEQ ID NO: 2724035 - RNA, 19 nt, Artificial Sequence
  Description of Artificial Sequence: Synthetic oligonucleotide
ggcaguacgcugggaaaac

SEQ ID NO: 2724036 - RNA, 19 nt, Artificial Sequence
  Description of Artificial Sequence: Synthetic oligonucleotide
gaguggcccagggaagcga

SEQ ID NO: 2724037 - RNA, 19 nt, Artificial Sequence
  Description of Artificial Sequence: Synthetic oligonucleotide
cugagagcagcucuccuuu

SEQ ID NO: 2724038 - RNA, 19 nt, Artificial Sequence
  Description of Artificial Sequence: Synthetic oligonucleotide
caccaacagauugacgucu

SEQ ID NO: 2724039 - RNA, 19 nt, Artificial Sequence
  Description of Artificial Sequence: Synthetic oligonucleotide
aggcggugugagaagacua

SEQ ID NO: 2724040 - RNA, 19 nt, Artificial Sequence
  Description of Artificial Sequence: Synthetic oligonucleotide
ggaagcgaccggguugccc

SEQ ID NO: 2724041 - RNA, 19 nt, Artificial Sequence
  Description of Artificial Sequence: Synthetic oligonucleotide
accaacagauugacgucuu

SEQ ID NO: 2724042 - RNA, 19 nt, Artificial Sequence
  Description of Artificial Sequence: Synthetic oligonucleotide
gcccagggaagcgaccggg

SEQ ID NO: 2724043 - RNA, 19 nt, Artificial Sequence
  Description of Artificial Sequence: Synthetic oligonucleotide
caugguugacaaccucacu

SEQ ID NO: 2724044 - RNA, 19 nt, Artificial Sequence
  Description of Artificial Sequence: Synthetic oligonucleotide
cgcugggaaaacauuucuc

SEQ ID NO: 2724045 - RNA, 19 nt, Artificial Sequence
  Description of Artificial Sequence: Synthetic oligonucleotide
cuguauggcucgucuuucu

SEQ ID NO: 2724046 - RNA, 19 nt, Artificial Sequence
  Description of Artificial Sequence: Synthetic oligonucleotide
ggguugcccucuucucugc

SEQ ID NO: 2724047 - RNA, 19 nt, Artificial Sequence
  Description of Artificial Sequence: Synthetic oligonucleotide
gcccauuggaauaggcguc

SEQ ID NO: 2724048 - RNA, 19 nt, Artificial Sequence
  Description of Artificial Sequence: Synthetic oligonucleotide
gcaauuucacaggguauua

SEQ ID NO: 2724049 - RNA, 19 nt, Artificial Sequence
  Description of Artificial Sequence: Synthetic oligonucleotide
aucccacccaugagagcug

SEQ ID NO: 2724050 - RNA, 19 nt, Artificial Sequence
  Description of Artificial Sequence: Synthetic oligonucleotide
ccaacagauugacgucuuc

SEQ ID NO: 2724051 - RNA, 19 nt, Artificial Sequence
  Description of Artificial Sequence: Synthetic oligonucleotide
ugagagcugccugcccauu

SEQ ID NO: 2724052 - RNA, 19 nt, Artificial Sequence
  Description of Artificial Sequence: Synthetic oligonucleotide
agcugccugcccauuggaa

SEQ ID NO: 2724053 - RNA, 19 nt, Artificial Sequence
  Description of Artificial Sequence: Synthetic oligonucleotide
guugcccucuucucugcau

SEQ ID NO: 2724054 - RNA, 19 nt, Artificial Sequence
  Description of Artificial Sequence: Synthetic oligonucleotide
ggcggugugagaagacuaa

SEQ ID NO: 2724055 - RNA, 19 nt, Artificial Sequence
  Description of Artificial Sequence: Synthetic oligonucleotide
gugaugaguccuguguauu

SEQ ID NO: 2724056 - RNA, 19 nt, Artificial Sequence
  Description of Artificial Sequence: Synthetic oligonucleotide
cggguugcccucuucucug

SEQ ID NO: 2724057 - RNA, 19 nt, Artificial Sequence
  Description of Artificial Sequence: Synthetic oligonucleotide
gcaguacgcugggaaaaca

SEQ ID NO: 2724058 - RNA, 19 nt, Artificial Sequence
  Description of Artificial Sequence: Synthetic oligonucleotide
ggaggcggugugagaagac

SEQ ID NO: 2724059 - RNA, 19 nt, Artificial Sequence
  Description of Artificial Sequence: Synthetic oligonucleotide
gcaccucagaaugcucuuc

SEQ ID NO: 2724060 - RNA, 19 nt, Artificial Sequence
  Description of Artificial Sequence: Synthetic oligonucleotide
agcgaccggguugcccucu

SEQ ID NO: 2724061 - RNA, 19 nt, Artificial Sequence
  Description of Artificial Sequence: Synthetic oligonucleotide
gggaugaaugaagcaauuu

SEQ ID NO: 2724062 - RNA, 19 nt, Artificial Sequence
  Description of Artificial Sequence: Synthetic oligonucleotide
uggugcgaucugguccuuu

SEQ ID NO: 2724063 - RNA, 19 nt, Artificial Sequence
  Description of Artificial Sequence: Synthetic oligonucleotide
gcccucuucucugcaugcc

SEQ ID NO: 2724064 - RNA, 19 nt, Artificial Sequence
  Description of Artificial Sequence: Synthetic oligonucleotide
cgucuucaggcugcagucc

SEQ ID NO: 2724065 - RNA, 19 nt, Artificial Sequence
  Description of Artificial Sequence: Synthetic oligonucleotide
ccaaaaugugguggugcga

SEQ ID NO: 2724066 - RNA, 19 nt, Artificial Sequence
  Description of Artificial Sequence: Synthetic oligonucleotide
gcauucuguauggcucguc

SEQ ID NO: 2724067 - RNA, 19 nt, Artificial Sequence
  Description of Artificial Sequence: Synthetic oligonucleotide
caggcugcagucccuuaau

SEQ ID NO: 2724068 - RNA, 19 nt, Artificial Sequence
  Description of Artificial Sequence: Synthetic oligonucleotide
cagucccuuaaugcugucu

SEQ ID NO: 2724069 - RNA, 19 nt, Artificial Sequence
  Description of Artificial Sequence: Synthetic oligonucleotide
ugcugacauuuggcuuaaa

SEQ ID NO: 2724070 - RNA, 19 nt, Artificial Sequence
  Description of Artificial Sequence: Synthetic oligonucleotide
cccacccaugagagcugcc

SEQ ID NO: 2724071 - RNA, 19 nt, Artificial Sequence
  Description of Artificial Sequence: Synthetic oligonucleotide
gcagucccuuaaugcuguc

SEQ ID NO: 2724072 - RNA, 19 nt, Artificial Sequence
  Description of Artificial Sequence: Synthetic oligonucleotide
ccgauuucccguugggaau

SEQ ID NO: 2724073 - RNA, 19 nt, Artificial Sequence
  Description of Artificial Sequence: Synthetic oligonucleotide
ggcgucuacugguguuucu

SEQ ID NO: 2724074 - RNA, 19 nt, Artificial Sequence
  Description of Artificial Sequence: Synthetic oligonucleotide
ccucugaguggcccaggga

SEQ ID NO: 2724075 - RNA, 19 nt, Artificial Sequence
  Description of Artificial Sequence: Synthetic oligonucleotide
ccuuuguuaccagagucuu

SEQ ID NO: 2724076 - RNA, 19 nt, Artificial Sequence
  Description of Artificial Sequence: Synthetic oligonucleotide
guccuuugugggaggcggu

SEQ ID NO: 2724077 - RNA, 19 nt, Artificial Sequence
  Description of Artificial Sequence: Synthetic oligonucleotide
cuucaggcugcagucccuu

SEQ ID NO: 2724078 - RNA, 19 nt, Artificial Sequence
  Description of Artificial Sequence: Synthetic oligonucleotide
cgucuuucugagagcagcu

SEQ ID NO: 2724079 - RNA, 19 nt, Artificial Sequence
  Description of Artificial Sequence: Synthetic oligonucleotide
cccauuggaauaggcgucu

SEQ ID NO: 2724080 - RNA, 19 nt, Artificial Sequence
  Description of Artificial Sequence: Synthetic oligonucleotide
ccggguugcccucuucucu

SEQ ID NO: 2724081 - RNA, 19 nt, Artificial Sequence
  Description of Artificial Sequence: Synthetic oligonucleotide
ccacccaugagagcugccu

SEQ ID NO: 2724082 - RNA, 19 nt, Artificial Sequence
  Description of Artificial Sequence: Synthetic oligonucleotide
gggaagcgaccggguugcc

SEQ ID NO: 2724083 - RNA, 19 nt, Artificial Sequence
  Description of Artificial Sequence: Synthetic oligonucleotide
ccguugggaaugacauggu

SEQ ID NO: 2724084 - RNA, 19 nt, Artificial Sequence
  Description of Artificial Sequence: Synthetic oligonucleotide
ccagggaagcgaccggguu

SEQ ID NO: 2724085 - RNA, 19 nt, Artificial Sequence
  Description of Artificial Sequence: Synthetic oligonucleotide
ccauuggaauaggcgucua

SEQ ID NO: 2724086 - RNA, 19 nt, Artificial Sequence
  Description of Artificial Sequence: Synthetic oligonucleotide
cgaccggguugcccucuuc

SEQ ID NO: 2724087 - RNA, 19 nt, Artificial Sequence
  Description of Artificial Sequence: Synthetic oligonucleotide
guggugcgaucugguccuu

SEQ ID NO: 2724088 - RNA, 19 nt, Artificial Sequence
  Description of Artificial Sequence: Synthetic oligonucleotide
gcgaccggguugcccucuu

SEQ ID NO: 2724089 - RNA, 19 nt, Artificial Sequence
  Description of Artificial Sequence: Synthetic oligonucleotide
aaaagaaucacccaagugg

SEQ ID NO: 2724090 - RNA, 19 nt, Artificial Sequence
  Description of Artificial Sequence: Synthetic oligonucleotide
uaaacaaucccacaaauag

SEQ ID NO: 2724091 - RNA, 19 nt, Artificial Sequence
  Description of Artificial Sequence: Synthetic oligonucleotide
aagaugaucaggcuaacag

SEQ ID NO: 2724092 - RNA, 19 nt, Artificial Sequence
  Description of Artificial Sequence: Synthetic oligonucleotide
aauaagagaggagagggcg

SEQ ID NO: 2724093 - RNA, 19 nt, Artificial Sequence
  Description of Artificial Sequence: Synthetic oligonucleotide
auaggugauaaacaauccc

SEQ ID NO: 2724094 - RNA, 19 nt, Artificial Sequence
  Description of Artificial Sequence: Synthetic oligonucleotide
aaugaagggcaaaagaauc

SEQ ID NO: 2724095 - RNA, 19 nt, Artificial Sequence
  Description of Artificial Sequence: Synthetic oligonucleotide
aaaacaaggcaagagagca

SEQ ID NO: 2724096 - RNA, 19 nt, Artificial Sequence
  Description of Artificial Sequence: Synthetic oligonucleotide
uuuguggaugacaugcugg

SEQ ID NO: 2724097 - RNA, 19 nt, Artificial Sequence
  Description of Artificial Sequence: Synthetic oligonucleotide
gaugaucaggcuaacagcg

SEQ ID NO: 2724098 - RNA, 19 nt, Artificial Sequence
  Description of Artificial Sequence: Synthetic oligonucleotide
agaugaucaggcuaacagc

SEQ ID NO: 2724099 - RNA, 19 nt, Artificial Sequence
  Description of Artificial Sequence: Synthetic oligonucleotide
accagcaauguucaggccc

SEQ ID NO: 2724100 - RNA, 19 nt, Artificial Sequence
  Description of Artificial Sequence: Synthetic oligonucleotide
aggaugugacacuuggucc

SEQ ID NO: 2724101 - RNA, 19 nt, Artificial Sequence
  Description of Artificial Sequence: Synthetic oligonucleotide
acauaggugauaaacaauc

SEQ ID NO: 2724102 - RNA, 19 nt, Artificial Sequence
  Description of Artificial Sequence: Synthetic oligonucleotide
agagcuuugacugugaggu

SEQ ID NO: 2724103 - RNA, 19 nt, Artificial Sequence
  Description of Artificial Sequence: Synthetic oligonucleotide
aacaaucccacaaauagga

SEQ ID NO: 2724104 - RNA, 19 nt, Artificial Sequence
  Description of Artificial Sequence: Synthetic oligonucleotide
ucagaguugagcuguaagc

SEQ ID NO: 2724105 - RNA, 19 nt, Artificial Sequence
  Description of Artificial Sequence: Synthetic oligonucleotide
guauuuguggaugacaugc

SEQ ID NO: 2724106 - RNA, 19 nt, Artificial Sequence
  Description of Artificial Sequence: Synthetic oligonucleotide
aaucccaccacuuggucug

SEQ ID NO: 2724107 - RNA, 19 nt, Artificial Sequence
  Description of Artificial Sequence: Synthetic oligonucleotide
aguuugucagaguugagcu

SEQ ID NO: 2724108 - RNA, 19 nt, Artificial Sequence
  Description of Artificial Sequence: Synthetic oligonucleotide
ugcagcaucuaucagcaca

SEQ ID NO: 2724109 - RNA, 19 nt, Artificial Sequence
  Description of Artificial Sequence: Synthetic oligonucleotide
aaacaaucccacaaauagg

SEQ ID NO: 2724110 - RNA, 19 nt, Artificial Sequence
  Description of Artificial Sequence: Synthetic oligonucleotide
aaggaugaauaagagagga

SEQ ID NO: 2724111 - RNA, 19 nt, Artificial Sequence
  Description of Artificial Sequence: Synthetic oligonucleotide
aaucccacaaauaggagca

SEQ ID NO: 2724112 - RNA, 19 nt, Artificial Sequence
  Description of Artificial Sequence: Synthetic oligonucleotide
aaagaaucacccaaguggu

SEQ ID NO: 2724113 - RNA, 19 nt, Artificial Sequence
  Description of Artificial Sequence: Synthetic oligonucleotide
caaucccacaaauaggagc

SEQ ID NO: 2724114 - RNA, 19 nt, Artificial Sequence
  Description of Artificial Sequence: Synthetic oligonucleotide
cacaaauaggagcagcagg

SEQ ID NO: 2724115 - RNA, 19 nt, Artificial Sequence
  Description of Artificial Sequence: Synthetic oligonucleotide
ugugagguggacaggacca

SEQ ID NO: 2724116 - RNA, 19 nt, Artificial Sequence
  Description of Artificial Sequence: Synthetic oligonucleotide
uccuaaagaggacugcagc

SEQ ID NO: 2724117 - RNA, 19 nt, Artificial Sequence
  Description of Artificial Sequence: Synthetic oligonucleotide
ugauaaacaaucccacaaa

SEQ ID NO: 2724118 - RNA, 19 nt, Artificial Sequence
  Description of Artificial Sequence: Synthetic oligonucleotide
ucacauaggugauaaacaa

SEQ ID NO: 2724119 - RNA, 19 nt, Artificial Sequence
  Description of Artificial Sequence: Synthetic oligonucleotide
caaccagcaauguucaggc

SEQ ID NO: 2724120 - RNA, 19 nt, Artificial Sequence
  Description of Artificial Sequence: Synthetic oligonucleotide
guauccucaucccugcugg

SEQ ID NO: 2724121 - RNA, 19 nt, Artificial Sequence
  Description of Artificial Sequence: Synthetic oligonucleotide
uuugucagaguugagcugu

SEQ ID NO: 2724122 - RNA, 19 nt, Artificial Sequence
  Description of Artificial Sequence: Synthetic oligonucleotide
guaggcacgaggcaggaag

SEQ ID NO: 2724123 - RNA, 19 nt, Artificial Sequence
  Description of Artificial Sequence: Synthetic oligonucleotide
cauaggugauaaacaaucc

SEQ ID NO: 2724124 - RNA, 19 nt, Artificial Sequence
  Description of Artificial Sequence: Synthetic oligonucleotide
augaauaagagaggagagg

SEQ ID NO: 2724125 - RNA, 19 nt, Artificial Sequence
  Description of Artificial Sequence: Synthetic oligonucleotide
caucacauaggugauaaac

SEQ ID NO: 2724126 - RNA, 19 nt, Artificial Sequence
  Description of Artificial Sequence: Synthetic oligonucleotide
agaaccuugugggaguggc

SEQ ID NO: 2724127 - RNA, 19 nt, Artificial Sequence
  Description of Artificial Sequence: Synthetic oligonucleotide
acccaagugguguaguagg

SEQ ID NO: 2724128 - RNA, 19 nt, Artificial Sequence
  Description of Artificial Sequence: Synthetic oligonucleotide
ugagcccgaagccaugagg

SEQ ID NO: 2724129 - RNA, 19 nt, Artificial Sequence
  Description of Artificial Sequence: Synthetic oligonucleotide
agaguugagcuguaagcag

SEQ ID NO: 2724130 - RNA, 19 nt, Artificial Sequence
  Description of Artificial Sequence: Synthetic oligonucleotide
gagauauggagaaggcugg

SEQ ID NO: 2724131 - RNA, 19 nt, Artificial Sequence
  Description of Artificial Sequence: Synthetic oligonucleotide
agggagagguuucccaacc

SEQ ID NO: 2724132 - RNA, 19 nt, Artificial Sequence
  Description of Artificial Sequence: Synthetic oligonucleotide
gaaggaugaauaagagagg

SEQ ID NO: 2724133 - RNA, 19 nt, Artificial Sequence
  Description of Artificial Sequence: Synthetic oligonucleotide
agccccaccuccuaaagag

SEQ ID NO: 2724134 - RNA, 19 nt, Artificial Sequence
  Description of Artificial Sequence: Synthetic oligonucleotide
acagcgacgaggccaaauc

SEQ ID NO: 2724135 - RNA, 19 nt, Artificial Sequence
  Description of Artificial Sequence: Synthetic oligonucleotide
caggcuaacagcgacgagg

SEQ ID NO: 2724136 - RNA, 19 nt, Artificial Sequence
  Description of Artificial Sequence: Synthetic oligonucleotide
ugaucaggcuaacagcgac

SEQ ID NO: 2724137 - RNA, 19 nt, Artificial Sequence
  Description of Artificial Sequence: Synthetic oligonucleotide
gagagcuuugacugugagg

SEQ ID NO: 2724138 - RNA, 19 nt, Artificial Sequence
  Description of Artificial Sequence: Synthetic oligonucleotide
uguucaggcccugagcccg

SEQ ID NO: 2724139 - RNA, 19 nt, Artificial Sequence
  Description of Artificial Sequence: Synthetic oligonucleotide
uggcugucaaugaagggca

SEQ ID NO: 2724140 - RNA, 19 nt, Artificial Sequence
  Description of Artificial Sequence: Synthetic oligonucleotide
aguggcagagagcuuugac

SEQ ID NO: 2724141 - RNA, 19 nt, Artificial Sequence
  Description of Artificial Sequence: Synthetic oligonucleotide
cuuggcuuccagaaggaug

SEQ ID NO: 2724142 - RNA, 19 nt, Artificial Sequence
  Description of Artificial Sequence: Synthetic oligonucleotide
auauggagaaggcugguau

SEQ ID NO: 2724143 - RNA, 19 nt, Artificial Sequence
  Description of Artificial Sequence: Synthetic oligonucleotide
guaggugaagaugaucagg

SEQ ID NO: 2724144 - RNA, 19 nt, Artificial Sequence
  Description of Artificial Sequence: Synthetic oligonucleotide
acaaauaggagcagcagga

SEQ ID NO: 2724145 - RNA, 19 nt, Artificial Sequence
  Description of Artificial Sequence: Synthetic oligonucleotide
auuuguggaugacaugcug

SEQ ID NO: 2724146 - RNA, 19 nt, Artificial Sequence
  Description of Artificial Sequence: Synthetic oligonucleotide
uaaagaggacugcagcagu

SEQ ID NO: 2724147 - RNA, 19 nt, Artificial Sequence
  Description of Artificial Sequence: Synthetic oligonucleotide
ucagucuucggcucuucag

SEQ ID NO: 2724148 - RNA, 19 nt, Artificial Sequence
  Description of Artificial Sequence: Synthetic oligonucleotide
ggagauauggagaaggcug

SEQ ID NO: 2724149 - RNA, 19 nt, Artificial Sequence
  Description of Artificial Sequence: Synthetic oligonucleotide
gagcccgaagccaugaggg

SEQ ID NO: 2724150 - RNA, 19 nt, Artificial Sequence
  Description of Artificial Sequence: Synthetic oligonucleotide
aguaggugaagaugaucag

SEQ ID NO: 2724151 - RNA, 19 nt, Artificial Sequence
  Description of Artificial Sequence: Synthetic oligonucleotide
aaccagcaauguucaggcc

SEQ ID NO: 2724152 - RNA, 19 nt, Artificial Sequence
  Description of Artificial Sequence: Synthetic oligonucleotide
aaagaggacugcagcaguc

SEQ ID NO: 2724153 - RNA, 19 nt, Artificial Sequence
  Description of Artificial Sequence: Synthetic oligonucleotide
cuaaagaggacugcagcag

SEQ ID NO: 2724154 - RNA, 19 nt, Artificial Sequence
  Description of Artificial Sequence: Synthetic oligonucleotide
uguaucaggaugugacacu

SEQ ID NO: 2724155 - RNA, 19 nt, Artificial Sequence
  Description of Artificial Sequence: Synthetic oligonucleotide
ggaggagauauggagaagg

SEQ ID NO: 2724156 - RNA, 19 nt, Artificial Sequence
  Description of Artificial Sequence: Synthetic oligonucleotide
aguugagcuguaagcagcc

SEQ ID NO: 2724157 - RNA, 19 nt, Artificial Sequence
  Description of Artificial Sequence: Synthetic oligonucleotide
ucaggcugacuguaucagg

SEQ ID NO: 2724158 - RNA, 19 nt, Artificial Sequence
  Description of Artificial Sequence: Synthetic oligonucleotide
gaagccaugagggagaggu

SEQ ID NO: 2724159 - RNA, 19 nt, Artificial Sequence
  Description of Artificial Sequence: Synthetic oligonucleotide
auguucaggcccugagccc

SEQ ID NO: 2724160 - RNA, 19 nt, Artificial Sequence
  Description of Artificial Sequence: Synthetic oligonucleotide
agcaucuaucagcacauga

SEQ ID NO: 2724161 - RNA, 19 nt, Artificial Sequence
  Description of Artificial Sequence: Synthetic oligonucleotide
ugaagggcaaaagaaucac

SEQ ID NO: 2724162 - RNA, 19 nt, Artificial Sequence
  Description of Artificial Sequence: Synthetic oligonucleotide
ugucaaugaagggcaaaag

SEQ ID NO: 2724163 - RNA, 19 nt, Artificial Sequence
  Description of Artificial Sequence: Synthetic oligonucleotide
gucagaguugagcuguaag

SEQ ID NO: 2724164 - RNA, 19 nt, Artificial Sequence
  Description of Artificial Sequence: Synthetic oligonucleotide
agaaucacccaaguggugu

SEQ ID NO: 2724165 - RNA, 19 nt, Artificial Sequence
  Description of Artificial Sequence: Synthetic oligonucleotide
aggcuaacagcgacgaggc

SEQ ID NO: 2724166 - RNA, 19 nt, Artificial Sequence
  Description of Artificial Sequence: Synthetic oligonucleotide
caguuugucagaguugagc

SEQ ID NO: 2724167 - RNA, 19 nt, Artificial Sequence
  Description of Artificial Sequence: Synthetic oligonucleotide
ucagcacaugacaggagga

SEQ ID NO: 2724168 - RNA, 19 nt, Artificial Sequence
  Description of Artificial Sequence: Synthetic oligonucleotide
aucacauaggugauaaaca

SEQ ID NO: 2724169 - RNA, 19 nt, Artificial Sequence
  Description of Artificial Sequence: Synthetic oligonucleotide
gacagcguaggcacgaggc

SEQ ID NO: 2724170 - RNA, 19 nt, Artificial Sequence
  Description of Artificial Sequence: Synthetic oligonucleotide
ugacacuuggucccuuccc

SEQ ID NO: 2724171 - RNA, 19 nt, Artificial Sequence
  Description of Artificial Sequence: Synthetic oligonucleotide
gaguugagcuguaagcagc

SEQ ID NO: 2724172 - RNA, 19 nt, Artificial Sequence
  Description of Artificial Sequence: Synthetic oligonucleotide
ggaugaauaagagaggaga

SEQ ID NO: 2724173 - RNA, 19 nt, Artificial Sequence
  Description of Artificial Sequence: Synthetic oligonucleotide
agcgacgaggccaaauccc

SEQ ID NO: 2724174 - RNA, 19 nt, Artificial Sequence
  Description of Artificial Sequence: Synthetic oligonucleotide
cagucuucggcucuucagc

SEQ ID NO: 2724175 - RNA, 19 nt, Artificial Sequence
  Description of Artificial Sequence: Synthetic oligonucleotide
ggaugugacacuugguccc

SEQ ID NO: 2724176 - RNA, 19 nt, Artificial Sequence
  Description of Artificial Sequence: Synthetic oligonucleotide
uuccucuuggcuuccagaa

SEQ ID NO: 2724177 - RNA, 19 nt, Artificial Sequence
  Description of Artificial Sequence: Synthetic oligonucleotide
uaucagcacaugacaggag

SEQ ID NO: 2724178 - RNA, 19 nt, Artificial Sequence
  Description of Artificial Sequence: Synthetic oligonucleotide
gacgaggccaaaucccacc

SEQ ID NO: 2724179 - RNA, 19 nt, Artificial Sequence
  Description of Artificial Sequence: Synthetic oligonucleotide
acuguaucaggaugugaca

SEQ ID NO: 2724180 - RNA, 19 nt, Artificial Sequence
  Description of Artificial Sequence: Synthetic oligonucleotide
caacccacguuccucuugg

SEQ ID NO: 2724181 - RNA, 19 nt, Artificial Sequence
  Description of Artificial Sequence: Synthetic oligonucleotide
gaucaggcuaacagcgacg

SEQ ID NO: 2724182 - RNA, 19 nt, Artificial Sequence
  Description of Artificial Sequence: Synthetic oligonucleotide
agcuguaagcagccccacc

SEQ ID NO: 2724183 - RNA, 19 nt, Artificial Sequence
  Description of Artificial Sequence: Synthetic oligonucleotide
caauguucaggcccugagc

SEQ ID NO: 2724184 - RNA, 19 nt, Artificial Sequence
  Description of Artificial Sequence: Synthetic oligonucleotide
gacaugcuggcugucaaug

SEQ ID NO: 2724185 - RNA, 19 nt, Artificial Sequence
  Description of Artificial Sequence: Synthetic oligonucleotide
caagugguguaguagguga

SEQ ID NO: 2724186 - RNA, 19 nt, Artificial Sequence
  Description of Artificial Sequence: Synthetic oligonucleotide
gaugaggacagcguaggca

SEQ ID NO: 2724187 - RNA, 19 nt, Artificial Sequence
  Description of Artificial Sequence: Synthetic oligonucleotide
aaacaaggcaagagagcag

SEQ ID NO: 2724188 - RNA, 19 nt, Artificial Sequence
  Description of Artificial Sequence: Synthetic oligonucleotide
guggacaggaccaaccagc

SEQ ID NO: 2724189 - RNA, 19 nt, Artificial Sequence
  Description of Artificial Sequence: Synthetic oligonucleotide
uauggagaaggcugguauc

SEQ ID NO: 2724190 - RNA, 19 nt, Artificial Sequence
  Description of Artificial Sequence: Synthetic oligonucleotide
gccaaaucccaccacuugg

SEQ ID NO: 2724191 - RNA, 19 nt, Artificial Sequence
  Description of Artificial Sequence: Synthetic oligonucleotide
cuguaucaggaugugacac

SEQ ID NO: 2724192 - RNA, 19 nt, Artificial Sequence
  Description of Artificial Sequence: Synthetic oligonucleotide
gaagggcaaaagaaucacc

SEQ ID NO: 2724193 - RNA, 19 nt, Artificial Sequence
  Description of Artificial Sequence: Synthetic oligonucleotide
cugugagguggacaggacc

SEQ ID NO: 2724194 - RNA, 19 nt, Artificial Sequence
  Description of Artificial Sequence: Synthetic oligonucleotide
uguaguaggugaagaugau

SEQ ID NO: 2724195 - RNA, 19 nt, Artificial Sequence
  Description of Artificial Sequence: Synthetic oligonucleotide
guuugucagaguugagcug

SEQ ID NO: 2724196 - RNA, 19 nt, Artificial Sequence
  Description of Artificial Sequence: Synthetic oligonucleotide
ugaggacagcguaggcacg

SEQ ID NO: 2724197 - RNA, 19 nt, Artificial Sequence
  Description of Artificial Sequence: Synthetic oligonucleotide
uggaugacaugcuggcugu

SEQ ID NO: 2724198 - RNA, 19 nt, Artificial Sequence
  Description of Artificial Sequence: Synthetic oligonucleotide
aaucacccaagugguguag

SEQ ID NO: 2724199 - RNA, 19 nt, Artificial Sequence
  Description of Artificial Sequence: Synthetic oligonucleotide
agggcaaaagaaucaccca

SEQ ID NO: 2724200 - RNA, 19 nt, Artificial Sequence
  Description of Artificial Sequence: Synthetic oligonucleotide
ccucuuggcuuccagaagg

SEQ ID NO: 2724201 - RNA, 19 nt, Artificial Sequence
  Description of Artificial Sequence: Synthetic oligonucleotide
ucacugagccuucuugguc

SEQ ID NO: 2724202 - RNA, 19 nt, Artificial Sequence
  Description of Artificial Sequence: Synthetic oligonucleotide
aacccacguuccucuuggc

SEQ ID NO: 2724203 - RNA, 19 nt, Artificial Sequence
  Description of Artificial Sequence: Synthetic oligonucleotide
cugguauccucaucccugc

SEQ ID NO: 2724204 - RNA, 19 nt, Artificial Sequence
  Description of Artificial Sequence: Synthetic oligonucleotide
augaagggcaaaagaauca

SEQ ID NO: 2724205 - RNA, 19 nt, Artificial Sequence
  Description of Artificial Sequence: Synthetic oligonucleotide
gaggagauauggagaaggc

SEQ ID NO: 2724206 - RNA, 19 nt, Artificial Sequence
  Description of Artificial Sequence: Synthetic oligonucleotide
cacuuggucccuucccugg

SEQ ID NO: 2724207 - RNA, 19 nt, Artificial Sequence
  Description of Artificial Sequence: Synthetic oligonucleotide
uaucaggaugugacacuug

SEQ ID NO: 2724208 - RNA, 19 nt, Artificial Sequence
  Description of Artificial Sequence: Synthetic oligonucleotide
aagaggacugcagcaguca

SEQ ID NO: 2724209 - RNA, 19 nt, Artificial Sequence
  Description of Artificial Sequence: Synthetic oligonucleotide
ucaggaugugacacuuggu

SEQ ID NO: 2724210 - RNA, 19 nt, Artificial Sequence
  Description of Artificial Sequence: Synthetic oligonucleotide
ugguguaguaggugaagau

SEQ ID NO: 2724211 - RNA, 19 nt, Artificial Sequence
  Description of Artificial Sequence: Synthetic oligonucleotide
gguguaguaggugaagaug

SEQ ID NO: 2724212 - RNA, 19 nt, Artificial Sequence
  Description of Artificial Sequence: Synthetic oligonucleotide
accuccuaaagaggacugc

SEQ ID NO: 2724213 - RNA, 19 nt, Artificial Sequence
  Description of Artificial Sequence: Synthetic oligonucleotide
gugaagaugaucaggcuaa

SEQ ID NO: 2724214 - RNA, 19 nt, Artificial Sequence
  Description of Artificial Sequence: Synthetic oligonucleotide
agcagaaccuugugggagu

SEQ ID NO: 2724215 - RNA, 19 nt, Artificial Sequence
  Description of Artificial Sequence: Synthetic oligonucleotide
ggagagggcguccaguuug

SEQ ID NO: 2724216 - RNA, 19 nt, Artificial Sequence
  Description of Artificial Sequence: Synthetic oligonucleotide
agugguguaguaggugaag

SEQ ID NO: 2724217 - RNA, 19 nt, Artificial Sequence
  Description of Artificial Sequence: Synthetic oligonucleotide
ugagccuucuuggucaguc

SEQ ID NO: 2724218 - RNA, 19 nt, Artificial Sequence
  Description of Artificial Sequence: Synthetic oligonucleotide
ugcuggacccucacugagc

SEQ ID NO: 2724219 - RNA, 19 nt, Artificial Sequence
  Description of Artificial Sequence: Synthetic oligonucleotide
uuucccaacccacguuccu

SEQ ID NO: 2724220 - RNA, 19 nt, Artificial Sequence
  Description of Artificial Sequence: Synthetic oligonucleotide
caaauaggagcagcaggag

SEQ ID NO: 2724221 - RNA, 19 nt, Artificial Sequence
  Description of Artificial Sequence: Synthetic oligonucleotide
ggaccaaccagcaauguuc

SEQ ID NO: 2724222 - RNA, 19 nt, Artificial Sequence
  Description of Artificial Sequence: Synthetic oligonucleotide
caggcugacuguaucagga

SEQ ID NO: 2724223 - RNA, 19 nt, Artificial Sequence
  Description of Artificial Sequence: Synthetic oligonucleotide
cacugagccuucuugguca

SEQ ID NO: 2724224 - RNA, 19 nt, Artificial Sequence
  Description of Artificial Sequence: Synthetic oligonucleotide
caccacuuggucugucccg

SEQ ID NO: 2724225 - RNA, 19 nt, Artificial Sequence
  Description of Artificial Sequence: Synthetic oligonucleotide
cagaguugagcuguaagca

SEQ ID NO: 2724226 - RNA, 19 nt, Artificial Sequence
  Description of Artificial Sequence: Synthetic oligonucleotide
uaagagaggagagggcguc

SEQ ID NO: 2724227 - RNA, 19 nt, Artificial Sequence
  Description of Artificial Sequence: Synthetic oligonucleotide
gacugugagguggacagga

SEQ ID NO: 2724228 - RNA, 19 nt, Artificial Sequence
  Description of Artificial Sequence: Synthetic oligonucleotide
cuggaggagauauggagaa

SEQ ID NO: 2724229 - RNA, 19 nt, Artificial Sequence
  Description of Artificial Sequence: Synthetic oligonucleotide
aggaugaauaagagaggag

SEQ ID NO: 2724230 - RNA, 19 nt, Artificial Sequence
  Description of Artificial Sequence: Synthetic oligonucleotide
aucaggcuaacagcgacga

SEQ ID NO: 2724231 - RNA, 19 nt, Artificial Sequence
  Description of Artificial Sequence: Synthetic oligonucleotide
aggagauauggagaaggcu

SEQ ID NO: 2724232 - RNA, 19 nt, Artificial Sequence
  Description of Artificial Sequence: Synthetic oligonucleotide
ccaaccagcaauguucagg

SEQ ID NO: 2724233 - RNA, 19 nt, Artificial Sequence
  Description of Artificial Sequence: Synthetic oligonucleotide
cuuggucugucccgguggc

SEQ ID NO: 2724234 - RNA, 19 nt, Artificial Sequence
  Description of Artificial Sequence: Synthetic oligonucleotide
uaggcacgaggcaggaagu

SEQ ID NO: 2724235 - RNA, 19 nt, Artificial Sequence
  Description of Artificial Sequence: Synthetic oligonucleotide
ucccaacccacguuccucu

SEQ ID NO: 2724236 - RNA, 19 nt, Artificial Sequence
  Description of Artificial Sequence: Synthetic oligonucleotide
cagcgacgaggccaaaucc

SEQ ID NO: 2724237 - RNA, 19 nt, Artificial Sequence
  Description of Artificial Sequence: Synthetic oligonucleotide
acaugcuggcugucaauga

SEQ ID NO: 2724238 - RNA, 19 nt, Artificial Sequence
  Description of Artificial Sequence: Synthetic oligonucleotide
gagggagagguuucccaac

SEQ ID NO: 2724239 - RNA, 19 nt, Artificial Sequence
  Description of Artificial Sequence: Synthetic oligonucleotide
gcaucuaucagcacaugac

SEQ ID NO: 2724240 - RNA, 19 nt, Artificial Sequence
  Description of Artificial Sequence: Synthetic oligonucleotide
gucaggcugacuguaucag

SEQ ID NO: 2724241 - RNA, 19 nt, Artificial Sequence
  Description of Artificial Sequence: Synthetic oligonucleotide
ggugaagaugaucaggcua

SEQ ID NO: 2724242 - RNA, 19 nt, Artificial Sequence
  Description of Artificial Sequence: Synthetic oligonucleotide
cuuccagaaggaugaauaa

SEQ ID NO: 2724243 - RNA, 19 nt, Artificial Sequence
  Description of Artificial Sequence: Synthetic oligonucleotide
ggcaggaaguauuugugga

SEQ ID NO: 2724244 - RNA, 19 nt, Artificial Sequence
  Description of Artificial Sequence: Synthetic oligonucleotide
gagaaggcugguauccuca

SEQ ID NO: 2724245 - RNA, 19 nt, Artificial Sequence
  Description of Artificial Sequence: Synthetic oligonucleotide
acgaggccaaaucccacca

SEQ ID NO: 2724246 - RNA, 19 nt, Artificial Sequence
  Description of Artificial Sequence: Synthetic oligonucleotide
ucaggcuaacagcgacgag

SEQ ID NO: 2724247 - RNA, 19 nt, Artificial Sequence
  Description of Artificial Sequence: Synthetic oligonucleotide
acagcguaggcacgaggca

SEQ ID NO: 2724248 - RNA, 19 nt, Artificial Sequence
  Description of Artificial Sequence: Synthetic oligonucleotide
acaaucccacaaauaggag

SEQ ID NO: 2724249 - RNA, 19 nt, Artificial Sequence
  Description of Artificial Sequence: Synthetic oligonucleotide
gaagaugaucaggcuaaca

SEQ ID NO: 2724250 - RNA, 19 nt, Artificial Sequence
  Description of Artificial Sequence: Synthetic oligonucleotide
ugugacacuuggucccuuc

SEQ ID NO: 2724251 - RNA, 19 nt, Artificial Sequence
  Description of Artificial Sequence: Synthetic oligonucleotide
cuaacagcgacgaggccaa

SEQ ID NO: 2724252 - RNA, 19 nt, Artificial Sequence
  Description of Artificial Sequence: Synthetic oligonucleotide
cuucuuggucagucuucgg

SEQ ID NO: 2724253 - RNA, 19 nt, Artificial Sequence
  Description of Artificial Sequence: Synthetic oligonucleotide
gugacacuuggucccuucc

SEQ ID NO: 2724254 - RNA, 19 nt, Artificial Sequence
  Description of Artificial Sequence: Synthetic oligonucleotide
caccuccuaaagaggacug

SEQ ID NO: 2724255 - RNA, 19 nt, Artificial Sequence
  Description of Artificial Sequence: Synthetic oligonucleotide
gcuaacagcgacgaggcca

SEQ ID NO: 2724256 - RNA, 19 nt, Artificial Sequence
  Description of Artificial Sequence: Synthetic oligonucleotide
gggaugaggacagcguagg

SEQ ID NO: 2724257 - RNA, 19 nt, Artificial Sequence
  Description of Artificial Sequence: Synthetic oligonucleotide
guaguaggugaagaugauc

SEQ ID NO: 2724258 - RNA, 19 nt, Artificial Sequence
  Description of Artificial Sequence: Synthetic oligonucleotide
uggacccucacugagccuu

SEQ ID NO: 2724259 - RNA, 19 nt, Artificial Sequence
  Description of Artificial Sequence: Synthetic oligonucleotide
acaggaccaaccagcaaug

SEQ ID NO: 2724260 - RNA, 19 nt, Artificial Sequence
  Description of Artificial Sequence: Synthetic oligonucleotide
gaccaaccagcaauguuca

SEQ ID NO: 2724261 - RNA, 19 nt, Artificial Sequence
  Description of Artificial Sequence: Synthetic oligonucleotide
ucccuggaggagauaugga

SEQ ID NO: 2724262 - RNA, 19 nt, Artificial Sequence
  Description of Artificial Sequence: Synthetic oligonucleotide
aggaccaaccagcaauguu

SEQ ID NO: 2724263 - RNA, 19 nt, Artificial Sequence
  Description of Artificial Sequence: Synthetic oligonucleotide
uggaggagauauggagaag

SEQ ID NO: 2724264 - RNA, 19 nt, Artificial Sequence
  Description of Artificial Sequence: Synthetic oligonucleotide
gggcaaaagaaucacccaa

SEQ ID NO: 2724265 - RNA, 19 nt, Artificial Sequence
  Description of Artificial Sequence: Synthetic oligonucleotide
cacccaagugguguaguag

SEQ ID NO: 2724266 - RNA, 19 nt, Artificial Sequence
  Description of Artificial Sequence: Synthetic oligonucleotide
uggucccuucccuggagga

SEQ ID NO: 2724267 - RNA, 19 nt, Artificial Sequence
  Description of Artificial Sequence: Synthetic oligonucleotide
gacacuuggucccuucccu

SEQ ID NO: 2724268 - RNA, 19 nt, Artificial Sequence
  Description of Artificial Sequence: Synthetic oligonucleotide
gaggccaaaucccaccacu

SEQ ID NO: 2724269 - RNA, 19 nt, Artificial Sequence
  Description of Artificial Sequence: Synthetic oligonucleotide
ugaagaugaucaggcuaac

SEQ ID NO: 2724270 - RNA, 19 nt, Artificial Sequence
  Description of Artificial Sequence: Synthetic oligonucleotide
gaggccugcagcaucuauc

SEQ ID NO: 2724271 - RNA, 19 nt, Artificial Sequence
  Description of Artificial Sequence: Synthetic oligonucleotide
acccacguuccucuuggcu

SEQ ID NO: 2724272 - RNA, 19 nt, Artificial Sequence
  Description of Artificial Sequence: Synthetic oligonucleotide
ccuaaagaggacugcagca

SEQ ID NO: 2724273 - RNA, 19 nt, Artificial Sequence
  Description of Artificial Sequence: Synthetic oligonucleotide
cagcguaggcacgaggcag

SEQ ID NO: 2724274 - RNA, 19 nt, Artificial Sequence
  Description of Artificial Sequence: Synthetic oligonucleotide
aacagcgacgaggccaaau

SEQ ID NO: 2724275 - RNA, 19 nt, Artificial Sequence
  Description of Artificial Sequence: Synthetic oligonucleotide
ugacugugagguggacagg

SEQ ID NO: 2724276 - RNA, 19 nt, Artificial Sequence
  Description of Artificial Sequence: Synthetic oligonucleotide
gaaucacccaaguggugua

SEQ ID NO: 2724277 - RNA, 19 nt, Artificial Sequence
  Description of Artificial Sequence: Synthetic oligonucleotide
gagaggagagggcguccag

SEQ ID NO: 2724278 - RNA, 19 nt, Artificial Sequence
  Description of Artificial Sequence: Synthetic oligonucleotide
ucacccaagugguguagua

SEQ ID NO: 2724279 - RNA, 19 nt, Artificial Sequence
  Description of Artificial Sequence: Synthetic oligonucleotide
acugcagcagucaggcuga

SEQ ID NO: 2724280 - RNA, 19 nt, Artificial Sequence
  Description of Artificial Sequence: Synthetic oligonucleotide
ugacaugcuggcugucaau

SEQ ID NO: 2724281 - RNA, 19 nt, Artificial Sequence
  Description of Artificial Sequence: Synthetic oligonucleotide
gagcuuugacugugaggug

SEQ ID NO: 2724282 - RNA, 19 nt, Artificial Sequence
  Description of Artificial Sequence: Synthetic oligonucleotide
agcacaugacaggaggaaa

SEQ ID NO: 2724283 - RNA, 19 nt, Artificial Sequence
  Description of Artificial Sequence: Synthetic oligonucleotide
aggcaagagagcagaaccu

SEQ ID NO: 2724284 - RNA, 19 nt, Artificial Sequence
  Description of Artificial Sequence: Synthetic oligonucleotide
gaaggcugguauccucauc

SEQ ID NO: 2724285 - RNA, 19 nt, Artificial Sequence
  Description of Artificial Sequence: Synthetic oligonucleotide
caagagagcagaaccuugu

SEQ ID NO: 2724286 - RNA, 19 nt, Artificial Sequence
  Description of Artificial Sequence: Synthetic oligonucleotide
gauauggagaaggcuggua

SEQ ID NO: 2724287 - RNA, 19 nt, Artificial Sequence
  Description of Artificial Sequence: Synthetic oligonucleotide
agccaugagggagagguuu

SEQ ID NO: 2724288 - RNA, 19 nt, Artificial Sequence
  Description of Artificial Sequence: Synthetic oligonucleotide
cugucaaugaagggcaaaa

SEQ ID NO: 2724289 - RNA, 19 nt, Artificial Sequence
  Description of Artificial Sequence: Synthetic oligonucleotide
cugacuguaucaggaugug

SEQ ID NO: 2724290 - RNA, 19 nt, Artificial Sequence
  Description of Artificial Sequence: Synthetic oligonucleotide
uauccucaucccugcugga

SEQ ID NO: 2724291 - RNA, 19 nt, Artificial Sequence
  Description of Artificial Sequence: Synthetic oligonucleotide
gugguguaguaggugaaga

SEQ ID NO: 2724292 - RNA, 19 nt, Artificial Sequence
  Description of Artificial Sequence: Synthetic oligonucleotide
cuguaagcagccccaccuc

SEQ ID NO: 2724293 - RNA, 19 nt, Artificial Sequence
  Description of Artificial Sequence: Synthetic oligonucleotide
accaaccagcaauguucag

SEQ ID NO: 2724294 - RNA, 19 nt, Artificial Sequence
  Description of Artificial Sequence: Synthetic oligonucleotide
ccuucuuggucagucuucg

SEQ ID NO: 2724295 - RNA, 19 nt, Artificial Sequence
  Description of Artificial Sequence: Synthetic oligonucleotide
agauauggagaaggcuggu

SEQ ID NO: 2724296 - RNA, 19 nt, Artificial Sequence
  Description of Artificial Sequence: Synthetic oligonucleotide
agaggagagggcguccagu

SEQ ID NO: 2724297 - RNA, 19 nt, Artificial Sequence
  Description of Artificial Sequence: Synthetic oligonucleotide
uucccaacccacguuccuc

SEQ ID NO: 2724298 - RNA, 19 nt, Artificial Sequence
  Description of Artificial Sequence: Synthetic oligonucleotide
gcuuccagaaggaugaaua

SEQ ID NO: 2724299 - RNA, 19 nt, Artificial Sequence
  Description of Artificial Sequence: Synthetic oligonucleotide
guccaguuugucagaguug

SEQ ID NO: 2724300 - RNA, 19 nt, Artificial Sequence
  Description of Artificial Sequence: Synthetic oligonucleotide
gaggacagcguaggcacga

SEQ ID NO: 2724301 - RNA, 19 nt, Artificial Sequence
  Description of Artificial Sequence: Synthetic oligonucleotide
cacuuggucugucccggug

SEQ ID NO: 2724302 - RNA, 19 nt, Artificial Sequence
  Description of Artificial Sequence: Synthetic oligonucleotide
ugguauccucaucccugcu

SEQ ID NO: 2724303 - RNA, 19 nt, Artificial Sequence
  Description of Artificial Sequence: Synthetic oligonucleotide
aagcagccccaccuccuaa

SEQ ID NO: 2724304 - RNA, 19 nt, Artificial Sequence
  Description of Artificial Sequence: Synthetic oligonucleotide
aggcugacuguaucaggau

SEQ ID NO: 2724305 - RNA, 19 nt, Artificial Sequence
  Description of Artificial Sequence: Synthetic oligonucleotide
gcuguaagcagccccaccu

SEQ ID NO: 2724306 - RNA, 19 nt, Artificial Sequence
  Description of Artificial Sequence: Synthetic oligonucleotide
ggacagcguaggcacgagg

SEQ ID NO: 2724307 - RNA, 19 nt, Artificial Sequence
  Description of Artificial Sequence: Synthetic oligonucleotide
gcagagagcuuugacugug

SEQ ID NO: 2724308 - RNA, 19 nt, Artificial Sequence
  Description of Artificial Sequence: Synthetic oligonucleotide
guugagcuguaagcagccc

SEQ ID NO: 2724309 - RNA, 19 nt, Artificial Sequence
  Description of Artificial Sequence: Synthetic oligonucleotide
augaucaggcuaacagcga

SEQ ID NO: 2724310 - RNA, 19 nt, Artificial Sequence
  Description of Artificial Sequence: Synthetic oligonucleotide
agcccgaagccaugaggga

SEQ ID NO: 2724311 - RNA, 19 nt, Artificial Sequence
  Description of Artificial Sequence: Synthetic oligonucleotide
gggagagguuucccaaccc

SEQ ID NO: 2724312 - RNA, 19 nt, Artificial Sequence
  Description of Artificial Sequence: Synthetic oligonucleotide
agcagccccaccuccuaaa

SEQ ID NO: 2724313 - RNA, 19 nt, Artificial Sequence
  Description of Artificial Sequence: Synthetic oligonucleotide
cacauaggugauaaacaau

SEQ ID NO: 2724314 - RNA, 19 nt, Artificial Sequence
  Description of Artificial Sequence: Synthetic oligonucleotide
aucacccaagugguguagu

SEQ ID NO: 2724315 - RNA, 19 nt, Artificial Sequence
  Description of Artificial Sequence: Synthetic oligonucleotide
ugucagaguugagcuguaa

SEQ ID NO: 2724316 - RNA, 19 nt, Artificial Sequence
  Description of Artificial Sequence: Synthetic oligonucleotide
uggccagcgggaugaggac

SEQ ID NO: 2724317 - RNA, 19 nt, Artificial Sequence
  Description of Artificial Sequence: Synthetic oligonucleotide
cccugcuggacccucacug

SEQ ID NO: 2724318 - RNA, 19 nt, Artificial Sequence
  Description of Artificial Sequence: Synthetic oligonucleotide
agcgggaugaggacagcgu

SEQ ID NO: 2724319 - RNA, 19 nt, Artificial Sequence
  Description of Artificial Sequence: Synthetic oligonucleotide
ggaugaggacagcguaggc

SEQ ID NO: 2724320 - RNA, 19 nt, Artificial Sequence
  Description of Artificial Sequence: Synthetic oligonucleotide
cccacaaauaggagcagca

SEQ ID NO: 2724321 - RNA, 19 nt, Artificial Sequence
  Description of Artificial Sequence: Synthetic oligonucleotide
cugagcccgaagccaugag

SEQ ID NO: 2724322 - RNA, 19 nt, Artificial Sequence
  Description of Artificial Sequence: Synthetic oligonucleotide
acgaggcaggaaguauuug

SEQ ID NO: 2724323 - RNA, 19 nt, Artificial Sequence
  Description of Artificial Sequence: Synthetic oligonucleotide
cagaaccuugugggagugg

SEQ ID NO: 2724324 - RNA, 19 nt, Artificial Sequence
  Description of Artificial Sequence: Synthetic oligonucleotide
ccacaaauaggagcagcag

SEQ ID NO: 2724325 - RNA, 19 nt, Artificial Sequence
  Description of Artificial Sequence: Synthetic oligonucleotide
ccaccacuuggucuguccc

SEQ ID NO: 2724326 - RNA, 19 nt, Artificial Sequence
  Description of Artificial Sequence: Synthetic oligonucleotide
cuuugacugugagguggac

SEQ ID NO: 2724327 - RNA, 19 nt, Artificial Sequence
  Description of Artificial Sequence: Synthetic oligonucleotide
gaaccuugugggaguggca

SEQ ID NO: 2724328 - RNA, 19 nt, Artificial Sequence
  Description of Artificial Sequence: Synthetic oligonucleotide
gucccuucccuggaggaga

SEQ ID NO: 2724329 - RNA, 19 nt, Artificial Sequence
  Description of Artificial Sequence: Synthetic oligonucleotide
cccucacugagccuucuug

SEQ ID NO: 2724330 - RNA, 19 nt, Artificial Sequence
  Description of Artificial Sequence: Synthetic oligonucleotide
gcccgaagccaugagggag

SEQ ID NO: 2724331 - RNA, 19 nt, Artificial Sequence
  Description of Artificial Sequence: Synthetic oligonucleotide
gaggagagggcguccaguu

SEQ ID NO: 2724332 - RNA, 19 nt, Artificial Sequence
  Description of Artificial Sequence: Synthetic oligonucleotide
aggaggcccguggccagcg

SEQ ID NO: 2724333 - RNA, 19 nt, Artificial Sequence
  Description of Artificial Sequence: Synthetic oligonucleotide
guaucaggaugugacacuu

SEQ ID NO: 2724334 - RNA, 19 nt, Artificial Sequence
  Description of Artificial Sequence: Synthetic oligonucleotide
gcugacuguaucaggaugu

SEQ ID NO: 2724335 - RNA, 19 nt, Artificial Sequence
  Description of Artificial Sequence: Synthetic oligonucleotide
aggagagggcguccaguuu

SEQ ID NO: 2724336 - RNA, 19 nt, Artificial Sequence
  Description of Artificial Sequence: Synthetic oligonucleotide
gcagccccaccuccuaaag

SEQ ID NO: 2724337 - RNA, 19 nt, Artificial Sequence
  Description of Artificial Sequence: Synthetic oligonucleotide
aggacagcguaggcacgag

SEQ ID NO: 2724338 - RNA, 19 nt, Artificial Sequence
  Description of Artificial Sequence: Synthetic oligonucleotide
gcacaugacaggaggaaaa

SEQ ID NO: 2724339 - RNA, 19 nt, Artificial Sequence
  Description of Artificial Sequence: Synthetic oligonucleotide
gaugugacacuuggucccu

SEQ ID NO: 2724340 - RNA, 19 nt, Artificial Sequence
  Description of Artificial Sequence: Synthetic oligonucleotide
ggcguccaguuugucagag

SEQ ID NO: 2724341 - RNA, 19 nt, Artificial Sequence
  Description of Artificial Sequence: Synthetic oligonucleotide
ccaagugguguaguaggug

SEQ ID NO: 2724342 - RNA, 19 nt, Artificial Sequence
  Description of Artificial Sequence: Synthetic oligonucleotide
ccacguuccucuuggcuuc

SEQ ID NO: 2724343 - RNA, 19 nt, Artificial Sequence
  Description of Artificial Sequence: Synthetic oligonucleotide
cccaccacuuggucugucc

SEQ ID NO: 2724344 - RNA, 19 nt, Artificial Sequence
  Description of Artificial Sequence: Synthetic oligonucleotide
ucaucccugcuggacccuc

SEQ ID NO: 2724345 - RNA, 19 nt, Artificial Sequence
  Description of Artificial Sequence: Synthetic oligonucleotide
acaaggcaagagagcagaa

SEQ ID NO: 2724346 - RNA, 19 nt, Artificial Sequence
  Description of Artificial Sequence: Synthetic oligonucleotide
cagcacaugacaggaggaa

SEQ ID NO: 2724347 - RNA, 19 nt, Artificial Sequence
  Description of Artificial Sequence: Synthetic oligonucleotide
cgggaugaggacagcguag

SEQ ID NO: 2724348 - RNA, 19 nt, Artificial Sequence
  Description of Artificial Sequence: Synthetic oligonucleotide
aggccaaaucccaccacuu

SEQ ID NO: 2724349 - RNA, 19 nt, Artificial Sequence
  Description of Artificial Sequence: Synthetic oligonucleotide
ccaguuugucagaguugag

SEQ ID NO: 2724350 - RNA, 19 nt, Artificial Sequence
  Description of Artificial Sequence: Synthetic oligonucleotide
gaguggcagagagcuuuga

SEQ ID NO: 2724351 - RNA, 19 nt, Artificial Sequence
  Description of Artificial Sequence: Synthetic oligonucleotide
cacguuccucuuggcuucc

SEQ ID NO: 2724352 - RNA, 19 nt, Artificial Sequence
  Description of Artificial Sequence: Synthetic oligonucleotide
ugggaguggcagagagcuu

SEQ ID NO: 2724353 - RNA, 19 nt, Artificial Sequence
  Description of Artificial Sequence: Synthetic oligonucleotide
ccccaccuccuaaagagga

SEQ ID NO: 2724354 - RNA, 19 nt, Artificial Sequence
  Description of Artificial Sequence: Synthetic oligonucleotide
ccaugagggagagguuucc

SEQ ID NO: 2724355 - RNA, 19 nt, Artificial Sequence
  Description of Artificial Sequence: Synthetic oligonucleotide
ccuccuaaagaggacugca

SEQ ID NO: 2724356 - RNA, 19 nt, Artificial Sequence
  Description of Artificial Sequence: Synthetic oligonucleotide
cccaccuccuaaagaggac

SEQ ID NO: 2724357 - RNA, 19 nt, Artificial Sequence
  Description of Artificial Sequence: Synthetic oligonucleotide
aagccaugagggagagguu

SEQ ID NO: 2724358 - RNA, 19 nt, Artificial Sequence
  Description of Artificial Sequence: Synthetic oligonucleotide
ccaacccacguuccucuug

SEQ ID NO: 2724359 - RNA, 19 nt, Artificial Sequence
  Description of Artificial Sequence: Synthetic oligonucleotide
cagcaucuaucagcacaug

SEQ ID NO: 2724360 - RNA, 19 nt, Artificial Sequence
  Description of Artificial Sequence: Synthetic oligonucleotide
caucccugcuggacccuca

SEQ ID NO: 2724361 - RNA, 19 nt, Artificial Sequence
  Description of Artificial Sequence: Synthetic oligonucleotide
ggcuaacagcgacgaggcc

SEQ ID NO: 2724362 - RNA, 19 nt, Artificial Sequence
  Description of Artificial Sequence: Synthetic oligonucleotide
gcgacgaggccaaauccca

SEQ ID NO: 2724363 - RNA, 19 nt, Artificial Sequence
  Description of Artificial Sequence: Synthetic oligonucleotide
gccccaccuccuaaagagg

SEQ ID NO: 2724364 - RNA, 19 nt, Artificial Sequence
  Description of Artificial Sequence: Synthetic oligonucleotide
gcuuugacugugaggugga

SEQ ID NO: 2724365 - RNA, 19 nt, Artificial Sequence
  Description of Artificial Sequence: Synthetic oligonucleotide
cuugugggaguggcagaga

SEQ ID NO: 2724366 - RNA, 19 nt, Artificial Sequence
  Description of Artificial Sequence: Synthetic oligonucleotide
cccgaagccaugagggaga

SEQ ID NO: 2724367 - RNA, 19 nt, Artificial Sequence
  Description of Artificial Sequence: Synthetic oligonucleotide
ccaaaucccaccacuuggu

SEQ ID NO: 2724368 - RNA, 19 nt, Artificial Sequence
  Description of Artificial Sequence: Synthetic oligonucleotide
cacgaggcaggaaguauuu

SEQ ID NO: 2724369 - RNA, 19 nt, Artificial Sequence
  Description of Artificial Sequence: Synthetic oligonucleotide
acccucacugagccuucuu

SEQ ID NO: 2724370 - RNA, 19 nt, Artificial Sequence
  Description of Artificial Sequence: Synthetic oligonucleotide
ccagcaauguucaggcccu

SEQ ID NO: 2724371 - RNA, 19 nt, Artificial Sequence
  Description of Artificial Sequence: Synthetic oligonucleotide
aggcacgaggcaggaagua

SEQ ID NO: 2724372 - RNA, 19 nt, Artificial Sequence
  Description of Artificial Sequence: Synthetic oligonucleotide
gcagcaucuaucagcacau

SEQ ID NO: 2724373 - RNA, 19 nt, Artificial Sequence
  Description of Artificial Sequence: Synthetic oligonucleotide
gccuucuuggucagucuuc

SEQ ID NO: 2724374 - RNA, 19 nt, Artificial Sequence
  Description of Artificial Sequence: Synthetic oligonucleotide
gccaugagggagagguuuc

SEQ ID NO: 2724375 - RNA, 19 nt, Artificial Sequence
  Description of Artificial Sequence: Synthetic oligonucleotide
ccugcuggacccucacuga

SEQ ID NO: 2724376 - RNA, 19 nt, Artificial Sequence
  Description of Artificial Sequence: Synthetic oligonucleotide
gucuucggcucuucagcau

SEQ ID NO: 2724377 - RNA, 19 nt, Artificial Sequence
  Description of Artificial Sequence: Synthetic oligonucleotide
cgaggcaggaaguauuugu

SEQ ID NO: 2724378 - RNA, 19 nt, Artificial Sequence
  Description of Artificial Sequence: Synthetic oligonucleotide
gcaucacauaggugauaaa

SEQ ID NO: 2724379 - RNA, 19 nt, Artificial Sequence
  Description of Artificial Sequence: Synthetic oligonucleotide
ggaggcccguggccagcgg

SEQ ID NO: 2724380 - RNA, 19 nt, Artificial Sequence
  Description of Artificial Sequence: Synthetic oligonucleotide
ggcaagagagcagaaccuu

SEQ ID NO: 2724381 - RNA, 19 nt, Artificial Sequence
  Description of Artificial Sequence: Synthetic oligonucleotide
ucccaccacuuggucuguc

SEQ ID NO: 2724382 - RNA, 19 nt, Artificial Sequence
  Description of Artificial Sequence: Synthetic oligonucleotide
aucccaccacuuggucugu

SEQ ID NO: 2724383 - RNA, 19 nt, Artificial Sequence
  Description of Artificial Sequence: Synthetic oligonucleotide
ccgaagccaugagggagag

SEQ ID NO: 2724384 - RNA, 19 nt, Artificial Sequence
  Description of Artificial Sequence: Synthetic oligonucleotide
cgacgaggccaaaucccac

SEQ ID NO: 2724385 - RNA, 19 nt, Artificial Sequence
  Description of Artificial Sequence: Synthetic oligonucleotide
ggccagcgggaugaggaca

SEQ ID NO: 2724386 - RNA, 19 nt, Artificial Sequence
  Description of Artificial Sequence: Synthetic oligonucleotide
augugacacuuggucccuu

SEQ ID NO: 2724387 - RNA, 19 nt, Artificial Sequence
  Description of Artificial Sequence: Synthetic oligonucleotide
acguuccucuuggcuucca

SEQ ID NO: 2724388 - RNA, 19 nt, Artificial Sequence
  Description of Artificial Sequence: Synthetic oligonucleotide
cccacguuccucuuggcuu

SEQ ID NO: 2724389 - RNA, 19 nt, Artificial Sequence
  Description of Artificial Sequence: Synthetic oligonucleotide
uaacagcgacgaggccaaa

SEQ ID NO: 2724390 - RNA, 19 nt, Artificial Sequence
  Description of Artificial Sequence: Synthetic oligonucleotide
cguccaguuugucagaguu

SEQ ID NO: 2724391 - RNA, 19 nt, Artificial Sequence
  Description of Artificial Sequence: Synthetic oligonucleotide
gggcguccaguuugucaga

SEQ ID NO: 2724392 - RNA, 19 nt, Artificial Sequence
  Description of Artificial Sequence: Synthetic oligonucleotide
ggucagucuucggcucuuc

SEQ ID NO: 2724393 - RNA, 19 nt, Artificial Sequence
  Description of Artificial Sequence: Synthetic oligonucleotide
ccuucccuggaggagauau

SEQ ID NO: 2724394 - RNA, 19 nt, Artificial Sequence
  Description of Artificial Sequence: Synthetic oligonucleotide
ccugagcccgaagccauga

SEQ ID NO: 2724395 - RNA, 19 nt, Artificial Sequence
  Description of Artificial Sequence: Synthetic oligonucleotide
cccugagcccgaagccaug

SEQ ID NO: 2724396 - RNA, 19 nt, Artificial Sequence
  Description of Artificial Sequence: Synthetic oligonucleotide
ccaccuccuaaagaggacu

SEQ ID NO: 2724397 - RNA, 19 nt, Artificial Sequence
  Description of Artificial Sequence: Synthetic oligonucleotide
caggaccaaccagcaaugu

SEQ ID NO: 2724398 - RNA, 19 nt, Artificial Sequence
  Description of Artificial Sequence: Synthetic oligonucleotide
gacccucacugagccuucu

SEQ ID NO: 2724399 - RNA, 19 nt, Artificial Sequence
  Description of Artificial Sequence: Synthetic oligonucleotide
gcacgaggcaggaaguauu

SEQ ID NO: 2724400 - RNA, 19 nt, Artificial Sequence
  Description of Artificial Sequence: Synthetic oligonucleotide
ggacccucacugagccuuc

SEQ ID NO: 2724401 - RNA, 19 nt, Artificial Sequence
  Description of Artificial Sequence: Synthetic oligonucleotide
cuggacccucacugagccu

SEQ ID NO: 2724402 - RNA, 19 nt, Artificial Sequence
  Description of Artificial Sequence: Synthetic oligonucleotide
ggcuuccagaaggaugaau

SEQ ID NO: 2724403 - RNA, 19 nt, Artificial Sequence
  Description of Artificial Sequence: Synthetic oligonucleotide
cggggaggccugcagcauc

SEQ ID NO: 2724404 - RNA, 19 nt, Artificial Sequence
  Description of Artificial Sequence: Synthetic oligonucleotide
gcguccaguuugucagagu

SEQ ID NO: 2724405 - RNA, 19 nt, Artificial Sequence
  Description of Artificial Sequence: Synthetic oligonucleotide
ccacuuggucugucccggu

SEQ ID NO: 2724406 - RNA, 19 nt, Artificial Sequence
  Description of Artificial Sequence: Synthetic oligonucleotide
cguaggcacgaggcaggaa

SEQ ID NO: 2724407 - RNA, 19 nt, Artificial Sequence
  Description of Artificial Sequence: Synthetic oligonucleotide
cccaacccacguuccucuu

SEQ ID NO: 2724408 - RNA, 19 nt, Artificial Sequence
  Description of Artificial Sequence: Synthetic oligonucleotide
uauacuguggcuaaaaugc

SEQ ID NO: 2724409 - RNA, 19 nt, Artificial Sequence
  Description of Artificial Sequence: Synthetic oligonucleotide
auaguauuacuuuagcacc

SEQ ID NO: 2724410 - RNA, 19 nt, Artificial Sequence
  Description of Artificial Sequence: Synthetic oligonucleotide
aaacauacaucccauauug

SEQ ID NO: 2724411 - RNA, 19 nt, Artificial Sequence
  Description of Artificial Sequence: Synthetic oligonucleotide
gauaguauuacuuuagcac

SEQ ID NO: 2724412 - RNA, 19 nt, Artificial Sequence
  Description of Artificial Sequence: Synthetic oligonucleotide
aggacuacagcacagggcc

SEQ ID NO: 2724413 - RNA, 19 nt, Artificial Sequence
  Description of Artificial Sequence: Synthetic oligonucleotide
ucagaugcaagaaugaugu

SEQ ID NO: 2724414 - RNA, 19 nt, Artificial Sequence
  Description of Artificial Sequence: Synthetic oligonucleotide
aaugaugucuugugguggc

SEQ ID NO: 2724415 - RNA, 19 nt, Artificial Sequence
  Description of Artificial Sequence: Synthetic oligonucleotide
uuuagcaccacauuuggca

SEQ ID NO: 2724416 - RNA, 19 nt, Artificial Sequence
  Description of Artificial Sequence: Synthetic oligonucleotide
acauuuggcagccaaaauc

SEQ ID NO: 2724417 - RNA, 19 nt, Artificial Sequence
  Description of Artificial Sequence: Synthetic oligonucleotide
acauacaucccauauuggg

SEQ ID NO: 2724418 - RNA, 19 nt, Artificial Sequence
  Description of Artificial Sequence: Synthetic oligonucleotide
uguucuucgacaaggagac

SEQ ID NO: 2724419 - RNA, 19 nt, Artificial Sequence
  Description of Artificial Sequence: Synthetic oligonucleotide
cauuuggcagccaaaaucc

SEQ ID NO: 2724420 - RNA, 19 nt, Artificial Sequence
  Description of Artificial Sequence: Synthetic oligonucleotide
uaaaaugcuuucaaagucu

SEQ ID NO: 2724421 - RNA, 19 nt, Artificial Sequence
  Description of Artificial Sequence: Synthetic oligonucleotide
aagaaugaugucuuguggu

SEQ ID NO: 2724422 - RNA, 19 nt, Artificial Sequence
  Description of Artificial Sequence: Synthetic oligonucleotide
uuucaugucccacuuguag

SEQ ID NO: 2724423 - RNA, 19 nt, Artificial Sequence
  Description of Artificial Sequence: Synthetic oligonucleotide
ucuucugugaaaccacagg

SEQ ID NO: 2724424 - RNA, 19 nt, Artificial Sequence
  Description of Artificial Sequence: Synthetic oligonucleotide
uucaaagucuucugguucg

SEQ ID NO: 2724425 - RNA, 19 nt, Artificial Sequence
  Description of Artificial Sequence: Synthetic oligonucleotide
ugcaucaggaaguauacug

SEQ ID NO: 2724426 - RNA, 19 nt, Artificial Sequence
  Description of Artificial Sequence: Synthetic oligonucleotide
uguagagcaagccuucaag

SEQ ID NO: 2724427 - RNA, 19 nt, Artificial Sequence
  Description of Artificial Sequence: Synthetic oligonucleotide
ucaggaaguauacuguggc

SEQ ID NO: 2724428 - RNA, 19 nt, Artificial Sequence
  Description of Artificial Sequence: Synthetic oligonucleotide
gauagugugucuuccuggg

SEQ ID NO: 2724429 - RNA, 19 nt, Artificial Sequence
  Description of Artificial Sequence: Synthetic oligonucleotide
aaagacaggagguccuuag

SEQ ID NO: 2724430 - RNA, 19 nt, Artificial Sequence
  Description of Artificial Sequence: Synthetic oligonucleotide
ucugguucgaagaacacau

SEQ ID NO: 2724431 - RNA, 19 nt, Artificial Sequence
  Description of Artificial Sequence: Synthetic oligonucleotide
ugugaaaccacagguauug

SEQ ID NO: 2724432 - RNA, 19 nt, Artificial Sequence
  Description of Artificial Sequence: Synthetic oligonucleotide
cagauguccaaacaguggg

SEQ ID NO: 2724433 - RNA, 19 nt, Artificial Sequence
  Description of Artificial Sequence: Synthetic oligonucleotide
uacuuuagcaccacauuug

SEQ ID NO: 2724434 - RNA, 19 nt, Artificial Sequence
  Description of Artificial Sequence: Synthetic oligonucleotide
aacguggacacauuucaug

SEQ ID NO: 2724435 - RNA, 19 nt, Artificial Sequence
  Description of Artificial Sequence: Synthetic oligonucleotide
cauacaucccauauugggc

SEQ ID NO: 2724436 - RNA, 19 nt, Artificial Sequence
  Description of Artificial Sequence: Synthetic oligonucleotide
ucuucugguucgaagaaca

SEQ ID NO: 2724437 - RNA, 19 nt, Artificial Sequence
  Description of Artificial Sequence: Synthetic oligonucleotide
ugcuuucaaagucuucugg

SEQ ID NO: 2724438 - RNA, 19 nt, Artificial Sequence
  Description of Artificial Sequence: Synthetic oligonucleotide
uauuacuuuagcaccacau

SEQ ID NO: 2724439 - RNA, 19 nt, Artificial Sequence
  Description of Artificial Sequence: Synthetic oligonucleotide
agcacuucugaccugguag

SEQ ID NO: 2724440 - RNA, 19 nt, Artificial Sequence
  Description of Artificial Sequence: Synthetic oligonucleotide
ugguagguagaccaaaacu

SEQ ID NO: 2724441 - RNA, 19 nt, Artificial Sequence
  Description of Artificial Sequence: Synthetic oligonucleotide
ucggauaguauuacuuuag

SEQ ID NO: 2724442 - RNA, 19 nt, Artificial Sequence
  Description of Artificial Sequence: Synthetic oligonucleotide
ucugugaaaccacagguau

SEQ ID NO: 2724443 - RNA, 19 nt, Artificial Sequence
  Description of Artificial Sequence: Synthetic oligonucleotide
ugaacuuugggguuccucu

SEQ ID NO: 2724444 - RNA, 19 nt, Artificial Sequence
  Description of Artificial Sequence: Synthetic oligonucleotide
cacaucagaugcaagaaug

SEQ ID NO: 2724445 - RNA, 19 nt, Artificial Sequence
  Description of Artificial Sequence: Synthetic oligonucleotide
ugguucgaagaacacauca

SEQ ID NO: 2724446 - RNA, 19 nt, Artificial Sequence
  Description of Artificial Sequence: Synthetic oligonucleotide
ucgaagaacacaucagaug

SEQ ID NO: 2724447 - RNA, 19 nt, Artificial Sequence
  Description of Artificial Sequence: Synthetic oligonucleotide
guauacuguggcuaaaaug

SEQ ID NO: 2724448 - RNA, 19 nt, Artificial Sequence
  Description of Artificial Sequence: Synthetic oligonucleotide
ugaccugguagguagacca

SEQ ID NO: 2724449 - RNA, 19 nt, Artificial Sequence
  Description of Artificial Sequence: Synthetic oligonucleotide
auucagaagcuguucuucg

SEQ ID NO: 2724450 - RNA, 19 nt, Artificial Sequence
  Description of Artificial Sequence: Synthetic oligonucleotide
aagcuguucuucgacaagg

SEQ ID NO: 2724451 - RNA, 19 nt, Artificial Sequence
  Description of Artificial Sequence: Synthetic oligonucleotide
ugcagauguccaaacagug

SEQ ID NO: 2724452 - RNA, 19 nt, Artificial Sequence
  Description of Artificial Sequence: Synthetic oligonucleotide
aggugguucaguuggcagc

SEQ ID NO: 2724453 - RNA, 19 nt, Artificial Sequence
  Description of Artificial Sequence: Synthetic oligonucleotide
cucaaaagacuucagagga

SEQ ID NO: 2724454 - RNA, 19 nt, Artificial Sequence
  Description of Artificial Sequence: Synthetic oligonucleotide
uuugccucaaaagacuuca

SEQ ID NO: 2724455 - RNA, 19 nt, Artificial Sequence
  Description of Artificial Sequence: Synthetic oligonucleotide
auacaucccauauugggca

SEQ ID NO: 2724456 - RNA, 19 nt, Artificial Sequence
  Description of Artificial Sequence: Synthetic oligonucleotide
uaguauuacuuuagcacca

SEQ ID NO: 2724457 - RNA, 19 nt, Artificial Sequence
  Description of Artificial Sequence: Synthetic oligonucleotide
aaagacuucagaggaacgu

SEQ ID NO: 2724458 - RNA, 19 nt, Artificial Sequence
  Description of Artificial Sequence: Synthetic oligonucleotide
aaaacugaacuuugggguu

SEQ ID NO: 2724459 - RNA, 19 nt, Artificial Sequence
  Description of Artificial Sequence: Synthetic oligonucleotide
uuagcaccacauuuggcag

SEQ ID NO: 2724460 - RNA, 19 nt, Artificial Sequence
  Description of Artificial Sequence: Synthetic oligonucleotide
ucugcaucaggaaguauac

SEQ ID NO: 2724461 - RNA, 19 nt, Artificial Sequence
  Description of Artificial Sequence: Synthetic oligonucleotide
agaaugaugucuuguggug

SEQ ID NO: 2724462 - RNA, 19 nt, Artificial Sequence
  Description of Artificial Sequence: Synthetic oligonucleotide
ugaguugucggauaguauu

SEQ ID NO: 2724463 - RNA, 19 nt, Artificial Sequence
  Description of Artificial Sequence: Synthetic oligonucleotide
ucccauauugggcaugcag

SEQ ID NO: 2724464 - RNA, 19 nt, Artificial Sequence
  Description of Artificial Sequence: Synthetic oligonucleotide
uauugggccaggacuacag

SEQ ID NO: 2724465 - RNA, 19 nt, Artificial Sequence
  Description of Artificial Sequence: Synthetic oligonucleotide
gaaggcucacuccagcucc

SEQ ID NO: 2724466 - RNA, 19 nt, Artificial Sequence
  Description of Artificial Sequence: Synthetic oligonucleotide
agccaaaaucccuggaagg

SEQ ID NO: 2724467 - RNA, 19 nt, Artificial Sequence
  Description of Artificial Sequence: Synthetic oligonucleotide
agagaucuucugugaaacc

SEQ ID NO: 2724468 - RNA, 19 nt, Artificial Sequence
  Description of Artificial Sequence: Synthetic oligonucleotide
uuguuugccucaaaagacu

SEQ ID NO: 2724469 - RNA, 19 nt, Artificial Sequence
  Description of Artificial Sequence: Synthetic oligonucleotide
gaaugaugucuuguggugg

SEQ ID NO: 2724470 - RNA, 19 nt, Artificial Sequence
  Description of Artificial Sequence: Synthetic oligonucleotide
uucuucgacaaggagacca

SEQ ID NO: 2724471 - RNA, 19 nt, Artificial Sequence
  Description of Artificial Sequence: Synthetic oligonucleotide
cuucugaccugguagguag

SEQ ID NO: 2724472 - RNA, 19 nt, Artificial Sequence
  Description of Artificial Sequence: Synthetic oligonucleotide
agaugcaagaaugaugucu

SEQ ID NO: 2724473 - RNA, 19 nt, Artificial Sequence
  Description of Artificial Sequence: Synthetic oligonucleotide
cagggccaaacauacaucc

SEQ ID NO: 2724474 - RNA, 19 nt, Artificial Sequence
  Description of Artificial Sequence: Synthetic oligonucleotide
ucuugugguggcaaagaca

SEQ ID NO: 2724475 - RNA, 19 nt, Artificial Sequence
  Description of Artificial Sequence: Synthetic oligonucleotide
agagcaagccuucaaguga

SEQ ID NO: 2724476 - RNA, 19 nt, Artificial Sequence
  Description of Artificial Sequence: Synthetic oligonucleotide
aaaagacuucagaggaacg

SEQ ID NO: 2724477 - RNA, 19 nt, Artificial Sequence
  Description of Artificial Sequence: Synthetic oligonucleotide
agugauguggccccacguc

SEQ ID NO: 2724478 - RNA, 19 nt, Artificial Sequence
  Description of Artificial Sequence: Synthetic oligonucleotide
aaggagaccaccagcaucu

SEQ ID NO: 2724479 - RNA, 19 nt, Artificial Sequence
  Description of Artificial Sequence: Synthetic oligonucleotide
uucaugucccacuuguaga

SEQ ID NO: 2724480 - RNA, 19 nt, Artificial Sequence
  Description of Artificial Sequence: Synthetic oligonucleotide
aaacugaacuuugggguuc

SEQ ID NO: 2724481 - RNA, 19 nt, Artificial Sequence
  Description of Artificial Sequence: Synthetic oligonucleotide
uucgaagaacacaucagau

SEQ ID NO: 2724482 - RNA, 19 nt, Artificial Sequence
  Description of Artificial Sequence: Synthetic oligonucleotide
uuagugauguggccccacg

SEQ ID NO: 2724483 - RNA, 19 nt, Artificial Sequence
  Description of Artificial Sequence: Synthetic oligonucleotide
gguagguagaccaaaacug

SEQ ID NO: 2724484 - RNA, 19 nt, Artificial Sequence
  Description of Artificial Sequence: Synthetic oligonucleotide
cuucaagugaccagucagc

SEQ ID NO: 2724485 - RNA, 19 nt, Artificial Sequence
  Description of Artificial Sequence: Synthetic oligonucleotide
uucagaggaacguggacac

SEQ ID NO: 2724486 - RNA, 19 nt, Artificial Sequence
  Description of Artificial Sequence: Synthetic oligonucleotide
aagacuucagaggaacgug

SEQ ID NO: 2724487 - RNA, 19 nt, Artificial Sequence
  Description of Artificial Sequence: Synthetic oligonucleotide
ucagaagcuguucuucgac

SEQ ID NO: 2724488 - RNA, 19 nt, Artificial Sequence
  Description of Artificial Sequence: Synthetic oligonucleotide
uucgacaaggagaccacca

SEQ ID NO: 2724489 - RNA, 19 nt, Artificial Sequence
  Description of Artificial Sequence: Synthetic oligonucleotide
acagguauugggccaggac

SEQ ID NO: 2724490 - RNA, 19 nt, Artificial Sequence
  Description of Artificial Sequence: Synthetic oligonucleotide
ucgacaaggagaccaccag

SEQ ID NO: 2724491 - RNA, 19 nt, Artificial Sequence
  Description of Artificial Sequence: Synthetic oligonucleotide
uagagaucuucugugaaac

SEQ ID NO: 2724492 - RNA, 19 nt, Artificial Sequence
  Description of Artificial Sequence: Synthetic oligonucleotide
caaaagacuucagaggaac

SEQ ID NO: 2724493 - RNA, 19 nt, Artificial Sequence
  Description of Artificial Sequence: Synthetic oligonucleotide
ggacaggugguucaguugg

SEQ ID NO: 2724494 - RNA, 19 nt, Artificial Sequence
  Description of Artificial Sequence: Synthetic oligonucleotide
ucgauagugugucuuccug

SEQ ID NO: 2724495 - RNA, 19 nt, Artificial Sequence
  Description of Artificial Sequence: Synthetic oligonucleotide
gccucaaaagacuucagag

SEQ ID NO: 2724496 - RNA, 19 nt, Artificial Sequence
  Description of Artificial Sequence: Synthetic oligonucleotide
acuucagaggaacguggac

SEQ ID NO: 2724497 - RNA, 19 nt, Artificial Sequence
  Description of Artificial Sequence: Synthetic oligonucleotide
cgaagaacacaucagaugc

SEQ ID NO: 2724498 - RNA, 19 nt, Artificial Sequence
  Description of Artificial Sequence: Synthetic oligonucleotide
aacauacaucccauauugg

SEQ ID NO: 2724499 - RNA, 19 nt, Artificial Sequence
  Description of Artificial Sequence: Synthetic oligonucleotide
agcaucucgauaguguguc

SEQ ID NO: 2724500 - RNA, 19 nt, Artificial Sequence
  Description of Artificial Sequence: Synthetic oligonucleotide
aacugaacuuugggguucc

SEQ ID NO: 2724501 - RNA, 19 nt, Artificial Sequence
  Description of Artificial Sequence: Synthetic oligonucleotide
cugguagagaucuucugug

SEQ ID NO: 2724502 - RNA, 19 nt, Artificial Sequence
  Description of Artificial Sequence: Synthetic oligonucleotide
auuacuuuagcaccacauu

SEQ ID NO: 2724503 - RNA, 19 nt, Artificial Sequence
  Description of Artificial Sequence: Synthetic oligonucleotide
gauguccaaacaguggggc

SEQ ID NO: 2724504 - RNA, 19 nt, Artificial Sequence
  Description of Artificial Sequence: Synthetic oligonucleotide
caaaacugaacuuuggggu

SEQ ID NO: 2724505 - RNA, 19 nt, Artificial Sequence
  Description of Artificial Sequence: Synthetic oligonucleotide
ucucuaagacagcuuugcc

SEQ ID NO: 2724506 - RNA, 19 nt, Artificial Sequence
  Description of Artificial Sequence: Synthetic oligonucleotide
ugaccagucagcacuucug

SEQ ID NO: 2724507 - RNA, 19 nt, Artificial Sequence
  Description of Artificial Sequence: Synthetic oligonucleotide
aucccuggaaggcucacuc

SEQ ID NO: 2724508 - RNA, 19 nt, Artificial Sequence
  Description of Artificial Sequence: Synthetic oligonucleotide
uuccugggaggguagaccc

SEQ ID NO: 2724509 - RNA, 19 nt, Artificial Sequence
  Description of Artificial Sequence: Synthetic oligonucleotide
acguggacacauuucaugu

SEQ ID NO: 2724510 - RNA, 19 nt, Artificial Sequence
  Description of Artificial Sequence: Synthetic oligonucleotide
uuccucugcaucaggaagu

SEQ ID NO: 2724511 - RNA, 19 nt, Artificial Sequence
  Description of Artificial Sequence: Synthetic oligonucleotide
ugccucaaaagacuucaga

SEQ ID NO: 2724512 - RNA, 19 nt, Artificial Sequence
  Description of Artificial Sequence: Synthetic oligonucleotide
cuguaccugggacaggugg

SEQ ID NO: 2724513 - RNA, 19 nt, Artificial Sequence
  Description of Artificial Sequence: Synthetic oligonucleotide
aacacaucagaugcaagaa

SEQ ID NO: 2724514 - RNA, 19 nt, Artificial Sequence
  Description of Artificial Sequence: Synthetic oligonucleotide
acaaccuguaccugggaca

SEQ ID NO: 2724515 - RNA, 19 nt, Artificial Sequence
  Description of Artificial Sequence: Synthetic oligonucleotide
aguauuacuuuagcaccac

SEQ ID NO: 2724516 - RNA, 19 nt, Artificial Sequence
  Description of Artificial Sequence: Synthetic oligonucleotide
uugucggauaguauuacuu

SEQ ID NO: 2724517 - RNA, 19 nt, Artificial Sequence
  Description of Artificial Sequence: Synthetic oligonucleotide
uccaaucucuaagacagcu

SEQ ID NO: 2724518 - RNA, 19 nt, Artificial Sequence
  Description of Artificial Sequence: Synthetic oligonucleotide
uccuuagugauguggcccc

SEQ ID NO: 2724519 - RNA, 19 nt, Artificial Sequence
  Description of Artificial Sequence: Synthetic oligonucleotide
guucgaagaacacaucaga

SEQ ID NO: 2724520 - RNA, 19 nt, Artificial Sequence
  Description of Artificial Sequence: Synthetic oligonucleotide
aucucgauagugugucuuc

SEQ ID NO: 2724521 - RNA, 19 nt, Artificial Sequence
  Description of Artificial Sequence: Synthetic oligonucleotide
cuguucuucgacaaggaga

SEQ ID NO: 2724522 - RNA, 19 nt, Artificial Sequence
  Description of Artificial Sequence: Synthetic oligonucleotide
gcuauguuuuccuuguuug

SEQ ID NO: 2724523 - RNA, 19 nt, Artificial Sequence
  Description of Artificial Sequence: Synthetic oligonucleotide
agcaccacauuuggcagcc

SEQ ID NO: 2724524 - RNA, 19 nt, Artificial Sequence
  Description of Artificial Sequence: Synthetic oligonucleotide
ucaaaagacuucagaggaa

SEQ ID NO: 2724525 - RNA, 19 nt, Artificial Sequence
  Description of Artificial Sequence: Synthetic oligonucleotide
uucaguuggcagcuuugcc

SEQ ID NO: 2724526 - RNA, 19 nt, Artificial Sequence
  Description of Artificial Sequence: Synthetic oligonucleotide
ccucaaaagacuucagagg

SEQ ID NO: 2724527 - RNA, 19 nt, Artificial Sequence
  Description of Artificial Sequence: Synthetic oligonucleotide
caucaggaaguauacugug

SEQ ID NO: 2724528 - RNA, 19 nt, Artificial Sequence
  Description of Artificial Sequence: Synthetic oligonucleotide
uauugggcaugcaggaccu

SEQ ID NO: 2724529 - RNA, 19 nt, Artificial Sequence
  Description of Artificial Sequence: Synthetic oligonucleotide
uuccuuguuugccucaaaa

SEQ ID NO: 2724530 - RNA, 19 nt, Artificial Sequence
  Description of Artificial Sequence: Synthetic oligonucleotide
uucaagugaccagucagca

SEQ ID NO: 2724531 - RNA, 19 nt, Artificial Sequence
  Description of Artificial Sequence: Synthetic oligonucleotide
uuugggguuccucugcauc

SEQ ID NO: 2724532 - RNA, 19 nt, Artificial Sequence
  Description of Artificial Sequence: Synthetic oligonucleotide
agguagaccaaaacugaac

SEQ ID NO: 2724533 - RNA, 19 nt, Artificial Sequence
  Description of Artificial Sequence: Synthetic oligonucleotide
aguugucggauaguauuac

SEQ ID NO: 2724534 - RNA, 19 nt, Artificial Sequence
  Description of Artificial Sequence: Synthetic oligonucleotide
aucagaugcaagaaugaug

SEQ ID NO: 2724535 - RNA, 19 nt, Artificial Sequence
  Description of Artificial Sequence: Synthetic oligonucleotide
uggacacauuucauguccc

SEQ ID NO: 2724536 - RNA, 19 nt, Artificial Sequence
  Description of Artificial Sequence: Synthetic oligonucleotide
ugucggauaguauuacuuu

SEQ ID NO: 2724537 - RNA, 19 nt, Artificial Sequence
  Description of Artificial Sequence: Synthetic oligonucleotide
uucugugaaaccacaggua

SEQ ID NO: 2724538 - RNA, 19 nt, Artificial Sequence
  Description of Artificial Sequence: Synthetic oligonucleotide
uguaccugggacagguggu

SEQ ID NO: 2724539 - RNA, 19 nt, Artificial Sequence
  Description of Artificial Sequence: Synthetic oligonucleotide
cagccaaaaucccuggaag

SEQ ID NO: 2724540 - RNA, 19 nt, Artificial Sequence
  Description of Artificial Sequence: Synthetic oligonucleotide
gacaggagguccuuaguga

SEQ ID NO: 2724541 - RNA, 19 nt, Artificial Sequence
  Description of Artificial Sequence: Synthetic oligonucleotide
agcuccaaucucuaagaca

SEQ ID NO: 2724542 - RNA, 19 nt, Artificial Sequence
  Description of Artificial Sequence: Synthetic oligonucleotide
aaccacagguauugggcca

SEQ ID NO: 2724543 - RNA, 19 nt, Artificial Sequence
  Description of Artificial Sequence: Synthetic oligonucleotide
ugcaagaaugaugucuugu

SEQ ID NO: 2724544 - RNA, 19 nt, Artificial Sequence
  Description of Artificial Sequence: Synthetic oligonucleotide
gacaaggagaccaccagca

SEQ ID NO: 2724545 - RNA, 19 nt, Artificial Sequence
  Description of Artificial Sequence: Synthetic oligonucleotide
uagguagaccaaaacugaa

SEQ ID NO: 2724546 - RNA, 19 nt, Artificial Sequence
  Description of Artificial Sequence: Synthetic oligonucleotide
aguauacuguggcuaaaau

SEQ ID NO: 2724547 - RNA, 19 nt, Artificial Sequence
  Description of Artificial Sequence: Synthetic oligonucleotide
uguggcuaaaaugcuuuca

SEQ ID NO: 2724548 - RNA, 19 nt, Artificial Sequence
  Description of Artificial Sequence: Synthetic oligonucleotide
aucaggaaguauacugugg

SEQ ID NO: 2724549 - RNA, 19 nt, Artificial Sequence
  Description of Artificial Sequence: Synthetic oligonucleotide
ugcuauguuuuccuuguuu

SEQ ID NO: 2724550 - RNA, 19 nt, Artificial Sequence
  Description of Artificial Sequence: Synthetic oligonucleotide
aagacaggagguccuuagu

SEQ ID NO: 2724551 - RNA, 19 nt, Artificial Sequence
  Description of Artificial Sequence: Synthetic oligonucleotide
cuuuagcaccacauuuggc

SEQ ID NO: 2724552 - RNA, 19 nt, Artificial Sequence
  Description of Artificial Sequence: Synthetic oligonucleotide
cccauauugggcaugcagg

SEQ ID NO: 2724553 - RNA, 19 nt, Artificial Sequence
  Description of Artificial Sequence: Synthetic oligonucleotide
caagccuucaagugaccag

SEQ ID NO: 2724554 - RNA, 19 nt, Artificial Sequence
  Description of Artificial Sequence: Synthetic oligonucleotide
uucagaagcuguucuucga

SEQ ID NO: 2724555 - RNA, 19 nt, Artificial Sequence
  Description of Artificial Sequence: Synthetic oligonucleotide
agacuucagaggaacgugg

SEQ ID NO: 2724556 - RNA, 19 nt, Artificial Sequence
  Description of Artificial Sequence: Synthetic oligonucleotide
ucuucgacaaggagaccac

SEQ ID NO: 2724557 - RNA, 19 nt, Artificial Sequence
  Description of Artificial Sequence: Synthetic oligonucleotide
ucugaguugucggauagua

SEQ ID NO: 2724558 - RNA, 19 nt, Artificial Sequence
  Description of Artificial Sequence: Synthetic oligonucleotide
uguuugccucaaaagacuu

SEQ ID NO: 2724559 - RNA, 19 nt, Artificial Sequence
  Description of Artificial Sequence: Synthetic oligonucleotide
gaacuuugggguuccucug

SEQ ID NO: 2724560 - RNA, 19 nt, Artificial Sequence
  Description of Artificial Sequence: Synthetic oligonucleotide
uucugguucgaagaacaca

SEQ ID NO: 2724561 - RNA, 19 nt, Artificial Sequence
  Description of Artificial Sequence: Synthetic oligonucleotide
agccccacaaccuguaccu

SEQ ID NO: 2724562 - RNA, 19 nt, Artificial Sequence
  Description of Artificial Sequence: Synthetic oligonucleotide
aaucucuaagacagcuuug

SEQ ID NO: 2724563 - RNA, 19 nt, Artificial Sequence
  Description of Artificial Sequence: Synthetic oligonucleotide
aaguauacuguggcuaaaa

SEQ ID NO: 2724564 - RNA, 19 nt, Artificial Sequence
  Description of Artificial Sequence: Synthetic oligonucleotide
ggaacguggacacauuuca

SEQ ID NO: 2724565 - RNA, 19 nt, Artificial Sequence
  Description of Artificial Sequence: Synthetic oligonucleotide
augucccacuuguagagca

SEQ ID NO: 2724566 - RNA, 19 nt, Artificial Sequence
  Description of Artificial Sequence: Synthetic oligonucleotide
cuaagacagcuuugccugg

SEQ ID NO: 2724567 - RNA, 19 nt, Artificial Sequence
  Description of Artificial Sequence: Synthetic oligonucleotide
agacagcuuugccugguag

SEQ ID NO: 2724568 - RNA, 19 nt, Artificial Sequence
  Description of Artificial Sequence: Synthetic oligonucleotide
ugggccaggacuacagcac

SEQ ID NO: 2724569 - RNA, 19 nt, Artificial Sequence
  Description of Artificial Sequence: Synthetic oligonucleotide
aaaaugcuuucaaagucuu

SEQ ID NO: 2724570 - RNA, 19 nt, Artificial Sequence
  Description of Artificial Sequence: Synthetic oligonucleotide
uggcaaagacaggaggucc

SEQ ID NO: 2724571 - RNA, 19 nt, Artificial Sequence
  Description of Artificial Sequence: Synthetic oligonucleotide
acuuguagagcaagccuuc

SEQ ID NO: 2724572 - RNA, 19 nt, Artificial Sequence
  Description of Artificial Sequence: Synthetic oligonucleotide
gagaccaccagcaucucga

SEQ ID NO: 2724573 - RNA, 19 nt, Artificial Sequence
  Description of Artificial Sequence: Synthetic oligonucleotide
ucucgauagugugucuucc

SEQ ID NO: 2724574 - RNA, 19 nt, Artificial Sequence
  Description of Artificial Sequence: Synthetic oligonucleotide
caaggagaccaccagcauc

SEQ ID NO: 2724575 - RNA, 19 nt, Artificial Sequence
  Description of Artificial Sequence: Synthetic oligonucleotide
ucaagugaccagucagcac

SEQ ID NO: 2724576 - RNA, 19 nt, Artificial Sequence
  Description of Artificial Sequence: Synthetic oligonucleotide
guagguagaccaaaacuga

SEQ ID NO: 2724577 - RNA, 19 nt, Artificial Sequence
  Description of Artificial Sequence: Synthetic oligonucleotide
gacagcuuugccugguaga

SEQ ID NO: 2724578 - RNA, 19 nt, Artificial Sequence
  Description of Artificial Sequence: Synthetic oligonucleotide
aguuggcagcuuugccugc

SEQ ID NO: 2724579 - RNA, 19 nt, Artificial Sequence
  Description of Artificial Sequence: Synthetic oligonucleotide
aaaucccuggaaggcucac

SEQ ID NO: 2724580 - RNA, 19 nt, Artificial Sequence
  Description of Artificial Sequence: Synthetic oligonucleotide
acaggagguccuuagugau

SEQ ID NO: 2724581 - RNA, 19 nt, Artificial Sequence
  Description of Artificial Sequence: Synthetic oligonucleotide
uuguagagcaagccuucaa

SEQ ID NO: 2724582 - RNA, 19 nt, Artificial Sequence
  Description of Artificial Sequence: Synthetic oligonucleotide
aggagguccuuagugaugu

SEQ ID NO: 2724583 - RNA, 19 nt, Artificial Sequence
  Description of Artificial Sequence: Synthetic oligonucleotide
acacaucagaugcaagaau

SEQ ID NO: 2724584 - RNA, 19 nt, Artificial Sequence
  Description of Artificial Sequence: Synthetic oligonucleotide
ucccacuuguagagcaagc

SEQ ID NO: 2724585 - RNA, 19 nt, Artificial Sequence
  Description of Artificial Sequence: Synthetic oligonucleotide
agaccaaaacugaacuuug

SEQ ID NO: 2724586 - RNA, 19 nt, Artificial Sequence
  Description of Artificial Sequence: Synthetic oligonucleotide
ccuucaagugaccagucag

SEQ ID NO: 2724587 - RNA, 19 nt, Artificial Sequence
  Description of Artificial Sequence: Synthetic oligonucleotide
agauguccaaacagugggg

SEQ ID NO: 2724588 - RNA, 19 nt, Artificial Sequence
  Description of Artificial Sequence: Synthetic oligonucleotide
caaccuguaccugggacag

SEQ ID NO: 2724589 - RNA, 19 nt, Artificial Sequence
  Description of Artificial Sequence: Synthetic oligonucleotide
uacuguggcuaaaaugcuu

SEQ ID NO: 2724590 - RNA, 19 nt, Artificial Sequence
  Description of Artificial Sequence: Synthetic oligonucleotide
guccuuagugauguggccc

SEQ ID NO: 2724591 - RNA, 19 nt, Artificial Sequence
  Description of Artificial Sequence: Synthetic oligonucleotide
cucugcaucaggaaguaua

SEQ ID NO: 2724592 - RNA, 19 nt, Artificial Sequence
  Description of Artificial Sequence: Synthetic oligonucleotide
guggcuaaaaugcuuucaa

SEQ ID NO: 2724593 - RNA, 19 nt, Artificial Sequence
  Description of Artificial Sequence: Synthetic oligonucleotide
cacaaccuguaccugggac

SEQ ID NO: 2724594 - RNA, 19 nt, Artificial Sequence
  Description of Artificial Sequence: Synthetic oligonucleotide
cugguagguagaccaaaac

SEQ ID NO: 2724595 - RNA, 19 nt, Artificial Sequence
  Description of Artificial Sequence: Synthetic oligonucleotide
aggaacguggacacauuuc

SEQ ID NO: 2724596 - RNA, 19 nt, Artificial Sequence
  Description of Artificial Sequence: Synthetic oligonucleotide
gagcaagccuucaagugac

SEQ ID NO: 2724597 - RNA, 19 nt, Artificial Sequence
  Description of Artificial Sequence: Synthetic oligonucleotide
aggaaguauacuguggcua

SEQ ID NO: 2724598 - RNA, 19 nt, Artificial Sequence
  Description of Artificial Sequence: Synthetic oligonucleotide
uagugauguggccccacgu

SEQ ID NO: 2724599 - RNA, 19 nt, Artificial Sequence
  Description of Artificial Sequence: Synthetic oligonucleotide
gguagaccaaaacugaacu

SEQ ID NO: 2724600 - RNA, 19 nt, Artificial Sequence
  Description of Artificial Sequence: Synthetic oligonucleotide
cuucugugaaaccacaggu

SEQ ID NO: 2724601 - RNA, 19 nt, Artificial Sequence
  Description of Artificial Sequence: Synthetic oligonucleotide
guagagaucuucugugaaa

SEQ ID NO: 2724602 - RNA, 19 nt, Artificial Sequence
  Description of Artificial Sequence: Synthetic oligonucleotide
uggcagccaaaaucccugg

SEQ ID NO: 2724603 - RNA, 19 nt, Artificial Sequence
  Description of Artificial Sequence: Synthetic oligonucleotide
uagcaccacauuuggcagc

SEQ ID NO: 2724604 - RNA, 19 nt, Artificial Sequence
  Description of Artificial Sequence: Synthetic oligonucleotide
gguucgaagaacacaucag

SEQ ID NO: 2724605 - RNA, 19 nt, Artificial Sequence
  Description of Artificial Sequence: Synthetic oligonucleotide
cauuucaugucccacuugu

SEQ ID NO: 2724606 - RNA, 19 nt, Artificial Sequence
  Description of Artificial Sequence: Synthetic oligonucleotide
gcacuucugaccugguagg

SEQ ID NO: 2724607 - RNA, 19 nt, Artificial Sequence
  Description of Artificial Sequence: Synthetic oligonucleotide
gaggguagacccugcuaug

SEQ ID NO: 2724608 - RNA, 19 nt, Artificial Sequence
  Description of Artificial Sequence: Synthetic oligonucleotide
cucuaagacagcuuugccu

SEQ ID NO: 2724609 - RNA, 19 nt, Artificial Sequence
  Description of Artificial Sequence: Synthetic oligonucleotide
cuuccugggaggguagacc

SEQ ID NO: 2724610 - RNA, 19 nt, Artificial Sequence
  Description of Artificial Sequence: Synthetic oligonucleotide
ggcagcucugaguugucgg

SEQ ID NO: 2724611 - RNA, 19 nt, Artificial Sequence
  Description of Artificial Sequence: Synthetic oligonucleotide
ugcaggaccugcgggacgc

SEQ ID NO: 2724612 - RNA, 19 nt, Artificial Sequence
  Description of Artificial Sequence: Synthetic oligonucleotide
cuucugguucgaagaacac

SEQ ID NO: 2724613 - RNA, 19 nt, Artificial Sequence
  Description of Artificial Sequence: Synthetic oligonucleotide
caaacaguggggcagcucu

SEQ ID NO: 2724614 - RNA, 19 nt, Artificial Sequence
  Description of Artificial Sequence: Synthetic oligonucleotide
caucccauauugggcaugc

SEQ ID NO: 2724615 - RNA, 19 nt, Artificial Sequence
  Description of Artificial Sequence: Synthetic oligonucleotide
gugauguggccccacguca

SEQ ID NO: 2724616 - RNA, 19 nt, Artificial Sequence
  Description of Artificial Sequence: Synthetic oligonucleotide
uggggcagcucugaguugu

SEQ ID NO: 2724617 - RNA, 19 nt, Artificial Sequence
  Description of Artificial Sequence: Synthetic oligonucleotide
acgucagccccacaaccug

SEQ ID NO: 2724618 - RNA, 19 nt, Artificial Sequence
  Description of Artificial Sequence: Synthetic oligonucleotide
gcagauguccaaacagugg

SEQ ID NO: 2724619 - RNA, 19 nt, Artificial Sequence
  Description of Artificial Sequence: Synthetic oligonucleotide
guagagcaagccuucaagu

SEQ ID NO: 2724620 - RNA, 19 nt, Artificial Sequence
  Description of Artificial Sequence: Synthetic oligonucleotide
aacaguggggcagcucuga

SEQ ID NO: 2724621 - RNA, 19 nt, Artificial Sequence
  Description of Artificial Sequence: Synthetic oligonucleotide
guucaguuggcagcuuugc

SEQ ID NO: 2724622 - RNA, 19 nt, Artificial Sequence
  Description of Artificial Sequence: Synthetic oligonucleotide
gaugcaagaaugaugucuu

SEQ ID NO: 2724623 - RNA, 19 nt, Artificial Sequence
  Description of Artificial Sequence: Synthetic oligonucleotide
gucggauaguauuacuuua

SEQ ID NO: 2724624 - RNA, 19 nt, Artificial Sequence
  Description of Artificial Sequence: Synthetic oligonucleotide
auguggccccacgucagcc

SEQ ID NO: 2724625 - RNA, 19 nt, Artificial Sequence
  Description of Artificial Sequence: Synthetic oligonucleotide
uguggccccacgucagccc

SEQ ID NO: 2724626 - RNA, 19 nt, Artificial Sequence
  Description of Artificial Sequence: Synthetic oligonucleotide
acagggccaaacauacauc

SEQ ID NO: 2724627 - RNA, 19 nt, Artificial Sequence
  Description of Artificial Sequence: Synthetic oligonucleotide
accagcaucucgauagugu

SEQ ID NO: 2724628 - RNA, 19 nt, Artificial Sequence
  Description of Artificial Sequence: Synthetic oligonucleotide
accuguaccugggacaggu

SEQ ID NO: 2724629 - RNA, 19 nt, Artificial Sequence
  Description of Artificial Sequence: Synthetic oligonucleotide
gauguggccccacgucagc

SEQ ID NO: 2724630 - RNA, 19 nt, Artificial Sequence
  Description of Artificial Sequence: Synthetic oligonucleotide
agaacacaucagaugcaag

SEQ ID NO: 2724631 - RNA, 19 nt, Artificial Sequence
  Description of Artificial Sequence: Synthetic oligonucleotide
augcaagaaugaugucuug

SEQ ID NO: 2724632 - RNA, 19 nt, Artificial Sequence
  Description of Artificial Sequence: Synthetic oligonucleotide
cagccccacaaccuguacc

SEQ ID NO: 2724633 - RNA, 19 nt, Artificial Sequence
  Description of Artificial Sequence: Synthetic oligonucleotide
ucugaccugguagguagac

SEQ ID NO: 2724634 - RNA, 19 nt, Artificial Sequence
  Description of Artificial Sequence: Synthetic oligonucleotide
guauuacuuuagcaccaca

SEQ ID NO: 2724635 - RNA, 19 nt, Artificial Sequence
  Description of Artificial Sequence: Synthetic oligonucleotide
cauauugggcaugcaggac

SEQ ID NO: 2724636 - RNA, 19 nt, Artificial Sequence
  Description of Artificial Sequence: Synthetic oligonucleotide
gggccaaacauacauccca

SEQ ID NO: 2724637 - RNA, 19 nt, Artificial Sequence
  Description of Artificial Sequence: Synthetic oligonucleotide
ggaaguauacuguggcuaa

SEQ ID NO: 2724638 - RNA, 19 nt, Artificial Sequence
  Description of Artificial Sequence: Synthetic oligonucleotide
ucaaagucuucugguucga

SEQ ID NO: 2724639 - RNA, 19 nt, Artificial Sequence
  Description of Artificial Sequence: Synthetic oligonucleotide
cagguauugggccaggacu

SEQ ID NO: 2724640 - RNA, 19 nt, Artificial Sequence
  Description of Artificial Sequence: Synthetic oligonucleotide
ugaugucuugugguggcaa

SEQ ID NO: 2724641 - RNA, 19 nt, Artificial Sequence
  Description of Artificial Sequence: Synthetic oligonucleotide
ggcaugcaggaccugcggg

SEQ ID NO: 2724642 - RNA, 19 nt, Artificial Sequence
  Description of Artificial Sequence: Synthetic oligonucleotide
gcuguucuucgacaaggag

SEQ ID NO: 2724643 - RNA, 19 nt, Artificial Sequence
  Description of Artificial Sequence: Synthetic oligonucleotide
gugaaaccacagguauugg

SEQ ID NO: 2724644 - RNA, 19 nt, Artificial Sequence
  Description of Artificial Sequence: Synthetic oligonucleotide
acaaggagaccaccagcau

SEQ ID NO: 2724645 - RNA, 19 nt, Artificial Sequence
  Description of Artificial Sequence: Synthetic oligonucleotide
uugccugguagagaucuuc

SEQ ID NO: 2724646 - RNA, 19 nt, Artificial Sequence
  Description of Artificial Sequence: Synthetic oligonucleotide
accacagguauugggccag

SEQ ID NO: 2724647 - RNA, 19 nt, Artificial Sequence
  Description of Artificial Sequence: Synthetic oligonucleotide
caaucucuaagacagcuuu

SEQ ID NO: 2724648 - RNA, 19 nt, Artificial Sequence
  Description of Artificial Sequence: Synthetic oligonucleotide
cagaagcuguucuucgaca

SEQ ID NO: 2724649 - RNA, 19 nt, Artificial Sequence
  Description of Artificial Sequence: Synthetic oligonucleotide
gacuucagaggaacgugga

SEQ ID NO: 2724650 - RNA, 19 nt, Artificial Sequence
  Description of Artificial Sequence: Synthetic oligonucleotide
gcucugaguugucggauag

SEQ ID NO: 2724651 - RNA, 19 nt, Artificial Sequence
  Description of Artificial Sequence: Synthetic oligonucleotide
augcaggaccugcgggacg

SEQ ID NO: 2724652 - RNA, 19 nt, Artificial Sequence
  Description of Artificial Sequence: Synthetic oligonucleotide
cuucgacaaggagaccacc

SEQ ID NO: 2724653 - RNA, 19 nt, Artificial Sequence
  Description of Artificial Sequence: Synthetic oligonucleotide
aaacaguggggcagcucug

SEQ ID NO: 2724654 - RNA, 19 nt, Artificial Sequence
  Description of Artificial Sequence: Synthetic oligonucleotide
uacaucccauauugggcau

SEQ ID NO: 2724655 - RNA, 19 nt, Artificial Sequence
  Description of Artificial Sequence: Synthetic oligonucleotide
auacuguggcuaaaaugcu

SEQ ID NO: 2724656 - RNA, 19 nt, Artificial Sequence
  Description of Artificial Sequence: Synthetic oligonucleotide
cuccaaucucuaagacagc

SEQ ID NO: 2724657 - RNA, 19 nt, Artificial Sequence
  Description of Artificial Sequence: Synthetic oligonucleotide
gguagagaucuucugugaa

SEQ ID NO: 2724658 - RNA, 19 nt, Artificial Sequence
  Description of Artificial Sequence: Synthetic oligonucleotide
gguccuuagugauguggcc

SEQ ID NO: 2724659 - RNA, 19 nt, Artificial Sequence
  Description of Artificial Sequence: Synthetic oligonucleotide
cuuugccugguagagaucu

SEQ ID NO: 2724660 - RNA, 19 nt, Artificial Sequence
  Description of Artificial Sequence: Synthetic oligonucleotide
cagcuccaaucucuaagac

SEQ ID NO: 2724661 - RNA, 19 nt, Artificial Sequence
  Description of Artificial Sequence: Synthetic oligonucleotide
ugggguuccucugcaucag

SEQ ID NO: 2724662 - RNA, 19 nt, Artificial Sequence
  Description of Artificial Sequence: Synthetic oligonucleotide
cgauagugugucuuccugg

SEQ ID NO: 2724663 - RNA, 19 nt, Artificial Sequence
  Description of Artificial Sequence: Synthetic oligonucleotide
aggguagacccugcuaugu

SEQ ID NO: 2724664 - RNA, 19 nt, Artificial Sequence
  Description of Artificial Sequence: Synthetic oligonucleotide
cuguggcuaaaaugcuuuc

SEQ ID NO: 2724665 - RNA, 19 nt, Artificial Sequence
  Description of Artificial Sequence: Synthetic oligonucleotide
ccaggacuacagcacaggg

SEQ ID NO: 2724666 - RNA, 19 nt, Artificial Sequence
  Description of Artificial Sequence: Synthetic oligonucleotide
gaguugucggauaguauua

SEQ ID NO: 2724667 - RNA, 19 nt, Artificial Sequence
  Description of Artificial Sequence: Synthetic oligonucleotide
caugucccacuuguagagc

SEQ ID NO: 2724668 - RNA, 19 nt, Artificial Sequence
  Description of Artificial Sequence: Synthetic oligonucleotide
ugggaggguagacccugcu

SEQ ID NO: 2724669 - RNA, 19 nt, Artificial Sequence
  Description of Artificial Sequence: Synthetic oligonucleotide
ucagccccacaaccuguac

SEQ ID NO: 2724670 - RNA, 19 nt, Artificial Sequence
  Description of Artificial Sequence: Synthetic oligonucleotide
uugccugcagauguccaaa

SEQ ID NO: 2724671 - RNA, 19 nt, Artificial Sequence
  Description of Artificial Sequence: Synthetic oligonucleotide
cugaccugguagguagacc

SEQ ID NO: 2724672 - RNA, 19 nt, Artificial Sequence
  Description of Artificial Sequence: Synthetic oligonucleotide
agguauugggccaggacua

SEQ ID NO: 2724673 - RNA, 19 nt, Artificial Sequence
  Description of Artificial Sequence: Synthetic oligonucleotide
agcaagccuucaagugacc

SEQ ID NO: 2724674 - RNA, 19 nt, Artificial Sequence
  Description of Artificial Sequence: Synthetic oligonucleotide
caugcaggaccugcgggac

SEQ ID NO: 2724675 - RNA, 19 nt, Artificial Sequence
  Description of Artificial Sequence: Synthetic oligonucleotide
gacuacagcacagggccaa

SEQ ID NO: 2724676 - RNA, 19 nt, Artificial Sequence
  Description of Artificial Sequence: Synthetic oligonucleotide
cugguucgaagaacacauc

SEQ ID NO: 2724677 - RNA, 19 nt, Artificial Sequence
  Description of Artificial Sequence: Synthetic oligonucleotide
gcuuucaaagucuucuggu

SEQ ID NO: 2724678 - RNA, 19 nt, Artificial Sequence
  Description of Artificial Sequence: Synthetic oligonucleotide
acaggugguucaguuggca

SEQ ID NO: 2724679 - RNA, 19 nt, Artificial Sequence
  Description of Artificial Sequence: Synthetic oligonucleotide
ucagcacuucugaccuggu

SEQ ID NO: 2724680 - RNA, 19 nt, Artificial Sequence
  Description of Artificial Sequence: Synthetic oligonucleotide
agcucugaguugucggaua

SEQ ID NO: 2724681 - RNA, 19 nt, Artificial Sequence
  Description of Artificial Sequence: Synthetic oligonucleotide
uagacccugcuauguuuuc

SEQ ID NO: 2724682 - RNA, 19 nt, Artificial Sequence
  Description of Artificial Sequence: Synthetic oligonucleotide
gacaggugguucaguuggc

SEQ ID NO: 2724683 - RNA, 19 nt, Artificial Sequence
  Description of Artificial Sequence: Synthetic oligonucleotide
aaccuguaccugggacagg

SEQ ID NO: 2724684 - RNA, 19 nt, Artificial Sequence
  Description of Artificial Sequence: Synthetic oligonucleotide
guugucggauaguauuacu

SEQ ID NO: 2724685 - RNA, 19 nt, Artificial Sequence
  Description of Artificial Sequence: Synthetic oligonucleotide
cugcagauguccaaacagu

SEQ ID NO: 2724686 - RNA, 19 nt, Artificial Sequence
  Description of Artificial Sequence: Synthetic oligonucleotide
agugaccagucagcacuuc

SEQ ID NO: 2724687 - RNA, 19 nt, Artificial Sequence
  Description of Artificial Sequence: Synthetic oligonucleotide
caaacauacaucccauauu

SEQ ID NO: 2724688 - RNA, 19 nt, Artificial Sequence
  Description of Artificial Sequence: Synthetic oligonucleotide
agcuuugccugcagauguc

SEQ ID NO: 2724689 - RNA, 19 nt, Artificial Sequence
  Description of Artificial Sequence: Synthetic oligonucleotide
ggaaggcucacuccagcuc

SEQ ID NO: 2724690 - RNA, 19 nt, Artificial Sequence
  Description of Artificial Sequence: Synthetic oligonucleotide
gaaguauacuguggcuaaa

SEQ ID NO: 2724691 - RNA, 19 nt, Artificial Sequence
  Description of Artificial Sequence: Synthetic oligonucleotide
guggccccacgucagcccc

SEQ ID NO: 2724692 - RNA, 19 nt, Artificial Sequence
  Description of Artificial Sequence: Synthetic oligonucleotide
cccacuuguagagcaagcc

SEQ ID NO: 2724693 - RNA, 19 nt, Artificial Sequence
  Description of Artificial Sequence: Synthetic oligonucleotide
acaucccauauugggcaug

SEQ ID NO: 2724694 - RNA, 19 nt, Artificial Sequence
  Description of Artificial Sequence: Synthetic oligonucleotide
agccuucaagugaccaguc

SEQ ID NO: 2724695 - RNA, 19 nt, Artificial Sequence
  Description of Artificial Sequence: Synthetic oligonucleotide
gcagccaaaaucccuggaa

SEQ ID NO: 2724696 - RNA, 19 nt, Artificial Sequence
  Description of Artificial Sequence: Synthetic oligonucleotide
cagaugcaagaaugauguc

SEQ ID NO: 2724697 - RNA, 19 nt, Artificial Sequence
  Description of Artificial Sequence: Synthetic oligonucleotide
cggauaguauuacuuuagc

SEQ ID NO: 2724698 - RNA, 19 nt, Artificial Sequence
  Description of Artificial Sequence: Synthetic oligonucleotide
uuugccugguagagaucuu

SEQ ID NO: 2724699 - RNA, 19 nt, Artificial Sequence
  Description of Artificial Sequence: Synthetic oligonucleotide
gguucaguuggcagcuuug

SEQ ID NO: 2724700 - RNA, 19 nt, Artificial Sequence
  Description of Artificial Sequence: Synthetic oligonucleotide
guagaccaaaacugaacuu

SEQ ID NO: 2724701 - RNA, 19 nt, Artificial Sequence
  Description of Artificial Sequence: Synthetic oligonucleotide
agcuguucuucgacaagga

SEQ ID NO: 2724702 - RNA, 19 nt, Artificial Sequence
  Description of Artificial Sequence: Synthetic oligonucleotide
ggaggguagacccugcuau

SEQ ID NO: 2724703 - RNA, 19 nt, Artificial Sequence
  Description of Artificial Sequence: Synthetic oligonucleotide
cagcuuugccugcagaugu

SEQ ID NO: 2724704 - RNA, 19 nt, Artificial Sequence
  Description of Artificial Sequence: Synthetic oligonucleotide
ccacgucagccccacaacc

SEQ ID NO: 2724705 - RNA, 19 nt, Artificial Sequence
  Description of Artificial Sequence: Synthetic oligonucleotide
gggcaugcaggaccugcgg

SEQ ID NO: 2724706 - RNA, 19 nt, Artificial Sequence
  Description of Artificial Sequence: Synthetic oligonucleotide
cugggaggguagacccugc

SEQ ID NO: 2724707 - RNA, 19 nt, Artificial Sequence
  Description of Artificial Sequence: Synthetic oligonucleotide
cuacagcacagggccaaac

SEQ ID NO: 2724708 - RNA, 19 nt, Artificial Sequence
  Description of Artificial Sequence: Synthetic oligonucleotide
ccagcuccaaucucuaaga

SEQ ID NO: 2724709 - RNA, 19 nt, Artificial Sequence
  Description of Artificial Sequence: Synthetic oligonucleotide
gaggaacguggacacauuu

SEQ ID NO: 2724710 - RNA, 19 nt, Artificial Sequence
  Description of Artificial Sequence: Synthetic oligonucleotide
aagugaccagucagcacuu

SEQ ID NO: 2724711 - RNA, 19 nt, Artificial Sequence
  Description of Artificial Sequence: Synthetic oligonucleotide
cuuguagagcaagccuuca

SEQ ID NO: 2724712 - RNA, 19 nt, Artificial Sequence
  Description of Artificial Sequence: Synthetic oligonucleotide
gcaugcaggaccugcggga

SEQ ID NO: 2724713 - RNA, 19 nt, Artificial Sequence
  Description of Artificial Sequence: Synthetic oligonucleotide
gccaggacuacagcacagg

SEQ ID NO: 2724714 - RNA, 19 nt, Artificial Sequence
  Description of Artificial Sequence: Synthetic oligonucleotide
aaggcucacuccagcucca

SEQ ID NO: 2724715 - RNA, 19 nt, Artificial Sequence
  Description of Artificial Sequence: Synthetic oligonucleotide
accugguagguagaccaaa

SEQ ID NO: 2724716 - RNA, 19 nt, Artificial Sequence
  Description of Artificial Sequence: Synthetic oligonucleotide
uccaaacaguggggcagcu

SEQ ID NO: 2724717 - RNA, 19 nt, Artificial Sequence
  Description of Artificial Sequence: Synthetic oligonucleotide
caccacauuuggcagccaa

SEQ ID NO: 2724718 - RNA, 19 nt, Artificial Sequence
  Description of Artificial Sequence: Synthetic oligonucleotide
gcuuugccugcagaugucc

SEQ ID NO: 2724719 - RNA, 19 nt, Artificial Sequence
  Description of Artificial Sequence: Synthetic oligonucleotide
gugaccagucagcacuucu

SEQ ID NO: 2724720 - RNA, 19 nt, Artificial Sequence
  Description of Artificial Sequence: Synthetic oligonucleotide
auuucaugucccacuugua

SEQ ID NO: 2724721 - RNA, 19 nt, Artificial Sequence
  Description of Artificial Sequence: Synthetic oligonucleotide
caccagcaucucgauagug

SEQ ID NO: 2724722 - RNA, 19 nt, Artificial Sequence
  Description of Artificial Sequence: Synthetic oligonucleotide
accacauuuggcagccaaa

SEQ ID NO: 2724723 - RNA, 19 nt, Artificial Sequence
  Description of Artificial Sequence: Synthetic oligonucleotide
caggaaguauacuguggcu

SEQ ID NO: 2724724 - RNA, 19 nt, Artificial Sequence
  Description of Artificial Sequence: Synthetic oligonucleotide
gggguuccucugcaucagg

SEQ ID NO: 2724725 - RNA, 19 nt, Artificial Sequence
  Description of Artificial Sequence: Synthetic oligonucleotide
cgacaaggagaccaccagc

SEQ ID NO: 2724726 - RNA, 19 nt, Artificial Sequence
  Description of Artificial Sequence: Synthetic oligonucleotide
guauugggccaggacuaca

SEQ ID NO: 2724727 - RNA, 19 nt, Artificial Sequence
  Description of Artificial Sequence: Synthetic oligonucleotide
uaccugggacaggugguuc

SEQ ID NO: 2724728 - RNA, 19 nt, Artificial Sequence
  Description of Artificial Sequence: Synthetic oligonucleotide
guuggcagcuuugccugca

SEQ ID NO: 2724729 - RNA, 19 nt, Artificial Sequence
  Description of Artificial Sequence: Synthetic oligonucleotide
gugucuuccugggagggua

SEQ ID NO: 2724730 - RNA, 19 nt, Artificial Sequence
  Description of Artificial Sequence: Synthetic oligonucleotide
cucgauagugugucuuccu

SEQ ID NO: 2724731 - RNA, 19 nt, Artificial Sequence
  Description of Artificial Sequence: Synthetic oligonucleotide
cacauuucaugucccacuu

SEQ ID NO: 2724732 - RNA, 19 nt, Artificial Sequence
  Description of Artificial Sequence: Synthetic oligonucleotide
cacgucagccccacaaccu

SEQ ID NO: 2724733 - RNA, 19 nt, Artificial Sequence
  Description of Artificial Sequence: Synthetic oligonucleotide
gcaagccuucaagugacca

SEQ ID NO: 2724734 - RNA, 19 nt, Artificial Sequence
  Description of Artificial Sequence: Synthetic oligonucleotide
aggagaccaccagcaucuc

SEQ ID NO: 2724735 - RNA, 19 nt, Artificial Sequence
  Description of Artificial Sequence: Synthetic oligonucleotide
ccugcuauguuuuccuugu

SEQ ID NO: 2724736 - RNA, 19 nt, Artificial Sequence
  Description of Artificial Sequence: Synthetic oligonucleotide
caucagaugcaagaaugau

SEQ ID NO: 2724737 - RNA, 19 nt, Artificial Sequence
  Description of Artificial Sequence: Synthetic oligonucleotide
gguauugggccaggacuac

SEQ ID NO: 2724738 - RNA, 19 nt, Artificial Sequence
  Description of Artificial Sequence: Synthetic oligonucleotide
guucuucgacaaggagacc

SEQ ID NO: 2724739 - RNA, 19 nt, Artificial Sequence
  Description of Artificial Sequence: Synthetic oligonucleotide
acccugcuauguuuuccuu

SEQ ID NO: 2724740 - RNA, 19 nt, Artificial Sequence
  Description of Artificial Sequence: Synthetic oligonucleotide
gccuucaagugaccaguca

SEQ ID NO: 2724741 - RNA, 19 nt, Artificial Sequence
  Description of Artificial Sequence: Synthetic oligonucleotide
gaacguggacacauuucau

SEQ ID NO: 2724742 - RNA, 19 nt, Artificial Sequence
  Description of Artificial Sequence: Synthetic oligonucleotide
gggccaggacuacagcaca

SEQ ID NO: 2724743 - RNA, 19 nt, Artificial Sequence
  Description of Artificial Sequence: Synthetic oligonucleotide
cugaguugucggauaguau

SEQ ID NO: 2724744 - RNA, 19 nt, Artificial Sequence
  Description of Artificial Sequence: Synthetic oligonucleotide
ggccaggacuacagcacag

SEQ ID NO: 2724745 - RNA, 19 nt, Artificial Sequence
  Description of Artificial Sequence: Synthetic oligonucleotide
acuacagcacagggccaaa

SEQ ID NO: 2724746 - RNA, 19 nt, Artificial Sequence
  Description of Artificial Sequence: Synthetic oligonucleotide
auugggcaugcaggaccug

SEQ ID NO: 2724747 - RNA, 19 nt, Artificial Sequence
  Description of Artificial Sequence: Synthetic oligonucleotide
uggccccacgucagcccca

SEQ ID NO: 2724748 - RNA, 19 nt, Artificial Sequence
  Description of Artificial Sequence: Synthetic oligonucleotide
ggcagccaaaaucccugga

SEQ ID NO: 2724749 - RNA, 19 nt, Artificial Sequence
  Description of Artificial Sequence: Synthetic oligonucleotide
cacauuuggcagccaaaau

SEQ ID NO: 2724750 - RNA, 19 nt, Artificial Sequence
  Description of Artificial Sequence: Synthetic oligonucleotide
cagcaucucgauagugugu

SEQ ID NO: 2724751 - RNA, 19 nt, Artificial Sequence
  Description of Artificial Sequence: Synthetic oligonucleotide
cguggacacauuucauguc

SEQ ID NO: 2724752 - RNA, 19 nt, Artificial Sequence
  Description of Artificial Sequence: Synthetic oligonucleotide
agaggaacguggacacauu

SEQ ID NO: 2724753 - RNA, 19 nt, Artificial Sequence
  Description of Artificial Sequence: Synthetic oligonucleotide
ccugguagguagaccaaaa

SEQ ID NO: 2724754 - RNA, 19 nt, Artificial Sequence
  Description of Artificial Sequence: Synthetic oligonucleotide
cugugaaaccacagguauu

SEQ ID NO: 2724755 - RNA, 19 nt, Artificial Sequence
  Description of Artificial Sequence: Synthetic oligonucleotide
caaagucuucugguucgaa

SEQ ID NO: 2724756 - RNA, 19 nt, Artificial Sequence
  Description of Artificial Sequence: Synthetic oligonucleotide
caaagacaggagguccuua

SEQ ID NO: 2724757 - RNA, 19 nt, Artificial Sequence
  Description of Artificial Sequence: Synthetic oligonucleotide
acugaacuuugggguuccu

SEQ ID NO: 2724758 - RNA, 19 nt, Artificial Sequence
  Description of Artificial Sequence: Synthetic oligonucleotide
cccacgucagccccacaac

SEQ ID NO: 2724759 - RNA, 19 nt, Artificial Sequence
  Description of Artificial Sequence: Synthetic oligonucleotide
gccaaacauacaucccaua

SEQ ID NO: 2724760 - RNA, 19 nt, Artificial Sequence
  Description of Artificial Sequence: Synthetic oligonucleotide
aucccauauugggcaugca

SEQ ID NO: 2724761 - RNA, 19 nt, Artificial Sequence
  Description of Artificial Sequence: Synthetic oligonucleotide
ggcaaagacaggagguccu

SEQ ID NO: 2724762 - RNA, 19 nt, Artificial Sequence
  Description of Artificial Sequence: Synthetic oligonucleotide
ccacuuguagagcaagccu

SEQ ID NO: 2724763 - RNA, 19 nt, Artificial Sequence
  Description of Artificial Sequence: Synthetic oligonucleotide
cuccagcuccaaucucuaa

SEQ ID NO: 2724764 - RNA, 19 nt, Artificial Sequence
  Description of Artificial Sequence: Synthetic oligonucleotide
caucucgauagugugucuu

SEQ ID NO: 2724765 - RNA, 19 nt, Artificial Sequence
  Description of Artificial Sequence: Synthetic oligonucleotide
gggaggguagacccugcua

SEQ ID NO: 2724766 - RNA, 19 nt, Artificial Sequence
  Description of Artificial Sequence: Synthetic oligonucleotide
ccuguaccugggacaggug

SEQ ID NO: 2724767 - RNA, 19 nt, Artificial Sequence
  Description of Artificial Sequence: Synthetic oligonucleotide
gucagccccacaaccugua

SEQ ID NO: 2724768 - RNA, 19 nt, Artificial Sequence
  Description of Artificial Sequence: Synthetic oligonucleotide
cacuucugaccugguaggu

SEQ ID NO: 2724769 - RNA, 19 nt, Artificial Sequence
  Description of Artificial Sequence: Synthetic oligonucleotide
cugcaucaggaaguauacu

SEQ ID NO: 2724770 - RNA, 19 nt, Artificial Sequence
  Description of Artificial Sequence: Synthetic oligonucleotide
ggacuacagcacagggcca

SEQ ID NO: 2724771 - RNA, 19 nt, Artificial Sequence
  Description of Artificial Sequence: Synthetic oligonucleotide
ccccacgucagccccacaa

SEQ ID NO: 2724772 - RNA, 19 nt, Artificial Sequence
  Description of Artificial Sequence: Synthetic oligonucleotide
guaccugggacaggugguu

SEQ ID NO: 2724773 - RNA, 19 nt, Artificial Sequence
  Description of Artificial Sequence: Synthetic oligonucleotide
cucugaguugucggauagu

SEQ ID NO: 2724774 - RNA, 19 nt, Artificial Sequence
  Description of Artificial Sequence: Synthetic oligonucleotide
ccacagguauugggccagg

SEQ ID NO: 2724775 - RNA, 19 nt, Artificial Sequence
  Description of Artificial Sequence: Synthetic oligonucleotide
ccaaucucuaagacagcuu

SEQ ID NO: 2724776 - RNA, 19 nt, Artificial Sequence
  Description of Artificial Sequence: Synthetic oligonucleotide
ggguagacccugcuauguu

SEQ ID NO: 2724777 - RNA, 19 nt, Artificial Sequence
  Description of Artificial Sequence: Synthetic oligonucleotide
gcuuugccugguagagauc

SEQ ID NO: 2724778 - RNA, 19 nt, Artificial Sequence
  Description of Artificial Sequence: Synthetic oligonucleotide
gcaucucgauagugugucu

SEQ ID NO: 2724779 - RNA, 19 nt, Artificial Sequence
  Description of Artificial Sequence: Synthetic oligonucleotide
cagcucugaguugucggau

SEQ ID NO: 2724780 - RNA, 19 nt, Artificial Sequence
  Description of Artificial Sequence: Synthetic oligonucleotide
gccccacaaccuguaccug

SEQ ID NO: 2724781 - RNA, 19 nt, Artificial Sequence
  Description of Artificial Sequence: Synthetic oligonucleotide
ccacaaccuguaccuggga

SEQ ID NO: 2724782 - RNA, 19 nt, Artificial Sequence
  Description of Artificial Sequence: Synthetic oligonucleotide
cugcuauguuuuccuuguu

SEQ ID NO: 2724783 - RNA, 19 nt, Artificial Sequence
  Description of Artificial Sequence: Synthetic oligonucleotide
ggccccacgucagccccac

SEQ ID NO: 2724784 - RNA, 19 nt, Artificial Sequence
  Description of Artificial Sequence: Synthetic oligonucleotide
ggcucacuccagcuccaau

SEQ ID NO: 2724785 - RNA, 19 nt, Artificial Sequence
  Description of Artificial Sequence: Synthetic oligonucleotide
ccuuagugauguggcccca

SEQ ID NO: 2724786 - RNA, 19 nt, Artificial Sequence
  Description of Artificial Sequence: Synthetic oligonucleotide
ggggcagcucugaguuguc

SEQ ID NO: 2724787 - RNA, 19 nt, Artificial Sequence
  Description of Artificial Sequence: Synthetic oligonucleotide
ccaccagcaucucgauagu

SEQ ID NO: 2724788 - RNA, 19 nt, Artificial Sequence
  Description of Artificial Sequence: Synthetic oligonucleotide
cgucagccccacaaccugu

SEQ ID NO: 2724789 - RNA, 19 nt, Artificial Sequence
  Description of Artificial Sequence: Synthetic oligonucleotide
gcaccacauuuggcagcca

SEQ ID NO: 2724790 - RNA, 19 nt, Artificial Sequence
  Description of Artificial Sequence: Synthetic oligonucleotide
gccccacgucagccccaca

SEQ ID NO: 2724791 - RNA, 19 nt, Artificial Sequence
  Description of Artificial Sequence: Synthetic oligonucleotide
auuucuuggacucacagcg

SEQ ID NO: 2724792 - RNA, 19 nt, Artificial Sequence
  Description of Artificial Sequence: Synthetic oligonucleotide
gauagcauaaaucugggcc

SEQ ID NO: 2724793 - RNA, 19 nt, Artificial Sequence
  Description of Artificial Sequence: Synthetic oligonucleotide
aauuucuuggacucacagc

SEQ ID NO: 2724794 - RNA, 19 nt, Artificial Sequence
  Description of Artificial Sequence: Synthetic oligonucleotide
ucggauagcauaaaucugg

SEQ ID NO: 2724795 - RNA, 19 nt, Artificial Sequence
  Description of Artificial Sequence: Synthetic oligonucleotide
ugauaauaagccaccaggg

SEQ ID NO: 2724796 - RNA, 19 nt, Artificial Sequence
  Description of Artificial Sequence: Synthetic oligonucleotide
cugauaauaagccaccagg

SEQ ID NO: 2724797 - RNA, 19 nt, Artificial Sequence
  Description of Artificial Sequence: Synthetic oligonucleotide
uauuacaaagguaacccug

SEQ ID NO: 2724798 - RNA, 19 nt, Artificial Sequence
  Description of Artificial Sequence: Synthetic oligonucleotide
ugucggauagcauaaaucu

SEQ ID NO: 2724799 - RNA, 19 nt, Artificial Sequence
  Description of Artificial Sequence: Synthetic oligonucleotide
auaaaucugggccacauga

SEQ ID NO: 2724800 - RNA, 19 nt, Artificial Sequence
  Description of Artificial Sequence: Synthetic oligonucleotide
ugggauguuuauuacaaag

SEQ ID NO: 2724801 - RNA, 19 nt, Artificial Sequence
  Description of Artificial Sequence: Synthetic oligonucleotide
auacuucugauaauaagcc

SEQ ID NO: 2724802 - RNA, 19 nt, Artificial Sequence
  Description of Artificial Sequence: Synthetic oligonucleotide
auaauaagccaccagggcu

SEQ ID NO: 2724803 - RNA, 19 nt, Artificial Sequence
  Description of Artificial Sequence: Synthetic oligonucleotide
ucugguaucgagcacgggc

SEQ ID NO: 2724804 - RNA, 19 nt, Artificial Sequence
  Description of Artificial Sequence: Synthetic oligonucleotide
acuucugauaauaagccac

SEQ ID NO: 2724805 - RNA, 19 nt, Artificial Sequence
  Description of Artificial Sequence: Synthetic oligonucleotide
gauaauaagccaccagggc

SEQ ID NO: 2724806 - RNA, 19 nt, Artificial Sequence
  Description of Artificial Sequence: Synthetic oligonucleotide
uuuggagauggacugucgg

SEQ ID NO: 2724807 - RNA, 19 nt, Artificial Sequence
  Description of Artificial Sequence: Synthetic oligonucleotide
ucaucgguaggauuucugg

SEQ ID NO: 2724808 - RNA, 19 nt, Artificial Sequence
  Description of Artificial Sequence: Synthetic oligonucleotide
ucugauaauaagccaccag

SEQ ID NO: 2724809 - RNA, 19 nt, Artificial Sequence
  Description of Artificial Sequence: Synthetic oligonucleotide
gaauuucuuggacucacag

SEQ ID NO: 2724810 - RNA, 19 nt, Artificial Sequence
  Description of Artificial Sequence: Synthetic oligonucleotide
auuucugguaucgagcacg

SEQ ID NO: 2724811 - RNA, 19 nt, Artificial Sequence
  Description of Artificial Sequence: Synthetic oligonucleotide
ucugggauguuuauuacaa

SEQ ID NO: 2724812 - RNA, 19 nt, Artificial Sequence
  Description of Artificial Sequence: Synthetic oligonucleotide
uuugcagugcgccacggcc

SEQ ID NO: 2724813 - RNA, 19 nt, Artificial Sequence
  Description of Artificial Sequence: Synthetic oligonucleotide
auagcauaaaucugggcca

SEQ ID NO: 2724814 - RNA, 19 nt, Artificial Sequence
  Description of Artificial Sequence: Synthetic oligonucleotide
auguuuauuacaaagguaa

SEQ ID NO: 2724815 - RNA, 19 nt, Artificial Sequence
  Description of Artificial Sequence: Synthetic oligonucleotide
ucagcuacaagcaggguuc

SEQ ID NO: 2724816 - RNA, 19 nt, Artificial Sequence
  Description of Artificial Sequence: Synthetic oligonucleotide
gaggauaucuuugaucucc

SEQ ID NO: 2724817 - RNA, 19 nt, Artificial Sequence
  Description of Artificial Sequence: Synthetic oligonucleotide
agcgacgaggaucagcuac

SEQ ID NO: 2724818 - RNA, 19 nt, Artificial Sequence
  Description of Artificial Sequence: Synthetic oligonucleotide
uaggauuucugguaucgag

SEQ ID NO: 2724819 - RNA, 19 nt, Artificial Sequence
  Description of Artificial Sequence: Synthetic oligonucleotide
cuugagaugggcucaucgg

SEQ ID NO: 2724820 - RNA, 19 nt, Artificial Sequence
  Description of Artificial Sequence: Synthetic oligonucleotide
cuucugauaauaagccacc

SEQ ID NO: 2724821 - RNA, 19 nt, Artificial Sequence
  Description of Artificial Sequence: Synthetic oligonucleotide
cugguaucgagcacgggcg

SEQ ID NO: 2724822 - RNA, 19 nt, Artificial Sequence
  Description of Artificial Sequence: Synthetic oligonucleotide
uccaguaacuuguacugca

SEQ ID NO: 2724823 - RNA, 19 nt, Artificial Sequence
  Description of Artificial Sequence: Synthetic oligonucleotide
uuuaaagcuucugggaugu

SEQ ID NO: 2724824 - RNA, 19 nt, Artificial Sequence
  Description of Artificial Sequence: Synthetic oligonucleotide
aggauuucugguaucgagc

SEQ ID NO: 2724825 - RNA, 19 nt, Artificial Sequence
  Description of Artificial Sequence: Synthetic oligonucleotide
cuuuaaagcuucugggaug

SEQ ID NO: 2724826 - RNA, 19 nt, Artificial Sequence
  Description of Artificial Sequence: Synthetic oligonucleotide
augaccaccacccuucaca

SEQ ID NO: 2724827 - RNA, 19 nt, Artificial Sequence
  Description of Artificial Sequence: Synthetic oligonucleotide
uuucugguaucgagcacgg

SEQ ID NO: 2724828 - RNA, 19 nt, Artificial Sequence
  Description of Artificial Sequence: Synthetic oligonucleotide
ucauacuggaugaggauau

SEQ ID NO: 2724829 - RNA, 19 nt, Artificial Sequence
  Description of Artificial Sequence: Synthetic oligonucleotide
gaaaagggaggcucggggc

SEQ ID NO: 2724830 - RNA, 19 nt, Artificial Sequence
  Description of Artificial Sequence: Synthetic oligonucleotide
uuguacugcagcgugcgcg

SEQ ID NO: 2724831 - RNA, 19 nt, Artificial Sequence
  Description of Artificial Sequence: Synthetic oligonucleotide
ucuucuugcguccgaagac

SEQ ID NO: 2724832 - RNA, 19 nt, Artificial Sequence
  Description of Artificial Sequence: Synthetic oligonucleotide
uugagaugggcucaucggu

SEQ ID NO: 2724833 - RNA, 19 nt, Artificial Sequence
  Description of Artificial Sequence: Synthetic oligonucleotide
gagauggacugucggauag

SEQ ID NO: 2724834 - RNA, 19 nt, Artificial Sequence
  Description of Artificial Sequence: Synthetic oligonucleotide
uacaagcaggguucgauca

SEQ ID NO: 2724835 - RNA, 19 nt, Artificial Sequence
  Description of Artificial Sequence: Synthetic oligonucleotide
ucgaucauacuggaugagg

SEQ ID NO: 2724836 - RNA, 19 nt, Artificial Sequence
  Description of Artificial Sequence: Synthetic oligonucleotide
auauccacuccagcaaacc

SEQ ID NO: 2724837 - RNA, 19 nt, Artificial Sequence
  Description of Artificial Sequence: Synthetic oligonucleotide
uggacugucggauagcaua

SEQ ID NO: 2724838 - RNA, 19 nt, Artificial Sequence
  Description of Artificial Sequence: Synthetic oligonucleotide
ugcagcggacccuuggacg

SEQ ID NO: 2724839 - RNA, 19 nt, Artificial Sequence
  Description of Artificial Sequence: Synthetic oligonucleotide
cuggaugaggauaucuuug

SEQ ID NO: 2724840 - RNA, 19 nt, Artificial Sequence
  Description of Artificial Sequence: Synthetic oligonucleotide
agcaaaccgcuccuugccc

SEQ ID NO: 2724841 - RNA, 19 nt, Artificial Sequence
  Description of Artificial Sequence: Synthetic oligonucleotide
uacuucugauaauaagcca

SEQ ID NO: 2724842 - RNA, 19 nt, Artificial Sequence
  Description of Artificial Sequence: Synthetic oligonucleotide
uggacucacagcgacgagg

SEQ ID NO: 2724843 - RNA, 19 nt, Artificial Sequence
  Description of Artificial Sequence: Synthetic oligonucleotide
ugauccuugagaugggcuc

SEQ ID NO: 2724844 - RNA, 19 nt, Artificial Sequence
  Description of Artificial Sequence: Synthetic oligonucleotide
uucuuggacucacagcgac

SEQ ID NO: 2724845 - RNA, 19 nt, Artificial Sequence
  Description of Artificial Sequence: Synthetic oligonucleotide
ucuuggacucacagcgacg

SEQ ID NO: 2724846 - RNA, 19 nt, Artificial Sequence
  Description of Artificial Sequence: Synthetic oligonucleotide
uaaaucugggccacaugac

SEQ ID NO: 2724847 - RNA, 19 nt, Artificial Sequence
  Description of Artificial Sequence: Synthetic oligonucleotide
accugcacggacugcagcg

SEQ ID NO: 2724848 - RNA, 19 nt, Artificial Sequence
  Description of Artificial Sequence: Synthetic oligonucleotide
aggaccuccgaauuucuug

SEQ ID NO: 2724849 - RNA, 19 nt, Artificial Sequence
  Description of Artificial Sequence: Synthetic oligonucleotide
aggaucagcuacaagcagg

SEQ ID NO: 2724850 - RNA, 19 nt, Artificial Sequence
  Description of Artificial Sequence: Synthetic oligonucleotide
gggauguuuauuacaaagg

SEQ ID NO: 2724851 - RNA, 19 nt, Artificial Sequence
  Description of Artificial Sequence: Synthetic oligonucleotide
aaagguaacccugauccuu

SEQ ID NO: 2724852 - RNA, 19 nt, Artificial Sequence
  Description of Artificial Sequence: Synthetic oligonucleotide
aucagcuacaagcaggguu

SEQ ID NO: 2724853 - RNA, 19 nt, Artificial Sequence
  Description of Artificial Sequence: Synthetic oligonucleotide
uucacacggacccggauau

SEQ ID NO: 2724854 - RNA, 19 nt, Artificial Sequence
  Description of Artificial Sequence: Synthetic oligonucleotide
gagaugggcucaucgguag

SEQ ID NO: 2724855 - RNA, 19 nt, Artificial Sequence
  Description of Artificial Sequence: Synthetic oligonucleotide
accuccgaauuucuuggac

SEQ ID NO: 2724856 - RNA, 19 nt, Artificial Sequence
  Description of Artificial Sequence: Synthetic oligonucleotide
auuacaaagguaacccuga

SEQ ID NO: 2724857 - RNA, 19 nt, Artificial Sequence
  Description of Artificial Sequence: Synthetic oligonucleotide
cugucggauagcauaaauc

SEQ ID NO: 2724858 - RNA, 19 nt, Artificial Sequence
  Description of Artificial Sequence: Synthetic oligonucleotide
cuugaugagcccguucccg

SEQ ID NO: 2724859 - RNA, 19 nt, Artificial Sequence
  Description of Artificial Sequence: Synthetic oligonucleotide
ugaugagcccguucccgcg

SEQ ID NO: 2724860 - RNA, 19 nt, Artificial Sequence
  Description of Artificial Sequence: Synthetic oligonucleotide
cacuccagcaaaccgcucc

SEQ ID NO: 2724861 - RNA, 19 nt, Artificial Sequence
  Description of Artificial Sequence: Synthetic oligonucleotide
gcaggguucgaucauacug

SEQ ID NO: 2724862 - RNA, 19 nt, Artificial Sequence
  Description of Artificial Sequence: Synthetic oligonucleotide
cacaugaccaccacccuuc

SEQ ID NO: 2724863 - RNA, 19 nt, Artificial Sequence
  Description of Artificial Sequence: Synthetic oligonucleotide
gguaggauuucugguaucg

SEQ ID NO: 2724864 - RNA, 19 nt, Artificial Sequence
  Description of Artificial Sequence: Synthetic oligonucleotide
uccagcaaaccgcuccuug

SEQ ID NO: 2724865 - RNA, 19 nt, Artificial Sequence
  Description of Artificial Sequence: Synthetic oligonucleotide
aagaccugcacggacugca

SEQ ID NO: 2724866 - RNA, 19 nt, Artificial Sequence
  Description of Artificial Sequence: Synthetic oligonucleotide
uugaugagcccguucccgc

SEQ ID NO: 2724867 - RNA, 19 nt, Artificial Sequence
  Description of Artificial Sequence: Synthetic oligonucleotide
guaacccugauccuugaga

SEQ ID NO: 2724868 - RNA, 19 nt, Artificial Sequence
  Description of Artificial Sequence: Synthetic oligonucleotide
ggaccuccgaauuucuugg

SEQ ID NO: 2724869 - RNA, 19 nt, Artificial Sequence
  Description of Artificial Sequence: Synthetic oligonucleotide
uucaccuugaugagcccgu

SEQ ID NO: 2724870 - RNA, 19 nt, Artificial Sequence
  Description of Artificial Sequence: Synthetic oligonucleotide
cuugcguccgaagaccugc

SEQ ID NO: 2724871 - RNA, 19 nt, Artificial Sequence
  Description of Artificial Sequence: Synthetic oligonucleotide
aagcaggguucgaucauac

SEQ ID NO: 2724872 - RNA, 19 nt, Artificial Sequence
  Description of Artificial Sequence: Synthetic oligonucleotide
aaagcuucugggauguuua

SEQ ID NO: 2724873 - RNA, 19 nt, Artificial Sequence
  Description of Artificial Sequence: Synthetic oligonucleotide
ucgguaggauuucugguau

SEQ ID NO: 2724874 - RNA, 19 nt, Artificial Sequence
  Description of Artificial Sequence: Synthetic oligonucleotide
aacgggcuccaguaacuug

SEQ ID NO: 2724875 - RNA, 19 nt, Artificial Sequence
  Description of Artificial Sequence: Synthetic oligonucleotide
acagcgacgaggaucagcu

SEQ ID NO: 2724876 - RNA, 19 nt, Artificial Sequence
  Description of Artificial Sequence: Synthetic oligonucleotide
ugcgacucuucuccacgcg

SEQ ID NO: 2724877 - RNA, 19 nt, Artificial Sequence
  Description of Artificial Sequence: Synthetic oligonucleotide
cuucuugcguccgaagacc

SEQ ID NO: 2724878 - RNA, 19 nt, Artificial Sequence
  Description of Artificial Sequence: Synthetic oligonucleotide
uuucuuggacucacagcga

SEQ ID NO: 2724879 - RNA, 19 nt, Artificial Sequence
  Description of Artificial Sequence: Synthetic oligonucleotide
gcuccaguaacuuguacug

SEQ ID NO: 2724880 - RNA, 19 nt, Artificial Sequence
  Description of Artificial Sequence: Synthetic oligonucleotide
aacccugauccuugagaug

SEQ ID NO: 2724881 - RNA, 19 nt, Artificial Sequence
  Description of Artificial Sequence: Synthetic oligonucleotide
aucgguaggauuucuggua

SEQ ID NO: 2724882 - RNA, 19 nt, Artificial Sequence
  Description of Artificial Sequence: Synthetic oligonucleotide
guucaccuugaugagcccg

SEQ ID NO: 2724883 - RNA, 19 nt, Artificial Sequence
  Description of Artificial Sequence: Synthetic oligonucleotide
gacugcagcggacccuugg

SEQ ID NO: 2724884 - RNA, 19 nt, Artificial Sequence
  Description of Artificial Sequence: Synthetic oligonucleotide
uccgaagaccugcacggac

SEQ ID NO: 2724885 - RNA, 19 nt, Artificial Sequence
  Description of Artificial Sequence: Synthetic oligonucleotide
ugaccaccacccuucacac

SEQ ID NO: 2724886 - RNA, 19 nt, Artificial Sequence
  Description of Artificial Sequence: Synthetic oligonucleotide
uucugauaauaagccacca

SEQ ID NO: 2724887 - RNA, 19 nt, Artificial Sequence
  Description of Artificial Sequence: Synthetic oligonucleotide
agcagaacgggcuccagua

SEQ ID NO: 2724888 - RNA, 19 nt, Artificial Sequence
  Description of Artificial Sequence: Synthetic oligonucleotide
cuucugggauguuuauuac

SEQ ID NO: 2724889 - RNA, 19 nt, Artificial Sequence
  Description of Artificial Sequence: Synthetic oligonucleotide
ggauuucugguaucgagca

SEQ ID NO: 2724890 - RNA, 19 nt, Artificial Sequence
  Description of Artificial Sequence: Synthetic oligonucleotide
uucuugcguccgaagaccu

SEQ ID NO: 2724891 - RNA, 19 nt, Artificial Sequence
  Description of Artificial Sequence: Synthetic oligonucleotide
acugucggauagcauaaau

SEQ ID NO: 2724892 - RNA, 19 nt, Artificial Sequence
  Description of Artificial Sequence: Synthetic oligonucleotide
uuacaaagguaacccugau

SEQ ID NO: 2724893 - RNA, 19 nt, Artificial Sequence
  Description of Artificial Sequence: Synthetic oligonucleotide
ggauguuuauuacaaaggu

SEQ ID NO: 2724894 - RNA, 19 nt, Artificial Sequence
  Description of Artificial Sequence: Synthetic oligonucleotide
auacuggaugaggauaucu

SEQ ID NO: 2724895 - RNA, 19 nt, Artificial Sequence
  Description of Artificial Sequence: Synthetic oligonucleotide
cuacaagcaggguucgauc

SEQ ID NO: 2724896 - RNA, 19 nt, Artificial Sequence
  Description of Artificial Sequence: Synthetic oligonucleotide
gauuucugguaucgagcac

SEQ ID NO: 2724897 - RNA, 19 nt, Artificial Sequence
  Description of Artificial Sequence: Synthetic oligonucleotide
agauggacugucggauagc

SEQ ID NO: 2724898 - RNA, 19 nt, Artificial Sequence
  Description of Artificial Sequence: Synthetic oligonucleotide
uggagauggacugucggau

SEQ ID NO: 2724899 - RNA, 19 nt, Artificial Sequence
  Description of Artificial Sequence: Synthetic oligonucleotide
cagcaaaccgcuccuugcc

SEQ ID NO: 2724900 - RNA, 19 nt, Artificial Sequence
  Description of Artificial Sequence: Synthetic oligonucleotide
gauggacugucggauagca

SEQ ID NO: 2724901 - RNA, 19 nt, Artificial Sequence
  Description of Artificial Sequence: Synthetic oligonucleotide
gauauccacuccagcaaac

SEQ ID NO: 2724902 - RNA, 19 nt, Artificial Sequence
  Description of Artificial Sequence: Synthetic oligonucleotide
ucguccacauacuucugau

SEQ ID NO: 2724903 - RNA, 19 nt, Artificial Sequence
  Description of Artificial Sequence: Synthetic oligonucleotide
uucgaucauacuggaugag

SEQ ID NO: 2724904 - RNA, 19 nt, Artificial Sequence
  Description of Artificial Sequence: Synthetic oligonucleotide
aucauacuggaugaggaua

SEQ ID NO: 2724905 - RNA, 19 nt, Artificial Sequence
  Description of Artificial Sequence: Synthetic oligonucleotide
gucuucuugcguccgaaga

SEQ ID NO: 2724906 - RNA, 19 nt, Artificial Sequence
  Description of Artificial Sequence: Synthetic oligonucleotide
ugguaucgagcacgggcgc

SEQ ID NO: 2724907 - RNA, 19 nt, Artificial Sequence
  Description of Artificial Sequence: Synthetic oligonucleotide
gucggauagcauaaaucug

SEQ ID NO: 2724908 - RNA, 19 nt, Artificial Sequence
  Description of Artificial Sequence: Synthetic oligonucleotide
aaaccgcuccuugcccagc

SEQ ID NO: 2724909 - RNA, 19 nt, Artificial Sequence
  Description of Artificial Sequence: Synthetic oligonucleotide
ccguucaccuugaugagcc

SEQ ID NO: 2724910 - RNA, 19 nt, Artificial Sequence
  Description of Artificial Sequence: Synthetic oligonucleotide
ggaggccucguccacauac

SEQ ID NO: 2724911 - RNA, 19 nt, Artificial Sequence
  Description of Artificial Sequence: Synthetic oligonucleotide
ucuugcguccgaagaccug

SEQ ID NO: 2724912 - RNA, 19 nt, Artificial Sequence
  Description of Artificial Sequence: Synthetic oligonucleotide
gacgaggaucagcuacaag

SEQ ID NO: 2724913 - RNA, 19 nt, Artificial Sequence
  Description of Artificial Sequence: Synthetic oligonucleotide
gagcacgggcgccaggacc

SEQ ID NO: 2724914 - RNA, 19 nt, Artificial Sequence
  Description of Artificial Sequence: Synthetic oligonucleotide
uccguucaccuugaugagc

SEQ ID NO: 2724915 - RNA, 19 nt, Artificial Sequence
  Description of Artificial Sequence: Synthetic oligonucleotide
cguccguucaccuugauga

SEQ ID NO: 2724916 - RNA, 19 nt, Artificial Sequence
  Description of Artificial Sequence: Synthetic oligonucleotide
gacccggauauccacucca

SEQ ID NO: 2724917 - RNA, 19 nt, Artificial Sequence
  Description of Artificial Sequence: Synthetic oligonucleotide
gcagcggacccuuggacgg

SEQ ID NO: 2724918 - RNA, 19 nt, Artificial Sequence
  Description of Artificial Sequence: Synthetic oligonucleotide
ugaggauaucuuugaucuc

SEQ ID NO: 2724919 - RNA, 19 nt, Artificial Sequence
  Description of Artificial Sequence: Synthetic oligonucleotide
cuuggacucacagcgacga

SEQ ID NO: 2724920 - RNA, 19 nt, Artificial Sequence
  Description of Artificial Sequence: Synthetic oligonucleotide
ggccacaugaccaccaccc

SEQ ID NO: 2724921 - RNA, 19 nt, Artificial Sequence
  Description of Artificial Sequence: Synthetic oligonucleotide
aagcuucugggauguuuau

SEQ ID NO: 2724922 - RNA, 19 nt, Artificial Sequence
  Description of Artificial Sequence: Synthetic oligonucleotide
gcugcgacucuucuccacg

SEQ ID NO: 2724923 - RNA, 19 nt, Artificial Sequence
  Description of Artificial Sequence: Synthetic oligonucleotide
acugcagcggacccuugga

SEQ ID NO: 2724924 - RNA, 19 nt, Artificial Sequence
  Description of Artificial Sequence: Synthetic oligonucleotide
accggaaaagggaggcucg

SEQ ID NO: 2724925 - RNA, 19 nt, Artificial Sequence
  Description of Artificial Sequence: Synthetic oligonucleotide
gauccuugagaugggcuca

SEQ ID NO: 2724926 - RNA, 19 nt, Artificial Sequence
  Description of Artificial Sequence: Synthetic oligonucleotide
aaccgcuccuugcccagca

SEQ ID NO: 2724927 - RNA, 19 nt, Artificial Sequence
  Description of Artificial Sequence: Synthetic oligonucleotide
acgcgagcuccucaccgcg

SEQ ID NO: 2724928 - RNA, 19 nt, Artificial Sequence
  Description of Artificial Sequence: Synthetic oligonucleotide
uuggacucacagcgacgag

SEQ ID NO: 2724929 - RNA, 19 nt, Artificial Sequence
  Description of Artificial Sequence: Synthetic oligonucleotide
ggauagcauaaaucugggc

SEQ ID NO: 2724930 - RNA, 19 nt, Artificial Sequence
  Description of Artificial Sequence: Synthetic oligonucleotide
uucccgcguuugcagugcg

SEQ ID NO: 2724931 - RNA, 19 nt, Artificial Sequence
  Description of Artificial Sequence: Synthetic oligonucleotide
caaaccgcuccuugcccag

SEQ ID NO: 2724932 - RNA, 19 nt, Artificial Sequence
  Description of Artificial Sequence: Synthetic oligonucleotide
agcccguucccgcguuugc

SEQ ID NO: 2724933 - RNA, 19 nt, Artificial Sequence
  Description of Artificial Sequence: Synthetic oligonucleotide
acgggcuccaguaacuugu

SEQ ID NO: 2724934 - RNA, 19 nt, Artificial Sequence
  Description of Artificial Sequence: Synthetic oligonucleotide
ucuccacgcgagcuccuca

SEQ ID NO: 2724935 - RNA, 19 nt, Artificial Sequence
  Description of Artificial Sequence: Synthetic oligonucleotide
acaagcaggguucgaucau

SEQ ID NO: 2724936 - RNA, 19 nt, Artificial Sequence
  Description of Artificial Sequence: Synthetic oligonucleotide
cacauacuucugauaauaa

SEQ ID NO: 2724937 - RNA, 19 nt, Artificial Sequence
  Description of Artificial Sequence: Synthetic oligonucleotide
ucgagcacgggcgccagga

SEQ ID NO: 2724938 - RNA, 19 nt, Artificial Sequence
  Description of Artificial Sequence: Synthetic oligonucleotide
cguccgaagaccugcacgg

SEQ ID NO: 2724939 - RNA, 19 nt, Artificial Sequence
  Description of Artificial Sequence: Synthetic oligonucleotide
gcguccgaagaccugcacg

SEQ ID NO: 2724940 - RNA, 19 nt, Artificial Sequence
  Description of Artificial Sequence: Synthetic oligonucleotide
guccguucaccuugaugag

SEQ ID NO: 2724941 - RNA, 19 nt, Artificial Sequence
  Description of Artificial Sequence: Synthetic oligonucleotide
cugcgacucuucuccacgc

SEQ ID NO: 2724942 - RNA, 19 nt, Artificial Sequence
  Description of Artificial Sequence: Synthetic oligonucleotide
gaucauacuggaugaggau

SEQ ID NO: 2724943 - RNA, 19 nt, Artificial Sequence
  Description of Artificial Sequence: Synthetic oligonucleotide
agcgugcgcggcucgauca

SEQ ID NO: 2724944 - RNA, 19 nt, Artificial Sequence
  Description of Artificial Sequence: Synthetic oligonucleotide
gaccugcacggacugcagc

SEQ ID NO: 2724945 - RNA, 19 nt, Artificial Sequence
  Description of Artificial Sequence: Synthetic oligonucleotide
ugcagugcgccacggccgu

SEQ ID NO: 2724946 - RNA, 19 nt, Artificial Sequence
  Description of Artificial Sequence: Synthetic oligonucleotide
cauggcugcgacucuucuc

SEQ ID NO: 2724947 - RNA, 19 nt, Artificial Sequence
  Description of Artificial Sequence: Synthetic oligonucleotide
agugcgccacggccguggc

SEQ ID NO: 2724948 - RNA, 19 nt, Artificial Sequence
  Description of Artificial Sequence: Synthetic oligonucleotide
ugcacggacugcagcggac

SEQ ID NO: 2724949 - RNA, 19 nt, Artificial Sequence
  Description of Artificial Sequence: Synthetic oligonucleotide
ccuuggacggcauggcugc

SEQ ID NO: 2724950 - RNA, 19 nt, Artificial Sequence
  Description of Artificial Sequence: Synthetic oligonucleotide
ggacccuuggacggcaugg

SEQ ID NO: 2724951 - RNA, 19 nt, Artificial Sequence
  Description of Artificial Sequence: Synthetic oligonucleotide
uccacgcgagcuccucacc

SEQ ID NO: 2724952 - RNA, 19 nt, Artificial Sequence
  Description of Artificial Sequence: Synthetic oligonucleotide
cacggacccggauauccac

SEQ ID NO: 2724953 - RNA, 19 nt, Artificial Sequence
  Description of Artificial Sequence: Synthetic oligonucleotide
agaacgggcuccaguaacu

SEQ ID NO: 2724954 - RNA, 19 nt, Artificial Sequence
  Description of Artificial Sequence: Synthetic oligonucleotide
cacgcgagcuccucaccgc

SEQ ID NO: 2724955 - RNA, 19 nt, Artificial Sequence
  Description of Artificial Sequence: Synthetic oligonucleotide
cuuguacugcagcgugcgc

SEQ ID NO: 2724956 - RNA, 19 nt, Artificial Sequence
  Description of Artificial Sequence: Synthetic oligonucleotide
acccuucacacggacccgg

SEQ ID NO: 2724957 - RNA, 19 nt, Artificial Sequence
  Description of Artificial Sequence: Synthetic oligonucleotide
cacagcgacgaggaucagc

SEQ ID NO: 2724958 - RNA, 19 nt, Artificial Sequence
  Description of Artificial Sequence: Synthetic oligonucleotide
uacugcagcgugcgcggcu

SEQ ID NO: 2724959 - RNA, 19 nt, Artificial Sequence
  Description of Artificial Sequence: Synthetic oligonucleotide
ccagcaaaccgcuccuugc

SEQ ID NO: 2724960 - RNA, 19 nt, Artificial Sequence
  Description of Artificial Sequence: Synthetic oligonucleotide
aauaagccaccagggcuuu

SEQ ID NO: 2724961 - RNA, 19 nt, Artificial Sequence
  Description of Artificial Sequence: Synthetic oligonucleotide
caccggaaaagggaggcuc

SEQ ID NO: 2724962 - RNA, 19 nt, Artificial Sequence
  Description of Artificial Sequence: Synthetic oligonucleotide
gcucgaucaucuccagggg

SEQ ID NO: 2724963 - RNA, 19 nt, Artificial Sequence
  Description of Artificial Sequence: Synthetic oligonucleotide
ccaguaacuuguacugcag

SEQ ID NO: 2724964 - RNA, 19 nt, Artificial Sequence
  Description of Artificial Sequence: Synthetic oligonucleotide
ugggccacaugaccaccac

SEQ ID NO: 2724965 - RNA, 19 nt, Artificial Sequence
  Description of Artificial Sequence: Synthetic oligonucleotide
agcuccucaccgcgcggcg

SEQ ID NO: 2724966 - RNA, 19 nt, Artificial Sequence
  Description of Artificial Sequence: Synthetic oligonucleotide
agcaggguucgaucauacu

SEQ ID NO: 2724967 - RNA, 19 nt, Artificial Sequence
  Description of Artificial Sequence: Synthetic oligonucleotide
uugcguccgaagaccugca

SEQ ID NO: 2724968 - RNA, 19 nt, Artificial Sequence
  Description of Artificial Sequence: Synthetic oligonucleotide
guaacuuguacugcagcgu

SEQ ID NO: 2724969 - RNA, 19 nt, Artificial Sequence
  Description of Artificial Sequence: Synthetic oligonucleotide
uucugguaucgagcacggg

SEQ ID NO: 2724970 - RNA, 19 nt, Artificial Sequence
  Description of Artificial Sequence: Synthetic oligonucleotide
gguaacccugauccuugag

SEQ ID NO: 2724971 - RNA, 19 nt, Artificial Sequence
  Description of Artificial Sequence: Synthetic oligonucleotide
cuccacgcgagcuccucac

SEQ ID NO: 2724972 - RNA, 19 nt, Artificial Sequence
  Description of Artificial Sequence: Synthetic oligonucleotide
aggauaucuuugaucuccu

SEQ ID NO: 2724973 - RNA, 19 nt, Artificial Sequence
  Description of Artificial Sequence: Synthetic oligonucleotide
cucuucuccacgcgagcuc

SEQ ID NO: 2724974 - RNA, 19 nt, Artificial Sequence
  Description of Artificial Sequence: Synthetic oligonucleotide
cuucacacggacccggaua

SEQ ID NO: 2724975 - RNA, 19 nt, Artificial Sequence
  Description of Artificial Sequence: Synthetic oligonucleotide
cggauagcauaaaucuggg

SEQ ID NO: 2724976 - RNA, 19 nt, Artificial Sequence
  Description of Artificial Sequence: Synthetic oligonucleotide
ccggauauccacuccagca

SEQ ID NO: 2724977 - RNA, 19 nt, Artificial Sequence
  Description of Artificial Sequence: Synthetic oligonucleotide
ggauauccacuccagcaaa

SEQ ID NO: 2724978 - RNA, 19 nt, Artificial Sequence
  Description of Artificial Sequence: Synthetic oligonucleotide
ugcguccgaagaccugcac

SEQ ID NO: 2724979 - RNA, 19 nt, Artificial Sequence
  Description of Artificial Sequence: Synthetic oligonucleotide
gacccuuggacggcauggc

SEQ ID NO: 2724980 - RNA, 19 nt, Artificial Sequence
  Description of Artificial Sequence: Synthetic oligonucleotide
ggcuccaguaacuuguacu

SEQ ID NO: 2724981 - RNA, 19 nt, Artificial Sequence
  Description of Artificial Sequence: Synthetic oligonucleotide
gaagaccugcacggacugc

SEQ ID NO: 2724982 - RNA, 19 nt, Artificial Sequence
  Description of Artificial Sequence: Synthetic oligonucleotide
cuccucaccgcgcggcgcc

SEQ ID NO: 2724983 - RNA, 19 nt, Artificial Sequence
  Description of Artificial Sequence: Synthetic oligonucleotide
acccuuggacggcauggcu

SEQ ID NO: 2724984 - RNA, 19 nt, Artificial Sequence
  Description of Artificial Sequence: Synthetic oligonucleotide
cugcagcggacccuuggac

SEQ ID NO: 2724985 - RNA, 19 nt, Artificial Sequence
  Description of Artificial Sequence: Synthetic oligonucleotide
agguaacccugauccuuga

SEQ ID NO: 2724986 - RNA, 19 nt, Artificial Sequence
  Description of Artificial Sequence: Synthetic oligonucleotide
gccguggccgucuucuugc

SEQ ID NO: 2724987 - RNA, 19 nt, Artificial Sequence
  Description of Artificial Sequence: Synthetic oligonucleotide
ugggcucaucgguaggauu

SEQ ID NO: 2724988 - RNA, 19 nt, Artificial Sequence
  Description of Artificial Sequence: Synthetic oligonucleotide
guaggauuucugguaucga

SEQ ID NO: 2724989 - RNA, 19 nt, Artificial Sequence
  Description of Artificial Sequence: Synthetic oligonucleotide
gaccuccgaauuucuugga

SEQ ID NO: 2724990 - RNA, 19 nt, Artificial Sequence
  Description of Artificial Sequence: Synthetic oligonucleotide
caucgguaggauuucuggu

SEQ ID NO: 2724991 - RNA, 19 nt, Artificial Sequence
  Description of Artificial Sequence: Synthetic oligonucleotide
uaucgagcacgggcgccag

SEQ ID NO: 2724992 - RNA, 19 nt, Artificial Sequence
  Description of Artificial Sequence: Synthetic oligonucleotide
acggccguggccgucuucu

SEQ ID NO: 2724993 - RNA, 19 nt, Artificial Sequence
  Description of Artificial Sequence: Synthetic oligonucleotide
cagcuacaagcaggguucg

SEQ ID NO: 2724994 - RNA, 19 nt, Artificial Sequence
  Description of Artificial Sequence: Synthetic oligonucleotide
gccccggccgauuuucagg

SEQ ID NO: 2724995 - RNA, 19 nt, Artificial Sequence
  Description of Artificial Sequence: Synthetic oligonucleotide
cauacuggaugaggauauc

SEQ ID NO: 2724996 - RNA, 19 nt, Artificial Sequence
  Description of Artificial Sequence: Synthetic oligonucleotide
gaggcucggggccgccccg

SEQ ID NO: 2724997 - RNA, 19 nt, Artificial Sequence
  Description of Artificial Sequence: Synthetic oligonucleotide
ggacucacagcgacgagga

SEQ ID NO: 2724998 - RNA, 19 nt, Artificial Sequence
  Description of Artificial Sequence: Synthetic oligonucleotide
ucccgcguuugcagugcgc

SEQ ID NO: 2724999 - RNA, 19 nt, Artificial Sequence
  Description of Artificial Sequence: Synthetic oligonucleotide
cagugcgccacggccgugg

SEQ ID NO: 2725000 - RNA, 19 nt, Artificial Sequence
  Description of Artificial Sequence: Synthetic oligonucleotide
gcgagcuccucaccgcgcg

SEQ ID NO: 2725001 - RNA, 19 nt, Artificial Sequence
  Description of Artificial Sequence: Synthetic oligonucleotide
cugggauguuuauuacaaa

SEQ ID NO: 2725002 - RNA, 19 nt, Artificial Sequence
  Description of Artificial Sequence: Synthetic oligonucleotide
cccuuggacggcauggcug

SEQ ID NO: 2725003 - RNA, 19 nt, Artificial Sequence
  Description of Artificial Sequence: Synthetic oligonucleotide
gccaccggaaaagggaggc

SEQ ID NO: 2725004 - RNA, 19 nt, Artificial Sequence
  Description of Artificial Sequence: Synthetic oligonucleotide
ccacgcgagcuccucaccg

SEQ ID NO: 2725005 - RNA, 19 nt, Artificial Sequence
  Description of Artificial Sequence: Synthetic oligonucleotide
guaucgagcacgggcgcca

SEQ ID NO: 2725006 - RNA, 19 nt, Artificial Sequence
  Description of Artificial Sequence: Synthetic oligonucleotide
gaucuccuucuuggaggcc

SEQ ID NO: 2725007 - RNA, 19 nt, Artificial Sequence
  Description of Artificial Sequence: Synthetic oligonucleotide
guucccgcguuugcagugc

SEQ ID NO: 2725008 - RNA, 19 nt, Artificial Sequence
  Description of Artificial Sequence: Synthetic oligonucleotide
uccuucuuggaggccucgu

SEQ ID NO: 2725009 - RNA, 19 nt, Artificial Sequence
  Description of Artificial Sequence: Synthetic oligonucleotide
acccggauauccacuccag

SEQ ID NO: 2725010 - RNA, 19 nt, Artificial Sequence
  Description of Artificial Sequence: Synthetic oligonucleotide
cugauccuugagaugggcu

SEQ ID NO: 2725011 - RNA, 19 nt, Artificial Sequence
  Description of Artificial Sequence: Synthetic oligonucleotide
ccgaauuucuuggacucac

SEQ ID NO: 2725012 - RNA, 19 nt, Artificial Sequence
  Description of Artificial Sequence: Synthetic oligonucleotide
ccuugaugagcccguuccc

SEQ ID NO: 2725013 - RNA, 19 nt, Artificial Sequence
  Description of Artificial Sequence: Synthetic oligonucleotide
agcauaaaucugggccaca

SEQ ID NO: 2725014 - RNA, 19 nt, Artificial Sequence
  Description of Artificial Sequence: Synthetic oligonucleotide
cugggccacaugaccacca

SEQ ID NO: 2725015 - RNA, 19 nt, Artificial Sequence
  Description of Artificial Sequence: Synthetic oligonucleotide
caaagguaacccugauccu

SEQ ID NO: 2725016 - RNA, 19 nt, Artificial Sequence
  Description of Artificial Sequence: Synthetic oligonucleotide
agcuucugggauguuuauu

SEQ ID NO: 2725017 - RNA, 19 nt, Artificial Sequence
  Description of Artificial Sequence: Synthetic oligonucleotide
gguaucgagcacgggcgcc

SEQ ID NO: 2725018 - RNA, 19 nt, Artificial Sequence
  Description of Artificial Sequence: Synthetic oligonucleotide
ggcgccgccaccggaaaag

SEQ ID NO: 2725019 - RNA, 19 nt, Artificial Sequence
  Description of Artificial Sequence: Synthetic oligonucleotide
uggcugcgacucuucucca

SEQ ID NO: 2725020 - RNA, 19 nt, Artificial Sequence
  Description of Artificial Sequence: Synthetic oligonucleotide
agaccugcacggacugcag

SEQ ID NO: 2725021 - RNA, 19 nt, Artificial Sequence
  Description of Artificial Sequence: Synthetic oligonucleotide
aggccucguccacauacuu

SEQ ID NO: 2725022 - RNA, 19 nt, Artificial Sequence
  Description of Artificial Sequence: Synthetic oligonucleotide
cacccuucacacggacccg

SEQ ID NO: 2725023 - RNA, 19 nt, Artificial Sequence
  Description of Artificial Sequence: Synthetic oligonucleotide
gagcccguucccgcguuug

SEQ ID NO: 2725024 - RNA, 19 nt, Artificial Sequence
  Description of Artificial Sequence: Synthetic oligonucleotide
cuuggacggcauggcugcg

SEQ ID NO: 2725025 - RNA, 19 nt, Artificial Sequence
  Description of Artificial Sequence: Synthetic oligonucleotide
gcguuugcagugcgccacg

SEQ ID NO: 2725026 - RNA, 19 nt, Artificial Sequence
  Description of Artificial Sequence: Synthetic oligonucleotide
gcguccguucaccuugaug

SEQ ID NO: 2725027 - RNA, 19 nt, Artificial Sequence
  Description of Artificial Sequence: Synthetic oligonucleotide
ccgccaccggaaaagggag

SEQ ID NO: 2725028 - RNA, 19 nt, Artificial Sequence
  Description of Artificial Sequence: Synthetic oligonucleotide
ggacccggauauccacucc

SEQ ID NO: 2725029 - RNA, 19 nt, Artificial Sequence
  Description of Artificial Sequence: Synthetic oligonucleotide
cgacucuucuccacgcgag

SEQ ID NO: 2725030 - RNA, 19 nt, Artificial Sequence
  Description of Artificial Sequence: Synthetic oligonucleotide
acacggacccggauaucca

SEQ ID NO: 2725031 - RNA, 19 nt, Artificial Sequence
  Description of Artificial Sequence: Synthetic oligonucleotide
cccgcguuugcagugcgcc

SEQ ID NO: 2725032 - RNA, 19 nt, Artificial Sequence
  Description of Artificial Sequence: Synthetic oligonucleotide
ggacugucggauagcauaa

SEQ ID NO: 2725033 - RNA, 19 nt, Artificial Sequence
  Description of Artificial Sequence: Synthetic oligonucleotide
cccguucccgcguuugcag

SEQ ID NO: 2725034 - RNA, 19 nt, Artificial Sequence
  Description of Artificial Sequence: Synthetic oligonucleotide
ggagauggacugucggaua

SEQ ID NO: 2725035 - RNA, 19 nt, Artificial Sequence
  Description of Artificial Sequence: Synthetic oligonucleotide
augggcucaucgguaggau

SEQ ID NO: 2725036 - RNA, 19 nt, Artificial Sequence
  Description of Artificial Sequence: Synthetic oligonucleotide
cccggauauccacuccagc

SEQ ID NO: 2725037 - RNA, 19 nt, Artificial Sequence
  Description of Artificial Sequence: Synthetic oligonucleotide
gcgcggcucgaucaucucc

SEQ ID NO: 2725038 - RNA, 19 nt, Artificial Sequence
  Description of Artificial Sequence: Synthetic oligonucleotide
gcgacucuucuccacgcga

SEQ ID NO: 2725039 - RNA, 19 nt, Artificial Sequence
  Description of Artificial Sequence: Synthetic oligonucleotide
ggaggcucggggccgcccc

SEQ ID NO: 2725040 - RNA, 19 nt, Artificial Sequence
  Description of Artificial Sequence: Synthetic oligonucleotide
auaagccaccagggcuuug

SEQ ID NO: 2725041 - RNA, 19 nt, Artificial Sequence
  Description of Artificial Sequence: Synthetic oligonucleotide
gccgccaccggaaaaggga

SEQ ID NO: 2725042 - RNA, 19 nt, Artificial Sequence
  Description of Artificial Sequence: Synthetic oligonucleotide
ugcgcggcucgaucaucuc

SEQ ID NO: 2725043 - RNA, 19 nt, Artificial Sequence
  Description of Artificial Sequence: Synthetic oligonucleotide
uccucaccgcgcggcgccg

SEQ ID NO: 2725044 - RNA, 19 nt, Artificial Sequence
  Description of Artificial Sequence: Synthetic oligonucleotide
agcuacaagcaggguucga

SEQ ID NO: 2725045 - RNA, 19 nt, Artificial Sequence
  Description of Artificial Sequence: Synthetic oligonucleotide
caagcaggguucgaucaua

SEQ ID NO: 2725046 - RNA, 19 nt, Artificial Sequence
  Description of Artificial Sequence: Synthetic oligonucleotide
cugcacggacugcagcgga

SEQ ID NO: 2725047 - RNA, 19 nt, Artificial Sequence
  Description of Artificial Sequence: Synthetic oligonucleotide
auccuugagaugggcucau

SEQ ID NO: 2725048 - RNA, 19 nt, Artificial Sequence
  Description of Artificial Sequence: Synthetic oligonucleotide
ugcagcgugcgcggcucga

SEQ ID NO: 2725049 - RNA, 19 nt, Artificial Sequence
  Description of Artificial Sequence: Synthetic oligonucleotide
uuaaagcuucugggauguu

SEQ ID NO: 2725050 - RNA, 19 nt, Artificial Sequence
  Description of Artificial Sequence: Synthetic oligonucleotide
gacugucggauagcauaaa

SEQ ID NO: 2725051 - RNA, 19 nt, Artificial Sequence
  Description of Artificial Sequence: Synthetic oligonucleotide
cccugauccuugagauggg

SEQ ID NO: 2725052 - RNA, 19 nt, Artificial Sequence
  Description of Artificial Sequence: Synthetic oligonucleotide
ggcugcgacucuucuccac

SEQ ID NO: 2725053 - RNA, 19 nt, Artificial Sequence
  Description of Artificial Sequence: Synthetic oligonucleotide
cugcagcgugcgcggcucg

SEQ ID NO: 2725054 - RNA, 19 nt, Artificial Sequence
  Description of Artificial Sequence: Synthetic oligonucleotide
ucaccuugaugagcccguu

SEQ ID NO: 2725055 - RNA, 19 nt, Artificial Sequence
  Description of Artificial Sequence: Synthetic oligonucleotide
ccugcacggacugcagcgg

SEQ ID NO: 2725056 - RNA, 19 nt, Artificial Sequence
  Description of Artificial Sequence: Synthetic oligonucleotide
ugagcccguucccgcguuu

SEQ ID NO: 2725057 - RNA, 19 nt, Artificial Sequence
  Description of Artificial Sequence: Synthetic oligonucleotide
augagcccguucccgcguu

SEQ ID NO: 2725058 - RNA, 19 nt, Artificial Sequence
  Description of Artificial Sequence: Synthetic oligonucleotide
cgaagaccugcacggacug

SEQ ID NO: 2725059 - RNA, 19 nt, Artificial Sequence
  Description of Artificial Sequence: Synthetic oligonucleotide
agcggacccuuggacggca

SEQ ID NO: 2725060 - RNA, 19 nt, Artificial Sequence
  Description of Artificial Sequence: Synthetic oligonucleotide
auggacugucggauagcau

SEQ ID NO: 2725061 - RNA, 19 nt, Artificial Sequence
  Description of Artificial Sequence: Synthetic oligonucleotide
ggaugaggauaucuuugau

SEQ ID NO: 2725062 - RNA, 19 nt, Artificial Sequence
  Description of Artificial Sequence: Synthetic oligonucleotide
ccuccgaauuucuuggacu

SEQ ID NO: 2725063 - RNA, 19 nt, Artificial Sequence
  Description of Artificial Sequence: Synthetic oligonucleotide
cagcgugcgcggcucgauc

SEQ ID NO: 2725064 - RNA, 19 nt, Artificial Sequence
  Description of Artificial Sequence: Synthetic oligonucleotide
ccggaaaagggaggcucgg

SEQ ID NO: 2725065 - RNA, 19 nt, Artificial Sequence
  Description of Artificial Sequence: Synthetic oligonucleotide
ccgcuccuugcccagcagc

SEQ ID NO: 2725066 - RNA, 19 nt, Artificial Sequence
  Description of Artificial Sequence: Synthetic oligonucleotide
guacugcagcgugcgcggc

SEQ ID NO: 2725067 - RNA, 19 nt, Artificial Sequence
  Description of Artificial Sequence: Synthetic oligonucleotide
gggcuccaguaacuuguac

SEQ ID NO: 2725068 - RNA, 19 nt, Artificial Sequence
  Description of Artificial Sequence: Synthetic oligonucleotide
gcuacaagcaggguucgau

SEQ ID NO: 2725069 - RNA, 19 nt, Artificial Sequence
  Description of Artificial Sequence: Synthetic oligonucleotide
gcgacgaggaucagcuaca

SEQ ID NO: 2725070 - RNA, 19 nt, Artificial Sequence
  Description of Artificial Sequence: Synthetic oligonucleotide
ucacagcgacgaggaucag

SEQ ID NO: 2725071 - RNA, 19 nt, Artificial Sequence
  Description of Artificial Sequence: Synthetic oligonucleotide
gcagaacgggcuccaguaa

SEQ ID NO: 2725072 - RNA, 19 nt, Artificial Sequence
  Description of Artificial Sequence: Synthetic oligonucleotide
gaggccucguccacauacu

SEQ ID NO: 2725073 - RNA, 19 nt, Artificial Sequence
  Description of Artificial Sequence: Synthetic oligonucleotide
cagcggacccuuggacggc

SEQ ID NO: 2725074 - RNA, 19 nt, Artificial Sequence
  Description of Artificial Sequence: Synthetic oligonucleotide
uggaggccucguccacaua

SEQ ID NO: 2725075 - RNA, 19 nt, Artificial Sequence
  Description of Artificial Sequence: Synthetic oligonucleotide
ggcucaucgguaggauuuc

SEQ ID NO: 2725076 - RNA, 19 nt, Artificial Sequence
  Description of Artificial Sequence: Synthetic oligonucleotide
gaucagcuacaagcagggu

SEQ ID NO: 2725077 - RNA, 19 nt, Artificial Sequence
  Description of Artificial Sequence: Synthetic oligonucleotide
cggauauccacuccagcaa

SEQ ID NO: 2725078 - RNA, 19 nt, Artificial Sequence
  Description of Artificial Sequence: Synthetic oligonucleotide
cguucccgcguuugcagug

SEQ ID NO: 2725079 - RNA, 19 nt, Artificial Sequence
  Description of Artificial Sequence: Synthetic oligonucleotide
gcggcucgaucaucuccag

SEQ ID NO: 2725080 - RNA, 19 nt, Artificial Sequence
  Description of Artificial Sequence: Synthetic oligonucleotide
cagcagaacgggcuccagu

SEQ ID NO: 2725081 - RNA, 19 nt, Artificial Sequence
  Description of Artificial Sequence: Synthetic oligonucleotide
gaacgggcuccaguaacuu

SEQ ID NO: 2725082 - RNA, 19 nt, Artificial Sequence
  Description of Artificial Sequence: Synthetic oligonucleotide
gcauaaaucugggccacau

SEQ ID NO: 2725083 - RNA, 19 nt, Artificial Sequence
  Description of Artificial Sequence: Synthetic oligonucleotide
ggcgccaggaccuccgaau

SEQ ID NO: 2725084 - RNA, 19 nt, Artificial Sequence
  Description of Artificial Sequence: Synthetic oligonucleotide
gugcgccacggccguggcc

SEQ ID NO: 2725085 - RNA, 19 nt, Artificial Sequence
  Description of Artificial Sequence: Synthetic oligonucleotide
caccagggcuuuggagaug

SEQ ID NO: 2725086 - RNA, 19 nt, Artificial Sequence
  Description of Artificial Sequence: Synthetic oligonucleotide
gggcucaucgguaggauuu

SEQ ID NO: 2725087 - RNA, 19 nt, Artificial Sequence
  Description of Artificial Sequence: Synthetic oligonucleotide
cgaauuucuuggacucaca

SEQ ID NO: 2725088 - RNA, 19 nt, Artificial Sequence
  Description of Artificial Sequence: Synthetic oligonucleotide
cguucaccuugaugagccc

SEQ ID NO: 2725089 - RNA, 19 nt, Artificial Sequence
  Description of Artificial Sequence: Synthetic oligonucleotide
cgcggcucgaucaucucca

SEQ ID NO: 2725090 - RNA, 19 nt, Artificial Sequence
  Description of Artificial Sequence: Synthetic oligonucleotide
cgcguuugcagugcgccac

SEQ ID NO: 2725091 - RNA, 19 nt, Artificial Sequence
  Description of Artificial Sequence: Synthetic oligonucleotide
cgccaccggaaaagggagg

SEQ ID NO: 2725092 - RNA, 19 nt, Artificial Sequence
  Description of Artificial Sequence: Synthetic oligonucleotide
ccguggccgucuucuugcg

SEQ ID NO: 2725093 - RNA, 19 nt, Artificial Sequence
  Description of Artificial Sequence: Synthetic oligonucleotide
cggacccggauauccacuc

SEQ ID NO: 2725094 - RNA, 19 nt, Artificial Sequence
  Description of Artificial Sequence: Synthetic oligonucleotide
ccgaagaccugcacggacu

SEQ ID NO: 2725095 - RNA, 19 nt, Artificial Sequence
  Description of Artificial Sequence: Synthetic oligonucleotide
ggcauggcugcgacucuuc

SEQ ID NO: 2725096 - RNA, 19 nt, Artificial Sequence
  Description of Artificial Sequence: Synthetic oligonucleotide
gcagcagaacgggcuccag

SEQ ID NO: 2725097 - RNA, 19 nt, Artificial Sequence
  Description of Artificial Sequence: Synthetic oligonucleotide
gugcgcggcucgaucaucu

SEQ ID NO: 2725098 - RNA, 19 nt, Artificial Sequence
  Description of Artificial Sequence: Synthetic oligonucleotide
gcgccgccaccggaaaagg

SEQ ID NO: 2725099 - RNA, 19 nt, Artificial Sequence
  Description of Artificial Sequence: Synthetic oligonucleotide
cgccgccaccggaaaaggg

SEQ ID NO: 2725100 - RNA, 19 nt, Artificial Sequence
  Description of Artificial Sequence: Synthetic oligonucleotide
cguuugcagugcgccacgg

SEQ ID NO: 2725101 - RNA, 19 nt, Artificial Sequence
  Description of Artificial Sequence: Synthetic oligonucleotide
gcauggcugcgacucuucu

SEQ ID NO: 2725102 - RNA, 19 nt, Artificial Sequence
  Description of Artificial Sequence: Synthetic oligonucleotide
gcuccucaccgcgcggcgc

SEQ ID NO: 2725103 - RNA, 19 nt, Artificial Sequence
  Description of Artificial Sequence: Synthetic oligonucleotide
gccgucuucuugcguccga

SEQ ID NO: 2725104 - RNA, 19 nt, Artificial Sequence
  Description of Artificial Sequence: Synthetic oligonucleotide
gccacaugaccaccacccu

SEQ ID NO: 2725105 - RNA, 19 nt, Artificial Sequence
  Description of Artificial Sequence: Synthetic oligonucleotide
caggaccuccgaauuucuu

SEQ ID NO: 2725106 - RNA, 19 nt, Artificial Sequence
  Description of Artificial Sequence: Synthetic oligonucleotide
cuucuccacgcgagcuccu

SEQ ID NO: 2725107 - RNA, 19 nt, Artificial Sequence
  Description of Artificial Sequence: Synthetic oligonucleotide
cacggccguggccgucuuc

SEQ ID NO: 2725108 - RNA, 19 nt, Artificial Sequence
  Description of Artificial Sequence: Synthetic oligonucleotide
cgcgagcuccucaccgcgc

SEQ ID NO: 2725109 - RNA, 19 nt, Artificial Sequence
  Description of Artificial Sequence: Synthetic oligonucleotide
ggcuuuggagauggacugu

SEQ ID NO: 2725110 - RNA, 19 nt, Artificial Sequence
  Description of Artificial Sequence: Synthetic oligonucleotide
gcccguucccgcguuugca

SEQ ID NO: 2725111 - RNA, 19 nt, Artificial Sequence
  Description of Artificial Sequence: Synthetic oligonucleotide
gccgccccggccgauuuuc

SEQ ID NO: 2725112 - RNA, 19 nt, Artificial Sequence
  Description of Artificial Sequence: Synthetic oligonucleotide
cagcgacgaggaucagcua

SEQ ID NO: 2725113 - RNA, 19 nt, Artificial Sequence
  Description of Artificial Sequence: Synthetic oligonucleotide
ggcucggggccgccccggc

SEQ ID NO: 2725114 - RNA, 19 nt, Artificial Sequence
  Description of Artificial Sequence: Synthetic oligonucleotide
cgccccggccgauuuucag

SEQ ID NO: 2725115 - RNA, 19 nt, Artificial Sequence
  Description of Artificial Sequence: Synthetic oligonucleotide
gggaggcucggggccgccc

SEQ ID NO: 2725116 - RNA, 19 nt, Artificial Sequence
  Description of Artificial Sequence: Synthetic oligonucleotide
cccuucacacggacccgga

SEQ ID NO: 2725117 - RNA, 19 nt, Artificial Sequence
  Description of Artificial Sequence: Synthetic oligonucleotide
ccaggaccuccgaauuucu

SEQ ID NO: 2725118 - RNA, 19 nt, Artificial Sequence
  Description of Artificial Sequence: Synthetic oligonucleotide
ccgcguuugcagugcgcca

SEQ ID NO: 2725119 - RNA, 19 nt, Artificial Sequence
  Description of Artificial Sequence: Synthetic oligonucleotide
ggacugcagcggacccuug

SEQ ID NO: 2725120 - RNA, 19 nt, Artificial Sequence
  Description of Artificial Sequence: Synthetic oligonucleotide
gggcgccaggaccuccgaa

SEQ ID NO: 2725121 - RNA, 19 nt, Artificial Sequence
  Description of Artificial Sequence: Synthetic oligonucleotide
gcgccaggaccuccgaauu

SEQ ID NO: 2725122 - RNA, 19 nt, Artificial Sequence
  Description of Artificial Sequence: Synthetic oligonucleotide
ccgucuucuugcguccgaa

SEQ ID NO: 2725123 - RNA, 19 nt, Artificial Sequence
  Description of Artificial Sequence: Synthetic oligonucleotide
gggcguccguucaccuuga

SEQ ID NO: 2725124 - RNA, 19 nt, Artificial Sequence
  Description of Artificial Sequence: Synthetic oligonucleotide
ggguucgaucauacuggau

SEQ ID NO: 2725125 - RNA, 19 nt, Artificial Sequence
  Description of Artificial Sequence: Synthetic oligonucleotide
ggacggcauggcugcgacu

SEQ ID NO: 2725126 - RNA, 19 nt, Artificial Sequence
  Description of Artificial Sequence: Synthetic oligonucleotide
ccucaccgcgcggcgccgc

SEQ ID NO: 2725127 - RNA, 19 nt, Artificial Sequence
  Description of Artificial Sequence: Synthetic oligonucleotide
gcagugcgccacggccgug

SEQ ID NO: 2725128 - RNA, 19 nt, Artificial Sequence
  Description of Artificial Sequence: Synthetic oligonucleotide
gcggcgccgccaccggaaa

SEQ ID NO: 2725129 - RNA, 19 nt, Artificial Sequence
  Description of Artificial Sequence: Synthetic oligonucleotide
ccuucacacggacccggau

SEQ ID NO: 2725130 - RNA, 19 nt, Artificial Sequence
  Description of Artificial Sequence: Synthetic oligonucleotide
cgugcgcggcucgaucauc

SEQ ID NO: 2725131 - RNA, 19 nt, Artificial Sequence
  Description of Artificial Sequence: Synthetic oligonucleotide
cuccagcaaaccgcuccuu

SEQ ID NO: 2725132 - RNA, 19 nt, Artificial Sequence
  Description of Artificial Sequence: Synthetic oligonucleotide
cgacgaggaucagcuacaa

SEQ ID NO: 2725133 - RNA, 19 nt, Artificial Sequence
  Description of Artificial Sequence: Synthetic oligonucleotide
cgggcuccaguaacuugua

SEQ ID NO: 2725134 - RNA, 19 nt, Artificial Sequence
  Description of Artificial Sequence: Synthetic oligonucleotide
ccgccccggccgauuuuca

SEQ ID NO: 2725135 - RNA, 19 nt, Artificial Sequence
  Description of Artificial Sequence: Synthetic oligonucleotide
gcacgggcgccaggaccuc

SEQ ID NO: 2725136 - RNA, 19 nt, Artificial Sequence
  Description of Artificial Sequence: Synthetic oligonucleotide
gcgcggcgccgccaccgga

SEQ ID NO: 2725137 - RNA, 19 nt, Artificial Sequence
  Description of Artificial Sequence: Synthetic oligonucleotide
ccaccggaaaagggaggcu

SEQ ID NO: 2725138 - RNA, 19 nt, Artificial Sequence
  Description of Artificial Sequence: Synthetic oligonucleotide
gcagcgugcgcggcucgau

SEQ ID NO: 2725139 - RNA, 19 nt, Artificial Sequence
  Description of Artificial Sequence: Synthetic oligonucleotide
ggcguccguucaccuugau

SEQ ID NO: 2725140 - RNA, 19 nt, Artificial Sequence
  Description of Artificial Sequence: Synthetic oligonucleotide
cguggccgucuucuugcgu

SEQ ID NO: 2725141 - RNA, 19 nt, Artificial Sequence
  Description of Artificial Sequence: Synthetic oligonucleotide
gggccgccccggccgauuu

SEQ ID NO: 2725142 - RNA, 19 nt, Artificial Sequence
  Description of Artificial Sequence: Synthetic oligonucleotide
cgccaggaccuccgaauuu

SEQ ID NO: 2725143 - RNA, 19 nt, Artificial Sequence
  Description of Artificial Sequence: Synthetic oligonucleotide
cgggcgccaggaccuccga

SEQ ID NO: 2725144 - RNA, 19 nt, Artificial Sequence
  Description of Artificial Sequence: Synthetic oligonucleotide
ggccgccccggccgauuuu

SEQ ID NO: 2725145 - RNA, 19 nt, Artificial Sequence
  Description of Artificial Sequence: Synthetic oligonucleotide
gcggacccuuggacggcau

SEQ ID NO: 2725146 - RNA, 19 nt, Artificial Sequence
  Description of Artificial Sequence: Synthetic oligonucleotide
cggcgccgccaccggaaaa

SEQ ID NO: 2725147 - RNA, 19 nt, Artificial Sequence
  Description of Artificial Sequence: Synthetic oligonucleotide
cggcauggcugcgacucuu

SEQ ID NO: 2725148 - RNA, 19 nt, Artificial Sequence
  Description of Artificial Sequence: Synthetic oligonucleotide
ccacggccguggccgucuu

SEQ ID NO: 2725149 - RNA, 19 nt, Artificial Sequence
  Description of Artificial Sequence: Synthetic oligonucleotide
cggccguggccgucuucuu

SEQ ID NO: 2725150 - RNA, 19 nt, Artificial Sequence
  Description of Artificial Sequence: Synthetic oligonucleotide
uauuccugaaaucucaugg

SEQ ID NO: 2725151 - RNA, 19 nt, Artificial Sequence
  Description of Artificial Sequence: Synthetic oligonucleotide
uuauuaaucaccuuuucug

SEQ ID NO: 2725152 - RNA, 19 nt, Artificial Sequence
  Description of Artificial Sequence: Synthetic oligonucleotide
aguauauuuauuaaucacc

SEQ ID NO: 2725153 - RNA, 19 nt, Artificial Sequence
  Description of Artificial Sequence: Synthetic oligonucleotide
ugugaagucuuuaacacag

SEQ ID NO: 2725154 - RNA, 19 nt, Artificial Sequence
  Description of Artificial Sequence: Synthetic oligonucleotide
uuaaauauuucuguaagca

SEQ ID NO: 2725155 - RNA, 19 nt, Artificial Sequence
  Description of Artificial Sequence: Synthetic oligonucleotide
ucuauuguaaguucccagg

SEQ ID NO: 2725156 - RNA, 19 nt, Artificial Sequence
  Description of Artificial Sequence: Synthetic oligonucleotide
auuguaaguucccaggaac

SEQ ID NO: 2725157 - RNA, 19 nt, Artificial Sequence
  Description of Artificial Sequence: Synthetic oligonucleotide
uuuucacucaacagcaagg

SEQ ID NO: 2725158 - RNA, 19 nt, Artificial Sequence
  Description of Artificial Sequence: Synthetic oligonucleotide
aaaagcagcuuucuguaag

SEQ ID NO: 2725159 - RNA, 19 nt, Artificial Sequence
  Description of Artificial Sequence: Synthetic oligonucleotide
uaugauauuccugaaaucu

SEQ ID NO: 2725160 - RNA, 19 nt, Artificial Sequence
  Description of Artificial Sequence: Synthetic oligonucleotide
uuuggauucuuucugguga

SEQ ID NO: 2725161 - RNA, 19 nt, Artificial Sequence
  Description of Artificial Sequence: Synthetic oligonucleotide
uuuauuaaucaccuuuucu

SEQ ID NO: 2725162 - RNA, 19 nt, Artificial Sequence
  Description of Artificial Sequence: Synthetic oligonucleotide
cuuaaacuguuuuaucugg

SEQ ID NO: 2725163 - RNA, 19 nt, Artificial Sequence
  Description of Artificial Sequence: Synthetic oligonucleotide
aacuguuuuaucuggucag

SEQ ID NO: 2725164 - RNA, 19 nt, Artificial Sequence
  Description of Artificial Sequence: Synthetic oligonucleotide
uguugugaagucuuuaaca

SEQ ID NO: 2725165 - RNA, 19 nt, Artificial Sequence
  Description of Artificial Sequence: Synthetic oligonucleotide
uaagcaauguucugaacag

SEQ ID NO: 2725166 - RNA, 19 nt, Artificial Sequence
  Description of Artificial Sequence: Synthetic oligonucleotide
uaagucuauuguaaguucc

SEQ ID NO: 2725167 - RNA, 19 nt, Artificial Sequence
  Description of Artificial Sequence: Synthetic oligonucleotide
agagugauuuuguuucucc

SEQ ID NO: 2725168 - RNA, 19 nt, Artificial Sequence
  Description of Artificial Sequence: Synthetic oligonucleotide
ucuguuuggauucuuucug

SEQ ID NO: 2725169 - RNA, 19 nt, Artificial Sequence
  Description of Artificial Sequence: Synthetic oligonucleotide
ucacucaacagcaaggccu

SEQ ID NO: 2725170 - RNA, 19 nt, Artificial Sequence
  Description of Artificial Sequence: Synthetic oligonucleotide
uucuuucuggugaagagug

SEQ ID NO: 2725171 - RNA, 19 nt, Artificial Sequence
  Description of Artificial Sequence: Synthetic oligonucleotide
aggcaguuacaacagaugg

SEQ ID NO: 2725172 - RNA, 19 nt, Artificial Sequence
  Description of Artificial Sequence: Synthetic oligonucleotide
gauuuuguuucuccagugg

SEQ ID NO: 2725173 - RNA, 19 nt, Artificial Sequence
  Description of Artificial Sequence: Synthetic oligonucleotide
guuuuaucuggucagauuc

SEQ ID NO: 2725174 - RNA, 19 nt, Artificial Sequence
  Description of Artificial Sequence: Synthetic oligonucleotide
ucuuucaguauauuuauua

SEQ ID NO: 2725175 - RNA, 19 nt, Artificial Sequence
  Description of Artificial Sequence: Synthetic oligonucleotide
uaaucaccuuuucugaugc

SEQ ID NO: 2725176 - RNA, 19 nt, Artificial Sequence
  Description of Artificial Sequence: Synthetic oligonucleotide
aaauauuucuguaagcaau

SEQ ID NO: 2725177 - RNA, 19 nt, Artificial Sequence
  Description of Artificial Sequence: Synthetic oligonucleotide
cugaauaugauauuccuga

SEQ ID NO: 2725178 - RNA, 19 nt, Artificial Sequence
  Description of Artificial Sequence: Synthetic oligonucleotide
aauguucugaacagguaac

SEQ ID NO: 2725179 - RNA, 19 nt, Artificial Sequence
  Description of Artificial Sequence: Synthetic oligonucleotide
uggaaaagcaacugucccg

SEQ ID NO: 2725180 - RNA, 19 nt, Artificial Sequence
  Description of Artificial Sequence: Synthetic oligonucleotide
uaucugugcagccauauuc

SEQ ID NO: 2725181 - RNA, 19 nt, Artificial Sequence
  Description of Artificial Sequence: Synthetic oligonucleotide
ucagguuucaccucucuug

SEQ ID NO: 2725182 - RNA, 19 nt, Artificial Sequence
  Description of Artificial Sequence: Synthetic oligonucleotide
caacagaugguuuaccacc

SEQ ID NO: 2725183 - RNA, 19 nt, Artificial Sequence
  Description of Artificial Sequence: Synthetic oligonucleotide
aauauuucuguaagcaaug

SEQ ID NO: 2725184 - RNA, 19 nt, Artificial Sequence
  Description of Artificial Sequence: Synthetic oligonucleotide
acaacagaugguuuaccac

SEQ ID NO: 2725185 - RNA, 19 nt, Artificial Sequence
  Description of Artificial Sequence: Synthetic oligonucleotide
ugaguuuccuuucugcucu

SEQ ID NO: 2725186 - RNA, 19 nt, Artificial Sequence
  Description of Artificial Sequence: Synthetic oligonucleotide
auuuucacucaacagcaag

SEQ ID NO: 2725187 - RNA, 19 nt, Artificial Sequence
  Description of Artificial Sequence: Synthetic oligonucleotide
guaagcaauguucugaaca

SEQ ID NO: 2725188 - RNA, 19 nt, Artificial Sequence
  Description of Artificial Sequence: Synthetic oligonucleotide
guugugaagucuuuaacac

SEQ ID NO: 2725189 - RNA, 19 nt, Artificial Sequence
  Description of Artificial Sequence: Synthetic oligonucleotide
ugaaaucucauggauauuc

SEQ ID NO: 2725190 - RNA, 19 nt, Artificial Sequence
  Description of Artificial Sequence: Synthetic oligonucleotide
uggucaggcaguuacaaca

SEQ ID NO: 2725191 - RNA, 19 nt, Artificial Sequence
  Description of Artificial Sequence: Synthetic oligonucleotide
aagucuauuguaaguuccc

SEQ ID NO: 2725192 - RNA, 19 nt, Artificial Sequence
  Description of Artificial Sequence: Synthetic oligonucleotide
uucugaacagguaaccucu

SEQ ID NO: 2725193 - RNA, 19 nt, Artificial Sequence
  Description of Artificial Sequence: Synthetic oligonucleotide
uuaaucaccuuuucugaug

SEQ ID NO: 2725194 - RNA, 19 nt, Artificial Sequence
  Description of Artificial Sequence: Synthetic oligonucleotide
ugcuugaaugucuucagug

SEQ ID NO: 2725195 - RNA, 19 nt, Artificial Sequence
  Description of Artificial Sequence: Synthetic oligonucleotide
ugaacccucacuuccagug

SEQ ID NO: 2725196 - RNA, 19 nt, Artificial Sequence
  Description of Artificial Sequence: Synthetic oligonucleotide
agugauuuuguuucuccag

SEQ ID NO: 2725197 - RNA, 19 nt, Artificial Sequence
  Description of Artificial Sequence: Synthetic oligonucleotide
auaugauauuccugaaauc

SEQ ID NO: 2725198 - RNA, 19 nt, Artificial Sequence
  Description of Artificial Sequence: Synthetic oligonucleotide
aaucucucagugcaagucu

SEQ ID NO: 2725199 - RNA, 19 nt, Artificial Sequence
  Description of Artificial Sequence: Synthetic oligonucleotide
uucuguaagucuauuguaa

SEQ ID NO: 2725200 - RNA, 19 nt, Artificial Sequence
  Description of Artificial Sequence: Synthetic oligonucleotide
uuugcuugaaugucuucag

SEQ ID NO: 2725201 - RNA, 19 nt, Artificial Sequence
  Description of Artificial Sequence: Synthetic oligonucleotide
cucagugcaagucugugcc

SEQ ID NO: 2725202 - RNA, 19 nt, Artificial Sequence
  Description of Artificial Sequence: Synthetic oligonucleotide
ucuguaagcaauguucuga

SEQ ID NO: 2725203 - RNA, 19 nt, Artificial Sequence
  Description of Artificial Sequence: Synthetic oligonucleotide
ucuccagugguuuccauug

SEQ ID NO: 2725204 - RNA, 19 nt, Artificial Sequence
  Description of Artificial Sequence: Synthetic oligonucleotide
uuaucuggucagauucugg

SEQ ID NO: 2725205 - RNA, 19 nt, Artificial Sequence
  Description of Artificial Sequence: Synthetic oligonucleotide
ugaaugucuucagugaggc

SEQ ID NO: 2725206 - RNA, 19 nt, Artificial Sequence
  Description of Artificial Sequence: Synthetic oligonucleotide
uacaacagaugguuuacca

SEQ ID NO: 2725207 - RNA, 19 nt, Artificial Sequence
  Description of Artificial Sequence: Synthetic oligonucleotide
ugugcagccauauucuuuc

SEQ ID NO: 2725208 - RNA, 19 nt, Artificial Sequence
  Description of Artificial Sequence: Synthetic oligonucleotide
gauucugguaucugugcag

SEQ ID NO: 2725209 - RNA, 19 nt, Artificial Sequence
  Description of Artificial Sequence: Synthetic oligonucleotide
augaguuuccuuucugcuc

SEQ ID NO: 2725210 - RNA, 19 nt, Artificial Sequence
  Description of Artificial Sequence: Synthetic oligonucleotide
uuaaacuguuuuaucuggu

SEQ ID NO: 2725211 - RNA, 19 nt, Artificial Sequence
  Description of Artificial Sequence: Synthetic oligonucleotide
ucuggucagauucugguau

SEQ ID NO: 2725212 - RNA, 19 nt, Artificial Sequence
  Description of Artificial Sequence: Synthetic oligonucleotide
ugaugcaugaguuuccuuu

SEQ ID NO: 2725213 - RNA, 19 nt, Artificial Sequence
  Description of Artificial Sequence: Synthetic oligonucleotide
aaaagcaacugucccgccu

SEQ ID NO: 2725214 - RNA, 19 nt, Artificial Sequence
  Description of Artificial Sequence: Synthetic oligonucleotide
uaccauuuucacucaacag

SEQ ID NO: 2725215 - RNA, 19 nt, Artificial Sequence
  Description of Artificial Sequence: Synthetic oligonucleotide
agugguuuccauuggucag

SEQ ID NO: 2725216 - RNA, 19 nt, Artificial Sequence
  Description of Artificial Sequence: Synthetic oligonucleotide
uuucacucaacagcaaggc

SEQ ID NO: 2725217 - RNA, 19 nt, Artificial Sequence
  Description of Artificial Sequence: Synthetic oligonucleotide
auucugguaucugugcagc

SEQ ID NO: 2725218 - RNA, 19 nt, Artificial Sequence
  Description of Artificial Sequence: Synthetic oligonucleotide
cuuccagugcaacagcugc

SEQ ID NO: 2725219 - RNA, 19 nt, Artificial Sequence
  Description of Artificial Sequence: Synthetic oligonucleotide
ugguuuaccaccaccacuu

SEQ ID NO: 2725220 - RNA, 19 nt, Artificial Sequence
  Description of Artificial Sequence: Synthetic oligonucleotide
uuuuaucuggucagauucu

SEQ ID NO: 2725221 - RNA, 19 nt, Artificial Sequence
  Description of Artificial Sequence: Synthetic oligonucleotide
aacagcaaggccuucuguu

SEQ ID NO: 2725222 - RNA, 19 nt, Artificial Sequence
  Description of Artificial Sequence: Synthetic oligonucleotide
aggccuucuguuuggauuc

SEQ ID NO: 2725223 - RNA, 19 nt, Artificial Sequence
  Description of Artificial Sequence: Synthetic oligonucleotide
cuggaaaagcaacuguccc

SEQ ID NO: 2725224 - RNA, 19 nt, Artificial Sequence
  Description of Artificial Sequence: Synthetic oligonucleotide
auguucugaacagguaacc

SEQ ID NO: 2725225 - RNA, 19 nt, Artificial Sequence
  Description of Artificial Sequence: Synthetic oligonucleotide
uuguugugaagucuuuaac

SEQ ID NO: 2725226 - RNA, 19 nt, Artificial Sequence
  Description of Artificial Sequence: Synthetic oligonucleotide
uauuguaaguucccaggaa

SEQ ID NO: 2725227 - RNA, 19 nt, Artificial Sequence
  Description of Artificial Sequence: Synthetic oligonucleotide
uaaguucccaggaacuccu

SEQ ID NO: 2725228 - RNA, 19 nt, Artificial Sequence
  Description of Artificial Sequence: Synthetic oligonucleotide
uuuccauuggucaggcagu

SEQ ID NO: 2725229 - RNA, 19 nt, Artificial Sequence
  Description of Artificial Sequence: Synthetic oligonucleotide
aacuccuuaaacuguuuua

SEQ ID NO: 2725230 - RNA, 19 nt, Artificial Sequence
  Description of Artificial Sequence: Synthetic oligonucleotide
uaaacuguuuuaucugguc

SEQ ID NO: 2725231 - RNA, 19 nt, Artificial Sequence
  Description of Artificial Sequence: Synthetic oligonucleotide
aaggccuucuguuuggauu

SEQ ID NO: 2725232 - RNA, 19 nt, Artificial Sequence
  Description of Artificial Sequence: Synthetic oligonucleotide
ucggcugugcuucaggggu

SEQ ID NO: 2725233 - RNA, 19 nt, Artificial Sequence
  Description of Artificial Sequence: Synthetic oligonucleotide
gucuauuguaaguucccag

SEQ ID NO: 2725234 - RNA, 19 nt, Artificial Sequence
  Description of Artificial Sequence: Synthetic oligonucleotide
uuucuguaagucuauugua

SEQ ID NO: 2725235 - RNA, 19 nt, Artificial Sequence
  Description of Artificial Sequence: Synthetic oligonucleotide
uuucugcucuggaaaagca

SEQ ID NO: 2725236 - RNA, 19 nt, Artificial Sequence
  Description of Artificial Sequence: Synthetic oligonucleotide
cucuggaaaagcaacuguc

SEQ ID NO: 2725237 - RNA, 19 nt, Artificial Sequence
  Description of Artificial Sequence: Synthetic oligonucleotide
uucacucaacagcaaggcc

SEQ ID NO: 2725238 - RNA, 19 nt, Artificial Sequence
  Description of Artificial Sequence: Synthetic oligonucleotide
gaauaugauauuccugaaa

SEQ ID NO: 2725239 - RNA, 19 nt, Artificial Sequence
  Description of Artificial Sequence: Synthetic oligonucleotide
uuuaucuggucagauucug

SEQ ID NO: 2725240 - RNA, 19 nt, Artificial Sequence
  Description of Artificial Sequence: Synthetic oligonucleotide
cuuaccauuuucacucaac

SEQ ID NO: 2725241 - RNA, 19 nt, Artificial Sequence
  Description of Artificial Sequence: Synthetic oligonucleotide
auuaaucaccuuuucugau

SEQ ID NO: 2725242 - RNA, 19 nt, Artificial Sequence
  Description of Artificial Sequence: Synthetic oligonucleotide
cugcugaauaugauauucc

SEQ ID NO: 2725243 - RNA, 19 nt, Artificial Sequence
  Description of Artificial Sequence: Synthetic oligonucleotide
cucacuuccagugcaacag

SEQ ID NO: 2725244 - RNA, 19 nt, Artificial Sequence
  Description of Artificial Sequence: Synthetic oligonucleotide
auggauauucucuguguca

SEQ ID NO: 2725245 - RNA, 19 nt, Artificial Sequence
  Description of Artificial Sequence: Synthetic oligonucleotide
aaagcaacugucccgccuu

SEQ ID NO: 2725246 - RNA, 19 nt, Artificial Sequence
  Description of Artificial Sequence: Synthetic oligonucleotide
aagcaauguucugaacagg

SEQ ID NO: 2725247 - RNA, 19 nt, Artificial Sequence
  Description of Artificial Sequence: Synthetic oligonucleotide
aacugucccgccuuuugcu

SEQ ID NO: 2725248 - RNA, 19 nt, Artificial Sequence
  Description of Artificial Sequence: Synthetic oligonucleotide
uucugaugcaugaguuucc

SEQ ID NO: 2725249 - RNA, 19 nt, Artificial Sequence
  Description of Artificial Sequence: Synthetic oligonucleotide
gaugcaugaguuuccuuuc

SEQ ID NO: 2725250 - RNA, 19 nt, Artificial Sequence
  Description of Artificial Sequence: Synthetic oligonucleotide
ugaggcuggauuucuuccc

SEQ ID NO: 2725251 - RNA, 19 nt, Artificial Sequence
  Description of Artificial Sequence: Synthetic oligonucleotide
augauauuccugaaaucuc

SEQ ID NO: 2725252 - RNA, 19 nt, Artificial Sequence
  Description of Artificial Sequence: Synthetic oligonucleotide
uauuucuguaagcaauguu

SEQ ID NO: 2725253 - RNA, 19 nt, Artificial Sequence
  Description of Artificial Sequence: Synthetic oligonucleotide
ugcuuuggcugccagggcu

SEQ ID NO: 2725254 - RNA, 19 nt, Artificial Sequence
  Description of Artificial Sequence: Synthetic oligonucleotide
caggugaacccucacuucc

SEQ ID NO: 2725255 - RNA, 19 nt, Artificial Sequence
  Description of Artificial Sequence: Synthetic oligonucleotide
auauuccugaaaucucaug

SEQ ID NO: 2725256 - RNA, 19 nt, Artificial Sequence
  Description of Artificial Sequence: Synthetic oligonucleotide
auucugcugaauaugauau

SEQ ID NO: 2725257 - RNA, 19 nt, Artificial Sequence
  Description of Artificial Sequence: Synthetic oligonucleotide
agauucugguaucugugca

SEQ ID NO: 2725258 - RNA, 19 nt, Artificial Sequence
  Description of Artificial Sequence: Synthetic oligonucleotide
guaagucuauuguaaguuc

SEQ ID NO: 2725259 - RNA, 19 nt, Artificial Sequence
  Description of Artificial Sequence: Synthetic oligonucleotide
ugaauaugauauuccugaa

SEQ ID NO: 2725260 - RNA, 19 nt, Artificial Sequence
  Description of Artificial Sequence: Synthetic oligonucleotide
ugcagccauauucuuucag

SEQ ID NO: 2725261 - RNA, 19 nt, Artificial Sequence
  Description of Artificial Sequence: Synthetic oligonucleotide
uguuuggauucuuucuggu

SEQ ID NO: 2725262 - RNA, 19 nt, Artificial Sequence
  Description of Artificial Sequence: Synthetic oligonucleotide
cuggcaaucucucagugca

SEQ ID NO: 2725263 - RNA, 19 nt, Artificial Sequence
  Description of Artificial Sequence: Synthetic oligonucleotide
augguuuaccaccaccacu

SEQ ID NO: 2725264 - RNA, 19 nt, Artificial Sequence
  Description of Artificial Sequence: Synthetic oligonucleotide
cagauucugguaucugugc

SEQ ID NO: 2725265 - RNA, 19 nt, Artificial Sequence
  Description of Artificial Sequence: Synthetic oligonucleotide
ugcaugaguuuccuuucug

SEQ ID NO: 2725266 - RNA, 19 nt, Artificial Sequence
  Description of Artificial Sequence: Synthetic oligonucleotide
guuuggauucuuucuggug

SEQ ID NO: 2725267 - RNA, 19 nt, Artificial Sequence
  Description of Artificial Sequence: Synthetic oligonucleotide
cucauggauauucucugug

SEQ ID NO: 2725268 - RNA, 19 nt, Artificial Sequence
  Description of Artificial Sequence: Synthetic oligonucleotide
guucugaacagguaaccuc

SEQ ID NO: 2725269 - RNA, 19 nt, Artificial Sequence
  Description of Artificial Sequence: Synthetic oligonucleotide
uauauuuauuaaucaccuu

SEQ ID NO: 2725270 - RNA, 19 nt, Artificial Sequence
  Description of Artificial Sequence: Synthetic oligonucleotide
gaugguuuaccaccaccac

SEQ ID NO: 2725271 - RNA, 19 nt, Artificial Sequence
  Description of Artificial Sequence: Synthetic oligonucleotide
cuuucugcucuggaaaagc

SEQ ID NO: 2725272 - RNA, 19 nt, Artificial Sequence
  Description of Artificial Sequence: Synthetic oligonucleotide
uccugaaaucucauggaua

SEQ ID NO: 2725273 - RNA, 19 nt, Artificial Sequence
  Description of Artificial Sequence: Synthetic oligonucleotide
cauggauauucucuguguc

SEQ ID NO: 2725274 - RNA, 19 nt, Artificial Sequence
  Description of Artificial Sequence: Synthetic oligonucleotide
ugugcuucagggguucucc

SEQ ID NO: 2725275 - RNA, 19 nt, Artificial Sequence
  Description of Artificial Sequence: Synthetic oligonucleotide
uguucugaacagguaaccu

SEQ ID NO: 2725276 - RNA, 19 nt, Artificial Sequence
  Description of Artificial Sequence: Synthetic oligonucleotide
uucuguaagcaauguucug

SEQ ID NO: 2725277 - RNA, 19 nt, Artificial Sequence
  Description of Artificial Sequence: Synthetic oligonucleotide
cuucggcugugcuucaggg

SEQ ID NO: 2725278 - RNA, 19 nt, Artificial Sequence
  Description of Artificial Sequence: Synthetic oligonucleotide
caauguucugaacagguaa

SEQ ID NO: 2725279 - RNA, 19 nt, Artificial Sequence
  Description of Artificial Sequence: Synthetic oligonucleotide
uguuuuaucuggucagauu

SEQ ID NO: 2725280 - RNA, 19 nt, Artificial Sequence
  Description of Artificial Sequence: Synthetic oligonucleotide
aacagaugguuuaccacca

SEQ ID NO: 2725281 - RNA, 19 nt, Artificial Sequence
  Description of Artificial Sequence: Synthetic oligonucleotide
aggaguccugcuuuggcug

SEQ ID NO: 2725282 - RNA, 19 nt, Artificial Sequence
  Description of Artificial Sequence: Synthetic oligonucleotide
cuuucuguaagucuauugu

SEQ ID NO: 2725283 - RNA, 19 nt, Artificial Sequence
  Description of Artificial Sequence: Synthetic oligonucleotide
uucggcugugcuucagggg

SEQ ID NO: 2725284 - RNA, 19 nt, Artificial Sequence
  Description of Artificial Sequence: Synthetic oligonucleotide
uggauauucucugugucau

SEQ ID NO: 2725285 - RNA, 19 nt, Artificial Sequence
  Description of Artificial Sequence: Synthetic oligonucleotide
guaaguucccaggaacucc

SEQ ID NO: 2725286 - RNA, 19 nt, Artificial Sequence
  Description of Artificial Sequence: Synthetic oligonucleotide
guuacaacagaugguuuac

SEQ ID NO: 2725287 - RNA, 19 nt, Artificial Sequence
  Description of Artificial Sequence: Synthetic oligonucleotide
cagaugguuuaccaccacc

SEQ ID NO: 2725288 - RNA, 19 nt, Artificial Sequence
  Description of Artificial Sequence: Synthetic oligonucleotide
agcaauguucugaacaggu

SEQ ID NO: 2725289 - RNA, 19 nt, Artificial Sequence
  Description of Artificial Sequence: Synthetic oligonucleotide
uucuggugaagagugauuu

SEQ ID NO: 2725290 - RNA, 19 nt, Artificial Sequence
  Description of Artificial Sequence: Synthetic oligonucleotide
gagugauuuuguuucucca

SEQ ID NO: 2725291 - RNA, 19 nt, Artificial Sequence
  Description of Artificial Sequence: Synthetic oligonucleotide
uucugcucuggaaaagcaa

SEQ ID NO: 2725292 - RNA, 19 nt, Artificial Sequence
  Description of Artificial Sequence: Synthetic oligonucleotide
uguaaguucccaggaacuc

SEQ ID NO: 2725293 - RNA, 19 nt, Artificial Sequence
  Description of Artificial Sequence: Synthetic oligonucleotide
agugcaagucugugccugg

SEQ ID NO: 2725294 - RNA, 19 nt, Artificial Sequence
  Description of Artificial Sequence: Synthetic oligonucleotide
ucacuuccagugcaacagc

SEQ ID NO: 2725295 - RNA, 19 nt, Artificial Sequence
  Description of Artificial Sequence: Synthetic oligonucleotide
ggaaaagcaacugucccgc

SEQ ID NO: 2725296 - RNA, 19 nt, Artificial Sequence
  Description of Artificial Sequence: Synthetic oligonucleotide
ugcucuggaaaagcaacug

SEQ ID NO: 2725297 - RNA, 19 nt, Artificial Sequence
  Description of Artificial Sequence: Synthetic oligonucleotide
cuauuguaaguucccagga

SEQ ID NO: 2725298 - RNA, 19 nt, Artificial Sequence
  Description of Artificial Sequence: Synthetic oligonucleotide
acuucggcugugcuucagg

SEQ ID NO: 2725299 - RNA, 19 nt, Artificial Sequence
  Description of Artificial Sequence: Synthetic oligonucleotide
cuuguugugaagucuuuaa

SEQ ID NO: 2725300 - RNA, 19 nt, Artificial Sequence
  Description of Artificial Sequence: Synthetic oligonucleotide
uuacaacagaugguuuacc

SEQ ID NO: 2725301 - RNA, 19 nt, Artificial Sequence
  Description of Artificial Sequence: Synthetic oligonucleotide
ugcuggcaaucucucagug

SEQ ID NO: 2725302 - RNA, 19 nt, Artificial Sequence
  Description of Artificial Sequence: Synthetic oligonucleotide
uccagugguuuccauuggu

SEQ ID NO: 2725303 - RNA, 19 nt, Artificial Sequence
  Description of Artificial Sequence: Synthetic oligonucleotide
ccuuaaacuguuuuaucug

SEQ ID NO: 2725304 - RNA, 19 nt, Artificial Sequence
  Description of Artificial Sequence: Synthetic oligonucleotide
uguaagcaauguucugaac

SEQ ID NO: 2725305 - RNA, 19 nt, Artificial Sequence
  Description of Artificial Sequence: Synthetic oligonucleotide
ucucauggauauucucugu

SEQ ID NO: 2725306 - RNA, 19 nt, Artificial Sequence
  Description of Artificial Sequence: Synthetic oligonucleotide
uugcuugaaugucuucagu

SEQ ID NO: 2725307 - RNA, 19 nt, Artificial Sequence
  Description of Artificial Sequence: Synthetic oligonucleotide
gaacccucacuuccagugc

SEQ ID NO: 2725308 - RNA, 19 nt, Artificial Sequence
  Description of Artificial Sequence: Synthetic oligonucleotide
gcugcuggcaaucucucag

SEQ ID NO: 2725309 - RNA, 19 nt, Artificial Sequence
  Description of Artificial Sequence: Synthetic oligonucleotide
ucucuaccggggcuggccc

SEQ ID NO: 2725310 - RNA, 19 nt, Artificial Sequence
  Description of Artificial Sequence: Synthetic oligonucleotide
gugguuuccauuggucagg

SEQ ID NO: 2725311 - RNA, 19 nt, Artificial Sequence
  Description of Artificial Sequence: Synthetic oligonucleotide
uucaccucucuuguuguga

SEQ ID NO: 2725312 - RNA, 19 nt, Artificial Sequence
  Description of Artificial Sequence: Synthetic oligonucleotide
caaucucucagugcaaguc

SEQ ID NO: 2725313 - RNA, 19 nt, Artificial Sequence
  Description of Artificial Sequence: Synthetic oligonucleotide
cauucugcugaauaugaua

SEQ ID NO: 2725314 - RNA, 19 nt, Artificial Sequence
  Description of Artificial Sequence: Synthetic oligonucleotide
uccagugcaacagcugcug

SEQ ID NO: 2725315 - RNA, 19 nt, Artificial Sequence
  Description of Artificial Sequence: Synthetic oligonucleotide
agugcaacagcugcuggca

SEQ ID NO: 2725316 - RNA, 19 nt, Artificial Sequence
  Description of Artificial Sequence: Synthetic oligonucleotide
uccugcuuuggcugccagg

SEQ ID NO: 2725317 - RNA, 19 nt, Artificial Sequence
  Description of Artificial Sequence: Synthetic oligonucleotide
aaucaccuuuucugaugca

SEQ ID NO: 2725318 - RNA, 19 nt, Artificial Sequence
  Description of Artificial Sequence: Synthetic oligonucleotide
gcuuucuguaagucuauug

SEQ ID NO: 2725319 - RNA, 19 nt, Artificial Sequence
  Description of Artificial Sequence: Synthetic oligonucleotide
uuucaccucucuuguugug

SEQ ID NO: 2725320 - RNA, 19 nt, Artificial Sequence
  Description of Artificial Sequence: Synthetic oligonucleotide
accucucuuguugugaagu

SEQ ID NO: 2725321 - RNA, 19 nt, Artificial Sequence
  Description of Artificial Sequence: Synthetic oligonucleotide
gaaaagcaacugucccgcc

SEQ ID NO: 2725322 - RNA, 19 nt, Artificial Sequence
  Description of Artificial Sequence: Synthetic oligonucleotide
ccauuuucacucaacagca

SEQ ID NO: 2725323 - RNA, 19 nt, Artificial Sequence
  Description of Artificial Sequence: Synthetic oligonucleotide
gcaugaguuuccuuucugc

SEQ ID NO: 2725324 - RNA, 19 nt, Artificial Sequence
  Description of Artificial Sequence: Synthetic oligonucleotide
uuucuggugaagagugauu

SEQ ID NO: 2725325 - RNA, 19 nt, Artificial Sequence
  Description of Artificial Sequence: Synthetic oligonucleotide
caacugucccgccuuuugc

SEQ ID NO: 2725326 - RNA, 19 nt, Artificial Sequence
  Description of Artificial Sequence: Synthetic oligonucleotide
uucuuucaguauauuuauu

SEQ ID NO: 2725327 - RNA, 19 nt, Artificial Sequence
  Description of Artificial Sequence: Synthetic oligonucleotide
cagugguuuccauugguca

SEQ ID NO: 2725328 - RNA, 19 nt, Artificial Sequence
  Description of Artificial Sequence: Synthetic oligonucleotide
ucaccucucuuguugugaa

SEQ ID NO: 2725329 - RNA, 19 nt, Artificial Sequence
  Description of Artificial Sequence: Synthetic oligonucleotide
uuggucaggcaguuacaac

SEQ ID NO: 2725330 - RNA, 19 nt, Artificial Sequence
  Description of Artificial Sequence: Synthetic oligonucleotide
ugcuucagggguucuccca

SEQ ID NO: 2725331 - RNA, 19 nt, Artificial Sequence
  Description of Artificial Sequence: Synthetic oligonucleotide
uucagguuucaccucucuu

SEQ ID NO: 2725332 - RNA, 19 nt, Artificial Sequence
  Description of Artificial Sequence: Synthetic oligonucleotide
agucuauuguaaguuccca

SEQ ID NO: 2725333 - RNA, 19 nt, Artificial Sequence
  Description of Artificial Sequence: Synthetic oligonucleotide
ccauuggucaggcaguuac

SEQ ID NO: 2725334 - RNA, 19 nt, Artificial Sequence
  Description of Artificial Sequence: Synthetic oligonucleotide
uucucuaccggggcuggcc

SEQ ID NO: 2725335 - RNA, 19 nt, Artificial Sequence
  Description of Artificial Sequence: Synthetic oligonucleotide
gcuugaaugucuucaguga

SEQ ID NO: 2725336 - RNA, 19 nt, Artificial Sequence
  Description of Artificial Sequence: Synthetic oligonucleotide
auuggucaggcaguuacaa

SEQ ID NO: 2725337 - RNA, 19 nt, Artificial Sequence
  Description of Artificial Sequence: Synthetic oligonucleotide
gugauuuuguuucuccagu

SEQ ID NO: 2725338 - RNA, 19 nt, Artificial Sequence
  Description of Artificial Sequence: Synthetic oligonucleotide
ucuuguugugaagucuuua

SEQ ID NO: 2725339 - RNA, 19 nt, Artificial Sequence
  Description of Artificial Sequence: Synthetic oligonucleotide
uucuccagugguuuccauu

SEQ ID NO: 2725340 - RNA, 19 nt, Artificial Sequence
  Description of Artificial Sequence: Synthetic oligonucleotide
acuguuuuaucuggucaga

SEQ ID NO: 2725341 - RNA, 19 nt, Artificial Sequence
  Description of Artificial Sequence: Synthetic oligonucleotide
ccugcuuuggcugccaggg

SEQ ID NO: 2725342 - RNA, 19 nt, Artificial Sequence
  Description of Artificial Sequence: Synthetic oligonucleotide
gcugaauaugauauuccug

SEQ ID NO: 2725343 - RNA, 19 nt, Artificial Sequence
  Description of Artificial Sequence: Synthetic oligonucleotide
ugcaacagcugcuggcaau

SEQ ID NO: 2725344 - RNA, 19 nt, Artificial Sequence
  Description of Artificial Sequence: Synthetic oligonucleotide
gauauucucugugucauuu

SEQ ID NO: 2725345 - RNA, 19 nt, Artificial Sequence
  Description of Artificial Sequence: Synthetic oligonucleotide
accaccacuucggcugugc

SEQ ID NO: 2725346 - RNA, 19 nt, Artificial Sequence
  Description of Artificial Sequence: Synthetic oligonucleotide
guucccaggaacuccuuaa

SEQ ID NO: 2725347 - RNA, 19 nt, Artificial Sequence
  Description of Artificial Sequence: Synthetic oligonucleotide
ugguuuccauuggucaggc

SEQ ID NO: 2725348 - RNA, 19 nt, Artificial Sequence
  Description of Artificial Sequence: Synthetic oligonucleotide
ucagugcaagucugugccu

SEQ ID NO: 2725349 - RNA, 19 nt, Artificial Sequence
  Description of Artificial Sequence: Synthetic oligonucleotide
auauucucugugucauuuu

SEQ ID NO: 2725350 - RNA, 19 nt, Artificial Sequence
  Description of Artificial Sequence: Synthetic oligonucleotide
caugaguuuccuuucugcu

SEQ ID NO: 2725351 - RNA, 19 nt, Artificial Sequence
  Description of Artificial Sequence: Synthetic oligonucleotide
ugccuggggacuucucuac

SEQ ID NO: 2725352 - RNA, 19 nt, Artificial Sequence
  Description of Artificial Sequence: Synthetic oligonucleotide
uggauucuuucuggugaag

SEQ ID NO: 2725353 - RNA, 19 nt, Artificial Sequence
  Description of Artificial Sequence: Synthetic oligonucleotide
uggucagauucugguaucu

SEQ ID NO: 2725354 - RNA, 19 nt, Artificial Sequence
  Description of Artificial Sequence: Synthetic oligonucleotide
gaaaucucauggauauucu

SEQ ID NO: 2725355 - RNA, 19 nt, Artificial Sequence
  Description of Artificial Sequence: Synthetic oligonucleotide
ugucccgccuuuugcuuga

SEQ ID NO: 2725356 - RNA, 19 nt, Artificial Sequence
  Description of Artificial Sequence: Synthetic oligonucleotide
uucugcugaauaugauauu

SEQ ID NO: 2725357 - RNA, 19 nt, Artificial Sequence
  Description of Artificial Sequence: Synthetic oligonucleotide
cuggucagauucugguauc

SEQ ID NO: 2725358 - RNA, 19 nt, Artificial Sequence
  Description of Artificial Sequence: Synthetic oligonucleotide
cuccagugguuuccauugg

SEQ ID NO: 2725359 - RNA, 19 nt, Artificial Sequence
  Description of Artificial Sequence: Synthetic oligonucleotide
aucuggucagauucuggua

SEQ ID NO: 2725360 - RNA, 19 nt, Artificial Sequence
  Description of Artificial Sequence: Synthetic oligonucleotide
cuguaagucuauuguaagu

SEQ ID NO: 2725361 - RNA, 19 nt, Artificial Sequence
  Description of Artificial Sequence: Synthetic oligonucleotide
cccgccuuuugcuugaaug

SEQ ID NO: 2725362 - RNA, 19 nt, Artificial Sequence
  Description of Artificial Sequence: Synthetic oligonucleotide
ggcaaucucucagugcaag

SEQ ID NO: 2725363 - RNA, 19 nt, Artificial Sequence
  Description of Artificial Sequence: Synthetic oligonucleotide
ggugaacccucacuuccag

SEQ ID NO: 2725364 - RNA, 19 nt, Artificial Sequence
  Description of Artificial Sequence: Synthetic oligonucleotide
cagugcaagucugugccug

SEQ ID NO: 2725365 - RNA, 19 nt, Artificial Sequence
  Description of Artificial Sequence: Synthetic oligonucleotide
ggucaggcaguuacaacag

SEQ ID NO: 2725366 - RNA, 19 nt, Artificial Sequence
  Description of Artificial Sequence: Synthetic oligonucleotide
ucuaccggggcuggcccag

SEQ ID NO: 2725367 - RNA, 19 nt, Artificial Sequence
  Description of Artificial Sequence: Synthetic oligonucleotide
cugucccgccuuuugcuug

SEQ ID NO: 2725368 - RNA, 19 nt, Artificial Sequence
  Description of Artificial Sequence: Synthetic oligonucleotide
cucucagugcaagucugug

SEQ ID NO: 2725369 - RNA, 19 nt, Artificial Sequence
  Description of Artificial Sequence: Synthetic oligonucleotide
gaacuccuuaaacuguuuu

SEQ ID NO: 2725370 - RNA, 19 nt, Artificial Sequence
  Description of Artificial Sequence: Synthetic oligonucleotide
gcuggcaaucucucagugc

SEQ ID NO: 2725371 - RNA, 19 nt, Artificial Sequence
  Description of Artificial Sequence: Synthetic oligonucleotide
guuucaccucucuuguugu

SEQ ID NO: 2725372 - RNA, 19 nt, Artificial Sequence
  Description of Artificial Sequence: Synthetic oligonucleotide
ggauucuuucuggugaaga

SEQ ID NO: 2725373 - RNA, 19 nt, Artificial Sequence
  Description of Artificial Sequence: Synthetic oligonucleotide
cauuggucaggcaguuaca

SEQ ID NO: 2725374 - RNA, 19 nt, Artificial Sequence
  Description of Artificial Sequence: Synthetic oligonucleotide
gcaacugucccgccuuuug

SEQ ID NO: 2725375 - RNA, 19 nt, Artificial Sequence
  Description of Artificial Sequence: Synthetic oligonucleotide
aggaacuccuuaaacuguu

SEQ ID NO: 2725376 - RNA, 19 nt, Artificial Sequence
  Description of Artificial Sequence: Synthetic oligonucleotide
gauauuccugaaaucucau

SEQ ID NO: 2725377 - RNA, 19 nt, Artificial Sequence
  Description of Artificial Sequence: Synthetic oligonucleotide
ccugaaaucucauggauau

SEQ ID NO: 2725378 - RNA, 19 nt, Artificial Sequence
  Description of Artificial Sequence: Synthetic oligonucleotide
cauuuucacucaacagcaa

SEQ ID NO: 2725379 - RNA, 19 nt, Artificial Sequence
  Description of Artificial Sequence: Synthetic oligonucleotide
agcugcuggcaaucucuca

SEQ ID NO: 2725380 - RNA, 19 nt, Artificial Sequence
  Description of Artificial Sequence: Synthetic oligonucleotide
ggcuucauucugcugaaua

SEQ ID NO: 2725381 - RNA, 19 nt, Artificial Sequence
  Description of Artificial Sequence: Synthetic oligonucleotide
caccucucuuguugugaag

SEQ ID NO: 2725382 - RNA, 19 nt, Artificial Sequence
  Description of Artificial Sequence: Synthetic oligonucleotide
uggcccaggaguccugcuu

SEQ ID NO: 2725383 - RNA, 19 nt, Artificial Sequence
  Description of Artificial Sequence: Synthetic oligonucleotide
uuucuccagugguuuccau

SEQ ID NO: 2725384 - RNA, 19 nt, Artificial Sequence
  Description of Artificial Sequence: Synthetic oligonucleotide
ccagugguuuccauugguc

SEQ ID NO: 2725385 - RNA, 19 nt, Artificial Sequence
  Description of Artificial Sequence: Synthetic oligonucleotide
ugguaucugugcagccaua

SEQ ID NO: 2725386 - RNA, 19 nt, Artificial Sequence
  Description of Artificial Sequence: Synthetic oligonucleotide
guuucuccagugguuucca

SEQ ID NO: 2725387 - RNA, 19 nt, Artificial Sequence
  Description of Artificial Sequence: Synthetic oligonucleotide
guaaccucuucagguuuca

SEQ ID NO: 2725388 - RNA, 19 nt, Artificial Sequence
  Description of Artificial Sequence: Synthetic oligonucleotide
cagguuucaccucucuugu

SEQ ID NO: 2725389 - RNA, 19 nt, Artificial Sequence
  Description of Artificial Sequence: Synthetic oligonucleotide
cuucagugaggcuggauuu

SEQ ID NO: 2725390 - RNA, 19 nt, Artificial Sequence
  Description of Artificial Sequence: Synthetic oligonucleotide
uuccauuggucaggcaguu

SEQ ID NO: 2725391 - RNA, 19 nt, Artificial Sequence
  Description of Artificial Sequence: Synthetic oligonucleotide
cugcuuuggcugccagggc

SEQ ID NO: 2725392 - RNA, 19 nt, Artificial Sequence
  Description of Artificial Sequence: Synthetic oligonucleotide
gcuucauucugcugaauau

SEQ ID NO: 2725393 - RNA, 19 nt, Artificial Sequence
  Description of Artificial Sequence: Synthetic oligonucleotide
aggugaacccucacuucca

SEQ ID NO: 2725394 - RNA, 19 nt, Artificial Sequence
  Description of Artificial Sequence: Synthetic oligonucleotide
agucuuuaacacaguccaa

SEQ ID NO: 2725395 - RNA, 19 nt, Artificial Sequence
  Description of Artificial Sequence: Synthetic oligonucleotide
ggcugccagggcuucauuc

SEQ ID NO: 2725396 - RNA, 19 nt, Artificial Sequence
  Description of Artificial Sequence: Synthetic oligonucleotide
gguaaccucuucagguuuc

SEQ ID NO: 2725397 - RNA, 19 nt, Artificial Sequence
  Description of Artificial Sequence: Synthetic oligonucleotide
ggucagauucugguaucug

SEQ ID NO: 2725398 - RNA, 19 nt, Artificial Sequence
  Description of Artificial Sequence: Synthetic oligonucleotide
cacuuccagugcaacagcu

SEQ ID NO: 2725399 - RNA, 19 nt, Artificial Sequence
  Description of Artificial Sequence: Synthetic oligonucleotide
agguuucaccucucuuguu

SEQ ID NO: 2725400 - RNA, 19 nt, Artificial Sequence
  Description of Artificial Sequence: Synthetic oligonucleotide
uaccggggcuggcccagga

SEQ ID NO: 2725401 - RNA, 19 nt, Artificial Sequence
  Description of Artificial Sequence: Synthetic oligonucleotide
ccuuucugcucuggaaaag

SEQ ID NO: 2725402 - RNA, 19 nt, Artificial Sequence
  Description of Artificial Sequence: Synthetic oligonucleotide
ccucucuuguugugaaguc

SEQ ID NO: 2725403 - RNA, 19 nt, Artificial Sequence
  Description of Artificial Sequence: Synthetic oligonucleotide
cucucuuguugugaagucu

SEQ ID NO: 2725404 - RNA, 19 nt, Artificial Sequence
  Description of Artificial Sequence: Synthetic oligonucleotide
ccaggugaacccucacuuc

SEQ ID NO: 2725405 - RNA, 19 nt, Artificial Sequence
  Description of Artificial Sequence: Synthetic oligonucleotide
gugccuggggacuucucua

SEQ ID NO: 2725406 - RNA, 19 nt, Artificial Sequence
  Description of Artificial Sequence: Synthetic oligonucleotide
cugguaucugugcagccau

SEQ ID NO: 2725407 - RNA, 19 nt, Artificial Sequence
  Description of Artificial Sequence: Synthetic oligonucleotide
cugugcuucagggguucuc

SEQ ID NO: 2725408 - RNA, 19 nt, Artificial Sequence
  Description of Artificial Sequence: Synthetic oligonucleotide
ggugaagagugauuuuguu

SEQ ID NO: 2725409 - RNA, 19 nt, Artificial Sequence
  Description of Artificial Sequence: Synthetic oligonucleotide
cuuuggcugccagggcuuc

SEQ ID NO: 2725410 - RNA, 19 nt, Artificial Sequence
  Description of Artificial Sequence: Synthetic oligonucleotide
uccauuggucaggcaguua

SEQ ID NO: 2725411 - RNA, 19 nt, Artificial Sequence
  Description of Artificial Sequence: Synthetic oligonucleotide
gcugccagggcuucauucu

SEQ ID NO: 2725412 - RNA, 19 nt, Artificial Sequence
  Description of Artificial Sequence: Synthetic oligonucleotide
cuucucuaccggggcuggc

SEQ ID NO: 2725413 - RNA, 19 nt, Artificial Sequence
  Description of Artificial Sequence: Synthetic oligonucleotide
cacucaacagcaaggccuu

SEQ ID NO: 2725414 - RNA, 19 nt, Artificial Sequence
  Description of Artificial Sequence: Synthetic oligonucleotide
cuucagguuucaccucucu

SEQ ID NO: 2725415 - RNA, 19 nt, Artificial Sequence
  Description of Artificial Sequence: Synthetic oligonucleotide
ggcaguuacaacagauggu

SEQ ID NO: 2725416 - RNA, 19 nt, Artificial Sequence
  Description of Artificial Sequence: Synthetic oligonucleotide
ucccgccuuuugcuugaau

SEQ ID NO: 2725417 - RNA, 19 nt, Artificial Sequence
  Description of Artificial Sequence: Synthetic oligonucleotide
gccuggggacuucucuacc

SEQ ID NO: 2725418 - RNA, 19 nt, Artificial Sequence
  Description of Artificial Sequence: Synthetic oligonucleotide
cacuucggcugugcuucag

SEQ ID NO: 2725419 - RNA, 19 nt, Artificial Sequence
  Description of Artificial Sequence: Synthetic oligonucleotide
ccucacuuccagugcaaca

SEQ ID NO: 2725420 - RNA, 19 nt, Artificial Sequence
  Description of Artificial Sequence: Synthetic oligonucleotide
gugaacccucacuuccagu

SEQ ID NO: 2725421 - RNA, 19 nt, Artificial Sequence
  Description of Artificial Sequence: Synthetic oligonucleotide
agggguucucccaggugaa

SEQ ID NO: 2725422 - RNA, 19 nt, Artificial Sequence
  Description of Artificial Sequence: Synthetic oligonucleotide
cuguuuuaucuggucagau

SEQ ID NO: 2725423 - RNA, 19 nt, Artificial Sequence
  Description of Artificial Sequence: Synthetic oligonucleotide
aaguucccaggaacuccuu

SEQ ID NO: 2725424 - RNA, 19 nt, Artificial Sequence
  Description of Artificial Sequence: Synthetic oligonucleotide
guaucugugcagccauauu

SEQ ID NO: 2725425 - RNA, 19 nt, Artificial Sequence
  Description of Artificial Sequence: Synthetic oligonucleotide
gcaauguucugaacaggua

SEQ ID NO: 2725426 - RNA, 19 nt, Artificial Sequence
  Description of Artificial Sequence: Synthetic oligonucleotide
cucuaccggggcuggccca

SEQ ID NO: 2725427 - RNA, 19 nt, Artificial Sequence
  Description of Artificial Sequence: Synthetic oligonucleotide
cauauucuuucaguauauu

SEQ ID NO: 2725428 - RNA, 19 nt, Artificial Sequence
  Description of Artificial Sequence: Synthetic oligonucleotide
gguaucugugcagccauau

SEQ ID NO: 2725429 - RNA, 19 nt, Artificial Sequence
  Description of Artificial Sequence: Synthetic oligonucleotide
gcaaucucucagugcaagu

SEQ ID NO: 2725430 - RNA, 19 nt, Artificial Sequence
  Description of Artificial Sequence: Synthetic oligonucleotide
uggcugccagggcuucauu

SEQ ID NO: 2725431 - RNA, 19 nt, Artificial Sequence
  Description of Artificial Sequence: Synthetic oligonucleotide
gguuuccauuggucaggca

SEQ ID NO: 2725432 - RNA, 19 nt, Artificial Sequence
  Description of Artificial Sequence: Synthetic oligonucleotide
ccgccuuuugcuugaaugu

SEQ ID NO: 2725433 - RNA, 19 nt, Artificial Sequence
  Description of Artificial Sequence: Synthetic oligonucleotide
guucucccaggugaacccu

SEQ ID NO: 2725434 - RNA, 19 nt, Artificial Sequence
  Description of Artificial Sequence: Synthetic oligonucleotide
ggacuucucuaccggggcu

SEQ ID NO: 2725435 - RNA, 19 nt, Artificial Sequence
  Description of Artificial Sequence: Synthetic oligonucleotide
cagcuuucuguaagucuau

SEQ ID NO: 2725436 - RNA, 19 nt, Artificial Sequence
  Description of Artificial Sequence: Synthetic oligonucleotide
acccucacuuccagugcaa

SEQ ID NO: 2725437 - RNA, 19 nt, Artificial Sequence
  Description of Artificial Sequence: Synthetic oligonucleotide
gcuggcccaggaguccugc

SEQ ID NO: 2725438 - RNA, 19 nt, Artificial Sequence
  Description of Artificial Sequence: Synthetic oligonucleotide
caccacuucggcugugcuu

SEQ ID NO: 2725439 - RNA, 19 nt, Artificial Sequence
  Description of Artificial Sequence: Synthetic oligonucleotide
cccaggugaacccucacuu

SEQ ID NO: 2725440 - RNA, 19 nt, Artificial Sequence
  Description of Artificial Sequence: Synthetic oligonucleotide
ggauauucucugugucauu

SEQ ID NO: 2725441 - RNA, 19 nt, Artificial Sequence
  Description of Artificial Sequence: Synthetic oligonucleotide
gggguucucccaggugaac

SEQ ID NO: 2725442 - RNA, 19 nt, Artificial Sequence
  Description of Artificial Sequence: Synthetic oligonucleotide
ggcccaggaguccugcuuu

SEQ ID NO: 2725443 - RNA, 19 nt, Artificial Sequence
  Description of Artificial Sequence: Synthetic oligonucleotide
caacagcugcuggcaaucu

SEQ ID NO: 2725444 - RNA, 19 nt, Artificial Sequence
  Description of Artificial Sequence: Synthetic oligonucleotide
cugaaaucucauggauauu

SEQ ID NO: 2725445 - RNA, 19 nt, Artificial Sequence
  Description of Artificial Sequence: Synthetic oligonucleotide
ccggggcuggcccaggagu

SEQ ID NO: 2725446 - RNA, 19 nt, Artificial Sequence
  Description of Artificial Sequence: Synthetic oligonucleotide
ccacuucggcugugcuuca

SEQ ID NO: 2725447 - RNA, 19 nt, Artificial Sequence
  Description of Artificial Sequence: Synthetic oligonucleotide
ggccuucuguuuggauucu

SEQ ID NO: 2725448 - RNA, 19 nt, Artificial Sequence
  Description of Artificial Sequence: Synthetic oligonucleotide
gucccgccuuuugcuugaa

SEQ ID NO: 2725449 - RNA, 19 nt, Artificial Sequence
  Description of Artificial Sequence: Synthetic oligonucleotide
ccaccacuucggcugugcu

SEQ ID NO: 2725450 - RNA, 19 nt, Artificial Sequence
  Description of Artificial Sequence: Synthetic oligonucleotide
cggcugugcuucagggguu

SEQ ID NO: 2725451 - RNA, 19 nt, Artificial Sequence
  Description of Artificial Sequence: Synthetic oligonucleotide
aaguuaauuaagcuggagg

SEQ ID NO: 2725452 - RNA, 19 nt, Artificial Sequence
  Description of Artificial Sequence: Synthetic oligonucleotide
uuaaagaccaagcuuaagc

SEQ ID NO: 2725453 - RNA, 19 nt, Artificial Sequence
  Description of Artificial Sequence: Synthetic oligonucleotide
accaaggugacgcugaucc

SEQ ID NO: 2725454 - RNA, 19 nt, Artificial Sequence
  Description of Artificial Sequence: Synthetic oligonucleotide
aguuaauuaagcuggaggu

SEQ ID NO: 2725455 - RNA, 19 nt, Artificial Sequence
  Description of Artificial Sequence: Synthetic oligonucleotide
aaaauauccccaaggagac

SEQ ID NO: 2725456 - RNA, 19 nt, Artificial Sequence
  Description of Artificial Sequence: Synthetic oligonucleotide
uuuaaagaggcccacucug

SEQ ID NO: 2725457 - RNA, 19 nt, Artificial Sequence
  Description of Artificial Sequence: Synthetic oligonucleotide
uuaagcuggagguuuaaag

SEQ ID NO: 2725458 - RNA, 19 nt, Artificial Sequence
  Description of Artificial Sequence: Synthetic oligonucleotide
acagagaccaaggugacgc

SEQ ID NO: 2725459 - RNA, 19 nt, Artificial Sequence
  Description of Artificial Sequence: Synthetic oligonucleotide
aagaccaagcuuaagcagg

SEQ ID NO: 2725460 - RNA, 19 nt, Artificial Sequence
  Description of Artificial Sequence: Synthetic oligonucleotide
uuuggauugcaccagcgac

SEQ ID NO: 2725461 - RNA, 19 nt, Artificial Sequence
  Description of Artificial Sequence: Synthetic oligonucleotide
aaugugcagcgacacgccc

SEQ ID NO: 2725462 - RNA, 19 nt, Artificial Sequence
  Description of Artificial Sequence: Synthetic oligonucleotide
accacgaaugugcuggugc

SEQ ID NO: 2725463 - RNA, 19 nt, Artificial Sequence
  Description of Artificial Sequence: Synthetic oligonucleotide
uaggccaccacgaaugugc

SEQ ID NO: 2725464 - RNA, 19 nt, Artificial Sequence
  Description of Artificial Sequence: Synthetic oligonucleotide
aauauccccaaggagacca

SEQ ID NO: 2725465 - RNA, 19 nt, Artificial Sequence
  Description of Artificial Sequence: Synthetic oligonucleotide
uuccuggcgacuaaggcag

SEQ ID NO: 2725466 - RNA, 19 nt, Artificial Sequence
  Description of Artificial Sequence: Synthetic oligonucleotide
uaaagaggcccacucugcg

SEQ ID NO: 2725467 - RNA, 19 nt, Artificial Sequence
  Description of Artificial Sequence: Synthetic oligonucleotide
aaagaggcccacucugcgg

SEQ ID NO: 2725468 - RNA, 19 nt, Artificial Sequence
  Description of Artificial Sequence: Synthetic oligonucleotide
aaguaccugacaaggaagg

SEQ ID NO: 2725469 - RNA, 19 nt, Artificial Sequence
  Description of Artificial Sequence: Synthetic oligonucleotide
uaccugacaaggaagggca

SEQ ID NO: 2725470 - RNA, 19 nt, Artificial Sequence
  Description of Artificial Sequence: Synthetic oligonucleotide
uuaaagaggcccacucugc

SEQ ID NO: 2725471 - RNA, 19 nt, Artificial Sequence
  Description of Artificial Sequence: Synthetic oligonucleotide
uucucugugcuguugacac

SEQ ID NO: 2725472 - RNA, 19 nt, Artificial Sequence
  Description of Artificial Sequence: Synthetic oligonucleotide
gacucuuuaaagaccaagc

SEQ ID NO: 2725473 - RNA, 19 nt, Artificial Sequence
  Description of Artificial Sequence: Synthetic oligonucleotide
ugccauuuuggauugcacc

SEQ ID NO: 2725474 - RNA, 19 nt, Artificial Sequence
  Description of Artificial Sequence: Synthetic oligonucleotide
uaagcaggagugcagacau

SEQ ID NO: 2725475 - RNA, 19 nt, Artificial Sequence
  Description of Artificial Sequence: Synthetic oligonucleotide
uggagguuuaaagaggccc

SEQ ID NO: 2725476 - RNA, 19 nt, Artificial Sequence
  Description of Artificial Sequence: Synthetic oligonucleotide
uauucuuggaagaccuucu

SEQ ID NO: 2725477 - RNA, 19 nt, Artificial Sequence
  Description of Artificial Sequence: Synthetic oligonucleotide
uuaauuaagcuggagguuu

SEQ ID NO: 2725478 - RNA, 19 nt, Artificial Sequence
  Description of Artificial Sequence: Synthetic oligonucleotide
uuuuggauugcaccagcga

SEQ ID NO: 2725479 - RNA, 19 nt, Artificial Sequence
  Description of Artificial Sequence: Synthetic oligonucleotide
aaggcagucccugcgggcc

SEQ ID NO: 2725480 - RNA, 19 nt, Artificial Sequence
  Description of Artificial Sequence: Synthetic oligonucleotide
gaagaccuucuucagcugc

SEQ ID NO: 2725481 - RNA, 19 nt, Artificial Sequence
  Description of Artificial Sequence: Synthetic oligonucleotide
ucuguuggguuccuggcga

SEQ ID NO: 2725482 - RNA, 19 nt, Artificial Sequence
  Description of Artificial Sequence: Synthetic oligonucleotide
gaaguaccugacaaggaag

SEQ ID NO: 2725483 - RNA, 19 nt, Artificial Sequence
  Description of Artificial Sequence: Synthetic oligonucleotide
gacaugucgacgccacugg

SEQ ID NO: 2725484 - RNA, 19 nt, Artificial Sequence
  Description of Artificial Sequence: Synthetic oligonucleotide
gacuaaggcagucccugcg

SEQ ID NO: 2725485 - RNA, 19 nt, Artificial Sequence
  Description of Artificial Sequence: Synthetic oligonucleotide
acuaaggcagucccugcgg

SEQ ID NO: 2725486 - RNA, 19 nt, Artificial Sequence
  Description of Artificial Sequence: Synthetic oligonucleotide
uuggaagaccuucuucagc

SEQ ID NO: 2725487 - RNA, 19 nt, Artificial Sequence
  Description of Artificial Sequence: Synthetic oligonucleotide
aaauauccccaaggagacc

SEQ ID NO: 2725488 - RNA, 19 nt, Artificial Sequence
  Description of Artificial Sequence: Synthetic oligonucleotide
aagaggcccacucugcgga

SEQ ID NO: 2725489 - RNA, 19 nt, Artificial Sequence
  Description of Artificial Sequence: Synthetic oligonucleotide
uuggauugcaccagcgacu

SEQ ID NO: 2725490 - RNA, 19 nt, Artificial Sequence
  Description of Artificial Sequence: Synthetic oligonucleotide
uguugacacugccuccugg

SEQ ID NO: 2725491 - RNA, 19 nt, Artificial Sequence
  Description of Artificial Sequence: Synthetic oligonucleotide
gagaucccaaugugcagcg

SEQ ID NO: 2725492 - RNA, 19 nt, Artificial Sequence
  Description of Artificial Sequence: Synthetic oligonucleotide
gugacgcugauccucacag

SEQ ID NO: 2725493 - RNA, 19 nt, Artificial Sequence
  Description of Artificial Sequence: Synthetic oligonucleotide
cacaggugcaaacagcuug

SEQ ID NO: 2725494 - RNA, 19 nt, Artificial Sequence
  Description of Artificial Sequence: Synthetic oligonucleotide
uccucacaggugcaaacag

SEQ ID NO: 2725495 - RNA, 19 nt, Artificial Sequence
  Description of Artificial Sequence: Synthetic oligonucleotide
uuuaaagaccaagcuuaag

SEQ ID NO: 2725496 - RNA, 19 nt, Artificial Sequence
  Description of Artificial Sequence: Synthetic oligonucleotide
ggcucaguggcucuguugg

SEQ ID NO: 2725497 - RNA, 19 nt, Artificial Sequence
  Description of Artificial Sequence: Synthetic oligonucleotide
gaucccaaugugcagcgac

SEQ ID NO: 2725498 - RNA, 19 nt, Artificial Sequence
  Description of Artificial Sequence: Synthetic oligonucleotide
uuaagcaggagugcagaca

SEQ ID NO: 2725499 - RNA, 19 nt, Artificial Sequence
  Description of Artificial Sequence: Synthetic oligonucleotide
cuuggaagaccuucuucag

SEQ ID NO: 2725500 - RNA, 19 nt, Artificial Sequence
  Description of Artificial Sequence: Synthetic oligonucleotide
ugugauuugcuuagcuuuu

SEQ ID NO: 2725501 - RNA, 19 nt, Artificial Sequence
  Description of Artificial Sequence: Synthetic oligonucleotide
ugcggaaguaccugacaag

SEQ ID NO: 2725502 - RNA, 19 nt, Artificial Sequence
  Description of Artificial Sequence: Synthetic oligonucleotide
guugacacugccuccuggc

SEQ ID NO: 2725503 - RNA, 19 nt, Artificial Sequence
  Description of Artificial Sequence: Synthetic oligonucleotide
accaagcuuaagcaggagu

SEQ ID NO: 2725504 - RNA, 19 nt, Artificial Sequence
  Description of Artificial Sequence: Synthetic oligonucleotide
cauuuuggauugcaccagc

SEQ ID NO: 2725505 - RNA, 19 nt, Artificial Sequence
  Description of Artificial Sequence: Synthetic oligonucleotide
agccccguauucuuggaag

SEQ ID NO: 2725506 - RNA, 19 nt, Artificial Sequence
  Description of Artificial Sequence: Synthetic oligonucleotide
aagcuuaagcaggagugca

SEQ ID NO: 2725507 - RNA, 19 nt, Artificial Sequence
  Description of Artificial Sequence: Synthetic oligonucleotide
accagggagaucccaaugu

SEQ ID NO: 2725508 - RNA, 19 nt, Artificial Sequence
  Description of Artificial Sequence: Synthetic oligonucleotide
aaggaagggcacagagacc

SEQ ID NO: 2725509 - RNA, 19 nt, Artificial Sequence
  Description of Artificial Sequence: Synthetic oligonucleotide
auuuuggauugcaccagcg

SEQ ID NO: 2725510 - RNA, 19 nt, Artificial Sequence
  Description of Artificial Sequence: Synthetic oligonucleotide
gcugcugugauuugcuuag

SEQ ID NO: 2725511 - RNA, 19 nt, Artificial Sequence
  Description of Artificial Sequence: Synthetic oligonucleotide
cagggagaucccaaugugc

SEQ ID NO: 2725512 - RNA, 19 nt, Artificial Sequence
  Description of Artificial Sequence: Synthetic oligonucleotide
ccaagcuuaagcaggagug

SEQ ID NO: 2725513 - RNA, 19 nt, Artificial Sequence
  Description of Artificial Sequence: Synthetic oligonucleotide
ucugcggaaguaccugaca

SEQ ID NO: 2725514 - RNA, 19 nt, Artificial Sequence
  Description of Artificial Sequence: Synthetic oligonucleotide
guuccuggcgacuaaggca

SEQ ID NO: 2725515 - RNA, 19 nt, Artificial Sequence
  Description of Artificial Sequence: Synthetic oligonucleotide
uggcgacuaaggcaguccc

SEQ ID NO: 2725516 - RNA, 19 nt, Artificial Sequence
  Description of Artificial Sequence: Synthetic oligonucleotide
guaccugacaaggaagggc

SEQ ID NO: 2725517 - RNA, 19 nt, Artificial Sequence
  Description of Artificial Sequence: Synthetic oligonucleotide
uaauuaagcuggagguuua

SEQ ID NO: 2725518 - RNA, 19 nt, Artificial Sequence
  Description of Artificial Sequence: Synthetic oligonucleotide
aguaccugacaaggaaggg

SEQ ID NO: 2725519 - RNA, 19 nt, Artificial Sequence
  Description of Artificial Sequence: Synthetic oligonucleotide
acugccuccuggcucagug

SEQ ID NO: 2725520 - RNA, 19 nt, Artificial Sequence
  Description of Artificial Sequence: Synthetic oligonucleotide
gauccucacaggugcaaac

SEQ ID NO: 2725521 - RNA, 19 nt, Artificial Sequence
  Description of Artificial Sequence: Synthetic oligonucleotide
cucuguuggguuccuggcg

SEQ ID NO: 2725522 - RNA, 19 nt, Artificial Sequence
  Description of Artificial Sequence: Synthetic oligonucleotide
ugugcagcgacacgcccac

SEQ ID NO: 2725523 - RNA, 19 nt, Artificial Sequence
  Description of Artificial Sequence: Synthetic oligonucleotide
cuuaagcaggagugcagac

SEQ ID NO: 2725524 - RNA, 19 nt, Artificial Sequence
  Description of Artificial Sequence: Synthetic oligonucleotide
agcuggagguuuaaagagg

SEQ ID NO: 2725525 - RNA, 19 nt, Artificial Sequence
  Description of Artificial Sequence: Synthetic oligonucleotide
guauucuuggaagaccuuc

SEQ ID NO: 2725526 - RNA, 19 nt, Artificial Sequence
  Description of Artificial Sequence: Synthetic oligonucleotide
agcaggagugcagacaugu

SEQ ID NO: 2725527 - RNA, 19 nt, Artificial Sequence
  Description of Artificial Sequence: Synthetic oligonucleotide
agcgacucuuuaaagacca

SEQ ID NO: 2725528 - RNA, 19 nt, Artificial Sequence
  Description of Artificial Sequence: Synthetic oligonucleotide
acuggaaaccacuguguaa

SEQ ID NO: 2725529 - RNA, 19 nt, Artificial Sequence
  Description of Artificial Sequence: Synthetic oligonucleotide
agacaugucgacgccacug

SEQ ID NO: 2725530 - RNA, 19 nt, Artificial Sequence
  Description of Artificial Sequence: Synthetic oligonucleotide
gguuuaaagaggcccacuc

SEQ ID NO: 2725531 - RNA, 19 nt, Artificial Sequence
  Description of Artificial Sequence: Synthetic oligonucleotide
caaugugcagcgacacgcc

SEQ ID NO: 2725532 - RNA, 19 nt, Artificial Sequence
  Description of Artificial Sequence: Synthetic oligonucleotide
ugcaccagcgacucuuuaa

SEQ ID NO: 2725533 - RNA, 19 nt, Artificial Sequence
  Description of Artificial Sequence: Synthetic oligonucleotide
cugacaaggaagggcacag

SEQ ID NO: 2725534 - RNA, 19 nt, Artificial Sequence
  Description of Artificial Sequence: Synthetic oligonucleotide
cagcgacucuuuaaagacc

SEQ ID NO: 2725535 - RNA, 19 nt, Artificial Sequence
  Description of Artificial Sequence: Synthetic oligonucleotide
augucgacgccacuggaaa

SEQ ID NO: 2725536 - RNA, 19 nt, Artificial Sequence
  Description of Artificial Sequence: Synthetic oligonucleotide
ugacgcugauccucacagg

SEQ ID NO: 2725537 - RNA, 19 nt, Artificial Sequence
  Description of Artificial Sequence: Synthetic oligonucleotide
ccagcgacucuuuaaagac

SEQ ID NO: 2725538 - RNA, 19 nt, Artificial Sequence
  Description of Artificial Sequence: Synthetic oligonucleotide
cuggaaaccacuguguaaa

SEQ ID NO: 2725539 - RNA, 19 nt, Artificial Sequence
  Description of Artificial Sequence: Synthetic oligonucleotide
aacagcuuguggauggcau

SEQ ID NO: 2725540 - RNA, 19 nt, Artificial Sequence
  Description of Artificial Sequence: Synthetic oligonucleotide
gcggaaguaccugacaagg

SEQ ID NO: 2725541 - RNA, 19 nt, Artificial Sequence
  Description of Artificial Sequence: Synthetic oligonucleotide
agggagaucccaaugugca

SEQ ID NO: 2725542 - RNA, 19 nt, Artificial Sequence
  Description of Artificial Sequence: Synthetic oligonucleotide
uaaggcagucccugcgggc

SEQ ID NO: 2725543 - RNA, 19 nt, Artificial Sequence
  Description of Artificial Sequence: Synthetic oligonucleotide
ccaaugugcagcgacacgc

SEQ ID NO: 2725544 - RNA, 19 nt, Artificial Sequence
  Description of Artificial Sequence: Synthetic oligonucleotide
gccauuuuggauugcacca

SEQ ID NO: 2725545 - RNA, 19 nt, Artificial Sequence
  Description of Artificial Sequence: Synthetic oligonucleotide
gacgcugauccucacaggu

SEQ ID NO: 2725546 - RNA, 19 nt, Artificial Sequence
  Description of Artificial Sequence: Synthetic oligonucleotide
ggcucuguuggguuccugg

SEQ ID NO: 2725547 - RNA, 19 nt, Artificial Sequence
  Description of Artificial Sequence: Synthetic oligonucleotide
gaccagggagaucccaaug

SEQ ID NO: 2725548 - RNA, 19 nt, Artificial Sequence
  Description of Artificial Sequence: Synthetic oligonucleotide
ggaaguaccugacaaggaa

SEQ ID NO: 2725549 - RNA, 19 nt, Artificial Sequence
  Description of Artificial Sequence: Synthetic oligonucleotide
aauuaagcuggagguuuaa

SEQ ID NO: 2725550 - RNA, 19 nt, Artificial Sequence
  Description of Artificial Sequence: Synthetic oligonucleotide
cagcgacacgcccacagcc

SEQ ID NO: 2725551 - RNA, 19 nt, Artificial Sequence
  Description of Artificial Sequence: Synthetic oligonucleotide
agcgacacgcccacagccc

SEQ ID NO: 2725552 - RNA, 19 nt, Artificial Sequence
  Description of Artificial Sequence: Synthetic oligonucleotide
gcauaggccaccacgaaug

SEQ ID NO: 2725553 - RNA, 19 nt, Artificial Sequence
  Description of Artificial Sequence: Synthetic oligonucleotide
ugugcagcagccggggugu

SEQ ID NO: 2725554 - RNA, 19 nt, Artificial Sequence
  Description of Artificial Sequence: Synthetic oligonucleotide
caaggugacgcugauccuc

SEQ ID NO: 2725555 - RNA, 19 nt, Artificial Sequence
  Description of Artificial Sequence: Synthetic oligonucleotide
aggagugcagacaugucga

SEQ ID NO: 2725556 - RNA, 19 nt, Artificial Sequence
  Description of Artificial Sequence: Synthetic oligonucleotide
uggauugcaccagcgacuc

SEQ ID NO: 2725557 - RNA, 19 nt, Artificial Sequence
  Description of Artificial Sequence: Synthetic oligonucleotide
ggagaucccaaugugcagc

SEQ ID NO: 2725558 - RNA, 19 nt, Artificial Sequence
  Description of Artificial Sequence: Synthetic oligonucleotide
gucgacgccacuggaaacc

SEQ ID NO: 2725559 - RNA, 19 nt, Artificial Sequence
  Description of Artificial Sequence: Synthetic oligonucleotide
gguuccuggcgacuaaggc

SEQ ID NO: 2725560 - RNA, 19 nt, Artificial Sequence
  Description of Artificial Sequence: Synthetic oligonucleotide
cuuuaaagaccaagcuuaa

SEQ ID NO: 2725561 - RNA, 19 nt, Artificial Sequence
  Description of Artificial Sequence: Synthetic oligonucleotide
aaggugacgcugauccuca

SEQ ID NO: 2725562 - RNA, 19 nt, Artificial Sequence
  Description of Artificial Sequence: Synthetic oligonucleotide
auccccaaggagaccaggg

SEQ ID NO: 2725563 - RNA, 19 nt, Artificial Sequence
  Description of Artificial Sequence: Synthetic oligonucleotide
acgaaugugcuggugccug

SEQ ID NO: 2725564 - RNA, 19 nt, Artificial Sequence
  Description of Artificial Sequence: Synthetic oligonucleotide
guuuaaagaggcccacucu

SEQ ID NO: 2725565 - RNA, 19 nt, Artificial Sequence
  Description of Artificial Sequence: Synthetic oligonucleotide
gugugcagcagccggggug

SEQ ID NO: 2725566 - RNA, 19 nt, Artificial Sequence
  Description of Artificial Sequence: Synthetic oligonucleotide
acucugcggaaguaccuga

SEQ ID NO: 2725567 - RNA, 19 nt, Artificial Sequence
  Description of Artificial Sequence: Synthetic oligonucleotide
uucccgccgggccaagcag

SEQ ID NO: 2725568 - RNA, 19 nt, Artificial Sequence
  Description of Artificial Sequence: Synthetic oligonucleotide
gagguuuaaagaggcccac

SEQ ID NO: 2725569 - RNA, 19 nt, Artificial Sequence
  Description of Artificial Sequence: Synthetic oligonucleotide
agcuuaagcaggagugcag

SEQ ID NO: 2725570 - RNA, 19 nt, Artificial Sequence
  Description of Artificial Sequence: Synthetic oligonucleotide
agagaccaaggugacgcug

SEQ ID NO: 2725571 - RNA, 19 nt, Artificial Sequence
  Description of Artificial Sequence: Synthetic oligonucleotide
caccagcgacucuuuaaag

SEQ ID NO: 2725572 - RNA, 19 nt, Artificial Sequence
  Description of Artificial Sequence: Synthetic oligonucleotide
ugucgacgccacuggaaac

SEQ ID NO: 2725573 - RNA, 19 nt, Artificial Sequence
  Description of Artificial Sequence: Synthetic oligonucleotide
acaggugcaaacagcuugu

SEQ ID NO: 2725574 - RNA, 19 nt, Artificial Sequence
  Description of Artificial Sequence: Synthetic oligonucleotide
ugcagacaugucgacgcca

SEQ ID NO: 2725575 - RNA, 19 nt, Artificial Sequence
  Description of Artificial Sequence: Synthetic oligonucleotide
aaggcccagugcccugaag

SEQ ID NO: 2725576 - RNA, 19 nt, Artificial Sequence
  Description of Artificial Sequence: Synthetic oligonucleotide
ucccaaugugcagcgacac

SEQ ID NO: 2725577 - RNA, 19 nt, Artificial Sequence
  Description of Artificial Sequence: Synthetic oligonucleotide
cucugcggaaguaccugac

SEQ ID NO: 2725578 - RNA, 19 nt, Artificial Sequence
  Description of Artificial Sequence: Synthetic oligonucleotide
auccucacaggugcaaaca

SEQ ID NO: 2725579 - RNA, 19 nt, Artificial Sequence
  Description of Artificial Sequence: Synthetic oligonucleotide
cuggcgacuaaggcagucc

SEQ ID NO: 2725580 - RNA, 19 nt, Artificial Sequence
  Description of Artificial Sequence: Synthetic oligonucleotide
ggguguccggcccugggcg

SEQ ID NO: 2725581 - RNA, 19 nt, Artificial Sequence
  Description of Artificial Sequence: Synthetic oligonucleotide
ugauccucacaggugcaaa

SEQ ID NO: 2725582 - RNA, 19 nt, Artificial Sequence
  Description of Artificial Sequence: Synthetic oligonucleotide
acaugucgacgccacugga

SEQ ID NO: 2725583 - RNA, 19 nt, Artificial Sequence
  Description of Artificial Sequence: Synthetic oligonucleotide
auuaagcuggagguuuaaa

SEQ ID NO: 2725584 - RNA, 19 nt, Artificial Sequence
  Description of Artificial Sequence: Synthetic oligonucleotide
cugcugccauuuuggauug

SEQ ID NO: 2725585 - RNA, 19 nt, Artificial Sequence
  Description of Artificial Sequence: Synthetic oligonucleotide
agaccaagcuuaagcagga

SEQ ID NO: 2725586 - RNA, 19 nt, Artificial Sequence
  Description of Artificial Sequence: Synthetic oligonucleotide
cacagagaccaaggugacg

SEQ ID NO: 2725587 - RNA, 19 nt, Artificial Sequence
  Description of Artificial Sequence: Synthetic oligonucleotide
cugcggaaguaccugacaa

SEQ ID NO: 2725588 - RNA, 19 nt, Artificial Sequence
  Description of Artificial Sequence: Synthetic oligonucleotide
acaggaggugguggcuccc

SEQ ID NO: 2725589 - RNA, 19 nt, Artificial Sequence
  Description of Artificial Sequence: Synthetic oligonucleotide
ggcgggacaaggccaaggc

SEQ ID NO: 2725590 - RNA, 19 nt, Artificial Sequence
  Description of Artificial Sequence: Synthetic oligonucleotide
ccucacaggugcaaacagc

SEQ ID NO: 2725591 - RNA, 19 nt, Artificial Sequence
  Description of Artificial Sequence: Synthetic oligonucleotide
ugccugcugccauuuugga

SEQ ID NO: 2725592 - RNA, 19 nt, Artificial Sequence
  Description of Artificial Sequence: Synthetic oligonucleotide
ggagguuuaaagaggccca

SEQ ID NO: 2725593 - RNA, 19 nt, Artificial Sequence
  Description of Artificial Sequence: Synthetic oligonucleotide
cacucugcggaaguaccug

SEQ ID NO: 2725594 - RNA, 19 nt, Artificial Sequence
  Description of Artificial Sequence: Synthetic oligonucleotide
agguuuaaagaggcccacu

SEQ ID NO: 2725595 - RNA, 19 nt, Artificial Sequence
  Description of Artificial Sequence: Synthetic oligonucleotide
caugucgacgccacuggaa

SEQ ID NO: 2725596 - RNA, 19 nt, Artificial Sequence
  Description of Artificial Sequence: Synthetic oligonucleotide
gggagaucccaaugugcag

SEQ ID NO: 2725597 - RNA, 19 nt, Artificial Sequence
  Description of Artificial Sequence: Synthetic oligonucleotide
ccacgaaugugcuggugcc

SEQ ID NO: 2725598 - RNA, 19 nt, Artificial Sequence
  Description of Artificial Sequence: Synthetic oligonucleotide
aggccaaggcccagugccc

SEQ ID NO: 2725599 - RNA, 19 nt, Artificial Sequence
  Description of Artificial Sequence: Synthetic oligonucleotide
ucgacgccacuggaaacca

SEQ ID NO: 2725600 - RNA, 19 nt, Artificial Sequence
  Description of Artificial Sequence: Synthetic oligonucleotide
ugacaaggaagggcacaga

SEQ ID NO: 2725601 - RNA, 19 nt, Artificial Sequence
  Description of Artificial Sequence: Synthetic oligonucleotide
aggcagucccugcgggccg

SEQ ID NO: 2725602 - RNA, 19 nt, Artificial Sequence
  Description of Artificial Sequence: Synthetic oligonucleotide
uggauggcauaggccacca

SEQ ID NO: 2725603 - RNA, 19 nt, Artificial Sequence
  Description of Artificial Sequence: Synthetic oligonucleotide
auaggccaccacgaaugug

SEQ ID NO: 2725604 - RNA, 19 nt, Artificial Sequence
  Description of Artificial Sequence: Synthetic oligonucleotide
agucccugcgggccgugug

SEQ ID NO: 2725605 - RNA, 19 nt, Artificial Sequence
  Description of Artificial Sequence: Synthetic oligonucleotide
cgcugauccucacaggugc

SEQ ID NO: 2725606 - RNA, 19 nt, Artificial Sequence
  Description of Artificial Sequence: Synthetic oligonucleotide
gaccaagcuuaagcaggag

SEQ ID NO: 2725607 - RNA, 19 nt, Artificial Sequence
  Description of Artificial Sequence: Synthetic oligonucleotide
aggugacgcugauccucac

SEQ ID NO: 2725608 - RNA, 19 nt, Artificial Sequence
  Description of Artificial Sequence: Synthetic oligonucleotide
accugacaaggaagggcac

SEQ ID NO: 2725609 - RNA, 19 nt, Artificial Sequence
  Description of Artificial Sequence: Synthetic oligonucleotide
gugguggcucccaggagcc

SEQ ID NO: 2725610 - RNA, 19 nt, Artificial Sequence
  Description of Artificial Sequence: Synthetic oligonucleotide
cccacucugcggaaguacc

SEQ ID NO: 2725611 - RNA, 19 nt, Artificial Sequence
  Description of Artificial Sequence: Synthetic oligonucleotide
guuaauuaagcuggagguu

SEQ ID NO: 2725612 - RNA, 19 nt, Artificial Sequence
  Description of Artificial Sequence: Synthetic oligonucleotide
aggggcccggagccguagc

SEQ ID NO: 2725613 - RNA, 19 nt, Artificial Sequence
  Description of Artificial Sequence: Synthetic oligonucleotide
uguuggguuccuggcgacu

SEQ ID NO: 2725614 - RNA, 19 nt, Artificial Sequence
  Description of Artificial Sequence: Synthetic oligonucleotide
agcagccgggguguccggc

SEQ ID NO: 2725615 - RNA, 19 nt, Artificial Sequence
  Description of Artificial Sequence: Synthetic oligonucleotide
ggaagaccuucuucagcug

SEQ ID NO: 2725616 - RNA, 19 nt, Artificial Sequence
  Description of Artificial Sequence: Synthetic oligonucleotide
gucccugcgggccgugugc

SEQ ID NO: 2725617 - RNA, 19 nt, Artificial Sequence
  Description of Artificial Sequence: Synthetic oligonucleotide
augugcagcgacacgccca

SEQ ID NO: 2725618 - RNA, 19 nt, Artificial Sequence
  Description of Artificial Sequence: Synthetic oligonucleotide
aucccaaugugcagcgaca

SEQ ID NO: 2725619 - RNA, 19 nt, Artificial Sequence
  Description of Artificial Sequence: Synthetic oligonucleotide
acagccccguauucuugga

SEQ ID NO: 2725620 - RNA, 19 nt, Artificial Sequence
  Description of Artificial Sequence: Synthetic oligonucleotide
gacgccacuggaaaccacu

SEQ ID NO: 2725621 - RNA, 19 nt, Artificial Sequence
  Description of Artificial Sequence: Synthetic oligonucleotide
cuguugacacugccuccug

SEQ ID NO: 2725622 - RNA, 19 nt, Artificial Sequence
  Description of Artificial Sequence: Synthetic oligonucleotide
aggcccacucugcggaagu

SEQ ID NO: 2725623 - RNA, 19 nt, Artificial Sequence
  Description of Artificial Sequence: Synthetic oligonucleotide
ccagggagaucccaaugug

SEQ ID NO: 2725624 - RNA, 19 nt, Artificial Sequence
  Description of Artificial Sequence: Synthetic oligonucleotide
agaccaaggugacgcugau

SEQ ID NO: 2725625 - RNA, 19 nt, Artificial Sequence
  Description of Artificial Sequence: Synthetic oligonucleotide
gcuuaagcaggagugcaga

SEQ ID NO: 2725626 - RNA, 19 nt, Artificial Sequence
  Description of Artificial Sequence: Synthetic oligonucleotide
gcagcagccgggguguccg

SEQ ID NO: 2725627 - RNA, 19 nt, Artificial Sequence
  Description of Artificial Sequence: Synthetic oligonucleotide
cauggcgcggcgcgagcgc

SEQ ID NO: 2725628 - RNA, 19 nt, Artificial Sequence
  Description of Artificial Sequence: Synthetic oligonucleotide
uagccgggcgcccacucuu

SEQ ID NO: 2725629 - RNA, 19 nt, Artificial Sequence
  Description of Artificial Sequence: Synthetic oligonucleotide
gaggcccacucugcggaag

SEQ ID NO: 2725630 - RNA, 19 nt, Artificial Sequence
  Description of Artificial Sequence: Synthetic oligonucleotide
auauccccaaggagaccag

SEQ ID NO: 2725631 - RNA, 19 nt, Artificial Sequence
  Description of Artificial Sequence: Synthetic oligonucleotide
cccguauucuuggaagacc

SEQ ID NO: 2725632 - RNA, 19 nt, Artificial Sequence
  Description of Artificial Sequence: Synthetic oligonucleotide
ggcccggagccguagccgg

SEQ ID NO: 2725633 - RNA, 19 nt, Artificial Sequence
  Description of Artificial Sequence: Synthetic oligonucleotide
acgcugauccucacaggug

SEQ ID NO: 2725634 - RNA, 19 nt, Artificial Sequence
  Description of Artificial Sequence: Synthetic oligonucleotide
gugcaaacagcuuguggau

SEQ ID NO: 2725635 - RNA, 19 nt, Artificial Sequence
  Description of Artificial Sequence: Synthetic oligonucleotide
uugcaccagcgacucuuua

SEQ ID NO: 2725636 - RNA, 19 nt, Artificial Sequence
  Description of Artificial Sequence: Synthetic oligonucleotide
ggguuccuggcgacuaagg

SEQ ID NO: 2725637 - RNA, 19 nt, Artificial Sequence
  Description of Artificial Sequence: Synthetic oligonucleotide
cacucuucccgccgggcca

SEQ ID NO: 2725638 - RNA, 19 nt, Artificial Sequence
  Description of Artificial Sequence: Synthetic oligonucleotide
acgcccacagccccguauu

SEQ ID NO: 2725639 - RNA, 19 nt, Artificial Sequence
  Description of Artificial Sequence: Synthetic oligonucleotide
cgacucuuuaaagaccaag

SEQ ID NO: 2725640 - RNA, 19 nt, Artificial Sequence
  Description of Artificial Sequence: Synthetic oligonucleotide
gguguccggcccugggcgg

SEQ ID NO: 2725641 - RNA, 19 nt, Artificial Sequence
  Description of Artificial Sequence: Synthetic oligonucleotide
cccaaugugcagcgacacg

SEQ ID NO: 2725642 - RNA, 19 nt, Artificial Sequence
  Description of Artificial Sequence: Synthetic oligonucleotide
acgccacuggaaaccacug

SEQ ID NO: 2725643 - RNA, 19 nt, Artificial Sequence
  Description of Artificial Sequence: Synthetic oligonucleotide
gcgggacaaggccaaggcc

SEQ ID NO: 2725644 - RNA, 19 nt, Artificial Sequence
  Description of Artificial Sequence: Synthetic oligonucleotide
ggugacgcugauccucaca

SEQ ID NO: 2725645 - RNA, 19 nt, Artificial Sequence
  Description of Artificial Sequence: Synthetic oligonucleotide
cuucccgccgggccaagca

SEQ ID NO: 2725646 - RNA, 19 nt, Artificial Sequence
  Description of Artificial Sequence: Synthetic oligonucleotide
gcagacaugucgacgccac

SEQ ID NO: 2725647 - RNA, 19 nt, Artificial Sequence
  Description of Artificial Sequence: Synthetic oligonucleotide
guuggguuccuggcgacua

SEQ ID NO: 2725648 - RNA, 19 nt, Artificial Sequence
  Description of Artificial Sequence: Synthetic oligonucleotide
gcgacacgcccacagcccc

SEQ ID NO: 2725649 - RNA, 19 nt, Artificial Sequence
  Description of Artificial Sequence: Synthetic oligonucleotide
ggagccguagccgggcgcc

SEQ ID NO: 2725650 - RNA, 19 nt, Artificial Sequence
  Description of Artificial Sequence: Synthetic oligonucleotide
ggcccagugcccugaagca

SEQ ID NO: 2725651 - RNA, 19 nt, Artificial Sequence
  Description of Artificial Sequence: Synthetic oligonucleotide
agccauggcgcggcgcgag

SEQ ID NO: 2725652 - RNA, 19 nt, Artificial Sequence
  Description of Artificial Sequence: Synthetic oligonucleotide
caggugcaaacagcuugug

SEQ ID NO: 2725653 - RNA, 19 nt, Artificial Sequence
  Description of Artificial Sequence: Synthetic oligonucleotide
gaaugugcuggugccugcu

SEQ ID NO: 2725654 - RNA, 19 nt, Artificial Sequence
  Description of Artificial Sequence: Synthetic oligonucleotide
ucuucccgccgggccaagc

SEQ ID NO: 2725655 - RNA, 19 nt, Artificial Sequence
  Description of Artificial Sequence: Synthetic oligonucleotide
gggguguccggcccugggc

SEQ ID NO: 2725656 - RNA, 19 nt, Artificial Sequence
  Description of Artificial Sequence: Synthetic oligonucleotide
uccuggcgacuaaggcagu

SEQ ID NO: 2725657 - RNA, 19 nt, Artificial Sequence
  Description of Artificial Sequence: Synthetic oligonucleotide
ccguauucuuggaagaccu

SEQ ID NO: 2725658 - RNA, 19 nt, Artificial Sequence
  Description of Artificial Sequence: Synthetic oligonucleotide
ucccugcgggccgugugca

SEQ ID NO: 2725659 - RNA, 19 nt, Artificial Sequence
  Description of Artificial Sequence: Synthetic oligonucleotide
gccccguauucuuggaaga

SEQ ID NO: 2725660 - RNA, 19 nt, Artificial Sequence
  Description of Artificial Sequence: Synthetic oligonucleotide
agaucccaaugugcagcga

SEQ ID NO: 2725661 - RNA, 19 nt, Artificial Sequence
  Description of Artificial Sequence: Synthetic oligonucleotide
cccagugcccugaagcaca

SEQ ID NO: 2725662 - RNA, 19 nt, Artificial Sequence
  Description of Artificial Sequence: Synthetic oligonucleotide
gggcgggacaaggccaagg

SEQ ID NO: 2725663 - RNA, 19 nt, Artificial Sequence
  Description of Artificial Sequence: Synthetic oligonucleotide
gacaaggccaaggcccagu

SEQ ID NO: 2725664 - RNA, 19 nt, Artificial Sequence
  Description of Artificial Sequence: Synthetic oligonucleotide
cauaggccaccacgaaugu

SEQ ID NO: 2725665 - RNA, 19 nt, Artificial Sequence
  Description of Artificial Sequence: Synthetic oligonucleotide
caccacgaaugugcuggug

SEQ ID NO: 2725666 - RNA, 19 nt, Artificial Sequence
  Description of Artificial Sequence: Synthetic oligonucleotide
cagcccagccauggcgcgg

SEQ ID NO: 2725667 - RNA, 19 nt, Artificial Sequence
  Description of Artificial Sequence: Synthetic oligonucleotide
aggccaccacgaaugugcu

SEQ ID NO: 2725668 - RNA, 19 nt, Artificial Sequence
  Description of Artificial Sequence: Synthetic oligonucleotide
uggcgcggcgcgagcgcug

SEQ ID NO: 2725669 - RNA, 19 nt, Artificial Sequence
  Description of Artificial Sequence: Synthetic oligonucleotide
cugaagcacaggagguggu

SEQ ID NO: 2725670 - RNA, 19 nt, Artificial Sequence
  Description of Artificial Sequence: Synthetic oligonucleotide
ggggcccggagccguagcc

SEQ ID NO: 2725671 - RNA, 19 nt, Artificial Sequence
  Description of Artificial Sequence: Synthetic oligonucleotide
cugcgggccgugugcagca

SEQ ID NO: 2725672 - RNA, 19 nt, Artificial Sequence
  Description of Artificial Sequence: Synthetic oligonucleotide
ugggcgggacaaggccaag

SEQ ID NO: 2725673 - RNA, 19 nt, Artificial Sequence
  Description of Artificial Sequence: Synthetic oligonucleotide
ccagugcccugaagcacag

SEQ ID NO: 2725674 - RNA, 19 nt, Artificial Sequence
  Description of Artificial Sequence: Synthetic oligonucleotide
uggcucuguuggguuccug

SEQ ID NO: 2725675 - RNA, 19 nt, Artificial Sequence
  Description of Artificial Sequence: Synthetic oligonucleotide
gcgcccacucuucccgccg

SEQ ID NO: 2725676 - RNA, 19 nt, Artificial Sequence
  Description of Artificial Sequence: Synthetic oligonucleotide
ggcauaggccaccacgaau

SEQ ID NO: 2725677 - RNA, 19 nt, Artificial Sequence
  Description of Artificial Sequence: Synthetic oligonucleotide
gggcccggagccguagccg

SEQ ID NO: 2725678 - RNA, 19 nt, Artificial Sequence
  Description of Artificial Sequence: Synthetic oligonucleotide
cgacuaaggcagucccugc

SEQ ID NO: 2725679 - RNA, 19 nt, Artificial Sequence
  Description of Artificial Sequence: Synthetic oligonucleotide
cccugaagcacaggaggug

SEQ ID NO: 2725680 - RNA, 19 nt, Artificial Sequence
  Description of Artificial Sequence: Synthetic oligonucleotide
gcuguugacacugccuccu

SEQ ID NO: 2725681 - RNA, 19 nt, Artificial Sequence
  Description of Artificial Sequence: Synthetic oligonucleotide
acucuucccgccgggccaa

SEQ ID NO: 2725682 - RNA, 19 nt, Artificial Sequence
  Description of Artificial Sequence: Synthetic oligonucleotide
ccugggcgggacaaggcca

SEQ ID NO: 2725683 - RNA, 19 nt, Artificial Sequence
  Description of Artificial Sequence: Synthetic oligonucleotide
ccacagccccguauucuug

SEQ ID NO: 2725684 - RNA, 19 nt, Artificial Sequence
  Description of Artificial Sequence: Synthetic oligonucleotide
cagcagccgggguguccgg

SEQ ID NO: 2725685 - RNA, 19 nt, Artificial Sequence
  Description of Artificial Sequence: Synthetic oligonucleotide
ccccguauucuuggaagac

SEQ ID NO: 2725686 - RNA, 19 nt, Artificial Sequence
  Description of Artificial Sequence: Synthetic oligonucleotide
auggcgcggcgcgagcgcu

SEQ ID NO: 2725687 - RNA, 19 nt, Artificial Sequence
  Description of Artificial Sequence: Synthetic oligonucleotide
agccgggguguccggcccu

SEQ ID NO: 2725688 - RNA, 19 nt, Artificial Sequence
  Description of Artificial Sequence: Synthetic oligonucleotide
ugcgggccgugugcagcag

SEQ ID NO: 2725689 - RNA, 19 nt, Artificial Sequence
  Description of Artificial Sequence: Synthetic oligonucleotide
ccugacaaggaagggcaca

SEQ ID NO: 2725690 - RNA, 19 nt, Artificial Sequence
  Description of Artificial Sequence: Synthetic oligonucleotide
ggcgcccacucuucccgcc

SEQ ID NO: 2725691 - RNA, 19 nt, Artificial Sequence
  Description of Artificial Sequence: Synthetic oligonucleotide
cagccccguauucuuggaa

SEQ ID NO: 2725692 - RNA, 19 nt, Artificial Sequence
  Description of Artificial Sequence: Synthetic oligonucleotide
cgggcgcccacucuucccg

SEQ ID NO: 2725693 - RNA, 19 nt, Artificial Sequence
  Description of Artificial Sequence: Synthetic oligonucleotide
gagccguagccgggcgccc

SEQ ID NO: 2725694 - RNA, 19 nt, Artificial Sequence
  Description of Artificial Sequence: Synthetic oligonucleotide
uguccggcccugggcggga

SEQ ID NO: 2725695 - RNA, 19 nt, Artificial Sequence
  Description of Artificial Sequence: Synthetic oligonucleotide
gcccacucugcggaaguac

SEQ ID NO: 2725696 - RNA, 19 nt, Artificial Sequence
  Description of Artificial Sequence: Synthetic oligonucleotide
cgggccgugugcagcagcc

SEQ ID NO: 2725697 - RNA, 19 nt, Artificial Sequence
  Description of Artificial Sequence: Synthetic oligonucleotide
cccgccgggccaagcagcc

SEQ ID NO: 2725698 - RNA, 19 nt, Artificial Sequence
  Description of Artificial Sequence: Synthetic oligonucleotide
gcggcgcgagcgcugcucc

SEQ ID NO: 2725699 - RNA, 19 nt, Artificial Sequence
  Description of Artificial Sequence: Synthetic oligonucleotide
cagagaccaaggugacgcu

SEQ ID NO: 2725700 - RNA, 19 nt, Artificial Sequence
  Description of Artificial Sequence: Synthetic oligonucleotide
cgccgggccaagcagcccc

SEQ ID NO: 2725701 - RNA, 19 nt, Artificial Sequence
  Description of Artificial Sequence: Synthetic oligonucleotide
ggacaaggccaaggcccag

SEQ ID NO: 2725702 - RNA, 19 nt, Artificial Sequence
  Description of Artificial Sequence: Synthetic oligonucleotide
guagccgggcgcccacucu

SEQ ID NO: 2725703 - RNA, 19 nt, Artificial Sequence
  Description of Artificial Sequence: Synthetic oligonucleotide
agccguagccgggcgccca

SEQ ID NO: 2725704 - RNA, 19 nt, Artificial Sequence
  Description of Artificial Sequence: Synthetic oligonucleotide
gcccagugcccugaagcac

SEQ ID NO: 2725705 - RNA, 19 nt, Artificial Sequence
  Description of Artificial Sequence: Synthetic oligonucleotide
caggaggugguggcuccca

SEQ ID NO: 2725706 - RNA, 19 nt, Artificial Sequence
  Description of Artificial Sequence: Synthetic oligonucleotide
cgacacgcccacagccccg

SEQ ID NO: 2725707 - RNA, 19 nt, Artificial Sequence
  Description of Artificial Sequence: Synthetic oligonucleotide
ccuggcgacuaaggcaguc

SEQ ID NO: 2725708 - RNA, 19 nt, Artificial Sequence
  Description of Artificial Sequence: Synthetic oligonucleotide
gggcgcccacucuucccgc

SEQ ID NO: 2725709 - RNA, 19 nt, Artificial Sequence
  Description of Artificial Sequence: Synthetic oligonucleotide
gccgggcgcccacucuucc

SEQ ID NO: 2725710 - RNA, 19 nt, Artificial Sequence
  Description of Artificial Sequence: Synthetic oligonucleotide
gcgggccgugugcagcagc

SEQ ID NO: 2725711 - RNA, 19 nt, Artificial Sequence
  Description of Artificial Sequence: Synthetic oligonucleotide
cagacaugucgacgccacu

SEQ ID NO: 2725712 - RNA, 19 nt, Artificial Sequence
  Description of Artificial Sequence: Synthetic oligonucleotide
ccaggagcccaggggcccg

SEQ ID NO: 2725713 - RNA, 19 nt, Artificial Sequence
  Description of Artificial Sequence: Synthetic oligonucleotide
gccugcugccauuuuggau

SEQ ID NO: 2725714 - RNA, 19 nt, Artificial Sequence
  Description of Artificial Sequence: Synthetic oligonucleotide
gccauggcgcggcgcgagc

SEQ ID NO: 2725715 - RNA, 19 nt, Artificial Sequence
  Description of Artificial Sequence: Synthetic oligonucleotide
cccacucuucccgccgggc

SEQ ID NO: 2725716 - RNA, 19 nt, Artificial Sequence
  Description of Artificial Sequence: Synthetic oligonucleotide
ccggagccguagccgggcg

SEQ ID NO: 2725717 - RNA, 19 nt, Artificial Sequence
  Description of Artificial Sequence: Synthetic oligonucleotide
gcccugaagcacaggaggu

SEQ ID NO: 2725718 - RNA, 19 nt, Artificial Sequence
  Description of Artificial Sequence: Synthetic oligonucleotide
ggcgcggcgcgagcgcugc

SEQ ID NO: 2725719 - RNA, 19 nt, Artificial Sequence
  Description of Artificial Sequence: Synthetic oligonucleotide
cacgcccacagccccguau

SEQ ID NO: 2725720 - RNA, 19 nt, Artificial Sequence
  Description of Artificial Sequence: Synthetic oligonucleotide
cucuucccgccgggccaag

SEQ ID NO: 2725721 - RNA, 19 nt, Artificial Sequence
  Description of Artificial Sequence: Synthetic oligonucleotide
gccguagccgggcgcccac

SEQ ID NO: 2725722 - RNA, 19 nt, Artificial Sequence
  Description of Artificial Sequence: Synthetic oligonucleotide
gcccggagccguagccggg

SEQ ID NO: 2725723 - RNA, 19 nt, Artificial Sequence
  Description of Artificial Sequence: Synthetic oligonucleotide
ggcgacuaaggcagucccu

SEQ ID NO: 2725724 - RNA, 19 nt, Artificial Sequence
  Description of Artificial Sequence: Synthetic oligonucleotide
cgggguguccggcccuggg

SEQ ID NO: 2725725 - RNA, 19 nt, Artificial Sequence
  Description of Artificial Sequence: Synthetic oligonucleotide
ccaaggcccagugcccuga

SEQ ID NO: 2725726 - RNA, 19 nt, Artificial Sequence
  Description of Artificial Sequence: Synthetic oligonucleotide
cgacgccacuggaaaccac

SEQ ID NO: 2725727 - RNA, 19 nt, Artificial Sequence
  Description of Artificial Sequence: Synthetic oligonucleotide
cccugcgggccgugugcag

SEQ ID NO: 2725728 - RNA, 19 nt, Artificial Sequence
  Description of Artificial Sequence: Synthetic oligonucleotide
cggagccguagccgggcgc

SEQ ID NO: 2725729 - RNA, 19 nt, Artificial Sequence
  Description of Artificial Sequence: Synthetic oligonucleotide
cguagccgggcgcccacuc

SEQ ID NO: 2725730 - RNA, 19 nt, Artificial Sequence
  Description of Artificial Sequence: Synthetic oligonucleotide
cccagccauggcgcggcgc

SEQ ID NO: 2725731 - RNA, 19 nt, Artificial Sequence
  Description of Artificial Sequence: Synthetic oligonucleotide
ggauugcaccagcgacucu

SEQ ID NO: 2725732 - RNA, 19 nt, Artificial Sequence
  Description of Artificial Sequence: Synthetic oligonucleotide
gcccaggggcccggagccg

SEQ ID NO: 2725733 - RNA, 19 nt, Artificial Sequence
  Description of Artificial Sequence: Synthetic oligonucleotide
ccaaggugacgcugauccu

SEQ ID NO: 2725734 - RNA, 19 nt, Artificial Sequence
  Description of Artificial Sequence: Synthetic oligonucleotide
guggcucuguuggguuccu

SEQ ID NO: 2725735 - RNA, 19 nt, Artificial Sequence
  Description of Artificial Sequence: Synthetic oligonucleotide
gccgggguguccggcccug

SEQ ID NO: 2725736 - RNA, 19 nt, Artificial Sequence
  Description of Artificial Sequence: Synthetic oligonucleotide
gugcagcgacacgcccaca

SEQ ID NO: 2725737 - RNA, 19 nt, Artificial Sequence
  Description of Artificial Sequence: Synthetic oligonucleotide
guccggcccugggcgggac

SEQ ID NO: 2725738 - RNA, 19 nt, Artificial Sequence
  Description of Artificial Sequence: Synthetic oligonucleotide
gcagucccugcgggccgug

SEQ ID NO: 2725739 - RNA, 19 nt, Artificial Sequence
  Description of Artificial Sequence: Synthetic oligonucleotide
gccgggccaagcagcccca

SEQ ID NO: 2725740 - RNA, 19 nt, Artificial Sequence
  Description of Artificial Sequence: Synthetic oligonucleotide
ccgggccaagcagccccag

SEQ ID NO: 2725741 - RNA, 19 nt, Artificial Sequence
  Description of Artificial Sequence: Synthetic oligonucleotide
ccaccacgaaugugcuggu

SEQ ID NO: 2725742 - RNA, 19 nt, Artificial Sequence
  Description of Artificial Sequence: Synthetic oligonucleotide
ccgccgggccaagcagccc

SEQ ID NO: 2725743 - RNA, 19 nt, Artificial Sequence
  Description of Artificial Sequence: Synthetic oligonucleotide
ggcagucccugcgggccgu

SEQ ID NO: 2725744 - RNA, 19 nt, Artificial Sequence
  Description of Artificial Sequence: Synthetic oligonucleotide
cagucccugcgggccgugu

SEQ ID NO: 2725745 - RNA, 19 nt, Artificial Sequence
  Description of Artificial Sequence: Synthetic oligonucleotide
cacugccuccuggcucagu

SEQ ID NO: 2725746 - RNA, 19 nt, Artificial Sequence
  Description of Artificial Sequence: Synthetic oligonucleotide
cccaggggcccggagccgu

SEQ ID NO: 2725747 - RNA, 19 nt, Artificial Sequence
  Description of Artificial Sequence: Synthetic oligonucleotide
cggcccugggcgggacaag

SEQ ID NO: 2725748 - RNA, 19 nt, Artificial Sequence
  Description of Artificial Sequence: Synthetic oligonucleotide
ccguagccgggcgcccacu

SEQ ID NO: 2725749 - RNA, 19 nt, Artificial Sequence
  Description of Artificial Sequence: Synthetic oligonucleotide
aaaauugugcaaaauaccc

SEQ ID NO: 2725750 - RNA, 19 nt, Artificial Sequence
  Description of Artificial Sequence: Synthetic oligonucleotide
aauugugcaaaauacccag

SEQ ID NO: 2725751 - RNA, 19 nt, Artificial Sequence
  Description of Artificial Sequence: Synthetic oligonucleotide
auaaaauugugcaaaauac

SEQ ID NO: 2725752 - RNA, 19 nt, Artificial Sequence
  Description of Artificial Sequence: Synthetic oligonucleotide
uauuaaaucaccuagucuu

SEQ ID NO: 2725753 - RNA, 19 nt, Artificial Sequence
  Description of Artificial Sequence: Synthetic oligonucleotide
gaaaggauccuuuagaguc

SEQ ID NO: 2725754 - RNA, 19 nt, Artificial Sequence
  Description of Artificial Sequence: Synthetic oligonucleotide
uguaauaaauguauuaaau

SEQ ID NO: 2725755 - RNA, 19 nt, Artificial Sequence
  Description of Artificial Sequence: Synthetic oligonucleotide
uaaaauugugcaaaauacc

SEQ ID NO: 2725756 - RNA, 19 nt, Artificial Sequence
  Description of Artificial Sequence: Synthetic oligonucleotide
cuuggcacuacacagauag

SEQ ID NO: 2725757 - RNA, 19 nt, Artificial Sequence
  Description of Artificial Sequence: Synthetic oligonucleotide
auaaauguauuaaaucacc

SEQ ID NO: 2725758 - RNA, 19 nt, Artificial Sequence
  Description of Artificial Sequence: Synthetic oligonucleotide
aaguauugccagcaugacc

SEQ ID NO: 2725759 - RNA, 19 nt, Artificial Sequence
  Description of Artificial Sequence: Synthetic oligonucleotide
aaaucccuugacuuggcac

SEQ ID NO: 2725760 - RNA, 19 nt, Artificial Sequence
  Description of Artificial Sequence: Synthetic oligonucleotide
ucugcuguaauaaauguau

SEQ ID NO: 2725761 - RNA, 19 nt, Artificial Sequence
  Description of Artificial Sequence: Synthetic oligonucleotide
ucaaguauugccagcauga

SEQ ID NO: 2725762 - RNA, 19 nt, Artificial Sequence
  Description of Artificial Sequence: Synthetic oligonucleotide
uaauaaacccguuucaagu

SEQ ID NO: 2725763 - RNA, 19 nt, Artificial Sequence
  Description of Artificial Sequence: Synthetic oligonucleotide
ucuacugguacccagcucu

SEQ ID NO: 2725764 - RNA, 19 nt, Artificial Sequence
  Description of Artificial Sequence: Synthetic oligonucleotide
uuaauaaacccguuucaag

SEQ ID NO: 2725765 - RNA, 19 nt, Artificial Sequence
  Description of Artificial Sequence: Synthetic oligonucleotide
aggucuauaaaauugugca

SEQ ID NO: 2725766 - RNA, 19 nt, Artificial Sequence
  Description of Artificial Sequence: Synthetic oligonucleotide
auagcaacguguuaacuuc

SEQ ID NO: 2725767 - RNA, 19 nt, Artificial Sequence
  Description of Artificial Sequence: Synthetic oligonucleotide
accacaccuaacuucagcc

SEQ ID NO: 2725768 - RNA, 19 nt, Artificial Sequence
  Description of Artificial Sequence: Synthetic oligonucleotide
agaacgcagagucaggugg

SEQ ID NO: 2725769 - RNA, 19 nt, Artificial Sequence
  Description of Artificial Sequence: Synthetic oligonucleotide
agcacucacagcuagaucu

SEQ ID NO: 2725770 - RNA, 19 nt, Artificial Sequence
  Description of Artificial Sequence: Synthetic oligonucleotide
uccuuuagaguccccaugg

SEQ ID NO: 2725771 - RNA, 19 nt, Artificial Sequence
  Description of Artificial Sequence: Synthetic oligonucleotide
uguauuaaaucaccuaguc

SEQ ID NO: 2725772 - RNA, 19 nt, Artificial Sequence
  Description of Artificial Sequence: Synthetic oligonucleotide
auacccagcauuaauaaac

SEQ ID NO: 2725773 - RNA, 19 nt, Artificial Sequence
  Description of Artificial Sequence: Synthetic oligonucleotide
aacccacccaccucuaacc

SEQ ID NO: 2725774 - RNA, 19 nt, Artificial Sequence
  Description of Artificial Sequence: Synthetic oligonucleotide
uaaauguauuaaaucaccu

SEQ ID NO: 2725775 - RNA, 19 nt, Artificial Sequence
  Description of Artificial Sequence: Synthetic oligonucleotide
acccguuucaaguauugcc

SEQ ID NO: 2725776 - RNA, 19 nt, Artificial Sequence
  Description of Artificial Sequence: Synthetic oligonucleotide
aacguguuaacuucuauuu

SEQ ID NO: 2725777 - RNA, 19 nt, Artificial Sequence
  Description of Artificial Sequence: Synthetic oligonucleotide
aguauugccagcaugaccu

SEQ ID NO: 2725778 - RNA, 19 nt, Artificial Sequence
  Description of Artificial Sequence: Synthetic oligonucleotide
uacacagauagcaacgugu

SEQ ID NO: 2725779 - RNA, 19 nt, Artificial Sequence
  Description of Artificial Sequence: Synthetic oligonucleotide
aaauacccagcauuaauaa

SEQ ID NO: 2725780 - RNA, 19 nt, Artificial Sequence
  Description of Artificial Sequence: Synthetic oligonucleotide
aguugcuuucuugagaacg

SEQ ID NO: 2725781 - RNA, 19 nt, Artificial Sequence
  Description of Artificial Sequence: Synthetic oligonucleotide
aaaggauccuuuagagucc

SEQ ID NO: 2725782 - RNA, 19 nt, Artificial Sequence
  Description of Artificial Sequence: Synthetic oligonucleotide
aaggcugaguccccauucc

SEQ ID NO: 2725783 - RNA, 19 nt, Artificial Sequence
  Description of Artificial Sequence: Synthetic oligonucleotide
guuaacuucuauuuuaaaa

SEQ ID NO: 2725784 - RNA, 19 nt, Artificial Sequence
  Description of Artificial Sequence: Synthetic oligonucleotide
aaaagaggucuauaaaauu

SEQ ID NO: 2725785 - RNA, 19 nt, Artificial Sequence
  Description of Artificial Sequence: Synthetic oligonucleotide
agcaugaccuaacccaccc

SEQ ID NO: 2725786 - RNA, 19 nt, Artificial Sequence
  Description of Artificial Sequence: Synthetic oligonucleotide
cuuucuuucuacugguacc

SEQ ID NO: 2725787 - RNA, 19 nt, Artificial Sequence
  Description of Artificial Sequence: Synthetic oligonucleotide
ucugaaaucccuugacuug

SEQ ID NO: 2725788 - RNA, 19 nt, Artificial Sequence
  Description of Artificial Sequence: Synthetic oligonucleotide
acaagaaaggauccuuuag

SEQ ID NO: 2725789 - RNA, 19 nt, Artificial Sequence
  Description of Artificial Sequence: Synthetic oligonucleotide
aauaaacccguuucaagua

SEQ ID NO: 2725790 - RNA, 19 nt, Artificial Sequence
  Description of Artificial Sequence: Synthetic oligonucleotide
uucucuuucagaguggaga

SEQ ID NO: 2725791 - RNA, 19 nt, Artificial Sequence
  Description of Artificial Sequence: Synthetic oligonucleotide
ugaguccccauuccuaggg

SEQ ID NO: 2725792 - RNA, 19 nt, Artificial Sequence
  Description of Artificial Sequence: Synthetic oligonucleotide
aaaucaccuagucuucuga

SEQ ID NO: 2725793 - RNA, 19 nt, Artificial Sequence
  Description of Artificial Sequence: Synthetic oligonucleotide
uuagaguccccauggcugg

SEQ ID NO: 2725794 - RNA, 19 nt, Artificial Sequence
  Description of Artificial Sequence: Synthetic oligonucleotide
acagcugggagccugaccu

SEQ ID NO: 2725795 - RNA, 19 nt, Artificial Sequence
  Description of Artificial Sequence: Synthetic oligonucleotide
acugguacccagcucuagc

SEQ ID NO: 2725796 - RNA, 19 nt, Artificial Sequence
  Description of Artificial Sequence: Synthetic oligonucleotide
ugcaaaauacccagcauua

SEQ ID NO: 2725797 - RNA, 19 nt, Artificial Sequence
  Description of Artificial Sequence: Synthetic oligonucleotide
gaaguugcuuucuugagaa

SEQ ID NO: 2725798 - RNA, 19 nt, Artificial Sequence
  Description of Artificial Sequence: Synthetic oligonucleotide
ccuaacuucagccuguugg

SEQ ID NO: 2725799 - RNA, 19 nt, Artificial Sequence
  Description of Artificial Sequence: Synthetic oligonucleotide
ucuauaaaauugugcaaaa

SEQ ID NO: 2725800 - RNA, 19 nt, Artificial Sequence
  Description of Artificial Sequence: Synthetic oligonucleotide
ucuuucagaguggagagga

SEQ ID NO: 2725801 - RNA, 19 nt, Artificial Sequence
  Description of Artificial Sequence: Synthetic oligonucleotide
uuucuuucuacugguaccc

SEQ ID NO: 2725802 - RNA, 19 nt, Artificial Sequence
  Description of Artificial Sequence: Synthetic oligonucleotide
cuugagaacgcagagucag

SEQ ID NO: 2725803 - RNA, 19 nt, Artificial Sequence
  Description of Artificial Sequence: Synthetic oligonucleotide
aaggauccuuuagaguccc

SEQ ID NO: 2725804 - RNA, 19 nt, Artificial Sequence
  Description of Artificial Sequence: Synthetic oligonucleotide
aaaauacccagcauuaaua

SEQ ID NO: 2725805 - RNA, 19 nt, Artificial Sequence
  Description of Artificial Sequence: Synthetic oligonucleotide
agaccugucacccaaccca

SEQ ID NO: 2725806 - RNA, 19 nt, Artificial Sequence
  Description of Artificial Sequence: Synthetic oligonucleotide
aaauugugcaaaauaccca

SEQ ID NO: 2725807 - RNA, 19 nt, Artificial Sequence
  Description of Artificial Sequence: Synthetic oligonucleotide
ucaccuagucuucugaaau

SEQ ID NO: 2725808 - RNA, 19 nt, Artificial Sequence
  Description of Artificial Sequence: Synthetic oligonucleotide
uucugaaaucccuugacuu

SEQ ID NO: 2725809 - RNA, 19 nt, Artificial Sequence
  Description of Artificial Sequence: Synthetic oligonucleotide
aauacccagcauuaauaaa

SEQ ID NO: 2725810 - RNA, 19 nt, Artificial Sequence
  Description of Artificial Sequence: Synthetic oligonucleotide
uuucagaguggagaggaag

SEQ ID NO: 2725811 - RNA, 19 nt, Artificial Sequence
  Description of Artificial Sequence: Synthetic oligonucleotide
aagaggucuauaaaauugu

SEQ ID NO: 2725812 - RNA, 19 nt, Artificial Sequence
  Description of Artificial Sequence: Synthetic oligonucleotide
cuuucuugagaacgcagag

SEQ ID NO: 2725813 - RNA, 19 nt, Artificial Sequence
  Description of Artificial Sequence: Synthetic oligonucleotide
ucuuucuacugguacccag

SEQ ID NO: 2725814 - RNA, 19 nt, Artificial Sequence
  Description of Artificial Sequence: Synthetic oligonucleotide
gaggucuauaaaauugugc

SEQ ID NO: 2725815 - RNA, 19 nt, Artificial Sequence
  Description of Artificial Sequence: Synthetic oligonucleotide
acagauagcaacguguuaa

SEQ ID NO: 2725816 - RNA, 19 nt, Artificial Sequence
  Description of Artificial Sequence: Synthetic oligonucleotide
auuaaaucaccuagucuuc

SEQ ID NO: 2725817 - RNA, 19 nt, Artificial Sequence
  Description of Artificial Sequence: Synthetic oligonucleotide
agaaaggauccuuuagagu

SEQ ID NO: 2725818 - RNA, 19 nt, Artificial Sequence
  Description of Artificial Sequence: Synthetic oligonucleotide
cugaaaucccuugacuugg

SEQ ID NO: 2725819 - RNA, 19 nt, Artificial Sequence
  Description of Artificial Sequence: Synthetic oligonucleotide
acccagcauuaauaaaccc

SEQ ID NO: 2725820 - RNA, 19 nt, Artificial Sequence
  Description of Artificial Sequence: Synthetic oligonucleotide
uggcacuacacagauagca

SEQ ID NO: 2725821 - RNA, 19 nt, Artificial Sequence
  Description of Artificial Sequence: Synthetic oligonucleotide
accucuaacccugacuugg

SEQ ID NO: 2725822 - RNA, 19 nt, Artificial Sequence
  Description of Artificial Sequence: Synthetic oligonucleotide
aacccguuucaaguauugc

SEQ ID NO: 2725823 - RNA, 19 nt, Artificial Sequence
  Description of Artificial Sequence: Synthetic oligonucleotide
ugaccuaacccacccaccu

SEQ ID NO: 2725824 - RNA, 19 nt, Artificial Sequence
  Description of Artificial Sequence: Synthetic oligonucleotide
uagggugcugcccaggacu

SEQ ID NO: 2725825 - RNA, 19 nt, Artificial Sequence
  Description of Artificial Sequence: Synthetic oligonucleotide
uaaaucaccuagucuucug

SEQ ID NO: 2725826 - RNA, 19 nt, Artificial Sequence
  Description of Artificial Sequence: Synthetic oligonucleotide
ugcuuucuugagaacgcag

SEQ ID NO: 2725827 - RNA, 19 nt, Artificial Sequence
  Description of Artificial Sequence: Synthetic oligonucleotide
aaguugcuuucuugagaac

SEQ ID NO: 2725828 - RNA, 19 nt, Artificial Sequence
  Description of Artificial Sequence: Synthetic oligonucleotide
aaucaccuagucuucugaa

SEQ ID NO: 2725829 - RNA, 19 nt, Artificial Sequence
  Description of Artificial Sequence: Synthetic oligonucleotide
cccagcauuaauaaacccg

SEQ ID NO: 2725830 - RNA, 19 nt, Artificial Sequence
  Description of Artificial Sequence: Synthetic oligonucleotide
agaggaaguugcuuucuug

SEQ ID NO: 2725831 - RNA, 19 nt, Artificial Sequence
  Description of Artificial Sequence: Synthetic oligonucleotide
uuucuacugguacccagcu

SEQ ID NO: 2725832 - RNA, 19 nt, Artificial Sequence
  Description of Artificial Sequence: Synthetic oligonucleotide
ugacuuggcacuacacaga

SEQ ID NO: 2725833 - RNA, 19 nt, Artificial Sequence
  Description of Artificial Sequence: Synthetic oligonucleotide
uugagaacgcagagucagg

SEQ ID NO: 2725834 - RNA, 19 nt, Artificial Sequence
  Description of Artificial Sequence: Synthetic oligonucleotide
ucacagcuagaucugcugu

SEQ ID NO: 2725835 - RNA, 19 nt, Artificial Sequence
  Description of Artificial Sequence: Synthetic oligonucleotide
caugaccuaacccacccac

SEQ ID NO: 2725836 - RNA, 19 nt, Artificial Sequence
  Description of Artificial Sequence: Synthetic oligonucleotide
uuugucuuccucugacaca

SEQ ID NO: 2725837 - RNA, 19 nt, Artificial Sequence
  Description of Artificial Sequence: Synthetic oligonucleotide
cauuaauaaacccguuuca

SEQ ID NO: 2725838 - RNA, 19 nt, Artificial Sequence
  Description of Artificial Sequence: Synthetic oligonucleotide
acccaugcuuucuuucuac

SEQ ID NO: 2725839 - RNA, 19 nt, Artificial Sequence
  Description of Artificial Sequence: Synthetic oligonucleotide
ucugcaggagcugagguuc

SEQ ID NO: 2725840 - RNA, 19 nt, Artificial Sequence
  Description of Artificial Sequence: Synthetic oligonucleotide
ugucacccaacccaccaca

SEQ ID NO: 2725841 - RNA, 19 nt, Artificial Sequence
  Description of Artificial Sequence: Synthetic oligonucleotide
auuccuagggugcugccca

SEQ ID NO: 2725842 - RNA, 19 nt, Artificial Sequence
  Description of Artificial Sequence: Synthetic oligonucleotide
agaagagcagcugcucccc

SEQ ID NO: 2725843 - RNA, 19 nt, Artificial Sequence
  Description of Artificial Sequence: Synthetic oligonucleotide
auugugcaaaauacccagc

SEQ ID NO: 2725844 - RNA, 19 nt, Artificial Sequence
  Description of Artificial Sequence: Synthetic oligonucleotide
ugugcaaaauacccagcau

SEQ ID NO: 2725845 - RNA, 19 nt, Artificial Sequence
  Description of Artificial Sequence: Synthetic oligonucleotide
auaaacccguuucaaguau

SEQ ID NO: 2725846 - RNA, 19 nt, Artificial Sequence
  Description of Artificial Sequence: Synthetic oligonucleotide
uuaaaucaccuagucuucu

SEQ ID NO: 2725847 - RNA, 19 nt, Artificial Sequence
  Description of Artificial Sequence: Synthetic oligonucleotide
cuguaauaaauguauuaaa

SEQ ID NO: 2725848 - RNA, 19 nt, Artificial Sequence
  Description of Artificial Sequence: Synthetic oligonucleotide
gguacccagcucuagcugg

SEQ ID NO: 2725849 - RNA, 19 nt, Artificial Sequence
  Description of Artificial Sequence: Synthetic oligonucleotide
gauagcaacguguuaacuu

SEQ ID NO: 2725850 - RNA, 19 nt, Artificial Sequence
  Description of Artificial Sequence: Synthetic oligonucleotide
cacaccuaacuucagccug

SEQ ID NO: 2725851 - RNA, 19 nt, Artificial Sequence
  Description of Artificial Sequence: Synthetic oligonucleotide
ucuugagaacgcagaguca

SEQ ID NO: 2725852 - RNA, 19 nt, Artificial Sequence
  Description of Artificial Sequence: Synthetic oligonucleotide
accuaacccacccaccucu

SEQ ID NO: 2725853 - RNA, 19 nt, Artificial Sequence
  Description of Artificial Sequence: Synthetic oligonucleotide
uguuaacuucuauuuuaaa

SEQ ID NO: 2725854 - RNA, 19 nt, Artificial Sequence
  Description of Artificial Sequence: Synthetic oligonucleotide
ucuacccaugcuuucuuuc

SEQ ID NO: 2725855 - RNA, 19 nt, Artificial Sequence
  Description of Artificial Sequence: Synthetic oligonucleotide
uaacccacccaccucuaac

SEQ ID NO: 2725856 - RNA, 19 nt, Artificial Sequence
  Description of Artificial Sequence: Synthetic oligonucleotide
agucaggugggugaccacg

SEQ ID NO: 2725857 - RNA, 19 nt, Artificial Sequence
  Description of Artificial Sequence: Synthetic oligonucleotide
cuugacuuggcacuacaca

SEQ ID NO: 2725858 - RNA, 19 nt, Artificial Sequence
  Description of Artificial Sequence: Synthetic oligonucleotide
uuucucuuucagaguggag

SEQ ID NO: 2725859 - RNA, 19 nt, Artificial Sequence
  Description of Artificial Sequence: Synthetic oligonucleotide
guugcuuucuugagaacgc

SEQ ID NO: 2725860 - RNA, 19 nt, Artificial Sequence
  Description of Artificial Sequence: Synthetic oligonucleotide
auugccagcaugaccuaac

SEQ ID NO: 2725861 - RNA, 19 nt, Artificial Sequence
  Description of Artificial Sequence: Synthetic oligonucleotide
ugagaacgcagagucaggu

SEQ ID NO: 2725862 - RNA, 19 nt, Artificial Sequence
  Description of Artificial Sequence: Synthetic oligonucleotide
aggagcugagguucugggg

SEQ ID NO: 2725863 - RNA, 19 nt, Artificial Sequence
  Description of Artificial Sequence: Synthetic oligonucleotide
ugaaaucccuugacuuggc

SEQ ID NO: 2725864 - RNA, 19 nt, Artificial Sequence
  Description of Artificial Sequence: Synthetic oligonucleotide
uagcugguuucucuuucag

SEQ ID NO: 2725865 - RNA, 19 nt, Artificial Sequence
  Description of Artificial Sequence: Synthetic oligonucleotide
aaacccguuucaaguauug

SEQ ID NO: 2725866 - RNA, 19 nt, Artificial Sequence
  Description of Artificial Sequence: Synthetic oligonucleotide
auccuuuagaguccccaug

SEQ ID NO: 2725867 - RNA, 19 nt, Artificial Sequence
  Description of Artificial Sequence: Synthetic oligonucleotide
gaaggcugaguccccauuc

SEQ ID NO: 2725868 - RNA, 19 nt, Artificial Sequence
  Description of Artificial Sequence: Synthetic oligonucleotide
cugacuuggaagagauuug

SEQ ID NO: 2725869 - RNA, 19 nt, Artificial Sequence
  Description of Artificial Sequence: Synthetic oligonucleotide
cucacagcuagaucugcug

SEQ ID NO: 2725870 - RNA, 19 nt, Artificial Sequence
  Description of Artificial Sequence: Synthetic oligonucleotide
uugcagaagagcagcugcu

SEQ ID NO: 2725871 - RNA, 19 nt, Artificial Sequence
  Description of Artificial Sequence: Synthetic oligonucleotide
augcuuucuuucuacuggu

SEQ ID NO: 2725872 - RNA, 19 nt, Artificial Sequence
  Description of Artificial Sequence: Synthetic oligonucleotide
uugccagcaugaccuaacc

SEQ ID NO: 2725873 - RNA, 19 nt, Artificial Sequence
  Description of Artificial Sequence: Synthetic oligonucleotide
guauuaaaucaccuagucu

SEQ ID NO: 2725874 - RNA, 19 nt, Artificial Sequence
  Description of Artificial Sequence: Synthetic oligonucleotide
gaucugcuguaauaaaugu

SEQ ID NO: 2725875 - RNA, 19 nt, Artificial Sequence
  Description of Artificial Sequence: Synthetic oligonucleotide
gaacgcagagucagguggg

SEQ ID NO: 2725876 - RNA, 19 nt, Artificial Sequence
  Description of Artificial Sequence: Synthetic oligonucleotide
agcucuagcugguuucucu

SEQ ID NO: 2725877 - RNA, 19 nt, Artificial Sequence
  Description of Artificial Sequence: Synthetic oligonucleotide
auguauuaaaucaccuagu

SEQ ID NO: 2725878 - RNA, 19 nt, Artificial Sequence
  Description of Artificial Sequence: Synthetic oligonucleotide
cagauagcaacguguuaac

SEQ ID NO: 2725879 - RNA, 19 nt, Artificial Sequence
  Description of Artificial Sequence: Synthetic oligonucleotide
ugguacccagcucuagcug

SEQ ID NO: 2725880 - RNA, 19 nt, Artificial Sequence
  Description of Artificial Sequence: Synthetic oligonucleotide
caggagcugagguucuggg

SEQ ID NO: 2725881 - RNA, 19 nt, Artificial Sequence
  Description of Artificial Sequence: Synthetic oligonucleotide
augaccuaacccacccacc

SEQ ID NO: 2725882 - RNA, 19 nt, Artificial Sequence
  Description of Artificial Sequence: Synthetic oligonucleotide
acuacacagauagcaacgu

SEQ ID NO: 2725883 - RNA, 19 nt, Artificial Sequence
  Description of Artificial Sequence: Synthetic oligonucleotide
uagcaacguguuaacuucu

SEQ ID NO: 2725884 - RNA, 19 nt, Artificial Sequence
  Description of Artificial Sequence: Synthetic oligonucleotide
agcuagaucugcuguaaua

SEQ ID NO: 2725885 - RNA, 19 nt, Artificial Sequence
  Description of Artificial Sequence: Synthetic oligonucleotide
cuacacagauagcaacgug

SEQ ID NO: 2725886 - RNA, 19 nt, Artificial Sequence
  Description of Artificial Sequence: Synthetic oligonucleotide
ugggacacacacagcacuc

SEQ ID NO: 2725887 - RNA, 19 nt, Artificial Sequence
  Description of Artificial Sequence: Synthetic oligonucleotide
uaaacccguuucaaguauu

SEQ ID NO: 2725888 - RNA, 19 nt, Artificial Sequence
  Description of Artificial Sequence: Synthetic oligonucleotide
gcuguaauaaauguauuaa

SEQ ID NO: 2725889 - RNA, 19 nt, Artificial Sequence
  Description of Artificial Sequence: Synthetic oligonucleotide
agaggucuauaaaauugug

SEQ ID NO: 2725890 - RNA, 19 nt, Artificial Sequence
  Description of Artificial Sequence: Synthetic oligonucleotide
aucaccuagucuucugaaa

SEQ ID NO: 2725891 - RNA, 19 nt, Artificial Sequence
  Description of Artificial Sequence: Synthetic oligonucleotide
caccacaccuaacuucagc

SEQ ID NO: 2725892 - RNA, 19 nt, Artificial Sequence
  Description of Artificial Sequence: Synthetic oligonucleotide
agcugguuucucuuucaga

SEQ ID NO: 2725893 - RNA, 19 nt, Artificial Sequence
  Description of Artificial Sequence: Synthetic oligonucleotide
ggaaguugcuuucuugaga

SEQ ID NO: 2725894 - RNA, 19 nt, Artificial Sequence
  Description of Artificial Sequence: Synthetic oligonucleotide
gaaaucccuugacuuggca

SEQ ID NO: 2725895 - RNA, 19 nt, Artificial Sequence
  Description of Artificial Sequence: Synthetic oligonucleotide
uaacccugacuuggaagag

SEQ ID NO: 2725896 - RNA, 19 nt, Artificial Sequence
  Description of Artificial Sequence: Synthetic oligonucleotide
uuggcacuacacagauagc

SEQ ID NO: 2725897 - RNA, 19 nt, Artificial Sequence
  Description of Artificial Sequence: Synthetic oligonucleotide
cugaguccccauuccuagg

SEQ ID NO: 2725898 - RNA, 19 nt, Artificial Sequence
  Description of Artificial Sequence: Synthetic oligonucleotide
cugccucccacccucuacc

SEQ ID NO: 2725899 - RNA, 19 nt, Artificial Sequence
  Description of Artificial Sequence: Synthetic oligonucleotide
aacccaccacaccuaacuu

SEQ ID NO: 2725900 - RNA, 19 nt, Artificial Sequence
  Description of Artificial Sequence: Synthetic oligonucleotide
agauagcaacguguuaacu

SEQ ID NO: 2725901 - RNA, 19 nt, Artificial Sequence
  Description of Artificial Sequence: Synthetic oligonucleotide
cauuccuagggugcugccc

SEQ ID NO: 2725902 - RNA, 19 nt, Artificial Sequence
  Description of Artificial Sequence: Synthetic oligonucleotide
cagaccugucacccaaccc

SEQ ID NO: 2725903 - RNA, 19 nt, Artificial Sequence
  Description of Artificial Sequence: Synthetic oligonucleotide
uugcuuucuugagaacgca

SEQ ID NO: 2725904 - RNA, 19 nt, Artificial Sequence
  Description of Artificial Sequence: Synthetic oligonucleotide
acagcacucacagcuagau

SEQ ID NO: 2725905 - RNA, 19 nt, Artificial Sequence
  Description of Artificial Sequence: Synthetic oligonucleotide
uucuacugguacccagcuc

SEQ ID NO: 2725906 - RNA, 19 nt, Artificial Sequence
  Description of Artificial Sequence: Synthetic oligonucleotide
cuccccagaccugucaccc

SEQ ID NO: 2725907 - RNA, 19 nt, Artificial Sequence
  Description of Artificial Sequence: Synthetic oligonucleotide
uacccaugcuuucuuucua

SEQ ID NO: 2725908 - RNA, 19 nt, Artificial Sequence
  Description of Artificial Sequence: Synthetic oligonucleotide
caaaauacccagcauuaau

SEQ ID NO: 2725909 - RNA, 19 nt, Artificial Sequence
  Description of Artificial Sequence: Synthetic oligonucleotide
ugcuuucuuucuacuggua

SEQ ID NO: 2725910 - RNA, 19 nt, Artificial Sequence
  Description of Artificial Sequence: Synthetic oligonucleotide
acagcuagaucugcuguaa

SEQ ID NO: 2725911 - RNA, 19 nt, Artificial Sequence
  Description of Artificial Sequence: Synthetic oligonucleotide
cuuuagaguccccauggcu

SEQ ID NO: 2725912 - RNA, 19 nt, Artificial Sequence
  Description of Artificial Sequence: Synthetic oligonucleotide
gcuagaucugcuguaauaa

SEQ ID NO: 2725913 - RNA, 19 nt, Artificial Sequence
  Description of Artificial Sequence: Synthetic oligonucleotide
cuagcugguuucucuuuca

SEQ ID NO: 2725914 - RNA, 19 nt, Artificial Sequence
  Description of Artificial Sequence: Synthetic oligonucleotide
ugcagaagagcagcugcuc

SEQ ID NO: 2725915 - RNA, 19 nt, Artificial Sequence
  Description of Artificial Sequence: Synthetic oligonucleotide
gacuuggcacuacacagau

SEQ ID NO: 2725916 - RNA, 19 nt, Artificial Sequence
  Description of Artificial Sequence: Synthetic oligonucleotide
uucuuucuacugguaccca

SEQ ID NO: 2725917 - RNA, 19 nt, Artificial Sequence
  Description of Artificial Sequence: Synthetic oligonucleotide
caacccaccacaccuaacu

SEQ ID NO: 2725918 - RNA, 19 nt, Artificial Sequence
  Description of Artificial Sequence: Synthetic oligonucleotide
ccuagucuucugaaauccc

SEQ ID NO: 2725919 - RNA, 19 nt, Artificial Sequence
  Description of Artificial Sequence: Synthetic oligonucleotide
cuucugaaaucccuugacu

SEQ ID NO: 2725920 - RNA, 19 nt, Artificial Sequence
  Description of Artificial Sequence: Synthetic oligonucleotide
aacgcagagucaggugggu

SEQ ID NO: 2725921 - RNA, 19 nt, Artificial Sequence
  Description of Artificial Sequence: Synthetic oligonucleotide
aucugcuguaauaaaugua

SEQ ID NO: 2725922 - RNA, 19 nt, Artificial Sequence
  Description of Artificial Sequence: Synthetic oligonucleotide
aggcugaguccccauuccu

SEQ ID NO: 2725923 - RNA, 19 nt, Artificial Sequence
  Description of Artificial Sequence: Synthetic oligonucleotide
cucugacacaggcugccuc

SEQ ID NO: 2725924 - RNA, 19 nt, Artificial Sequence
  Description of Artificial Sequence: Synthetic oligonucleotide
cccguuucaaguauugcca

SEQ ID NO: 2725925 - RNA, 19 nt, Artificial Sequence
  Description of Artificial Sequence: Synthetic oligonucleotide
gaccugucacccaacccac

SEQ ID NO: 2725926 - RNA, 19 nt, Artificial Sequence
  Description of Artificial Sequence: Synthetic oligonucleotide
gcaggucacagcugggagc

SEQ ID NO: 2725927 - RNA, 19 nt, Artificial Sequence
  Description of Artificial Sequence: Synthetic oligonucleotide
uccccauggcuggggaagg

SEQ ID NO: 2725928 - RNA, 19 nt, Artificial Sequence
  Description of Artificial Sequence: Synthetic oligonucleotide
ccagcaugaccuaacccac

SEQ ID NO: 2725929 - RNA, 19 nt, Artificial Sequence
  Description of Artificial Sequence: Synthetic oligonucleotide
caggcugccucccacccuc

SEQ ID NO: 2725930 - RNA, 19 nt, Artificial Sequence
  Description of Artificial Sequence: Synthetic oligonucleotide
cacagcugggagccugacc

SEQ ID NO: 2725931 - RNA, 19 nt, Artificial Sequence
  Description of Artificial Sequence: Synthetic oligonucleotide
gaccuaacccacccaccuc

SEQ ID NO: 2725932 - RNA, 19 nt, Artificial Sequence
  Description of Artificial Sequence: Synthetic oligonucleotide
uuccuagggugcugcccag

SEQ ID NO: 2725933 - RNA, 19 nt, Artificial Sequence
  Description of Artificial Sequence: Synthetic oligonucleotide
gauccuuuagaguccccau

SEQ ID NO: 2725934 - RNA, 19 nt, Artificial Sequence
  Description of Artificial Sequence: Synthetic oligonucleotide
ccguuucaaguauugccag

SEQ ID NO: 2725935 - RNA, 19 nt, Artificial Sequence
  Description of Artificial Sequence: Synthetic oligonucleotide
uagaguccccauggcuggg

SEQ ID NO: 2725936 - RNA, 19 nt, Artificial Sequence
  Description of Artificial Sequence: Synthetic oligonucleotide
acaccuaacuucagccugu

SEQ ID NO: 2725937 - RNA, 19 nt, Artificial Sequence
  Description of Artificial Sequence: Synthetic oligonucleotide
uccuagggugcugcccagg

SEQ ID NO: 2725938 - RNA, 19 nt, Artificial Sequence
  Description of Artificial Sequence: Synthetic oligonucleotide
accuaacuucagccuguug

SEQ ID NO: 2725939 - RNA, 19 nt, Artificial Sequence
  Description of Artificial Sequence: Synthetic oligonucleotide
ccagcauuaauaaacccgu

SEQ ID NO: 2725940 - RNA, 19 nt, Artificial Sequence
  Description of Artificial Sequence: Synthetic oligonucleotide
cugucacccaacccaccac

SEQ ID NO: 2725941 - RNA, 19 nt, Artificial Sequence
  Description of Artificial Sequence: Synthetic oligonucleotide
acccaccucuaacccugac

SEQ ID NO: 2725942 - RNA, 19 nt, Artificial Sequence
  Description of Artificial Sequence: Synthetic oligonucleotide
gcuuucuugagaacgcaga

SEQ ID NO: 2725943 - RNA, 19 nt, Artificial Sequence
  Description of Artificial Sequence: Synthetic oligonucleotide
cuagggugcugcccaggac

SEQ ID NO: 2725944 - RNA, 19 nt, Artificial Sequence
  Description of Artificial Sequence: Synthetic oligonucleotide
caccucuaacccugacuug

SEQ ID NO: 2725945 - RNA, 19 nt, Artificial Sequence
  Description of Artificial Sequence: Synthetic oligonucleotide
acucacagcuagaucugcu

SEQ ID NO: 2725946 - RNA, 19 nt, Artificial Sequence
  Description of Artificial Sequence: Synthetic oligonucleotide
cauggcuggggaaggcuga

SEQ ID NO: 2725947 - RNA, 19 nt, Artificial Sequence
  Description of Artificial Sequence: Synthetic oligonucleotide
gguuugucuuccucugaca

SEQ ID NO: 2725948 - RNA, 19 nt, Artificial Sequence
  Description of Artificial Sequence: Synthetic oligonucleotide
cuacccaugcuuucuuucu

SEQ ID NO: 2725949 - RNA, 19 nt, Artificial Sequence
  Description of Artificial Sequence: Synthetic oligonucleotide
acccugacuuggaagagau

SEQ ID NO: 2725950 - RNA, 19 nt, Artificial Sequence
  Description of Artificial Sequence: Synthetic oligonucleotide
ggggcacaagaaaggaucc

SEQ ID NO: 2725951 - RNA, 19 nt, Artificial Sequence
  Description of Artificial Sequence: Synthetic oligonucleotide
caacguguuaacuucuauu

SEQ ID NO: 2725952 - RNA, 19 nt, Artificial Sequence
  Description of Artificial Sequence: Synthetic oligonucleotide
cacccaacccaccacaccu

SEQ ID NO: 2725953 - RNA, 19 nt, Artificial Sequence
  Description of Artificial Sequence: Synthetic oligonucleotide
ggauccuuuagagucccca

SEQ ID NO: 2725954 - RNA, 19 nt, Artificial Sequence
  Description of Artificial Sequence: Synthetic oligonucleotide
ccacccaccucuaacccug

SEQ ID NO: 2725955 - RNA, 19 nt, Artificial Sequence
  Description of Artificial Sequence: Synthetic oligonucleotide
cuguuggggcaggucacag

SEQ ID NO: 2725956 - RNA, 19 nt, Artificial Sequence
  Description of Artificial Sequence: Synthetic oligonucleotide
cacagcuagaucugcugua

SEQ ID NO: 2725957 - RNA, 19 nt, Artificial Sequence
  Description of Artificial Sequence: Synthetic oligonucleotide
ccuuuagaguccccauggc

SEQ ID NO: 2725958 - RNA, 19 nt, Artificial Sequence
  Description of Artificial Sequence: Synthetic oligonucleotide
ccuugacuuggcacuacac

SEQ ID NO: 2725959 - RNA, 19 nt, Artificial Sequence
  Description of Artificial Sequence: Synthetic oligonucleotide
cguuucaaguauugccagc

SEQ ID NO: 2725960 - RNA, 19 nt, Artificial Sequence
  Description of Artificial Sequence: Synthetic oligonucleotide
cugguacccagcucuagcu

SEQ ID NO: 2725961 - RNA, 19 nt, Artificial Sequence
  Description of Artificial Sequence: Synthetic oligonucleotide
aggauccuuuagagucccc

SEQ ID NO: 2725962 - RNA, 19 nt, Artificial Sequence
  Description of Artificial Sequence: Synthetic oligonucleotide
cagcacucacagcuagauc

SEQ ID NO: 2725963 - RNA, 19 nt, Artificial Sequence
  Description of Artificial Sequence: Synthetic oligonucleotide
cuuucagaguggagaggaa

SEQ ID NO: 2725964 - RNA, 19 nt, Artificial Sequence
  Description of Artificial Sequence: Synthetic oligonucleotide
gagucaggugggugaccac

SEQ ID NO: 2725965 - RNA, 19 nt, Artificial Sequence
  Description of Artificial Sequence: Synthetic oligonucleotide
ccagaccugucacccaacc

SEQ ID NO: 2725966 - RNA, 19 nt, Artificial Sequence
  Description of Artificial Sequence: Synthetic oligonucleotide
uccccagaccugucaccca

SEQ ID NO: 2725967 - RNA, 19 nt, Artificial Sequence
  Description of Artificial Sequence: Synthetic oligonucleotide
cuucagccuguuggggcag

SEQ ID NO: 2725968 - RNA, 19 nt, Artificial Sequence
  Description of Artificial Sequence: Synthetic oligonucleotide
acccagcucuagcugguuu

SEQ ID NO: 2725969 - RNA, 19 nt, Artificial Sequence
  Description of Artificial Sequence: Synthetic oligonucleotide
ggucacagcugggagccug

SEQ ID NO: 2725970 - RNA, 19 nt, Artificial Sequence
  Description of Artificial Sequence: Synthetic oligonucleotide
cccagcucuagcugguuuc

SEQ ID NO: 2725971 - RNA, 19 nt, Artificial Sequence
  Description of Artificial Sequence: Synthetic oligonucleotide
acgcagagucaggugggug

SEQ ID NO: 2725972 - RNA, 19 nt, Artificial Sequence
  Description of Artificial Sequence: Synthetic oligonucleotide
cacagauagcaacguguua

SEQ ID NO: 2725973 - RNA, 19 nt, Artificial Sequence
  Description of Artificial Sequence: Synthetic oligonucleotide
ucagccuguuggggcaggu

SEQ ID NO: 2725974 - RNA, 19 nt, Artificial Sequence
  Description of Artificial Sequence: Synthetic oligonucleotide
ggauggcugguuugucuuc

SEQ ID NO: 2725975 - RNA, 19 nt, Artificial Sequence
  Description of Artificial Sequence: Synthetic oligonucleotide
ucccuugacuuggcacuac

SEQ ID NO: 2725976 - RNA, 19 nt, Artificial Sequence
  Description of Artificial Sequence: Synthetic oligonucleotide
agcaacguguuaacuucua

SEQ ID NO: 2725977 - RNA, 19 nt, Artificial Sequence
  Description of Artificial Sequence: Synthetic oligonucleotide
gcacucacagcuagaucug

SEQ ID NO: 2725978 - RNA, 19 nt, Artificial Sequence
  Description of Artificial Sequence: Synthetic oligonucleotide
cuaacccacccaccucuaa

SEQ ID NO: 2725979 - RNA, 19 nt, Artificial Sequence
  Description of Artificial Sequence: Synthetic oligonucleotide
ggccuggauggcugguuug

SEQ ID NO: 2725980 - RNA, 19 nt, Artificial Sequence
  Description of Artificial Sequence: Synthetic oligonucleotide
aucccuugacuuggcacua

SEQ ID NO: 2725981 - RNA, 19 nt, Artificial Sequence
  Description of Artificial Sequence: Synthetic oligonucleotide
gcagagucaggugggugac

SEQ ID NO: 2725982 - RNA, 19 nt, Artificial Sequence
  Description of Artificial Sequence: Synthetic oligonucleotide
cuacugguacccagcucua

SEQ ID NO: 2725983 - RNA, 19 nt, Artificial Sequence
  Description of Artificial Sequence: Synthetic oligonucleotide
ccauuccuagggugcugcc

SEQ ID NO: 2725984 - RNA, 19 nt, Artificial Sequence
  Description of Artificial Sequence: Synthetic oligonucleotide
cugcuccccagaccuguca

SEQ ID NO: 2725985 - RNA, 19 nt, Artificial Sequence
  Description of Artificial Sequence: Synthetic oligonucleotide
cgcagagucagguggguga

SEQ ID NO: 2725986 - RNA, 19 nt, Artificial Sequence
  Description of Artificial Sequence: Synthetic oligonucleotide
gcaugaccuaacccaccca

SEQ ID NO: 2725987 - RNA, 19 nt, Artificial Sequence
  Description of Artificial Sequence: Synthetic oligonucleotide
ccaccucuaacccugacuu

SEQ ID NO: 2725988 - RNA, 19 nt, Artificial Sequence
  Description of Artificial Sequence: Synthetic oligonucleotide
gugcugcccaggacucugc

SEQ ID NO: 2725989 - RNA, 19 nt, Artificial Sequence
  Description of Artificial Sequence: Synthetic oligonucleotide
cagcucuagcugguuucuc

SEQ ID NO: 2725990 - RNA, 19 nt, Artificial Sequence
  Description of Artificial Sequence: Synthetic oligonucleotide
cacccucuacccaugcuuu

SEQ ID NO: 2725991 - RNA, 19 nt, Artificial Sequence
  Description of Artificial Sequence: Synthetic oligonucleotide
gcaacguguuaacuucuau

SEQ ID NO: 2725992 - RNA, 19 nt, Artificial Sequence
  Description of Artificial Sequence: Synthetic oligonucleotide
ccuagggugcugcccagga

SEQ ID NO: 2725993 - RNA, 19 nt, Artificial Sequence
  Description of Artificial Sequence: Synthetic oligonucleotide
ggagaggaaguugcuuucu

SEQ ID NO: 2725994 - RNA, 19 nt, Artificial Sequence
  Description of Artificial Sequence: Synthetic oligonucleotide
gggcaggucacagcuggga

SEQ ID NO: 2725995 - RNA, 19 nt, Artificial Sequence
  Description of Artificial Sequence: Synthetic oligonucleotide
cucuagcugguuucucuuu

SEQ ID NO: 2725996 - RNA, 19 nt, Artificial Sequence
  Description of Artificial Sequence: Synthetic oligonucleotide
acuuggcacuacacagaua

SEQ ID NO: 2725997 - RNA, 19 nt, Artificial Sequence
  Description of Artificial Sequence: Synthetic oligonucleotide
ccucuaacccugacuugga

SEQ ID NO: 2725998 - RNA, 19 nt, Artificial Sequence
  Description of Artificial Sequence: Synthetic oligonucleotide
cagccuguuggggcagguc

SEQ ID NO: 2725999 - RNA, 19 nt, Artificial Sequence
  Description of Artificial Sequence: Synthetic oligonucleotide
ggcugaguccccauuccua

SEQ ID NO: 2726000 - RNA, 19 nt, Artificial Sequence
  Description of Artificial Sequence: Synthetic oligonucleotide
guacccagcucuagcuggu

SEQ ID NO: 2726001 - RNA, 19 nt, Artificial Sequence
  Description of Artificial Sequence: Synthetic oligonucleotide
cccuugacuuggcacuaca

SEQ ID NO: 2726002 - RNA, 19 nt, Artificial Sequence
  Description of Artificial Sequence: Synthetic oligonucleotide
ccacaccuaacuucagccu

SEQ ID NO: 2726003 - RNA, 19 nt, Artificial Sequence
  Description of Artificial Sequence: Synthetic oligonucleotide
gcucuagcugguuucucuu

SEQ ID NO: 2726004 - RNA, 19 nt, Artificial Sequence
  Description of Artificial Sequence: Synthetic oligonucleotide
cacccaccucuaacccuga

SEQ ID NO: 2726005 - RNA, 19 nt, Artificial Sequence
  Description of Artificial Sequence: Synthetic oligonucleotide
cugcaggagcugagguucu

SEQ ID NO: 2726006 - RNA, 19 nt, Artificial Sequence
  Description of Artificial Sequence: Synthetic oligonucleotide
gccucccacccucuaccca

SEQ ID NO: 2726007 - RNA, 19 nt, Artificial Sequence
  Description of Artificial Sequence: Synthetic oligonucleotide
cagcuagaucugcuguaau

SEQ ID NO: 2726008 - RNA, 19 nt, Artificial Sequence
  Description of Artificial Sequence: Synthetic oligonucleotide
cccaccucuaacccugacu

SEQ ID NO: 2726009 - RNA, 19 nt, Artificial Sequence
  Description of Artificial Sequence: Synthetic oligonucleotide
ccacccucuacccaugcuu

SEQ ID NO: 2726010 - RNA, 19 nt, Artificial Sequence
  Description of Artificial Sequence: Synthetic oligonucleotide
ccccauggcuggggaaggc

SEQ ID NO: 2726011 - RNA, 19 nt, Artificial Sequence
  Description of Artificial Sequence: Synthetic oligonucleotide
aggcugccucccacccucu

SEQ ID NO: 2726012 - RNA, 19 nt, Artificial Sequence
  Description of Artificial Sequence: Synthetic oligonucleotide
ccuaacccacccaccucua

SEQ ID NO: 2726013 - RNA, 19 nt, Artificial Sequence
  Description of Artificial Sequence: Synthetic oligonucleotide
ccucuacccaugcuuucuu

SEQ ID NO: 2726014 - RNA, 19 nt, Artificial Sequence
  Description of Artificial Sequence: Synthetic oligonucleotide
ccucugacacaggcugccu

SEQ ID NO: 2726015 - RNA, 19 nt, Artificial Sequence
  Description of Artificial Sequence: Synthetic oligonucleotide
cccugacuuggaagagauu

SEQ ID NO: 2726016 - RNA, 19 nt, Artificial Sequence
  Description of Artificial Sequence: Synthetic oligonucleotide
aaugcuaacaaucuguccu

SEQ ID NO: 2726017 - RNA, 19 nt, Artificial Sequence
  Description of Artificial Sequence: Synthetic oligonucleotide
guuacugucagcuaacugg

SEQ ID NO: 2726018 - RNA, 19 nt, Artificial Sequence
  Description of Artificial Sequence: Synthetic oligonucleotide
acuacuagaugauacacuc

SEQ ID NO: 2726019 - RNA, 19 nt, Artificial Sequence
  Description of Artificial Sequence: Synthetic oligonucleotide
uguaaugcuaacaaucugu

SEQ ID NO: 2726020 - RNA, 19 nt, Artificial Sequence
  Description of Artificial Sequence: Synthetic oligonucleotide
ugaucugacgauuugagga

SEQ ID NO: 2726021 - RNA, 19 nt, Artificial Sequence
  Description of Artificial Sequence: Synthetic oligonucleotide
uuuuccgacuacuagauga

SEQ ID NO: 2726022 - RNA, 19 nt, Artificial Sequence
  Description of Artificial Sequence: Synthetic oligonucleotide
uuguguaaaauucacuucu

SEQ ID NO: 2726023 - RNA, 19 nt, Artificial Sequence
  Description of Artificial Sequence: Synthetic oligonucleotide
aauugguacugauuugggg

SEQ ID NO: 2726024 - RNA, 19 nt, Artificial Sequence
  Description of Artificial Sequence: Synthetic oligonucleotide
uaaaauucacuucuguuuc

SEQ ID NO: 2726025 - RNA, 19 nt, Artificial Sequence
  Description of Artificial Sequence: Synthetic oligonucleotide
aaaagcacggauccaucac

SEQ ID NO: 2726026 - RNA, 19 nt, Artificial Sequence
  Description of Artificial Sequence: Synthetic oligonucleotide
uuuuguguaaaauucacuu

SEQ ID NO: 2726027 - RNA, 19 nt, Artificial Sequence
  Description of Artificial Sequence: Synthetic oligonucleotide
aaagcauguguuccaaauc

SEQ ID NO: 2726028 - RNA, 19 nt, Artificial Sequence
  Description of Artificial Sequence: Synthetic oligonucleotide
ugcagaaaagcacggaucc

SEQ ID NO: 2726029 - RNA, 19 nt, Artificial Sequence
  Description of Artificial Sequence: Synthetic oligonucleotide
gauacacucuacuuucugg

SEQ ID NO: 2726030 - RNA, 19 nt, Artificial Sequence
  Description of Artificial Sequence: Synthetic oligonucleotide
aagcauguguuccaaaucu

SEQ ID NO: 2726031 - RNA, 19 nt, Artificial Sequence
  Description of Artificial Sequence: Synthetic oligonucleotide
uuacugucagcuaacuggg

SEQ ID NO: 2726032 - RNA, 19 nt, Artificial Sequence
  Description of Artificial Sequence: Synthetic oligonucleotide
auugguacugauuugggga

SEQ ID NO: 2726033 - RNA, 19 nt, Artificial Sequence
  Description of Artificial Sequence: Synthetic oligonucleotide
gaugauacacucuacuuuc

SEQ ID NO: 2726034 - RNA, 19 nt, Artificial Sequence
  Description of Artificial Sequence: Synthetic oligonucleotide
uguuucugaauuaguuugg

SEQ ID NO: 2726035 - RNA, 19 nt, Artificial Sequence
  Description of Artificial Sequence: Synthetic oligonucleotide
ugaagaugugcgcaauugg

SEQ ID NO: 2726036 - RNA, 19 nt, Artificial Sequence
  Description of Artificial Sequence: Synthetic oligonucleotide
agaugugcgcaauugguac

SEQ ID NO: 2726037 - RNA, 19 nt, Artificial Sequence
  Description of Artificial Sequence: Synthetic oligonucleotide
aaaagcauguguuccaaau

SEQ ID NO: 2726038 - RNA, 19 nt, Artificial Sequence
  Description of Artificial Sequence: Synthetic oligonucleotide
uuucuucuugaucugacga

SEQ ID NO: 2726039 - RNA, 19 nt, Artificial Sequence
  Description of Artificial Sequence: Synthetic oligonucleotide
uuugauguuucugaauuag

SEQ ID NO: 2726040 - RNA, 19 nt, Artificial Sequence
  Description of Artificial Sequence: Synthetic oligonucleotide
aacucuguuacugucagcu

SEQ ID NO: 2726041 - RNA, 19 nt, Artificial Sequence
  Description of Artificial Sequence: Synthetic oligonucleotide
gauuugaggaacauuuucc

SEQ ID NO: 2726042 - RNA, 19 nt, Artificial Sequence
  Description of Artificial Sequence: Synthetic oligonucleotide
ucuacuuucuggaacucug

SEQ ID NO: 2726043 - RNA, 19 nt, Artificial Sequence
  Description of Artificial Sequence: Synthetic oligonucleotide
cuuucuggaacucuguuac

SEQ ID NO: 2726044 - RNA, 19 nt, Artificial Sequence
  Description of Artificial Sequence: Synthetic oligonucleotide
uguguuccaaaucuaucag

SEQ ID NO: 2726045 - RNA, 19 nt, Artificial Sequence
  Description of Artificial Sequence: Synthetic oligonucleotide
uucuaacacagacuccugg

SEQ ID NO: 2726046 - RNA, 19 nt, Artificial Sequence
  Description of Artificial Sequence: Synthetic oligonucleotide
ugucgguuuagcgucaucg

SEQ ID NO: 2726047 - RNA, 19 nt, Artificial Sequence
  Description of Artificial Sequence: Synthetic oligonucleotide
aauucacuucuguuucuuc

SEQ ID NO: 2726048 - RNA, 19 nt, Artificial Sequence
  Description of Artificial Sequence: Synthetic oligonucleotide
uuucggaaaucucuuuucc

SEQ ID NO: 2726049 - RNA, 19 nt, Artificial Sequence
  Description of Artificial Sequence: Synthetic oligonucleotide
uuacucagcagccugucug

SEQ ID NO: 2726050 - RNA, 19 nt, Artificial Sequence
  Description of Artificial Sequence: Synthetic oligonucleotide
uugaggaacauuuuccuuc

SEQ ID NO: 2726051 - RNA, 19 nt, Artificial Sequence
  Description of Artificial Sequence: Synthetic oligonucleotide
uugcuuaugucucucaaaa

SEQ ID NO: 2726052 - RNA, 19 nt, Artificial Sequence
  Description of Artificial Sequence: Synthetic oligonucleotide
uucugaauuaguuuggcuu

SEQ ID NO: 2726053 - RNA, 19 nt, Artificial Sequence
  Description of Artificial Sequence: Synthetic oligonucleotide
ucucuuuuccgacuacuag

SEQ ID NO: 2726054 - RNA, 19 nt, Artificial Sequence
  Description of Artificial Sequence: Synthetic oligonucleotide
uucggaaaucucuuuuccg

SEQ ID NO: 2726055 - RNA, 19 nt, Artificial Sequence
  Description of Artificial Sequence: Synthetic oligonucleotide
agcuguaaugcuaacaauc

SEQ ID NO: 2726056 - RNA, 19 nt, Artificial Sequence
  Description of Artificial Sequence: Synthetic oligonucleotide
uuugcagaaaagcacggau

SEQ ID NO: 2726057 - RNA, 19 nt, Artificial Sequence
  Description of Artificial Sequence: Synthetic oligonucleotide
uagcuuuggaccccuaucc

SEQ ID NO: 2726058 - RNA, 19 nt, Artificial Sequence
  Description of Artificial Sequence: Synthetic oligonucleotide
uguuccaaaucuaucaguu

SEQ ID NO: 2726059 - RNA, 19 nt, Artificial Sequence
  Description of Artificial Sequence: Synthetic oligonucleotide
uacuagaugauacacucua

SEQ ID NO: 2726060 - RNA, 19 nt, Artificial Sequence
  Description of Artificial Sequence: Synthetic oligonucleotide
ucuuucugaagcuguaaug

SEQ ID NO: 2726061 - RNA, 19 nt, Artificial Sequence
  Description of Artificial Sequence: Synthetic oligonucleotide
cuugaucugacgauuugag

SEQ ID NO: 2726062 - RNA, 19 nt, Artificial Sequence
  Description of Artificial Sequence: Synthetic oligonucleotide
uguaaaauucacuucuguu

SEQ ID NO: 2726063 - RNA, 19 nt, Artificial Sequence
  Description of Artificial Sequence: Synthetic oligonucleotide
uuuguguaaaauucacuuc

SEQ ID NO: 2726064 - RNA, 19 nt, Artificial Sequence
  Description of Artificial Sequence: Synthetic oligonucleotide
uuccaaaucuaucaguuuu

SEQ ID NO: 2726065 - RNA, 19 nt, Artificial Sequence
  Description of Artificial Sequence: Synthetic oligonucleotide
ugauguuucugaauuaguu

SEQ ID NO: 2726066 - RNA, 19 nt, Artificial Sequence
  Description of Artificial Sequence: Synthetic oligonucleotide
auuugaggaacauuuuccu

SEQ ID NO: 2726067 - RNA, 19 nt, Artificial Sequence
  Description of Artificial Sequence: Synthetic oligonucleotide
cuuuggaccccuauccugg

SEQ ID NO: 2726068 - RNA, 19 nt, Artificial Sequence
  Description of Artificial Sequence: Synthetic oligonucleotide
aaaucucuuuuccgacuac

SEQ ID NO: 2726069 - RNA, 19 nt, Artificial Sequence
  Description of Artificial Sequence: Synthetic oligonucleotide
acacucuacuuucuggaac

SEQ ID NO: 2726070 - RNA, 19 nt, Artificial Sequence
  Description of Artificial Sequence: Synthetic oligonucleotide
aaagcacggauccaucacu

SEQ ID NO: 2726071 - RNA, 19 nt, Artificial Sequence
  Description of Artificial Sequence: Synthetic oligonucleotide
uguguaaaauucacuucug

SEQ ID NO: 2726072 - RNA, 19 nt, Artificial Sequence
  Description of Artificial Sequence: Synthetic oligonucleotide
ucggaaaucucuuuuccga

SEQ ID NO: 2726073 - RNA, 19 nt, Artificial Sequence
  Description of Artificial Sequence: Synthetic oligonucleotide
uccgacuacuagaugauac

SEQ ID NO: 2726074 - RNA, 19 nt, Artificial Sequence
  Description of Artificial Sequence: Synthetic oligonucleotide
uccaucacugcuucuaaca

SEQ ID NO: 2726075 - RNA, 19 nt, Artificial Sequence
  Description of Artificial Sequence: Synthetic oligonucleotide
cugguggugaagaugugcg

SEQ ID NO: 2726076 - RNA, 19 nt, Artificial Sequence
  Description of Artificial Sequence: Synthetic oligonucleotide
uggggauccuuucugucgg

SEQ ID NO: 2726077 - RNA, 19 nt, Artificial Sequence
  Description of Artificial Sequence: Synthetic oligonucleotide
aaaggcgugcgccaccgag

SEQ ID NO: 2726078 - RNA, 19 nt, Artificial Sequence
  Description of Artificial Sequence: Synthetic oligonucleotide
uuucugucgguuuagcguc

SEQ ID NO: 2726079 - RNA, 19 nt, Artificial Sequence
  Description of Artificial Sequence: Synthetic oligonucleotide
ucuaacacagacuccuggu

SEQ ID NO: 2726080 - RNA, 19 nt, Artificial Sequence
  Description of Artificial Sequence: Synthetic oligonucleotide
ucuuuuccgacuacuagau

SEQ ID NO: 2726081 - RNA, 19 nt, Artificial Sequence
  Description of Artificial Sequence: Synthetic oligonucleotide
auucacuucuguuucuucu

SEQ ID NO: 2726082 - RNA, 19 nt, Artificial Sequence
  Description of Artificial Sequence: Synthetic oligonucleotide
uuuggaauucuuccucugu

SEQ ID NO: 2726083 - RNA, 19 nt, Artificial Sequence
  Description of Artificial Sequence: Synthetic oligonucleotide
auacacucuacuuucugga

SEQ ID NO: 2726084 - RNA, 19 nt, Artificial Sequence
  Description of Artificial Sequence: Synthetic oligonucleotide
gauuuggggauccuuucug

SEQ ID NO: 2726085 - RNA, 19 nt, Artificial Sequence
  Description of Artificial Sequence: Synthetic oligonucleotide
ucugaauuaguuuggcuuu

SEQ ID NO: 2726086 - RNA, 19 nt, Artificial Sequence
  Description of Artificial Sequence: Synthetic oligonucleotide
ugauacacucuacuuucug

SEQ ID NO: 2726087 - RNA, 19 nt, Artificial Sequence
  Description of Artificial Sequence: Synthetic oligonucleotide
guuucuucuugaucugacg

SEQ ID NO: 2726088 - RNA, 19 nt, Artificial Sequence
  Description of Artificial Sequence: Synthetic oligonucleotide
agaugauacacucuacuuu

SEQ ID NO: 2726089 - RNA, 19 nt, Artificial Sequence
  Description of Artificial Sequence: Synthetic oligonucleotide
uaaugcuaacaaucugucc

SEQ ID NO: 2726090 - RNA, 19 nt, Artificial Sequence
  Description of Artificial Sequence: Synthetic oligonucleotide
uuuucggaaaucucuuuuc

SEQ ID NO: 2726091 - RNA, 19 nt, Artificial Sequence
  Description of Artificial Sequence: Synthetic oligonucleotide
cugcuucuaacacagacuc

SEQ ID NO: 2726092 - RNA, 19 nt, Artificial Sequence
  Description of Artificial Sequence: Synthetic oligonucleotide
uguuacugucagcuaacug

SEQ ID NO: 2726093 - RNA, 19 nt, Artificial Sequence
  Description of Artificial Sequence: Synthetic oligonucleotide
uguuucuucuugaucugac

SEQ ID NO: 2726094 - RNA, 19 nt, Artificial Sequence
  Description of Artificial Sequence: Synthetic oligonucleotide
uucuucuugcuuaugucuc

SEQ ID NO: 2726095 - RNA, 19 nt, Artificial Sequence
  Description of Artificial Sequence: Synthetic oligonucleotide
uucggaguuccuaucuuug

SEQ ID NO: 2726096 - RNA, 19 nt, Artificial Sequence
  Description of Artificial Sequence: Synthetic oligonucleotide
ucuuuggaauucuuccucu

SEQ ID NO: 2726097 - RNA, 19 nt, Artificial Sequence
  Description of Artificial Sequence: Synthetic oligonucleotide
uuuuguagacgaagguuuc

SEQ ID NO: 2726098 - RNA, 19 nt, Artificial Sequence
  Description of Artificial Sequence: Synthetic oligonucleotide
ucuguuacugucagcuaac

SEQ ID NO: 2726099 - RNA, 19 nt, Artificial Sequence
  Description of Artificial Sequence: Synthetic oligonucleotide
uacucagcagccugucugg

SEQ ID NO: 2726100 - RNA, 19 nt, Artificial Sequence
  Description of Artificial Sequence: Synthetic oligonucleotide
caauugguacugauuuggg

SEQ ID NO: 2726101 - RNA, 19 nt, Artificial Sequence
  Description of Artificial Sequence: Synthetic oligonucleotide
ugaggaacauuuuccuucu

SEQ ID NO: 2726102 - RNA, 19 nt, Artificial Sequence
  Description of Artificial Sequence: Synthetic oligonucleotide
agcuaacugggucacaccu

SEQ ID NO: 2726103 - RNA, 19 nt, Artificial Sequence
  Description of Artificial Sequence: Synthetic oligonucleotide
uucuggaacucuguuacug

SEQ ID NO: 2726104 - RNA, 19 nt, Artificial Sequence
  Description of Artificial Sequence: Synthetic oligonucleotide
ucggaguuccuaucuuugg

SEQ ID NO: 2726105 - RNA, 19 nt, Artificial Sequence
  Description of Artificial Sequence: Synthetic oligonucleotide
uugcagaaaagcacggauc

SEQ ID NO: 2726106 - RNA, 19 nt, Artificial Sequence
  Description of Artificial Sequence: Synthetic oligonucleotide
uugauguuucugaauuagu

SEQ ID NO: 2726107 - RNA, 19 nt, Artificial Sequence
  Description of Artificial Sequence: Synthetic oligonucleotide
gaaaagcacggauccauca

SEQ ID NO: 2726108 - RNA, 19 nt, Artificial Sequence
  Description of Artificial Sequence: Synthetic oligonucleotide
uggaacucuguuacuguca

SEQ ID NO: 2726109 - RNA, 19 nt, Artificial Sequence
  Description of Artificial Sequence: Synthetic oligonucleotide
uuucugaauuaguuuggcu

SEQ ID NO: 2726110 - RNA, 19 nt, Artificial Sequence
  Description of Artificial Sequence: Synthetic oligonucleotide
uagacgaagguuucucugu

SEQ ID NO: 2726111 - RNA, 19 nt, Artificial Sequence
  Description of Artificial Sequence: Synthetic oligonucleotide
guaaaauucacuucuguuu

SEQ ID NO: 2726112 - RNA, 19 nt, Artificial Sequence
  Description of Artificial Sequence: Synthetic oligonucleotide
ugauuuggggauccuuucu

SEQ ID NO: 2726113 - RNA, 19 nt, Artificial Sequence
  Description of Artificial Sequence: Synthetic oligonucleotide
gaauucuuccucuguuuac

SEQ ID NO: 2726114 - RNA, 19 nt, Artificial Sequence
  Description of Artificial Sequence: Synthetic oligonucleotide
ugaagcuguaaugcuaaca

SEQ ID NO: 2726115 - RNA, 19 nt, Artificial Sequence
  Description of Artificial Sequence: Synthetic oligonucleotide
uagaugauacacucuacuu

SEQ ID NO: 2726116 - RNA, 19 nt, Artificial Sequence
  Description of Artificial Sequence: Synthetic oligonucleotide
ucuugaucugacgauuuga

SEQ ID NO: 2726117 - RNA, 19 nt, Artificial Sequence
  Description of Artificial Sequence: Synthetic oligonucleotide
guagacgaagguuucucug

SEQ ID NO: 2726118 - RNA, 19 nt, Artificial Sequence
  Description of Artificial Sequence: Synthetic oligonucleotide
uguagacgaagguuucucu

SEQ ID NO: 2726119 - RNA, 19 nt, Artificial Sequence
  Description of Artificial Sequence: Synthetic oligonucleotide
uguucuucuugcuuauguc

SEQ ID NO: 2726120 - RNA, 19 nt, Artificial Sequence
  Description of Artificial Sequence: Synthetic oligonucleotide
uguuuacucagcagccugu

SEQ ID NO: 2726121 - RNA, 19 nt, Artificial Sequence
  Description of Artificial Sequence: Synthetic oligonucleotide
ucugacgauuugaggaaca

SEQ ID NO: 2726122 - RNA, 19 nt, Artificial Sequence
  Description of Artificial Sequence: Synthetic oligonucleotide
uucuugaucugacgauuug

SEQ ID NO: 2726123 - RNA, 19 nt, Artificial Sequence
  Description of Artificial Sequence: Synthetic oligonucleotide
uucugaagcuguaaugcua

SEQ ID NO: 2726124 - RNA, 19 nt, Artificial Sequence
  Description of Artificial Sequence: Synthetic oligonucleotide
aacacagacuccugguuuu

SEQ ID NO: 2726125 - RNA, 19 nt, Artificial Sequence
  Description of Artificial Sequence: Synthetic oligonucleotide
ucuugcuuaugucucucaa

SEQ ID NO: 2726126 - RNA, 19 nt, Artificial Sequence
  Description of Artificial Sequence: Synthetic oligonucleotide
ucugguggugaagaugugc

SEQ ID NO: 2726127 - RNA, 19 nt, Artificial Sequence
  Description of Artificial Sequence: Synthetic oligonucleotide
ucagcuaacugggucacac

SEQ ID NO: 2726128 - RNA, 19 nt, Artificial Sequence
  Description of Artificial Sequence: Synthetic oligonucleotide
ucuggaacucuguuacugu

SEQ ID NO: 2726129 - RNA, 19 nt, Artificial Sequence
  Description of Artificial Sequence: Synthetic oligonucleotide
uuuugauguuucugaauua

SEQ ID NO: 2726130 - RNA, 19 nt, Artificial Sequence
  Description of Artificial Sequence: Synthetic oligonucleotide
ucgguuuagcgucaucggu

SEQ ID NO: 2726131 - RNA, 19 nt, Artificial Sequence
  Description of Artificial Sequence: Synthetic oligonucleotide
augcuaacaaucuguccug

SEQ ID NO: 2726132 - RNA, 19 nt, Artificial Sequence
  Description of Artificial Sequence: Synthetic oligonucleotide
cucuuuuccgacuacuaga

SEQ ID NO: 2726133 - RNA, 19 nt, Artificial Sequence
  Description of Artificial Sequence: Synthetic oligonucleotide
uuggaauucuuccucuguu

SEQ ID NO: 2726134 - RNA, 19 nt, Artificial Sequence
  Description of Artificial Sequence: Synthetic oligonucleotide
agcacggauccaucacugc

SEQ ID NO: 2726135 - RNA, 19 nt, Artificial Sequence
  Description of Artificial Sequence: Synthetic oligonucleotide
gucgguuuagcgucaucgg

SEQ ID NO: 2726136 - RNA, 19 nt, Artificial Sequence
  Description of Artificial Sequence: Synthetic oligonucleotide
uuuccgacuacuagaugau

SEQ ID NO: 2726137 - RNA, 19 nt, Artificial Sequence
  Description of Artificial Sequence: Synthetic oligonucleotide
gaaaucucuuuuccgacua

SEQ ID NO: 2726138 - RNA, 19 nt, Artificial Sequence
  Description of Artificial Sequence: Synthetic oligonucleotide
acggauccaucacugcuuc

SEQ ID NO: 2726139 - RNA, 19 nt, Artificial Sequence
  Description of Artificial Sequence: Synthetic oligonucleotide
acuagaugauacacucuac

SEQ ID NO: 2726140 - RNA, 19 nt, Artificial Sequence
  Description of Artificial Sequence: Synthetic oligonucleotide
gaucugacgauuugaggaa

SEQ ID NO: 2726141 - RNA, 19 nt, Artificial Sequence
  Description of Artificial Sequence: Synthetic oligonucleotide
auccaucacugcuucuaac

SEQ ID NO: 2726142 - RNA, 19 nt, Artificial Sequence
  Description of Artificial Sequence: Synthetic oligonucleotide
auuuggggauccuuucugu

SEQ ID NO: 2726143 - RNA, 19 nt, Artificial Sequence
  Description of Artificial Sequence: Synthetic oligonucleotide
uuugaggaacauuuuccuu

SEQ ID NO: 2726144 - RNA, 19 nt, Artificial Sequence
  Description of Artificial Sequence: Synthetic oligonucleotide
uucuucuugaucugacgau

SEQ ID NO: 2726145 - RNA, 19 nt, Artificial Sequence
  Description of Artificial Sequence: Synthetic oligonucleotide
agcgucaucgguucuuugu

SEQ ID NO: 2726146 - RNA, 19 nt, Artificial Sequence
  Description of Artificial Sequence: Synthetic oligonucleotide
uugguacugauuuggggau

SEQ ID NO: 2726147 - RNA, 19 nt, Artificial Sequence
  Description of Artificial Sequence: Synthetic oligonucleotide
uuuugcagaaaagcacgga

SEQ ID NO: 2726148 - RNA, 19 nt, Artificial Sequence
  Description of Artificial Sequence: Synthetic oligonucleotide
uuuacucagcagccugucu

SEQ ID NO: 2726149 - RNA, 19 nt, Artificial Sequence
  Description of Artificial Sequence: Synthetic oligonucleotide
gauguuucugaauuaguuu

SEQ ID NO: 2726150 - RNA, 19 nt, Artificial Sequence
  Description of Artificial Sequence: Synthetic oligonucleotide
agacgaagguuucucugug

SEQ ID NO: 2726151 - RNA, 19 nt, Artificial Sequence
  Description of Artificial Sequence: Synthetic oligonucleotide
cuguaaugcuaacaaucug

SEQ ID NO: 2726152 - RNA, 19 nt, Artificial Sequence
  Description of Artificial Sequence: Synthetic oligonucleotide
gacgauuugaggaacauuu

SEQ ID NO: 2726153 - RNA, 19 nt, Artificial Sequence
  Description of Artificial Sequence: Synthetic oligonucleotide
guuucugaauuaguuuggc

SEQ ID NO: 2726154 - RNA, 19 nt, Artificial Sequence
  Description of Artificial Sequence: Synthetic oligonucleotide
ggaacucuguuacugucag

SEQ ID NO: 2726155 - RNA, 19 nt, Artificial Sequence
  Description of Artificial Sequence: Synthetic oligonucleotide
cuguuuacucagcagccug

SEQ ID NO: 2726156 - RNA, 19 nt, Artificial Sequence
  Description of Artificial Sequence: Synthetic oligonucleotide
ccucuguuuacucagcagc

SEQ ID NO: 2726157 - RNA, 19 nt, Artificial Sequence
  Description of Artificial Sequence: Synthetic oligonucleotide
gugaagaugugcgcaauug

SEQ ID NO: 2726158 - RNA, 19 nt, Artificial Sequence
  Description of Artificial Sequence: Synthetic oligonucleotide
uggaccccuauccuggcac

SEQ ID NO: 2726159 - RNA, 19 nt, Artificial Sequence
  Description of Artificial Sequence: Synthetic oligonucleotide
cuuuggaauucuuccucug

SEQ ID NO: 2726160 - RNA, 19 nt, Artificial Sequence
  Description of Artificial Sequence: Synthetic oligonucleotide
acuuucuggaacucuguua

SEQ ID NO: 2726161 - RNA, 19 nt, Artificial Sequence
  Description of Artificial Sequence: Synthetic oligonucleotide
ugcuucuaacacagacucc

SEQ ID NO: 2726162 - RNA, 19 nt, Artificial Sequence
  Description of Artificial Sequence: Synthetic oligonucleotide
guaaugcuaacaaucuguc

SEQ ID NO: 2726163 - RNA, 19 nt, Artificial Sequence
  Description of Artificial Sequence: Synthetic oligonucleotide
aggaacauuuuccuucuuu

SEQ ID NO: 2726164 - RNA, 19 nt, Artificial Sequence
  Description of Artificial Sequence: Synthetic oligonucleotide
uguagcuuuggaccccuau

SEQ ID NO: 2726165 - RNA, 19 nt, Artificial Sequence
  Description of Artificial Sequence: Synthetic oligonucleotide
acaaucuguccuguucuuc

SEQ ID NO: 2726166 - RNA, 19 nt, Artificial Sequence
  Description of Artificial Sequence: Synthetic oligonucleotide
aaauucacuucuguuucuu

SEQ ID NO: 2726167 - RNA, 19 nt, Artificial Sequence
  Description of Artificial Sequence: Synthetic oligonucleotide
aguuccuaucuuuggaauu

SEQ ID NO: 2726168 - RNA, 19 nt, Artificial Sequence
  Description of Artificial Sequence: Synthetic oligonucleotide
uuuggggauccuuucuguc

SEQ ID NO: 2726169 - RNA, 19 nt, Artificial Sequence
  Description of Artificial Sequence: Synthetic oligonucleotide
guuccuaucuuuggaauuc

SEQ ID NO: 2726170 - RNA, 19 nt, Artificial Sequence
  Description of Artificial Sequence: Synthetic oligonucleotide
uuuguagacgaagguuucu

SEQ ID NO: 2726171 - RNA, 19 nt, Artificial Sequence
  Description of Artificial Sequence: Synthetic oligonucleotide
uccaccucuuucugaagcu

SEQ ID NO: 2726172 - RNA, 19 nt, Artificial Sequence
  Description of Artificial Sequence: Synthetic oligonucleotide
agaaaagcacggauccauc

SEQ ID NO: 2726173 - RNA, 19 nt, Artificial Sequence
  Description of Artificial Sequence: Synthetic oligonucleotide
aacaaucuguccuguucuu

SEQ ID NO: 2726174 - RNA, 19 nt, Artificial Sequence
  Description of Artificial Sequence: Synthetic oligonucleotide
guagcuuuggaccccuauc

SEQ ID NO: 2726175 - RNA, 19 nt, Artificial Sequence
  Description of Artificial Sequence: Synthetic oligonucleotide
aucugacgauuugaggaac

SEQ ID NO: 2726176 - RNA, 19 nt, Artificial Sequence
  Description of Artificial Sequence: Synthetic oligonucleotide
uuucggaguuccuaucuuu

SEQ ID NO: 2726177 - RNA, 19 nt, Artificial Sequence
  Description of Artificial Sequence: Synthetic oligonucleotide
uuuucggaguuccuaucuu

SEQ ID NO: 2726178 - RNA, 19 nt, Artificial Sequence
  Description of Artificial Sequence: Synthetic oligonucleotide
ucuucuugaucugacgauu

SEQ ID NO: 2726179 - RNA, 19 nt, Artificial Sequence
  Description of Artificial Sequence: Synthetic oligonucleotide
uggaauucuuccucuguuu

SEQ ID NO: 2726180 - RNA, 19 nt, Artificial Sequence
  Description of Artificial Sequence: Synthetic oligonucleotide
acugcuucuaacacagacu

SEQ ID NO: 2726181 - RNA, 19 nt, Artificial Sequence
  Description of Artificial Sequence: Synthetic oligonucleotide
uguccuguucuucuugcuu

SEQ ID NO: 2726182 - RNA, 19 nt, Artificial Sequence
  Description of Artificial Sequence: Synthetic oligonucleotide
uacacucuacuuucuggaa

SEQ ID NO: 2726183 - RNA, 19 nt, Artificial Sequence
  Description of Artificial Sequence: Synthetic oligonucleotide
ugcgcaauugguacugauu

SEQ ID NO: 2726184 - RNA, 19 nt, Artificial Sequence
  Description of Artificial Sequence: Synthetic oligonucleotide
cugauuuggggauccuuuc

SEQ ID NO: 2726185 - RNA, 19 nt, Artificial Sequence
  Description of Artificial Sequence: Synthetic oligonucleotide
aagcacggauccaucacug

SEQ ID NO: 2726186 - RNA, 19 nt, Artificial Sequence
  Description of Artificial Sequence: Synthetic oligonucleotide
guucuucuugcuuaugucu

SEQ ID NO: 2726187 - RNA, 19 nt, Artificial Sequence
  Description of Artificial Sequence: Synthetic oligonucleotide
uuguagacgaagguuucuc

SEQ ID NO: 2726188 - RNA, 19 nt, Artificial Sequence
  Description of Artificial Sequence: Synthetic oligonucleotide
aagaugugcgcaauuggua

SEQ ID NO: 2726189 - RNA, 19 nt, Artificial Sequence
  Description of Artificial Sequence: Synthetic oligonucleotide
uacuuucuggaacucuguu

SEQ ID NO: 2726190 - RNA, 19 nt, Artificial Sequence
  Description of Artificial Sequence: Synthetic oligonucleotide
cuggaacucuguuacuguc

SEQ ID NO: 2726191 - RNA, 19 nt, Artificial Sequence
  Description of Artificial Sequence: Synthetic oligonucleotide
uucuugcuuaugucucuca

SEQ ID NO: 2726192 - RNA, 19 nt, Artificial Sequence
  Description of Artificial Sequence: Synthetic oligonucleotide
uugcucuggaaaccaggcu

SEQ ID NO: 2726193 - RNA, 19 nt, Artificial Sequence
  Description of Artificial Sequence: Synthetic oligonucleotide
aaucuguccuguucuucuu

SEQ ID NO: 2726194 - RNA, 19 nt, Artificial Sequence
  Description of Artificial Sequence: Synthetic oligonucleotide
cuagaugauacacucuacu

SEQ ID NO: 2726195 - RNA, 19 nt, Artificial Sequence
  Description of Artificial Sequence: Synthetic oligonucleotide
ugguggugaagaugugcgc

SEQ ID NO: 2726196 - RNA, 19 nt, Artificial Sequence
  Description of Artificial Sequence: Synthetic oligonucleotide
cugucagcuaacuggguca

SEQ ID NO: 2726197 - RNA, 19 nt, Artificial Sequence
  Description of Artificial Sequence: Synthetic oligonucleotide
cuuuguccaccucuuucug

SEQ ID NO: 2726198 - RNA, 19 nt, Artificial Sequence
  Description of Artificial Sequence: Synthetic oligonucleotide
gaagaugugcgcaauuggu

SEQ ID NO: 2726199 - RNA, 19 nt, Artificial Sequence
  Description of Artificial Sequence: Synthetic oligonucleotide
aucgguucuuuguccaccu

SEQ ID NO: 2726200 - RNA, 19 nt, Artificial Sequence
  Description of Artificial Sequence: Synthetic oligonucleotide
cucuguuacugucagcuaa

SEQ ID NO: 2726201 - RNA, 19 nt, Artificial Sequence
  Description of Artificial Sequence: Synthetic oligonucleotide
gauccuuucugucgguuua

SEQ ID NO: 2726202 - RNA, 19 nt, Artificial Sequence
  Description of Artificial Sequence: Synthetic oligonucleotide
acgaagguuucucugugua

SEQ ID NO: 2726203 - RNA, 19 nt, Artificial Sequence
  Description of Artificial Sequence: Synthetic oligonucleotide
cuucuaacacagacuccug

SEQ ID NO: 2726204 - RNA, 19 nt, Artificial Sequence
  Description of Artificial Sequence: Synthetic oligonucleotide
ccgaguacugggauuaaag

SEQ ID NO: 2726205 - RNA, 19 nt, Artificial Sequence
  Description of Artificial Sequence: Synthetic oligonucleotide
uuuggaccccuauccuggc

SEQ ID NO: 2726206 - RNA, 19 nt, Artificial Sequence
  Description of Artificial Sequence: Synthetic oligonucleotide
agcuuuggaccccuauccu

SEQ ID NO: 2726207 - RNA, 19 nt, Artificial Sequence
  Description of Artificial Sequence: Synthetic oligonucleotide
gucaucgguucuuugucca

SEQ ID NO: 2726208 - RNA, 19 nt, Artificial Sequence
  Description of Artificial Sequence: Synthetic oligonucleotide
caucacugcuucuaacaca

SEQ ID NO: 2726209 - RNA, 19 nt, Artificial Sequence
  Description of Artificial Sequence: Synthetic oligonucleotide
uuucuggaacucuguuacu

SEQ ID NO: 2726210 - RNA, 19 nt, Artificial Sequence
  Description of Artificial Sequence: Synthetic oligonucleotide
caucgguucuuuguccacc

SEQ ID NO: 2726211 - RNA, 19 nt, Artificial Sequence
  Description of Artificial Sequence: Synthetic oligonucleotide
gaacucuguuacugucagc

SEQ ID NO: 2726212 - RNA, 19 nt, Artificial Sequence
  Description of Artificial Sequence: Synthetic oligonucleotide
uuuagcgucaucgguucuu

SEQ ID NO: 2726213 - RNA, 19 nt, Artificial Sequence
  Description of Artificial Sequence: Synthetic oligonucleotide
cuugcuuaugucucucaaa

SEQ ID NO: 2726214 - RNA, 19 nt, Artificial Sequence
  Description of Artificial Sequence: Synthetic oligonucleotide
ucaucgguucuuuguccac

SEQ ID NO: 2726215 - RNA, 19 nt, Artificial Sequence
  Description of Artificial Sequence: Synthetic oligonucleotide
gauccaucacugcuucuaa

SEQ ID NO: 2726216 - RNA, 19 nt, Artificial Sequence
  Description of Artificial Sequence: Synthetic oligonucleotide
gguuuagcgucaucgguuc

SEQ ID NO: 2726217 - RNA, 19 nt, Artificial Sequence
  Description of Artificial Sequence: Synthetic oligonucleotide
ccuuucugucgguuuagcg

SEQ ID NO: 2726218 - RNA, 19 nt, Artificial Sequence
  Description of Artificial Sequence: Synthetic oligonucleotide
gguacugauuuggggaucc

SEQ ID NO: 2726219 - RNA, 19 nt, Artificial Sequence
  Description of Artificial Sequence: Synthetic oligonucleotide
augugcgcaauugguacug

SEQ ID NO: 2726220 - RNA, 19 nt, Artificial Sequence
  Description of Artificial Sequence: Synthetic oligonucleotide
guguaaaauucacuucugu

SEQ ID NO: 2726221 - RNA, 19 nt, Artificial Sequence
  Description of Artificial Sequence: Synthetic oligonucleotide
uucugucgguuuagcguca

SEQ ID NO: 2726222 - RNA, 19 nt, Artificial Sequence
  Description of Artificial Sequence: Synthetic oligonucleotide
ugucagcuaacugggucac

SEQ ID NO: 2726223 - RNA, 19 nt, Artificial Sequence
  Description of Artificial Sequence: Synthetic oligonucleotide
cuuuuccgacuacuagaug

SEQ ID NO: 2726224 - RNA, 19 nt, Artificial Sequence
  Description of Artificial Sequence: Synthetic oligonucleotide
cuggaaaccaggcuggccu

SEQ ID NO: 2726225 - RNA, 19 nt, Artificial Sequence
  Description of Artificial Sequence: Synthetic oligonucleotide
gcuuuggaccccuauccug

SEQ ID NO: 2726226 - RNA, 19 nt, Artificial Sequence
  Description of Artificial Sequence: Synthetic oligonucleotide
agacuccugguuuucuuuu

SEQ ID NO: 2726227 - RNA, 19 nt, Artificial Sequence
  Description of Artificial Sequence: Synthetic oligonucleotide
uuccuaucuuuggaauucu

SEQ ID NO: 2726228 - RNA, 19 nt, Artificial Sequence
  Description of Artificial Sequence: Synthetic oligonucleotide
ugcuaacaaucuguccugu

SEQ ID NO: 2726229 - RNA, 19 nt, Artificial Sequence
  Description of Artificial Sequence: Synthetic oligonucleotide
cugucugguggugaagaug

SEQ ID NO: 2726230 - RNA, 19 nt, Artificial Sequence
  Description of Artificial Sequence: Synthetic oligonucleotide
cacucuacuuucuggaacu

SEQ ID NO: 2726231 - RNA, 19 nt, Artificial Sequence
  Description of Artificial Sequence: Synthetic oligonucleotide
cagcuaacugggucacacc

SEQ ID NO: 2726232 - RNA, 19 nt, Artificial Sequence
  Description of Artificial Sequence: Synthetic oligonucleotide
uacugucagcuaacugggu

SEQ ID NO: 2726233 - RNA, 19 nt, Artificial Sequence
  Description of Artificial Sequence: Synthetic oligonucleotide
gacuacuagaugauacacu

SEQ ID NO: 2726234 - RNA, 19 nt, Artificial Sequence
  Description of Artificial Sequence: Synthetic oligonucleotide
gaugugcgcaauugguacu

SEQ ID NO: 2726235 - RNA, 19 nt, Artificial Sequence
  Description of Artificial Sequence: Synthetic oligonucleotide
caaucuguccuguucuucu

SEQ ID NO: 2726236 - RNA, 19 nt, Artificial Sequence
  Description of Artificial Sequence: Synthetic oligonucleotide
uuggaccccuauccuggca

SEQ ID NO: 2726237 - RNA, 19 nt, Artificial Sequence
  Description of Artificial Sequence: Synthetic oligonucleotide
ggaguuccuaucuuuggaa

SEQ ID NO: 2726238 - RNA, 19 nt, Artificial Sequence
  Description of Artificial Sequence: Synthetic oligonucleotide
uccuaucuuuggaauucuu

SEQ ID NO: 2726239 - RNA, 19 nt, Artificial Sequence
  Description of Artificial Sequence: Synthetic oligonucleotide
uggaaaccaggcuggccuc

SEQ ID NO: 2726240 - RNA, 19 nt, Artificial Sequence
  Description of Artificial Sequence: Synthetic oligonucleotide
acagacuccugguuuucuu

SEQ ID NO: 2726241 - RNA, 19 nt, Artificial Sequence
  Description of Artificial Sequence: Synthetic oligonucleotide
uccuuucugucgguuuagc

SEQ ID NO: 2726242 - RNA, 19 nt, Artificial Sequence
  Description of Artificial Sequence: Synthetic oligonucleotide
gcucuggaaaccaggcugg

SEQ ID NO: 2726243 - RNA, 19 nt, Artificial Sequence
  Description of Artificial Sequence: Synthetic oligonucleotide
ggaauucuuccucuguuua

SEQ ID NO: 2726244 - RNA, 19 nt, Artificial Sequence
  Description of Artificial Sequence: Synthetic oligonucleotide
gaguuccuaucuuuggaau

SEQ ID NO: 2726245 - RNA, 19 nt, Artificial Sequence
  Description of Artificial Sequence: Synthetic oligonucleotide
cugaagcuguaaugcuaac

SEQ ID NO: 2726246 - RNA, 19 nt, Artificial Sequence
  Description of Artificial Sequence: Synthetic oligonucleotide
gguggugaagaugugcgca

SEQ ID NO: 2726247 - RNA, 19 nt, Artificial Sequence
  Description of Artificial Sequence: Synthetic oligonucleotide
auccuuucugucgguuuag

SEQ ID NO: 2726248 - RNA, 19 nt, Artificial Sequence
  Description of Artificial Sequence: Synthetic oligonucleotide
gcuucuaacacagacuccu

SEQ ID NO: 2726249 - RNA, 19 nt, Artificial Sequence
  Description of Artificial Sequence: Synthetic oligonucleotide
ugacgauuugaggaacauu

SEQ ID NO: 2726250 - RNA, 19 nt, Artificial Sequence
  Description of Artificial Sequence: Synthetic oligonucleotide
ccaucacugcuucuaacac

SEQ ID NO: 2726251 - RNA, 19 nt, Artificial Sequence
  Description of Artificial Sequence: Synthetic oligonucleotide
guguuccaaaucuaucagu

SEQ ID NO: 2726252 - RNA, 19 nt, Artificial Sequence
  Description of Artificial Sequence: Synthetic oligonucleotide
uuagcgucaucgguucuuu

SEQ ID NO: 2726253 - RNA, 19 nt, Artificial Sequence
  Description of Artificial Sequence: Synthetic oligonucleotide
aaggcgugcgccaccgaga

SEQ ID NO: 2726254 - RNA, 19 nt, Artificial Sequence
  Description of Artificial Sequence: Synthetic oligonucleotide
guuuacucagcagccuguc

SEQ ID NO: 2726255 - RNA, 19 nt, Artificial Sequence
  Description of Artificial Sequence: Synthetic oligonucleotide
cgauuugaggaacauuuuc

SEQ ID NO: 2726256 - RNA, 19 nt, Artificial Sequence
  Description of Artificial Sequence: Synthetic oligonucleotide
augauacacucuacuuucu

SEQ ID NO: 2726257 - RNA, 19 nt, Artificial Sequence
  Description of Artificial Sequence: Synthetic oligonucleotide
uacugauuuggggauccuu

SEQ ID NO: 2726258 - RNA, 19 nt, Artificial Sequence
  Description of Artificial Sequence: Synthetic oligonucleotide
guggugaagaugugcgcaa

SEQ ID NO: 2726259 - RNA, 19 nt, Artificial Sequence
  Description of Artificial Sequence: Synthetic oligonucleotide
ggaacauuuuccuucuuuu

SEQ ID NO: 2726260 - RNA, 19 nt, Artificial Sequence
  Description of Artificial Sequence: Synthetic oligonucleotide
uagcgucaucgguucuuug

SEQ ID NO: 2726261 - RNA, 19 nt, Artificial Sequence
  Description of Artificial Sequence: Synthetic oligonucleotide
gcuguaaugcuaacaaucu

SEQ ID NO: 2726262 - RNA, 19 nt, Artificial Sequence
  Description of Artificial Sequence: Synthetic oligonucleotide
acucuguuacugucagcua

SEQ ID NO: 2726263 - RNA, 19 nt, Artificial Sequence
  Description of Artificial Sequence: Synthetic oligonucleotide
ugugcgcaauugguacuga

SEQ ID NO: 2726264 - RNA, 19 nt, Artificial Sequence
  Description of Artificial Sequence: Synthetic oligonucleotide
aggcgugcgccaccgagau

SEQ ID NO: 2726265 - RNA, 19 nt, Artificial Sequence
  Description of Artificial Sequence: Synthetic oligonucleotide
aucucuuuuccgacuacua

SEQ ID NO: 2726266 - RNA, 19 nt, Artificial Sequence
  Description of Artificial Sequence: Synthetic oligonucleotide
gacgaagguuucucugugu

SEQ ID NO: 2726267 - RNA, 19 nt, Artificial Sequence
  Description of Artificial Sequence: Synthetic oligonucleotide
ggaaaucucuuuuccgacu

SEQ ID NO: 2726268 - RNA, 19 nt, Artificial Sequence
  Description of Artificial Sequence: Synthetic oligonucleotide
cuacuagaugauacacucu

SEQ ID NO: 2726269 - RNA, 19 nt, Artificial Sequence
  Description of Artificial Sequence: Synthetic oligonucleotide
ucgguucuuuguccaccuc

SEQ ID NO: 2726270 - RNA, 19 nt, Artificial Sequence
  Description of Artificial Sequence: Synthetic oligonucleotide
uggugaagaugugcgcaau

SEQ ID NO: 2726271 - RNA, 19 nt, Artificial Sequence
  Description of Artificial Sequence: Synthetic oligonucleotide
cuguuucuucuugaucuga

SEQ ID NO: 2726272 - RNA, 19 nt, Artificial Sequence
  Description of Artificial Sequence: Synthetic oligonucleotide
cucuggaaaccaggcuggc

SEQ ID NO: 2726273 - RNA, 19 nt, Artificial Sequence
  Description of Artificial Sequence: Synthetic oligonucleotide
gcgucaucgguucuuuguc

SEQ ID NO: 2726274 - RNA, 19 nt, Artificial Sequence
  Description of Artificial Sequence: Synthetic oligonucleotide
cucuuucugaagcuguaau

SEQ ID NO: 2726275 - RNA, 19 nt, Artificial Sequence
  Description of Artificial Sequence: Synthetic oligonucleotide
acgauuugaggaacauuuu

SEQ ID NO: 2726276 - RNA, 19 nt, Artificial Sequence
  Description of Artificial Sequence: Synthetic oligonucleotide
cuacuuucuggaacucugu

SEQ ID NO: 2726277 - RNA, 19 nt, Artificial Sequence
  Description of Artificial Sequence: Synthetic oligonucleotide
agcauguguuccaaaucua

SEQ ID NO: 2726278 - RNA, 19 nt, Artificial Sequence
  Description of Artificial Sequence: Synthetic oligonucleotide
uuccgacuacuagaugaua

SEQ ID NO: 2726279 - RNA, 19 nt, Artificial Sequence
  Description of Artificial Sequence: Synthetic oligonucleotide
gcuaacugggucacaccug

SEQ ID NO: 2726280 - RNA, 19 nt, Artificial Sequence
  Description of Artificial Sequence: Synthetic oligonucleotide
cagaaaagcacggauccau

SEQ ID NO: 2726281 - RNA, 19 nt, Artificial Sequence
  Description of Artificial Sequence: Synthetic oligonucleotide
cggaaaucucuuuuccgac

SEQ ID NO: 2726282 - RNA, 19 nt, Artificial Sequence
  Description of Artificial Sequence: Synthetic oligonucleotide
guuccaaaucuaucaguuu

SEQ ID NO: 2726283 - RNA, 19 nt, Artificial Sequence
  Description of Artificial Sequence: Synthetic oligonucleotide
accccuauccuggcacuug

SEQ ID NO: 2726284 - RNA, 19 nt, Artificial Sequence
  Description of Artificial Sequence: Synthetic oligonucleotide
gcgcaauugguacugauuu

SEQ ID NO: 2726285 - RNA, 19 nt, Artificial Sequence
  Description of Artificial Sequence: Synthetic oligonucleotide
ccgacuacuagaugauaca

SEQ ID NO: 2726286 - RNA, 19 nt, Artificial Sequence
  Description of Artificial Sequence: Synthetic oligonucleotide
cgucaucgguucuuugucc

SEQ ID NO: 2726287 - RNA, 19 nt, Artificial Sequence
  Description of Artificial Sequence: Synthetic oligonucleotide
ggauccaucacugcuucua

SEQ ID NO: 2726288 - RNA, 19 nt, Artificial Sequence
  Description of Artificial Sequence: Synthetic oligonucleotide
guacugggauuaaaggcgu

SEQ ID NO: 2726289 - RNA, 19 nt, Artificial Sequence
  Description of Artificial Sequence: Synthetic oligonucleotide
cgacuacuagaugauacac

SEQ ID NO: 2726290 - RNA, 19 nt, Artificial Sequence
  Description of Artificial Sequence: Synthetic oligonucleotide
caccucuuucugaagcugu

SEQ ID NO: 2726291 - RNA, 19 nt, Artificial Sequence
  Description of Artificial Sequence: Synthetic oligonucleotide
ucugucgguuuagcgucau

SEQ ID NO: 2726292 - RNA, 19 nt, Artificial Sequence
  Description of Artificial Sequence: Synthetic oligonucleotide
cgcaauugguacugauuug

SEQ ID NO: 2726293 - RNA, 19 nt, Artificial Sequence
  Description of Artificial Sequence: Synthetic oligonucleotide
agccugucugguggugaag

SEQ ID NO: 2726294 - RNA, 19 nt, Artificial Sequence
  Description of Artificial Sequence: Synthetic oligonucleotide
ccccuauccuggcacuugc

SEQ ID NO: 2726295 - RNA, 19 nt, Artificial Sequence
  Description of Artificial Sequence: Synthetic oligonucleotide
gcacggauccaucacugcu

SEQ ID NO: 2726296 - RNA, 19 nt, Artificial Sequence
  Description of Artificial Sequence: Synthetic oligonucleotide
agcagccugucugguggug

SEQ ID NO: 2726297 - RNA, 19 nt, Artificial Sequence
  Description of Artificial Sequence: Synthetic oligonucleotide
accucuuucugaagcugua

SEQ ID NO: 2726298 - RNA, 19 nt, Artificial Sequence
  Description of Artificial Sequence: Synthetic oligonucleotide
cacggauccaucacugcuu

SEQ ID NO: 2726299 - RNA, 19 nt, Artificial Sequence
  Description of Artificial Sequence: Synthetic oligonucleotide
cucuacuuucuggaacucu

SEQ ID NO: 2726300 - RNA, 19 nt, Artificial Sequence
  Description of Artificial Sequence: Synthetic oligonucleotide
cugucgguuuagcgucauc

SEQ ID NO: 2726301 - RNA, 19 nt, Artificial Sequence
  Description of Artificial Sequence: Synthetic oligonucleotide
gccugucugguggugaaga

SEQ ID NO: 2726302 - RNA, 19 nt, Artificial Sequence
  Description of Artificial Sequence: Synthetic oligonucleotide
guuuagcgucaucgguucu

SEQ ID NO: 2726303 - RNA, 19 nt, Artificial Sequence
  Description of Artificial Sequence: Synthetic oligonucleotide
gucugguggugaagaugug

SEQ ID NO: 2726304 - RNA, 19 nt, Artificial Sequence
  Description of Artificial Sequence: Synthetic oligonucleotide
gcagaaaagcacggaucca

SEQ ID NO: 2726305 - RNA, 19 nt, Artificial Sequence
  Description of Artificial Sequence: Synthetic oligonucleotide
cagacuccugguuuucuuu

SEQ ID NO: 2726306 - RNA, 19 nt, Artificial Sequence
  Description of Artificial Sequence: Synthetic oligonucleotide
ccaccucuuucugaagcug

SEQ ID NO: 2726307 - RNA, 19 nt, Artificial Sequence
  Description of Artificial Sequence: Synthetic oligonucleotide
gcauguguuccaaaucuau

SEQ ID NO: 2726308 - RNA, 19 nt, Artificial Sequence
  Description of Artificial Sequence: Synthetic oligonucleotide
guucuuuguccaccucuuu

SEQ ID NO: 2726309 - RNA, 19 nt, Artificial Sequence
  Description of Artificial Sequence: Synthetic oligonucleotide
cuguccuguucuucuugcu

SEQ ID NO: 2726310 - RNA, 19 nt, Artificial Sequence
  Description of Artificial Sequence: Synthetic oligonucleotide
ucccgaguacugggauuaa

SEQ ID NO: 2726311 - RNA, 19 nt, Artificial Sequence
  Description of Artificial Sequence: Synthetic oligonucleotide
ggaaaccaggcuggccuca

SEQ ID NO: 2726312 - RNA, 19 nt, Artificial Sequence
  Description of Artificial Sequence: Synthetic oligonucleotide
cuguuacugucagcuaacu

SEQ ID NO: 2726313 - RNA, 19 nt, Artificial Sequence
  Description of Artificial Sequence: Synthetic oligonucleotide
cggaguuccuaucuuugga

SEQ ID NO: 2726314 - RNA, 19 nt, Artificial Sequence
  Description of Artificial Sequence: Synthetic oligonucleotide
ggauccuuucugucgguuu

SEQ ID NO: 2726315 - RNA, 19 nt, Artificial Sequence
  Description of Artificial Sequence: Synthetic oligonucleotide
cugacgauuugaggaacau

SEQ ID NO: 2726316 - RNA, 19 nt, Artificial Sequence
  Description of Artificial Sequence: Synthetic oligonucleotide
ggugaagaugugcgcaauu

SEQ ID NO: 2726317 - RNA, 19 nt, Artificial Sequence
  Description of Artificial Sequence: Synthetic oligonucleotide
gugcgcaauugguacugau

SEQ ID NO: 2726318 - RNA, 19 nt, Artificial Sequence
  Description of Artificial Sequence: Synthetic oligonucleotide
gcgugcgccaccgagauuu

SEQ ID NO: 2726319 - RNA, 19 nt, Artificial Sequence
  Description of Artificial Sequence: Synthetic oligonucleotide
cugaauuaguuuggcuuuu

SEQ ID NO: 2726320 - RNA, 19 nt, Artificial Sequence
  Description of Artificial Sequence: Synthetic oligonucleotide
gcagccugucuggugguga

SEQ ID NO: 2726321 - RNA, 19 nt, Artificial Sequence
  Description of Artificial Sequence: Synthetic oligonucleotide
ccuguucuucuugcuuaug

SEQ ID NO: 2726322 - RNA, 19 nt, Artificial Sequence
  Description of Artificial Sequence: Synthetic oligonucleotide
gcuaacaaucuguccuguu

SEQ ID NO: 2726323 - RNA, 19 nt, Artificial Sequence
  Description of Artificial Sequence: Synthetic oligonucleotide
cacagacuccugguuuucu

SEQ ID NO: 2726324 - RNA, 19 nt, Artificial Sequence
  Description of Artificial Sequence: Synthetic oligonucleotide
guacugauuuggggauccu

SEQ ID NO: 2726325 - RNA, 19 nt, Artificial Sequence
  Description of Artificial Sequence: Synthetic oligonucleotide
ccucuuucugaagcuguaa

SEQ ID NO: 2726326 - RNA, 19 nt, Artificial Sequence
  Description of Artificial Sequence: Synthetic oligonucleotide
ggaccccuauccuggcacu

SEQ ID NO: 2726327 - RNA, 19 nt, Artificial Sequence
  Description of Artificial Sequence: Synthetic oligonucleotide
cgguucuuuguccaccucu

SEQ ID NO: 2726328 - RNA, 19 nt, Artificial Sequence
  Description of Artificial Sequence: Synthetic oligonucleotide
gaccccuauccuggcacuu

SEQ ID NO: 2726329 - RNA, 19 nt, Artificial Sequence
  Description of Artificial Sequence: Synthetic oligonucleotide
cgguuuagcgucaucgguu

SEQ ID NO: 2726330 - RNA, 19 nt, Artificial Sequence
  Description of Artificial Sequence: Synthetic oligonucleotide
ggggauccuuucugucggu

SEQ ID NO: 2726331 - RNA, 19 nt, Artificial Sequence
  Description of Artificial Sequence: Synthetic oligonucleotide
cccgaguacugggauuaaa

SEQ ID NO: 2726332 - RNA, 19 nt, Artificial Sequence
  Description of Artificial Sequence: Synthetic oligonucleotide
ccugucugguggugaagau

SEQ ID NO: 2726333 - RNA, 19 nt, Artificial Sequence
  Description of Artificial Sequence: Synthetic oligonucleotide
gggauccuuucugucgguu

SEQ ID NO: 2726334 - RNA, 19 nt, Artificial Sequence
  Description of Artificial Sequence: Synthetic oligonucleotide
cggauccaucacugcuucu

SEQ ID NO: 2726335 - RNA, 19 nt, Artificial Sequence
  Description of Artificial Sequence: Synthetic oligonucleotide
ggcgugcgccaccgagauu

SEQ ID NO: 2726336 - RNA, 19 nt, Artificial Sequence
  Description of Artificial Sequence: Synthetic oligonucleotide
cgugcgccaccgagauuuu

SEQ ID NO: 2726337 - RNA, 19 nt, Artificial Sequence
  Description of Artificial Sequence: Synthetic oligonucleotide
aggguuuugauguugaagc

SEQ ID NO: 2726338 - RNA, 19 nt, Artificial Sequence
  Description of Artificial Sequence: Synthetic oligonucleotide
uuugcgaagaugaggaggg

SEQ ID NO: 2726339 - RNA, 19 nt, Artificial Sequence
  Description of Artificial Sequence: Synthetic oligonucleotide
agauguucaguuugaaucc

SEQ ID NO: 2726340 - RNA, 19 nt, Artificial Sequence
  Description of Artificial Sequence: Synthetic oligonucleotide
aaugucaucaaggagccag

SEQ ID NO: 2726341 - RNA, 19 nt, Artificial Sequence
  Description of Artificial Sequence: Synthetic oligonucleotide
aaguaguuccgccaguagg

SEQ ID NO: 2726342 - RNA, 19 nt, Artificial Sequence
  Description of Artificial Sequence: Synthetic oligonucleotide
uugaacuucuugaggaugg

SEQ ID NO: 2726343 - RNA, 19 nt, Artificial Sequence
  Description of Artificial Sequence: Synthetic oligonucleotide
uucagaauggucagaagcc

SEQ ID NO: 2726344 - RNA, 19 nt, Artificial Sequence
  Description of Artificial Sequence: Synthetic oligonucleotide
uuguuugcgaagaugagga

SEQ ID NO: 2726345 - RNA, 19 nt, Artificial Sequence
  Description of Artificial Sequence: Synthetic oligonucleotide
cagauguucaguuugaauc

SEQ ID NO: 2726346 - RNA, 19 nt, Artificial Sequence
  Description of Artificial Sequence: Synthetic oligonucleotide
ucaucaaggagccagucga

SEQ ID NO: 2726347 - RNA, 19 nt, Artificial Sequence
  Description of Artificial Sequence: Synthetic oligonucleotide
cuucagaauggucagaagc

SEQ ID NO: 2726348 - RNA, 19 nt, Artificial Sequence
  Description of Artificial Sequence: Synthetic oligonucleotide
aacuucuugaggauggugg

SEQ ID NO: 2726349 - RNA, 19 nt, Artificial Sequence
  Description of Artificial Sequence: Synthetic oligonucleotide
uccacuacccagaugaggc

SEQ ID NO: 2726350 - RNA, 19 nt, Artificial Sequence
  Description of Artificial Sequence: Synthetic oligonucleotide
acugaagaagcucagucag

SEQ ID NO: 2726351 - RNA, 19 nt, Artificial Sequence
  Description of Artificial Sequence: Synthetic oligonucleotide
ugcuuguuugcgaagauga

SEQ ID NO: 2726352 - RNA, 19 nt, Artificial Sequence
  Description of Artificial Sequence: Synthetic oligonucleotide
uccugaauagcguuagagg

SEQ ID NO: 2726353 - RNA, 19 nt, Artificial Sequence
  Description of Artificial Sequence: Synthetic oligonucleotide
aagaagcucagucagcagu

SEQ ID NO: 2726354 - RNA, 19 nt, Artificial Sequence
  Description of Artificial Sequence: Synthetic oligonucleotide
ggaaaugucaucaaggagc

SEQ ID NO: 2726355 - RNA, 19 nt, Artificial Sequence
  Description of Artificial Sequence: Synthetic oligonucleotide
aaagacacgacuggaaaug

SEQ ID NO: 2726356 - RNA, 19 nt, Artificial Sequence
  Description of Artificial Sequence: Synthetic oligonucleotide
agcguagagacuucuggcc

SEQ ID NO: 2726357 - RNA, 19 nt, Artificial Sequence
  Description of Artificial Sequence: Synthetic oligonucleotide
cuucuggccacccacaucc

SEQ ID NO: 2726358 - RNA, 19 nt, Artificial Sequence
  Description of Artificial Sequence: Synthetic oligonucleotide
acacugaagaagcucaguc

SEQ ID NO: 2726359 - RNA, 19 nt, Artificial Sequence
  Description of Artificial Sequence: Synthetic oligonucleotide
agaugaggaggguugcucc

SEQ ID NO: 2726360 - RNA, 19 nt, Artificial Sequence
  Description of Artificial Sequence: Synthetic oligonucleotide
uguucaguuugaauccccg

SEQ ID NO: 2726361 - RNA, 19 nt, Artificial Sequence
  Description of Artificial Sequence: Synthetic oligonucleotide
uugauguugaagcccagug

SEQ ID NO: 2726362 - RNA, 19 nt, Artificial Sequence
  Description of Artificial Sequence: Synthetic oligonucleotide
ugcuccaggguuuugaugu

SEQ ID NO: 2726363 - RNA, 19 nt, Artificial Sequence
  Description of Artificial Sequence: Synthetic oligonucleotide
acuggaaaugucaucaagg

SEQ ID NO: 2726364 - RNA, 19 nt, Artificial Sequence
  Description of Artificial Sequence: Synthetic oligonucleotide
uggaaaugucaucaaggag

SEQ ID NO: 2726365 - RNA, 19 nt, Artificial Sequence
  Description of Artificial Sequence: Synthetic oligonucleotide
uucaguuugaauccccggu

SEQ ID NO: 2726366 - RNA, 19 nt, Artificial Sequence
  Description of Artificial Sequence: Synthetic oligonucleotide
uguugaagcccaguguugg

SEQ ID NO: 2726367 - RNA, 19 nt, Artificial Sequence
  Description of Artificial Sequence: Synthetic oligonucleotide
ucaguuugaauccccggug

SEQ ID NO: 2726368 - RNA, 19 nt, Artificial Sequence
  Description of Artificial Sequence: Synthetic oligonucleotide
aggauggugguuuugccag

SEQ ID NO: 2726369 - RNA, 19 nt, Artificial Sequence
  Description of Artificial Sequence: Synthetic oligonucleotide
ugcuucaucuucuucagaa

SEQ ID NO: 2726370 - RNA, 19 nt, Artificial Sequence
  Description of Artificial Sequence: Synthetic oligonucleotide
aagccaagcaugagcagcc

SEQ ID NO: 2726371 - RNA, 19 nt, Artificial Sequence
  Description of Artificial Sequence: Synthetic oligonucleotide
gucagaagccccaugaucc

SEQ ID NO: 2726372 - RNA, 19 nt, Artificial Sequence
  Description of Artificial Sequence: Synthetic oligonucleotide
gaugccaggcagcaggucc

SEQ ID NO: 2726373 - RNA, 19 nt, Artificial Sequence
  Description of Artificial Sequence: Synthetic oligonucleotide
ugaagaagcucagucagca

SEQ ID NO: 2726374 - RNA, 19 nt, Artificial Sequence
  Description of Artificial Sequence: Synthetic oligonucleotide
aggacagugcuccaggcag

SEQ ID NO: 2726375 - RNA, 19 nt, Artificial Sequence
  Description of Artificial Sequence: Synthetic oligonucleotide
uccccauugaacuucuuga

SEQ ID NO: 2726376 - RNA, 19 nt, Artificial Sequence
  Description of Artificial Sequence: Synthetic oligonucleotide
gucgaugccaggcagcagg

SEQ ID NO: 2726377 - RNA, 19 nt, Artificial Sequence
  Description of Artificial Sequence: Synthetic oligonucleotide
acgucuuccccauugaacu

SEQ ID NO: 2726378 - RNA, 19 nt, Artificial Sequence
  Description of Artificial Sequence: Synthetic oligonucleotide
uagaggacagugcuccagg

SEQ ID NO: 2726379 - RNA, 19 nt, Artificial Sequence
  Description of Artificial Sequence: Synthetic oligonucleotide
cuguccacuacccagauga

SEQ ID NO: 2726380 - RNA, 19 nt, Artificial Sequence
  Description of Artificial Sequence: Synthetic oligonucleotide
ugaauagcguuagaggaca

SEQ ID NO: 2726381 - RNA, 19 nt, Artificial Sequence
  Description of Artificial Sequence: Synthetic oligonucleotide
aagaugaggaggguugcuc

SEQ ID NO: 2726382 - RNA, 19 nt, Artificial Sequence
  Description of Artificial Sequence: Synthetic oligonucleotide
guuugcgaagaugaggagg

SEQ ID NO: 2726383 - RNA, 19 nt, Artificial Sequence
  Description of Artificial Sequence: Synthetic oligonucleotide
ugauguugaagcccagugu

SEQ ID NO: 2726384 - RNA, 19 nt, Artificial Sequence
  Description of Artificial Sequence: Synthetic oligonucleotide
ucucaaaguaguuccgcca

SEQ ID NO: 2726385 - RNA, 19 nt, Artificial Sequence
  Description of Artificial Sequence: Synthetic oligonucleotide
augguguccacgucuuccc

SEQ ID NO: 2726386 - RNA, 19 nt, Artificial Sequence
  Description of Artificial Sequence: Synthetic oligonucleotide
agcguuagaggacagugcu

SEQ ID NO: 2726387 - RNA, 19 nt, Artificial Sequence
  Description of Artificial Sequence: Synthetic oligonucleotide
agcauuguccaagccaagc

SEQ ID NO: 2726388 - RNA, 19 nt, Artificial Sequence
  Description of Artificial Sequence: Synthetic oligonucleotide
aguuccgccaguaggagcg

SEQ ID NO: 2726389 - RNA, 19 nt, Artificial Sequence
  Description of Artificial Sequence: Synthetic oligonucleotide
uuugaauccccggugcucc

SEQ ID NO: 2726390 - RNA, 19 nt, Artificial Sequence
  Description of Artificial Sequence: Synthetic oligonucleotide
aagcaugagcagccgcagc

SEQ ID NO: 2726391 - RNA, 19 nt, Artificial Sequence
  Description of Artificial Sequence: Synthetic oligonucleotide
gauggcugcggauggaggc

SEQ ID NO: 2726392 - RNA, 19 nt, Artificial Sequence
  Description of Artificial Sequence: Synthetic oligonucleotide
gugcucucaaaguaguucc

SEQ ID NO: 2726393 - RNA, 19 nt, Artificial Sequence
  Description of Artificial Sequence: Synthetic oligonucleotide
agcaguaaagacacgacug

SEQ ID NO: 2726394 - RNA, 19 nt, Artificial Sequence
  Description of Artificial Sequence: Synthetic oligonucleotide
cucaaaguaguuccgccag

SEQ ID NO: 2726395 - RNA, 19 nt, Artificial Sequence
  Description of Artificial Sequence: Synthetic oligonucleotide
uuccccauugaacuucuug

SEQ ID NO: 2726396 - RNA, 19 nt, Artificial Sequence
  Description of Artificial Sequence: Synthetic oligonucleotide
auagcguuagaggacagug

SEQ ID NO: 2726397 - RNA, 19 nt, Artificial Sequence
  Description of Artificial Sequence: Synthetic oligonucleotide
cuggaugcgccagugaugg

SEQ ID NO: 2726398 - RNA, 19 nt, Artificial Sequence
  Description of Artificial Sequence: Synthetic oligonucleotide
cugaauagcguuagaggac

SEQ ID NO: 2726399 - RNA, 19 nt, Artificial Sequence
  Description of Artificial Sequence: Synthetic oligonucleotide
ucagcaguaaagacacgac

SEQ ID NO: 2726400 - RNA, 19 nt, Artificial Sequence
  Description of Artificial Sequence: Synthetic oligonucleotide
uaaagacacgacuggaaau

SEQ ID NO: 2726401 - RNA, 19 nt, Artificial Sequence
  Description of Artificial Sequence: Synthetic oligonucleotide
agaggacagugcuccaggc

SEQ ID NO: 2726402 - RNA, 19 nt, Artificial Sequence
  Description of Artificial Sequence: Synthetic oligonucleotide
acgacuggaaaugucauca

SEQ ID NO: 2726403 - RNA, 19 nt, Artificial Sequence
  Description of Artificial Sequence: Synthetic oligonucleotide
ugcucucaaaguaguuccg

SEQ ID NO: 2726404 - RNA, 19 nt, Artificial Sequence
  Description of Artificial Sequence: Synthetic oligonucleotide
auggaggccagguccaggg

SEQ ID NO: 2726405 - RNA, 19 nt, Artificial Sequence
  Description of Artificial Sequence: Synthetic oligonucleotide
ucagaauggucagaagccc

SEQ ID NO: 2726406 - RNA, 19 nt, Artificial Sequence
  Description of Artificial Sequence: Synthetic oligonucleotide
gucaucaaggagccagucg

SEQ ID NO: 2726407 - RNA, 19 nt, Artificial Sequence
  Description of Artificial Sequence: Synthetic oligonucleotide
cucucaaaguaguuccgcc

SEQ ID NO: 2726408 - RNA, 19 nt, Artificial Sequence
  Description of Artificial Sequence: Synthetic oligonucleotide
uugaagcccaguguugggg

SEQ ID NO: 2726409 - RNA, 19 nt, Artificial Sequence
  Description of Artificial Sequence: Synthetic oligonucleotide
gagcguagagacuucuggc

SEQ ID NO: 2726410 - RNA, 19 nt, Artificial Sequence
  Description of Artificial Sequence: Synthetic oligonucleotide
auggucagaagccccauga

SEQ ID NO: 2726411 - RNA, 19 nt, Artificial Sequence
  Description of Artificial Sequence: Synthetic oligonucleotide
uccggugacagcacugcag

SEQ ID NO: 2726412 - RNA, 19 nt, Artificial Sequence
  Description of Artificial Sequence: Synthetic oligonucleotide
ggagcguagagacuucugg

SEQ ID NO: 2726413 - RNA, 19 nt, Artificial Sequence
  Description of Artificial Sequence: Synthetic oligonucleotide
guucaguuugaauccccgg

SEQ ID NO: 2726414 - RNA, 19 nt, Artificial Sequence
  Description of Artificial Sequence: Synthetic oligonucleotide
ugugcucucaaaguaguuc

SEQ ID NO: 2726415 - RNA, 19 nt, Artificial Sequence
  Description of Artificial Sequence: Synthetic oligonucleotide
gagacuucuggccacccac

SEQ ID NO: 2726416 - RNA, 19 nt, Artificial Sequence
  Description of Artificial Sequence: Synthetic oligonucleotide
gcaguaaagacacgacugg

SEQ ID NO: 2726417 - RNA, 19 nt, Artificial Sequence
  Description of Artificial Sequence: Synthetic oligonucleotide
ugauggcugcggauggagg

SEQ ID NO: 2726418 - RNA, 19 nt, Artificial Sequence
  Description of Artificial Sequence: Synthetic oligonucleotide
cuggaaaugucaucaagga

SEQ ID NO: 2726419 - RNA, 19 nt, Artificial Sequence
  Description of Artificial Sequence: Synthetic oligonucleotide
auugaacuucuugaggaug

SEQ ID NO: 2726420 - RNA, 19 nt, Artificial Sequence
  Description of Artificial Sequence: Synthetic oligonucleotide
guaaagacacgacuggaaa

SEQ ID NO: 2726421 - RNA, 19 nt, Artificial Sequence
  Description of Artificial Sequence: Synthetic oligonucleotide
agcaugagcagccgcagcu

SEQ ID NO: 2726422 - RNA, 19 nt, Artificial Sequence
  Description of Artificial Sequence: Synthetic oligonucleotide
uccuccaccagcaggcucu

SEQ ID NO: 2726423 - RNA, 19 nt, Artificial Sequence
  Description of Artificial Sequence: Synthetic oligonucleotide
cagaauggucagaagcccc

SEQ ID NO: 2726424 - RNA, 19 nt, Artificial Sequence
  Description of Artificial Sequence: Synthetic oligonucleotide
caagccaagcaugagcagc

SEQ ID NO: 2726425 - RNA, 19 nt, Artificial Sequence
  Description of Artificial Sequence: Synthetic oligonucleotide
ugacaguccugcaugcgcu

SEQ ID NO: 2726426 - RNA, 19 nt, Artificial Sequence
  Description of Artificial Sequence: Synthetic oligonucleotide
aguaggagcguagagacuu

SEQ ID NO: 2726427 - RNA, 19 nt, Artificial Sequence
  Description of Artificial Sequence: Synthetic oligonucleotide
uagcguuagaggacagugc

SEQ ID NO: 2726428 - RNA, 19 nt, Artificial Sequence
  Description of Artificial Sequence: Synthetic oligonucleotide
gaugaggccaucugugcuc

SEQ ID NO: 2726429 - RNA, 19 nt, Artificial Sequence
  Description of Artificial Sequence: Synthetic oligonucleotide
gauguucaguuugaauccc

SEQ ID NO: 2726430 - RNA, 19 nt, Artificial Sequence
  Description of Artificial Sequence: Synthetic oligonucleotide
aauccccggugcuccaggg

SEQ ID NO: 2726431 - RNA, 19 nt, Artificial Sequence
  Description of Artificial Sequence: Synthetic oligonucleotide
gacacgacuggaaauguca

SEQ ID NO: 2726432 - RNA, 19 nt, Artificial Sequence
  Description of Artificial Sequence: Synthetic oligonucleotide
uuagaggacagugcuccag

SEQ ID NO: 2726433 - RNA, 19 nt, Artificial Sequence
  Description of Artificial Sequence: Synthetic oligonucleotide
cucagucagcaguaaagac

SEQ ID NO: 2726434 - RNA, 19 nt, Artificial Sequence
  Description of Artificial Sequence: Synthetic oligonucleotide
cugacaguccugcaugcgc

SEQ ID NO: 2726435 - RNA, 19 nt, Artificial Sequence
  Description of Artificial Sequence: Synthetic oligonucleotide
cuccugaauagcguuagag

SEQ ID NO: 2726436 - RNA, 19 nt, Artificial Sequence
  Description of Artificial Sequence: Synthetic oligonucleotide
aguaguuccgccaguagga

SEQ ID NO: 2726437 - RNA, 19 nt, Artificial Sequence
  Description of Artificial Sequence: Synthetic oligonucleotide
ugaggauggugguuuugcc

SEQ ID NO: 2726438 - RNA, 19 nt, Artificial Sequence
  Description of Artificial Sequence: Synthetic oligonucleotide
agcucagucagcaguaaag

SEQ ID NO: 2726439 - RNA, 19 nt, Artificial Sequence
  Description of Artificial Sequence: Synthetic oligonucleotide
guuuugauguugaagccca

SEQ ID NO: 2726440 - RNA, 19 nt, Artificial Sequence
  Description of Artificial Sequence: Synthetic oligonucleotide
uuuugauguugaagcccag

SEQ ID NO: 2726441 - RNA, 19 nt, Artificial Sequence
  Description of Artificial Sequence: Synthetic oligonucleotide
gaagaagcucagucagcag

SEQ ID NO: 2726442 - RNA, 19 nt, Artificial Sequence
  Description of Artificial Sequence: Synthetic oligonucleotide
caguuugaauccccggugc

SEQ ID NO: 2726443 - RNA, 19 nt, Artificial Sequence
  Description of Artificial Sequence: Synthetic oligonucleotide
agaugaggccaucugugcu

SEQ ID NO: 2726444 - RNA, 19 nt, Artificial Sequence
  Description of Artificial Sequence: Synthetic oligonucleotide
ugaagcccaguguugggga

SEQ ID NO: 2726445 - RNA, 19 nt, Artificial Sequence
  Description of Artificial Sequence: Synthetic oligonucleotide
uguuugcgaagaugaggag

SEQ ID NO: 2726446 - RNA, 19 nt, Artificial Sequence
  Description of Artificial Sequence: Synthetic oligonucleotide
gauguugaagcccaguguu

SEQ ID NO: 2726447 - RNA, 19 nt, Artificial Sequence
  Description of Artificial Sequence: Synthetic oligonucleotide
aauagcguuagaggacagu

SEQ ID NO: 2726448 - RNA, 19 nt, Artificial Sequence
  Description of Artificial Sequence: Synthetic oligonucleotide
cacgucuuccccauugaac

SEQ ID NO: 2726449 - RNA, 19 nt, Artificial Sequence
  Description of Artificial Sequence: Synthetic oligonucleotide
ucagaagccccaugauccc

SEQ ID NO: 2726450 - RNA, 19 nt, Artificial Sequence
  Description of Artificial Sequence: Synthetic oligonucleotide
ugagcagccgcagcucucg

SEQ ID NO: 2726451 - RNA, 19 nt, Artificial Sequence
  Description of Artificial Sequence: Synthetic oligonucleotide
ucaaaguaguuccgccagu

SEQ ID NO: 2726452 - RNA, 19 nt, Artificial Sequence
  Description of Artificial Sequence: Synthetic oligonucleotide
acccacaucccagauguuc

SEQ ID NO: 2726453 - RNA, 19 nt, Artificial Sequence
  Description of Artificial Sequence: Synthetic oligonucleotide
auguucaguuugaaucccc

SEQ ID NO: 2726454 - RNA, 19 nt, Artificial Sequence
  Description of Artificial Sequence: Synthetic oligonucleotide
cagaugaggccaucugugc

SEQ ID NO: 2726455 - RNA, 19 nt, Artificial Sequence
  Description of Artificial Sequence: Synthetic oligonucleotide
cugaagaagcucagucagc

SEQ ID NO: 2726456 - RNA, 19 nt, Artificial Sequence
  Description of Artificial Sequence: Synthetic oligonucleotide
uccaggcagguccugcuug

SEQ ID NO: 2726457 - RNA, 19 nt, Artificial Sequence
  Description of Artificial Sequence: Synthetic oligonucleotide
auuguccaagccaagcaug

SEQ ID NO: 2726458 - RNA, 19 nt, Artificial Sequence
  Description of Artificial Sequence: Synthetic oligonucleotide
ccugaauagcguuagagga

SEQ ID NO: 2726459 - RNA, 19 nt, Artificial Sequence
  Description of Artificial Sequence: Synthetic oligonucleotide
aguuugaauccccggugcu

SEQ ID NO: 2726460 - RNA, 19 nt, Artificial Sequence
  Description of Artificial Sequence: Synthetic oligonucleotide
caaggagccagucgaugcc

SEQ ID NO: 2726461 - RNA, 19 nt, Artificial Sequence
  Description of Artificial Sequence: Synthetic oligonucleotide
gucagcaguaaagacacga

SEQ ID NO: 2726462 - RNA, 19 nt, Artificial Sequence
  Description of Artificial Sequence: Synthetic oligonucleotide
ccaguaggagcguagagac

SEQ ID NO: 2726463 - RNA, 19 nt, Artificial Sequence
  Description of Artificial Sequence: Synthetic oligonucleotide
aagacacgacuggaaaugu

SEQ ID NO: 2726464 - RNA, 19 nt, Artificial Sequence
  Description of Artificial Sequence: Synthetic oligonucleotide
gguuuugauguugaagccc

SEQ ID NO: 2726465 - RNA, 19 nt, Artificial Sequence
  Description of Artificial Sequence: Synthetic oligonucleotide
caggguuuugauguugaag

SEQ ID NO: 2726466 - RNA, 19 nt, Artificial Sequence
  Description of Artificial Sequence: Synthetic oligonucleotide
acgcugacaguccugcaug

SEQ ID NO: 2726467 - RNA, 19 nt, Artificial Sequence
  Description of Artificial Sequence: Synthetic oligonucleotide
aucugugcucucaaaguag

SEQ ID NO: 2726468 - RNA, 19 nt, Artificial Sequence
  Description of Artificial Sequence: Synthetic oligonucleotide
aguguuggggagauggugu

SEQ ID NO: 2726469 - RNA, 19 nt, Artificial Sequence
  Description of Artificial Sequence: Synthetic oligonucleotide
cacugaagaagcucaguca

SEQ ID NO: 2726470 - RNA, 19 nt, Artificial Sequence
  Description of Artificial Sequence: Synthetic oligonucleotide
aguaaagacacgacuggaa

SEQ ID NO: 2726471 - RNA, 19 nt, Artificial Sequence
  Description of Artificial Sequence: Synthetic oligonucleotide
gaauccccggugcuccagg

SEQ ID NO: 2726472 - RNA, 19 nt, Artificial Sequence
  Description of Artificial Sequence: Synthetic oligonucleotide
uccgccaguaggagcguag

SEQ ID NO: 2726473 - RNA, 19 nt, Artificial Sequence
  Description of Artificial Sequence: Synthetic oligonucleotide
uucuugaggauggugguuu

SEQ ID NO: 2726474 - RNA, 19 nt, Artificial Sequence
  Description of Artificial Sequence: Synthetic oligonucleotide
gaagcccaguguuggggag

SEQ ID NO: 2726475 - RNA, 19 nt, Artificial Sequence
  Description of Artificial Sequence: Synthetic oligonucleotide
ggaggguugcuccagccag

SEQ ID NO: 2726476 - RNA, 19 nt, Artificial Sequence
  Description of Artificial Sequence: Synthetic oligonucleotide
acaucccagauguucaguu

SEQ ID NO: 2726477 - RNA, 19 nt, Artificial Sequence
  Description of Artificial Sequence: Synthetic oligonucleotide
ccauugaacuucuugagga

SEQ ID NO: 2726478 - RNA, 19 nt, Artificial Sequence
  Description of Artificial Sequence: Synthetic oligonucleotide
auggcugcggauggaggcc

SEQ ID NO: 2726479 - RNA, 19 nt, Artificial Sequence
  Description of Artificial Sequence: Synthetic oligonucleotide
gacagcacugcagcccugg

SEQ ID NO: 2726480 - RNA, 19 nt, Artificial Sequence
  Description of Artificial Sequence: Synthetic oligonucleotide
ugaggaggguugcuccagc

SEQ ID NO: 2726481 - RNA, 19 nt, Artificial Sequence
  Description of Artificial Sequence: Synthetic oligonucleotide
uguccacuacccagaugag

SEQ ID NO: 2726482 - RNA, 19 nt, Artificial Sequence
  Description of Artificial Sequence: Synthetic oligonucleotide
aagcucagucagcaguaaa

SEQ ID NO: 2726483 - RNA, 19 nt, Artificial Sequence
  Description of Artificial Sequence: Synthetic oligonucleotide
gccaucugugcucucaaag

SEQ ID NO: 2726484 - RNA, 19 nt, Artificial Sequence
  Description of Artificial Sequence: Synthetic oligonucleotide
gaugaggaggguugcucca

SEQ ID NO: 2726485 - RNA, 19 nt, Artificial Sequence
  Description of Artificial Sequence: Synthetic oligonucleotide
agcagguccucuccgguga

SEQ ID NO: 2726486 - RNA, 19 nt, Artificial Sequence
  Description of Artificial Sequence: Synthetic oligonucleotide
cucacgcugacaguccugc

SEQ ID NO: 2726487 - RNA, 19 nt, Artificial Sequence
  Description of Artificial Sequence: Synthetic oligonucleotide
cagugauggcugcggaugg

SEQ ID NO: 2726488 - RNA, 19 nt, Artificial Sequence
  Description of Artificial Sequence: Synthetic oligonucleotide
cccaugaucccguagcccc

SEQ ID NO: 2726489 - RNA, 19 nt, Artificial Sequence
  Description of Artificial Sequence: Synthetic oligonucleotide
uaguuccgccaguaggagc

SEQ ID NO: 2726490 - RNA, 19 nt, Artificial Sequence
  Description of Artificial Sequence: Synthetic oligonucleotide
ucuccggugacagcacugc

SEQ ID NO: 2726491 - RNA, 19 nt, Artificial Sequence
  Description of Artificial Sequence: Synthetic oligonucleotide
gaggaggguugcuccagcc

SEQ ID NO: 2726492 - RNA, 19 nt, Artificial Sequence
  Description of Artificial Sequence: Synthetic oligonucleotide
aggguugcuccagccaggc

SEQ ID NO: 2726493 - RNA, 19 nt, Artificial Sequence
  Description of Artificial Sequence: Synthetic oligonucleotide
gagccagucgaugccaggc

SEQ ID NO: 2726494 - RNA, 19 nt, Artificial Sequence
  Description of Artificial Sequence: Synthetic oligonucleotide
uccacgucuuccccauuga

SEQ ID NO: 2726495 - RNA, 19 nt, Artificial Sequence
  Description of Artificial Sequence: Synthetic oligonucleotide
ggguuuugauguugaagcc

SEQ ID NO: 2726496 - RNA, 19 nt, Artificial Sequence
  Description of Artificial Sequence: Synthetic oligonucleotide
guccacuacccagaugagg

SEQ ID NO: 2726497 - RNA, 19 nt, Artificial Sequence
  Description of Artificial Sequence: Synthetic oligonucleotide
ggcgcuguccacuacccag

SEQ ID NO: 2726498 - RNA, 19 nt, Artificial Sequence
  Description of Artificial Sequence: Synthetic oligonucleotide
cccauugaacuucuugagg

SEQ ID NO: 2726499 - RNA, 19 nt, Artificial Sequence
  Description of Artificial Sequence: Synthetic oligonucleotide
ucggcgcuguccacuaccc

SEQ ID NO: 2726500 - RNA, 19 nt, Artificial Sequence
  Description of Artificial Sequence: Synthetic oligonucleotide
gcggauggaggccaggucc

SEQ ID NO: 2726501 - RNA, 19 nt, Artificial Sequence
  Description of Artificial Sequence: Synthetic oligonucleotide
guccacgucuuccccauug

SEQ ID NO: 2726502 - RNA, 19 nt, Artificial Sequence
  Description of Artificial Sequence: Synthetic oligonucleotide
uggugguuuugccagcauu

SEQ ID NO: 2726503 - RNA, 19 nt, Artificial Sequence
  Description of Artificial Sequence: Synthetic oligonucleotide
gaugcgccagugauggcug

SEQ ID NO: 2726504 - RNA, 19 nt, Artificial Sequence
  Description of Artificial Sequence: Synthetic oligonucleotide
agaauggucagaagcccca

SEQ ID NO: 2726505 - RNA, 19 nt, Artificial Sequence
  Description of Artificial Sequence: Synthetic oligonucleotide
uguuggggagauggugucc

SEQ ID NO: 2726506 - RNA, 19 nt, Artificial Sequence
  Description of Artificial Sequence: Synthetic oligonucleotide
ccagaugaggccaucugug

SEQ ID NO: 2726507 - RNA, 19 nt, Artificial Sequence
  Description of Artificial Sequence: Synthetic oligonucleotide
caggcucugcagcucacgc

SEQ ID NO: 2726508 - RNA, 19 nt, Artificial Sequence
  Description of Artificial Sequence: Synthetic oligonucleotide
uccagccaggcgcuccucc

SEQ ID NO: 2726509 - RNA, 19 nt, Artificial Sequence
  Description of Artificial Sequence: Synthetic oligonucleotide
agaugguguccacgucuuc

SEQ ID NO: 2726510 - RNA, 19 nt, Artificial Sequence
  Description of Artificial Sequence: Synthetic oligonucleotide
gacaguccugcaugcgcug

SEQ ID NO: 2726511 - RNA, 19 nt, Artificial Sequence
  Description of Artificial Sequence: Synthetic oligonucleotide
ggugacagcacugcagccc

SEQ ID NO: 2726512 - RNA, 19 nt, Artificial Sequence
  Description of Artificial Sequence: Synthetic oligonucleotide
gaauagcguuagaggacag

SEQ ID NO: 2726513 - RNA, 19 nt, Artificial Sequence
  Description of Artificial Sequence: Synthetic oligonucleotide
ggucagaagccccaugauc

SEQ ID NO: 2726514 - RNA, 19 nt, Artificial Sequence
  Description of Artificial Sequence: Synthetic oligonucleotide
aggaggguugcuccagcca

SEQ ID NO: 2726515 - RNA, 19 nt, Artificial Sequence
  Description of Artificial Sequence: Synthetic oligonucleotide
agagacuucuggccaccca

SEQ ID NO: 2726516 - RNA, 19 nt, Artificial Sequence
  Description of Artificial Sequence: Synthetic oligonucleotide
agacacgacuggaaauguc

SEQ ID NO: 2726517 - RNA, 19 nt, Artificial Sequence
  Description of Artificial Sequence: Synthetic oligonucleotide
caggcagcagguccucucc

SEQ ID NO: 2726518 - RNA, 19 nt, Artificial Sequence
  Description of Artificial Sequence: Synthetic oligonucleotide
guaguuccgccaguaggag

SEQ ID NO: 2726519 - RNA, 19 nt, Artificial Sequence
  Description of Artificial Sequence: Synthetic oligonucleotide
gucggcgcuguccacuacc

SEQ ID NO: 2726520 - RNA, 19 nt, Artificial Sequence
  Description of Artificial Sequence: Synthetic oligonucleotide
cacgacuggaaaugucauc

SEQ ID NO: 2726521 - RNA, 19 nt, Artificial Sequence
  Description of Artificial Sequence: Synthetic oligonucleotide
gauggugguuuugccagca

SEQ ID NO: 2726522 - RNA, 19 nt, Artificial Sequence
  Description of Artificial Sequence: Synthetic oligonucleotide
ugaacuucuugaggauggu

SEQ ID NO: 2726523 - RNA, 19 nt, Artificial Sequence
  Description of Artificial Sequence: Synthetic oligonucleotide
agguccucuccggugacag

SEQ ID NO: 2726524 - RNA, 19 nt, Artificial Sequence
  Description of Artificial Sequence: Synthetic oligonucleotide
gaggguugcuccagccagg

SEQ ID NO: 2726525 - RNA, 19 nt, Artificial Sequence
  Description of Artificial Sequence: Synthetic oligonucleotide
aguccugcaugcgcuggcg

SEQ ID NO: 2726526 - RNA, 19 nt, Artificial Sequence
  Description of Artificial Sequence: Synthetic oligonucleotide
caguguuggggagauggug

SEQ ID NO: 2726527 - RNA, 19 nt, Artificial Sequence
  Description of Artificial Sequence: Synthetic oligonucleotide
acaguccugcaugcgcugg

SEQ ID NO: 2726528 - RNA, 19 nt, Artificial Sequence
  Description of Artificial Sequence: Synthetic oligonucleotide
ugcgcuggcggucggcgcu

SEQ ID NO: 2726529 - RNA, 19 nt, Artificial Sequence
  Description of Artificial Sequence: Synthetic oligonucleotide
auguugaagcccaguguug

SEQ ID NO: 2726530 - RNA, 19 nt, Artificial Sequence
  Description of Artificial Sequence: Synthetic oligonucleotide
ugcgaagaugaggaggguu

SEQ ID NO: 2726531 - RNA, 19 nt, Artificial Sequence
  Description of Artificial Sequence: Synthetic oligonucleotide
uggcggucggcgcugucca

SEQ ID NO: 2726532 - RNA, 19 nt, Artificial Sequence
  Description of Artificial Sequence: Synthetic oligonucleotide
agcucacgcugacaguccu

SEQ ID NO: 2726533 - RNA, 19 nt, Artificial Sequence
  Description of Artificial Sequence: Synthetic oligonucleotide
ugccagcauuguccaagcc

SEQ ID NO: 2726534 - RNA, 19 nt, Artificial Sequence
  Description of Artificial Sequence: Synthetic oligonucleotide
gcgaagaugaggaggguug

SEQ ID NO: 2726535 - RNA, 19 nt, Artificial Sequence
  Description of Artificial Sequence: Synthetic oligonucleotide
guuggggagauggugucca

SEQ ID NO: 2726536 - RNA, 19 nt, Artificial Sequence
  Description of Artificial Sequence: Synthetic oligonucleotide
guuugaauccccggugcuc

SEQ ID NO: 2726537 - RNA, 19 nt, Artificial Sequence
  Description of Artificial Sequence: Synthetic oligonucleotide
uccccggugcuccaggguu

SEQ ID NO: 2726538 - RNA, 19 nt, Artificial Sequence
  Description of Artificial Sequence: Synthetic oligonucleotide
ugcgccagugauggcugcg

SEQ ID NO: 2726539 - RNA, 19 nt, Artificial Sequence
  Description of Artificial Sequence: Synthetic oligonucleotide
augcgccagugauggcugc

SEQ ID NO: 2726540 - RNA, 19 nt, Artificial Sequence
  Description of Artificial Sequence: Synthetic oligonucleotide
cagaagccccaugaucccg

SEQ ID NO: 2726541 - RNA, 19 nt, Artificial Sequence
  Description of Artificial Sequence: Synthetic oligonucleotide
gcauuguccaagccaagca

SEQ ID NO: 2726542 - RNA, 19 nt, Artificial Sequence
  Description of Artificial Sequence: Synthetic oligonucleotide
augaggaggguugcuccag

SEQ ID NO: 2726543 - RNA, 19 nt, Artificial Sequence
  Description of Artificial Sequence: Synthetic oligonucleotide
caugcgcuggcggucggcg

SEQ ID NO: 2726544 - RNA, 19 nt, Artificial Sequence
  Description of Artificial Sequence: Synthetic oligonucleotide
gggacacugaagaagcuca

SEQ ID NO: 2726545 - RNA, 19 nt, Artificial Sequence
  Description of Artificial Sequence: Synthetic oligonucleotide
augcgcuggcggucggcgc

SEQ ID NO: 2726546 - RNA, 19 nt, Artificial Sequence
  Description of Artificial Sequence: Synthetic oligonucleotide
cucuccggugacagcacug

SEQ ID NO: 2726547 - RNA, 19 nt, Artificial Sequence
  Description of Artificial Sequence: Synthetic oligonucleotide
guagagacuucuggccacc

SEQ ID NO: 2726548 - RNA, 19 nt, Artificial Sequence
  Description of Artificial Sequence: Synthetic oligonucleotide
ugcggauggaggccagguc

SEQ ID NO: 2726549 - RNA, 19 nt, Artificial Sequence
  Description of Artificial Sequence: Synthetic oligonucleotide
ugaauccccggugcuccag

SEQ ID NO: 2726550 - RNA, 19 nt, Artificial Sequence
  Description of Artificial Sequence: Synthetic oligonucleotide
agaagcucagucagcagua

SEQ ID NO: 2726551 - RNA, 19 nt, Artificial Sequence
  Description of Artificial Sequence: Synthetic oligonucleotide
uaggagcguagagacuucu

SEQ ID NO: 2726552 - RNA, 19 nt, Artificial Sequence
  Description of Artificial Sequence: Synthetic oligonucleotide
uggaggccagguccagggc

SEQ ID NO: 2726553 - RNA, 19 nt, Artificial Sequence
  Description of Artificial Sequence: Synthetic oligonucleotide
cagcucacgcugacagucc

SEQ ID NO: 2726554 - RNA, 19 nt, Artificial Sequence
  Description of Artificial Sequence: Synthetic oligonucleotide
agccagucgaugccaggca

SEQ ID NO: 2726555 - RNA, 19 nt, Artificial Sequence
  Description of Artificial Sequence: Synthetic oligonucleotide
ccccauugaacuucuugag

SEQ ID NO: 2726556 - RNA, 19 nt, Artificial Sequence
  Description of Artificial Sequence: Synthetic oligonucleotide
aggcucugcagcucacgcu

SEQ ID NO: 2726557 - RNA, 19 nt, Artificial Sequence
  Description of Artificial Sequence: Synthetic oligonucleotide
aagcccaguguuggggaga

SEQ ID NO: 2726558 - RNA, 19 nt, Artificial Sequence
  Description of Artificial Sequence: Synthetic oligonucleotide
gugcuccaggguuuugaug

SEQ ID NO: 2726559 - RNA, 19 nt, Artificial Sequence
  Description of Artificial Sequence: Synthetic oligonucleotide
guguuggggagaugguguc

SEQ ID NO: 2726560 - RNA, 19 nt, Artificial Sequence
  Description of Artificial Sequence: Synthetic oligonucleotide
ucuugaggauggugguuuu

SEQ ID NO: 2726561 - RNA, 19 nt, Artificial Sequence
  Description of Artificial Sequence: Synthetic oligonucleotide
ugcagcucacgcugacagu

SEQ ID NO: 2726562 - RNA, 19 nt, Artificial Sequence
  Description of Artificial Sequence: Synthetic oligonucleotide
uugaauccccggugcucca

SEQ ID NO: 2726563 - RNA, 19 nt, Artificial Sequence
  Description of Artificial Sequence: Synthetic oligonucleotide
caguaaagacacgacugga

SEQ ID NO: 2726564 - RNA, 19 nt, Artificial Sequence
  Description of Artificial Sequence: Synthetic oligonucleotide
uagagacuucuggccaccc

SEQ ID NO: 2726565 - RNA, 19 nt, Artificial Sequence
  Description of Artificial Sequence: Synthetic oligonucleotide
ccggugacagcacugcagc

SEQ ID NO: 2726566 - RNA, 19 nt, Artificial Sequence
  Description of Artificial Sequence: Synthetic oligonucleotide
uacccagaugaggccaucu

SEQ ID NO: 2726567 - RNA, 19 nt, Artificial Sequence
  Description of Artificial Sequence: Synthetic oligonucleotide
uuuugccagcauuguccaa

SEQ ID NO: 2726568 - RNA, 19 nt, Artificial Sequence
  Description of Artificial Sequence: Synthetic oligonucleotide
ggagaugguguccacgucu

SEQ ID NO: 2726569 - RNA, 19 nt, Artificial Sequence
  Description of Artificial Sequence: Synthetic oligonucleotide
ccagcauuguccaagccaa

SEQ ID NO: 2726570 - RNA, 19 nt, Artificial Sequence
  Description of Artificial Sequence: Synthetic oligonucleotide
gaggccaucugugcucuca

SEQ ID NO: 2726571 - RNA, 19 nt, Artificial Sequence
  Description of Artificial Sequence: Synthetic oligonucleotide
caggcgcuccuccaccagc

SEQ ID NO: 2726572 - RNA, 19 nt, Artificial Sequence
  Description of Artificial Sequence: Synthetic oligonucleotide
ugcaugcgcuggcggucgg

SEQ ID NO: 2726573 - RNA, 19 nt, Artificial Sequence
  Description of Artificial Sequence: Synthetic oligonucleotide
caguccugcaugcgcuggc

SEQ ID NO: 2726574 - RNA, 19 nt, Artificial Sequence
  Description of Artificial Sequence: Synthetic oligonucleotide
cagcauuguccaagccaag

SEQ ID NO: 2726575 - RNA, 19 nt, Artificial Sequence
  Description of Artificial Sequence: Synthetic oligonucleotide
cagcaguaaagacacgacu

SEQ ID NO: 2726576 - RNA, 19 nt, Artificial Sequence
  Description of Artificial Sequence: Synthetic oligonucleotide
agaagccccaugaucccgu

SEQ ID NO: 2726577 - RNA, 19 nt, Artificial Sequence
  Description of Artificial Sequence: Synthetic oligonucleotide
cagcagguccucuccggug

SEQ ID NO: 2726578 - RNA, 19 nt, Artificial Sequence
  Description of Artificial Sequence: Synthetic oligonucleotide
gcucucaaaguaguuccgc

SEQ ID NO: 2726579 - RNA, 19 nt, Artificial Sequence
  Description of Artificial Sequence: Synthetic oligonucleotide
cuggcggucggcgcugucc

SEQ ID NO: 2726580 - RNA, 19 nt, Artificial Sequence
  Description of Artificial Sequence: Synthetic oligonucleotide
gccagucgaugccaggcag

SEQ ID NO: 2726581 - RNA, 19 nt, Artificial Sequence
  Description of Artificial Sequence: Synthetic oligonucleotide
agccaagcaugagcagccg

SEQ ID NO: 2726582 - RNA, 19 nt, Artificial Sequence
  Description of Artificial Sequence: Synthetic oligonucleotide
caaaguaguuccgccagua

SEQ ID NO: 2726583 - RNA, 19 nt, Artificial Sequence
  Description of Artificial Sequence: Synthetic oligonucleotide
cauuguccaagccaagcau

SEQ ID NO: 2726584 - RNA, 19 nt, Artificial Sequence
  Description of Artificial Sequence: Synthetic oligonucleotide
ugcuccagccaggcgcucc

SEQ ID NO: 2726585 - RNA, 19 nt, Artificial Sequence
  Description of Artificial Sequence: Synthetic oligonucleotide
cuccaggguuuugauguug

SEQ ID NO: 2726586 - RNA, 19 nt, Artificial Sequence
  Description of Artificial Sequence: Synthetic oligonucleotide
gcguagagacuucuggcca

SEQ ID NO: 2726587 - RNA, 19 nt, Artificial Sequence
  Description of Artificial Sequence: Synthetic oligonucleotide
gcagcucacgcugacaguc

SEQ ID NO: 2726588 - RNA, 19 nt, Artificial Sequence
  Description of Artificial Sequence: Synthetic oligonucleotide
augucaucaaggagccagu

SEQ ID NO: 2726589 - RNA, 19 nt, Artificial Sequence
  Description of Artificial Sequence: Synthetic oligonucleotide
ggagccagucgaugccagg

SEQ ID NO: 2726590 - RNA, 19 nt, Artificial Sequence
  Description of Artificial Sequence: Synthetic oligonucleotide
ucacgcugacaguccugca

SEQ ID NO: 2726591 - RNA, 19 nt, Artificial Sequence
  Description of Artificial Sequence: Synthetic oligonucleotide
gugacagcacugcagcccu

SEQ ID NO: 2726592 - RNA, 19 nt, Artificial Sequence
  Description of Artificial Sequence: Synthetic oligonucleotide
ccagugauggcugcggaug

SEQ ID NO: 2726593 - RNA, 19 nt, Artificial Sequence
  Description of Artificial Sequence: Synthetic oligonucleotide
acacgacuggaaaugucau

SEQ ID NO: 2726594 - RNA, 19 nt, Artificial Sequence
  Description of Artificial Sequence: Synthetic oligonucleotide
gcuuguuugcgaagaugag

SEQ ID NO: 2726595 - RNA, 19 nt, Artificial Sequence
  Description of Artificial Sequence: Synthetic oligonucleotide
gcucagucagcaguaaaga

SEQ ID NO: 2726596 - RNA, 19 nt, Artificial Sequence
  Description of Artificial Sequence: Synthetic oligonucleotide
ccaagcaugagcagccgca

SEQ ID NO: 2726597 - RNA, 19 nt, Artificial Sequence
  Description of Artificial Sequence: Synthetic oligonucleotide
cacuacccagaugaggcca

SEQ ID NO: 2726598 - RNA, 19 nt, Artificial Sequence
  Description of Artificial Sequence: Synthetic oligonucleotide
gccaguaggagcguagaga

SEQ ID NO: 2726599 - RNA, 19 nt, Artificial Sequence
  Description of Artificial Sequence: Synthetic oligonucleotide
augagcagccgcagcucuc

SEQ ID NO: 2726600 - RNA, 19 nt, Artificial Sequence
  Description of Artificial Sequence: Synthetic oligonucleotide
cucugcagcucacgcugac

SEQ ID NO: 2726601 - RNA, 19 nt, Artificial Sequence
  Description of Artificial Sequence: Synthetic oligonucleotide
agucagcaguaaagacacg

SEQ ID NO: 2726602 - RNA, 19 nt, Artificial Sequence
  Description of Artificial Sequence: Synthetic oligonucleotide
agugcuccaggcagguccu

SEQ ID NO: 2726603 - RNA, 19 nt, Artificial Sequence
  Description of Artificial Sequence: Synthetic oligonucleotide
gguguccacgucuucccca

SEQ ID NO: 2726604 - RNA, 19 nt, Artificial Sequence
  Description of Artificial Sequence: Synthetic oligonucleotide
ggauggugguuuugccagc

SEQ ID NO: 2726605 - RNA, 19 nt, Artificial Sequence
  Description of Artificial Sequence: Synthetic oligonucleotide
agacuucuggccacccaca

SEQ ID NO: 2726606 - RNA, 19 nt, Artificial Sequence
  Description of Artificial Sequence: Synthetic oligonucleotide
cacugcagcccuggaugcg

SEQ ID NO: 2726607 - RNA, 19 nt, Artificial Sequence
  Description of Artificial Sequence: Synthetic oligonucleotide
agugauggcugcggaugga

SEQ ID NO: 2726608 - RNA, 19 nt, Artificial Sequence
  Description of Artificial Sequence: Synthetic oligonucleotide
cgcuccuccaccagcaggc

SEQ ID NO: 2726609 - RNA, 19 nt, Artificial Sequence
  Description of Artificial Sequence: Synthetic oligonucleotide
aggagcguagagacuucug

SEQ ID NO: 2726610 - RNA, 19 nt, Artificial Sequence
  Description of Artificial Sequence: Synthetic oligonucleotide
aggccaucugugcucucaa

SEQ ID NO: 2726611 - RNA, 19 nt, Artificial Sequence
  Description of Artificial Sequence: Synthetic oligonucleotide
gacacugaagaagcucagu

SEQ ID NO: 2726612 - RNA, 19 nt, Artificial Sequence
  Description of Artificial Sequence: Synthetic oligonucleotide
gcugacaguccugcaugcg

SEQ ID NO: 2726613 - RNA, 19 nt, Artificial Sequence
  Description of Artificial Sequence: Synthetic oligonucleotide
acagcacugcagcccugga

SEQ ID NO: 2726614 - RNA, 19 nt, Artificial Sequence
  Description of Artificial Sequence: Synthetic oligonucleotide
gcacugcagcccuggaugc

SEQ ID NO: 2726615 - RNA, 19 nt, Artificial Sequence
  Description of Artificial Sequence: Synthetic oligonucleotide
gccuccugaauagcguuag

SEQ ID NO: 2726616 - RNA, 19 nt, Artificial Sequence
  Description of Artificial Sequence: Synthetic oligonucleotide
agggccuccugaauagcgu

SEQ ID NO: 2726617 - RNA, 19 nt, Artificial Sequence
  Description of Artificial Sequence: Synthetic oligonucleotide
gccaagcaugagcagccgc

SEQ ID NO: 2726618 - RNA, 19 nt, Artificial Sequence
  Description of Artificial Sequence: Synthetic oligonucleotide
ccuggaugcgccagugaug

SEQ ID NO: 2726619 - RNA, 19 nt, Artificial Sequence
  Description of Artificial Sequence: Synthetic oligonucleotide
aggagccagucgaugccag

SEQ ID NO: 2726620 - RNA, 19 nt, Artificial Sequence
  Description of Artificial Sequence: Synthetic oligonucleotide
gcagccgcagcucucgcuc

SEQ ID NO: 2726621 - RNA, 19 nt, Artificial Sequence
  Description of Artificial Sequence: Synthetic oligonucleotide
cagucgaugccaggcagca

SEQ ID NO: 2726622 - RNA, 19 nt, Artificial Sequence
  Description of Artificial Sequence: Synthetic oligonucleotide
auggugguuuugccagcau

SEQ ID NO: 2726623 - RNA, 19 nt, Artificial Sequence
  Description of Artificial Sequence: Synthetic oligonucleotide
augccaggcagcagguccu

SEQ ID NO: 2726624 - RNA, 19 nt, Artificial Sequence
  Description of Artificial Sequence: Synthetic oligonucleotide
gaagaugaggaggguugcu

SEQ ID NO: 2726625 - RNA, 19 nt, Artificial Sequence
  Description of Artificial Sequence: Synthetic oligonucleotide
ccacuacccagaugaggcc

SEQ ID NO: 2726626 - RNA, 19 nt, Artificial Sequence
  Description of Artificial Sequence: Synthetic oligonucleotide
auccccggugcuccagggu

SEQ ID NO: 2726627 - RNA, 19 nt, Artificial Sequence
  Description of Artificial Sequence: Synthetic oligonucleotide
uugcgaagaugaggagggu

SEQ ID NO: 2726628 - RNA, 19 nt, Artificial Sequence
  Description of Artificial Sequence: Synthetic oligonucleotide
acagugcuccaggcagguc

SEQ ID NO: 2726629 - RNA, 19 nt, Artificial Sequence
  Description of Artificial Sequence: Synthetic oligonucleotide
agucgaugccaggcagcag

SEQ ID NO: 2726630 - RNA, 19 nt, Artificial Sequence
  Description of Artificial Sequence: Synthetic oligonucleotide
cguagagacuucuggccac

SEQ ID NO: 2726631 - RNA, 19 nt, Artificial Sequence
  Description of Artificial Sequence: Synthetic oligonucleotide
uggaugcgccagugauggc

SEQ ID NO: 2726632 - RNA, 19 nt, Artificial Sequence
  Description of Artificial Sequence: Synthetic oligonucleotide
acuacccagaugaggccau

SEQ ID NO: 2726633 - RNA, 19 nt, Artificial Sequence
  Description of Artificial Sequence: Synthetic oligonucleotide
agcaggcucugcagcucac

SEQ ID NO: 2726634 - RNA, 19 nt, Artificial Sequence
  Description of Artificial Sequence: Synthetic oligonucleotide
ccaagccaagcaugagcag

SEQ ID NO: 2726635 - RNA, 19 nt, Artificial Sequence
  Description of Artificial Sequence: Synthetic oligonucleotide
ggggagaugguguccacgu

SEQ ID NO: 2726636 - RNA, 19 nt, Artificial Sequence
  Description of Artificial Sequence: Synthetic oligonucleotide
agcccuggaugcgccagug

SEQ ID NO: 2726637 - RNA, 19 nt, Artificial Sequence
  Description of Artificial Sequence: Synthetic oligonucleotide
gccccaugaucccguagcc

SEQ ID NO: 2726638 - RNA, 19 nt, Artificial Sequence
  Description of Artificial Sequence: Synthetic oligonucleotide
gacuucuggccacccacau

SEQ ID NO: 2726639 - RNA, 19 nt, Artificial Sequence
  Description of Artificial Sequence: Synthetic oligonucleotide
caugagcagccgcagcucu

SEQ ID NO: 2726640 - RNA, 19 nt, Artificial Sequence
  Description of Artificial Sequence: Synthetic oligonucleotide
guaggagcguagagacuuc

SEQ ID NO: 2726641 - RNA, 19 nt, Artificial Sequence
  Description of Artificial Sequence: Synthetic oligonucleotide
ggaugcgccagugauggcu

SEQ ID NO: 2726642 - RNA, 19 nt, Artificial Sequence
  Description of Artificial Sequence: Synthetic oligonucleotide
agcccaguguuggggagau

SEQ ID NO: 2726643 - RNA, 19 nt, Artificial Sequence
  Description of Artificial Sequence: Synthetic oligonucleotide
gacagugcuccaggcaggu

SEQ ID NO: 2726644 - RNA, 19 nt, Artificial Sequence
  Description of Artificial Sequence: Synthetic oligonucleotide
gaagccccaugaucccgua

SEQ ID NO: 2726645 - RNA, 19 nt, Artificial Sequence
  Description of Artificial Sequence: Synthetic oligonucleotide
cacgcugacaguccugcau

SEQ ID NO: 2726646 - RNA, 19 nt, Artificial Sequence
  Description of Artificial Sequence: Synthetic oligonucleotide
ggguugcuccagccaggcg

SEQ ID NO: 2726647 - RNA, 19 nt, Artificial Sequence
  Description of Artificial Sequence: Synthetic oligonucleotide
gagaugguguccacgucuu

SEQ ID NO: 2726648 - RNA, 19 nt, Artificial Sequence
  Description of Artificial Sequence: Synthetic oligonucleotide
guugcuccagccaggcgcu

SEQ ID NO: 2726649 - RNA, 19 nt, Artificial Sequence
  Description of Artificial Sequence: Synthetic oligonucleotide
gaggccagguccagggccu

SEQ ID NO: 2726650 - RNA, 19 nt, Artificial Sequence
  Description of Artificial Sequence: Synthetic oligonucleotide
uguccacgucuuccccauu

SEQ ID NO: 2726651 - RNA, 19 nt, Artificial Sequence
  Description of Artificial Sequence: Synthetic oligonucleotide
ccaggcagcagguccucuc

SEQ ID NO: 2726652 - RNA, 19 nt, Artificial Sequence
  Description of Artificial Sequence: Synthetic oligonucleotide
gcgccagugauggcugcgg

SEQ ID NO: 2726653 - RNA, 19 nt, Artificial Sequence
  Description of Artificial Sequence: Synthetic oligonucleotide
gggagaugguguccacguc

SEQ ID NO: 2726654 - RNA, 19 nt, Artificial Sequence
  Description of Artificial Sequence: Synthetic oligonucleotide
cuccggugacagcacugca

SEQ ID NO: 2726655 - RNA, 19 nt, Artificial Sequence
  Description of Artificial Sequence: Synthetic oligonucleotide
gguccucuccggugacagc

SEQ ID NO: 2726656 - RNA, 19 nt, Artificial Sequence
  Description of Artificial Sequence: Synthetic oligonucleotide
guguccacgucuuccccau

SEQ ID NO: 2726657 - RNA, 19 nt, Artificial Sequence
  Description of Artificial Sequence: Synthetic oligonucleotide
cuacccagaugaggccauc

SEQ ID NO: 2726658 - RNA, 19 nt, Artificial Sequence
  Description of Artificial Sequence: Synthetic oligonucleotide
caucaaggagccagucgau

SEQ ID NO: 2726659 - RNA, 19 nt, Artificial Sequence
  Description of Artificial Sequence: Synthetic oligonucleotide
ugaggccaucugugcucuc

SEQ ID NO: 2726660 - RNA, 19 nt, Artificial Sequence
  Description of Artificial Sequence: Synthetic oligonucleotide
gcagcccuggaugcgccag

SEQ ID NO: 2726661 - RNA, 19 nt, Artificial Sequence
  Description of Artificial Sequence: Synthetic oligonucleotide
cgcugacaguccugcaugc

SEQ ID NO: 2726662 - RNA, 19 nt, Artificial Sequence
  Description of Artificial Sequence: Synthetic oligonucleotide
ucccggccgccguuucuuc

SEQ ID NO: 2726663 - RNA, 19 nt, Artificial Sequence
  Description of Artificial Sequence: Synthetic oligonucleotide
ccccaugaucccguagccc

SEQ ID NO: 2726664 - RNA, 19 nt, Artificial Sequence
  Description of Artificial Sequence: Synthetic oligonucleotide
ugccaggcagcagguccuc

SEQ ID NO: 2726665 - RNA, 19 nt, Artificial Sequence
  Description of Artificial Sequence: Synthetic oligonucleotide
caguaggagcguagagacu

SEQ ID NO: 2726666 - RNA, 19 nt, Artificial Sequence
  Description of Artificial Sequence: Synthetic oligonucleotide
uuccgccaguaggagcgua

SEQ ID NO: 2726667 - RNA, 19 nt, Artificial Sequence
  Description of Artificial Sequence: Synthetic oligonucleotide
agccgcagcucucgcucuu

SEQ ID NO: 2726668 - RNA, 19 nt, Artificial Sequence
  Description of Artificial Sequence: Synthetic oligonucleotide
gcugcggauggaggccagg

SEQ ID NO: 2726669 - RNA, 19 nt, Artificial Sequence
  Description of Artificial Sequence: Synthetic oligonucleotide
gcguuagaggacagugcuc

SEQ ID NO: 2726670 - RNA, 19 nt, Artificial Sequence
  Description of Artificial Sequence: Synthetic oligonucleotide
cccagaugaggccaucugu

SEQ ID NO: 2726671 - RNA, 19 nt, Artificial Sequence
  Description of Artificial Sequence: Synthetic oligonucleotide
cggugacagcacugcagcc

SEQ ID NO: 2726672 - RNA, 19 nt, Artificial Sequence
  Description of Artificial Sequence: Synthetic oligonucleotide
gcagguccucuccggugac

SEQ ID NO: 2726673 - RNA, 19 nt, Artificial Sequence
  Description of Artificial Sequence: Synthetic oligonucleotide
gcucacgcugacaguccug

SEQ ID NO: 2726674 - RNA, 19 nt, Artificial Sequence
  Description of Artificial Sequence: Synthetic oligonucleotide
cgccaguaggagcguagag

SEQ ID NO: 2726675 - RNA, 19 nt, Artificial Sequence
  Description of Artificial Sequence: Synthetic oligonucleotide
cugugcucucaaaguaguu

SEQ ID NO: 2726676 - RNA, 19 nt, Artificial Sequence
  Description of Artificial Sequence: Synthetic oligonucleotide
cuucuugaggauggugguu

SEQ ID NO: 2726677 - RNA, 19 nt, Artificial Sequence
  Description of Artificial Sequence: Synthetic oligonucleotide
cuccaccagcaggcucugc

SEQ ID NO: 2726678 - RNA, 19 nt, Artificial Sequence
  Description of Artificial Sequence: Synthetic oligonucleotide
gcgcuguccacuacccaga

SEQ ID NO: 2726679 - RNA, 19 nt, Artificial Sequence
  Description of Artificial Sequence: Synthetic oligonucleotide
ggccaucugugcucucaaa

SEQ ID NO: 2726680 - RNA, 19 nt, Artificial Sequence
  Description of Artificial Sequence: Synthetic oligonucleotide
cagcacugcagcccuggau

SEQ ID NO: 2726681 - RNA, 19 nt, Artificial Sequence
  Description of Artificial Sequence: Synthetic oligonucleotide
cagguccucuccggugaca

SEQ ID NO: 2726682 - RNA, 19 nt, Artificial Sequence
  Description of Artificial Sequence: Synthetic oligonucleotide
uugcuccagccaggcgcuc

SEQ ID NO: 2726683 - RNA, 19 nt, Artificial Sequence
  Description of Artificial Sequence: Synthetic oligonucleotide
gugcuccaggcagguccug

SEQ ID NO: 2726684 - RNA, 19 nt, Artificial Sequence
  Description of Artificial Sequence: Synthetic oligonucleotide
ccacgucuuccccauugaa

SEQ ID NO: 2726685 - RNA, 19 nt, Artificial Sequence
  Description of Artificial Sequence: Synthetic oligonucleotide
gggccuccugaauagcguu

SEQ ID NO: 2726686 - RNA, 19 nt, Artificial Sequence
  Description of Artificial Sequence: Synthetic oligonucleotide
gccagugauggcugcggau

SEQ ID NO: 2726687 - RNA, 19 nt, Artificial Sequence
  Description of Artificial Sequence: Synthetic oligonucleotide
cccuggaugcgccagugau

SEQ ID NO: 2726688 - RNA, 19 nt, Artificial Sequence
  Description of Artificial Sequence: Synthetic oligonucleotide
gcaugcgcuggcggucggc

SEQ ID NO: 2726689 - RNA, 19 nt, Artificial Sequence
  Description of Artificial Sequence: Synthetic oligonucleotide
ggcugcggauggaggccag

SEQ ID NO: 2726690 - RNA, 19 nt, Artificial Sequence
  Description of Artificial Sequence: Synthetic oligonucleotide
ggccuccugaauagcguua

SEQ ID NO: 2726691 - RNA, 19 nt, Artificial Sequence
  Description of Artificial Sequence: Synthetic oligonucleotide
cuccagccaggcgcuccuc

SEQ ID NO: 2726692 - RNA, 19 nt, Artificial Sequence
  Description of Artificial Sequence: Synthetic oligonucleotide
ccuccugaauagcguuaga

SEQ ID NO: 2726693 - RNA, 19 nt, Artificial Sequence
  Description of Artificial Sequence: Synthetic oligonucleotide
gcccuggaugcgccaguga

SEQ ID NO: 2726694 - RNA, 19 nt, Artificial Sequence
  Description of Artificial Sequence: Synthetic oligonucleotide
ggccagguccagggccucc

SEQ ID NO: 2726695 - RNA, 19 nt, Artificial Sequence
  Description of Artificial Sequence: Synthetic oligonucleotide
gguccagggccuccugaau

SEQ ID NO: 2726696 - RNA, 19 nt, Artificial Sequence
  Description of Artificial Sequence: Synthetic oligonucleotide
ccaguguuggggagauggu

SEQ ID NO: 2726697 - RNA, 19 nt, Artificial Sequence
  Description of Artificial Sequence: Synthetic oligonucleotide
cagccgcagcucucgcucu

SEQ ID NO: 2726698 - RNA, 19 nt, Artificial Sequence
  Description of Artificial Sequence: Synthetic oligonucleotide
cuccaggcagguccugcuu

SEQ ID NO: 2726699 - RNA, 19 nt, Artificial Sequence
  Description of Artificial Sequence: Synthetic oligonucleotide
guuccgccaguaggagcgu

SEQ ID NO: 2726700 - RNA, 19 nt, Artificial Sequence
  Description of Artificial Sequence: Synthetic oligonucleotide
cagcccuggaugcgccagu

SEQ ID NO: 2726701 - RNA, 19 nt, Artificial Sequence
  Description of Artificial Sequence: Synthetic oligonucleotide
cucgcucuuucugcuucau

SEQ ID NO: 2726702 - RNA, 19 nt, Artificial Sequence
  Description of Artificial Sequence: Synthetic oligonucleotide
ccgccaguaggagcguaga

SEQ ID NO: 2726703 - RNA, 19 nt, Artificial Sequence
  Description of Artificial Sequence: Synthetic oligonucleotide
gcuccaggguuuugauguu

SEQ ID NO: 2726704 - RNA, 19 nt, Artificial Sequence
  Description of Artificial Sequence: Synthetic oligonucleotide
cuuccccauugaacuucuu

SEQ ID NO: 2726705 - RNA, 19 nt, Artificial Sequence
  Description of Artificial Sequence: Synthetic oligonucleotide
ggccacccacaucccagau

SEQ ID NO: 2726706 - RNA, 19 nt, Artificial Sequence
  Description of Artificial Sequence: Synthetic oligonucleotide
cucccggccgccguuucuu

SEQ ID NO: 2726707 - RNA, 19 nt, Artificial Sequence
  Description of Artificial Sequence: Synthetic oligonucleotide
cgccagugauggcugcgga

SEQ ID NO: 2726708 - RNA, 19 nt, Artificial Sequence
  Description of Artificial Sequence: Synthetic oligonucleotide
gcuggcggucggcgcuguc

SEQ ID NO: 2726709 - RNA, 19 nt, Artificial Sequence
  Description of Artificial Sequence: Synthetic oligonucleotide
cgaugccaggcagcagguc

SEQ ID NO: 2726710 - RNA, 19 nt, Artificial Sequence
  Description of Artificial Sequence: Synthetic oligonucleotide
gcccaguguuggggagaug

SEQ ID NO: 2726711 - RNA, 19 nt, Artificial Sequence
  Description of Artificial Sequence: Synthetic oligonucleotide
cacccacaucccagauguu

SEQ ID NO: 2726712 - RNA, 19 nt, Artificial Sequence
  Description of Artificial Sequence: Synthetic oligonucleotide
cccucccggccgccguuuc

SEQ ID NO: 2726713 - RNA, 19 nt, Artificial Sequence
  Description of Artificial Sequence: Synthetic oligonucleotide
ccggugcuccaggguuuug

SEQ ID NO: 2726714 - RNA, 19 nt, Artificial Sequence
  Description of Artificial Sequence: Synthetic oligonucleotide
cggucggcgcuguccacua

SEQ ID NO: 2726715 - RNA, 19 nt, Artificial Sequence
  Description of Artificial Sequence: Synthetic oligonucleotide
gccaggcagcagguccucu

SEQ ID NO: 2726716 - RNA, 19 nt, Artificial Sequence
  Description of Artificial Sequence: Synthetic oligonucleotide
cggcgcuguccacuaccca

SEQ ID NO: 2726717 - RNA, 19 nt, Artificial Sequence
  Description of Artificial Sequence: Synthetic oligonucleotide
ccucccggccgccguuucu

SEQ ID NO: 2726718 - RNA, 19 nt, Artificial Sequence
  Description of Artificial Sequence: Synthetic oligonucleotide
ccccggugcuccaggguuu

SEQ ID NO: 2726719 - RNA, 19 nt, Artificial Sequence
  Description of Artificial Sequence: Synthetic oligonucleotide
cgcuguccacuacccagau

SEQ ID NO: 2726720 - RNA, 19 nt, Artificial Sequence
  Description of Artificial Sequence: Synthetic oligonucleotide
gccgcagcucucgcucuuu

SEQ ID NO: 2726721 - RNA, 19 nt, Artificial Sequence
  Description of Artificial Sequence: Synthetic oligonucleotide
cccggugcuccaggguuuu

SEQ ID NO: 2726722 - RNA, 19 nt, Artificial Sequence
  Description of Artificial Sequence: Synthetic oligonucleotide
ccccucccggccgccguuu

SEQ ID NO: 2726723 - RNA, 19 nt, Artificial Sequence
  Description of Artificial Sequence: Synthetic oligonucleotide
cgcuggcggucggcgcugu

SEQ ID NO: 2726724 - RNA, 19 nt, Artificial Sequence
  Description of Artificial Sequence: Synthetic oligonucleotide
gugacuauaauuuucauag

SEQ ID NO: 2726725 - RNA, 19 nt, Artificial Sequence
  Description of Artificial Sequence: Synthetic oligonucleotide
aaaagaacuggcuacugac

SEQ ID NO: 2726726 - RNA, 19 nt, Artificial Sequence
  Description of Artificial Sequence: Synthetic oligonucleotide
auuuuaugguucuugaugg

SEQ ID NO: 2726727 - RNA, 19 nt, Artificial Sequence
  Description of Artificial Sequence: Synthetic oligonucleotide
ucuaacaugagccucagga

SEQ ID NO: 2726728 - RNA, 19 nt, Artificial Sequence
  Description of Artificial Sequence: Synthetic oligonucleotide
uuuguuaugaauugcacug

SEQ ID NO: 2726729 - RNA, 19 nt, Artificial Sequence
  Description of Artificial Sequence: Synthetic oligonucleotide
ucauagucuaacaugagcc

SEQ ID NO: 2726730 - RNA, 19 nt, Artificial Sequence
  Description of Artificial Sequence: Synthetic oligonucleotide
uauuuuaugguucuugaug

SEQ ID NO: 2726731 - RNA, 19 nt, Artificial Sequence
  Description of Artificial Sequence: Synthetic oligonucleotide
agaucggcagcucaaaucc

SEQ ID NO: 2726732 - RNA, 19 nt, Artificial Sequence
  Description of Artificial Sequence: Synthetic oligonucleotide
auugucguguguuagaauc

SEQ ID NO: 2726733 - RNA, 19 nt, Artificial Sequence
  Description of Artificial Sequence: Synthetic oligonucleotide
uuaugauuugauaaaagaa

SEQ ID NO: 2726734 - RNA, 19 nt, Artificial Sequence
  Description of Artificial Sequence: Synthetic oligonucleotide
uuaugaauugcacuguccc

SEQ ID NO: 2726735 - RNA, 19 nt, Artificial Sequence
  Description of Artificial Sequence: Synthetic oligonucleotide
auuaugauuugauaaaaga

SEQ ID NO: 2726736 - RNA, 19 nt, Artificial Sequence
  Description of Artificial Sequence: Synthetic oligonucleotide
uuugauaaaagaacuggcu

SEQ ID NO: 2726737 - RNA, 19 nt, Artificial Sequence
  Description of Artificial Sequence: Synthetic oligonucleotide
uuagaaucagagcagaauc

SEQ ID NO: 2726738 - RNA, 19 nt, Artificial Sequence
  Description of Artificial Sequence: Synthetic oligonucleotide
aguagagacaugcuaugcc

SEQ ID NO: 2726739 - RNA, 19 nt, Artificial Sequence
  Description of Artificial Sequence: Synthetic oligonucleotide
uacuuuggaacuccaaagg

SEQ ID NO: 2726740 - RNA, 19 nt, Artificial Sequence
  Description of Artificial Sequence: Synthetic oligonucleotide
augguuuguuucuugaugg

SEQ ID NO: 2726741 - RNA, 19 nt, Artificial Sequence
  Description of Artificial Sequence: Synthetic oligonucleotide
gagguagaaauccugagug

SEQ ID NO: 2726742 - RNA, 19 nt, Artificial Sequence
  Description of Artificial Sequence: Synthetic oligonucleotide
ugauaaaagaacuggcuac

SEQ ID NO: 2726743 - RNA, 19 nt, Artificial Sequence
  Description of Artificial Sequence: Synthetic oligonucleotide
uuacuuuggaacuccaaag

SEQ ID NO: 2726744 - RNA, 19 nt, Artificial Sequence
  Description of Artificial Sequence: Synthetic oligonucleotide
auuugauaaaagaacuggc

SEQ ID NO: 2726745 - RNA, 19 nt, Artificial Sequence
  Description of Artificial Sequence: Synthetic oligonucleotide
aauuuucauagucuaacau

SEQ ID NO: 2726746 - RNA, 19 nt, Artificial Sequence
  Description of Artificial Sequence: Synthetic oligonucleotide
ucguguguuagaaucagag

SEQ ID NO: 2726747 - RNA, 19 nt, Artificial Sequence
  Description of Artificial Sequence: Synthetic oligonucleotide
uguguuagaaucagagcag

SEQ ID NO: 2726748 - RNA, 19 nt, Artificial Sequence
  Description of Artificial Sequence: Synthetic oligonucleotide
agcagaaucuucaucaccc

SEQ ID NO: 2726749 - RNA, 19 nt, Artificial Sequence
  Description of Artificial Sequence: Synthetic oligonucleotide
uuuacuuuggaacuccaaa

SEQ ID NO: 2726750 - RNA, 19 nt, Artificial Sequence
  Description of Artificial Sequence: Synthetic oligonucleotide
uaugguucuugauggaacg

SEQ ID NO: 2726751 - RNA, 19 nt, Artificial Sequence
  Description of Artificial Sequence: Synthetic oligonucleotide
uuuuguuaugaauugcacu

SEQ ID NO: 2726752 - RNA, 19 nt, Artificial Sequence
  Description of Artificial Sequence: Synthetic oligonucleotide
acuuuggaacuccaaaggg

SEQ ID NO: 2726753 - RNA, 19 nt, Artificial Sequence
  Description of Artificial Sequence: Synthetic oligonucleotide
agggaagacauguauggac

SEQ ID NO: 2726754 - RNA, 19 nt, Artificial Sequence
  Description of Artificial Sequence: Synthetic oligonucleotide
aagacauguauggaccacc

SEQ ID NO: 2726755 - RNA, 19 nt, Artificial Sequence
  Description of Artificial Sequence: Synthetic oligonucleotide
uauggaccaccuuagauga

SEQ ID NO: 2726756 - RNA, 19 nt, Artificial Sequence
  Description of Artificial Sequence: Synthetic oligonucleotide
uguauuuuaugguucuuga

SEQ ID NO: 2726757 - RNA, 19 nt, Artificial Sequence
  Description of Artificial Sequence: Synthetic oligonucleotide
ucacuauucacugacaggu

SEQ ID NO: 2726758 - RNA, 19 nt, Artificial Sequence
  Description of Artificial Sequence: Synthetic oligonucleotide
guguguuagaaucagagca

SEQ ID NO: 2726759 - RNA, 19 nt, Artificial Sequence
  Description of Artificial Sequence: Synthetic oligonucleotide
gaucacuauucacugacag

SEQ ID NO: 2726760 - RNA, 19 nt, Artificial Sequence
  Description of Artificial Sequence: Synthetic oligonucleotide
gugucuuuuacuuuggaac

SEQ ID NO: 2726761 - RNA, 19 nt, Artificial Sequence
  Description of Artificial Sequence: Synthetic oligonucleotide
uucauuaugauuugauaaa

SEQ ID NO: 2726762 - RNA, 19 nt, Artificial Sequence
  Description of Artificial Sequence: Synthetic oligonucleotide
uugauaaaagaacuggcua

SEQ ID NO: 2726763 - RNA, 19 nt, Artificial Sequence
  Description of Artificial Sequence: Synthetic oligonucleotide
gaugaugaugguuuguuuc

SEQ ID NO: 2726764 - RNA, 19 nt, Artificial Sequence
  Description of Artificial Sequence: Synthetic oligonucleotide
gaugguuuguuucuugaug

SEQ ID NO: 2726765 - RNA, 19 nt, Artificial Sequence
  Description of Artificial Sequence: Synthetic oligonucleotide
aaguagagacaugcuaugc

SEQ ID NO: 2726766 - RNA, 19 nt, Artificial Sequence
  Description of Artificial Sequence: Synthetic oligonucleotide
uuuggaacuccaaagggaa

SEQ ID NO: 2726767 - RNA, 19 nt, Artificial Sequence
  Description of Artificial Sequence: Synthetic oligonucleotide
gagaaacacagcuucgucc

SEQ ID NO: 2726768 - RNA, 19 nt, Artificial Sequence
  Description of Artificial Sequence: Synthetic oligonucleotide
caggcagugagaaacacag

SEQ ID NO: 2726769 - RNA, 19 nt, Artificial Sequence
  Description of Artificial Sequence: Synthetic oligonucleotide
uguugucugagguagaaau

SEQ ID NO: 2726770 - RNA, 19 nt, Artificial Sequence
  Description of Artificial Sequence: Synthetic oligonucleotide
ugucuuuuacuuuggaacu

SEQ ID NO: 2726771 - RNA, 19 nt, Artificial Sequence
  Description of Artificial Sequence: Synthetic oligonucleotide
guauggaccaccuuagaug

SEQ ID NO: 2726772 - RNA, 19 nt, Artificial Sequence
  Description of Artificial Sequence: Synthetic oligonucleotide
cauuaugauuugauaaaag

SEQ ID NO: 2726773 - RNA, 19 nt, Artificial Sequence
  Description of Artificial Sequence: Synthetic oligonucleotide
aaauccuccaccccagacu

SEQ ID NO: 2726774 - RNA, 19 nt, Artificial Sequence
  Description of Artificial Sequence: Synthetic oligonucleotide
uaaaagaacuggcuacuga

SEQ ID NO: 2726775 - RNA, 19 nt, Artificial Sequence
  Description of Artificial Sequence: Synthetic oligonucleotide
ucugagguagaaauccuga

SEQ ID NO: 2726776 - RNA, 19 nt, Artificial Sequence
  Description of Artificial Sequence: Synthetic oligonucleotide
uauaauuuucauagucuaa

SEQ ID NO: 2726777 - RNA, 19 nt, Artificial Sequence
  Description of Artificial Sequence: Synthetic oligonucleotide
uuaauuuggaagugcuucu

SEQ ID NO: 2726778 - RNA, 19 nt, Artificial Sequence
  Description of Artificial Sequence: Synthetic oligonucleotide
ugagguagaaauccugagu

SEQ ID NO: 2726779 - RNA, 19 nt, Artificial Sequence
  Description of Artificial Sequence: Synthetic oligonucleotide
uuaugguucuugauggaac

SEQ ID NO: 2726780 - RNA, 19 nt, Artificial Sequence
  Description of Artificial Sequence: Synthetic oligonucleotide
aucacuauucacugacagg

SEQ ID NO: 2726781 - RNA, 19 nt, Artificial Sequence
  Description of Artificial Sequence: Synthetic oligonucleotide
aauuuggaagugcuucugu

SEQ ID NO: 2726782 - RNA, 19 nt, Artificial Sequence
  Description of Artificial Sequence: Synthetic oligonucleotide
uagaaucagagcagaaucu

SEQ ID NO: 2726783 - RNA, 19 nt, Artificial Sequence
  Description of Artificial Sequence: Synthetic oligonucleotide
agaaucuucaucacccugg

SEQ ID NO: 2726784 - RNA, 19 nt, Artificial Sequence
  Description of Artificial Sequence: Synthetic oligonucleotide
ucaaauugucguguguuag

SEQ ID NO: 2726785 - RNA, 19 nt, Artificial Sequence
  Description of Artificial Sequence: Synthetic oligonucleotide
acagcuucguccgaguccc

SEQ ID NO: 2726786 - RNA, 19 nt, Artificial Sequence
  Description of Artificial Sequence: Synthetic oligonucleotide
augauuugauaaaagaacu

SEQ ID NO: 2726787 - RNA, 19 nt, Artificial Sequence
  Description of Artificial Sequence: Synthetic oligonucleotide
uuucauagcuguauuuuau

SEQ ID NO: 2726788 - RNA, 19 nt, Artificial Sequence
  Description of Artificial Sequence: Synthetic oligonucleotide
uaacaugagccucaggaau

SEQ ID NO: 2726789 - RNA, 19 nt, Artificial Sequence
  Description of Artificial Sequence: Synthetic oligonucleotide
gaaucuucaucacccuggg

SEQ ID NO: 2726790 - RNA, 19 nt, Artificial Sequence
  Description of Artificial Sequence: Synthetic oligonucleotide
uucauagcuguauuuuaug

SEQ ID NO: 2726791 - RNA, 19 nt, Artificial Sequence
  Description of Artificial Sequence: Synthetic oligonucleotide
uaaguagagacaugcuaug

SEQ ID NO: 2726792 - RNA, 19 nt, Artificial Sequence
  Description of Artificial Sequence: Synthetic oligonucleotide
uaauccugaggaguguugg

SEQ ID NO: 2726793 - RNA, 19 nt, Artificial Sequence
  Description of Artificial Sequence: Synthetic oligonucleotide
uaugccagggaagacaugu

SEQ ID NO: 2726794 - RNA, 19 nt, Artificial Sequence
  Description of Artificial Sequence: Synthetic oligonucleotide
uguauggaccaccuuagau

SEQ ID NO: 2726795 - RNA, 19 nt, Artificial Sequence
  Description of Artificial Sequence: Synthetic oligonucleotide
ucuucaucacccugggaag

SEQ ID NO: 2726796 - RNA, 19 nt, Artificial Sequence
  Description of Artificial Sequence: Synthetic oligonucleotide
ucugugucuuuuacuuugg

SEQ ID NO: 2726797 - RNA, 19 nt, Artificial Sequence
  Description of Artificial Sequence: Synthetic oligonucleotide
cauguauggaccaccuuag

SEQ ID NO: 2726798 - RNA, 19 nt, Artificial Sequence
  Description of Artificial Sequence: Synthetic oligonucleotide
uuuggaagugcuucugugu

SEQ ID NO: 2726799 - RNA, 19 nt, Artificial Sequence
  Description of Artificial Sequence: Synthetic oligonucleotide
gaacgugccauuucuugag

SEQ ID NO: 2726800 - RNA, 19 nt, Artificial Sequence
  Description of Artificial Sequence: Synthetic oligonucleotide
accacuuggagaucggcag

SEQ ID NO: 2726801 - RNA, 19 nt, Artificial Sequence
  Description of Artificial Sequence: Synthetic oligonucleotide
uucuugauggugacuauaa

SEQ ID NO: 2726802 - RNA, 19 nt, Artificial Sequence
  Description of Artificial Sequence: Synthetic oligonucleotide
uuuucaaauugucgugugu

SEQ ID NO: 2726803 - RNA, 19 nt, Artificial Sequence
  Description of Artificial Sequence: Synthetic oligonucleotide
uguuucuugauggugacua

SEQ ID NO: 2726804 - RNA, 19 nt, Artificial Sequence
  Description of Artificial Sequence: Synthetic oligonucleotide
gaugggaaggacuucaugu

SEQ ID NO: 2726805 - RNA, 19 nt, Artificial Sequence
  Description of Artificial Sequence: Synthetic oligonucleotide
acauguauggaccaccuua

SEQ ID NO: 2726806 - RNA, 19 nt, Artificial Sequence
  Description of Artificial Sequence: Synthetic oligonucleotide
cuauucacugacaggucgg

SEQ ID NO: 2726807 - RNA, 19 nt, Artificial Sequence
  Description of Artificial Sequence: Synthetic oligonucleotide
uagucuaacaugagccuca

SEQ ID NO: 2726808 - RNA, 19 nt, Artificial Sequence
  Description of Artificial Sequence: Synthetic oligonucleotide
uagagacaugcuaugccag

SEQ ID NO: 2726809 - RNA, 19 nt, Artificial Sequence
  Description of Artificial Sequence: Synthetic oligonucleotide
uccugaucacuauucacug

SEQ ID NO: 2726810 - RNA, 19 nt, Artificial Sequence
  Description of Artificial Sequence: Synthetic oligonucleotide
ucuucauuaugauuugaua

SEQ ID NO: 2726811 - RNA, 19 nt, Artificial Sequence
  Description of Artificial Sequence: Synthetic oligonucleotide
agagacaugcuaugccagg

SEQ ID NO: 2726812 - RNA, 19 nt, Artificial Sequence
  Description of Artificial Sequence: Synthetic oligonucleotide
uucauguucccacuguaau

SEQ ID NO: 2726813 - RNA, 19 nt, Artificial Sequence
  Description of Artificial Sequence: Synthetic oligonucleotide
ucauuaugauuugauaaaa

SEQ ID NO: 2726814 - RNA, 19 nt, Artificial Sequence
  Description of Artificial Sequence: Synthetic oligonucleotide
auagucuaacaugagccuc

SEQ ID NO: 2726815 - RNA, 19 nt, Artificial Sequence
  Description of Artificial Sequence: Synthetic oligonucleotide
uuuucauagcuguauuuua

SEQ ID NO: 2726816 - RNA, 19 nt, Artificial Sequence
  Description of Artificial Sequence: Synthetic oligonucleotide
uccugaggaguguuggccg

SEQ ID NO: 2726817 - RNA, 19 nt, Artificial Sequence
  Description of Artificial Sequence: Synthetic oligonucleotide
uuauuuucauagcuguauu

SEQ ID NO: 2726818 - RNA, 19 nt, Artificial Sequence
  Description of Artificial Sequence: Synthetic oligonucleotide
gaugaugguuuguuucuug

SEQ ID NO: 2726819 - RNA, 19 nt, Artificial Sequence
  Description of Artificial Sequence: Synthetic oligonucleotide
agcuuuucaaauugucgug

SEQ ID NO: 2726820 - RNA, 19 nt, Artificial Sequence
  Description of Artificial Sequence: Synthetic oligonucleotide
uccaaagggaagccucagg

SEQ ID NO: 2726821 - RNA, 19 nt, Artificial Sequence
  Description of Artificial Sequence: Synthetic oligonucleotide
uggaacgugccauuucuug

SEQ ID NO: 2726822 - RNA, 19 nt, Artificial Sequence
  Description of Artificial Sequence: Synthetic oligonucleotide
uuggaagugcuucuguguc

SEQ ID NO: 2726823 - RNA, 19 nt, Artificial Sequence
  Description of Artificial Sequence: Synthetic oligonucleotide
uaugaauugcacugucccu

SEQ ID NO: 2726824 - RNA, 19 nt, Artificial Sequence
  Description of Artificial Sequence: Synthetic oligonucleotide
agcucaaauccuccacccc

SEQ ID NO: 2726825 - RNA, 19 nt, Artificial Sequence
  Description of Artificial Sequence: Synthetic oligonucleotide
aaauugucguguguuagaa

SEQ ID NO: 2726826 - RNA, 19 nt, Artificial Sequence
  Description of Artificial Sequence: Synthetic oligonucleotide
aacaugagccucaggaaug

SEQ ID NO: 2726827 - RNA, 19 nt, Artificial Sequence
  Description of Artificial Sequence: Synthetic oligonucleotide
cagugagaaacacagcuuc

SEQ ID NO: 2726828 - RNA, 19 nt, Artificial Sequence
  Description of Artificial Sequence: Synthetic oligonucleotide
guagagacaugcuaugcca

SEQ ID NO: 2726829 - RNA, 19 nt, Artificial Sequence
  Description of Artificial Sequence: Synthetic oligonucleotide
uucuugauggaacgugcca

SEQ ID NO: 2726830 - RNA, 19 nt, Artificial Sequence
  Description of Artificial Sequence: Synthetic oligonucleotide
aauugcacugucccuuuaa

SEQ ID NO: 2726831 - RNA, 19 nt, Artificial Sequence
  Description of Artificial Sequence: Synthetic oligonucleotide
gauggugacuauaauuuuc

SEQ ID NO: 2726832 - RNA, 19 nt, Artificial Sequence
  Description of Artificial Sequence: Synthetic oligonucleotide
gagcuuuucaaauugucgu

SEQ ID NO: 2726833 - RNA, 19 nt, Artificial Sequence
  Description of Artificial Sequence: Synthetic oligonucleotide
cuuagaugaugaugguuug

SEQ ID NO: 2726834 - RNA, 19 nt, Artificial Sequence
  Description of Artificial Sequence: Synthetic oligonucleotide
uuuuacuuuggaacuccaa

SEQ ID NO: 2726835 - RNA, 19 nt, Artificial Sequence
  Description of Artificial Sequence: Synthetic oligonucleotide
cuacugacagacuguauuc

SEQ ID NO: 2726836 - RNA, 19 nt, Artificial Sequence
  Description of Artificial Sequence: Synthetic oligonucleotide
ugagaaacacagcuucguc

SEQ ID NO: 2726837 - RNA, 19 nt, Artificial Sequence
  Description of Artificial Sequence: Synthetic oligonucleotide
uuucaaauugucguguguu

SEQ ID NO: 2726838 - RNA, 19 nt, Artificial Sequence
  Description of Artificial Sequence: Synthetic oligonucleotide
ucugagcuuuucaaauugu

SEQ ID NO: 2726839 - RNA, 19 nt, Artificial Sequence
  Description of Artificial Sequence: Synthetic oligonucleotide
cuuuucaaauugucgugug

SEQ ID NO: 2726840 - RNA, 19 nt, Artificial Sequence
  Description of Artificial Sequence: Synthetic oligonucleotide
cuuuggaacuccaaaggga

SEQ ID NO: 2726841 - RNA, 19 nt, Artificial Sequence
  Description of Artificial Sequence: Synthetic oligonucleotide
uucacugacaggucgggau

SEQ ID NO: 2726842 - RNA, 19 nt, Artificial Sequence
  Description of Artificial Sequence: Synthetic oligonucleotide
uugucguguguuagaauca

SEQ ID NO: 2726843 - RNA, 19 nt, Artificial Sequence
  Description of Artificial Sequence: Synthetic oligonucleotide
uuuuaugguucuugaugga

SEQ ID NO: 2726844 - RNA, 19 nt, Artificial Sequence
  Description of Artificial Sequence: Synthetic oligonucleotide
uauucacugacaggucggg

SEQ ID NO: 2726845 - RNA, 19 nt, Artificial Sequence
  Description of Artificial Sequence: Synthetic oligonucleotide
gagacaugcuaugccaggg

SEQ ID NO: 2726846 - RNA, 19 nt, Artificial Sequence
  Description of Artificial Sequence: Synthetic oligonucleotide
ucccacuguaauccugagg

SEQ ID NO: 2726847 - RNA, 19 nt, Artificial Sequence
  Description of Artificial Sequence: Synthetic oligonucleotide
ucauguucccacuguaauc

SEQ ID NO: 2726848 - RNA, 19 nt, Artificial Sequence
  Description of Artificial Sequence: Synthetic oligonucleotide
auuuucauagcuguauuuu

SEQ ID NO: 2726849 - RNA, 19 nt, Artificial Sequence
  Description of Artificial Sequence: Synthetic oligonucleotide
acaugagccucaggaaugc

SEQ ID NO: 2726850 - RNA, 19 nt, Artificial Sequence
  Description of Artificial Sequence: Synthetic oligonucleotide
gagcagaaucuucaucacc

SEQ ID NO: 2726851 - RNA, 19 nt, Artificial Sequence
  Description of Artificial Sequence: Synthetic oligonucleotide
cugagguagaaauccugag

SEQ ID NO: 2726852 - RNA, 19 nt, Artificial Sequence
  Description of Artificial Sequence: Synthetic oligonucleotide
uuggaacuccaaagggaag

SEQ ID NO: 2726853 - RNA, 19 nt, Artificial Sequence
  Description of Artificial Sequence: Synthetic oligonucleotide
uguuagaaucagagcagaa

SEQ ID NO: 2726854 - RNA, 19 nt, Artificial Sequence
  Description of Artificial Sequence: Synthetic oligonucleotide
guuaugaauugcacugucc

SEQ ID NO: 2726855 - RNA, 19 nt, Artificial Sequence
  Description of Artificial Sequence: Synthetic oligonucleotide
uaauuuggaagugcuucug

SEQ ID NO: 2726856 - RNA, 19 nt, Artificial Sequence
  Description of Artificial Sequence: Synthetic oligonucleotide
cuguauuuuaugguucuug

SEQ ID NO: 2726857 - RNA, 19 nt, Artificial Sequence
  Description of Artificial Sequence: Synthetic oligonucleotide
ugucguguguuagaaucag

SEQ ID NO: 2726858 - RNA, 19 nt, Artificial Sequence
  Description of Artificial Sequence: Synthetic oligonucleotide
uguucccacuguaauccug

SEQ ID NO: 2726859 - RNA, 19 nt, Artificial Sequence
  Description of Artificial Sequence: Synthetic oligonucleotide
aauugucguguguuagaau

SEQ ID NO: 2726860 - RNA, 19 nt, Artificial Sequence
  Description of Artificial Sequence: Synthetic oligonucleotide
uucaaauugucguguguua

SEQ ID NO: 2726861 - RNA, 19 nt, Artificial Sequence
  Description of Artificial Sequence: Synthetic oligonucleotide
ugcuaugccagggaagaca

SEQ ID NO: 2726862 - RNA, 19 nt, Artificial Sequence
  Description of Artificial Sequence: Synthetic oligonucleotide
agugagaaacacagcuucg

SEQ ID NO: 2726863 - RNA, 19 nt, Artificial Sequence
  Description of Artificial Sequence: Synthetic oligonucleotide
uugccacugucuucgcugg

SEQ ID NO: 2726864 - RNA, 19 nt, Artificial Sequence
  Description of Artificial Sequence: Synthetic oligonucleotide
acugucuucgcugggagca

SEQ ID NO: 2726865 - RNA, 19 nt, Artificial Sequence
  Description of Artificial Sequence: Synthetic oligonucleotide
cucaaauccuccaccccag

SEQ ID NO: 2726866 - RNA, 19 nt, Artificial Sequence
  Description of Artificial Sequence: Synthetic oligonucleotide
ugacuauaauuuucauagu

SEQ ID NO: 2726867 - RNA, 19 nt, Artificial Sequence
  Description of Artificial Sequence: Synthetic oligonucleotide
ugguucuugauggaacgug

SEQ ID NO: 2726868 - RNA, 19 nt, Artificial Sequence
  Description of Artificial Sequence: Synthetic oligonucleotide
ugucugagguagaaauccu

SEQ ID NO: 2726869 - RNA, 19 nt, Artificial Sequence
  Description of Artificial Sequence: Synthetic oligonucleotide
ucuugauggaacgugccau

SEQ ID NO: 2726870 - RNA, 19 nt, Artificial Sequence
  Description of Artificial Sequence: Synthetic oligonucleotide
gauggaacgugccauuucu

SEQ ID NO: 2726871 - RNA, 19 nt, Artificial Sequence
  Description of Artificial Sequence: Synthetic oligonucleotide
uggaccaccuuagaugaug

SEQ ID NO: 2726872 - RNA, 19 nt, Artificial Sequence
  Description of Artificial Sequence: Synthetic oligonucleotide
cagcucaaauccuccaccc

SEQ ID NO: 2726873 - RNA, 19 nt, Artificial Sequence
  Description of Artificial Sequence: Synthetic oligonucleotide
auaaaagaacuggcuacug

SEQ ID NO: 2726874 - RNA, 19 nt, Artificial Sequence
  Description of Artificial Sequence: Synthetic oligonucleotide
uuggccguguuguugucug

SEQ ID NO: 2726875 - RNA, 19 nt, Artificial Sequence
  Description of Artificial Sequence: Synthetic oligonucleotide
agacuccugaucacuauuc

SEQ ID NO: 2726876 - RNA, 19 nt, Artificial Sequence
  Description of Artificial Sequence: Synthetic oligonucleotide
gacaggucgggaucugagc

SEQ ID NO: 2726877 - RNA, 19 nt, Artificial Sequence
  Description of Artificial Sequence: Synthetic oligonucleotide
ugacagacuguauucuuuu

SEQ ID NO: 2726878 - RNA, 19 nt, Artificial Sequence
  Description of Artificial Sequence: Synthetic oligonucleotide
auggugacuauaauuuuca

SEQ ID NO: 2726879 - RNA, 19 nt, Artificial Sequence
  Description of Artificial Sequence: Synthetic oligonucleotide
aacacagcuucguccgagu

SEQ ID NO: 2726880 - RNA, 19 nt, Artificial Sequence
  Description of Artificial Sequence: Synthetic oligonucleotide
gauaaaagaacuggcuacu

SEQ ID NO: 2726881 - RNA, 19 nt, Artificial Sequence
  Description of Artificial Sequence: Synthetic oligonucleotide
ucggcagcucaaauccucc

SEQ ID NO: 2726882 - RNA, 19 nt, Artificial Sequence
  Description of Artificial Sequence: Synthetic oligonucleotide
uuagaugaugaugguuugu

SEQ ID NO: 2726883 - RNA, 19 nt, Artificial Sequence
  Description of Artificial Sequence: Synthetic oligonucleotide
aacgugccauuucuugaga

SEQ ID NO: 2726884 - RNA, 19 nt, Artificial Sequence
  Description of Artificial Sequence: Synthetic oligonucleotide
ucuugauggugacuauaau

SEQ ID NO: 2726885 - RNA, 19 nt, Artificial Sequence
  Description of Artificial Sequence: Synthetic oligonucleotide
uagaugaugaugguuuguu

SEQ ID NO: 2726886 - RNA, 19 nt, Artificial Sequence
  Description of Artificial Sequence: Synthetic oligonucleotide
ugcucaccaccacuuggag

SEQ ID NO: 2726887 - RNA, 19 nt, Artificial Sequence
  Description of Artificial Sequence: Synthetic oligonucleotide
ugccagggaagacauguau

SEQ ID NO: 2726888 - RNA, 19 nt, Artificial Sequence
  Description of Artificial Sequence: Synthetic oligonucleotide
ucgggaucugagcuuuuca

SEQ ID NO: 2726889 - RNA, 19 nt, Artificial Sequence
  Description of Artificial Sequence: Synthetic oligonucleotide
ugaugguuuguuucuugau

SEQ ID NO: 2726890 - RNA, 19 nt, Artificial Sequence
  Description of Artificial Sequence: Synthetic oligonucleotide
ucacugacaggucgggauc

SEQ ID NO: 2726891 - RNA, 19 nt, Artificial Sequence
  Description of Artificial Sequence: Synthetic oligonucleotide
ggaagccucaggcagugag

SEQ ID NO: 2726892 - RNA, 19 nt, Artificial Sequence
  Description of Artificial Sequence: Synthetic oligonucleotide
uuggagaucggcagcucaa

SEQ ID NO: 2726893 - RNA, 19 nt, Artificial Sequence
  Description of Artificial Sequence: Synthetic oligonucleotide
cccacuguaauccugagga

SEQ ID NO: 2726894 - RNA, 19 nt, Artificial Sequence
  Description of Artificial Sequence: Synthetic oligonucleotide
gaaucagagcagaaucuuc

SEQ ID NO: 2726895 - RNA, 19 nt, Artificial Sequence
  Description of Artificial Sequence: Synthetic oligonucleotide
ugauggaacgugccauuuc

SEQ ID NO: 2726896 - RNA, 19 nt, Artificial Sequence
  Description of Artificial Sequence: Synthetic oligonucleotide
ugggagcaugcucaccacc

SEQ ID NO: 2726897 - RNA, 19 nt, Artificial Sequence
  Description of Artificial Sequence: Synthetic oligonucleotide
cuucaucacccugggaagg

SEQ ID NO: 2726898 - RNA, 19 nt, Artificial Sequence
  Description of Artificial Sequence: Synthetic oligonucleotide
acacagcuucguccgaguc

SEQ ID NO: 2726899 - RNA, 19 nt, Artificial Sequence
  Description of Artificial Sequence: Synthetic oligonucleotide
aggacuucauguucccacu

SEQ ID NO: 2726900 - RNA, 19 nt, Artificial Sequence
  Description of Artificial Sequence: Synthetic oligonucleotide
gggaagacauguauggacc

SEQ ID NO: 2726901 - RNA, 19 nt, Artificial Sequence
  Description of Artificial Sequence: Synthetic oligonucleotide
aggaguguuggccguguug

SEQ ID NO: 2726902 - RNA, 19 nt, Artificial Sequence
  Description of Artificial Sequence: Synthetic oligonucleotide
caugcuaugccagggaaga

SEQ ID NO: 2726903 - RNA, 19 nt, Artificial Sequence
  Description of Artificial Sequence: Synthetic oligonucleotide
caaauugucguguguuaga

SEQ ID NO: 2726904 - RNA, 19 nt, Artificial Sequence
  Description of Artificial Sequence: Synthetic oligonucleotide
auugcacugucccuuuaau

SEQ ID NO: 2726905 - RNA, 19 nt, Artificial Sequence
  Description of Artificial Sequence: Synthetic oligonucleotide
cuaacaugagccucaggaa

SEQ ID NO: 2726906 - RNA, 19 nt, Artificial Sequence
  Description of Artificial Sequence: Synthetic oligonucleotide
agaacuggcuacugacaga

SEQ ID NO: 2726907 - RNA, 19 nt, Artificial Sequence
  Description of Artificial Sequence: Synthetic oligonucleotide
augaauugcacugucccuu

SEQ ID NO: 2726908 - RNA, 19 nt, Artificial Sequence
  Description of Artificial Sequence: Synthetic oligonucleotide
uggaagugcuucugugucu

SEQ ID NO: 2726909 - RNA, 19 nt, Artificial Sequence
  Description of Artificial Sequence: Synthetic oligonucleotide
uguuguugucugagguaga

SEQ ID NO: 2726910 - RNA, 19 nt, Artificial Sequence
  Description of Artificial Sequence: Synthetic oligonucleotide
ugguuuguuucuugauggu

SEQ ID NO: 2726911 - RNA, 19 nt, Artificial Sequence
  Description of Artificial Sequence: Synthetic oligonucleotide
gacaugcuaugccagggaa

SEQ ID NO: 2726912 - RNA, 19 nt, Artificial Sequence
  Description of Artificial Sequence: Synthetic oligonucleotide
aguguuggccguguuguug

SEQ ID NO: 2726913 - RNA, 19 nt, Artificial Sequence
  Description of Artificial Sequence: Synthetic oligonucleotide
augggaaggacuucauguu

SEQ ID NO: 2726914 - RNA, 19 nt, Artificial Sequence
  Description of Artificial Sequence: Synthetic oligonucleotide
gaagacauguauggaccac

SEQ ID NO: 2726915 - RNA, 19 nt, Artificial Sequence
  Description of Artificial Sequence: Synthetic oligonucleotide
gacuccugaucacuauuca

SEQ ID NO: 2726916 - RNA, 19 nt, Artificial Sequence
  Description of Artificial Sequence: Synthetic oligonucleotide
agacaugcuaugccaggga

SEQ ID NO: 2726917 - RNA, 19 nt, Artificial Sequence
  Description of Artificial Sequence: Synthetic oligonucleotide
ucaaauccuccaccccaga

SEQ ID NO: 2726918 - RNA, 19 nt, Artificial Sequence
  Description of Artificial Sequence: Synthetic oligonucleotide
ggcagugagaaacacagcu

SEQ ID NO: 2726919 - RNA, 19 nt, Artificial Sequence
  Description of Artificial Sequence: Synthetic oligonucleotide
acuucauguucccacugua

SEQ ID NO: 2726920 - RNA, 19 nt, Artificial Sequence
  Description of Artificial Sequence: Synthetic oligonucleotide
agccucaggaaugcugaac

SEQ ID NO: 2726921 - RNA, 19 nt, Artificial Sequence
  Description of Artificial Sequence: Synthetic oligonucleotide
aucggcagcucaaauccuc

SEQ ID NO: 2726922 - RNA, 19 nt, Artificial Sequence
  Description of Artificial Sequence: Synthetic oligonucleotide
cuccugaucacuauucacu

SEQ ID NO: 2726923 - RNA, 19 nt, Artificial Sequence
  Description of Artificial Sequence: Synthetic oligonucleotide
ugaauugcacugucccuuu

SEQ ID NO: 2726924 - RNA, 19 nt, Artificial Sequence
  Description of Artificial Sequence: Synthetic oligonucleotide
uguaauccugaggaguguu

SEQ ID NO: 2726925 - RNA, 19 nt, Artificial Sequence
  Description of Artificial Sequence: Synthetic oligonucleotide
gguucuugauggaacgugc

SEQ ID NO: 2726926 - RNA, 19 nt, Artificial Sequence
  Description of Artificial Sequence: Synthetic oligonucleotide
acaugcuaugccagggaag

SEQ ID NO: 2726927 - RNA, 19 nt, Artificial Sequence
  Description of Artificial Sequence: Synthetic oligonucleotide
gcagcucaaauccuccacc

SEQ ID NO: 2726928 - RNA, 19 nt, Artificial Sequence
  Description of Artificial Sequence: Synthetic oligonucleotide
gucugagguagaaauccug

SEQ ID NO: 2726929 - RNA, 19 nt, Artificial Sequence
  Description of Artificial Sequence: Synthetic oligonucleotide
caccaccacuuggagaucg

SEQ ID NO: 2726930 - RNA, 19 nt, Artificial Sequence
  Description of Artificial Sequence: Synthetic oligonucleotide
agugcuucugugucuuuua

SEQ ID NO: 2726931 - RNA, 19 nt, Artificial Sequence
  Description of Artificial Sequence: Synthetic oligonucleotide
guaauccugaggaguguug

SEQ ID NO: 2726932 - RNA, 19 nt, Artificial Sequence
  Description of Artificial Sequence: Synthetic oligonucleotide
guugucugagguagaaauc

SEQ ID NO: 2726933 - RNA, 19 nt, Artificial Sequence
  Description of Artificial Sequence: Synthetic oligonucleotide
cuuuuacuuuggaacucca

SEQ ID NO: 2726934 - RNA, 19 nt, Artificial Sequence
  Description of Artificial Sequence: Synthetic oligonucleotide
cauagucuaacaugagccu

SEQ ID NO: 2726935 - RNA, 19 nt, Artificial Sequence
  Description of Artificial Sequence: Synthetic oligonucleotide
augagccucaggaaugcug

SEQ ID NO: 2726936 - RNA, 19 nt, Artificial Sequence
  Description of Artificial Sequence: Synthetic oligonucleotide
ggaacgugccauuucuuga

SEQ ID NO: 2726937 - RNA, 19 nt, Artificial Sequence
  Description of Artificial Sequence: Synthetic oligonucleotide
gcucaaauccuccacccca

SEQ ID NO: 2726938 - RNA, 19 nt, Artificial Sequence
  Description of Artificial Sequence: Synthetic oligonucleotide
cuuggagaucggcagcuca

SEQ ID NO: 2726939 - RNA, 19 nt, Artificial Sequence
  Description of Artificial Sequence: Synthetic oligonucleotide
cacuauucacugacagguc

SEQ ID NO: 2726940 - RNA, 19 nt, Artificial Sequence
  Description of Artificial Sequence: Synthetic oligonucleotide
auguauggaccaccuuaga

SEQ ID NO: 2726941 - RNA, 19 nt, Artificial Sequence
  Description of Artificial Sequence: Synthetic oligonucleotide
guuagaaucagagcagaau

SEQ ID NO: 2726942 - RNA, 19 nt, Artificial Sequence
  Description of Artificial Sequence: Synthetic oligonucleotide
uggugacuauaauuuucau

SEQ ID NO: 2726943 - RNA, 19 nt, Artificial Sequence
  Description of Artificial Sequence: Synthetic oligonucleotide
guguuagaaucagagcaga

SEQ ID NO: 2726944 - RNA, 19 nt, Artificial Sequence
  Description of Artificial Sequence: Synthetic oligonucleotide
agucuaacaugagccucag

SEQ ID NO: 2726945 - RNA, 19 nt, Artificial Sequence
  Description of Artificial Sequence: Synthetic oligonucleotide
ggaaggacuucauguuccc

SEQ ID NO: 2726946 - RNA, 19 nt, Artificial Sequence
  Description of Artificial Sequence: Synthetic oligonucleotide
agacauguauggaccaccu

SEQ ID NO: 2726947 - RNA, 19 nt, Artificial Sequence
  Description of Artificial Sequence: Synthetic oligonucleotide
ggaagacauguauggacca

SEQ ID NO: 2726948 - RNA, 19 nt, Artificial Sequence
  Description of Artificial Sequence: Synthetic oligonucleotide
acgugccauuucuugagau

SEQ ID NO: 2726949 - RNA, 19 nt, Artificial Sequence
  Description of Artificial Sequence: Synthetic oligonucleotide
ucaucacccugggaagggc

SEQ ID NO: 2726950 - RNA, 19 nt, Artificial Sequence
  Description of Artificial Sequence: Synthetic oligonucleotide
ugccacugucuucgcuggg

SEQ ID NO: 2726951 - RNA, 19 nt, Artificial Sequence
  Description of Artificial Sequence: Synthetic oligonucleotide
cacugucuucgcugggagc

SEQ ID NO: 2726952 - RNA, 19 nt, Artificial Sequence
  Description of Artificial Sequence: Synthetic oligonucleotide
aggcagugagaaacacagc

SEQ ID NO: 2726953 - RNA, 19 nt, Artificial Sequence
  Description of Artificial Sequence: Synthetic oligonucleotide
gaaacacagcuucguccga

SEQ ID NO: 2726954 - RNA, 19 nt, Artificial Sequence
  Description of Artificial Sequence: Synthetic oligonucleotide
uucguccgagucccugucu

SEQ ID NO: 2726955 - RNA, 19 nt, Artificial Sequence
  Description of Artificial Sequence: Synthetic oligonucleotide
gucuaacaugagccucagg

SEQ ID NO: 2726956 - RNA, 19 nt, Artificial Sequence
  Description of Artificial Sequence: Synthetic oligonucleotide
ucguccgagucccugucuu

SEQ ID NO: 2726957 - RNA, 19 nt, Artificial Sequence
  Description of Artificial Sequence: Synthetic oligonucleotide
cuucgcugggagcaugcuc

SEQ ID NO: 2726958 - RNA, 19 nt, Artificial Sequence
  Description of Artificial Sequence: Synthetic oligonucleotide
ggaacuccaaagggaagcc

SEQ ID NO: 2726959 - RNA, 19 nt, Artificial Sequence
  Description of Artificial Sequence: Synthetic oligonucleotide
caccacuuggagaucggca

SEQ ID NO: 2726960 - RNA, 19 nt, Artificial Sequence
  Description of Artificial Sequence: Synthetic oligonucleotide
uggaugggaaggacuucau

SEQ ID NO: 2726961 - RNA, 19 nt, Artificial Sequence
  Description of Artificial Sequence: Synthetic oligonucleotide
guuguugucugagguagaa

SEQ ID NO: 2726962 - RNA, 19 nt, Artificial Sequence
  Description of Artificial Sequence: Synthetic oligonucleotide
ggaugggaaggacuucaug

SEQ ID NO: 2726963 - RNA, 19 nt, Artificial Sequence
  Description of Artificial Sequence: Synthetic oligonucleotide
uuguuucuugauggugacu

SEQ ID NO: 2726964 - RNA, 19 nt, Artificial Sequence
  Description of Artificial Sequence: Synthetic oligonucleotide
cuggaugggaaggacuuca

SEQ ID NO: 2726965 - RNA, 19 nt, Artificial Sequence
  Description of Artificial Sequence: Synthetic oligonucleotide
gaagccucaggcagugaga

SEQ ID NO: 2726966 - RNA, 19 nt, Artificial Sequence
  Description of Artificial Sequence: Synthetic oligonucleotide
uugauggaacgugccauuu

SEQ ID NO: 2726967 - RNA, 19 nt, Artificial Sequence
  Description of Artificial Sequence: Synthetic oligonucleotide
uuguugucugagguagaaa

SEQ ID NO: 2726968 - RNA, 19 nt, Artificial Sequence
  Description of Artificial Sequence: Synthetic oligonucleotide
ggaucugagcuuuucaaau

SEQ ID NO: 2726969 - RNA, 19 nt, Artificial Sequence
  Description of Artificial Sequence: Synthetic oligonucleotide
aucacccugggaagggcuc

SEQ ID NO: 2726970 - RNA, 19 nt, Artificial Sequence
  Description of Artificial Sequence: Synthetic oligonucleotide
augcuaugccagggaagac

SEQ ID NO: 2726971 - RNA, 19 nt, Artificial Sequence
  Description of Artificial Sequence: Synthetic oligonucleotide
acuccaaagggaagccuca

SEQ ID NO: 2726972 - RNA, 19 nt, Artificial Sequence
  Description of Artificial Sequence: Synthetic oligonucleotide
accuuagaugaugaugguu

SEQ ID NO: 2726973 - RNA, 19 nt, Artificial Sequence
  Description of Artificial Sequence: Synthetic oligonucleotide
aagggcuccuggaugggaa

SEQ ID NO: 2726974 - RNA, 19 nt, Artificial Sequence
  Description of Artificial Sequence: Synthetic oligonucleotide
augcucaccaccacuugga

SEQ ID NO: 2726975 - RNA, 19 nt, Artificial Sequence
  Description of Artificial Sequence: Synthetic oligonucleotide
augguucuugauggaacgu

SEQ ID NO: 2726976 - RNA, 19 nt, Artificial Sequence
  Description of Artificial Sequence: Synthetic oligonucleotide
acuuggagaucggcagcuc

SEQ ID NO: 2726977 - RNA, 19 nt, Artificial Sequence
  Description of Artificial Sequence: Synthetic oligonucleotide
uggcuacugacagacugua

SEQ ID NO: 2726978 - RNA, 19 nt, Artificial Sequence
  Description of Artificial Sequence: Synthetic oligonucleotide
ggcagcucaaauccuccac

SEQ ID NO: 2726979 - RNA, 19 nt, Artificial Sequence
  Description of Artificial Sequence: Synthetic oligonucleotide
agggaagccucaggcagug

SEQ ID NO: 2726980 - RNA, 19 nt, Artificial Sequence
  Description of Artificial Sequence: Synthetic oligonucleotide
cccuuuaauuuggaagugc

SEQ ID NO: 2726981 - RNA, 19 nt, Artificial Sequence
  Description of Artificial Sequence: Synthetic oligonucleotide
gggaucugagcuuuucaaa

SEQ ID NO: 2726982 - RNA, 19 nt, Artificial Sequence
  Description of Artificial Sequence: Synthetic oligonucleotide
agcaugcucaccaccacuu

SEQ ID NO: 2726983 - RNA, 19 nt, Artificial Sequence
  Description of Artificial Sequence: Synthetic oligonucleotide
uggagaucggcagcucaaa

SEQ ID NO: 2726984 - RNA, 19 nt, Artificial Sequence
  Description of Artificial Sequence: Synthetic oligonucleotide
gcuacugacagacuguauu

SEQ ID NO: 2726985 - RNA, 19 nt, Artificial Sequence
  Description of Artificial Sequence: Synthetic oligonucleotide
cuccaaagggaagccucag

SEQ ID NO: 2726986 - RNA, 19 nt, Artificial Sequence
  Description of Artificial Sequence: Synthetic oligonucleotide
cuucguccgagucccuguc

SEQ ID NO: 2726987 - RNA, 19 nt, Artificial Sequence
  Description of Artificial Sequence: Synthetic oligonucleotide
ccuuagaugaugaugguuu

SEQ ID NO: 2726988 - RNA, 19 nt, Artificial Sequence
  Description of Artificial Sequence: Synthetic oligonucleotide
gccguguuguugucugagg

SEQ ID NO: 2726989 - RNA, 19 nt, Artificial Sequence
  Description of Artificial Sequence: Synthetic oligonucleotide
cuaugccagggaagacaug

SEQ ID NO: 2726990 - RNA, 19 nt, Artificial Sequence
  Description of Artificial Sequence: Synthetic oligonucleotide
guguuggccguguuguugu

SEQ ID NO: 2726991 - RNA, 19 nt, Artificial Sequence
  Description of Artificial Sequence: Synthetic oligonucleotide
gccagggaagacauguaug

SEQ ID NO: 2726992 - RNA, 19 nt, Artificial Sequence
  Description of Artificial Sequence: Synthetic oligonucleotide
cacuguaauccugaggagu

SEQ ID NO: 2726993 - RNA, 19 nt, Artificial Sequence
  Description of Artificial Sequence: Synthetic oligonucleotide
agucccugucuuugccacu

SEQ ID NO: 2726994 - RNA, 19 nt, Artificial Sequence
  Description of Artificial Sequence: Synthetic oligonucleotide
gugagaaacacagcuucgu

SEQ ID NO: 2726995 - RNA, 19 nt, Artificial Sequence
  Description of Artificial Sequence: Synthetic oligonucleotide
gucuucgcugggagcaugc

SEQ ID NO: 2726996 - RNA, 19 nt, Artificial Sequence
  Description of Artificial Sequence: Synthetic oligonucleotide
ccuuuaauuuggaagugcu

SEQ ID NO: 2726997 - RNA, 19 nt, Artificial Sequence
  Description of Artificial Sequence: Synthetic oligonucleotide
ccucaggaaugcugaacag

SEQ ID NO: 2726998 - RNA, 19 nt, Artificial Sequence
  Description of Artificial Sequence: Synthetic oligonucleotide
agcuucguccgagucccug

SEQ ID NO: 2726999 - RNA, 19 nt, Artificial Sequence
  Description of Artificial Sequence: Synthetic oligonucleotide
ucuucgcugggagcaugcu

SEQ ID NO: 2727000 - RNA, 19 nt, Artificial Sequence
  Description of Artificial Sequence: Synthetic oligonucleotide
ggaaugcugaacagucuuc

SEQ ID NO: 2727001 - RNA, 19 nt, Artificial Sequence
  Description of Artificial Sequence: Synthetic oligonucleotide
gaagggcuccuggauggga

SEQ ID NO: 2727002 - RNA, 19 nt, Artificial Sequence
  Description of Artificial Sequence: Synthetic oligonucleotide
ggaguguuggccguguugu

SEQ ID NO: 2727003 - RNA, 19 nt, Artificial Sequence
  Description of Artificial Sequence: Synthetic oligonucleotide
gggagcaugcucaccacca

SEQ ID NO: 2727004 - RNA, 19 nt, Artificial Sequence
  Description of Artificial Sequence: Synthetic oligonucleotide
cugacagacuguauucuuu

SEQ ID NO: 2727005 - RNA, 19 nt, Artificial Sequence
  Description of Artificial Sequence: Synthetic oligonucleotide
acugacaggucgggaucug

SEQ ID NO: 2727006 - RNA, 19 nt, Artificial Sequence
  Description of Artificial Sequence: Synthetic oligonucleotide
cuggcuacugacagacugu

SEQ ID NO: 2727007 - RNA, 19 nt, Artificial Sequence
  Description of Artificial Sequence: Synthetic oligonucleotide
ccacuguaauccugaggag

SEQ ID NO: 2727008 - RNA, 19 nt, Artificial Sequence
  Description of Artificial Sequence: Synthetic oligonucleotide
aggucgggaucugagcuuu

SEQ ID NO: 2727009 - RNA, 19 nt, Artificial Sequence
  Description of Artificial Sequence: Synthetic oligonucleotide
ccacuuggagaucggcagc

SEQ ID NO: 2727010 - RNA, 19 nt, Artificial Sequence
  Description of Artificial Sequence: Synthetic oligonucleotide
gcaugcucaccaccacuug

SEQ ID NO: 2727011 - RNA, 19 nt, Artificial Sequence
  Description of Artificial Sequence: Synthetic oligonucleotide
ccacugucuucgcugggag

SEQ ID NO: 2727012 - RNA, 19 nt, Artificial Sequence
  Description of Artificial Sequence: Synthetic oligonucleotide
cuugauggaacgugccauu

SEQ ID NO: 2727013 - RNA, 19 nt, Artificial Sequence
  Description of Artificial Sequence: Synthetic oligonucleotide
gcucaccaccacuuggaga

SEQ ID NO: 2727014 - RNA, 19 nt, Artificial Sequence
  Description of Artificial Sequence: Synthetic oligonucleotide
gucguguguuagaaucaga

SEQ ID NO: 2727015 - RNA, 19 nt, Artificial Sequence
  Description of Artificial Sequence: Synthetic oligonucleotide
guuucuugauggugacuau

SEQ ID NO: 2727016 - RNA, 19 nt, Artificial Sequence
  Description of Artificial Sequence: Synthetic oligonucleotide
caggaaugcugaacagucu

SEQ ID NO: 2727017 - RNA, 19 nt, Artificial Sequence
  Description of Artificial Sequence: Synthetic oligonucleotide
gggcuccuggaugggaagg

SEQ ID NO: 2727018 - RNA, 19 nt, Artificial Sequence
  Description of Artificial Sequence: Synthetic oligonucleotide
ggaccaccuuagaugauga

SEQ ID NO: 2727019 - RNA, 19 nt, Artificial Sequence
  Description of Artificial Sequence: Synthetic oligonucleotide
gagccucaggaaugcugaa

SEQ ID NO: 2727020 - RNA, 19 nt, Artificial Sequence
  Description of Artificial Sequence: Synthetic oligonucleotide
ggaagggcuccuggauggg

SEQ ID NO: 2727021 - RNA, 19 nt, Artificial Sequence
  Description of Artificial Sequence: Synthetic oligonucleotide
ccgagucccugucuuugcc

SEQ ID NO: 2727022 - RNA, 19 nt, Artificial Sequence
  Description of Artificial Sequence: Synthetic oligonucleotide
caucacccugggaagggcu

SEQ ID NO: 2727023 - RNA, 19 nt, Artificial Sequence
  Description of Artificial Sequence: Synthetic oligonucleotide
gacauguauggaccaccuu

SEQ ID NO: 2727024 - RNA, 19 nt, Artificial Sequence
  Description of Artificial Sequence: Synthetic oligonucleotide
ccugaucacuauucacuga

SEQ ID NO: 2727025 - RNA, 19 nt, Artificial Sequence
  Description of Artificial Sequence: Synthetic oligonucleotide
cugacaggucgggaucuga

SEQ ID NO: 2727026 - RNA, 19 nt, Artificial Sequence
  Description of Artificial Sequence: Synthetic oligonucleotide
cacuuggagaucggcagcu

SEQ ID NO: 2727027 - RNA, 19 nt, Artificial Sequence
  Description of Artificial Sequence: Synthetic oligonucleotide
gaucggcagcucaaauccu

SEQ ID NO: 2727028 - RNA, 19 nt, Artificial Sequence
  Description of Artificial Sequence: Synthetic oligonucleotide
gcagaaucuucaucacccu

SEQ ID NO: 2727029 - RNA, 19 nt, Artificial Sequence
  Description of Artificial Sequence: Synthetic oligonucleotide
ucaccaccacuuggagauc

SEQ ID NO: 2727030 - RNA, 19 nt, Artificial Sequence
  Description of Artificial Sequence: Synthetic oligonucleotide
gaccaccuuagaugaugau

SEQ ID NO: 2727031 - RNA, 19 nt, Artificial Sequence
  Description of Artificial Sequence: Synthetic oligonucleotide
cugggaagggcuccuggau

SEQ ID NO: 2727032 - RNA, 19 nt, Artificial Sequence
  Description of Artificial Sequence: Synthetic oligonucleotide
ccaccacuuggagaucggc

SEQ ID NO: 2727033 - RNA, 19 nt, Artificial Sequence
  Description of Artificial Sequence: Synthetic oligonucleotide
cagacuccugaucacuauu

SEQ ID NO: 2727034 - RNA, 19 nt, Artificial Sequence
  Description of Artificial Sequence: Synthetic oligonucleotide
ccucaggcagugagaaaca

SEQ ID NO: 2727035 - RNA, 19 nt, Artificial Sequence
  Description of Artificial Sequence: Synthetic oligonucleotide
gccacugucuucgcuggga

SEQ ID NO: 2727036 - RNA, 19 nt, Artificial Sequence
  Description of Artificial Sequence: Synthetic oligonucleotide
guuggccguguuguugucu

SEQ ID NO: 2727037 - RNA, 19 nt, Artificial Sequence
  Description of Artificial Sequence: Synthetic oligonucleotide
ggagaucggcagcucaaau

SEQ ID NO: 2727038 - RNA, 19 nt, Artificial Sequence
  Description of Artificial Sequence: Synthetic oligonucleotide
augccagggaagacaugua

SEQ ID NO: 2727039 - RNA, 19 nt, Artificial Sequence
  Description of Artificial Sequence: Synthetic oligonucleotide
cacugacaggucgggaucu

SEQ ID NO: 2727040 - RNA, 19 nt, Artificial Sequence
  Description of Artificial Sequence: Synthetic oligonucleotide
cgggaucugagcuuuucaa

SEQ ID NO: 2727041 - RNA, 19 nt, Artificial Sequence
  Description of Artificial Sequence: Synthetic oligonucleotide
ccguguuguugucugaggu

SEQ ID NO: 2727042 - RNA, 19 nt, Artificial Sequence
  Description of Artificial Sequence: Synthetic oligonucleotide
gaguguuggccguguuguu

SEQ ID NO: 2727043 - RNA, 19 nt, Artificial Sequence
  Description of Artificial Sequence: Synthetic oligonucleotide
auggaccaccuuagaugau

SEQ ID NO: 2727044 - RNA, 19 nt, Artificial Sequence
  Description of Artificial Sequence: Synthetic oligonucleotide
acccugggaagggcuccug

SEQ ID NO: 2727045 - RNA, 19 nt, Artificial Sequence
  Description of Artificial Sequence: Synthetic oligonucleotide
cguguuguugucugaggua

SEQ ID NO: 2727046 - RNA, 19 nt, Artificial Sequence
  Description of Artificial Sequence: Synthetic oligonucleotide
gcagugagaaacacagcuu

SEQ ID NO: 2727047 - RNA, 19 nt, Artificial Sequence
  Description of Artificial Sequence: Synthetic oligonucleotide
cccagacuccugaucacua

SEQ ID NO: 2727048 - RNA, 19 nt, Artificial Sequence
  Description of Artificial Sequence: Synthetic oligonucleotide
caggucgggaucugagcuu

SEQ ID NO: 2727049 - RNA, 19 nt, Artificial Sequence
  Description of Artificial Sequence: Synthetic oligonucleotide
cgagucccugucuuugcca

SEQ ID NO: 2727050 - RNA, 19 nt, Artificial Sequence
  Description of Artificial Sequence: Synthetic oligonucleotide
gaggaguguuggccguguu

SEQ ID NO: 2727051 - RNA, 19 nt, Artificial Sequence
  Description of Artificial Sequence: Synthetic oligonucleotide
caugagccucaggaaugcu

SEQ ID NO: 2727052 - RNA, 19 nt, Artificial Sequence
  Description of Artificial Sequence: Synthetic oligonucleotide
ccugaggaguguuggccgu

SEQ ID NO: 2727053 - RNA, 19 nt, Artificial Sequence
  Description of Artificial Sequence: Synthetic oligonucleotide
ccagacuccugaucacuau

SEQ ID NO: 2727054 - RNA, 19 nt, Artificial Sequence
  Description of Artificial Sequence: Synthetic oligonucleotide
ggcuacugacagacuguau

SEQ ID NO: 2727055 - RNA, 19 nt, Artificial Sequence
  Description of Artificial Sequence: Synthetic oligonucleotide
cugucuucgcugggagcau

SEQ ID NO: 2727056 - RNA, 19 nt, Artificial Sequence
  Description of Artificial Sequence: Synthetic oligonucleotide
gggaagccucaggcaguga

SEQ ID NO: 2727057 - RNA, 19 nt, Artificial Sequence
  Description of Artificial Sequence: Synthetic oligonucleotide
cgcugggagcaugcucacc

SEQ ID NO: 2727058 - RNA, 19 nt, Artificial Sequence
  Description of Artificial Sequence: Synthetic oligonucleotide
ccccagacuccugaucacu

SEQ ID NO: 2727059 - RNA, 19 nt, Artificial Sequence
  Description of Artificial Sequence: Synthetic oligonucleotide
cagcuucguccgagucccu

SEQ ID NO: 2727060 - RNA, 19 nt, Artificial Sequence
  Description of Artificial Sequence: Synthetic oligonucleotide
ggucgggaucugagcuuuu

SEQ ID NO: 2727061 - RNA, 19 nt, Artificial Sequence
  Description of Artificial Sequence: Synthetic oligonucleotide
aacaguacugccuucagcc

SEQ ID NO: 2727062 - RNA, 19 nt, Artificial Sequence
  Description of Artificial Sequence: Synthetic oligonucleotide
uguaauaccaccuggaacc

SEQ ID NO: 2727063 - RNA, 19 nt, Artificial Sequence
  Description of Artificial Sequence: Synthetic oligonucleotide
uguuuuguggggcagagag

SEQ ID NO: 2727064 - RNA, 19 nt, Artificial Sequence
  Description of Artificial Sequence: Synthetic oligonucleotide
gaaaugaacauguaauacc

SEQ ID NO: 2727065 - RNA, 19 nt, Artificial Sequence
  Description of Artificial Sequence: Synthetic oligonucleotide
augaacauguaauaccacc

SEQ ID NO: 2727066 - RNA, 19 nt, Artificial Sequence
  Description of Artificial Sequence: Synthetic oligonucleotide
aagggaguuggucagaguc

SEQ ID NO: 2727067 - RNA, 19 nt, Artificial Sequence
  Description of Artificial Sequence: Synthetic oligonucleotide
uuaaucaagacucugcuua

SEQ ID NO: 2727068 - RNA, 19 nt, Artificial Sequence
  Description of Artificial Sequence: Synthetic oligonucleotide
aacauguaauaccaccugg

SEQ ID NO: 2727069 - RNA, 19 nt, Artificial Sequence
  Description of Artificial Sequence: Synthetic oligonucleotide
uuuuaaucaagacucugcu

SEQ ID NO: 2727070 - RNA, 19 nt, Artificial Sequence
  Description of Artificial Sequence: Synthetic oligonucleotide
aaacaguacugccuucagc

SEQ ID NO: 2727071 - RNA, 19 nt, Artificial Sequence
  Description of Artificial Sequence: Synthetic oligonucleotide
aagacuggauauucguugg

SEQ ID NO: 2727072 - RNA, 19 nt, Artificial Sequence
  Description of Artificial Sequence: Synthetic oligonucleotide
cuuuuaaucaagacucugc

SEQ ID NO: 2727073 - RNA, 19 nt, Artificial Sequence
  Description of Artificial Sequence: Synthetic oligonucleotide
uaggaaauggucaaggcuc

SEQ ID NO: 2727074 - RNA, 19 nt, Artificial Sequence
  Description of Artificial Sequence: Synthetic oligonucleotide
aaaugaacauguaauacca

SEQ ID NO: 2727075 - RNA, 19 nt, Artificial Sequence
  Description of Artificial Sequence: Synthetic oligonucleotide
ugcuuaaguguuuuguggg

SEQ ID NO: 2727076 - RNA, 19 nt, Artificial Sequence
  Description of Artificial Sequence: Synthetic oligonucleotide
aagacuggccccuuuagug

SEQ ID NO: 2727077 - RNA, 19 nt, Artificial Sequence
  Description of Artificial Sequence: Synthetic oligonucleotide
auguaauaccaccuggaac

SEQ ID NO: 2727078 - RNA, 19 nt, Artificial Sequence
  Description of Artificial Sequence: Synthetic oligonucleotide
aaagcaugaaaugaacaug

SEQ ID NO: 2727079 - RNA, 19 nt, Artificial Sequence
  Description of Artificial Sequence: Synthetic oligonucleotide
uuuuguggggcagagagcc

SEQ ID NO: 2727080 - RNA, 19 nt, Artificial Sequence
  Description of Artificial Sequence: Synthetic oligonucleotide
ucagccaggacaacguggg

SEQ ID NO: 2727081 - RNA, 19 nt, Artificial Sequence
  Description of Artificial Sequence: Synthetic oligonucleotide
cuacauuucaaaacaguac

SEQ ID NO: 2727082 - RNA, 19 nt, Artificial Sequence
  Description of Artificial Sequence: Synthetic oligonucleotide
acugccuucagccaggaca

SEQ ID NO: 2727083 - RNA, 19 nt, Artificial Sequence
  Description of Artificial Sequence: Synthetic oligonucleotide
acaacgugggaguggaccc

SEQ ID NO: 2727084 - RNA, 19 nt, Artificial Sequence
  Description of Artificial Sequence: Synthetic oligonucleotide
gauacagcuggcuggggcg

SEQ ID NO: 2727085 - RNA, 19 nt, Artificial Sequence
  Description of Artificial Sequence: Synthetic oligonucleotide
aguuggucagaguccagcc

SEQ ID NO: 2727086 - RNA, 19 nt, Artificial Sequence
  Description of Artificial Sequence: Synthetic oligonucleotide
auaggaaauggucaaggcu

SEQ ID NO: 2727087 - RNA, 19 nt, Artificial Sequence
  Description of Artificial Sequence: Synthetic oligonucleotide
aagcaugaaaugaacaugu

SEQ ID NO: 2727088 - RNA, 19 nt, Artificial Sequence
  Description of Artificial Sequence: Synthetic oligonucleotide
ucaagacucugcuuaagug

SEQ ID NO: 2727089 - RNA, 19 nt, Artificial Sequence
  Description of Artificial Sequence: Synthetic oligonucleotide
ugggaguggacccagcugc

SEQ ID NO: 2727090 - RNA, 19 nt, Artificial Sequence
  Description of Artificial Sequence: Synthetic oligonucleotide
aaaacaguacugccuucag

SEQ ID NO: 2727091 - RNA, 19 nt, Artificial Sequence
  Description of Artificial Sequence: Synthetic oligonucleotide
ucugcuuaaguguuuugug

SEQ ID NO: 2727092 - RNA, 19 nt, Artificial Sequence
  Description of Artificial Sequence: Synthetic oligonucleotide
uucagccaggacaacgugg

SEQ ID NO: 2727093 - RNA, 19 nt, Artificial Sequence
  Description of Artificial Sequence: Synthetic oligonucleotide
cugcuuaaguguuuugugg

SEQ ID NO: 2727094 - RNA, 19 nt, Artificial Sequence
  Description of Artificial Sequence: Synthetic oligonucleotide
caagacuggauauucguug

SEQ ID NO: 2727095 - RNA, 19 nt, Artificial Sequence
  Description of Artificial Sequence: Synthetic oligonucleotide
uuuggaaggccaccucugg

SEQ ID NO: 2727096 - RNA, 19 nt, Artificial Sequence
  Description of Artificial Sequence: Synthetic oligonucleotide
cuuuagugaagggaguugg

SEQ ID NO: 2727097 - RNA, 19 nt, Artificial Sequence
  Description of Artificial Sequence: Synthetic oligonucleotide
auauucguuggcuacauuu

SEQ ID NO: 2727098 - RNA, 19 nt, Artificial Sequence
  Description of Artificial Sequence: Synthetic oligonucleotide
aaugaacauguaauaccac

SEQ ID NO: 2727099 - RNA, 19 nt, Artificial Sequence
  Description of Artificial Sequence: Synthetic oligonucleotide
ugccaucccaggcugaggg

SEQ ID NO: 2727100 - RNA, 19 nt, Artificial Sequence
  Description of Artificial Sequence: Synthetic oligonucleotide
uagaaagggacagaaguca

SEQ ID NO: 2727101 - RNA, 19 nt, Artificial Sequence
  Description of Artificial Sequence: Synthetic oligonucleotide
aaauggucaaggcuccgca

SEQ ID NO: 2727102 - RNA, 19 nt, Artificial Sequence
  Description of Artificial Sequence: Synthetic oligonucleotide
uagugaagggaguugguca

SEQ ID NO: 2727103 - RNA, 19 nt, Artificial Sequence
  Description of Artificial Sequence: Synthetic oligonucleotide
gaacauguaauaccaccug

SEQ ID NO: 2727104 - RNA, 19 nt, Artificial Sequence
  Description of Artificial Sequence: Synthetic oligonucleotide
aauccgaguccucaagacu

SEQ ID NO: 2727105 - RNA, 19 nt, Artificial Sequence
  Description of Artificial Sequence: Synthetic oligonucleotide
agggccaaguaccagcaac

SEQ ID NO: 2727106 - RNA, 19 nt, Artificial Sequence
  Description of Artificial Sequence: Synthetic oligonucleotide
agugaagggaguuggucag

SEQ ID NO: 2727107 - RNA, 19 nt, Artificial Sequence
  Description of Artificial Sequence: Synthetic oligonucleotide
aauggucaaggcuccgcag

SEQ ID NO: 2727108 - RNA, 19 nt, Artificial Sequence
  Description of Artificial Sequence: Synthetic oligonucleotide
uauucguuggcuacauuuc

SEQ ID NO: 2727109 - RNA, 19 nt, Artificial Sequence
  Description of Artificial Sequence: Synthetic oligonucleotide
agcaucuccucgcaggcgg

SEQ ID NO: 2727110 - RNA, 19 nt, Artificial Sequence
  Description of Artificial Sequence: Synthetic oligonucleotide
cuagaaagggacagaaguc

SEQ ID NO: 2727111 - RNA, 19 nt, Artificial Sequence
  Description of Artificial Sequence: Synthetic oligonucleotide
uuaaguguuuuguggggca

SEQ ID NO: 2727112 - RNA, 19 nt, Artificial Sequence
  Description of Artificial Sequence: Synthetic oligonucleotide
augaaaugaacauguaaua

SEQ ID NO: 2727113 - RNA, 19 nt, Artificial Sequence
  Description of Artificial Sequence: Synthetic oligonucleotide
agcaacugccacugaagac

SEQ ID NO: 2727114 - RNA, 19 nt, Artificial Sequence
  Description of Artificial Sequence: Synthetic oligonucleotide
ugaagacuggccccuuuag

SEQ ID NO: 2727115 - RNA, 19 nt, Artificial Sequence
  Description of Artificial Sequence: Synthetic oligonucleotide
acugccacugaagacuggc

SEQ ID NO: 2727116 - RNA, 19 nt, Artificial Sequence
  Description of Artificial Sequence: Synthetic oligonucleotide
caugaaaugaacauguaau

SEQ ID NO: 2727117 - RNA, 19 nt, Artificial Sequence
  Description of Artificial Sequence: Synthetic oligonucleotide
uagagaugccaucccaggc

SEQ ID NO: 2727118 - RNA, 19 nt, Artificial Sequence
  Description of Artificial Sequence: Synthetic oligonucleotide
agcacugcuggccugccgg

SEQ ID NO: 2727119 - RNA, 19 nt, Artificial Sequence
  Description of Artificial Sequence: Synthetic oligonucleotide
agagaugccaucccaggcu

SEQ ID NO: 2727120 - RNA, 19 nt, Artificial Sequence
  Description of Artificial Sequence: Synthetic oligonucleotide
agacuggauauucguuggc

SEQ ID NO: 2727121 - RNA, 19 nt, Artificial Sequence
  Description of Artificial Sequence: Synthetic oligonucleotide
uuuaggagucugcagguuu

SEQ ID NO: 2727122 - RNA, 19 nt, Artificial Sequence
  Description of Artificial Sequence: Synthetic oligonucleotide
cuuaaguguuuuguggggc

SEQ ID NO: 2727123 - RNA, 19 nt, Artificial Sequence
  Description of Artificial Sequence: Synthetic oligonucleotide
aucaagacucugcuuaagu

SEQ ID NO: 2727124 - RNA, 19 nt, Artificial Sequence
  Description of Artificial Sequence: Synthetic oligonucleotide
gacaacgugggaguggacc

SEQ ID NO: 2727125 - RNA, 19 nt, Artificial Sequence
  Description of Artificial Sequence: Synthetic oligonucleotide
gaauccgaguccucaagac

SEQ ID NO: 2727126 - RNA, 19 nt, Artificial Sequence
  Description of Artificial Sequence: Synthetic oligonucleotide
acuuggcugaaccguuccc

SEQ ID NO: 2727127 - RNA, 19 nt, Artificial Sequence
  Description of Artificial Sequence: Synthetic oligonucleotide
cuggauauucguuggcuac

SEQ ID NO: 2727128 - RNA, 19 nt, Artificial Sequence
  Description of Artificial Sequence: Synthetic oligonucleotide
uuuagugaagggaguuggu

SEQ ID NO: 2727129 - RNA, 19 nt, Artificial Sequence
  Description of Artificial Sequence: Synthetic oligonucleotide
uuuaaucaagacucugcuu

SEQ ID NO: 2727130 - RNA, 19 nt, Artificial Sequence
  Description of Artificial Sequence: Synthetic oligonucleotide
aaucaagacucugcuuaag

SEQ ID NO: 2727131 - RNA, 19 nt, Artificial Sequence
  Description of Artificial Sequence: Synthetic oligonucleotide
auucguuggcuacauuuca

SEQ ID NO: 2727132 - RNA, 19 nt, Artificial Sequence
  Description of Artificial Sequence: Synthetic oligonucleotide
aggaaauggucaaggcucc

SEQ ID NO: 2727133 - RNA, 19 nt, Artificial Sequence
  Description of Artificial Sequence: Synthetic oligonucleotide
aggcugagggccaaguacc

SEQ ID NO: 2727134 - RNA, 19 nt, Artificial Sequence
  Description of Artificial Sequence: Synthetic oligonucleotide
aucgccagcauccuuugga

SEQ ID NO: 2727135 - RNA, 19 nt, Artificial Sequence
  Description of Artificial Sequence: Synthetic oligonucleotide
cuuggcugaaccguucccg

SEQ ID NO: 2727136 - RNA, 19 nt, Artificial Sequence
  Description of Artificial Sequence: Synthetic oligonucleotide
ucaagacuggauauucguu

SEQ ID NO: 2727137 - RNA, 19 nt, Artificial Sequence
  Description of Artificial Sequence: Synthetic oligonucleotide
uccuuuuaaucaagacucu

SEQ ID NO: 2727138 - RNA, 19 nt, Artificial Sequence
  Description of Artificial Sequence: Synthetic oligonucleotide
ugaagggaguuggucagag

SEQ ID NO: 2727139 - RNA, 19 nt, Artificial Sequence
  Description of Artificial Sequence: Synthetic oligonucleotide
agucagggugcccggauag

SEQ ID NO: 2727140 - RNA, 19 nt, Artificial Sequence
  Description of Artificial Sequence: Synthetic oligonucleotide
uaaucaagacucugcuuaa

SEQ ID NO: 2727141 - RNA, 19 nt, Artificial Sequence
  Description of Artificial Sequence: Synthetic oligonucleotide
uuagugaagggaguugguc

SEQ ID NO: 2727142 - RNA, 19 nt, Artificial Sequence
  Description of Artificial Sequence: Synthetic oligonucleotide
uuggaaggccaccucuggc

SEQ ID NO: 2727143 - RNA, 19 nt, Artificial Sequence
  Description of Artificial Sequence: Synthetic oligonucleotide
aguagagaugccaucccag

SEQ ID NO: 2727144 - RNA, 19 nt, Artificial Sequence
  Description of Artificial Sequence: Synthetic oligonucleotide
aaccguucccgccgccagc

SEQ ID NO: 2727145 - RNA, 19 nt, Artificial Sequence
  Description of Artificial Sequence: Synthetic oligonucleotide
aaagcaggccagaccacuc

SEQ ID NO: 2727146 - RNA, 19 nt, Artificial Sequence
  Description of Artificial Sequence: Synthetic oligonucleotide
gaaauggucaaggcuccgc

SEQ ID NO: 2727147 - RNA, 19 nt, Artificial Sequence
  Description of Artificial Sequence: Synthetic oligonucleotide
cuuuggaaggccaccucug

SEQ ID NO: 2727148 - RNA, 19 nt, Artificial Sequence
  Description of Artificial Sequence: Synthetic oligonucleotide
gcuuaaguguuuugugggg

SEQ ID NO: 2727149 - RNA, 19 nt, Artificial Sequence
  Description of Artificial Sequence: Synthetic oligonucleotide
cucuggcggauacagcugg

SEQ ID NO: 2727150 - RNA, 19 nt, Artificial Sequence
  Description of Artificial Sequence: Synthetic oligonucleotide
uccggacuuggcugaaccg

SEQ ID NO: 2727151 - RNA, 19 nt, Artificial Sequence
  Description of Artificial Sequence: Synthetic oligonucleotide
uucguuggcuacauuucaa

SEQ ID NO: 2727152 - RNA, 19 nt, Artificial Sequence
  Description of Artificial Sequence: Synthetic oligonucleotide
aguccucaagacuggauau

SEQ ID NO: 2727153 - RNA, 19 nt, Artificial Sequence
  Description of Artificial Sequence: Synthetic oligonucleotide
uccaucgccagcauccuuu

SEQ ID NO: 2727154 - RNA, 19 nt, Artificial Sequence
  Description of Artificial Sequence: Synthetic oligonucleotide
uuggcugaaccguucccgc

SEQ ID NO: 2727155 - RNA, 19 nt, Artificial Sequence
  Description of Artificial Sequence: Synthetic oligonucleotide
agaaagggacagaagucag

SEQ ID NO: 2727156 - RNA, 19 nt, Artificial Sequence
  Description of Artificial Sequence: Synthetic oligonucleotide
aggccagaccacucuggcc

SEQ ID NO: 2727157 - RNA, 19 nt, Artificial Sequence
  Description of Artificial Sequence: Synthetic oligonucleotide
gaguuggucagaguccagc

SEQ ID NO: 2727158 - RNA, 19 nt, Artificial Sequence
  Description of Artificial Sequence: Synthetic oligonucleotide
gacuuggcugaaccguucc

SEQ ID NO: 2727159 - RNA, 19 nt, Artificial Sequence
  Description of Artificial Sequence: Synthetic oligonucleotide
aagacucugcuuaaguguu

SEQ ID NO: 2727160 - RNA, 19 nt, Artificial Sequence
  Description of Artificial Sequence: Synthetic oligonucleotide
caguacugccuucagccag

SEQ ID NO: 2727161 - RNA, 19 nt, Artificial Sequence
  Description of Artificial Sequence: Synthetic oligonucleotide
ggcggauacagcuggcugg

SEQ ID NO: 2727162 - RNA, 19 nt, Artificial Sequence
  Description of Artificial Sequence: Synthetic oligonucleotide
agacuggccccuuuaguga

SEQ ID NO: 2727163 - RNA, 19 nt, Artificial Sequence
  Description of Artificial Sequence: Synthetic oligonucleotide
ucguuggcuacauuucaaa

SEQ ID NO: 2727164 - RNA, 19 nt, Artificial Sequence
  Description of Artificial Sequence: Synthetic oligonucleotide
uccucaagacuggauauuc

SEQ ID NO: 2727165 - RNA, 19 nt, Artificial Sequence
  Description of Artificial Sequence: Synthetic oligonucleotide
acauguaauaccaccugga

SEQ ID NO: 2727166 - RNA, 19 nt, Artificial Sequence
  Description of Artificial Sequence: Synthetic oligonucleotide
caaagcaugaaaugaacau

SEQ ID NO: 2727167 - RNA, 19 nt, Artificial Sequence
  Description of Artificial Sequence: Synthetic oligonucleotide
uggccugccggaauccgag

SEQ ID NO: 2727168 - RNA, 19 nt, Artificial Sequence
  Description of Artificial Sequence: Synthetic oligonucleotide
gaguggacccagcugccag

SEQ ID NO: 2727169 - RNA, 19 nt, Artificial Sequence
  Description of Artificial Sequence: Synthetic oligonucleotide
gaguccucaagacuggaua

SEQ ID NO: 2727170 - RNA, 19 nt, Artificial Sequence
  Description of Artificial Sequence: Synthetic oligonucleotide
uggcggauacagcuggcug

SEQ ID NO: 2727171 - RNA, 19 nt, Artificial Sequence
  Description of Artificial Sequence: Synthetic oligonucleotide
uggauauucguuggcuaca

SEQ ID NO: 2727172 - RNA, 19 nt, Artificial Sequence
  Description of Artificial Sequence: Synthetic oligonucleotide
uggucaaggcuccgcagcu

SEQ ID NO: 2727173 - RNA, 19 nt, Artificial Sequence
  Description of Artificial Sequence: Synthetic oligonucleotide
acuggauauucguuggcua

SEQ ID NO: 2727174 - RNA, 19 nt, Artificial Sequence
  Description of Artificial Sequence: Synthetic oligonucleotide
aguacugccuucagccagg

SEQ ID NO: 2727175 - RNA, 19 nt, Artificial Sequence
  Description of Artificial Sequence: Synthetic oligonucleotide
caagacucugcuuaagugu

SEQ ID NO: 2727176 - RNA, 19 nt, Artificial Sequence
  Description of Artificial Sequence: Synthetic oligonucleotide
aggcuccgcagcuccaucg

SEQ ID NO: 2727177 - RNA, 19 nt, Artificial Sequence
  Description of Artificial Sequence: Synthetic oligonucleotide
gaugccaucccaggcugag

SEQ ID NO: 2727178 - RNA, 19 nt, Artificial Sequence
  Description of Artificial Sequence: Synthetic oligonucleotide
caacugccacugaagacug

SEQ ID NO: 2727179 - RNA, 19 nt, Artificial Sequence
  Description of Artificial Sequence: Synthetic oligonucleotide
cuccggacuuggcugaacc

SEQ ID NO: 2727180 - RNA, 19 nt, Artificial Sequence
  Description of Artificial Sequence: Synthetic oligonucleotide
ggcgaugguguccaggagc

SEQ ID NO: 2727181 - RNA, 19 nt, Artificial Sequence
  Description of Artificial Sequence: Synthetic oligonucleotide
acaguacugccuucagcca

SEQ ID NO: 2727182 - RNA, 19 nt, Artificial Sequence
  Description of Artificial Sequence: Synthetic oligonucleotide
cauguaauaccaccuggaa

SEQ ID NO: 2727183 - RNA, 19 nt, Artificial Sequence
  Description of Artificial Sequence: Synthetic oligonucleotide
caaaacaguacugccuuca

SEQ ID NO: 2727184 - RNA, 19 nt, Artificial Sequence
  Description of Artificial Sequence: Synthetic oligonucleotide
gaaccguucccgccgccag

SEQ ID NO: 2727185 - RNA, 19 nt, Artificial Sequence
  Description of Artificial Sequence: Synthetic oligonucleotide
ucgcaggcggcgauggugu

SEQ ID NO: 2727186 - RNA, 19 nt, Artificial Sequence
  Description of Artificial Sequence: Synthetic oligonucleotide
aacgugggaguggacccag

SEQ ID NO: 2727187 - RNA, 19 nt, Artificial Sequence
  Description of Artificial Sequence: Synthetic oligonucleotide
ggauacagcuggcuggggc

SEQ ID NO: 2727188 - RNA, 19 nt, Artificial Sequence
  Description of Artificial Sequence: Synthetic oligonucleotide
uuuguggggcagagagccc

SEQ ID NO: 2727189 - RNA, 19 nt, Artificial Sequence
  Description of Artificial Sequence: Synthetic oligonucleotide
uggucagaguccagccacc

SEQ ID NO: 2727190 - RNA, 19 nt, Artificial Sequence
  Description of Artificial Sequence: Synthetic oligonucleotide
guaauaccaccuggaaccc

SEQ ID NO: 2727191 - RNA, 19 nt, Artificial Sequence
  Description of Artificial Sequence: Synthetic oligonucleotide
accguucccgccgccagcc

SEQ ID NO: 2727192 - RNA, 19 nt, Artificial Sequence
  Description of Artificial Sequence: Synthetic oligonucleotide
ggcugaaccguucccgccg

SEQ ID NO: 2727193 - RNA, 19 nt, Artificial Sequence
  Description of Artificial Sequence: Synthetic oligonucleotide
ugcccggauaggaaauggu

SEQ ID NO: 2727194 - RNA, 19 nt, Artificial Sequence
  Description of Artificial Sequence: Synthetic oligonucleotide
aaguguuuuguggggcaga

SEQ ID NO: 2727195 - RNA, 19 nt, Artificial Sequence
  Description of Artificial Sequence: Synthetic oligonucleotide
aggacaacgugggagugga

SEQ ID NO: 2727196 - RNA, 19 nt, Artificial Sequence
  Description of Artificial Sequence: Synthetic oligonucleotide
cagcugccaguagagaugc

SEQ ID NO: 2727197 - RNA, 19 nt, Artificial Sequence
  Description of Artificial Sequence: Synthetic oligonucleotide
accggcccuagaaagggac

SEQ ID NO: 2727198 - RNA, 19 nt, Artificial Sequence
  Description of Artificial Sequence: Synthetic oligonucleotide
uaauaccaccuggaacccc

SEQ ID NO: 2727199 - RNA, 19 nt, Artificial Sequence
  Description of Artificial Sequence: Synthetic oligonucleotide
ccuagaaagggacagaagu

SEQ ID NO: 2727200 - RNA, 19 nt, Artificial Sequence
  Description of Artificial Sequence: Synthetic oligonucleotide
ucgccagcauccuuuggaa

SEQ ID NO: 2727201 - RNA, 19 nt, Artificial Sequence
  Description of Artificial Sequence: Synthetic oligonucleotide
cucaagacuggauauucgu

SEQ ID NO: 2727202 - RNA, 19 nt, Artificial Sequence
  Description of Artificial Sequence: Synthetic oligonucleotide
auacagcuggcuggggcgg

SEQ ID NO: 2727203 - RNA, 19 nt, Artificial Sequence
  Description of Artificial Sequence: Synthetic oligonucleotide
caggccagaccacucuggc

SEQ ID NO: 2727204 - RNA, 19 nt, Artificial Sequence
  Description of Artificial Sequence: Synthetic oligonucleotide
uccucgcaggcggcgaugg

SEQ ID NO: 2727205 - RNA, 19 nt, Artificial Sequence
  Description of Artificial Sequence: Synthetic oligonucleotide
uggcugaaccguucccgcc

SEQ ID NO: 2727206 - RNA, 19 nt, Artificial Sequence
  Description of Artificial Sequence: Synthetic oligonucleotide
aagucagggugcccggaua

SEQ ID NO: 2727207 - RNA, 19 nt, Artificial Sequence
  Description of Artificial Sequence: Synthetic oligonucleotide
cccaaagcaugaaaugaac

SEQ ID NO: 2727208 - RNA, 19 nt, Artificial Sequence
  Description of Artificial Sequence: Synthetic oligonucleotide
ccucaagacuggauauucg

SEQ ID NO: 2727209 - RNA, 19 nt, Artificial Sequence
  Description of Artificial Sequence: Synthetic oligonucleotide
gccccuuuagugaagggag

SEQ ID NO: 2727210 - RNA, 19 nt, Artificial Sequence
  Description of Artificial Sequence: Synthetic oligonucleotide
guuuuguggggcagagagc

SEQ ID NO: 2727211 - RNA, 19 nt, Artificial Sequence
  Description of Artificial Sequence: Synthetic oligonucleotide
gugggaguggacccagcug

SEQ ID NO: 2727212 - RNA, 19 nt, Artificial Sequence
  Description of Artificial Sequence: Synthetic oligonucleotide
ccaaagcaugaaaugaaca

SEQ ID NO: 2727213 - RNA, 19 nt, Artificial Sequence
  Description of Artificial Sequence: Synthetic oligonucleotide
uaggagucugcagguuucc

SEQ ID NO: 2727214 - RNA, 19 nt, Artificial Sequence
  Description of Artificial Sequence: Synthetic oligonucleotide
agggugcccggauaggaaa

SEQ ID NO: 2727215 - RNA, 19 nt, Artificial Sequence
  Description of Artificial Sequence: Synthetic oligonucleotide
gugcccggauaggaaaugg

SEQ ID NO: 2727216 - RNA, 19 nt, Artificial Sequence
  Description of Artificial Sequence: Synthetic oligonucleotide
gaagacuggccccuuuagu

SEQ ID NO: 2727217 - RNA, 19 nt, Artificial Sequence
  Description of Artificial Sequence: Synthetic oligonucleotide
cuggccccuuuagugaagg

SEQ ID NO: 2727218 - RNA, 19 nt, Artificial Sequence
  Description of Artificial Sequence: Synthetic oligonucleotide
ugaaccguucccgccgcca

SEQ ID NO: 2727219 - RNA, 19 nt, Artificial Sequence
  Description of Artificial Sequence: Synthetic oligonucleotide
ucaaggcuccgcagcucca

SEQ ID NO: 2727220 - RNA, 19 nt, Artificial Sequence
  Description of Artificial Sequence: Synthetic oligonucleotide
ggaauccgaguccucaaga

SEQ ID NO: 2727221 - RNA, 19 nt, Artificial Sequence
  Description of Artificial Sequence: Synthetic oligonucleotide
uuuuaggagucugcagguu

SEQ ID NO: 2727222 - RNA, 19 nt, Artificial Sequence
  Description of Artificial Sequence: Synthetic oligonucleotide
gggacagaagucagggugc

SEQ ID NO: 2727223 - RNA, 19 nt, Artificial Sequence
  Description of Artificial Sequence: Synthetic oligonucleotide
caguagagaugccauccca

SEQ ID NO: 2727224 - RNA, 19 nt, Artificial Sequence
  Description of Artificial Sequence: Synthetic oligonucleotide
gacuggccccuuuagugaa

SEQ ID NO: 2727225 - RNA, 19 nt, Artificial Sequence
  Description of Artificial Sequence: Synthetic oligonucleotide
uggccccuuuagugaaggg

SEQ ID NO: 2727226 - RNA, 19 nt, Artificial Sequence
  Description of Artificial Sequence: Synthetic oligonucleotide
caaguaccagcaacugcca

SEQ ID NO: 2727227 - RNA, 19 nt, Artificial Sequence
  Description of Artificial Sequence: Synthetic oligonucleotide
gagucugcagguuuccuuu

SEQ ID NO: 2727228 - RNA, 19 nt, Artificial Sequence
  Description of Artificial Sequence: Synthetic oligonucleotide
aacugccacugaagacugg

SEQ ID NO: 2727229 - RNA, 19 nt, Artificial Sequence
  Description of Artificial Sequence: Synthetic oligonucleotide
gacuggauauucguuggcu

SEQ ID NO: 2727230 - RNA, 19 nt, Artificial Sequence
  Description of Artificial Sequence: Synthetic oligonucleotide
ccuuuuaaucaagacucug

SEQ ID NO: 2727231 - RNA, 19 nt, Artificial Sequence
  Description of Artificial Sequence: Synthetic oligonucleotide
cucgcaggcggcgauggug

SEQ ID NO: 2727232 - RNA, 19 nt, Artificial Sequence
  Description of Artificial Sequence: Synthetic oligonucleotide
gcaacugccacugaagacu

SEQ ID NO: 2727233 - RNA, 19 nt, Artificial Sequence
  Description of Artificial Sequence: Synthetic oligonucleotide
cccggauaggaaaugguca

SEQ ID NO: 2727234 - RNA, 19 nt, Artificial Sequence
  Description of Artificial Sequence: Synthetic oligonucleotide
ggucagaguccagccaccg

SEQ ID NO: 2727235 - RNA, 19 nt, Artificial Sequence
  Description of Artificial Sequence: Synthetic oligonucleotide
ccaguagagaugccauccc

SEQ ID NO: 2727236 - RNA, 19 nt, Artificial Sequence
  Description of Artificial Sequence: Synthetic oligonucleotide
caucgccagcauccuuugg

SEQ ID NO: 2727237 - RNA, 19 nt, Artificial Sequence
  Description of Artificial Sequence: Synthetic oligonucleotide
ggacccagcugccaguaga

SEQ ID NO: 2727238 - RNA, 19 nt, Artificial Sequence
  Description of Artificial Sequence: Synthetic oligonucleotide
ggaaauggucaaggcuccg

SEQ ID NO: 2727239 - RNA, 19 nt, Artificial Sequence
  Description of Artificial Sequence: Synthetic oligonucleotide
gcggauacagcuggcuggg

SEQ ID NO: 2727240 - RNA, 19 nt, Artificial Sequence
  Description of Artificial Sequence: Synthetic oligonucleotide
gucagggugcccggauagg

SEQ ID NO: 2727241 - RNA, 19 nt, Artificial Sequence
  Description of Artificial Sequence: Synthetic oligonucleotide
caccucuggcggauacagc

SEQ ID NO: 2727242 - RNA, 19 nt, Artificial Sequence
  Description of Artificial Sequence: Synthetic oligonucleotide
caucuccucgcaggcggcg

SEQ ID NO: 2727243 - RNA, 19 nt, Artificial Sequence
  Description of Artificial Sequence: Synthetic oligonucleotide
ccugccggaauccgagucc

SEQ ID NO: 2727244 - RNA, 19 nt, Artificial Sequence
  Description of Artificial Sequence: Synthetic oligonucleotide
cuccgcagcuccaucgcca

SEQ ID NO: 2727245 - RNA, 19 nt, Artificial Sequence
  Description of Artificial Sequence: Synthetic oligonucleotide
gcugccaguagagaugcca

SEQ ID NO: 2727246 - RNA, 19 nt, Artificial Sequence
  Description of Artificial Sequence: Synthetic oligonucleotide
ucuccucgcaggcggcgau

SEQ ID NO: 2727247 - RNA, 19 nt, Artificial Sequence
  Description of Artificial Sequence: Synthetic oligonucleotide
agaagucagggugcccgga

SEQ ID NO: 2727248 - RNA, 19 nt, Artificial Sequence
  Description of Artificial Sequence: Synthetic oligonucleotide
cccuagaaagggacagaag

SEQ ID NO: 2727249 - RNA, 19 nt, Artificial Sequence
  Description of Artificial Sequence: Synthetic oligonucleotide
cuggcuggggcggcgcucc

SEQ ID NO: 2727250 - RNA, 19 nt, Artificial Sequence
  Description of Artificial Sequence: Synthetic oligonucleotide
cagcaucuccucgcaggcg

SEQ ID NO: 2727251 - RNA, 19 nt, Artificial Sequence
  Description of Artificial Sequence: Synthetic oligonucleotide
cugcuggccugccggaauc

SEQ ID NO: 2727252 - RNA, 19 nt, Artificial Sequence
  Description of Artificial Sequence: Synthetic oligonucleotide
agcaugaaaugaacaugua

SEQ ID NO: 2727253 - RNA, 19 nt, Artificial Sequence
  Description of Artificial Sequence: Synthetic oligonucleotide
ccaccggcccuagaaaggg

SEQ ID NO: 2727254 - RNA, 19 nt, Artificial Sequence
  Description of Artificial Sequence: Synthetic oligonucleotide
gcggcgaugguguccagga

SEQ ID NO: 2727255 - RNA, 19 nt, Artificial Sequence
  Description of Artificial Sequence: Synthetic oligonucleotide
gcaggccagaccacucugg

SEQ ID NO: 2727256 - RNA, 19 nt, Artificial Sequence
  Description of Artificial Sequence: Synthetic oligonucleotide
gaagggaguuggucagagu

SEQ ID NO: 2727257 - RNA, 19 nt, Artificial Sequence
  Description of Artificial Sequence: Synthetic oligonucleotide
uacagcuggcuggggcggc

SEQ ID NO: 2727258 - RNA, 19 nt, Artificial Sequence
  Description of Artificial Sequence: Synthetic oligonucleotide
ccaccucuggcggauacag

SEQ ID NO: 2727259 - RNA, 19 nt, Artificial Sequence
  Description of Artificial Sequence: Synthetic oligonucleotide
ggccccuuuagugaaggga

SEQ ID NO: 2727260 - RNA, 19 nt, Artificial Sequence
  Description of Artificial Sequence: Synthetic oligonucleotide
aggagucugcagguuuccu

SEQ ID NO: 2727261 - RNA, 19 nt, Artificial Sequence
  Description of Artificial Sequence: Synthetic oligonucleotide
ggccaaguaccagcaacug

SEQ ID NO: 2727262 - RNA, 19 nt, Artificial Sequence
  Description of Artificial Sequence: Synthetic oligonucleotide
acuggccccuuuagugaag

SEQ ID NO: 2727263 - RNA, 19 nt, Artificial Sequence
  Description of Artificial Sequence: Synthetic oligonucleotide
ccggauaggaaauggucaa

SEQ ID NO: 2727264 - RNA, 19 nt, Artificial Sequence
  Description of Artificial Sequence: Synthetic oligonucleotide
ccccaaagcaugaaaugaa

SEQ ID NO: 2727265 - RNA, 19 nt, Artificial Sequence
  Description of Artificial Sequence: Synthetic oligonucleotide
caaagcaggccagaccacu

SEQ ID NO: 2727266 - RNA, 19 nt, Artificial Sequence
  Description of Artificial Sequence: Synthetic oligonucleotide
gcccggauaggaaaugguc

SEQ ID NO: 2727267 - RNA, 19 nt, Artificial Sequence
  Description of Artificial Sequence: Synthetic oligonucleotide
cuggccugccggaauccga

SEQ ID NO: 2727268 - RNA, 19 nt, Artificial Sequence
  Description of Artificial Sequence: Synthetic oligonucleotide
acgugggaguggacccagc

SEQ ID NO: 2727269 - RNA, 19 nt, Artificial Sequence
  Description of Artificial Sequence: Synthetic oligonucleotide
gauauucguuggcuacauu

SEQ ID NO: 2727270 - RNA, 19 nt, Artificial Sequence
  Description of Artificial Sequence: Synthetic oligonucleotide
ggugcccggauaggaaaug

SEQ ID NO: 2727271 - RNA, 19 nt, Artificial Sequence
  Description of Artificial Sequence: Synthetic oligonucleotide
agcugccaguagagaugcc

SEQ ID NO: 2727272 - RNA, 19 nt, Artificial Sequence
  Description of Artificial Sequence: Synthetic oligonucleotide
cagggugcccggauaggaa

SEQ ID NO: 2727273 - RNA, 19 nt, Artificial Sequence
  Description of Artificial Sequence: Synthetic oligonucleotide
ccucuggcggauacagcug

SEQ ID NO: 2727274 - RNA, 19 nt, Artificial Sequence
  Description of Artificial Sequence: Synthetic oligonucleotide
gugaagggaguuggucaga

SEQ ID NO: 2727275 - RNA, 19 nt, Artificial Sequence
  Description of Artificial Sequence: Synthetic oligonucleotide
ggcggcgaugguguccagg

SEQ ID NO: 2727276 - RNA, 19 nt, Artificial Sequence
  Description of Artificial Sequence: Synthetic oligonucleotide
cagaccacucuggccagca

SEQ ID NO: 2727277 - RNA, 19 nt, Artificial Sequence
  Description of Artificial Sequence: Synthetic oligonucleotide
ccaaagcaggccagaccac

SEQ ID NO: 2727278 - RNA, 19 nt, Artificial Sequence
  Description of Artificial Sequence: Synthetic oligonucleotide
aguccagccaccggcccua

SEQ ID NO: 2727279 - RNA, 19 nt, Artificial Sequence
  Description of Artificial Sequence: Synthetic oligonucleotide
ugccggaauccgaguccuc

SEQ ID NO: 2727280 - RNA, 19 nt, Artificial Sequence
  Description of Artificial Sequence: Synthetic oligonucleotide
gagggccaaguaccagcaa

SEQ ID NO: 2727281 - RNA, 19 nt, Artificial Sequence
  Description of Artificial Sequence: Synthetic oligonucleotide
gccagaccacucuggccag

SEQ ID NO: 2727282 - RNA, 19 nt, Artificial Sequence
  Description of Artificial Sequence: Synthetic oligonucleotide
gcccuagaaagggacagaa

SEQ ID NO: 2727283 - RNA, 19 nt, Artificial Sequence
  Description of Artificial Sequence: Synthetic oligonucleotide
gcuccgcagcuccaucgcc

SEQ ID NO: 2727284 - RNA, 19 nt, Artificial Sequence
  Description of Artificial Sequence: Synthetic oligonucleotide
gccugccggaauccgaguc

SEQ ID NO: 2727285 - RNA, 19 nt, Artificial Sequence
  Description of Artificial Sequence: Synthetic oligonucleotide
ccaucgccagcauccuuug

SEQ ID NO: 2727286 - RNA, 19 nt, Artificial Sequence
  Description of Artificial Sequence: Synthetic oligonucleotide
gccggaauccgaguccuca

SEQ ID NO: 2727287 - RNA, 19 nt, Artificial Sequence
  Description of Artificial Sequence: Synthetic oligonucleotide
guguuuuguggggcagaga

SEQ ID NO: 2727288 - RNA, 19 nt, Artificial Sequence
  Description of Artificial Sequence: Synthetic oligonucleotide
cugccgcugcuccacggca

SEQ ID NO: 2727289 - RNA, 19 nt, Artificial Sequence
  Description of Artificial Sequence: Synthetic oligonucleotide
gcuggccugccggaauccg

SEQ ID NO: 2727290 - RNA, 19 nt, Artificial Sequence
  Description of Artificial Sequence: Synthetic oligonucleotide
cggaauccgaguccucaag

SEQ ID NO: 2727291 - RNA, 19 nt, Artificial Sequence
  Description of Artificial Sequence: Synthetic oligonucleotide
acccagcugccaguagaga

SEQ ID NO: 2727292 - RNA, 19 nt, Artificial Sequence
  Description of Artificial Sequence: Synthetic oligonucleotide
cuccggacgccggcggccc

SEQ ID NO: 2727293 - RNA, 19 nt, Artificial Sequence
  Description of Artificial Sequence: Synthetic oligonucleotide
cugcagguuuccuuuuaau

SEQ ID NO: 2727294 - RNA, 19 nt, Artificial Sequence
  Description of Artificial Sequence: Synthetic oligonucleotide
caacgugggaguggaccca

SEQ ID NO: 2727295 - RNA, 19 nt, Artificial Sequence
  Description of Artificial Sequence: Synthetic oligonucleotide
ggagucugcagguuuccuu

SEQ ID NO: 2727296 - RNA, 19 nt, Artificial Sequence
  Description of Artificial Sequence: Synthetic oligonucleotide
cguuggcuacauuucaaaa

SEQ ID NO: 2727297 - RNA, 19 nt, Artificial Sequence
  Description of Artificial Sequence: Synthetic oligonucleotide
ucccaggcugagggccaag

SEQ ID NO: 2727298 - RNA, 19 nt, Artificial Sequence
  Description of Artificial Sequence: Synthetic oligonucleotide
gccagcacugcuggccugc

SEQ ID NO: 2727299 - RNA, 19 nt, Artificial Sequence
  Description of Artificial Sequence: Synthetic oligonucleotide
ggacuuggcugaaccguuc

SEQ ID NO: 2727300 - RNA, 19 nt, Artificial Sequence
  Description of Artificial Sequence: Synthetic oligonucleotide
ggcggcgcuccggacuugg

SEQ ID NO: 2727301 - RNA, 19 nt, Artificial Sequence
  Description of Artificial Sequence: Synthetic oligonucleotide
gcaggcggcgauggugucc

SEQ ID NO: 2727302 - RNA, 19 nt, Artificial Sequence
  Description of Artificial Sequence: Synthetic oligonucleotide
uccggacgccggcggccca

SEQ ID NO: 2727303 - RNA, 19 nt, Artificial Sequence
  Description of Artificial Sequence: Synthetic oligonucleotide
gggccaaguaccagcaacu

SEQ ID NO: 2727304 - RNA, 19 nt, Artificial Sequence
  Description of Artificial Sequence: Synthetic oligonucleotide
guacugccuucagccagga

SEQ ID NO: 2727305 - RNA, 19 nt, Artificial Sequence
  Description of Artificial Sequence: Synthetic oligonucleotide
caccggcccuagaaaggga

SEQ ID NO: 2727306 - RNA, 19 nt, Artificial Sequence
  Description of Artificial Sequence: Synthetic oligonucleotide
ugccuucagccaggacaac

SEQ ID NO: 2727307 - RNA, 19 nt, Artificial Sequence
  Description of Artificial Sequence: Synthetic oligonucleotide
ggauauucguuggcuacau

SEQ ID NO: 2727308 - RNA, 19 nt, Artificial Sequence
  Description of Artificial Sequence: Synthetic oligonucleotide
cuccucgcaggcggcgaug

SEQ ID NO: 2727309 - RNA, 19 nt, Artificial Sequence
  Description of Artificial Sequence: Synthetic oligonucleotide
cguucccgccgccagccgg

SEQ ID NO: 2727310 - RNA, 19 nt, Artificial Sequence
  Description of Artificial Sequence: Synthetic oligonucleotide
cggcccuagaaagggacag

SEQ ID NO: 2727311 - RNA, 19 nt, Artificial Sequence
  Description of Artificial Sequence: Synthetic oligonucleotide
gccgcagcaucuccucgca

SEQ ID NO: 2727312 - RNA, 19 nt, Artificial Sequence
  Description of Artificial Sequence: Synthetic oligonucleotide
cuggggcggcgcuccggac

SEQ ID NO: 2727313 - RNA, 19 nt, Artificial Sequence
  Description of Artificial Sequence: Synthetic oligonucleotide
ggaguggacccagcugcca

SEQ ID NO: 2727314 - RNA, 19 nt, Artificial Sequence
  Description of Artificial Sequence: Synthetic oligonucleotide
gccagccggcuccggacgc

SEQ ID NO: 2727315 - RNA, 19 nt, Artificial Sequence
  Description of Artificial Sequence: Synthetic oligonucleotide
ggucaaggcuccgcagcuc

SEQ ID NO: 2727316 - RNA, 19 nt, Artificial Sequence
  Description of Artificial Sequence: Synthetic oligonucleotide
cagccaggacaacguggga

SEQ ID NO: 2727317 - RNA, 19 nt, Artificial Sequence
  Description of Artificial Sequence: Synthetic oligonucleotide
cugccggaauccgaguccu

SEQ ID NO: 2727318 - RNA, 19 nt, Artificial Sequence
  Description of Artificial Sequence: Synthetic oligonucleotide
ggcuccggacgccggcggc

SEQ ID NO: 2727319 - RNA, 19 nt, Artificial Sequence
  Description of Artificial Sequence: Synthetic oligonucleotide
gcaucuccucgcaggcggc

SEQ ID NO: 2727320 - RNA, 19 nt, Artificial Sequence
  Description of Artificial Sequence: Synthetic oligonucleotide
ggcccuagaaagggacaga

SEQ ID NO: 2727321 - RNA, 19 nt, Artificial Sequence
  Description of Artificial Sequence: Synthetic oligonucleotide
guccucaagacuggauauu

SEQ ID NO: 2727322 - RNA, 19 nt, Artificial Sequence
  Description of Artificial Sequence: Synthetic oligonucleotide
cuggcggauacagcuggcu

SEQ ID NO: 2727323 - RNA, 19 nt, Artificial Sequence
  Description of Artificial Sequence: Synthetic oligonucleotide
ggccagcacugcuggccug

SEQ ID NO: 2727324 - RNA, 19 nt, Artificial Sequence
  Description of Artificial Sequence: Synthetic oligonucleotide
aucccaggcugagggccaa

SEQ ID NO: 2727325 - RNA, 19 nt, Artificial Sequence
  Description of Artificial Sequence: Synthetic oligonucleotide
gcuccggacgccggcggcc

SEQ ID NO: 2727326 - RNA, 19 nt, Artificial Sequence
  Description of Artificial Sequence: Synthetic oligonucleotide
gcgcuccggacuuggcuga

SEQ ID NO: 2727327 - RNA, 19 nt, Artificial Sequence
  Description of Artificial Sequence: Synthetic oligonucleotide
uucccgccgccagccggcu

SEQ ID NO: 2727328 - RNA, 19 nt, Artificial Sequence
  Description of Artificial Sequence: Synthetic oligonucleotide
aggcggcgaugguguccag

SEQ ID NO: 2727329 - RNA, 19 nt, Artificial Sequence
  Description of Artificial Sequence: Synthetic oligonucleotide
ggcuggggcggcgcuccgg

SEQ ID NO: 2727330 - RNA, 19 nt, Artificial Sequence
  Description of Artificial Sequence: Synthetic oligonucleotide
ccggcccuagaaagggaca

SEQ ID NO: 2727331 - RNA, 19 nt, Artificial Sequence
  Description of Artificial Sequence: Synthetic oligonucleotide
ccacucuggccagcacugc

SEQ ID NO: 2727332 - RNA, 19 nt, Artificial Sequence
  Description of Artificial Sequence: Synthetic oligonucleotide
ccggaauccgaguccucaa

SEQ ID NO: 2727333 - RNA, 19 nt, Artificial Sequence
  Description of Artificial Sequence: Synthetic oligonucleotide
guccagccaccggcccuag

SEQ ID NO: 2727334 - RNA, 19 nt, Artificial Sequence
  Description of Artificial Sequence: Synthetic oligonucleotide
cgccagccggcuccggacg

SEQ ID NO: 2727335 - RNA, 19 nt, Artificial Sequence
  Description of Artificial Sequence: Synthetic oligonucleotide
ccagaccacucuggccagc

SEQ ID NO: 2727336 - RNA, 19 nt, Artificial Sequence
  Description of Artificial Sequence: Synthetic oligonucleotide
cgcugccgcugcuccacgg

SEQ ID NO: 2727337 - RNA, 19 nt, Artificial Sequence
  Description of Artificial Sequence: Synthetic oligonucleotide
gccgccagccggcuccgga

SEQ ID NO: 2727338 - RNA, 19 nt, Artificial Sequence
  Description of Artificial Sequence: Synthetic oligonucleotide
ccggcuccggacgccggcg

SEQ ID NO: 2727339 - RNA, 19 nt, Artificial Sequence
  Description of Artificial Sequence: Synthetic oligonucleotide
ccggacuuggcugaaccgu

SEQ ID NO: 2727340 - RNA, 19 nt, Artificial Sequence
  Description of Artificial Sequence: Synthetic oligonucleotide
ggacaacgugggaguggac

SEQ ID NO: 2727341 - RNA, 19 nt, Artificial Sequence
  Description of Artificial Sequence: Synthetic oligonucleotide
gccaccucuggcggauaca

SEQ ID NO: 2727342 - RNA, 19 nt, Artificial Sequence
  Description of Artificial Sequence: Synthetic oligonucleotide
gcuccggacuuggcugaac

SEQ ID NO: 2727343 - RNA, 19 nt, Artificial Sequence
  Description of Artificial Sequence: Synthetic oligonucleotide
ccaggcugagggccaagua

SEQ ID NO: 2727344 - RNA, 19 nt, Artificial Sequence
  Description of Artificial Sequence: Synthetic oligonucleotide
ccguucccgccgccagccg

SEQ ID NO: 2727345 - RNA, 19 nt, Artificial Sequence
  Description of Artificial Sequence: Synthetic oligonucleotide
cggauacagcuggcugggg

SEQ ID NO: 2727346 - RNA, 19 nt, Artificial Sequence
  Description of Artificial Sequence: Synthetic oligonucleotide
ccgaguccucaagacugga

SEQ ID NO: 2727347 - RNA, 19 nt, Artificial Sequence
  Description of Artificial Sequence: Synthetic oligonucleotide
gggugcccggauaggaaau

SEQ ID NO: 2727348 - RNA, 19 nt, Artificial Sequence
  Description of Artificial Sequence: Synthetic oligonucleotide
ggggcggcgcuccggacuu

SEQ ID NO: 2727349 - RNA, 19 nt, Artificial Sequence
  Description of Artificial Sequence: Synthetic oligonucleotide
ggccugccggaauccgagu

SEQ ID NO: 2727350 - RNA, 19 nt, Artificial Sequence
  Description of Artificial Sequence: Synthetic oligonucleotide
ccggacgccggcggcccag

SEQ ID NO: 2727351 - RNA, 19 nt, Artificial Sequence
  Description of Artificial Sequence: Synthetic oligonucleotide
cgaguccucaagacuggau

SEQ ID NO: 2727352 - RNA, 19 nt, Artificial Sequence
  Description of Artificial Sequence: Synthetic oligonucleotide
gcggcgcuccggacuuggc

SEQ ID NO: 2727353 - RNA, 19 nt, Artificial Sequence
  Description of Artificial Sequence: Synthetic oligonucleotide
cggacuuggcugaaccguu

SEQ ID NO: 2727354 - RNA, 19 nt, Artificial Sequence
  Description of Artificial Sequence: Synthetic oligonucleotide
cgcaggcggcgaugguguc

SEQ ID NO: 2727355 - RNA, 19 nt, Artificial Sequence
  Description of Artificial Sequence: Synthetic oligonucleotide
cccaggcugagggccaagu

SEQ ID NO: 2727356 - RNA, 19 nt, Artificial Sequence
  Description of Artificial Sequence: Synthetic oligonucleotide
ggacgccggcggcccagcu

SEQ ID NO: 2727357 - RNA, 19 nt, Artificial Sequence
  Description of Artificial Sequence: Synthetic oligonucleotide
gggcggcgcuccggacuug

SEQ ID NO: 2727358 - RNA, 19 nt, Artificial Sequence
  Description of Artificial Sequence: Synthetic oligonucleotide
cggcgcuccggacuuggcu

SEQ ID NO: 2727359 - RNA, 19 nt, Artificial Sequence
  Description of Artificial Sequence: Synthetic oligonucleotide
cggacgccggcggcccagc

SEQ ID NO: 2727360 - RNA, 19 nt, Artificial Sequence
  Description of Artificial Sequence: Synthetic oligonucleotide
cgcuccggacuuggcugaa

SEQ ID NO: 2727361 - RNA, 19 nt, Artificial Sequence
  Description of Artificial Sequence: Synthetic oligonucleotide
uuuaaagaaacucaggaag

SEQ ID NO: 2727362 - RNA, 19 nt, Artificial Sequence
  Description of Artificial Sequence: Synthetic oligonucleotide
uuaaagaaacucaggaagg

SEQ ID NO: 2727363 - RNA, 19 nt, Artificial Sequence
  Description of Artificial Sequence: Synthetic oligonucleotide
uaucacuucauucagguug

SEQ ID NO: 2727364 - RNA, 19 nt, Artificial Sequence
  Description of Artificial Sequence: Synthetic oligonucleotide
aagaacuaaacaaagucgg

SEQ ID NO: 2727365 - RNA, 19 nt, Artificial Sequence
  Description of Artificial Sequence: Synthetic oligonucleotide
uguuguuuccaguugauag

SEQ ID NO: 2727366 - RNA, 19 nt, Artificial Sequence
  Description of Artificial Sequence: Synthetic oligonucleotide
ugaagaacuaaacaaaguc

SEQ ID NO: 2727367 - RNA, 19 nt, Artificial Sequence
  Description of Artificial Sequence: Synthetic oligonucleotide
cugaaaggcaguaugaggg

SEQ ID NO: 2727368 - RNA, 19 nt, Artificial Sequence
  Description of Artificial Sequence: Synthetic oligonucleotide
gaagaacuaaacaaagucg

SEQ ID NO: 2727369 - RNA, 19 nt, Artificial Sequence
  Description of Artificial Sequence: Synthetic oligonucleotide
acuguauuaaagucaggcc

SEQ ID NO: 2727370 - RNA, 19 nt, Artificial Sequence
  Description of Artificial Sequence: Synthetic oligonucleotide
aagacaagucccauaaacc

SEQ ID NO: 2727371 - RNA, 19 nt, Artificial Sequence
  Description of Artificial Sequence: Synthetic oligonucleotide
gaugugaagaacuaaacaa

SEQ ID NO: 2727372 - RNA, 19 nt, Artificial Sequence
  Description of Artificial Sequence: Synthetic oligonucleotide
uacaauauguauuuucucu

SEQ ID NO: 2727373 - RNA, 19 nt, Artificial Sequence
  Description of Artificial Sequence: Synthetic oligonucleotide
aggaauuccaaacaguucu

SEQ ID NO: 2727374 - RNA, 19 nt, Artificial Sequence
  Description of Artificial Sequence: Synthetic oligonucleotide
agugcccacaccuuuaucg

SEQ ID NO: 2727375 - RNA, 19 nt, Artificial Sequence
  Description of Artificial Sequence: Synthetic oligonucleotide
uuaucguucauuacaauau

SEQ ID NO: 2727376 - RNA, 19 nt, Artificial Sequence
  Description of Artificial Sequence: Synthetic oligonucleotide
gaagacaagucccauaaac

SEQ ID NO: 2727377 - RNA, 19 nt, Artificial Sequence
  Description of Artificial Sequence: Synthetic oligonucleotide
uauacuguuggucauucac

SEQ ID NO: 2727378 - RNA, 19 nt, Artificial Sequence
  Description of Artificial Sequence: Synthetic oligonucleotide
ugugguauacuguugguca

SEQ ID NO: 2727379 - RNA, 19 nt, Artificial Sequence
  Description of Artificial Sequence: Synthetic oligonucleotide
uuccccagaacccaaacag

SEQ ID NO: 2727380 - RNA, 19 nt, Artificial Sequence
  Description of Artificial Sequence: Synthetic oligonucleotide
auuaucacuucauucaggu

SEQ ID NO: 2727381 - RNA, 19 nt, Artificial Sequence
  Description of Artificial Sequence: Synthetic oligonucleotide
guucucuugacuuugacca

SEQ ID NO: 2727382 - RNA, 19 nt, Artificial Sequence
  Description of Artificial Sequence: Synthetic oligonucleotide
uuccaaacaguucuuagga

SEQ ID NO: 2727383 - RNA, 19 nt, Artificial Sequence
  Description of Artificial Sequence: Synthetic oligonucleotide
acuaaacaaagucgguggc

SEQ ID NO: 2727384 - RNA, 19 nt, Artificial Sequence
  Description of Artificial Sequence: Synthetic oligonucleotide
uguauuaaagucaggccac

SEQ ID NO: 2727385 - RNA, 19 nt, Artificial Sequence
  Description of Artificial Sequence: Synthetic oligonucleotide
auauguauuuucucuaucu

SEQ ID NO: 2727386 - RNA, 19 nt, Artificial Sequence
  Description of Artificial Sequence: Synthetic oligonucleotide
uuaaagucaggccacuugu

SEQ ID NO: 2727387 - RNA, 19 nt, Artificial Sequence
  Description of Artificial Sequence: Synthetic oligonucleotide
uaaaccuuuaaagaaacuc

SEQ ID NO: 2727388 - RNA, 19 nt, Artificial Sequence
  Description of Artificial Sequence: Synthetic oligonucleotide
cuuaggauccuuagaauag

SEQ ID NO: 2727389 - RNA, 19 nt, Artificial Sequence
  Description of Artificial Sequence: Synthetic oligonucleotide
acaaucacuguauuaaagu

SEQ ID NO: 2727390 - RNA, 19 nt, Artificial Sequence
  Description of Artificial Sequence: Synthetic oligonucleotide
ucuguauccgccaucagaa

SEQ ID NO: 2727391 - RNA, 19 nt, Artificial Sequence
  Description of Artificial Sequence: Synthetic oligonucleotide
gucccauaaaccuuuaaag

SEQ ID NO: 2727392 - RNA, 19 nt, Artificial Sequence
  Description of Artificial Sequence: Synthetic oligonucleotide
uuuaucguucauuacaaua

SEQ ID NO: 2727393 - RNA, 19 nt, Artificial Sequence
  Description of Artificial Sequence: Synthetic oligonucleotide
ucugcuguaucugaaaggc

SEQ ID NO: 2727394 - RNA, 19 nt, Artificial Sequence
  Description of Artificial Sequence: Synthetic oligonucleotide
guugguauggggaucaagg

SEQ ID NO: 2727395 - RNA, 19 nt, Artificial Sequence
  Description of Artificial Sequence: Synthetic oligonucleotide
gacugugguauacuguugg

SEQ ID NO: 2727396 - RNA, 19 nt, Artificial Sequence
  Description of Artificial Sequence: Synthetic oligonucleotide
  modified_base (2)..(2): a, c, u, g, unknown or other
unuuuggggcaucauguag

SEQ ID NO: 2727397 - RNA, 19 nt, Artificial Sequence
  Description of Artificial Sequence: Synthetic oligonucleotide
auccuuagaauagaguugg

SEQ ID NO: 2727398 - RNA, 19 nt, Artificial Sequence
  Description of Artificial Sequence: Synthetic oligonucleotide
cauuacaauauguauuuuc

SEQ ID NO: 2727399 - RNA, 19 nt, Artificial Sequence
  Description of Artificial Sequence: Synthetic oligonucleotide
cuucauucagguuggauug

SEQ ID NO: 2727400 - RNA, 19 nt, Artificial Sequence
  Description of Artificial Sequence: Synthetic oligonucleotide
ucagguuggauugugaacu

SEQ ID NO: 2727401 - RNA, 19 nt, Artificial Sequence
  Description of Artificial Sequence: Synthetic oligonucleotide
accuuuaucguucauuaca

SEQ ID NO: 2727402 - RNA, 19 nt, Artificial Sequence
  Description of Artificial Sequence: Synthetic oligonucleotide
agacaagucccauaaaccu

SEQ ID NO: 2727403 - RNA, 19 nt, Artificial Sequence
  Description of Artificial Sequence: Synthetic oligonucleotide
uggauugugaacuuuggau

SEQ ID NO: 2727404 - RNA, 19 nt, Artificial Sequence
  Description of Artificial Sequence: Synthetic oligonucleotide
auuaaagucaggccacuug

SEQ ID NO: 2727405 - RNA, 19 nt, Artificial Sequence
  Description of Artificial Sequence: Synthetic oligonucleotide
aaccuuuaaagaaacucag

SEQ ID NO: 2727406 - RNA, 19 nt, Artificial Sequence
  Description of Artificial Sequence: Synthetic oligonucleotide
cacuguauuaaagucaggc

SEQ ID NO: 2727407 - RNA, 19 nt, Artificial Sequence
  Description of Artificial Sequence: Synthetic oligonucleotide
acacugcuuccccagaacc

SEQ ID NO: 2727408 - RNA, 19 nt, Artificial Sequence
  Description of Artificial Sequence: Synthetic oligonucleotide
guaucugaaaggcaguaug

SEQ ID NO: 2727409 - RNA, 19 nt, Artificial Sequence
  Description of Artificial Sequence: Synthetic oligonucleotide
gaagguguuuccuuaagga

SEQ ID NO: 2727410 - RNA, 19 nt, Artificial Sequence
  Description of Artificial Sequence: Synthetic oligonucleotide
ucuuaggauccuuagaaua

SEQ ID NO: 2727411 - RNA, 19 nt, Artificial Sequence
  Description of Artificial Sequence: Synthetic oligonucleotide
uaucugaaaggcaguauga

SEQ ID NO: 2727412 - RNA, 19 nt, Artificial Sequence
  Description of Artificial Sequence: Synthetic oligonucleotide
uguucucuugacuuugacc

SEQ ID NO: 2727413 - RNA, 19 nt, Artificial Sequence
  Description of Artificial Sequence: Synthetic oligonucleotide
agaaaagguaaccaguuuu

SEQ ID NO: 2727414 - RNA, 19 nt, Artificial Sequence
  Description of Artificial Sequence: Synthetic oligonucleotide
gaacuaaacaaagucggug

SEQ ID NO: 2727415 - RNA, 19 nt, Artificial Sequence
  Description of Artificial Sequence: Synthetic oligonucleotide
  modified_base (5)..(5): a, c, u, g, unknown or other
ugcunuuuggggcaucaug

SEQ ID NO: 2727416 - RNA, 19 nt, Artificial Sequence
  Description of Artificial Sequence: Synthetic oligonucleotide
cuuugaccagcuuagcagc

SEQ ID NO: 2727417 - RNA, 19 nt, Artificial Sequence
  Description of Artificial Sequence: Synthetic oligonucleotide
uaucguucauuacaauaug

SEQ ID NO: 2727418 - RNA, 19 nt, Artificial Sequence
  Description of Artificial Sequence: Synthetic oligonucleotide
guuucccugguucaugugg

SEQ ID NO: 2727419 - RNA, 19 nt, Artificial Sequence
  Description of Artificial Sequence: Synthetic oligonucleotide
uaaacaaagucgguggcug

SEQ ID NO: 2727420 - RNA, 19 nt, Artificial Sequence
  Description of Artificial Sequence: Synthetic oligonucleotide
aguugauagccucuggugu

SEQ ID NO: 2727421 - RNA, 19 nt, Artificial Sequence
  Description of Artificial Sequence: Synthetic oligonucleotide
ugaggacggacaaucacug

SEQ ID NO: 2727422 - RNA, 19 nt, Artificial Sequence
  Description of Artificial Sequence: Synthetic oligonucleotide
aauagaguugguaaguguu

SEQ ID NO: 2727423 - RNA, 19 nt, Artificial Sequence
  Description of Artificial Sequence: Synthetic oligonucleotide
acuucauucagguuggauu

SEQ ID NO: 2727424 - RNA, 19 nt, Artificial Sequence
  Description of Artificial Sequence: Synthetic oligonucleotide
uugaggacggacaaucacu

SEQ ID NO: 2727425 - RNA, 19 nt, Artificial Sequence
  Description of Artificial Sequence: Synthetic oligonucleotide
aucaaggucaucugccauc

SEQ ID NO: 2727426 - RNA, 19 nt, Artificial Sequence
  Description of Artificial Sequence: Synthetic oligonucleotide
ucagaaaagguaaccaguu

SEQ ID NO: 2727427 - RNA, 19 nt, Artificial Sequence
  Description of Artificial Sequence: Synthetic oligonucleotide
guuguuuccaguugauagc

SEQ ID NO: 2727428 - RNA, 19 nt, Artificial Sequence
  Description of Artificial Sequence: Synthetic oligonucleotide
aaagucgguggcugagugg

SEQ ID NO: 2727429 - RNA, 19 nt, Artificial Sequence
  Description of Artificial Sequence: Synthetic oligonucleotide
aaagaaacucaggaaggug

SEQ ID NO: 2727430 - RNA, 19 nt, Artificial Sequence
  Description of Artificial Sequence: Synthetic oligonucleotide
caaucacuguauuaaaguc

SEQ ID NO: 2727431 - RNA, 19 nt, Artificial Sequence
  Description of Artificial Sequence: Synthetic oligonucleotide
aauggguuucccugguuca

SEQ ID NO: 2727432 - RNA, 19 nt, Artificial Sequence
  Description of Artificial Sequence: Synthetic oligonucleotide
caucauguagagaaugcac

SEQ ID NO: 2727433 - RNA, 19 nt, Artificial Sequence
  Description of Artificial Sequence: Synthetic oligonucleotide
uuuggaucugcagauguug

SEQ ID NO: 2727434 - RNA, 19 nt, Artificial Sequence
  Description of Artificial Sequence: Synthetic oligonucleotide
gacaaucacuguauuaaag

SEQ ID NO: 2727435 - RNA, 19 nt, Artificial Sequence
  Description of Artificial Sequence: Synthetic oligonucleotide
agagaaugcacuguguucu

SEQ ID NO: 2727436 - RNA, 19 nt, Artificial Sequence
  Description of Artificial Sequence: Synthetic oligonucleotide
agcugcaaggcucauuauc

SEQ ID NO: 2727437 - RNA, 19 nt, Artificial Sequence
  Description of Artificial Sequence: Synthetic oligonucleotide
uagaguugguaaguguugg

SEQ ID NO: 2727438 - RNA, 19 nt, Artificial Sequence
  Description of Artificial Sequence: Synthetic oligonucleotide
  modified_base (9)..(9): a, c, u, g, unknown or other
gucacuggnacccagaugu

SEQ ID NO: 2727439 - RNA, 19 nt, Artificial Sequence
  Description of Artificial Sequence: Synthetic oligonucleotide
uguauccgccaucagaaaa

SEQ ID NO: 2727440 - RNA, 19 nt, Artificial Sequence
  Description of Artificial Sequence: Synthetic oligonucleotide
uccgccaucagaaaaggua

SEQ ID NO: 2727441 - RNA, 19 nt, Artificial Sequence
  Description of Artificial Sequence: Synthetic oligonucleotide
aucugcuguaucugaaagg

SEQ ID NO: 2727442 - RNA, 19 nt, Artificial Sequence
  Description of Artificial Sequence: Synthetic oligonucleotide
uugguaaguguugguaugg

SEQ ID NO: 2727443 - RNA, 19 nt, Artificial Sequence
  Description of Artificial Sequence: Synthetic oligonucleotide
aaugcacuguguucucuug

SEQ ID NO: 2727444 - RNA, 19 nt, Artificial Sequence
  Description of Artificial Sequence: Synthetic oligonucleotide
gauccuuagaauagaguug

SEQ ID NO: 2727445 - RNA, 19 nt, Artificial Sequence
  Description of Artificial Sequence: Synthetic oligonucleotide
cagcuuagcagcugcaagg

SEQ ID NO: 2727446 - RNA, 19 nt, Artificial Sequence
  Description of Artificial Sequence: Synthetic oligonucleotide
auguagagaaugcacugug

SEQ ID NO: 2727447 - RNA, 19 nt, Artificial Sequence
  Description of Artificial Sequence: Synthetic oligonucleotide
ucguucauuacaauaugua

SEQ ID NO: 2727448 - RNA, 19 nt, Artificial Sequence
  Description of Artificial Sequence: Synthetic oligonucleotide
acaauauguauuuucucua

SEQ ID NO: 2727449 - RNA, 19 nt, Artificial Sequence
  Description of Artificial Sequence: Synthetic oligonucleotide
acuuuggaucugcagaugu

SEQ ID NO: 2727450 - RNA, 19 nt, Artificial Sequence
  Description of Artificial Sequence: Synthetic oligonucleotide
uuggauugugaacuuugga

SEQ ID NO: 2727451 - RNA, 19 nt, Artificial Sequence
  Description of Artificial Sequence: Synthetic oligonucleotide
aucugcagauguuguuucc

SEQ ID NO: 2727452 - RNA, 19 nt, Artificial Sequence
  Description of Artificial Sequence: Synthetic oligonucleotide
uguagagaaugcacugugu

SEQ ID NO: 2727453 - RNA, 19 nt, Artificial Sequence
  Description of Artificial Sequence: Synthetic oligonucleotide
cuuuaaagaaacucaggaa

SEQ ID NO: 2727454 - RNA, 19 nt, Artificial Sequence
  Description of Artificial Sequence: Synthetic oligonucleotide
ucauucacacugcuucccc

SEQ ID NO: 2727455 - RNA, 19 nt, Artificial Sequence
  Description of Artificial Sequence: Synthetic oligonucleotide
guugguaaguguugguaug

SEQ ID NO: 2727456 - RNA, 19 nt, Artificial Sequence
  Description of Artificial Sequence: Synthetic oligonucleotide
aguugguaaguguugguau

SEQ ID NO: 2727457 - RNA, 19 nt, Artificial Sequence
  Description of Artificial Sequence: Synthetic oligonucleotide
  modified_base (7)..(7): a, c, u, g, unknown or other
uuugcunuuuggggcauca

SEQ ID NO: 2727458 - RNA, 19 nt, Artificial Sequence
  Description of Artificial Sequence: Synthetic oligonucleotide
guugauagccucuggugug

SEQ ID NO: 2727459 - RNA, 19 nt, Artificial Sequence
  Description of Artificial Sequence: Synthetic oligonucleotide
  modified_base (10)..(10): a, c, u, g, unknown or other
ugucacuggnacccagaug

SEQ ID NO: 2727460 - RNA, 19 nt, Artificial Sequence
  Description of Artificial Sequence: Synthetic oligonucleotide
ucuaucucuguauccgcca

SEQ ID NO: 2727461 - RNA, 19 nt, Artificial Sequence
  Description of Artificial Sequence: Synthetic oligonucleotide
agcuuagcagcugcaaggc

SEQ ID NO: 2727462 - RNA, 19 nt, Artificial Sequence
  Description of Artificial Sequence: Synthetic oligonucleotide
gauugugaacuuuggaucu

SEQ ID NO: 2727463 - RNA, 19 nt, Artificial Sequence
  Description of Artificial Sequence: Synthetic oligonucleotide
aacaaagucgguggcugag

SEQ ID NO: 2727464 - RNA, 19 nt, Artificial Sequence
  Description of Artificial Sequence: Synthetic oligonucleotide
uaaguguugguauggggau

SEQ ID NO: 2727465 - RNA, 19 nt, Artificial Sequence
  Description of Artificial Sequence: Synthetic oligonucleotide
cuggccaugcuucaucugc

SEQ ID NO: 2727466 - RNA, 19 nt, Artificial Sequence
  Description of Artificial Sequence: Synthetic oligonucleotide
gaauggguuucccugguuc

SEQ ID NO: 2727467 - RNA, 19 nt, Artificial Sequence
  Description of Artificial Sequence: Synthetic oligonucleotide
aaggcucauuaucacuuca

SEQ ID NO: 2727468 - RNA, 19 nt, Artificial Sequence
  Description of Artificial Sequence: Synthetic oligonucleotide
uuucccugguucaugugga

SEQ ID NO: 2727469 - RNA, 19 nt, Artificial Sequence
  Description of Artificial Sequence: Synthetic oligonucleotide
acaccuuuaucguucauua

SEQ ID NO: 2727470 - RNA, 19 nt, Artificial Sequence
  Description of Artificial Sequence: Synthetic oligonucleotide
uauuuucucuaucucugua

SEQ ID NO: 2727471 - RNA, 19 nt, Artificial Sequence
  Description of Artificial Sequence: Synthetic oligonucleotide
aguucuuaggauccuuaga

SEQ ID NO: 2727472 - RNA, 19 nt, Artificial Sequence
  Description of Artificial Sequence: Synthetic oligonucleotide
acccaaacagugcccacac

SEQ ID NO: 2727473 - RNA, 19 nt, Artificial Sequence
  Description of Artificial Sequence: Synthetic oligonucleotide
guaaguguugguaugggga

SEQ ID NO: 2727474 - RNA, 19 nt, Artificial Sequence
  Description of Artificial Sequence: Synthetic oligonucleotide
aagucgguggcugagugga

SEQ ID NO: 2727475 - RNA, 19 nt, Artificial Sequence
  Description of Artificial Sequence: Synthetic oligonucleotide
ggauugugaacuuuggauc

SEQ ID NO: 2727476 - RNA, 19 nt, Artificial Sequence
  Description of Artificial Sequence: Synthetic oligonucleotide
uucagguuggauugugaac

SEQ ID NO: 2727477 - RNA, 19 nt, Artificial Sequence
  Description of Artificial Sequence: Synthetic oligonucleotide
uagagaaugcacuguguuc

SEQ ID NO: 2727478 - RNA, 19 nt, Artificial Sequence
  Description of Artificial Sequence: Synthetic oligonucleotide
auggggaucaaggucaucu

SEQ ID NO: 2727479 - RNA, 19 nt, Artificial Sequence
  Description of Artificial Sequence: Synthetic oligonucleotide
agaauagaguugguaagug

SEQ ID NO: 2727480 - RNA, 19 nt, Artificial Sequence
  Description of Artificial Sequence: Synthetic oligonucleotide
uuuccaguugauagccucu

SEQ ID NO: 2727481 - RNA, 19 nt, Artificial Sequence
  Description of Artificial Sequence: Synthetic oligonucleotide
aucacuucauucagguugg

SEQ ID NO: 2727482 - RNA, 19 nt, Artificial Sequence
  Description of Artificial Sequence: Synthetic oligonucleotide
aucagaaaagguaaccagu

SEQ ID NO: 2727483 - RNA, 19 nt, Artificial Sequence
  Description of Artificial Sequence: Synthetic oligonucleotide
uugguauggggaucaaggu

SEQ ID NO: 2727484 - RNA, 19 nt, Artificial Sequence
  Description of Artificial Sequence: Synthetic oligonucleotide
ggaagguguuuccuuaagg

SEQ ID NO: 2727485 - RNA, 19 nt, Artificial Sequence
  Description of Artificial Sequence: Synthetic oligonucleotide
uuaggauccuuagaauaga

SEQ ID NO: 2727486 - RNA, 19 nt, Artificial Sequence
  Description of Artificial Sequence: Synthetic oligonucleotide
aaacaaagucgguggcuga

SEQ ID NO: 2727487 - RNA, 19 nt, Artificial Sequence
  Description of Artificial Sequence: Synthetic oligonucleotide
cucuaucucuguauccgcc

SEQ ID NO: 2727488 - RNA, 19 nt, Artificial Sequence
  Description of Artificial Sequence: Synthetic oligonucleotide
uccaguugauagccucugg

SEQ ID NO: 2727489 - RNA, 19 nt, Artificial Sequence
  Description of Artificial Sequence: Synthetic oligonucleotide
uauccgccaucagaaaagg

SEQ ID NO: 2727490 - RNA, 19 nt, Artificial Sequence
  Description of Artificial Sequence: Synthetic oligonucleotide
cuugaggacggacaaucac

SEQ ID NO: 2727491 - RNA, 19 nt, Artificial Sequence
  Description of Artificial Sequence: Synthetic oligonucleotide
ucucuaucucuguauccgc

SEQ ID NO: 2727492 - RNA, 19 nt, Artificial Sequence
  Description of Artificial Sequence: Synthetic oligonucleotide
auucagguuggauugugaa

SEQ ID NO: 2727493 - RNA, 19 nt, Artificial Sequence
  Description of Artificial Sequence: Synthetic oligonucleotide
ugccaucucuugaggacgg

SEQ ID NO: 2727494 - RNA, 19 nt, Artificial Sequence
  Description of Artificial Sequence: Synthetic oligonucleotide
ugaguggagaggucuggcc

SEQ ID NO: 2727495 - RNA, 19 nt, Artificial Sequence
  Description of Artificial Sequence: Synthetic oligonucleotide
uuggaucugcagauguugu

SEQ ID NO: 2727496 - RNA, 19 nt, Artificial Sequence
  Description of Artificial Sequence: Synthetic oligonucleotide
agaggucuggccaugcuuc

SEQ ID NO: 2727497 - RNA, 19 nt, Artificial Sequence
  Description of Artificial Sequence: Synthetic oligonucleotide
guauccgccaucagaaaag

SEQ ID NO: 2727498 - RNA, 19 nt, Artificial Sequence
  Description of Artificial Sequence: Synthetic oligonucleotide
guuggauugugaacuuugg

SEQ ID NO: 2727499 - RNA, 19 nt, Artificial Sequence
  Description of Artificial Sequence: Synthetic oligonucleotide
caguugauagccucuggug

SEQ ID NO: 2727500 - RNA, 19 nt, Artificial Sequence
  Description of Artificial Sequence: Synthetic oligonucleotide
gguaaguguugguaugggg

SEQ ID NO: 2727501 - RNA, 19 nt, Artificial Sequence
  Description of Artificial Sequence: Synthetic oligonucleotide
  modified_base (4)..(4): a, c, u, g, unknown or other
uggnacccagaugugaaga

SEQ ID NO: 2727502 - RNA, 19 nt, Artificial Sequence
  Description of Artificial Sequence: Synthetic oligonucleotide
ugcaaggcucauuaucacu

SEQ ID NO: 2727503 - RNA, 19 nt, Artificial Sequence
  Description of Artificial Sequence: Synthetic oligonucleotide
ugccgaggaauuccaaaca

SEQ ID NO: 2727504 - RNA, 19 nt, Artificial Sequence
  Description of Artificial Sequence: Synthetic oligonucleotide
accuuuaaagaaacucagg

SEQ ID NO: 2727505 - RNA, 19 nt, Artificial Sequence
  Description of Artificial Sequence: Synthetic oligonucleotide
ucuugaggacggacaauca

SEQ ID NO: 2727506 - RNA, 19 nt, Artificial Sequence
  Description of Artificial Sequence: Synthetic oligonucleotide
ucucuugacuuugaccagc

SEQ ID NO: 2727507 - RNA, 19 nt, Artificial Sequence
  Description of Artificial Sequence: Synthetic oligonucleotide
gaucugcagauguuguuuc

SEQ ID NO: 2727508 - RNA, 19 nt, Artificial Sequence
  Description of Artificial Sequence: Synthetic oligonucleotide
ccuuuaaagaaacucagga

SEQ ID NO: 2727509 - RNA, 19 nt, Artificial Sequence
  Description of Artificial Sequence: Synthetic oligonucleotide
uucucuugacuuugaccag

SEQ ID NO: 2727510 - RNA, 19 nt, Artificial Sequence
  Description of Artificial Sequence: Synthetic oligonucleotide
guuuccaguugauagccuc

SEQ ID NO: 2727511 - RNA, 19 nt, Artificial Sequence
  Description of Artificial Sequence: Synthetic oligonucleotide
ugcacuguguucucuugac

SEQ ID NO: 2727512 - RNA, 19 nt, Artificial Sequence
  Description of Artificial Sequence: Synthetic oligonucleotide
ucaaggucaucugccaucu

SEQ ID NO: 2727513 - RNA, 19 nt, Artificial Sequence
  Description of Artificial Sequence: Synthetic oligonucleotide
aaggcaguaugaggguggg

SEQ ID NO: 2727514 - RNA, 19 nt, Artificial Sequence
  Description of Artificial Sequence: Synthetic oligonucleotide
ucaggaagguguuuccuua

SEQ ID NO: 2727515 - RNA, 19 nt, Artificial Sequence
  Description of Artificial Sequence: Synthetic oligonucleotide
uucuuaggauccuuagaau

SEQ ID NO: 2727516 - RNA, 19 nt, Artificial Sequence
  Description of Artificial Sequence: Synthetic oligonucleotide
ugugaacuuuggaucugca

SEQ ID NO: 2727517 - RNA, 19 nt, Artificial Sequence
  Description of Artificial Sequence: Synthetic oligonucleotide
caguucuuaggauccuuag

SEQ ID NO: 2727518 - RNA, 19 nt, Artificial Sequence
  Description of Artificial Sequence: Synthetic oligonucleotide
ugugccgaggaauuccaaa

SEQ ID NO: 2727519 - RNA, 19 nt, Artificial Sequence
  Description of Artificial Sequence: Synthetic oligonucleotide
ugguaaguguugguauggg

SEQ ID NO: 2727520 - RNA, 19 nt, Artificial Sequence
  Description of Artificial Sequence: Synthetic oligonucleotide
auagaguugguaaguguug

SEQ ID NO: 2727521 - RNA, 19 nt, Artificial Sequence
  Description of Artificial Sequence: Synthetic oligonucleotide
gguauggggaucaagguca

SEQ ID NO: 2727522 - RNA, 19 nt, Artificial Sequence
  Description of Artificial Sequence: Synthetic oligonucleotide
ugagcuugaauggguuucc

SEQ ID NO: 2727523 - RNA, 19 nt, Artificial Sequence
  Description of Artificial Sequence: Synthetic oligonucleotide
gauagccucuggugugccg

SEQ ID NO: 2727524 - RNA, 19 nt, Artificial Sequence
  Description of Artificial Sequence: Synthetic oligonucleotide
aggacggacaaucacugua

SEQ ID NO: 2727525 - RNA, 19 nt, Artificial Sequence
  Description of Artificial Sequence: Synthetic oligonucleotide
cucuugaggacggacaauc

SEQ ID NO: 2727526 - RNA, 19 nt, Artificial Sequence
  Description of Artificial Sequence: Synthetic oligonucleotide
uugugaacuuuggaucugc

SEQ ID NO: 2727527 - RNA, 19 nt, Artificial Sequence
  Description of Artificial Sequence: Synthetic oligonucleotide
aacccaaacagugcccaca

SEQ ID NO: 2727528 - RNA, 19 nt, Artificial Sequence
  Description of Artificial Sequence: Synthetic oligonucleotide
aucucuugaggacggacaa

SEQ ID NO: 2727529 - RNA, 19 nt, Artificial Sequence
  Description of Artificial Sequence: Synthetic oligonucleotide
gugccgaggaauuccaaac

SEQ ID NO: 2727530 - RNA, 19 nt, Artificial Sequence
  Description of Artificial Sequence: Synthetic oligonucleotide
cugcagauguuguuuccag

SEQ ID NO: 2727531 - RNA, 19 nt, Artificial Sequence
  Description of Artificial Sequence: Synthetic oligonucleotide
ugcagauguuguuuccagu

SEQ ID NO: 2727532 - RNA, 19 nt, Artificial Sequence
  Description of Artificial Sequence: Synthetic oligonucleotide
uguugguauggggaucaag

SEQ ID NO: 2727533 - RNA, 19 nt, Artificial Sequence
  Description of Artificial Sequence: Synthetic oligonucleotide
caaagucgguggcugagug

SEQ ID NO: 2727534 - RNA, 19 nt, Artificial Sequence
  Description of Artificial Sequence: Synthetic oligonucleotide
ucauucagguuggauugug

SEQ ID NO: 2727535 - RNA, 19 nt, Artificial Sequence
  Description of Artificial Sequence: Synthetic oligonucleotide
aacuuuggaucugcagaug

SEQ ID NO: 2727536 - RNA, 19 nt, Artificial Sequence
  Description of Artificial Sequence: Synthetic oligonucleotide
ucgguggcugaguggagag

SEQ ID NO: 2727537 - RNA, 19 nt, Artificial Sequence
  Description of Artificial Sequence: Synthetic oligonucleotide
agaacccaaacagugccca

SEQ ID NO: 2727538 - RNA, 19 nt, Artificial Sequence
  Description of Artificial Sequence: Synthetic oligonucleotide
aucguucauuacaauaugu

SEQ ID NO: 2727539 - RNA, 19 nt, Artificial Sequence
  Description of Artificial Sequence: Synthetic oligonucleotide
ccagaacccaaacagugcc

SEQ ID NO: 2727540 - RNA, 19 nt, Artificial Sequence
  Description of Artificial Sequence: Synthetic oligonucleotide
uugauagccucuggugugc

SEQ ID NO: 2727541 - RNA, 19 nt, Artificial Sequence
  Description of Artificial Sequence: Synthetic oligonucleotide
  modified_base (2)..(2): a, c, u, g, unknown or other
gnacccagaugugaagaac

SEQ ID NO: 2727542 - RNA, 19 nt, Artificial Sequence
  Description of Artificial Sequence: Synthetic oligonucleotide
cagaacccaaacagugccc

SEQ ID NO: 2727543 - RNA, 19 nt, Artificial Sequence
  Description of Artificial Sequence: Synthetic oligonucleotide
auacuguuggucauucaca

SEQ ID NO: 2727544 - RNA, 19 nt, Artificial Sequence
  Description of Artificial Sequence: Synthetic oligonucleotide
uccccagaacccaaacagu

SEQ ID NO: 2727545 - RNA, 19 nt, Artificial Sequence
  Description of Artificial Sequence: Synthetic oligonucleotide
agaguugguaaguguuggu

SEQ ID NO: 2727546 - RNA, 19 nt, Artificial Sequence
  Description of Artificial Sequence: Synthetic oligonucleotide
uggggaucaaggucaucug

SEQ ID NO: 2727547 - RNA, 19 nt, Artificial Sequence
  Description of Artificial Sequence: Synthetic oligonucleotide
  modified_base (5)..(5): a, c, u, g, unknown or other
cuggnacccagaugugaag

SEQ ID NO: 2727548 - RNA, 19 nt, Artificial Sequence
  Description of Artificial Sequence: Synthetic oligonucleotide
agaacuaaacaaagucggu

SEQ ID NO: 2727549 - RNA, 19 nt, Artificial Sequence
  Description of Artificial Sequence: Synthetic oligonucleotide
cucuguauccgccaucaga

SEQ ID NO: 2727550 - RNA, 19 nt, Artificial Sequence
  Description of Artificial Sequence: Synthetic oligonucleotide
uguaucugaaaggcaguau

SEQ ID NO: 2727551 - RNA, 19 nt, Artificial Sequence
  Description of Artificial Sequence: Synthetic oligonucleotide
uggugugccgaggaauucc

SEQ ID NO: 2727552 - RNA, 19 nt, Artificial Sequence
  Description of Artificial Sequence: Synthetic oligonucleotide
aggccacuuguccaccagg

SEQ ID NO: 2727553 - RNA, 19 nt, Artificial Sequence
  Description of Artificial Sequence: Synthetic oligonucleotide
caucucuugaggacggaca

SEQ ID NO: 2727554 - RNA, 19 nt, Artificial Sequence
  Description of Artificial Sequence: Synthetic oligonucleotide
acugugguauacuguuggu

SEQ ID NO: 2727555 - RNA, 19 nt, Artificial Sequence
  Description of Artificial Sequence: Synthetic oligonucleotide
caucugccaucucuugagg

SEQ ID NO: 2727556 - RNA, 19 nt, Artificial Sequence
  Description of Artificial Sequence: Synthetic oligonucleotide
gguuggauugugaacuuug

SEQ ID NO: 2727557 - RNA, 19 nt, Artificial Sequence
  Description of Artificial Sequence: Synthetic oligonucleotide
aaacaguucuuaggauccu

SEQ ID NO: 2727558 - RNA, 19 nt, Artificial Sequence
  Description of Artificial Sequence: Synthetic oligonucleotide
ccacuuguccaccagggcc

SEQ ID NO: 2727559 - RNA, 19 nt, Artificial Sequence
  Description of Artificial Sequence: Synthetic oligonucleotide
acuguguucucuugacuuu

SEQ ID NO: 2727560 - RNA, 19 nt, Artificial Sequence
  Description of Artificial Sequence: Synthetic oligonucleotide
aagucccauaaaccuuuaa

SEQ ID NO: 2727561 - RNA, 19 nt, Artificial Sequence
  Description of Artificial Sequence: Synthetic oligonucleotide
  modified_base (8)..(8): a, c, u, g, unknown or other
ucacuggnacccagaugug

SEQ ID NO: 2727562 - RNA, 19 nt, Artificial Sequence
  Description of Artificial Sequence: Synthetic oligonucleotide
auugugaacuuuggaucug

SEQ ID NO: 2727563 - RNA, 19 nt, Artificial Sequence
  Description of Artificial Sequence: Synthetic oligonucleotide
acaagucccauaaaccuuu

SEQ ID NO: 2727564 - RNA, 19 nt, Artificial Sequence
  Description of Artificial Sequence: Synthetic oligonucleotide
augcacuguguucucuuga

SEQ ID NO: 2727565 - RNA, 19 nt, Artificial Sequence
  Description of Artificial Sequence: Synthetic oligonucleotide
gucauucacacugcuuccc

SEQ ID NO: 2727566 - RNA, 19 nt, Artificial Sequence
  Description of Artificial Sequence: Synthetic oligonucleotide
ucccugguucauguggaag

SEQ ID NO: 2727567 - RNA, 19 nt, Artificial Sequence
  Description of Artificial Sequence: Synthetic oligonucleotide
uuaucacuucauucagguu

SEQ ID NO: 2727568 - RNA, 19 nt, Artificial Sequence
  Description of Artificial Sequence: Synthetic oligonucleotide
ggucauucacacugcuucc

SEQ ID NO: 2727569 - RNA, 19 nt, Artificial Sequence
  Description of Artificial Sequence: Synthetic oligonucleotide
gggaucaaggucaucugcc

SEQ ID NO: 2727570 - RNA, 19 nt, Artificial Sequence
  Description of Artificial Sequence: Synthetic oligonucleotide
auagccucuggugugccga

SEQ ID NO: 2727571 - RNA, 19 nt, Artificial Sequence
  Description of Artificial Sequence: Synthetic oligonucleotide
caaggcucauuaucacuuc

SEQ ID NO: 2727572 - RNA, 19 nt, Artificial Sequence
  Description of Artificial Sequence: Synthetic oligonucleotide
cugugguauacuguugguc

SEQ ID NO: 2727573 - RNA, 19 nt, Artificial Sequence
  Description of Artificial Sequence: Synthetic oligonucleotide
acggacaaucacuguauua

SEQ ID NO: 2727574 - RNA, 19 nt, Artificial Sequence
  Description of Artificial Sequence: Synthetic oligonucleotide
cuguguucucuugacuuug

SEQ ID NO: 2727575 - RNA, 19 nt, Artificial Sequence
  Description of Artificial Sequence: Synthetic oligonucleotide
aacaguucuuaggauccuu

SEQ ID NO: 2727576 - RNA, 19 nt, Artificial Sequence
  Description of Artificial Sequence: Synthetic oligonucleotide
ggggaucaaggucaucugc

SEQ ID NO: 2727577 - RNA, 19 nt, Artificial Sequence
  Description of Artificial Sequence: Synthetic oligonucleotide
caccuuuaucguucauuac

SEQ ID NO: 2727578 - RNA, 19 nt, Artificial Sequence
  Description of Artificial Sequence: Synthetic oligonucleotide
ggcaucauguagagaaugc

SEQ ID NO: 2727579 - RNA, 19 nt, Artificial Sequence
  Description of Artificial Sequence: Synthetic oligonucleotide
gagaaugcacuguguucuc

SEQ ID NO: 2727580 - RNA, 19 nt, Artificial Sequence
  Description of Artificial Sequence: Synthetic oligonucleotide
  modified_base (6)..(6): a, c, u, g, unknown or other
acuggnacccagaugugaa

SEQ ID NO: 2727581 - RNA, 19 nt, Artificial Sequence
  Description of Artificial Sequence: Synthetic oligonucleotide
uauuaaagucaggccacuu

SEQ ID NO: 2727582 - RNA, 19 nt, Artificial Sequence
  Description of Artificial Sequence: Synthetic oligonucleotide
gcugcaaggcucauuauca

SEQ ID NO: 2727583 - RNA, 19 nt, Artificial Sequence
  Description of Artificial Sequence: Synthetic oligonucleotide
gaguugguaaguguuggua

SEQ ID NO: 2727584 - RNA, 19 nt, Artificial Sequence
  Description of Artificial Sequence: Synthetic oligonucleotide
uugaccagcuuagcagcug

SEQ ID NO: 2727585 - RNA, 19 nt, Artificial Sequence
  Description of Artificial Sequence: Synthetic oligonucleotide
ucuggccaugcuucaucug

SEQ ID NO: 2727586 - RNA, 19 nt, Artificial Sequence
  Description of Artificial Sequence: Synthetic oligonucleotide
uguggaagacaagucccau

SEQ ID NO: 2727587 - RNA, 19 nt, Artificial Sequence
  Description of Artificial Sequence: Synthetic oligonucleotide
uccuuagaauagaguuggu

SEQ ID NO: 2727588 - RNA, 19 nt, Artificial Sequence
  Description of Artificial Sequence: Synthetic oligonucleotide
uucauucagguuggauugu

SEQ ID NO: 2727589 - RNA, 19 nt, Artificial Sequence
  Description of Artificial Sequence: Synthetic oligonucleotide
guagagaaugcacuguguu

SEQ ID NO: 2727590 - RNA, 19 nt, Artificial Sequence
  Description of Artificial Sequence: Synthetic oligonucleotide
ugacuuugaccagcuuagc

SEQ ID NO: 2727591 - RNA, 19 nt, Artificial Sequence
  Description of Artificial Sequence: Synthetic oligonucleotide
uggaucugcagauguuguu

SEQ ID NO: 2727592 - RNA, 19 nt, Artificial Sequence
  Description of Artificial Sequence: Synthetic oligonucleotide
aggauccuuagaauagagu

SEQ ID NO: 2727593 - RNA, 19 nt, Artificial Sequence
  Description of Artificial Sequence: Synthetic oligonucleotide
gaauuccaaacaguucuua

SEQ ID NO: 2727594 - RNA, 19 nt, Artificial Sequence
  Description of Artificial Sequence: Synthetic oligonucleotide
cacacugcuuccccagaac

SEQ ID NO: 2727595 - RNA, 19 nt, Artificial Sequence
  Description of Artificial Sequence: Synthetic oligonucleotide
cauucagguuggauuguga

SEQ ID NO: 2727596 - RNA, 19 nt, Artificial Sequence
  Description of Artificial Sequence: Synthetic oligonucleotide
gccaucagaaaagguaacc

SEQ ID NO: 2727597 - RNA, 19 nt, Artificial Sequence
  Description of Artificial Sequence: Synthetic oligonucleotide
gaacccaaacagugcccac

SEQ ID NO: 2727598 - RNA, 19 nt, Artificial Sequence
  Description of Artificial Sequence: Synthetic oligonucleotide
ucauuacaauauguauuuu

SEQ ID NO: 2727599 - RNA, 19 nt, Artificial Sequence
  Description of Artificial Sequence: Synthetic oligonucleotide
ccccagaacccaaacagug

SEQ ID NO: 2727600 - RNA, 19 nt, Artificial Sequence
  Description of Artificial Sequence: Synthetic oligonucleotide
ucaggccacuuguccacca

SEQ ID NO: 2727601 - RNA, 19 nt, Artificial Sequence
  Description of Artificial Sequence: Synthetic oligonucleotide
  modified_base (4)..(4): a, c, u, g, unknown or other
gcunuuuggggcaucaugu

SEQ ID NO: 2727602 - RNA, 19 nt, Artificial Sequence
  Description of Artificial Sequence: Synthetic oligonucleotide
uggguuucccugguucaug

SEQ ID NO: 2727603 - RNA, 19 nt, Artificial Sequence
  Description of Artificial Sequence: Synthetic oligonucleotide
cugaguggagaggucuggc

SEQ ID NO: 2727604 - RNA, 19 nt, Artificial Sequence
  Description of Artificial Sequence: Synthetic oligonucleotide
guguucucuugacuuugac

SEQ ID NO: 2727605 - RNA, 19 nt, Artificial Sequence
  Description of Artificial Sequence: Synthetic oligonucleotide
cauucacacugcuucccca

SEQ ID NO: 2727606 - RNA, 19 nt, Artificial Sequence
  Description of Artificial Sequence: Synthetic oligonucleotide
ugaauggguuucccugguu

SEQ ID NO: 2727607 - RNA, 19 nt, Artificial Sequence
  Description of Artificial Sequence: Synthetic oligonucleotide
ggaucaaggucaucugcca

SEQ ID NO: 2727608 - RNA, 19 nt, Artificial Sequence
  Description of Artificial Sequence: Synthetic oligonucleotide
acucaggaagguguuuccu

SEQ ID NO: 2727609 - RNA, 19 nt, Artificial Sequence
  Description of Artificial Sequence: Synthetic oligonucleotide
  modified_base (3)..(3): a, c, u, g, unknown or other
cunuuuggggcaucaugua

SEQ ID NO: 2727610 - RNA, 19 nt, Artificial Sequence
  Description of Artificial Sequence: Synthetic oligonucleotide
cuuccccagaacccaaaca

SEQ ID NO: 2727611 - RNA, 19 nt, Artificial Sequence
  Description of Artificial Sequence: Synthetic oligonucleotide
ccuuuaucguucauuacaa

SEQ ID NO: 2727612 - RNA, 19 nt, Artificial Sequence
  Description of Artificial Sequence: Synthetic oligonucleotide
cccagaacccaaacagugc

SEQ ID NO: 2727613 - RNA, 19 nt, Artificial Sequence
  Description of Artificial Sequence: Synthetic oligonucleotide
gguauacuguuggucauuc

SEQ ID NO: 2727614 - RNA, 19 nt, Artificial Sequence
  Description of Artificial Sequence: Synthetic oligonucleotide
guauacuguuggucauuca

SEQ ID NO: 2727615 - RNA, 19 nt, Artificial Sequence
  Description of Artificial Sequence: Synthetic oligonucleotide
ggccacuuguccaccaggg

SEQ ID NO: 2727616 - RNA, 19 nt, Artificial Sequence
  Description of Artificial Sequence: Synthetic oligonucleotide
ccagcuuagcagcugcaag

SEQ ID NO: 2727617 - RNA, 19 nt, Artificial Sequence
  Description of Artificial Sequence: Synthetic oligonucleotide
gagcuugaauggguuuccc

SEQ ID NO: 2727618 - RNA, 19 nt, Artificial Sequence
  Description of Artificial Sequence: Synthetic oligonucleotide
  modified_base (7)..(7): a, c, u, g, unknown or other
cacuggnacccagauguga

SEQ ID NO: 2727619 - RNA, 19 nt, Artificial Sequence
  Description of Artificial Sequence: Synthetic oligonucleotide
gggcaucauguagagaaug

SEQ ID NO: 2727620 - RNA, 19 nt, Artificial Sequence
  Description of Artificial Sequence: Synthetic oligonucleotide
ggucaucugccaucucuug

SEQ ID NO: 2727621 - RNA, 19 nt, Artificial Sequence
  Description of Artificial Sequence: Synthetic oligonucleotide
ugcuuccccagaacccaaa

SEQ ID NO: 2727622 - RNA, 19 nt, Artificial Sequence
  Description of Artificial Sequence: Synthetic oligonucleotide
cacuguguucucuugacuu

SEQ ID NO: 2727623 - RNA, 19 nt, Artificial Sequence
  Description of Artificial Sequence: Synthetic oligonucleotide
ggccuugagcuugaauggg

SEQ ID NO: 2727624 - RNA, 19 nt, Artificial Sequence
  Description of Artificial Sequence: Synthetic oligonucleotide
acaguucuuaggauccuua

SEQ ID NO: 2727625 - RNA, 19 nt, Artificial Sequence
  Description of Artificial Sequence: Synthetic oligonucleotide
ucuugacuuugaccagcuu

SEQ ID NO: 2727626 - RNA, 19 nt, Artificial Sequence
  Description of Artificial Sequence: Synthetic oligonucleotide
gaaugcacuguguucucuu

SEQ ID NO: 2727627 - RNA, 19 nt, Artificial Sequence
  Description of Artificial Sequence: Synthetic oligonucleotide
ugguauacuguuggucauu

SEQ ID NO: 2727628 - RNA, 19 nt, Artificial Sequence
  Description of Artificial Sequence: Synthetic oligonucleotide
  modified_base (8)..(8): a, c, u, g, unknown or other
uuuugcunuuuggggcauc

SEQ ID NO: 2727629 - RNA, 19 nt, Artificial Sequence
  Description of Artificial Sequence: Synthetic oligonucleotide
cuaaacaaagucgguggcu

SEQ ID NO: 2727630 - RNA, 19 nt, Artificial Sequence
  Description of Artificial Sequence: Synthetic oligonucleotide
uucccugguucauguggaa

SEQ ID NO: 2727631 - RNA, 19 nt, Artificial Sequence
  Description of Artificial Sequence: Synthetic oligonucleotide
gcaucauguagagaaugca

SEQ ID NO: 2727632 - RNA, 19 nt, Artificial Sequence
  Description of Artificial Sequence: Synthetic oligonucleotide
guggaagacaagucccaua

SEQ ID NO: 2727633 - RNA, 19 nt, Artificial Sequence
  Description of Artificial Sequence: Synthetic oligonucleotide
  modified_base (3)..(3): a, c, u, g, unknown or other
ggnacccagaugugaagaa

SEQ ID NO: 2727634 - RNA, 19 nt, Artificial Sequence
  Description of Artificial Sequence: Synthetic oligonucleotide
cugcuguaucugaaaggca

SEQ ID NO: 2727635 - RNA, 19 nt, Artificial Sequence
  Description of Artificial Sequence: Synthetic oligonucleotide
auguuguuuccaguugaua

SEQ ID NO: 2727636 - RNA, 19 nt, Artificial Sequence
  Description of Artificial Sequence: Synthetic oligonucleotide
caggccacuuguccaccag

SEQ ID NO: 2727637 - RNA, 19 nt, Artificial Sequence
  Description of Artificial Sequence: Synthetic oligonucleotide
ucucuugaggacggacaau

SEQ ID NO: 2727638 - RNA, 19 nt, Artificial Sequence
  Description of Artificial Sequence: Synthetic oligonucleotide
ugcccacaccuuuaucguu

SEQ ID NO: 2727639 - RNA, 19 nt, Artificial Sequence
  Description of Artificial Sequence: Synthetic oligonucleotide
ccaaacagugcccacaccu

SEQ ID NO: 2727640 - RNA, 19 nt, Artificial Sequence
  Description of Artificial Sequence: Synthetic oligonucleotide
gacaagucccauaaaccuu

SEQ ID NO: 2727641 - RNA, 19 nt, Artificial Sequence
  Description of Artificial Sequence: Synthetic oligonucleotide
aggcucauuaucacuucau

SEQ ID NO: 2727642 - RNA, 19 nt, Artificial Sequence
  Description of Artificial Sequence: Synthetic oligonucleotide
cauguagagaaugcacugu

SEQ ID NO: 2727643 - RNA, 19 nt, Artificial Sequence
  Description of Artificial Sequence: Synthetic oligonucleotide
accagcuuagcagcugcaa

SEQ ID NO: 2727644 - RNA, 19 nt, Artificial Sequence
  Description of Artificial Sequence: Synthetic oligonucleotide
gauguuguuuccaguugau

SEQ ID NO: 2727645 - RNA, 19 nt, Artificial Sequence
  Description of Artificial Sequence: Synthetic oligonucleotide
ggucuggccaugcuucauc

SEQ ID NO: 2727646 - RNA, 19 nt, Artificial Sequence
  Description of Artificial Sequence: Synthetic oligonucleotide
gagaggucuggccaugcuu

SEQ ID NO: 2727647 - RNA, 19 nt, Artificial Sequence
  Description of Artificial Sequence: Synthetic oligonucleotide
caggaagguguuuccuuaa

SEQ ID NO: 2727648 - RNA, 19 nt, Artificial Sequence
  Description of Artificial Sequence: Synthetic oligonucleotide
aggucaucugccaucucuu

SEQ ID NO: 2727649 - RNA, 19 nt, Artificial Sequence
  Description of Artificial Sequence: Synthetic oligonucleotide
gggacugugguauacuguu

SEQ ID NO: 2727650 - RNA, 19 nt, Artificial Sequence
  Description of Artificial Sequence: Synthetic oligonucleotide
cuguaucugaaaggcagua

SEQ ID NO: 2727651 - RNA, 19 nt, Artificial Sequence
  Description of Artificial Sequence: Synthetic oligonucleotide
gcagauguuguuuccaguu

SEQ ID NO: 2727652 - RNA, 19 nt, Artificial Sequence
  Description of Artificial Sequence: Synthetic oligonucleotide
uuggggcaucauguagaga

SEQ ID NO: 2727653 - RNA, 19 nt, Artificial Sequence
  Description of Artificial Sequence: Synthetic oligonucleotide
gguuucccugguucaugug

SEQ ID NO: 2727654 - RNA, 19 nt, Artificial Sequence
  Description of Artificial Sequence: Synthetic oligonucleotide
guauuaaagucaggccacu

SEQ ID NO: 2727655 - RNA, 19 nt, Artificial Sequence
  Description of Artificial Sequence: Synthetic oligonucleotide
cucuugacuuugaccagcu

SEQ ID NO: 2727656 - RNA, 19 nt, Artificial Sequence
  Description of Artificial Sequence: Synthetic oligonucleotide
gucgguggcugaguggaga

SEQ ID NO: 2727657 - RNA, 19 nt, Artificial Sequence
  Description of Artificial Sequence: Synthetic oligonucleotide
cuuuaucguucauuacaau

SEQ ID NO: 2727658 - RNA, 19 nt, Artificial Sequence
  Description of Artificial Sequence: Synthetic oligonucleotide
gccacuuguccaccagggc

SEQ ID NO: 2727659 - RNA, 19 nt, Artificial Sequence
  Description of Artificial Sequence: Synthetic oligonucleotide
aggcaguaugagggugggg

SEQ ID NO: 2727660 - RNA, 19 nt, Artificial Sequence
  Description of Artificial Sequence: Synthetic oligonucleotide
gcuuccccagaacccaaac

SEQ ID NO: 2727661 - RNA, 19 nt, Artificial Sequence
  Description of Artificial Sequence: Synthetic oligonucleotide
ccgccaucagaaaagguaa

SEQ ID NO: 2727662 - RNA, 19 nt, Artificial Sequence
  Description of Artificial Sequence: Synthetic oligonucleotide
  modified_base (6)..(6): a, c, u, g, unknown or other
uugcunuuuggggcaucau

SEQ ID NO: 2727663 - RNA, 19 nt, Artificial Sequence
  Description of Artificial Sequence: Synthetic oligonucleotide
gugguauacuguuggucau

SEQ ID NO: 2727664 - RNA, 19 nt, Artificial Sequence
  Description of Artificial Sequence: Synthetic oligonucleotide
cggacaaucacuguauuaa

SEQ ID NO: 2727665 - RNA, 19 nt, Artificial Sequence
  Description of Artificial Sequence: Synthetic oligonucleotide
agguuggauugugaacuuu

SEQ ID NO: 2727666 - RNA, 19 nt, Artificial Sequence
  Description of Artificial Sequence: Synthetic oligonucleotide
ccugguucauguggaagac

SEQ ID NO: 2727667 - RNA, 19 nt, Artificial Sequence
  Description of Artificial Sequence: Synthetic oligonucleotide
gaggacggacaaucacugu

SEQ ID NO: 2727668 - RNA, 19 nt, Artificial Sequence
  Description of Artificial Sequence: Synthetic oligonucleotide
  modified_base (11)..(11): a, c, u, g, unknown or other
gugucacuggnacccagau

SEQ ID NO: 2727669 - RNA, 19 nt, Artificial Sequence
  Description of Artificial Sequence: Synthetic oligonucleotide
uauggggaucaaggucauc

SEQ ID NO: 2727670 - RNA, 19 nt, Artificial Sequence
  Description of Artificial Sequence: Synthetic oligonucleotide
cuggugugccgaggaauuc

SEQ ID NO: 2727671 - RNA, 19 nt, Artificial Sequence
  Description of Artificial Sequence: Synthetic oligonucleotide
acccagaugugaagaacua

SEQ ID NO: 2727672 - RNA, 19 nt, Artificial Sequence
  Description of Artificial Sequence: Synthetic oligonucleotide
cuguauccgccaucagaaa

SEQ ID NO: 2727673 - RNA, 19 nt, Artificial Sequence
  Description of Artificial Sequence: Synthetic oligonucleotide
cucaggaagguguuuccuu

SEQ ID NO: 2727674 - RNA, 19 nt, Artificial Sequence
  Description of Artificial Sequence: Synthetic oligonucleotide
gacggacaaucacuguauu

SEQ ID NO: 2727675 - RNA, 19 nt, Artificial Sequence
  Description of Artificial Sequence: Synthetic oligonucleotide
ggaagacaagucccauaaa

SEQ ID NO: 2727676 - RNA, 19 nt, Artificial Sequence
  Description of Artificial Sequence: Synthetic oligonucleotide
cuuuggaucugcagauguu

SEQ ID NO: 2727677 - RNA, 19 nt, Artificial Sequence
  Description of Artificial Sequence: Synthetic oligonucleotide
ccuuagaauagaguuggua

SEQ ID NO: 2727678 - RNA, 19 nt, Artificial Sequence
  Description of Artificial Sequence: Synthetic oligonucleotide
cuaucucuguauccgccau

SEQ ID NO: 2727679 - RNA, 19 nt, Artificial Sequence
  Description of Artificial Sequence: Synthetic oligonucleotide
auccgccaucagaaaaggu

SEQ ID NO: 2727680 - RNA, 19 nt, Artificial Sequence
  Description of Artificial Sequence: Synthetic oligonucleotide
ccaucucuugaggacggac

SEQ ID NO: 2727681 - RNA, 19 nt, Artificial Sequence
  Description of Artificial Sequence: Synthetic oligonucleotide
gcaaggcucauuaucacuu

SEQ ID NO: 2727682 - RNA, 19 nt, Artificial Sequence
  Description of Artificial Sequence: Synthetic oligonucleotide
cacaccuuuaucguucauu

SEQ ID NO: 2727683 - RNA, 19 nt, Artificial Sequence
  Description of Artificial Sequence: Synthetic oligonucleotide
gccucuggugugccgagga

SEQ ID NO: 2727684 - RNA, 19 nt, Artificial Sequence
  Description of Artificial Sequence: Synthetic oligonucleotide
caagucccauaaaccuuua

SEQ ID NO: 2727685 - RNA, 19 nt, Artificial Sequence
  Description of Artificial Sequence: Synthetic oligonucleotide
ggcucauuaucacuucauu

SEQ ID NO: 2727686 - RNA, 19 nt, Artificial Sequence
  Description of Artificial Sequence: Synthetic oligonucleotide
ccaugcuucaucugcugua

SEQ ID NO: 2727687 - RNA, 19 nt, Artificial Sequence
  Description of Artificial Sequence: Synthetic oligonucleotide
ccaguugauagccucuggu

SEQ ID NO: 2727688 - RNA, 19 nt, Artificial Sequence
  Description of Artificial Sequence: Synthetic oligonucleotide
cgaggaauuccaaacaguu

SEQ ID NO: 2727689 - RNA, 19 nt, Artificial Sequence
  Description of Artificial Sequence: Synthetic oligonucleotide
cccaaacagugcccacacc

SEQ ID NO: 2727690 - RNA, 19 nt, Artificial Sequence
  Description of Artificial Sequence: Synthetic oligonucleotide
aggucuggccaugcuucau

SEQ ID NO: 2727691 - RNA, 19 nt, Artificial Sequence
  Description of Artificial Sequence: Synthetic oligonucleotide
ggacggacaaucacuguau

SEQ ID NO: 2727692 - RNA, 19 nt, Artificial Sequence
  Description of Artificial Sequence: Synthetic oligonucleotide
gccaugcuucaucugcugu

SEQ ID NO: 2727693 - RNA, 19 nt, Artificial Sequence
  Description of Artificial Sequence: Synthetic oligonucleotide
gcuguaucugaaaggcagu

SEQ ID NO: 2727694 - RNA, 19 nt, Artificial Sequence
  Description of Artificial Sequence: Synthetic oligonucleotide
gcacuguguucucuugacu

SEQ ID NO: 2727695 - RNA, 19 nt, Artificial Sequence
  Description of Artificial Sequence: Synthetic oligonucleotide
ccgaggaauuccaaacagu

SEQ ID NO: 2727696 - RNA, 19 nt, Artificial Sequence
  Description of Artificial Sequence: Synthetic oligonucleotide
cccacaccuuuaucguuca

SEQ ID NO: 2727697 - RNA, 19 nt, Artificial Sequence
  Description of Artificial Sequence: Synthetic oligonucleotide
cagguuggauugugaacuu

SEQ ID NO: 2727698 - RNA, 19 nt, Artificial Sequence
  Description of Artificial Sequence: Synthetic oligonucleotide
cccagaugugaagaacuaa

SEQ ID NO: 2727699 - RNA, 19 nt, Artificial Sequence
  Description of Artificial Sequence: Synthetic oligonucleotide
ggggacugugguauacugu

SEQ ID NO: 2727700 - RNA, 19 nt, Artificial Sequence
  Description of Artificial Sequence: Synthetic oligonucleotide
guauggggaucaaggucau

SEQ ID NO: 2727701 - RNA, 19 nt, Artificial Sequence
  Description of Artificial Sequence: Synthetic oligonucleotide
guguugguauggggaucaa

SEQ ID NO: 2727702 - RNA, 19 nt, Artificial Sequence
  Description of Artificial Sequence: Synthetic oligonucleotide
cagggccuugagcuugaau

SEQ ID NO: 2727703 - RNA, 19 nt, Artificial Sequence
  Description of Artificial Sequence: Synthetic oligonucleotide
ccagggccuugagcuugaa

SEQ ID NO: 2727704 - RNA, 19 nt, Artificial Sequence
  Description of Artificial Sequence: Synthetic oligonucleotide
acuaauuacauucauaggg

SEQ ID NO: 2727705 - RNA, 19 nt, Artificial Sequence
  Description of Artificial Sequence: Synthetic oligonucleotide
  modified_base (5)..(5): a, c, u, g, unknown or other
gaagnuuacacacugauug

SEQ ID NO: 2727706 - RNA, 19 nt, Artificial Sequence
  Description of Artificial Sequence: Synthetic oligonucleotide
aguaugugaucuuuuaugc

SEQ ID NO: 2727707 - RNA, 19 nt, Artificial Sequence
  Description of Artificial Sequence: Synthetic oligonucleotide
acacuaauuacauucauag

SEQ ID NO: 2727708 - RNA, 19 nt, Artificial Sequence
  Description of Artificial Sequence: Synthetic oligonucleotide
uauuugaagacuucugugg

SEQ ID NO: 2727709 - RNA, 19 nt, Artificial Sequence
  Description of Artificial Sequence: Synthetic oligonucleotide
  modified_base (4)..(4): a, c, u, g, unknown or other
aagnuuacacacugauugc

SEQ ID NO: 2727710 - RNA, 19 nt, Artificial Sequence
  Description of Artificial Sequence: Synthetic oligonucleotide
  modified_base (19)..(19): a, c, u, g, unknown or other
aagacuagcgugcagaagn

SEQ ID NO: 2727711 - RNA, 19 nt, Artificial Sequence
  Description of Artificial Sequence: Synthetic oligonucleotide
uuuccuaugguaucuaucc

SEQ ID NO: 2727712 - RNA, 19 nt, Artificial Sequence
  Description of Artificial Sequence: Synthetic oligonucleotide
cauuuuauguauuugaaga

SEQ ID NO: 2727713 - RNA, 19 nt, Artificial Sequence
  Description of Artificial Sequence: Synthetic oligonucleotide
ucauuuuauguauuugaag

SEQ ID NO: 2727714 - RNA, 19 nt, Artificial Sequence
  Description of Artificial Sequence: Synthetic oligonucleotide
uaugugaucuuuuaugccu

SEQ ID NO: 2727715 - RNA, 19 nt, Artificial Sequence
  Description of Artificial Sequence: Synthetic oligonucleotide
ugucauuuuauguauuuga

SEQ ID NO: 2727716 - RNA, 19 nt, Artificial Sequence
  Description of Artificial Sequence: Synthetic oligonucleotide
ugcaguaugauuuuccagu

SEQ ID NO: 2727717 - RNA, 19 nt, Artificial Sequence
  Description of Artificial Sequence: Synthetic oligonucleotide
aguaugauuuuccaguaug

SEQ ID NO: 2727718 - RNA, 19 nt, Artificial Sequence
  Description of Artificial Sequence: Synthetic oligonucleotide
uuuuaugcacuuugaagag

SEQ ID NO: 2727719 - RNA, 19 nt, Artificial Sequence
  Description of Artificial Sequence: Synthetic oligonucleotide
uuuuguugcauuugaagac

SEQ ID NO: 2727720 - RNA, 19 nt, Artificial Sequence
  Description of Artificial Sequence: Synthetic oligonucleotide
  modified_base (9)..(9): a, c, u, g, unknown or other
ugcagaagnuuacacacug

SEQ ID NO: 2727721 - RNA, 19 nt, Artificial Sequence
  Description of Artificial Sequence: Synthetic oligonucleotide
agguuuaccacacugauua

SEQ ID NO: 2727722 - RNA, 19 nt, Artificial Sequence
  Description of Artificial Sequence: Synthetic oligonucleotide
uuuaugcauuugaagauga

SEQ ID NO: 2727723 - RNA, 19 nt, Artificial Sequence
  Description of Artificial Sequence: Synthetic oligonucleotide
ucuguggugagaaaagacu

SEQ ID NO: 2727724 - RNA, 19 nt, Artificial Sequence
  Description of Artificial Sequence: Synthetic oligonucleotide
ugaugagaaagguuuacca

SEQ ID NO: 2727725 - RNA, 19 nt, Artificial Sequence
  Description of Artificial Sequence: Synthetic oligonucleotide
ugcacuuugaagaguacug

SEQ ID NO: 2727726 - RNA, 19 nt, Artificial Sequence
  Description of Artificial Sequence: Synthetic oligonucleotide
agaaagguuuaccacacug

SEQ ID NO: 2727727 - RNA, 19 nt, Artificial Sequence
  Description of Artificial Sequence: Synthetic oligonucleotide
ugauuuuccaguauguguu

SEQ ID NO: 2727728 - RNA, 19 nt, Artificial Sequence
  Description of Artificial Sequence: Synthetic oligonucleotide
cauuugaagacuagcgugc

SEQ ID NO: 2727729 - RNA, 19 nt, Artificial Sequence
  Description of Artificial Sequence: Synthetic oligonucleotide
aaagguuuaccacacugau

SEQ ID NO: 2727730 - RNA, 19 nt, Artificial Sequence
  Description of Artificial Sequence: Synthetic oligonucleotide
aguauguguucuuuuacug

SEQ ID NO: 2727731 - RNA, 19 nt, Artificial Sequence
  Description of Artificial Sequence: Synthetic oligonucleotide
augagaaagguuuaccaca

SEQ ID NO: 2727732 - RNA, 19 nt, Artificial Sequence
  Description of Artificial Sequence: Synthetic oligonucleotide
augauuuuccaguaugugu

SEQ ID NO: 2727733 - RNA, 19 nt, Artificial Sequence
  Description of Artificial Sequence: Synthetic oligonucleotide
ugcauuugaagacuagcgu

SEQ ID NO: 2727734 - RNA, 19 nt, Artificial Sequence
  Description of Artificial Sequence: Synthetic oligonucleotide
ugagaaagguuuaccacac

SEQ ID NO: 2727735 - RNA, 19 nt, Artificial Sequence
  Description of Artificial Sequence: Synthetic oligonucleotide
uuaugcacuuugaagagua

SEQ ID NO: 2727736 - RNA, 19 nt, Artificial Sequence
  Description of Artificial Sequence: Synthetic oligonucleotide
uaugugucauuuuauguau

SEQ ID NO: 2727737 - RNA, 19 nt, Artificial Sequence
  Description of Artificial Sequence: Synthetic oligonucleotide
ucuuuuacugugcugugaa

SEQ ID NO: 2727738 - RNA, 19 nt, Artificial Sequence
  Description of Artificial Sequence: Synthetic oligonucleotide
ugaucuuuuaugccuuuga

SEQ ID NO: 2727739 - RNA, 19 nt, Artificial Sequence
  Description of Artificial Sequence: Synthetic oligonucleotide
augguaucuauccauuaug

SEQ ID NO: 2727740 - RNA, 19 nt, Artificial Sequence
  Description of Artificial Sequence: Synthetic oligonucleotide
auuugaagacuucuguggu

SEQ ID NO: 2727741 - RNA, 19 nt, Artificial Sequence
  Description of Artificial Sequence: Synthetic oligonucleotide
uaugguaucuauccauuau

SEQ ID NO: 2727742 - RNA, 19 nt, Artificial Sequence
  Description of Artificial Sequence: Synthetic oligonucleotide
uuuuacugugcugugaaaa

SEQ ID NO: 2727743 - RNA, 19 nt, Artificial Sequence
  Description of Artificial Sequence: Synthetic oligonucleotide
uuauagguuuucucugcag

SEQ ID NO: 2727744 - RNA, 19 nt, Artificial Sequence
  Description of Artificial Sequence: Synthetic oligonucleotide
uaugauuuuccaguaugug

SEQ ID NO: 2727745 - RNA, 19 nt, Artificial Sequence
  Description of Artificial Sequence: Synthetic oligonucleotide
ucugcaguaugauuuucca

SEQ ID NO: 2727746 - RNA, 19 nt, Artificial Sequence
  Description of Artificial Sequence: Synthetic oligonucleotide
cacuaauuacauucauagg

SEQ ID NO: 2727747 - RNA, 19 nt, Artificial Sequence
  Description of Artificial Sequence: Synthetic oligonucleotide
uucuguggugagaaaagac

SEQ ID NO: 2727748 - RNA, 19 nt, Artificial Sequence
  Description of Artificial Sequence: Synthetic oligonucleotide
uuuguugcauuugaagacu

SEQ ID NO: 2727749 - RNA, 19 nt, Artificial Sequence
  Description of Artificial Sequence: Synthetic oligonucleotide
ggugagaaaagacuuuacc

SEQ ID NO: 2727750 - RNA, 19 nt, Artificial Sequence
  Description of Artificial Sequence: Synthetic oligonucleotide
uucuuuuaugcacuuugaa

SEQ ID NO: 2727751 - RNA, 19 nt, Artificial Sequence
  Description of Artificial Sequence: Synthetic oligonucleotide
uuacacacugauugcauuc

SEQ ID NO: 2727752 - RNA, 19 nt, Artificial Sequence
  Description of Artificial Sequence: Synthetic oligonucleotide
uugaagacuucugugguga

SEQ ID NO: 2727753 - RNA, 19 nt, Artificial Sequence
  Description of Artificial Sequence: Synthetic oligonucleotide
acugugaugagaaagguuu

SEQ ID NO: 2727754 - RNA, 19 nt, Artificial Sequence
  Description of Artificial Sequence: Synthetic oligonucleotide
uugaagacuagcgugcaga

SEQ ID NO: 2727755 - RNA, 19 nt, Artificial Sequence
  Description of Artificial Sequence: Synthetic oligonucleotide
aagacuucuguggugagaa

SEQ ID NO: 2727756 - RNA, 19 nt, Artificial Sequence
  Description of Artificial Sequence: Synthetic oligonucleotide
uguguucuuuuacugugcu

SEQ ID NO: 2727757 - RNA, 19 nt, Artificial Sequence
  Description of Artificial Sequence: Synthetic oligonucleotide
uguugcauuugaagacuag

SEQ ID NO: 2727758 - RNA, 19 nt, Artificial Sequence
  Description of Artificial Sequence: Synthetic oligonucleotide
uaugcguccuuuuaugcau

SEQ ID NO: 2727759 - RNA, 19 nt, Artificial Sequence
  Description of Artificial Sequence: Synthetic oligonucleotide
guaugugaucuuuuaugcc

SEQ ID NO: 2727760 - RNA, 19 nt, Artificial Sequence
  Description of Artificial Sequence: Synthetic oligonucleotide
gcauuugaagacuagcgug

SEQ ID NO: 2727761 - RNA, 19 nt, Artificial Sequence
  Description of Artificial Sequence: Synthetic oligonucleotide
guugcauuugaagacuagc

SEQ ID NO: 2727762 - RNA, 19 nt, Artificial Sequence
  Description of Artificial Sequence: Synthetic oligonucleotide
ugugucauuuuauguauuu

SEQ ID NO: 2727763 - RNA, 19 nt, Artificial Sequence
  Description of Artificial Sequence: Synthetic oligonucleotide
uccuaugguaucuauccau

SEQ ID NO: 2727764 - RNA, 19 nt, Artificial Sequence
  Description of Artificial Sequence: Synthetic oligonucleotide
uaauuacauucauaggguu

SEQ ID NO: 2727765 - RNA, 19 nt, Artificial Sequence
  Description of Artificial Sequence: Synthetic oligonucleotide
cuaauuacauucauagggu

SEQ ID NO: 2727766 - RNA, 19 nt, Artificial Sequence
  Description of Artificial Sequence: Synthetic oligonucleotide
cacuuugaagaguacugug

SEQ ID NO: 2727767 - RNA, 19 nt, Artificial Sequence
  Description of Artificial Sequence: Synthetic oligonucleotide
  modified_base (3)..(3): a, c, u, g, unknown or other
agnuuacacacugauugca

SEQ ID NO: 2727768 - RNA, 19 nt, Artificial Sequence
  Description of Artificial Sequence: Synthetic oligonucleotide
ugugaugagaaagguuuac

SEQ ID NO: 2727769 - RNA, 19 nt, Artificial Sequence
  Description of Artificial Sequence: Synthetic oligonucleotide
cuuuccuaugguaucuauc

SEQ ID NO: 2727770 - RNA, 19 nt, Artificial Sequence
  Description of Artificial Sequence: Synthetic oligonucleotide
uauguguccuuuuguugca

SEQ ID NO: 2727771 - RNA, 19 nt, Artificial Sequence
  Description of Artificial Sequence: Synthetic oligonucleotide
gaucuuuuaugccuuugaa

SEQ ID NO: 2727772 - RNA, 19 nt, Artificial Sequence
  Description of Artificial Sequence: Synthetic oligonucleotide
uuaugcauuugaagaugac

SEQ ID NO: 2727773 - RNA, 19 nt, Artificial Sequence
  Description of Artificial Sequence: Synthetic oligonucleotide
ugauuacuuuccuauggua

SEQ ID NO: 2727774 - RNA, 19 nt, Artificial Sequence
  Description of Artificial Sequence: Synthetic oligonucleotide
auguguucuuuuacugugc

SEQ ID NO: 2727775 - RNA, 19 nt, Artificial Sequence
  Description of Artificial Sequence: Synthetic oligonucleotide
gauuuuccaguauguguuc

SEQ ID NO: 2727776 - RNA, 19 nt, Artificial Sequence
  Description of Artificial Sequence: Synthetic oligonucleotide
uuuaugcacuuugaagagu

SEQ ID NO: 2727777 - RNA, 19 nt, Artificial Sequence
  Description of Artificial Sequence: Synthetic oligonucleotide
uuccuaugguaucuaucca

SEQ ID NO: 2727778 - RNA, 19 nt, Artificial Sequence
  Description of Artificial Sequence: Synthetic oligonucleotide
uguggugagaaaagacuuu

SEQ ID NO: 2727779 - RNA, 19 nt, Artificial Sequence
  Description of Artificial Sequence: Synthetic oligonucleotide
uuuucucugcaguaugauu

SEQ ID NO: 2727780 - RNA, 19 nt, Artificial Sequence
  Description of Artificial Sequence: Synthetic oligonucleotide
acuucuguggugagaaaag

SEQ ID NO: 2727781 - RNA, 19 nt, Artificial Sequence
  Description of Artificial Sequence: Synthetic oligonucleotide
ugaagacuagcgugcagaa

SEQ ID NO: 2727782 - RNA, 19 nt, Artificial Sequence
  Description of Artificial Sequence: Synthetic oligonucleotide
  modified_base (15)..(15): a, c, u, g, unknown or other
cuagcgugcagaagnuuac

SEQ ID NO: 2727783 - RNA, 19 nt, Artificial Sequence
  Description of Artificial Sequence: Synthetic oligonucleotide
uggugagaaaagacuuuac

SEQ ID NO: 2727784 - RNA, 19 nt, Artificial Sequence
  Description of Artificial Sequence: Synthetic oligonucleotide
cugcaguaugauuuuccag

SEQ ID NO: 2727785 - RNA, 19 nt, Artificial Sequence
  Description of Artificial Sequence: Synthetic oligonucleotide
uacacacugauugcauuca

SEQ ID NO: 2727786 - RNA, 19 nt, Artificial Sequence
  Description of Artificial Sequence: Synthetic oligonucleotide
  modified_base (13)..(13): a, c, u, g, unknown or other
agcgugcagaagnuuacac

SEQ ID NO: 2727787 - RNA, 19 nt, Artificial Sequence
  Description of Artificial Sequence: Synthetic oligonucleotide
gugaugagaaagguuuacc

SEQ ID NO: 2727788 - RNA, 19 nt, Artificial Sequence
  Description of Artificial Sequence: Synthetic oligonucleotide
  modified_base (16)..(16): a, c, u, g, unknown or other
acuagcgugcagaagnuua

SEQ ID NO: 2727789 - RNA, 19 nt, Artificial Sequence
  Description of Artificial Sequence: Synthetic oligonucleotide
guaugcguccuuuuaugca

SEQ ID NO: 2727790 - RNA, 19 nt, Artificial Sequence
  Description of Artificial Sequence: Synthetic oligonucleotide
  modified_base (11)..(11): a, c, u, g, unknown or other
cgugcagaagnuuacacac

SEQ ID NO: 2727791 - RNA, 19 nt, Artificial Sequence
  Description of Artificial Sequence: Synthetic oligonucleotide
ugaagacuucuguggugag

SEQ ID NO: 2727792 - RNA, 19 nt, Artificial Sequence
  Description of Artificial Sequence: Synthetic oligonucleotide
gauuacuuuccuaugguau

SEQ ID NO: 2727793 - RNA, 19 nt, Artificial Sequence
  Description of Artificial Sequence: Synthetic oligonucleotide
uacugugaugagaaagguu

SEQ ID NO: 2727794 - RNA, 19 nt, Artificial Sequence
  Description of Artificial Sequence: Synthetic oligonucleotide
uucuuuuacugugcuguga

SEQ ID NO: 2727795 - RNA, 19 nt, Artificial Sequence
  Description of Artificial Sequence: Synthetic oligonucleotide
uaugcacuuugaagaguac

SEQ ID NO: 2727796 - RNA, 19 nt, Artificial Sequence
  Description of Artificial Sequence: Synthetic oligonucleotide
cacugauuacuuuccuaug

SEQ ID NO: 2727797 - RNA, 19 nt, Artificial Sequence
  Description of Artificial Sequence: Synthetic oligonucleotide
uuguugcauuugaagacua

SEQ ID NO: 2727798 - RNA, 19 nt, Artificial Sequence
  Description of Artificial Sequence: Synthetic oligonucleotide
gaagacuagcgugcagaag

SEQ ID NO: 2727799 - RNA, 19 nt, Artificial Sequence
  Description of Artificial Sequence: Synthetic oligonucleotide
gucauuuuauguauuugaa

SEQ ID NO: 2727800 - RNA, 19 nt, Artificial Sequence
  Description of Artificial Sequence: Synthetic oligonucleotide
gugucauuuuauguauuug

SEQ ID NO: 2727801 - RNA, 19 nt, Artificial Sequence
  Description of Artificial Sequence: Synthetic oligonucleotide
gacuucuguggugagaaaa

SEQ ID NO: 2727802 - RNA, 19 nt, Artificial Sequence
  Description of Artificial Sequence: Synthetic oligonucleotide
augcacuuugaagaguacu

SEQ ID NO: 2727803 - RNA, 19 nt, Artificial Sequence
  Description of Artificial Sequence: Synthetic oligonucleotide
auuuuccaguauguguucu

SEQ ID NO: 2727804 - RNA, 19 nt, Artificial Sequence
  Description of Artificial Sequence: Synthetic oligonucleotide
uuuuccaguauguguucuu

SEQ ID NO: 2727805 - RNA, 19 nt, Artificial Sequence
  Description of Artificial Sequence: Synthetic oligonucleotide
guauguguucuuuuacugu

SEQ ID NO: 2727806 - RNA, 19 nt, Artificial Sequence
  Description of Artificial Sequence: Synthetic oligonucleotide
guccuuuuguugcauuuga

SEQ ID NO: 2727807 - RNA, 19 nt, Artificial Sequence
  Description of Artificial Sequence: Synthetic oligonucleotide
  modified_base (7)..(7): a, c, u, g, unknown or other
cagaagnuuacacacugau

SEQ ID NO: 2727808 - RNA, 19 nt, Artificial Sequence
  Description of Artificial Sequence: Synthetic oligonucleotide
acugugccaagcaaaggcu

SEQ ID NO: 2727809 - RNA, 19 nt, Artificial Sequence
  Description of Artificial Sequence: Synthetic oligonucleotide
accacacuaauuacauuca

SEQ ID NO: 2727810 - RNA, 19 nt, Artificial Sequence
  Description of Artificial Sequence: Synthetic oligonucleotide
uuuccaguauguguucuuu

SEQ ID NO: 2727811 - RNA, 19 nt, Artificial Sequence
  Description of Artificial Sequence: Synthetic oligonucleotide
guguucuuuuacugugcug

SEQ ID NO: 2727812 - RNA, 19 nt, Artificial Sequence
  Description of Artificial Sequence: Synthetic oligonucleotide
  modified_base (6)..(6): a, c, u, g, unknown or other
agaagnuuacacacugauu

SEQ ID NO: 2727813 - RNA, 19 nt, Artificial Sequence
  Description of Artificial Sequence: Synthetic oligonucleotide
aagguuuaccacacugauu

SEQ ID NO: 2727814 - RNA, 19 nt, Artificial Sequence
  Description of Artificial Sequence: Synthetic oligonucleotide
gaagacuucuguggugaga

SEQ ID NO: 2727815 - RNA, 19 nt, Artificial Sequence
  Description of Artificial Sequence: Synthetic oligonucleotide
ugugaucuuuuaugccuuu

SEQ ID NO: 2727816 - RNA, 19 nt, Artificial Sequence
  Description of Artificial Sequence: Synthetic oligonucleotide
uguguccuuuuguugcauu

SEQ ID NO: 2727817 - RNA, 19 nt, Artificial Sequence
  Description of Artificial Sequence: Synthetic oligonucleotide
guaugauuuuccaguaugu

SEQ ID NO: 2727818 - RNA, 19 nt, Artificial Sequence
  Description of Artificial Sequence: Synthetic oligonucleotide
gugaucuuuuaugccuuug

SEQ ID NO: 2727819 - RNA, 19 nt, Artificial Sequence
  Description of Artificial Sequence: Synthetic oligonucleotide
cuaugguaucuauccauua

SEQ ID NO: 2727820 - RNA, 19 nt, Artificial Sequence
  Description of Artificial Sequence: Synthetic oligonucleotide
  modified_base (2)..(2): a, c, u, g, unknown or other
gnuuacacacugauugcau

SEQ ID NO: 2727821 - RNA, 19 nt, Artificial Sequence
  Description of Artificial Sequence: Synthetic oligonucleotide
cuucuguggugagaaaaga

SEQ ID NO: 2727822 - RNA, 19 nt, Artificial Sequence
  Description of Artificial Sequence: Synthetic oligonucleotide
guggugagaaaagacuuua

SEQ ID NO: 2727823 - RNA, 19 nt, Artificial Sequence
  Description of Artificial Sequence: Synthetic oligonucleotide
ugccaagcaaaggcuuuac

SEQ ID NO: 2727824 - RNA, 19 nt, Artificial Sequence
  Description of Artificial Sequence: Synthetic oligonucleotide
ucucugcaguaugauuuuc

SEQ ID NO: 2727825 - RNA, 19 nt, Artificial Sequence
  Description of Artificial Sequence: Synthetic oligonucleotide
cuguggugagaaaagacuu

SEQ ID NO: 2727826 - RNA, 19 nt, Artificial Sequence
  Description of Artificial Sequence: Synthetic oligonucleotide
  modified_base (12)..(12): a, c, u, g, unknown or other
gcgugcagaagnuuacaca

SEQ ID NO: 2727827 - RNA, 19 nt, Artificial Sequence
  Description of Artificial Sequence: Synthetic oligonucleotide
cuuuuacugugcugugaaa

SEQ ID NO: 2727828 - RNA, 19 nt, Artificial Sequence
  Description of Artificial Sequence: Synthetic oligonucleotide
ugcguccuuuuaugcauuu

SEQ ID NO: 2727829 - RNA, 19 nt, Artificial Sequence
  Description of Artificial Sequence: Synthetic oligonucleotide
cugugaugagaaagguuua

SEQ ID NO: 2727830 - RNA, 19 nt, Artificial Sequence
  Description of Artificial Sequence: Synthetic oligonucleotide
gcaguaugauuuuccagua

SEQ ID NO: 2727831 - RNA, 19 nt, Artificial Sequence
  Description of Artificial Sequence: Synthetic oligonucleotide
gguuuaccacacugauuac

SEQ ID NO: 2727832 - RNA, 19 nt, Artificial Sequence
  Description of Artificial Sequence: Synthetic oligonucleotide
  modified_base (18)..(18): a, c, u, g, unknown or other
agacuagcgugcagaagnu

SEQ ID NO: 2727833 - RNA, 19 nt, Artificial Sequence
  Description of Artificial Sequence: Synthetic oligonucleotide
gagaaagguuuaccacacu

SEQ ID NO: 2727834 - RNA, 19 nt, Artificial Sequence
  Description of Artificial Sequence: Synthetic oligonucleotide
guacugugaugagaaaggu

SEQ ID NO: 2727835 - RNA, 19 nt, Artificial Sequence
  Description of Artificial Sequence: Synthetic oligonucleotide
agacuucuguggugagaaa

SEQ ID NO: 2727836 - RNA, 19 nt, Artificial Sequence
  Description of Artificial Sequence: Synthetic oligonucleotide
  modified_base (10)..(10): a, c, u, g, unknown or other
gugcagaagnuuacacacu

SEQ ID NO: 2727837 - RNA, 19 nt, Artificial Sequence
  Description of Artificial Sequence: Synthetic oligonucleotide
augugucauuuuauguauu

SEQ ID NO: 2727838 - RNA, 19 nt, Artificial Sequence
  Description of Artificial Sequence: Synthetic oligonucleotide
guguccuuuuguugcauuu

SEQ ID NO: 2727839 - RNA, 19 nt, Artificial Sequence
  Description of Artificial Sequence: Synthetic oligonucleotide
auguguccuuuuguugcau

SEQ ID NO: 2727840 - RNA, 19 nt, Artificial Sequence
  Description of Artificial Sequence: Synthetic oligonucleotide
  modified_base (8)..(8): a, c, u, g, unknown or other
gcagaagnuuacacacuga

SEQ ID NO: 2727841 - RNA, 19 nt, Artificial Sequence
  Description of Artificial Sequence: Synthetic oligonucleotide
caguaugauuuuccaguau

SEQ ID NO: 2727842 - RNA, 19 nt, Artificial Sequence
  Description of Artificial Sequence: Synthetic oligonucleotide
gcacuuugaagaguacugu

SEQ ID NO: 2727843 - RNA, 19 nt, Artificial Sequence
  Description of Artificial Sequence: Synthetic oligonucleotide
gugccaagcaaaggcuuua

SEQ ID NO: 2727844 - RNA, 19 nt, Artificial Sequence
  Description of Artificial Sequence: Synthetic oligonucleotide
gcguccuuuuaugcauuug

SEQ ID NO: 2727845 - RNA, 19 nt, Artificial Sequence
  Description of Artificial Sequence: Synthetic oligonucleotide
augcguccuuuuaugcauu

SEQ ID NO: 2727846 - RNA, 19 nt, Artificial Sequence
  Description of Artificial Sequence: Synthetic oligonucleotide
ccuaugguaucuauccauu

SEQ ID NO: 2727847 - RNA, 19 nt, Artificial Sequence
  Description of Artificial Sequence: Synthetic oligonucleotide
  modified_base (17)..(17): a, c, u, g, unknown or other
gacuagcgugcagaagnuu

SEQ ID NO: 2727848 - RNA, 19 nt, Artificial Sequence
  Description of Artificial Sequence: Synthetic oligonucleotide
ccacacuaauuacauucau

SEQ ID NO: 2727849 - RNA, 19 nt, Artificial Sequence
  Description of Artificial Sequence: Synthetic oligonucleotide
  modified_base (1)..(1): a, c, u, g, unknown or other
nuuacacacugauugcauu

SEQ ID NO: 2727850 - RNA, 19 nt, Artificial Sequence
  Description of Artificial Sequence: Synthetic oligonucleotide
auaacuaugauaugcaaag

SEQ ID NO: 2727851 - RNA, 19 nt, Artificial Sequence
  Description of Artificial Sequence: Synthetic oligonucleotide
aacucuuaugugcaaaggc

SEQ ID NO: 2727852 - RNA, 19 nt, Artificial Sequence
  Description of Artificial Sequence: Synthetic oligonucleotide
agaauguauucuuuuaugc

SEQ ID NO: 2727853 - RNA, 19 nt, Artificial Sequence
  Description of Artificial Sequence: Synthetic oligonucleotide
gaagauuacuguuacaugc

SEQ ID NO: 2727854 - RNA, 19 nt, Artificial Sequence
  Description of Artificial Sequence: Synthetic oligonucleotide
uauucuuuuaugcauucgg

SEQ ID NO: 2727855 - RNA, 19 nt, Artificial Sequence
  Description of Artificial Sequence: Synthetic oligonucleotide
auucacugcauucauaagg

SEQ ID NO: 2727856 - RNA, 19 nt, Artificial Sequence
  Description of Artificial Sequence: Synthetic oligonucleotide
auuacuguuacaugcaaag

SEQ ID NO: 2727857 - RNA, 19 nt, Artificial Sequence
  Description of Artificial Sequence: Synthetic oligonucleotide
ucggagauaacuaugauau

SEQ ID NO: 2727858 - RNA, 19 nt, Artificial Sequence
  Description of Artificial Sequence: Synthetic oligonucleotide
ucggagauaacucuuaugu

SEQ ID NO: 2727859 - RNA, 19 nt, Artificial Sequence
  Description of Artificial Sequence: Synthetic oligonucleotide
aauguauucuuuuaugcau

SEQ ID NO: 2727860 - RNA, 19 nt, Artificial Sequence
  Description of Artificial Sequence: Synthetic oligonucleotide
aacuaugauaugcaaaggu

SEQ ID NO: 2727861 - RNA, 19 nt, Artificial Sequence
  Description of Artificial Sequence: Synthetic oligonucleotide
uguauuuggagacuagugu

SEQ ID NO: 2727862 - RNA, 19 nt, Artificial Sequence
  Description of Artificial Sequence: Synthetic oligonucleotide
gguuuuaccacauucacug

SEQ ID NO: 2727863 - RNA, 19 nt, Artificial Sequence
  Description of Artificial Sequence: Synthetic oligonucleotide
acuagugugacgugcaaag

SEQ ID NO: 2727864 - RNA, 19 nt, Artificial Sequence
  Description of Artificial Sequence: Synthetic oligonucleotide
uaugcauucggagauaacu

SEQ ID NO: 2727865 - RNA, 19 nt, Artificial Sequence
  Description of Artificial Sequence: Synthetic oligonucleotide
ggagauaacucuuaugugc

SEQ ID NO: 2727866 - RNA, 19 nt, Artificial Sequence
  Description of Artificial Sequence: Synthetic oligonucleotide
aucugaagauuacuguuac

SEQ ID NO: 2727867 - RNA, 19 nt, Artificial Sequence
  Description of Artificial Sequence: Synthetic oligonucleotide
guauuuggagacuagugug

SEQ ID NO: 2727868 - RNA, 19 nt, Artificial Sequence
  Description of Artificial Sequence: Synthetic oligonucleotide
auaacucuuaugugcaaag

SEQ ID NO: 2727869 - RNA, 19 nt, Artificial Sequence
  Description of Artificial Sequence: Synthetic oligonucleotide
gaauguauucuuuuaugca

SEQ ID NO: 2727870 - RNA, 19 nt, Artificial Sequence
  Description of Artificial Sequence: Synthetic oligonucleotide
uaugcguucuuuuauguau

SEQ ID NO: 2727871 - RNA, 19 nt, Artificial Sequence
  Description of Artificial Sequence: Synthetic oligonucleotide
uagugugacgugcaaaggc

SEQ ID NO: 2727872 - RNA, 19 nt, Artificial Sequence
  Description of Artificial Sequence: Synthetic oligonucleotide
uauucgaagacuacuguua

SEQ ID NO: 2727873 - RNA, 19 nt, Artificial Sequence
  Description of Artificial Sequence: Synthetic oligonucleotide
uauuuggagacuaguguga

SEQ ID NO: 2727874 - RNA, 19 nt, Artificial Sequence
  Description of Artificial Sequence: Synthetic oligonucleotide
caugcaaaggcuuuaccac

SEQ ID NO: 2727875 - RNA, 19 nt, Artificial Sequence
  Description of Artificial Sequence: Synthetic oligonucleotide
uuuauguauucggagauaa

SEQ ID NO: 2727876 - RNA, 19 nt, Artificial Sequence
  Description of Artificial Sequence: Synthetic oligonucleotide
ggagauaacuaugauaugc

SEQ ID NO: 2727877 - RNA, 19 nt, Artificial Sequence
  Description of Artificial Sequence: Synthetic oligonucleotide
uguauucgaagacuacugu

SEQ ID NO: 2727878 - RNA, 19 nt, Artificial Sequence
  Description of Artificial Sequence: Synthetic oligonucleotide
uguauucggagauaacuau

SEQ ID NO: 2727879 - RNA, 19 nt, Artificial Sequence
  Description of Artificial Sequence: Synthetic oligonucleotide
cagaauguauucuuuuaug

SEQ ID NO: 2727880 - RNA, 19 nt, Artificial Sequence
  Description of Artificial Sequence: Synthetic oligonucleotide
ugcaucugaagauuacugu

SEQ ID NO: 2727881 - RNA, 19 nt, Artificial Sequence
  Description of Artificial Sequence: Synthetic oligonucleotide
uaacuaugauaugcaaagg

SEQ ID NO: 2727882 - RNA, 19 nt, Artificial Sequence
  Description of Artificial Sequence: Synthetic oligonucleotide
uuuggagacuagugugacg

SEQ ID NO: 2727883 - RNA, 19 nt, Artificial Sequence
  Description of Artificial Sequence: Synthetic oligonucleotide
ugcauucggagauaacucu

SEQ ID NO: 2727884 - RNA, 19 nt, Artificial Sequence
  Description of Artificial Sequence: Synthetic oligonucleotide
uguauucuuuuaugcauuc

SEQ ID NO: 2727885 - RNA, 19 nt, Artificial Sequence
  Description of Artificial Sequence: Synthetic oligonucleotide
gauaacuaugauaugcaaa

SEQ ID NO: 2727886 - RNA, 19 nt, Artificial Sequence
  Description of Artificial Sequence: Synthetic oligonucleotide
uuaugcaucugaagauuac

SEQ ID NO: 2727887 - RNA, 19 nt, Artificial Sequence
  Description of Artificial Sequence: Synthetic oligonucleotide
uucggagauaacuaugaua

SEQ ID NO: 2727888 - RNA, 19 nt, Artificial Sequence
  Description of Artificial Sequence: Synthetic oligonucleotide
auuuggagacuagugugac

SEQ ID NO: 2727889 - RNA, 19 nt, Artificial Sequence
  Description of Artificial Sequence: Synthetic oligonucleotide
aagauuacuguuacaugca

SEQ ID NO: 2727890 - RNA, 19 nt, Artificial Sequence
  Description of Artificial Sequence: Synthetic oligonucleotide
aguaugcguucuuuuaugu

SEQ ID NO: 2727891 - RNA, 19 nt, Artificial Sequence
  Description of Artificial Sequence: Synthetic oligonucleotide
uaugcaucugaagauuacu

SEQ ID NO: 2727892 - RNA, 19 nt, Artificial Sequence
  Description of Artificial Sequence: Synthetic oligonucleotide
uucggagauaacucuuaug

SEQ ID NO: 2727893 - RNA, 19 nt, Artificial Sequence
  Description of Artificial Sequence: Synthetic oligonucleotide
agauaacuaugauaugcaa

SEQ ID NO: 2727894 - RNA, 19 nt, Artificial Sequence
  Description of Artificial Sequence: Synthetic oligonucleotide
acucuuaugugcaaaggcu

SEQ ID NO: 2727895 - RNA, 19 nt, Artificial Sequence
  Description of Artificial Sequence: Synthetic oligonucleotide
uuuaugcauucggagauaa

SEQ ID NO: 2727896 - RNA, 19 nt, Artificial Sequence
  Description of Artificial Sequence: Synthetic oligonucleotide
ucuuaugugcaaaggcuuu

SEQ ID NO: 2727897 - RNA, 19 nt, Artificial Sequence
  Description of Artificial Sequence: Synthetic oligonucleotide
uuauguauucggagauaac

SEQ ID NO: 2727898 - RNA, 19 nt, Artificial Sequence
  Description of Artificial Sequence: Synthetic oligonucleotide
augcauucggagauaacuc

SEQ ID NO: 2727899 - RNA, 19 nt, Artificial Sequence
  Description of Artificial Sequence: Synthetic oligonucleotide
ucugaagauuacuguuaca

SEQ ID NO: 2727900 - RNA, 19 nt, Artificial Sequence
  Description of Artificial Sequence: Synthetic oligonucleotide
guauucuuuuaugcauucg

SEQ ID NO: 2727901 - RNA, 19 nt, Artificial Sequence
  Description of Artificial Sequence: Synthetic oligonucleotide
acuaugauaugcaaagguu

SEQ ID NO: 2727902 - RNA, 19 nt, Artificial Sequence
  Description of Artificial Sequence: Synthetic oligonucleotide
uuaugugcaaaggcuuuac

SEQ ID NO: 2727903 - RNA, 19 nt, Artificial Sequence
  Description of Artificial Sequence: Synthetic oligonucleotide
gauaacucuuaugugcaaa

SEQ ID NO: 2727904 - RNA, 19 nt, Artificial Sequence
  Description of Artificial Sequence: Synthetic oligonucleotide
cauucacugcauucauaag

SEQ ID NO: 2727905 - RNA, 19 nt, Artificial Sequence
  Description of Artificial Sequence: Synthetic oligonucleotide
augcaucugaagauuacug

SEQ ID NO: 2727906 - RNA, 19 nt, Artificial Sequence
  Description of Artificial Sequence: Synthetic oligonucleotide
guuuuaccacauucacugc

SEQ ID NO: 2727907 - RNA, 19 nt, Artificial Sequence
  Description of Artificial Sequence: Synthetic oligonucleotide
agugugacgugcaaaggcu

SEQ ID NO: 2727908 - RNA, 19 nt, Artificial Sequence
  Description of Artificial Sequence: Synthetic oligonucleotide
uuaugcauucggagauaac

SEQ ID NO: 2727909 - RNA, 19 nt, Artificial Sequence
  Description of Artificial Sequence: Synthetic oligonucleotide
cuagugugacgugcaaagg

SEQ ID NO: 2727910 - RNA, 19 nt, Artificial Sequence
  Description of Artificial Sequence: Synthetic oligonucleotide
uuuuauguauucggagaua

SEQ ID NO: 2727911 - RNA, 19 nt, Artificial Sequence
  Description of Artificial Sequence: Synthetic oligonucleotide
ugugacgugcaaaggcuuu

SEQ ID NO: 2727912 - RNA, 19 nt, Artificial Sequence
  Description of Artificial Sequence: Synthetic oligonucleotide
cuaugauaugcaaagguuu

SEQ ID NO: 2727913 - RNA, 19 nt, Artificial Sequence
  Description of Artificial Sequence: Synthetic oligonucleotide
auucggagauaacucuuau

SEQ ID NO: 2727914 - RNA, 19 nt, Artificial Sequence
  Description of Artificial Sequence: Synthetic oligonucleotide
ugcguucuuuuauguauuc

SEQ ID NO: 2727915 - RNA, 19 nt, Artificial Sequence
  Description of Artificial Sequence: Synthetic oligonucleotide
auguauucggagauaacua

SEQ ID NO: 2727916 - RNA, 19 nt, Artificial Sequence
  Description of Artificial Sequence: Synthetic oligonucleotide
agauaacucuuaugugcaa

SEQ ID NO: 2727917 - RNA, 19 nt, Artificial Sequence
  Description of Artificial Sequence: Synthetic oligonucleotide
agguuuuaccacauucacu

SEQ ID NO: 2727918 - RNA, 19 nt, Artificial Sequence
  Description of Artificial Sequence: Synthetic oligonucleotide
gagacuagugugacgugca

SEQ ID NO: 2727919 - RNA, 19 nt, Artificial Sequence
  Description of Artificial Sequence: Synthetic oligonucleotide
uuuuaugcauucggagaua

SEQ ID NO: 2727920 - RNA, 19 nt, Artificial Sequence
  Description of Artificial Sequence: Synthetic oligonucleotide
ggagacuagugugacgugc

SEQ ID NO: 2727921 - RNA, 19 nt, Artificial Sequence
  Description of Artificial Sequence: Synthetic oligonucleotide
auguauucuuuuaugcauu

SEQ ID NO: 2727922 - RNA, 19 nt, Artificial Sequence
  Description of Artificial Sequence: Synthetic oligonucleotide
uggagacuagugugacgug

SEQ ID NO: 2727923 - RNA, 19 nt, Artificial Sequence
  Description of Artificial Sequence: Synthetic oligonucleotide
ugacgugcaaaggcuuuac

SEQ ID NO: 2727924 - RNA, 19 nt, Artificial Sequence
  Description of Artificial Sequence: Synthetic oligonucleotide
guaugcguucuuuuaugua

SEQ ID NO: 2727925 - RNA, 19 nt, Artificial Sequence
  Description of Artificial Sequence: Synthetic oligonucleotide
cauucggagauaacucuua

SEQ ID NO: 2727926 - RNA, 19 nt, Artificial Sequence
  Description of Artificial Sequence: Synthetic oligonucleotide
guauucgaagacuacuguu

SEQ ID NO: 2727927 - RNA, 19 nt, Artificial Sequence
  Description of Artificial Sequence: Synthetic oligonucleotide
gcguucuuuuauguauucg

SEQ ID NO: 2727928 - RNA, 19 nt, Artificial Sequence
  Description of Artificial Sequence: Synthetic oligonucleotide
guuacaugcaaaggcuuua

SEQ ID NO: 2727929 - RNA, 19 nt, Artificial Sequence
  Description of Artificial Sequence: Synthetic oligonucleotide
cacugcauucauaagguuu

SEQ ID NO: 2727930 - RNA, 19 nt, Artificial Sequence
  Description of Artificial Sequence: Synthetic oligonucleotide
agacuagugugacgugcaa

SEQ ID NO: 2727931 - RNA, 19 nt, Artificial Sequence
  Description of Artificial Sequence: Synthetic oligonucleotide
gacuagugugacgugcaaa

SEQ ID NO: 2727932 - RNA, 19 nt, Artificial Sequence
  Description of Artificial Sequence: Synthetic oligonucleotide
cucuuaugugcaaaggcuu

SEQ ID NO: 2727933 - RNA, 19 nt, Artificial Sequence
  Description of Artificial Sequence: Synthetic oligonucleotide
cuuaugugcaaaggcuuua

SEQ ID NO: 2727934 - RNA, 19 nt, Artificial Sequence
  Description of Artificial Sequence: Synthetic oligonucleotide
augcguucuuuuauguauu

SEQ ID NO: 2727935 - RNA, 19 nt, Artificial Sequence
  Description of Artificial Sequence: Synthetic oligonucleotide
gcaucugaagauuacuguu

SEQ ID NO: 2727936 - RNA, 19 nt, Artificial Sequence
  Description of Artificial Sequence: Synthetic oligonucleotide
cggagauaacucuuaugug

SEQ ID NO: 2727937 - RNA, 19 nt, Artificial Sequence
  Description of Artificial Sequence: Synthetic oligonucleotide
ccagaauguauucuuuuau

SEQ ID NO: 2727938 - RNA, 19 nt, Artificial Sequence
  Description of Artificial Sequence: Synthetic oligonucleotide
gugacgugcaaaggcuuua

SEQ ID NO: 2727939 - RNA, 19 nt, Artificial Sequence
  Description of Artificial Sequence: Synthetic oligonucleotide
cggagauaacuaugauaug

SEQ ID NO: 2727940 - RNA, 19 nt, Artificial Sequence
  Description of Artificial Sequence: Synthetic oligonucleotide
gugugacgugcaaaggcuu

SEQ ID NO: 2727941 - RNA, 19 nt, Artificial Sequence
  Description of Artificial Sequence: Synthetic oligonucleotide
gcauucggagauaacucuu

SEQ ID NO: 2727942 - RNA, 19 nt, Artificial Sequence
  Description of Artificial Sequence: Synthetic oligonucleotide
aaauuuaaagguuguaggg

SEQ ID NO: 2727943 - RNA, 19 nt, Artificial Sequence
  Description of Artificial Sequence: Synthetic oligonucleotide
uuuacaagaaaguaaggcg

SEQ ID NO: 2727944 - RNA, 19 nt, Artificial Sequence
  Description of Artificial Sequence: Synthetic oligonucleotide
ucaaaugucaagcaguagc

SEQ ID NO: 2727945 - RNA, 19 nt, Artificial Sequence
  Description of Artificial Sequence: Synthetic oligonucleotide
uauuuauuacaauuuacag

SEQ ID NO: 2727946 - RNA, 19 nt, Artificial Sequence
  Description of Artificial Sequence: Synthetic oligonucleotide
uuaguaauugcaaauauau

SEQ ID NO: 2727947 - RNA, 19 nt, Artificial Sequence
  Description of Artificial Sequence: Synthetic oligonucleotide
gagccuuaaaauuuaaagg

SEQ ID NO: 2727948 - RNA, 19 nt, Artificial Sequence
  Description of Artificial Sequence: Synthetic oligonucleotide
acuuauauaauacucggug

SEQ ID NO: 2727949 - RNA, 19 nt, Artificial Sequence
  Description of Artificial Sequence: Synthetic oligonucleotide
aaauucuucccaugguccc

SEQ ID NO: 2727950 - RNA, 19 nt, Artificial Sequence
  Description of Artificial Sequence: Synthetic oligonucleotide
aacauuuguaccuuuacaa

SEQ ID NO: 2727951 - RNA, 19 nt, Artificial Sequence
  Description of Artificial Sequence: Synthetic oligonucleotide
agucuuaacauugaugagc

SEQ ID NO: 2727952 - RNA, 19 nt, Artificial Sequence
  Description of Artificial Sequence: Synthetic oligonucleotide
uucacuagucuuaacauug

SEQ ID NO: 2727953 - RNA, 19 nt, Artificial Sequence
  Description of Artificial Sequence: Synthetic oligonucleotide
auuuaaagguuguaggguc

SEQ ID NO: 2727954 - RNA, 19 nt, Artificial Sequence
  Description of Artificial Sequence: Synthetic oligonucleotide
uuauauaauacucggugac

SEQ ID NO: 2727955 - RNA, 19 nt, Artificial Sequence
  Description of Artificial Sequence: Synthetic oligonucleotide
cuagucuuaacauugauga

SEQ ID NO: 2727956 - RNA, 19 nt, Artificial Sequence
  Description of Artificial Sequence: Synthetic oligonucleotide
agccuuaaaauuuaaaggu

SEQ ID NO: 2727957 - RNA, 19 nt, Artificial Sequence
  Description of Artificial Sequence: Synthetic oligonucleotide
uuugacacccagaaaaggc

SEQ ID NO: 2727958 - RNA, 19 nt, Artificial Sequence
  Description of Artificial Sequence: Synthetic oligonucleotide
aaaggagccucacccagcc

SEQ ID NO: 2727959 - RNA, 19 nt, Artificial Sequence
  Description of Artificial Sequence: Synthetic oligonucleotide
uuaggaaaccuacucaagc

SEQ ID NO: 2727960 - RNA, 19 nt, Artificial Sequence
  Description of Artificial Sequence: Synthetic oligonucleotide
ugcaaauauauuuauuaca

SEQ ID NO: 2727961 - RNA, 19 nt, Artificial Sequence
  Description of Artificial Sequence: Synthetic oligonucleotide
auugcaaauauauuuauua

SEQ ID NO: 2727962 - RNA, 19 nt, Artificial Sequence
  Description of Artificial Sequence: Synthetic oligonucleotide
uacaauuuacagauuagga

SEQ ID NO: 2727963 - RNA, 19 nt, Artificial Sequence
  Description of Artificial Sequence: Synthetic oligonucleotide
uuacaauuuacagauuagg

SEQ ID NO: 2727964 - RNA, 19 nt, Artificial Sequence
  Description of Artificial Sequence: Synthetic oligonucleotide
agaaagaguuaccacaauc

SEQ ID NO: 2727965 - RNA, 19 nt, Artificial Sequence
  Description of Artificial Sequence: Synthetic oligonucleotide
cuuuacaagaaaguaaggc

SEQ ID NO: 2727966 - RNA, 19 nt, Artificial Sequence
  Description of Artificial Sequence: Synthetic oligonucleotide
aucccuugcaaauucuucc

SEQ ID NO: 2727967 - RNA, 19 nt, Artificial Sequence
  Description of Artificial Sequence: Synthetic oligonucleotide
gaaguuuugaaagggagcc

SEQ ID NO: 2727968 - RNA, 19 nt, Artificial Sequence
  Description of Artificial Sequence: Synthetic oligonucleotide
uuuucucuuguuaugggug

SEQ ID NO: 2727969 - RNA, 19 nt, Artificial Sequence
  Description of Artificial Sequence: Synthetic oligonucleotide
ugcagaaagaguuaccaca

SEQ ID NO: 2727970 - RNA, 19 nt, Artificial Sequence
  Description of Artificial Sequence: Synthetic oligonucleotide
auagugugucuucugaaac

SEQ ID NO: 2727971 - RNA, 19 nt, Artificial Sequence
  Description of Artificial Sequence: Synthetic oligonucleotide
ugaaacauguuccugcagu

SEQ ID NO: 2727972 - RNA, 19 nt, Artificial Sequence
  Description of Artificial Sequence: Synthetic oligonucleotide
auugaugagcaauagugug

SEQ ID NO: 2727973 - RNA, 19 nt, Artificial Sequence
  Description of Artificial Sequence: Synthetic oligonucleotide
ucuauugaacauucguucc

SEQ ID NO: 2727974 - RNA, 19 nt, Artificial Sequence
  Description of Artificial Sequence: Synthetic oligonucleotide
uguaccuuuacaagaaagu

SEQ ID NO: 2727975 - RNA, 19 nt, Artificial Sequence
  Description of Artificial Sequence: Synthetic oligonucleotide
aagauucuccgcuucaucu

SEQ ID NO: 2727976 - RNA, 19 nt, Artificial Sequence
  Description of Artificial Sequence: Synthetic oligonucleotide
uugcaaauucuucccaugg

SEQ ID NO: 2727977 - RNA, 19 nt, Artificial Sequence
  Description of Artificial Sequence: Synthetic oligonucleotide
cagaaaaggagccucaccc

SEQ ID NO: 2727978 - RNA, 19 nt, Artificial Sequence
  Description of Artificial Sequence: Synthetic oligonucleotide
aauuuaaagguuguagggu

SEQ ID NO: 2727979 - RNA, 19 nt, Artificial Sequence
  Description of Artificial Sequence: Synthetic oligonucleotide
ugaaguuuugaaagggagc

SEQ ID NO: 2727980 - RNA, 19 nt, Artificial Sequence
  Description of Artificial Sequence: Synthetic oligonucleotide
acauugaugagcaauagug

SEQ ID NO: 2727981 - RNA, 19 nt, Artificial Sequence
  Description of Artificial Sequence: Synthetic oligonucleotide
acaauuuacagauuaggaa

SEQ ID NO: 2727982 - RNA, 19 nt, Artificial Sequence
  Description of Artificial Sequence: Synthetic oligonucleotide
cuuuugagcccucacaacc

SEQ ID NO: 2727983 - RNA, 19 nt, Artificial Sequence
  Description of Artificial Sequence: Synthetic oligonucleotide
uacagauuaggaaaccuac

SEQ ID NO: 2727984 - RNA, 19 nt, Artificial Sequence
  Description of Artificial Sequence: Synthetic oligonucleotide
caaaugucaagcaguagcc

SEQ ID NO: 2727985 - RNA, 19 nt, Artificial Sequence
  Description of Artificial Sequence: Synthetic oligonucleotide
ggagccuuaaaauuuaaag

SEQ ID NO: 2727986 - RNA, 19 nt, Artificial Sequence
  Description of Artificial Sequence: Synthetic oligonucleotide
uuguaccuuuacaagaaag

SEQ ID NO: 2727987 - RNA, 19 nt, Artificial Sequence
  Description of Artificial Sequence: Synthetic oligonucleotide
ucccuuucgauccucauca

SEQ ID NO: 2727988 - RNA, 19 nt, Artificial Sequence
  Description of Artificial Sequence: Synthetic oligonucleotide
uuaacauugaugagcaaua

SEQ ID NO: 2727989 - RNA, 19 nt, Artificial Sequence
  Description of Artificial Sequence: Synthetic oligonucleotide
caaauucuucccauggucc

SEQ ID NO: 2727990 - RNA, 19 nt, Artificial Sequence
  Description of Artificial Sequence: Synthetic oligonucleotide
guuucuggaaccugcaucc

SEQ ID NO: 2727991 - RNA, 19 nt, Artificial Sequence
  Description of Artificial Sequence: Synthetic oligonucleotide
uugaaagggagccuuaaaa

SEQ ID NO: 2727992 - RNA, 19 nt, Artificial Sequence
  Description of Artificial Sequence: Synthetic oligonucleotide
uccucagaauugcagaaag

SEQ ID NO: 2727993 - RNA, 19 nt, Artificial Sequence
  Description of Artificial Sequence: Synthetic oligonucleotide
uuuaaagguuguagggucc

SEQ ID NO: 2727994 - RNA, 19 nt, Artificial Sequence
  Description of Artificial Sequence: Synthetic oligonucleotide
acauuuguaccuuuacaag

SEQ ID NO: 2727995 - RNA, 19 nt, Artificial Sequence
  Description of Artificial Sequence: Synthetic oligonucleotide
aauagugugucuucugaaa

SEQ ID NO: 2727996 - RNA, 19 nt, Artificial Sequence
  Description of Artificial Sequence: Synthetic oligonucleotide
uuuaguaauugcaaauaua

SEQ ID NO: 2727997 - RNA, 19 nt, Artificial Sequence
  Description of Artificial Sequence: Synthetic oligonucleotide
uaacauuuguaccuuuaca

SEQ ID NO: 2727998 - RNA, 19 nt, Artificial Sequence
  Description of Artificial Sequence: Synthetic oligonucleotide
uuaccacaaucuaagauuc

SEQ ID NO: 2727999 - RNA, 19 nt, Artificial Sequence
  Description of Artificial Sequence: Synthetic oligonucleotide
aaugucaagcaguagccaa

SEQ ID NO: 2728000 - RNA, 19 nt, Artificial Sequence
  Description of Artificial Sequence: Synthetic oligonucleotide
aucuucuuggcucucuaac

SEQ ID NO: 2728001 - RNA, 19 nt, Artificial Sequence
  Description of Artificial Sequence: Synthetic oligonucleotide
uugacacccagaaaaggcc

SEQ ID NO: 2728002 - RNA, 19 nt, Artificial Sequence
  Description of Artificial Sequence: Synthetic oligonucleotide
uugcaaauauauuuauuac

SEQ ID NO: 2728003 - RNA, 19 nt, Artificial Sequence
  Description of Artificial Sequence: Synthetic oligonucleotide
aucaccacuuauauaauac

SEQ ID NO: 2728004 - RNA, 19 nt, Artificial Sequence
  Description of Artificial Sequence: Synthetic oligonucleotide
agaguuaccacaaucuaag

SEQ ID NO: 2728005 - RNA, 19 nt, Artificial Sequence
  Description of Artificial Sequence: Synthetic oligonucleotide
ucuugaauccguuucugga

SEQ ID NO: 2728006 - RNA, 19 nt, Artificial Sequence
  Description of Artificial Sequence: Synthetic oligonucleotide
aagcaagagaguguguggg

SEQ ID NO: 2728007 - RNA, 19 nt, Artificial Sequence
  Description of Artificial Sequence: Synthetic oligonucleotide
uggacaaucuucuuggcuc

SEQ ID NO: 2728008 - RNA, 19 nt, Artificial Sequence
  Description of Artificial Sequence: Synthetic oligonucleotide
ugcucaaaugucaagcagu

SEQ ID NO: 2728009 - RNA, 19 nt, Artificial Sequence
  Description of Artificial Sequence: Synthetic oligonucleotide
auauauuuauuacaauuua

SEQ ID NO: 2728010 - RNA, 19 nt, Artificial Sequence
  Description of Artificial Sequence: Synthetic oligonucleotide
aacauugaugagcaauagu

SEQ ID NO: 2728011 - RNA, 19 nt, Artificial Sequence
  Description of Artificial Sequence: Synthetic oligonucleotide
accuacucaagcaagagag

SEQ ID NO: 2728012 - RNA, 19 nt, Artificial Sequence
  Description of Artificial Sequence: Synthetic oligonucleotide
gaaaaggagccucacccag

SEQ ID NO: 2728013 - RNA, 19 nt, Artificial Sequence
  Description of Artificial Sequence: Synthetic oligonucleotide
uaccuuuacaagaaaguaa

SEQ ID NO: 2728014 - RNA, 19 nt, Artificial Sequence
  Description of Artificial Sequence: Synthetic oligonucleotide
accacuuauauaauacucg

SEQ ID NO: 2728015 - RNA, 19 nt, Artificial Sequence
  Description of Artificial Sequence: Synthetic oligonucleotide
uuuugacacccagaaaagg

SEQ ID NO: 2728016 - RNA, 19 nt, Artificial Sequence
  Description of Artificial Sequence: Synthetic oligonucleotide
ucaagcaagagagugugug

SEQ ID NO: 2728017 - RNA, 19 nt, Artificial Sequence
  Description of Artificial Sequence: Synthetic oligonucleotide
gauuaggaaaccuacucaa

SEQ ID NO: 2728018 - RNA, 19 nt, Artificial Sequence
  Description of Artificial Sequence: Synthetic oligonucleotide
uaugggugcauguuucucc

SEQ ID NO: 2728019 - RNA, 19 nt, Artificial Sequence
  Description of Artificial Sequence: Synthetic oligonucleotide
cauguuucuccagaaaagg

SEQ ID NO: 2728020 - RNA, 19 nt, Artificial Sequence
  Description of Artificial Sequence: Synthetic oligonucleotide
uaggaaaccuacucaagca

SEQ ID NO: 2728021 - RNA, 19 nt, Artificial Sequence
  Description of Artificial Sequence: Synthetic oligonucleotide
aaagaguuaccacaaucua

SEQ ID NO: 2728022 - RNA, 19 nt, Artificial Sequence
  Description of Artificial Sequence: Synthetic oligonucleotide
uugaugagcaauagugugu

SEQ ID NO: 2728023 - RNA, 19 nt, Artificial Sequence
  Description of Artificial Sequence: Synthetic oligonucleotide
gaaaaggccaccauggcca

SEQ ID NO: 2728024 - RNA, 19 nt, Artificial Sequence
  Description of Artificial Sequence: Synthetic oligonucleotide
agauuaggaaaccuacuca

SEQ ID NO: 2728025 - RNA, 19 nt, Artificial Sequence
  Description of Artificial Sequence: Synthetic oligonucleotide
uguaggguccucagaauug

SEQ ID NO: 2728026 - RNA, 19 nt, Artificial Sequence
  Description of Artificial Sequence: Synthetic oligonucleotide
uucuugaauccguuucugg

SEQ ID NO: 2728027 - RNA, 19 nt, Artificial Sequence
  Description of Artificial Sequence: Synthetic oligonucleotide
uucaaggaaaguuaccuuu

SEQ ID NO: 2728028 - RNA, 19 nt, Artificial Sequence
  Description of Artificial Sequence: Synthetic oligonucleotide
gucuauugaacauucguuc

SEQ ID NO: 2728029 - RNA, 19 nt, Artificial Sequence
  Description of Artificial Sequence: Synthetic oligonucleotide
cuauugaacauucguuccc

SEQ ID NO: 2728030 - RNA, 19 nt, Artificial Sequence
  Description of Artificial Sequence: Synthetic oligonucleotide
uguucacuagucuuaacau

SEQ ID NO: 2728031 - RNA, 19 nt, Artificial Sequence
  Description of Artificial Sequence: Synthetic oligonucleotide
uacaagaaaguaaggcgcu

SEQ ID NO: 2728032 - RNA, 19 nt, Artificial Sequence
  Description of Artificial Sequence: Synthetic oligonucleotide
uuucucuuguuaugggugc

SEQ ID NO: 2728033 - RNA, 19 nt, Artificial Sequence
  Description of Artificial Sequence: Synthetic oligonucleotide
auugcagaaagaguuacca

SEQ ID NO: 2728034 - RNA, 19 nt, Artificial Sequence
  Description of Artificial Sequence: Synthetic oligonucleotide
cuuauauaauacucgguga

SEQ ID NO: 2728035 - RNA, 19 nt, Artificial Sequence
  Description of Artificial Sequence: Synthetic oligonucleotide
uguuaugggugcauguuuc

SEQ ID NO: 2728036 - RNA, 19 nt, Artificial Sequence
  Description of Artificial Sequence: Synthetic oligonucleotide
cuuucgauccucaucacca

SEQ ID NO: 2728037 - RNA, 19 nt, Artificial Sequence
  Description of Artificial Sequence: Synthetic oligonucleotide
ucuaagauucuccgcuuca

SEQ ID NO: 2728038 - RNA, 19 nt, Artificial Sequence
  Description of Artificial Sequence: Synthetic oligonucleotide
ugcuuuugagcccucacaa

SEQ ID NO: 2728039 - RNA, 19 nt, Artificial Sequence
  Description of Artificial Sequence: Synthetic oligonucleotide
aguuaccacaaucuaagau

SEQ ID NO: 2728040 - RNA, 19 nt, Artificial Sequence
  Description of Artificial Sequence: Synthetic oligonucleotide
uuacagauuaggaaaccua

SEQ ID NO: 2728041 - RNA, 19 nt, Artificial Sequence
  Description of Artificial Sequence: Synthetic oligonucleotide
ugugcucaaaugucaagca

SEQ ID NO: 2728042 - RNA, 19 nt, Artificial Sequence
  Description of Artificial Sequence: Synthetic oligonucleotide
cauuuguaccuuuacaaga

SEQ ID NO: 2728043 - RNA, 19 nt, Artificial Sequence
  Description of Artificial Sequence: Synthetic oligonucleotide
ucugaaacauguuccugca

SEQ ID NO: 2728044 - RNA, 19 nt, Artificial Sequence
  Description of Artificial Sequence: Synthetic oligonucleotide
uugaauccguuucuggaac

SEQ ID NO: 2728045 - RNA, 19 nt, Artificial Sequence
  Description of Artificial Sequence: Synthetic oligonucleotide
agcaagagagugugugggc

SEQ ID NO: 2728046 - RNA, 19 nt, Artificial Sequence
  Description of Artificial Sequence: Synthetic oligonucleotide
aaaccuacucaagcaagag

SEQ ID NO: 2728047 - RNA, 19 nt, Artificial Sequence
  Description of Artificial Sequence: Synthetic oligonucleotide
cuucuucaaggaaaguuac

SEQ ID NO: 2728048 - RNA, 19 nt, Artificial Sequence
  Description of Artificial Sequence: Synthetic oligonucleotide
uuucccugaaguuuugaaa

SEQ ID NO: 2728049 - RNA, 19 nt, Artificial Sequence
  Description of Artificial Sequence: Synthetic oligonucleotide
aaccuacucaagcaagaga

SEQ ID NO: 2728050 - RNA, 19 nt, Artificial Sequence
  Description of Artificial Sequence: Synthetic oligonucleotide
uuuugagcccucacaaccu

SEQ ID NO: 2728051 - RNA, 19 nt, Artificial Sequence
  Description of Artificial Sequence: Synthetic oligonucleotide
auuacaauuuacagauuag

SEQ ID NO: 2728052 - RNA, 19 nt, Artificial Sequence
  Description of Artificial Sequence: Synthetic oligonucleotide
cagauuaggaaaccuacuc

SEQ ID NO: 2728053 - RNA, 19 nt, Artificial Sequence
  Description of Artificial Sequence: Synthetic oligonucleotide
cuaacauuuguaccuuuac

SEQ ID NO: 2728054 - RNA, 19 nt, Artificial Sequence
  Description of Artificial Sequence: Synthetic oligonucleotide
aagguuguaggguccucag

SEQ ID NO: 2728055 - RNA, 19 nt, Artificial Sequence
  Description of Artificial Sequence: Synthetic oligonucleotide
uauauaauacucggugacu

SEQ ID NO: 2728056 - RNA, 19 nt, Artificial Sequence
  Description of Artificial Sequence: Synthetic oligonucleotide
gauucuccgcuucaucugc

SEQ ID NO: 2728057 - RNA, 19 nt, Artificial Sequence
  Description of Artificial Sequence: Synthetic oligonucleotide
ucccugaaguuuugaaagg

SEQ ID NO: 2728058 - RNA, 19 nt, Artificial Sequence
  Description of Artificial Sequence: Synthetic oligonucleotide
uucuguuucuugaauccgu

SEQ ID NO: 2728059 - RNA, 19 nt, Artificial Sequence
  Description of Artificial Sequence: Synthetic oligonucleotide
ugcagucuauugaacauuc

SEQ ID NO: 2728060 - RNA, 19 nt, Artificial Sequence
  Description of Artificial Sequence: Synthetic oligonucleotide
uucuucaaggaaaguuacc

SEQ ID NO: 2728061 - RNA, 19 nt, Artificial Sequence
  Description of Artificial Sequence: Synthetic oligonucleotide
aaagggagccuuaaaauuu

SEQ ID NO: 2728062 - RNA, 19 nt, Artificial Sequence
  Description of Artificial Sequence: Synthetic oligonucleotide
caagcaagagagugugugg

SEQ ID NO: 2728063 - RNA, 19 nt, Artificial Sequence
  Description of Artificial Sequence: Synthetic oligonucleotide
aacauguuccugcagucua

SEQ ID NO: 2728064 - RNA, 19 nt, Artificial Sequence
  Description of Artificial Sequence: Synthetic oligonucleotide
ucaccacuuauauaauacu

SEQ ID NO: 2728065 - RNA, 19 nt, Artificial Sequence
  Description of Artificial Sequence: Synthetic oligonucleotide
caccacuuauauaauacuc

SEQ ID NO: 2728066 - RNA, 19 nt, Artificial Sequence
  Description of Artificial Sequence: Synthetic oligonucleotide
ucuaacauuuguaccuuua

SEQ ID NO: 2728067 - RNA, 19 nt, Artificial Sequence
  Description of Artificial Sequence: Synthetic oligonucleotide
aucuaagauucuccgcuuc

SEQ ID NO: 2728068 - RNA, 19 nt, Artificial Sequence
  Description of Artificial Sequence: Synthetic oligonucleotide
uagugugucuucugaaaca

SEQ ID NO: 2728069 - RNA, 19 nt, Artificial Sequence
  Description of Artificial Sequence: Synthetic oligonucleotide
guuucuccagaaaaggagc

SEQ ID NO: 2728070 - RNA, 19 nt, Artificial Sequence
  Description of Artificial Sequence: Synthetic oligonucleotide
gaauugcagaaagaguuac

SEQ ID NO: 2728071 - RNA, 19 nt, Artificial Sequence
  Description of Artificial Sequence: Synthetic oligonucleotide
ucuuggcucucuaacauuu

SEQ ID NO: 2728072 - RNA, 19 nt, Artificial Sequence
  Description of Artificial Sequence: Synthetic oligonucleotide
uaacauugaugagcaauag

SEQ ID NO: 2728073 - RNA, 19 nt, Artificial Sequence
  Description of Artificial Sequence: Synthetic oligonucleotide
cuacucaagcaagagagug

SEQ ID NO: 2728074 - RNA, 19 nt, Artificial Sequence
  Description of Artificial Sequence: Synthetic oligonucleotide
uacucaagcaagagagugu

SEQ ID NO: 2728075 - RNA, 19 nt, Artificial Sequence
  Description of Artificial Sequence: Synthetic oligonucleotide
uagucuuaacauugaugag

SEQ ID NO: 2728076 - RNA, 19 nt, Artificial Sequence
  Description of Artificial Sequence: Synthetic oligonucleotide
ucuuguuaugggugcaugu

SEQ ID NO: 2728077 - RNA, 19 nt, Artificial Sequence
  Description of Artificial Sequence: Synthetic oligonucleotide
ugcaaauucuucccauggu

SEQ ID NO: 2728078 - RNA, 19 nt, Artificial Sequence
  Description of Artificial Sequence: Synthetic oligonucleotide
aagaguuaccacaaucuaa

SEQ ID NO: 2728079 - RNA, 19 nt, Artificial Sequence
  Description of Artificial Sequence: Synthetic oligonucleotide
auccaucccuugcaaauuc

SEQ ID NO: 2728080 - RNA, 19 nt, Artificial Sequence
  Description of Artificial Sequence: Synthetic oligonucleotide
ccacuuauauaauacucgg

SEQ ID NO: 2728081 - RNA, 19 nt, Artificial Sequence
  Description of Artificial Sequence: Synthetic oligonucleotide
acuagucuuaacauugaug

SEQ ID NO: 2728082 - RNA, 19 nt, Artificial Sequence
  Description of Artificial Sequence: Synthetic oligonucleotide
cuguucacuagucuuaaca

SEQ ID NO: 2728083 - RNA, 19 nt, Artificial Sequence
  Description of Artificial Sequence: Synthetic oligonucleotide
acucaagcaagagagugug

SEQ ID NO: 2728084 - RNA, 19 nt, Artificial Sequence
  Description of Artificial Sequence: Synthetic oligonucleotide
guaauugcaaauauauuua

SEQ ID NO: 2728085 - RNA, 19 nt, Artificial Sequence
  Description of Artificial Sequence: Synthetic oligonucleotide
guuaccacaaucuaagauu

SEQ ID NO: 2728086 - RNA, 19 nt, Artificial Sequence
  Description of Artificial Sequence: Synthetic oligonucleotide
ugagcaauagugugucuuc

SEQ ID NO: 2728087 - RNA, 19 nt, Artificial Sequence
  Description of Artificial Sequence: Synthetic oligonucleotide
uuugaaagggagccuuaaa

SEQ ID NO: 2728088 - RNA, 19 nt, Artificial Sequence
  Description of Artificial Sequence: Synthetic oligonucleotide
aaagguuguaggguccuca

SEQ ID NO: 2728089 - RNA, 19 nt, Artificial Sequence
  Description of Artificial Sequence: Synthetic oligonucleotide
uuggcucucuaacauuugu

SEQ ID NO: 2728090 - RNA, 19 nt, Artificial Sequence
  Description of Artificial Sequence: Synthetic oligonucleotide
ugaugagcaauaguguguc

SEQ ID NO: 2728091 - RNA, 19 nt, Artificial Sequence
  Description of Artificial Sequence: Synthetic oligonucleotide
aaaugucaagcaguagcca

SEQ ID NO: 2728092 - RNA, 19 nt, Artificial Sequence
  Description of Artificial Sequence: Synthetic oligonucleotide
aaucuaagauucuccgcuu

SEQ ID NO: 2728093 - RNA, 19 nt, Artificial Sequence
  Description of Artificial Sequence: Synthetic oligonucleotide
uagccaauggcaucuucug

SEQ ID NO: 2728094 - RNA, 19 nt, Artificial Sequence
  Description of Artificial Sequence: Synthetic oligonucleotide
ucacuagucuuaacauuga

SEQ ID NO: 2728095 - RNA, 19 nt, Artificial Sequence
  Description of Artificial Sequence: Synthetic oligonucleotide
ugaauccguuucuggaacc

SEQ ID NO: 2728096 - RNA, 19 nt, Artificial Sequence
  Description of Artificial Sequence: Synthetic oligonucleotide
auagucuggacaaucuucu

SEQ ID NO: 2728097 - RNA, 19 nt, Artificial Sequence
  Description of Artificial Sequence: Synthetic oligonucleotide
gucuuaacauugaugagca

SEQ ID NO: 2728098 - RNA, 19 nt, Artificial Sequence
  Description of Artificial Sequence: Synthetic oligonucleotide
gugacuucuucaaggaaag

SEQ ID NO: 2728099 - RNA, 19 nt, Artificial Sequence
  Description of Artificial Sequence: Synthetic oligonucleotide
auauaauacucggugacuu

SEQ ID NO: 2728100 - RNA, 19 nt, Artificial Sequence
  Description of Artificial Sequence: Synthetic oligonucleotide
ucggugacuucuucaagga

SEQ ID NO: 2728101 - RNA, 19 nt, Artificial Sequence
  Description of Artificial Sequence: Synthetic oligonucleotide
auccguuucuggaaccugc

SEQ ID NO: 2728102 - RNA, 19 nt, Artificial Sequence
  Description of Artificial Sequence: Synthetic oligonucleotide
cuuaaaauuuaaagguugu

SEQ ID NO: 2728103 - RNA, 19 nt, Artificial Sequence
  Description of Artificial Sequence: Synthetic oligonucleotide
auuaggaaaccuacucaag

SEQ ID NO: 2728104 - RNA, 19 nt, Artificial Sequence
  Description of Artificial Sequence: Synthetic oligonucleotide
aggaaaccuacucaagcaa

SEQ ID NO: 2728105 - RNA, 19 nt, Artificial Sequence
  Description of Artificial Sequence: Synthetic oligonucleotide
auuuguaccuuuacaagaa

SEQ ID NO: 2728106 - RNA, 19 nt, Artificial Sequence
  Description of Artificial Sequence: Synthetic oligonucleotide
aggagccucacccagccca

SEQ ID NO: 2728107 - RNA, 19 nt, Artificial Sequence
  Description of Artificial Sequence: Synthetic oligonucleotide
uuguuaugggugcauguuu

SEQ ID NO: 2728108 - RNA, 19 nt, Artificial Sequence
  Description of Artificial Sequence: Synthetic oligonucleotide
agcaauagugugucuucug

SEQ ID NO: 2728109 - RNA, 19 nt, Artificial Sequence
  Description of Artificial Sequence: Synthetic oligonucleotide
gugcucaaaugucaagcag

SEQ ID NO: 2728110 - RNA, 19 nt, Artificial Sequence
  Description of Artificial Sequence: Synthetic oligonucleotide
cucucuaacauuuguaccu

SEQ ID NO: 2728111 - RNA, 19 nt, Artificial Sequence
  Description of Artificial Sequence: Synthetic oligonucleotide
caaucuaagauucuccgcu

SEQ ID NO: 2728112 - RNA, 19 nt, Artificial Sequence
  Description of Artificial Sequence: Synthetic oligonucleotide
aguagccaauggcaucuuc

SEQ ID NO: 2728113 - RNA, 19 nt, Artificial Sequence
  Description of Artificial Sequence: Synthetic oligonucleotide
cuggaaccugcauccaucc

SEQ ID NO: 2728114 - RNA, 19 nt, Artificial Sequence
  Description of Artificial Sequence: Synthetic oligonucleotide
uacucggugacuucuucaa

SEQ ID NO: 2728115 - RNA, 19 nt, Artificial Sequence
  Description of Artificial Sequence: Synthetic oligonucleotide
uuaaagguuguaggguccu

SEQ ID NO: 2728116 - RNA, 19 nt, Artificial Sequence
  Description of Artificial Sequence: Synthetic oligonucleotide
acuguucacuagucuuaac

SEQ ID NO: 2728117 - RNA, 19 nt, Artificial Sequence
  Description of Artificial Sequence: Synthetic oligonucleotide
acuucuucaaggaaaguua

SEQ ID NO: 2728118 - RNA, 19 nt, Artificial Sequence
  Description of Artificial Sequence: Synthetic oligonucleotide
acauucguucccugugcuc

SEQ ID NO: 2728119 - RNA, 19 nt, Artificial Sequence
  Description of Artificial Sequence: Synthetic oligonucleotide
aaggagccucacccagccc

SEQ ID NO: 2728120 - RNA, 19 nt, Artificial Sequence
  Description of Artificial Sequence: Synthetic oligonucleotide
gaaaccuacucaagcaaga

SEQ ID NO: 2728121 - RNA, 19 nt, Artificial Sequence
  Description of Artificial Sequence: Synthetic oligonucleotide
ggcucucuaacauuuguac

SEQ ID NO: 2728122 - RNA, 19 nt, Artificial Sequence
  Description of Artificial Sequence: Synthetic oligonucleotide
gaaagggagccuuaaaauu

SEQ ID NO: 2728123 - RNA, 19 nt, Artificial Sequence
  Description of Artificial Sequence: Synthetic oligonucleotide
auugaacauucguucccug

SEQ ID NO: 2728124 - RNA, 19 nt, Artificial Sequence
  Description of Artificial Sequence: Synthetic oligonucleotide
cuugaauccguuucuggaa

SEQ ID NO: 2728125 - RNA, 19 nt, Artificial Sequence
  Description of Artificial Sequence: Synthetic oligonucleotide
uuuugaaagggagccuuaa

SEQ ID NO: 2728126 - RNA, 19 nt, Artificial Sequence
  Description of Artificial Sequence: Synthetic oligonucleotide
auacucggugacuucuuca

SEQ ID NO: 2728127 - RNA, 19 nt, Artificial Sequence
  Description of Artificial Sequence: Synthetic oligonucleotide
uucgauccucaucaccacu

SEQ ID NO: 2728128 - RNA, 19 nt, Artificial Sequence
  Description of Artificial Sequence: Synthetic oligonucleotide
caucccuugcaaauucuuc

SEQ ID NO: 2728129 - RNA, 19 nt, Artificial Sequence
  Description of Artificial Sequence: Synthetic oligonucleotide
guuccugcagucuauugaa

SEQ ID NO: 2728130 - RNA, 19 nt, Artificial Sequence
  Description of Artificial Sequence: Synthetic oligonucleotide
auggccaaggugcuuuuga

SEQ ID NO: 2728131 - RNA, 19 nt, Artificial Sequence
  Description of Artificial Sequence: Synthetic oligonucleotide
uuucgauccucaucaccac

SEQ ID NO: 2728132 - RNA, 19 nt, Artificial Sequence
  Description of Artificial Sequence: Synthetic oligonucleotide
agucuauugaacauucguu

SEQ ID NO: 2728133 - RNA, 19 nt, Artificial Sequence
  Description of Artificial Sequence: Synthetic oligonucleotide
aauccguuucuggaaccug

SEQ ID NO: 2728134 - RNA, 19 nt, Artificial Sequence
  Description of Artificial Sequence: Synthetic oligonucleotide
uccguuucuggaaccugca

SEQ ID NO: 2728135 - RNA, 19 nt, Artificial Sequence
  Description of Artificial Sequence: Synthetic oligonucleotide
gcaaauucuucccaugguc

SEQ ID NO: 2728136 - RNA, 19 nt, Artificial Sequence
  Description of Artificial Sequence: Synthetic oligonucleotide
acacccagaaaaggccacc

SEQ ID NO: 2728137 - RNA, 19 nt, Artificial Sequence
  Description of Artificial Sequence: Synthetic oligonucleotide
agugugucuucugaaacau

SEQ ID NO: 2728138 - RNA, 19 nt, Artificial Sequence
  Description of Artificial Sequence: Synthetic oligonucleotide
augggugcauguuucucca

SEQ ID NO: 2728139 - RNA, 19 nt, Artificial Sequence
  Description of Artificial Sequence: Synthetic oligonucleotide
gguuguaggguccucagaa

SEQ ID NO: 2728140 - RNA, 19 nt, Artificial Sequence
  Description of Artificial Sequence: Synthetic oligonucleotide
ucaucaccacuuauauaau

SEQ ID NO: 2728141 - RNA, 19 nt, Artificial Sequence
  Description of Artificial Sequence: Synthetic oligonucleotide
uuauuacaauuuacagauu

SEQ ID NO: 2728142 - RNA, 19 nt, Artificial Sequence
  Description of Artificial Sequence: Synthetic oligonucleotide
ggaaaccuacucaagcaag

SEQ ID NO: 2728143 - RNA, 19 nt, Artificial Sequence
  Description of Artificial Sequence: Synthetic oligonucleotide
guaggguccucagaauugc

SEQ ID NO: 2728144 - RNA, 19 nt, Artificial Sequence
  Description of Artificial Sequence: Synthetic oligonucleotide
cuuaacauugaugagcaau

SEQ ID NO: 2728145 - RNA, 19 nt, Artificial Sequence
  Description of Artificial Sequence: Synthetic oligonucleotide
acucggugacuucuucaag

SEQ ID NO: 2728146 - RNA, 19 nt, Artificial Sequence
  Description of Artificial Sequence: Synthetic oligonucleotide
ccauggucccuuucgaucc

SEQ ID NO: 2728147 - RNA, 19 nt, Artificial Sequence
  Description of Artificial Sequence: Synthetic oligonucleotide
acagauuaggaaaccuacu

SEQ ID NO: 2728148 - RNA, 19 nt, Artificial Sequence
  Description of Artificial Sequence: Synthetic oligonucleotide
guaccuuuacaagaaagua

SEQ ID NO: 2728149 - RNA, 19 nt, Artificial Sequence
  Description of Artificial Sequence: Synthetic oligonucleotide
uggcucucuaacauuugua

SEQ ID NO: 2728150 - RNA, 19 nt, Artificial Sequence
  Description of Artificial Sequence: Synthetic oligonucleotide
ucacaaccuuuccaguuuu

SEQ ID NO: 2728151 - RNA, 19 nt, Artificial Sequence
  Description of Artificial Sequence: Synthetic oligonucleotide
cauugaugagcaauagugu

SEQ ID NO: 2728152 - RNA, 19 nt, Artificial Sequence
  Description of Artificial Sequence: Synthetic oligonucleotide
cauucguucccugugcuca

SEQ ID NO: 2728153 - RNA, 19 nt, Artificial Sequence
  Description of Artificial Sequence: Synthetic oligonucleotide
ccuuuacaagaaaguaagg

SEQ ID NO: 2728154 - RNA, 19 nt, Artificial Sequence
  Description of Artificial Sequence: Synthetic oligonucleotide
augagcaauagugugucuu

SEQ ID NO: 2728155 - RNA, 19 nt, Artificial Sequence
  Description of Artificial Sequence: Synthetic oligonucleotide
cugaaacauguuccugcag

SEQ ID NO: 2728156 - RNA, 19 nt, Artificial Sequence
  Description of Artificial Sequence: Synthetic oligonucleotide
guucccugugcucaaaugu

SEQ ID NO: 2728157 - RNA, 19 nt, Artificial Sequence
  Description of Artificial Sequence: Synthetic oligonucleotide
gcauguuucuccagaaaag

SEQ ID NO: 2728158 - RNA, 19 nt, Artificial Sequence
  Description of Artificial Sequence: Synthetic oligonucleotide
uuugagcccucacaaccuu

SEQ ID NO: 2728159 - RNA, 19 nt, Artificial Sequence
  Description of Artificial Sequence: Synthetic oligonucleotide
auguuccugcagucuauug

SEQ ID NO: 2728160 - RNA, 19 nt, Artificial Sequence
  Description of Artificial Sequence: Synthetic oligonucleotide
uggaaccugcauccauccc

SEQ ID NO: 2728161 - RNA, 19 nt, Artificial Sequence
  Description of Artificial Sequence: Synthetic oligonucleotide
agccaauggcaucuucugu

SEQ ID NO: 2728162 - RNA, 19 nt, Artificial Sequence
  Description of Artificial Sequence: Synthetic oligonucleotide
gaguuaccacaaucuaaga

SEQ ID NO: 2728163 - RNA, 19 nt, Artificial Sequence
  Description of Artificial Sequence: Synthetic oligonucleotide
uuaugggugcauguuucuc

SEQ ID NO: 2728164 - RNA, 19 nt, Artificial Sequence
  Description of Artificial Sequence: Synthetic oligonucleotide
cuuggcucucuaacauuug

SEQ ID NO: 2728165 - RNA, 19 nt, Artificial Sequence
  Description of Artificial Sequence: Synthetic oligonucleotide
agcccucacaaccuuucca

SEQ ID NO: 2728166 - RNA, 19 nt, Artificial Sequence
  Description of Artificial Sequence: Synthetic oligonucleotide
uuccugcagucuauugaac

SEQ ID NO: 2728167 - RNA, 19 nt, Artificial Sequence
  Description of Artificial Sequence: Synthetic oligonucleotide
gcaauagugugucuucuga

SEQ ID NO: 2728168 - RNA, 19 nt, Artificial Sequence
  Description of Artificial Sequence: Synthetic oligonucleotide
ggugacuucuucaaggaaa

SEQ ID NO: 2728169 - RNA, 19 nt, Artificial Sequence
  Description of Artificial Sequence: Synthetic oligonucleotide
aagggagccuuaaaauuua

SEQ ID NO: 2728170 - RNA, 19 nt, Artificial Sequence
  Description of Artificial Sequence: Synthetic oligonucleotide
ucucuaacauuuguaccuu

SEQ ID NO: 2728171 - RNA, 19 nt, Artificial Sequence
  Description of Artificial Sequence: Synthetic oligonucleotide
gugcuuuugagcccucaca

SEQ ID NO: 2728172 - RNA, 19 nt, Artificial Sequence
  Description of Artificial Sequence: Synthetic oligonucleotide
ugcauccaucccuugcaaa

SEQ ID NO: 2728173 - RNA, 19 nt, Artificial Sequence
  Description of Artificial Sequence: Synthetic oligonucleotide
caauagugugucuucugaa

SEQ ID NO: 2728174 - RNA, 19 nt, Artificial Sequence
  Description of Artificial Sequence: Synthetic oligonucleotide
gacuucuucaaggaaaguu

SEQ ID NO: 2728175 - RNA, 19 nt, Artificial Sequence
  Description of Artificial Sequence: Synthetic oligonucleotide
uggcaucuucuguuucuug

SEQ ID NO: 2728176 - RNA, 19 nt, Artificial Sequence
  Description of Artificial Sequence: Synthetic oligonucleotide
agaauugcagaaagaguua

SEQ ID NO: 2728177 - RNA, 19 nt, Artificial Sequence
  Description of Artificial Sequence: Synthetic oligonucleotide
uucucuuguuaugggugca

SEQ ID NO: 2728178 - RNA, 19 nt, Artificial Sequence
  Description of Artificial Sequence: Synthetic oligonucleotide
cagucuauugaacauucgu

SEQ ID NO: 2728179 - RNA, 19 nt, Artificial Sequence
  Description of Artificial Sequence: Synthetic oligonucleotide
ucuuaacauugaugagcaa

SEQ ID NO: 2728180 - RNA, 19 nt, Artificial Sequence
  Description of Artificial Sequence: Synthetic oligonucleotide
cagcccauagucuggacaa

SEQ ID NO: 2728181 - RNA, 19 nt, Artificial Sequence
  Description of Artificial Sequence: Synthetic oligonucleotide
gcugcagacuguucacuag

SEQ ID NO: 2728182 - RNA, 19 nt, Artificial Sequence
  Description of Artificial Sequence: Synthetic oligonucleotide
gcaagagagugugugggcc

SEQ ID NO: 2728183 - RNA, 19 nt, Artificial Sequence
  Description of Artificial Sequence: Synthetic oligonucleotide
caagagagugugugggcca

SEQ ID NO: 2728184 - RNA, 19 nt, Artificial Sequence
  Description of Artificial Sequence: Synthetic oligonucleotide
gucccuuucgauccucauc

SEQ ID NO: 2728185 - RNA, 19 nt, Artificial Sequence
  Description of Artificial Sequence: Synthetic oligonucleotide
gagcccucacaaccuuucc

SEQ ID NO: 2728186 - RNA, 19 nt, Artificial Sequence
  Description of Artificial Sequence: Synthetic oligonucleotide
caucaccacuuauauaaua

SEQ ID NO: 2728187 - RNA, 19 nt, Artificial Sequence
  Description of Artificial Sequence: Synthetic oligonucleotide
cucuuguuaugggugcaug

SEQ ID NO: 2728188 - RNA, 19 nt, Artificial Sequence
  Description of Artificial Sequence: Synthetic oligonucleotide
cccugaaguuuugaaaggg

SEQ ID NO: 2728189 - RNA, 19 nt, Artificial Sequence
  Description of Artificial Sequence: Synthetic oligonucleotide
agugugugggccagggcug

SEQ ID NO: 2728190 - RNA, 19 nt, Artificial Sequence
  Description of Artificial Sequence: Synthetic oligonucleotide
agguuguaggguccucaga

SEQ ID NO: 2728191 - RNA, 19 nt, Artificial Sequence
  Description of Artificial Sequence: Synthetic oligonucleotide
ugggugcauguuucuccag

SEQ ID NO: 2728192 - RNA, 19 nt, Artificial Sequence
  Description of Artificial Sequence: Synthetic oligonucleotide
aaccugcauccaucccuug

SEQ ID NO: 2728193 - RNA, 19 nt, Artificial Sequence
  Description of Artificial Sequence: Synthetic oligonucleotide
ggaaccugcauccaucccu

SEQ ID NO: 2728194 - RNA, 19 nt, Artificial Sequence
  Description of Artificial Sequence: Synthetic oligonucleotide
ucuucccauggucccuuuc

SEQ ID NO: 2728195 - RNA, 19 nt, Artificial Sequence
  Description of Artificial Sequence: Synthetic oligonucleotide
ucucuuguuaugggugcau

SEQ ID NO: 2728196 - RNA, 19 nt, Artificial Sequence
  Description of Artificial Sequence: Synthetic oligonucleotide
agacuguucacuagucuua

SEQ ID NO: 2728197 - RNA, 19 nt, Artificial Sequence
  Description of Artificial Sequence: Synthetic oligonucleotide
ccagaaaaggagccucacc

SEQ ID NO: 2728198 - RNA, 19 nt, Artificial Sequence
  Description of Artificial Sequence: Synthetic oligonucleotide
gacuguucacuagucuuaa

SEQ ID NO: 2728199 - RNA, 19 nt, Artificial Sequence
  Description of Artificial Sequence: Synthetic oligonucleotide
cacuuauauaauacucggu

SEQ ID NO: 2728200 - RNA, 19 nt, Artificial Sequence
  Description of Artificial Sequence: Synthetic oligonucleotide
ucguucccugugcucaaau

SEQ ID NO: 2728201 - RNA, 19 nt, Artificial Sequence
  Description of Artificial Sequence: Synthetic oligonucleotide
uugagcccucacaaccuuu

SEQ ID NO: 2728202 - RNA, 19 nt, Artificial Sequence
  Description of Artificial Sequence: Synthetic oligonucleotide
guagccaauggcaucuucu

SEQ ID NO: 2728203 - RNA, 19 nt, Artificial Sequence
  Description of Artificial Sequence: Synthetic oligonucleotide
ugacuucuucaaggaaagu

SEQ ID NO: 2728204 - RNA, 19 nt, Artificial Sequence
  Description of Artificial Sequence: Synthetic oligonucleotide
guucacuagucuuaacauu

SEQ ID NO: 2728205 - RNA, 19 nt, Artificial Sequence
  Description of Artificial Sequence: Synthetic oligonucleotide
ggugcuuuugagcccucac

SEQ ID NO: 2728206 - RNA, 19 nt, Artificial Sequence
  Description of Artificial Sequence: Synthetic oligonucleotide
augucaagcaguagccaau

SEQ ID NO: 2728207 - RNA, 19 nt, Artificial Sequence
  Description of Artificial Sequence: Synthetic oligonucleotide
accauggccaaggugcuuu

SEQ ID NO: 2728208 - RNA, 19 nt, Artificial Sequence
  Description of Artificial Sequence: Synthetic oligonucleotide
gcuuuugagcccucacaac

SEQ ID NO: 2728209 - RNA, 19 nt, Artificial Sequence
  Description of Artificial Sequence: Synthetic oligonucleotide
guuaugggugcauguuucu

SEQ ID NO: 2728210 - RNA, 19 nt, Artificial Sequence
  Description of Artificial Sequence: Synthetic oligonucleotide
cuucuuggcucucuaacau

SEQ ID NO: 2728211 - RNA, 19 nt, Artificial Sequence
  Description of Artificial Sequence: Synthetic oligonucleotide
uaaagguuguaggguccuc

SEQ ID NO: 2728212 - RNA, 19 nt, Artificial Sequence
  Description of Artificial Sequence: Synthetic oligonucleotide
cagacuguucacuagucuu

SEQ ID NO: 2728213 - RNA, 19 nt, Artificial Sequence
  Description of Artificial Sequence: Synthetic oligonucleotide
ggugcauguuucuccagaa

SEQ ID NO: 2728214 - RNA, 19 nt, Artificial Sequence
  Description of Artificial Sequence: Synthetic oligonucleotide
ccugaaguuuugaaaggga

SEQ ID NO: 2728215 - RNA, 19 nt, Artificial Sequence
  Description of Artificial Sequence: Synthetic oligonucleotide
auucguucccugugcucaa

SEQ ID NO: 2728216 - RNA, 19 nt, Artificial Sequence
  Description of Artificial Sequence: Synthetic oligonucleotide
acaagaaaguaaggcgcuu

SEQ ID NO: 2728217 - RNA, 19 nt, Artificial Sequence
  Description of Artificial Sequence: Synthetic oligonucleotide
acccagaaaaggccaccau

SEQ ID NO: 2728218 - RNA, 19 nt, Artificial Sequence
  Description of Artificial Sequence: Synthetic oligonucleotide
gaauccguuucuggaaccu

SEQ ID NO: 2728219 - RNA, 19 nt, Artificial Sequence
  Description of Artificial Sequence: Synthetic oligonucleotide
agagagugugugggccagg

SEQ ID NO: 2728220 - RNA, 19 nt, Artificial Sequence
  Description of Artificial Sequence: Synthetic oligonucleotide
cccauggucccuuucgauc

SEQ ID NO: 2728221 - RNA, 19 nt, Artificial Sequence
  Description of Artificial Sequence: Synthetic oligonucleotide
cuggacaaucuucuuggcu

SEQ ID NO: 2728222 - RNA, 19 nt, Artificial Sequence
  Description of Artificial Sequence: Synthetic oligonucleotide
gaugagcaauagugugucu

SEQ ID NO: 2728223 - RNA, 19 nt, Artificial Sequence
  Description of Artificial Sequence: Synthetic oligonucleotide
gugcauguuucuccagaaa

SEQ ID NO: 2728224 - RNA, 19 nt, Artificial Sequence
  Description of Artificial Sequence: Synthetic oligonucleotide
acauguuccugcagucuau

SEQ ID NO: 2728225 - RNA, 19 nt, Artificial Sequence
  Description of Artificial Sequence: Synthetic oligonucleotide
auggcaucuucuguuucuu

SEQ ID NO: 2728226 - RNA, 19 nt, Artificial Sequence
  Description of Artificial Sequence: Synthetic oligonucleotide
guuguaggguccucagaau

SEQ ID NO: 2728227 - RNA, 19 nt, Artificial Sequence
  Description of Artificial Sequence: Synthetic oligonucleotide
auucuucccauggucccuu

SEQ ID NO: 2728228 - RNA, 19 nt, Artificial Sequence
  Description of Artificial Sequence: Synthetic oligonucleotide
cugcagacuguucacuagu

SEQ ID NO: 2728229 - RNA, 19 nt, Artificial Sequence
  Description of Artificial Sequence: Synthetic oligonucleotide
cucacaaccuuuccaguuu

SEQ ID NO: 2728230 - RNA, 19 nt, Artificial Sequence
  Description of Artificial Sequence: Synthetic oligonucleotide
gcucaaaugucaagcagua

SEQ ID NO: 2728231 - RNA, 19 nt, Artificial Sequence
  Description of Artificial Sequence: Synthetic oligonucleotide
auucuccgcuucaucugca

SEQ ID NO: 2728232 - RNA, 19 nt, Artificial Sequence
  Description of Artificial Sequence: Synthetic oligonucleotide
gcauccaucccuugcaaau

SEQ ID NO: 2728233 - RNA, 19 nt, Artificial Sequence
  Description of Artificial Sequence: Synthetic oligonucleotide
cauggccaaggugcuuuug

SEQ ID NO: 2728234 - RNA, 19 nt, Artificial Sequence
  Description of Artificial Sequence: Synthetic oligonucleotide
ggacaaucuucuuggcucu

SEQ ID NO: 2728235 - RNA, 19 nt, Artificial Sequence
  Description of Artificial Sequence: Synthetic oligonucleotide
cuuguuaugggugcauguu

SEQ ID NO: 2728236 - RNA, 19 nt, Artificial Sequence
  Description of Artificial Sequence: Synthetic oligonucleotide
cacccagaaaaggccacca

SEQ ID NO: 2728237 - RNA, 19 nt, Artificial Sequence
  Description of Artificial Sequence: Synthetic oligonucleotide
gccaauggcaucuucuguu

SEQ ID NO: 2728238 - RNA, 19 nt, Artificial Sequence
  Description of Artificial Sequence: Synthetic oligonucleotide
gcaguagccaauggcaucu

SEQ ID NO: 2728239 - RNA, 19 nt, Artificial Sequence
  Description of Artificial Sequence: Synthetic oligonucleotide
ggcugcagacuguucacua

SEQ ID NO: 2728240 - RNA, 19 nt, Artificial Sequence
  Description of Artificial Sequence: Synthetic oligonucleotide
aggugcuuuugagcccuca

SEQ ID NO: 2728241 - RNA, 19 nt, Artificial Sequence
  Description of Artificial Sequence: Synthetic oligonucleotide
cugcauccaucccuugcaa

SEQ ID NO: 2728242 - RNA, 19 nt, Artificial Sequence
  Description of Artificial Sequence: Synthetic oligonucleotide
agggagccuuaaaauuuaa

SEQ ID NO: 2728243 - RNA, 19 nt, Artificial Sequence
  Description of Artificial Sequence: Synthetic oligonucleotide
cuaagauucuccgcuucau

SEQ ID NO: 2728244 - RNA, 19 nt, Artificial Sequence
  Description of Artificial Sequence: Synthetic oligonucleotide
cguucccugugcucaaaug

SEQ ID NO: 2728245 - RNA, 19 nt, Artificial Sequence
  Description of Artificial Sequence: Synthetic oligonucleotide
uucuucccauggucccuuu

SEQ ID NO: 2728246 - RNA, 19 nt, Artificial Sequence
  Description of Artificial Sequence: Synthetic oligonucleotide
gccuuaaaauuuaaagguu

SEQ ID NO: 2728247 - RNA, 19 nt, Artificial Sequence
  Description of Artificial Sequence: Synthetic oligonucleotide
gcccauagucuggacaauc

SEQ ID NO: 2728248 - RNA, 19 nt, Artificial Sequence
  Description of Artificial Sequence: Synthetic oligonucleotide
gggagccuuaaaauuuaaa

SEQ ID NO: 2728249 - RNA, 19 nt, Artificial Sequence
  Description of Artificial Sequence: Synthetic oligonucleotide
cucaagcaagagagugugu

SEQ ID NO: 2728250 - RNA, 19 nt, Artificial Sequence
  Description of Artificial Sequence: Synthetic oligonucleotide
agcccauagucuggacaau

SEQ ID NO: 2728251 - RNA, 19 nt, Artificial Sequence
  Description of Artificial Sequence: Synthetic oligonucleotide
cucuaacauuuguaccuuu

SEQ ID NO: 2728252 - RNA, 19 nt, Artificial Sequence
  Description of Artificial Sequence: Synthetic oligonucleotide
cccauagucuggacaaucu

SEQ ID NO: 2728253 - RNA, 19 nt, Artificial Sequence
  Description of Artificial Sequence: Synthetic oligonucleotide
ccugcagucuauugaacau

SEQ ID NO: 2728254 - RNA, 19 nt, Artificial Sequence
  Description of Artificial Sequence: Synthetic oligonucleotide
cugcagucuauugaacauu

SEQ ID NO: 2728255 - RNA, 19 nt, Artificial Sequence
  Description of Artificial Sequence: Synthetic oligonucleotide
cccuuucgauccucaucac

SEQ ID NO: 2728256 - RNA, 19 nt, Artificial Sequence
  Description of Artificial Sequence: Synthetic oligonucleotide
cauggucccuuucgauccu

SEQ ID NO: 2728257 - RNA, 19 nt, Artificial Sequence
  Description of Artificial Sequence: Synthetic oligonucleotide
ccuacucaagcaagagagu

SEQ ID NO: 2728258 - RNA, 19 nt, Artificial Sequence
  Description of Artificial Sequence: Synthetic oligonucleotide
ccucacaaccuuuccaguu

SEQ ID NO: 2728259 - RNA, 19 nt, Artificial Sequence
  Description of Artificial Sequence: Synthetic oligonucleotide
cauguuccugcagucuauu

SEQ ID NO: 2728260 - RNA, 19 nt, Artificial Sequence
  Description of Artificial Sequence: Synthetic oligonucleotide
ggucccuuucgauccucau

SEQ ID NO: 2728261 - RNA, 19 nt, Artificial Sequence
  Description of Artificial Sequence: Synthetic oligonucleotide
gagccucacccagcccaua

SEQ ID NO: 2728262 - RNA, 19 nt, Artificial Sequence
  Description of Artificial Sequence: Synthetic oligonucleotide
cccucacaaccuuuccagu

SEQ ID NO: 2728263 - RNA, 19 nt, Artificial Sequence
  Description of Artificial Sequence: Synthetic oligonucleotide
cgauccucaucaccacuua

SEQ ID NO: 2728264 - RNA, 19 nt, Artificial Sequence
  Description of Artificial Sequence: Synthetic oligonucleotide
ggagccucacccagcccau

SEQ ID NO: 2728265 - RNA, 19 nt, Artificial Sequence
  Description of Artificial Sequence: Synthetic oligonucleotide
ccguuucuggaaccugcau

SEQ ID NO: 2728266 - RNA, 19 nt, Artificial Sequence
  Description of Artificial Sequence: Synthetic oligonucleotide
caguagccaauggcaucuu

SEQ ID NO: 2728267 - RNA, 19 nt, Artificial Sequence
  Description of Artificial Sequence: Synthetic oligonucleotide
caccauggccaaggugcuu

SEQ ID NO: 2728268 - RNA, 19 nt, Artificial Sequence
  Description of Artificial Sequence: Synthetic oligonucleotide
ggccagggcugcagacugu

SEQ ID NO: 2728269 - RNA, 19 nt, Artificial Sequence
  Description of Artificial Sequence: Synthetic oligonucleotide
ccauggccaaggugcuuuu

SEQ ID NO: 2728270 - RNA, 19 nt, Artificial Sequence
  Description of Artificial Sequence: Synthetic oligonucleotide
uaaauaaucaucaaacagg

SEQ ID NO: 2728271 - RNA, 19 nt, Artificial Sequence
  Description of Artificial Sequence: Synthetic oligonucleotide
uuaguagaaaggcacaggg

SEQ ID NO: 2728272 - RNA, 19 nt, Artificial Sequence
  Description of Artificial Sequence: Synthetic oligonucleotide
auaaucaucaaacaggggu

SEQ ID NO: 2728273 - RNA, 19 nt, Artificial Sequence
  Description of Artificial Sequence: Synthetic oligonucleotide
uuuacauucaaggagagga

SEQ ID NO: 2728274 - RNA, 19 nt, Artificial Sequence
  Description of Artificial Sequence: Synthetic oligonucleotide
aagagaauaaauaaucauc

SEQ ID NO: 2728275 - RNA, 19 nt, Artificial Sequence
  Description of Artificial Sequence: Synthetic oligonucleotide
acaaauuucaccuuggaau

SEQ ID NO: 2728276 - RNA, 19 nt, Artificial Sequence
  Description of Artificial Sequence: Synthetic oligonucleotide
aaagagaauaaauaaucau

SEQ ID NO: 2728277 - RNA, 19 nt, Artificial Sequence
  Description of Artificial Sequence: Synthetic oligonucleotide
cuuggaauuggucacauag

SEQ ID NO: 2728278 - RNA, 19 nt, Artificial Sequence
  Description of Artificial Sequence: Synthetic oligonucleotide
auuggaggaauccaccacc

SEQ ID NO: 2728279 - RNA, 19 nt, Artificial Sequence
  Description of Artificial Sequence: Synthetic oligonucleotide
aguuggguagaguaggccc

SEQ ID NO: 2728280 - RNA, 19 nt, Artificial Sequence
  Description of Artificial Sequence: Synthetic oligonucleotide
aaggauaauucuccuuggc

SEQ ID NO: 2728281 - RNA, 19 nt, Artificial Sequence
  Description of Artificial Sequence: Synthetic oligonucleotide
uguacaaaggauaauucuc

SEQ ID NO: 2728282 - RNA, 19 nt, Artificial Sequence
  Description of Artificial Sequence: Synthetic oligonucleotide
uggaauuggucacauagcc

SEQ ID NO: 2728283 - RNA, 19 nt, Artificial Sequence
  Description of Artificial Sequence: Synthetic oligonucleotide
aaaggauaauucuccuugg

SEQ ID NO: 2728284 - RNA, 19 nt, Artificial Sequence
  Description of Artificial Sequence: Synthetic oligonucleotide
ucaaggagaggaaagagaa

SEQ ID NO: 2728285 - RNA, 19 nt, Artificial Sequence
  Description of Artificial Sequence: Synthetic oligonucleotide
accaugacaaauuucaccu

SEQ ID NO: 2728286 - RNA, 19 nt, Artificial Sequence
  Description of Artificial Sequence: Synthetic oligonucleotide
uucuccuuggcgaucaccg

SEQ ID NO: 2728287 - RNA, 19 nt, Artificial Sequence
  Description of Artificial Sequence: Synthetic oligonucleotide
agcgcuuuaguagaaaggc

SEQ ID NO: 2728288 - RNA, 19 nt, Artificial Sequence
  Description of Artificial Sequence: Synthetic oligonucleotide
cagaccuggaucaucaucg

SEQ ID NO: 2728289 - RNA, 19 nt, Artificial Sequence
  Description of Artificial Sequence: Synthetic oligonucleotide
ucuaccacauccagggacg

SEQ ID NO: 2728290 - RNA, 19 nt, Artificial Sequence
  Description of Artificial Sequence: Synthetic oligonucleotide
aauacaggcuucucucuuc

SEQ ID NO: 2728291 - RNA, 19 nt, Artificial Sequence
  Description of Artificial Sequence: Synthetic oligonucleotide
uuucccauggcagagaucu

SEQ ID NO: 2728292 - RNA, 19 nt, Artificial Sequence
  Description of Artificial Sequence: Synthetic oligonucleotide
acgguuuacauucaaggag

SEQ ID NO: 2728293 - RNA, 19 nt, Artificial Sequence
  Description of Artificial Sequence: Synthetic oligonucleotide
auguaguggaacuugagcu

SEQ ID NO: 2728294 - RNA, 19 nt, Artificial Sequence
  Description of Artificial Sequence: Synthetic oligonucleotide
aggauaauucuccuuggcg

SEQ ID NO: 2728295 - RNA, 19 nt, Artificial Sequence
  Description of Artificial Sequence: Synthetic oligonucleotide
uuaccauguucucaaaggc

SEQ ID NO: 2728296 - RNA, 19 nt, Artificial Sequence
  Description of Artificial Sequence: Synthetic oligonucleotide
cauacugcggaucucauug

SEQ ID NO: 2728297 - RNA, 19 nt, Artificial Sequence
  Description of Artificial Sequence: Synthetic oligonucleotide
uuacacaucacaucugugu

SEQ ID NO: 2728298 - RNA, 19 nt, Artificial Sequence
  Description of Artificial Sequence: Synthetic oligonucleotide
uguguaggaguuaugcagc

SEQ ID NO: 2728299 - RNA, 19 nt, Artificial Sequence
  Description of Artificial Sequence: Synthetic oligonucleotide
uguauuggaggaauccacc

SEQ ID NO: 2728300 - RNA, 19 nt, Artificial Sequence
  Description of Artificial Sequence: Synthetic oligonucleotide
aucuaccacauccagggac

SEQ ID NO: 2728301 - RNA, 19 nt, Artificial Sequence
  Description of Artificial Sequence: Synthetic oligonucleotide
cuguguaggaguuaugcag

SEQ ID NO: 2728302 - RNA, 19 nt, Artificial Sequence
  Description of Artificial Sequence: Synthetic oligonucleotide
caaacaggggugaauacag

SEQ ID NO: 2728303 - RNA, 19 nt, Artificial Sequence
  Description of Artificial Sequence: Synthetic oligonucleotide
uuuaguagaaaggcacagg

SEQ ID NO: 2728304 - RNA, 19 nt, Artificial Sequence
  Description of Artificial Sequence: Synthetic oligonucleotide
uuuucucaucgugugagcg

SEQ ID NO: 2728305 - RNA, 19 nt, Artificial Sequence
  Description of Artificial Sequence: Synthetic oligonucleotide
gaauccaccaccaugacaa

SEQ ID NO: 2728306 - RNA, 19 nt, Artificial Sequence
  Description of Artificial Sequence: Synthetic oligonucleotide
uuggcgaucaccgcgaugc

SEQ ID NO: 2728307 - RNA, 19 nt, Artificial Sequence
  Description of Artificial Sequence: Synthetic oligonucleotide
aucucauugucucgaaggg

SEQ ID NO: 2728308 - RNA, 19 nt, Artificial Sequence
  Description of Artificial Sequence: Synthetic oligonucleotide
uagaagggguuacacauca

SEQ ID NO: 2728309 - RNA, 19 nt, Artificial Sequence
  Description of Artificial Sequence: Synthetic oligonucleotide
guagaguaggcccagguac

SEQ ID NO: 2728310 - RNA, 19 nt, Artificial Sequence
  Description of Artificial Sequence: Synthetic oligonucleotide
cauguaguggaacuugagc

SEQ ID NO: 2728311 - RNA, 19 nt, Artificial Sequence
  Description of Artificial Sequence: Synthetic oligonucleotide
ugagcucauucucuguggg

SEQ ID NO: 2728312 - RNA, 19 nt, Artificial Sequence
  Description of Artificial Sequence: Synthetic oligonucleotide
auagccguauaccuuguag

SEQ ID NO: 2728313 - RNA, 19 nt, Artificial Sequence
  Description of Artificial Sequence: Synthetic oligonucleotide
gaaguuaccauguucucaa

SEQ ID NO: 2728314 - RNA, 19 nt, Artificial Sequence
  Description of Artificial Sequence: Synthetic oligonucleotide
ucucccggguuguagaagg

SEQ ID NO: 2728315 - RNA, 19 nt, Artificial Sequence
  Description of Artificial Sequence: Synthetic oligonucleotide
ugagcgcuuuaguagaaag

SEQ ID NO: 2728316 - RNA, 19 nt, Artificial Sequence
  Description of Artificial Sequence: Synthetic oligonucleotide
caugacaaauuucaccuug

SEQ ID NO: 2728317 - RNA, 19 nt, Artificial Sequence
  Description of Artificial Sequence: Synthetic oligonucleotide
gaugcacaccgccauauug

SEQ ID NO: 2728318 - RNA, 19 nt, Artificial Sequence
  Description of Artificial Sequence: Synthetic oligonucleotide
uuccaggugacuaggggag

SEQ ID NO: 2728319 - RNA, 19 nt, Artificial Sequence
  Description of Artificial Sequence: Synthetic oligonucleotide
uuggaauuggucacauagc

SEQ ID NO: 2728320 - RNA, 19 nt, Artificial Sequence
  Description of Artificial Sequence: Synthetic oligonucleotide
gaauuggucacauagccgu

SEQ ID NO: 2728321 - RNA, 19 nt, Artificial Sequence
  Description of Artificial Sequence: Synthetic oligonucleotide
uuaugcagcuuccggaaca

SEQ ID NO: 2728322 - RNA, 19 nt, Artificial Sequence
  Description of Artificial Sequence: Synthetic oligonucleotide
cacaccgccauauuggcag

SEQ ID NO: 2728323 - RNA, 19 nt, Artificial Sequence
  Description of Artificial Sequence: Synthetic oligonucleotide
guacaaaggauaauucucc

SEQ ID NO: 2728324 - RNA, 19 nt, Artificial Sequence
  Description of Artificial Sequence: Synthetic oligonucleotide
aguuaccauguucucaaag

SEQ ID NO: 2728325 - RNA, 19 nt, Artificial Sequence
  Description of Artificial Sequence: Synthetic oligonucleotide
uucggauguacaaaggaua

SEQ ID NO: 2728326 - RNA, 19 nt, Artificial Sequence
  Description of Artificial Sequence: Synthetic oligonucleotide
aauaaucaucaaacagggg

SEQ ID NO: 2728327 - RNA, 19 nt, Artificial Sequence
  Description of Artificial Sequence: Synthetic oligonucleotide
uuccggaacauacugcgga

SEQ ID NO: 2728328 - RNA, 19 nt, Artificial Sequence
  Description of Artificial Sequence: Synthetic oligonucleotide
agccguauaccuuguaguc

SEQ ID NO: 2728329 - RNA, 19 nt, Artificial Sequence
  Description of Artificial Sequence: Synthetic oligonucleotide
uugagcucauucucugugg

SEQ ID NO: 2728330 - RNA, 19 nt, Artificial Sequence
  Description of Artificial Sequence: Synthetic oligonucleotide
ggaaagagaauaaauaauc

SEQ ID NO: 2728331 - RNA, 19 nt, Artificial Sequence
  Description of Artificial Sequence: Synthetic oligonucleotide
uggaucaucaucgaaguua

SEQ ID NO: 2728332 - RNA, 19 nt, Artificial Sequence
  Description of Artificial Sequence: Synthetic oligonucleotide
ucucaucuaccacauccag

SEQ ID NO: 2728333 - RNA, 19 nt, Artificial Sequence
  Description of Artificial Sequence: Synthetic oligonucleotide
accaccaugacaaauuuca

SEQ ID NO: 2728334 - RNA, 19 nt, Artificial Sequence
  Description of Artificial Sequence: Synthetic oligonucleotide
uauaccuuguaguccucag

SEQ ID NO: 2728335 - RNA, 19 nt, Artificial Sequence
  Description of Artificial Sequence: Synthetic oligonucleotide
cacauagccguauaccuug

SEQ ID NO: 2728336 - RNA, 19 nt, Artificial Sequence
  Description of Artificial Sequence: Synthetic oligonucleotide
uaguagaaaggcacagggc

SEQ ID NO: 2728337 - RNA, 19 nt, Artificial Sequence
  Description of Artificial Sequence: Synthetic oligonucleotide
ucggauguacaaaggauaa

SEQ ID NO: 2728338 - RNA, 19 nt, Artificial Sequence
  Description of Artificial Sequence: Synthetic oligonucleotide
ucaaacaggggugaauaca

SEQ ID NO: 2728339 - RNA, 19 nt, Artificial Sequence
  Description of Artificial Sequence: Synthetic oligonucleotide
ucucgaagggcuguauugg

SEQ ID NO: 2728340 - RNA, 19 nt, Artificial Sequence
  Description of Artificial Sequence: Synthetic oligonucleotide
aucgaaguuaccauguucu

SEQ ID NO: 2728341 - RNA, 19 nt, Artificial Sequence
  Description of Artificial Sequence: Synthetic oligonucleotide
agugcuuuucccauggcag

SEQ ID NO: 2728342 - RNA, 19 nt, Artificial Sequence
  Description of Artificial Sequence: Synthetic oligonucleotide
gaagggguuacacaucaca

SEQ ID NO: 2728343 - RNA, 19 nt, Artificial Sequence
  Description of Artificial Sequence: Synthetic oligonucleotide
aguaggcccagguacagcu

SEQ ID NO: 2728344 - RNA, 19 nt, Artificial Sequence
  Description of Artificial Sequence: Synthetic oligonucleotide
guaggaguuaugcagcuuc

SEQ ID NO: 2728345 - RNA, 19 nt, Artificial Sequence
  Description of Artificial Sequence: Synthetic oligonucleotide
guaguccucaguuggguag

SEQ ID NO: 2728346 - RNA, 19 nt, Artificial Sequence
  Description of Artificial Sequence: Synthetic oligonucleotide
ugcaccauguaguggaacu

SEQ ID NO: 2728347 - RNA, 19 nt, Artificial Sequence
  Description of Artificial Sequence: Synthetic oligonucleotide
accagugcuuuucccaugg

SEQ ID NO: 2728348 - RNA, 19 nt, Artificial Sequence
  Description of Artificial Sequence: Synthetic oligonucleotide
gugacuaggggagaggucc

SEQ ID NO: 2728349 - RNA, 19 nt, Artificial Sequence
  Description of Artificial Sequence: Synthetic oligonucleotide
ucuguguaggaguuaugca

SEQ ID NO: 2728350 - RNA, 19 nt, Artificial Sequence
  Description of Artificial Sequence: Synthetic oligonucleotide
uacacaucacaucugugua

SEQ ID NO: 2728351 - RNA, 19 nt, Artificial Sequence
  Description of Artificial Sequence: Synthetic oligonucleotide
cucaguuggguagaguagg

SEQ ID NO: 2728352 - RNA, 19 nt, Artificial Sequence
  Description of Artificial Sequence: Synthetic oligonucleotide
cugcccacgguuuacauuc

SEQ ID NO: 2728353 - RNA, 19 nt, Artificial Sequence
  Description of Artificial Sequence: Synthetic oligonucleotide
acuggaugcggucucccgg

SEQ ID NO: 2728354 - RNA, 19 nt, Artificial Sequence
  Description of Artificial Sequence: Synthetic oligonucleotide
uacaaaggauaauucuccu

SEQ ID NO: 2728355 - RNA, 19 nt, Artificial Sequence
  Description of Artificial Sequence: Synthetic oligonucleotide
uuucucaucgugugagcgc

SEQ ID NO: 2728356 - RNA, 19 nt, Artificial Sequence
  Description of Artificial Sequence: Synthetic oligonucleotide
auucaaggagaggaaagag

SEQ ID NO: 2728357 - RNA, 19 nt, Artificial Sequence
  Description of Artificial Sequence: Synthetic oligonucleotide
uccucaguuggguagagua

SEQ ID NO: 2728358 - RNA, 19 nt, Artificial Sequence
  Description of Artificial Sequence: Synthetic oligonucleotide
ugugggagugcuucggaug

SEQ ID NO: 2728359 - RNA, 19 nt, Artificial Sequence
  Description of Artificial Sequence: Synthetic oligonucleotide
ugacaaauuucaccuugga

SEQ ID NO: 2728360 - RNA, 19 nt, Artificial Sequence
  Description of Artificial Sequence: Synthetic oligonucleotide
cuguauuggaggaauccac

SEQ ID NO: 2728361 - RNA, 19 nt, Artificial Sequence
  Description of Artificial Sequence: Synthetic oligonucleotide
ugcuucggauguacaaagg

SEQ ID NO: 2728362 - RNA, 19 nt, Artificial Sequence
  Description of Artificial Sequence: Synthetic oligonucleotide
uaccuuguaguccucaguu

SEQ ID NO: 2728363 - RNA, 19 nt, Artificial Sequence
  Description of Artificial Sequence: Synthetic oligonucleotide
cacaucacaucuguguagg

SEQ ID NO: 2728364 - RNA, 19 nt, Artificial Sequence
  Description of Artificial Sequence: Synthetic oligonucleotide
cuugagcucauucucugug

SEQ ID NO: 2728365 - RNA, 19 nt, Artificial Sequence
  Description of Artificial Sequence: Synthetic oligonucleotide
acacaucacaucuguguag

SEQ ID NO: 2728366 - RNA, 19 nt, Artificial Sequence
  Description of Artificial Sequence: Synthetic oligonucleotide
gaggaauccaccaccauga

SEQ ID NO: 2728367 - RNA, 19 nt, Artificial Sequence
  Description of Artificial Sequence: Synthetic oligonucleotide
ggauaauucuccuuggcga

SEQ ID NO: 2728368 - RNA, 19 nt, Artificial Sequence
  Description of Artificial Sequence: Synthetic oligonucleotide
uagccguauaccuuguagu

SEQ ID NO: 2728369 - RNA, 19 nt, Artificial Sequence
  Description of Artificial Sequence: Synthetic oligonucleotide
agagaucuucucaucuacc

SEQ ID NO: 2728370 - RNA, 19 nt, Artificial Sequence
  Description of Artificial Sequence: Synthetic oligonucleotide
agcucauucucugugggag

SEQ ID NO: 2728371 - RNA, 19 nt, Artificial Sequence
  Description of Artificial Sequence: Synthetic oligonucleotide
gaguuaugcagcuuccgga

SEQ ID NO: 2728372 - RNA, 19 nt, Artificial Sequence
  Description of Artificial Sequence: Synthetic oligonucleotide
accuggaucaucaucgaag

SEQ ID NO: 2728373 - RNA, 19 nt, Artificial Sequence
  Description of Artificial Sequence: Synthetic oligonucleotide
gcuuccggaacauacugcg

SEQ ID NO: 2728374 - RNA, 19 nt, Artificial Sequence
  Description of Artificial Sequence: Synthetic oligonucleotide
aguuaugcagcuuccggaa

SEQ ID NO: 2728375 - RNA, 19 nt, Artificial Sequence
  Description of Artificial Sequence: Synthetic oligonucleotide
uagaguaggcccagguaca

SEQ ID NO: 2728376 - RNA, 19 nt, Artificial Sequence
  Description of Artificial Sequence: Synthetic oligonucleotide
ggaguuaugcagcuuccgg

SEQ ID NO: 2728377 - RNA, 19 nt, Artificial Sequence
  Description of Artificial Sequence: Synthetic oligonucleotide
uuggaggaauccaccacca

SEQ ID NO: 2728378 - RNA, 19 nt, Artificial Sequence
  Description of Artificial Sequence: Synthetic oligonucleotide
gaugcggucucccggguug

SEQ ID NO: 2728379 - RNA, 19 nt, Artificial Sequence
  Description of Artificial Sequence: Synthetic oligonucleotide
gagcgcuuuaguagaaagg

SEQ ID NO: 2728380 - RNA, 19 nt, Artificial Sequence
  Description of Artificial Sequence: Synthetic oligonucleotide
uccaccaccaugacaaauu

SEQ ID NO: 2728381 - RNA, 19 nt, Artificial Sequence
  Description of Artificial Sequence: Synthetic oligonucleotide
uaggcccagguacagcucc

SEQ ID NO: 2728382 - RNA, 19 nt, Artificial Sequence
  Description of Artificial Sequence: Synthetic oligonucleotide
gucucgaagggcuguauug

SEQ ID NO: 2728383 - RNA, 19 nt, Artificial Sequence
  Description of Artificial Sequence: Synthetic oligonucleotide
uaggaguuaugcagcuucc

SEQ ID NO: 2728384 - RNA, 19 nt, Artificial Sequence
  Description of Artificial Sequence: Synthetic oligonucleotide
gugcuucggauguacaaag

SEQ ID NO: 2728385 - RNA, 19 nt, Artificial Sequence
  Description of Artificial Sequence: Synthetic oligonucleotide
augacaaauuucaccuugg

SEQ ID NO: 2728386 - RNA, 19 nt, Artificial Sequence
  Description of Artificial Sequence: Synthetic oligonucleotide
cagagaucuucucaucuac

SEQ ID NO: 2728387 - RNA, 19 nt, Artificial Sequence
  Description of Artificial Sequence: Synthetic oligonucleotide
augcacaccgccauauugg

SEQ ID NO: 2728388 - RNA, 19 nt, Artificial Sequence
  Description of Artificial Sequence: Synthetic oligonucleotide
auggcagagaucuucucau

SEQ ID NO: 2728389 - RNA, 19 nt, Artificial Sequence
  Description of Artificial Sequence: Synthetic oligonucleotide
ccuuguaguccucaguugg

SEQ ID NO: 2728390 - RNA, 19 nt, Artificial Sequence
  Description of Artificial Sequence: Synthetic oligonucleotide
cuccuuggcgaucaccgcg

SEQ ID NO: 2728391 - RNA, 19 nt, Artificial Sequence
  Description of Artificial Sequence: Synthetic oligonucleotide
guuuacauucaaggagagg

SEQ ID NO: 2728392 - RNA, 19 nt, Artificial Sequence
  Description of Artificial Sequence: Synthetic oligonucleotide
ucucauugucucgaagggc

SEQ ID NO: 2728393 - RNA, 19 nt, Artificial Sequence
  Description of Artificial Sequence: Synthetic oligonucleotide
ugcggaucucauugucucg

SEQ ID NO: 2728394 - RNA, 19 nt, Artificial Sequence
  Description of Artificial Sequence: Synthetic oligonucleotide
guauuggaggaauccacca

SEQ ID NO: 2728395 - RNA, 19 nt, Artificial Sequence
  Description of Artificial Sequence: Synthetic oligonucleotide
uucucaucgugugagcgcu

SEQ ID NO: 2728396 - RNA, 19 nt, Artificial Sequence
  Description of Artificial Sequence: Synthetic oligonucleotide
uuucaccuuggaauugguc

SEQ ID NO: 2728397 - RNA, 19 nt, Artificial Sequence
  Description of Artificial Sequence: Synthetic oligonucleotide
aagggguuacacaucacau

SEQ ID NO: 2728398 - RNA, 19 nt, Artificial Sequence
  Description of Artificial Sequence: Synthetic oligonucleotide
uagaaaggcacagggcaca

SEQ ID NO: 2728399 - RNA, 19 nt, Artificial Sequence
  Description of Artificial Sequence: Synthetic oligonucleotide
acaaaggauaauucuccuu

SEQ ID NO: 2728400 - RNA, 19 nt, Artificial Sequence
  Description of Artificial Sequence: Synthetic oligonucleotide
ucacauagccguauaccuu

SEQ ID NO: 2728401 - RNA, 19 nt, Artificial Sequence
  Description of Artificial Sequence: Synthetic oligonucleotide
uggucacauagccguauac

SEQ ID NO: 2728402 - RNA, 19 nt, Artificial Sequence
  Description of Artificial Sequence: Synthetic oligonucleotide
aucaucgaaguuaccaugu

SEQ ID NO: 2728403 - RNA, 19 nt, Artificial Sequence
  Description of Artificial Sequence: Synthetic oligonucleotide
gacuggaugcggucucccg

SEQ ID NO: 2728404 - RNA, 19 nt, Artificial Sequence
  Description of Artificial Sequence: Synthetic oligonucleotide
auaccuuguaguccucagu

SEQ ID NO: 2728405 - RNA, 19 nt, Artificial Sequence
  Description of Artificial Sequence: Synthetic oligonucleotide
ggacgugugcaccauguag

SEQ ID NO: 2728406 - RNA, 19 nt, Artificial Sequence
  Description of Artificial Sequence: Synthetic oligonucleotide
cacgguuuacauucaagga

SEQ ID NO: 2728407 - RNA, 19 nt, Artificial Sequence
  Description of Artificial Sequence: Synthetic oligonucleotide
ucgugugagcgcuuuagua

SEQ ID NO: 2728408 - RNA, 19 nt, Artificial Sequence
  Description of Artificial Sequence: Synthetic oligonucleotide
cuuccggaacauacugcgg

SEQ ID NO: 2728409 - RNA, 19 nt, Artificial Sequence
  Description of Artificial Sequence: Synthetic oligonucleotide
ggaauuggucacauagccg

SEQ ID NO: 2728410 - RNA, 19 nt, Artificial Sequence
  Description of Artificial Sequence: Synthetic oligonucleotide
agcuuccggaacauacugc

SEQ ID NO: 2728411 - RNA, 19 nt, Artificial Sequence
  Description of Artificial Sequence: Synthetic oligonucleotide
gucacauagccguauaccu

SEQ ID NO: 2728412 - RNA, 19 nt, Artificial Sequence
  Description of Artificial Sequence: Synthetic oligonucleotide
accacauccagggacgugu

SEQ ID NO: 2728413 - RNA, 19 nt, Artificial Sequence
  Description of Artificial Sequence: Synthetic oligonucleotide
gauaauucuccuuggcgau

SEQ ID NO: 2728414 - RNA, 19 nt, Artificial Sequence
  Description of Artificial Sequence: Synthetic oligonucleotide
acuaggggagagguccagc

SEQ ID NO: 2728415 - RNA, 19 nt, Artificial Sequence
  Description of Artificial Sequence: Synthetic oligonucleotide
cugcggaucucauugucuc

SEQ ID NO: 2728416 - RNA, 19 nt, Artificial Sequence
  Description of Artificial Sequence: Synthetic oligonucleotide
acaucuguguaggaguuau

SEQ ID NO: 2728417 - RNA, 19 nt, Artificial Sequence
  Description of Artificial Sequence: Synthetic oligonucleotide
gugugagcgcuuuaguaga

SEQ ID NO: 2728418 - RNA, 19 nt, Artificial Sequence
  Description of Artificial Sequence: Synthetic oligonucleotide
agaaaggcacagggcacac

SEQ ID NO: 2728419 - RNA, 19 nt, Artificial Sequence
  Description of Artificial Sequence: Synthetic oligonucleotide
aggaguuaugcagcuuccg

SEQ ID NO: 2728420 - RNA, 19 nt, Artificial Sequence
  Description of Artificial Sequence: Synthetic oligonucleotide
uguaguccucaguugggua

SEQ ID NO: 2728421 - RNA, 19 nt, Artificial Sequence
  Description of Artificial Sequence: Synthetic oligonucleotide
uacugcggaucucauuguc

SEQ ID NO: 2728422 - RNA, 19 nt, Artificial Sequence
  Description of Artificial Sequence: Synthetic oligonucleotide
caucgugugagcgcuuuag

SEQ ID NO: 2728423 - RNA, 19 nt, Artificial Sequence
  Description of Artificial Sequence: Synthetic oligonucleotide
ucgaaguuaccauguucuc

SEQ ID NO: 2728424 - RNA, 19 nt, Artificial Sequence
  Description of Artificial Sequence: Synthetic oligonucleotide
cauucaaggagaggaaaga

SEQ ID NO: 2728425 - RNA, 19 nt, Artificial Sequence
  Description of Artificial Sequence: Synthetic oligonucleotide
agugcuucggauguacaaa

SEQ ID NO: 2728426 - RNA, 19 nt, Artificial Sequence
  Description of Artificial Sequence: Synthetic oligonucleotide
guaguggaacuugagcuca

SEQ ID NO: 2728427 - RNA, 19 nt, Artificial Sequence
  Description of Artificial Sequence: Synthetic oligonucleotide
ucccggguuguagaagggg

SEQ ID NO: 2728428 - RNA, 19 nt, Artificial Sequence
  Description of Artificial Sequence: Synthetic oligonucleotide
acuugagcucauucucugu

SEQ ID NO: 2728429 - RNA, 19 nt, Artificial Sequence
  Description of Artificial Sequence: Synthetic oligonucleotide
ggaucaucaucgaaguuac

SEQ ID NO: 2728430 - RNA, 19 nt, Artificial Sequence
  Description of Artificial Sequence: Synthetic oligonucleotide
cagcuuccggaacauacug

SEQ ID NO: 2728431 - RNA, 19 nt, Artificial Sequence
  Description of Artificial Sequence: Synthetic oligonucleotide
ucucucuuccaggugacua

SEQ ID NO: 2728432 - RNA, 19 nt, Artificial Sequence
  Description of Artificial Sequence: Synthetic oligonucleotide
uccagggacgugugcacca

SEQ ID NO: 2728433 - RNA, 19 nt, Artificial Sequence
  Description of Artificial Sequence: Synthetic oligonucleotide
gagugcuucggauguacaa

SEQ ID NO: 2728434 - RNA, 19 nt, Artificial Sequence
  Description of Artificial Sequence: Synthetic oligonucleotide
guucucaaaggcccuugac

SEQ ID NO: 2728435 - RNA, 19 nt, Artificial Sequence
  Description of Artificial Sequence: Synthetic oligonucleotide
ucaucaaacaggggugaau

SEQ ID NO: 2728436 - RNA, 19 nt, Artificial Sequence
  Description of Artificial Sequence: Synthetic oligonucleotide
cgcuuuaguagaaaggcac

SEQ ID NO: 2728437 - RNA, 19 nt, Artificial Sequence
  Description of Artificial Sequence: Synthetic oligonucleotide
ucaucgaaguuaccauguu

SEQ ID NO: 2728438 - RNA, 19 nt, Artificial Sequence
  Description of Artificial Sequence: Synthetic oligonucleotide
ucccucugguccaccagug

SEQ ID NO: 2728439 - RNA, 19 nt, Artificial Sequence
  Description of Artificial Sequence: Synthetic oligonucleotide
cucauucucugugggagug

SEQ ID NO: 2728440 - RNA, 19 nt, Artificial Sequence
  Description of Artificial Sequence: Synthetic oligonucleotide
guuaugcagcuuccggaac

SEQ ID NO: 2728441 - RNA, 19 nt, Artificial Sequence
  Description of Artificial Sequence: Synthetic oligonucleotide
cuugacuggaugcggucuc

SEQ ID NO: 2728442 - RNA, 19 nt, Artificial Sequence
  Description of Artificial Sequence: Synthetic oligonucleotide
guuacacaucacaucugug

SEQ ID NO: 2728443 - RNA, 19 nt, Artificial Sequence
  Description of Artificial Sequence: Synthetic oligonucleotide
ugacuaggggagaggucca

SEQ ID NO: 2728444 - RNA, 19 nt, Artificial Sequence
  Description of Artificial Sequence: Synthetic oligonucleotide
aggcuucucucuuccaggu

SEQ ID NO: 2728445 - RNA, 19 nt, Artificial Sequence
  Description of Artificial Sequence: Synthetic oligonucleotide
aucgugugagcgcuuuagu

SEQ ID NO: 2728446 - RNA, 19 nt, Artificial Sequence
  Description of Artificial Sequence: Synthetic oligonucleotide
acaggggugaauacaggcu

SEQ ID NO: 2728447 - RNA, 19 nt, Artificial Sequence
  Description of Artificial Sequence: Synthetic oligonucleotide
gcuucucucuuccagguga

SEQ ID NO: 2728448 - RNA, 19 nt, Artificial Sequence
  Description of Artificial Sequence: Synthetic oligonucleotide
agguccagcucagcagacc

SEQ ID NO: 2728449 - RNA, 19 nt, Artificial Sequence
  Description of Artificial Sequence: Synthetic oligonucleotide
aaguuaccauguucucaaa

SEQ ID NO: 2728450 - RNA, 19 nt, Artificial Sequence
  Description of Artificial Sequence: Synthetic oligonucleotide
ugucucgaagggcuguauu

SEQ ID NO: 2728451 - RNA, 19 nt, Artificial Sequence
  Description of Artificial Sequence: Synthetic oligonucleotide
acagggcacacagcccugc

SEQ ID NO: 2728452 - RNA, 19 nt, Artificial Sequence
  Description of Artificial Sequence: Synthetic oligonucleotide
gcuucggauguacaaagga

SEQ ID NO: 2728453 - RNA, 19 nt, Artificial Sequence
  Description of Artificial Sequence: Synthetic oligonucleotide
auacugcggaucucauugu

SEQ ID NO: 2728454 - RNA, 19 nt, Artificial Sequence
  Description of Artificial Sequence: Synthetic oligonucleotide
agaguaggcccagguacag

SEQ ID NO: 2728455 - RNA, 19 nt, Artificial Sequence
  Description of Artificial Sequence: Synthetic oligonucleotide
caucaaacaggggugaaua

SEQ ID NO: 2728456 - RNA, 19 nt, Artificial Sequence
  Description of Artificial Sequence: Synthetic oligonucleotide
cauccagggacgugugcac

SEQ ID NO: 2728457 - RNA, 19 nt, Artificial Sequence
  Description of Artificial Sequence: Synthetic oligonucleotide
cagcagaccuggaucauca

SEQ ID NO: 2728458 - RNA, 19 nt, Artificial Sequence
  Description of Artificial Sequence: Synthetic oligonucleotide
aggcccuugacuggaugcg

SEQ ID NO: 2728459 - RNA, 19 nt, Artificial Sequence
  Description of Artificial Sequence: Synthetic oligonucleotide
ggcuguauuggaggaaucc

SEQ ID NO: 2728460 - RNA, 19 nt, Artificial Sequence
  Description of Artificial Sequence: Synthetic oligonucleotide
uccggaacauacugcggau

SEQ ID NO: 2728461 - RNA, 19 nt, Artificial Sequence
  Description of Artificial Sequence: Synthetic oligonucleotide
gacgugugcaccauguagu

SEQ ID NO: 2728462 - RNA, 19 nt, Artificial Sequence
  Description of Artificial Sequence: Synthetic oligonucleotide
acaccgccauauuggcagg

SEQ ID NO: 2728463 - RNA, 19 nt, Artificial Sequence
  Description of Artificial Sequence: Synthetic oligonucleotide
guuggguagaguaggccca

SEQ ID NO: 2728464 - RNA, 19 nt, Artificial Sequence
  Description of Artificial Sequence: Synthetic oligonucleotide
ggugaauacaggcuucucu

SEQ ID NO: 2728465 - RNA, 19 nt, Artificial Sequence
  Description of Artificial Sequence: Synthetic oligonucleotide
ggaucucauugucucgaag

SEQ ID NO: 2728466 - RNA, 19 nt, Artificial Sequence
  Description of Artificial Sequence: Synthetic oligonucleotide
uuuucccauggcagagauc

SEQ ID NO: 2728467 - RNA, 19 nt, Artificial Sequence
  Description of Artificial Sequence: Synthetic oligonucleotide
aauccaccaccaugacaaa

SEQ ID NO: 2728468 - RNA, 19 nt, Artificial Sequence
  Description of Artificial Sequence: Synthetic oligonucleotide
ugugcaccauguaguggaa

SEQ ID NO: 2728469 - RNA, 19 nt, Artificial Sequence
  Description of Artificial Sequence: Synthetic oligonucleotide
ugguccaccagugcuuuuc

SEQ ID NO: 2728470 - RNA, 19 nt, Artificial Sequence
  Description of Artificial Sequence: Synthetic oligonucleotide
gguuuacauucaaggagag

SEQ ID NO: 2728471 - RNA, 19 nt, Artificial Sequence
  Description of Artificial Sequence: Synthetic oligonucleotide
gguuacacaucacaucugu

SEQ ID NO: 2728472 - RNA, 19 nt, Artificial Sequence
  Description of Artificial Sequence: Synthetic oligonucleotide
uugacuggaugcggucucc

SEQ ID NO: 2728473 - RNA, 19 nt, Artificial Sequence
  Description of Artificial Sequence: Synthetic oligonucleotide
cucugugggagugcuucgg

SEQ ID NO: 2728474 - RNA, 19 nt, Artificial Sequence
  Description of Artificial Sequence: Synthetic oligonucleotide
ggagagguccagcucagca

SEQ ID NO: 2728475 - RNA, 19 nt, Artificial Sequence
  Description of Artificial Sequence: Synthetic oligonucleotide
acugcggaucucauugucu

SEQ ID NO: 2728476 - RNA, 19 nt, Artificial Sequence
  Description of Artificial Sequence: Synthetic oligonucleotide
ucagcagaccuggaucauc

SEQ ID NO: 2728477 - RNA, 19 nt, Artificial Sequence
  Description of Artificial Sequence: Synthetic oligonucleotide
agaagggguuacacaucac

SEQ ID NO: 2728478 - RNA, 19 nt, Artificial Sequence
  Description of Artificial Sequence: Synthetic oligonucleotide
acauacugcggaucucauu

SEQ ID NO: 2728479 - RNA, 19 nt, Artificial Sequence
  Description of Artificial Sequence: Synthetic oligonucleotide
accauguaguggaacuuga

SEQ ID NO: 2728480 - RNA, 19 nt, Artificial Sequence
  Description of Artificial Sequence: Synthetic oligonucleotide
aggagaggaaagagaauaa

SEQ ID NO: 2728481 - RNA, 19 nt, Artificial Sequence
  Description of Artificial Sequence: Synthetic oligonucleotide
caucuguguaggaguuaug

SEQ ID NO: 2728482 - RNA, 19 nt, Artificial Sequence
  Description of Artificial Sequence: Synthetic oligonucleotide
aacauacugcggaucucau

SEQ ID NO: 2728483 - RNA, 19 nt, Artificial Sequence
  Description of Artificial Sequence: Synthetic oligonucleotide
cucccggguuguagaaggg

SEQ ID NO: 2728484 - RNA, 19 nt, Artificial Sequence
  Description of Artificial Sequence: Synthetic oligonucleotide
caccgcgaugcacaccgcc

SEQ ID NO: 2728485 - RNA, 19 nt, Artificial Sequence
  Description of Artificial Sequence: Synthetic oligonucleotide
uggaggaauccaccaccau

SEQ ID NO: 2728486 - RNA, 19 nt, Artificial Sequence
  Description of Artificial Sequence: Synthetic oligonucleotide
ccucaguuggguagaguag

SEQ ID NO: 2728487 - RNA, 19 nt, Artificial Sequence
  Description of Artificial Sequence: Synthetic oligonucleotide
guagaagggguuacacauc

SEQ ID NO: 2728488 - RNA, 19 nt, Artificial Sequence
  Description of Artificial Sequence: Synthetic oligonucleotide
gaauacaggcuucucucuu

SEQ ID NO: 2728489 - RNA, 19 nt, Artificial Sequence
  Description of Artificial Sequence: Synthetic oligonucleotide
ugacuggaugcggucuccc

SEQ ID NO: 2728490 - RNA, 19 nt, Artificial Sequence
  Description of Artificial Sequence: Synthetic oligonucleotide
ggaauccaccaccaugaca

SEQ ID NO: 2728491 - RNA, 19 nt, Artificial Sequence
  Description of Artificial Sequence: Synthetic oligonucleotide
cacauccagggacgugugc

SEQ ID NO: 2728492 - RNA, 19 nt, Artificial Sequence
  Description of Artificial Sequence: Synthetic oligonucleotide
gaucaucaucgaaguuacc

SEQ ID NO: 2728493 - RNA, 19 nt, Artificial Sequence
  Description of Artificial Sequence: Synthetic oligonucleotide
gacuaggggagagguccag

SEQ ID NO: 2728494 - RNA, 19 nt, Artificial Sequence
  Description of Artificial Sequence: Synthetic oligonucleotide
ggauguacaaaggauaauu

SEQ ID NO: 2728495 - RNA, 19 nt, Artificial Sequence
  Description of Artificial Sequence: Synthetic oligonucleotide
ccauguaguggaacuugag

SEQ ID NO: 2728496 - RNA, 19 nt, Artificial Sequence
  Description of Artificial Sequence: Synthetic oligonucleotide
aagggcuguauuggaggaa

SEQ ID NO: 2728497 - RNA, 19 nt, Artificial Sequence
  Description of Artificial Sequence: Synthetic oligonucleotide
agggacgugugcaccaugu

SEQ ID NO: 2728498 - RNA, 19 nt, Artificial Sequence
  Description of Artificial Sequence: Synthetic oligonucleotide
caggugacuaggggagagg

SEQ ID NO: 2728499 - RNA, 19 nt, Artificial Sequence
  Description of Artificial Sequence: Synthetic oligonucleotide
uggguagaguaggcccagg

SEQ ID NO: 2728500 - RNA, 19 nt, Artificial Sequence
  Description of Artificial Sequence: Synthetic oligonucleotide
gccguauaccuuguagucc

SEQ ID NO: 2728501 - RNA, 19 nt, Artificial Sequence
  Description of Artificial Sequence: Synthetic oligonucleotide
gguacagcucccucugguc

SEQ ID NO: 2728502 - RNA, 19 nt, Artificial Sequence
  Description of Artificial Sequence: Synthetic oligonucleotide
uaguggaacuugagcucau

SEQ ID NO: 2728503 - RNA, 19 nt, Artificial Sequence
  Description of Artificial Sequence: Synthetic oligonucleotide
guccaccagugcuuuuccc

SEQ ID NO: 2728504 - RNA, 19 nt, Artificial Sequence
  Description of Artificial Sequence: Synthetic oligonucleotide
gaguaggcccagguacagc

SEQ ID NO: 2728505 - RNA, 19 nt, Artificial Sequence
  Description of Artificial Sequence: Synthetic oligonucleotide
gcuguauuggaggaaucca

SEQ ID NO: 2728506 - RNA, 19 nt, Artificial Sequence
  Description of Artificial Sequence: Synthetic oligonucleotide
auuucaccuuggaauuggu

SEQ ID NO: 2728507 - RNA, 19 nt, Artificial Sequence
  Description of Artificial Sequence: Synthetic oligonucleotide
cgguuuacauucaaggaga

SEQ ID NO: 2728508 - RNA, 19 nt, Artificial Sequence
  Description of Artificial Sequence: Synthetic oligonucleotide
gaccuggaucaucaucgaa

SEQ ID NO: 2728509 - RNA, 19 nt, Artificial Sequence
  Description of Artificial Sequence: Synthetic oligonucleotide
ucaucgugugagcgcuuua

SEQ ID NO: 2728510 - RNA, 19 nt, Artificial Sequence
  Description of Artificial Sequence: Synthetic oligonucleotide
gcuuuaguagaaaggcaca

SEQ ID NO: 2728511 - RNA, 19 nt, Artificial Sequence
  Description of Artificial Sequence: Synthetic oligonucleotide
cccacgguuuacauucaag

SEQ ID NO: 2728512 - RNA, 19 nt, Artificial Sequence
  Description of Artificial Sequence: Synthetic oligonucleotide
cuaggggagagguccagcu

SEQ ID NO: 2728513 - RNA, 19 nt, Artificial Sequence
  Description of Artificial Sequence: Synthetic oligonucleotide
ggagaggaaagagaauaaa

SEQ ID NO: 2728514 - RNA, 19 nt, Artificial Sequence
  Description of Artificial Sequence: Synthetic oligonucleotide
gcagaccuggaucaucauc

SEQ ID NO: 2728515 - RNA, 19 nt, Artificial Sequence
  Description of Artificial Sequence: Synthetic oligonucleotide
cuuggcgaucaccgcgaug

SEQ ID NO: 2728516 - RNA, 19 nt, Artificial Sequence
  Description of Artificial Sequence: Synthetic oligonucleotide
ugcccacgguuuacauuca

SEQ ID NO: 2728517 - RNA, 19 nt, Artificial Sequence
  Description of Artificial Sequence: Synthetic oligonucleotide
aucaucaaacaggggugaa

SEQ ID NO: 2728518 - RNA, 19 nt, Artificial Sequence
  Description of Artificial Sequence: Synthetic oligonucleotide
gggcacacagcccugccca

SEQ ID NO: 2728519 - RNA, 19 nt, Artificial Sequence
  Description of Artificial Sequence: Synthetic oligonucleotide
gguagaguaggcccaggua

SEQ ID NO: 2728520 - RNA, 19 nt, Artificial Sequence
  Description of Artificial Sequence: Synthetic oligonucleotide
uaccacauccagggacgug

SEQ ID NO: 2728521 - RNA, 19 nt, Artificial Sequence
  Description of Artificial Sequence: Synthetic oligonucleotide
gaucaccgcgaugcacacc

SEQ ID NO: 2728522 - RNA, 19 nt, Artificial Sequence
  Description of Artificial Sequence: Synthetic oligonucleotide
accuuggaauuggucacau

SEQ ID NO: 2728523 - RNA, 19 nt, Artificial Sequence
  Description of Artificial Sequence: Synthetic oligonucleotide
gucucccggguuguagaag

SEQ ID NO: 2728524 - RNA, 19 nt, Artificial Sequence
  Description of Artificial Sequence: Synthetic oligonucleotide
uggcgaucaccgcgaugca

SEQ ID NO: 2728525 - RNA, 19 nt, Artificial Sequence
  Description of Artificial Sequence: Synthetic oligonucleotide
auugucucgaagggcugua

SEQ ID NO: 2728526 - RNA, 19 nt, Artificial Sequence
  Description of Artificial Sequence: Synthetic oligonucleotide
cuuuucccauggcagagau

SEQ ID NO: 2728527 - RNA, 19 nt, Artificial Sequence
  Description of Artificial Sequence: Synthetic oligonucleotide
accgcgaugcacaccgcca

SEQ ID NO: 2728528 - RNA, 19 nt, Artificial Sequence
  Description of Artificial Sequence: Synthetic oligonucleotide
ucaccgcgaugcacaccgc

SEQ ID NO: 2728529 - RNA, 19 nt, Artificial Sequence
  Description of Artificial Sequence: Synthetic oligonucleotide
agcagaccuggaucaucau

SEQ ID NO: 2728530 - RNA, 19 nt, Artificial Sequence
  Description of Artificial Sequence: Synthetic oligonucleotide
gcgaucaccgcgaugcaca

SEQ ID NO: 2728531 - RNA, 19 nt, Artificial Sequence
  Description of Artificial Sequence: Synthetic oligonucleotide
uugucucgaagggcuguau

SEQ ID NO: 2728532 - RNA, 19 nt, Artificial Sequence
  Description of Artificial Sequence: Synthetic oligonucleotide
gguccagcucagcagaccu

SEQ ID NO: 2728533 - RNA, 19 nt, Artificial Sequence
  Description of Artificial Sequence: Synthetic oligonucleotide
acauagccguauaccuugu

SEQ ID NO: 2728534 - RNA, 19 nt, Artificial Sequence
  Description of Artificial Sequence: Synthetic oligonucleotide
gguuguagaagggguuaca

SEQ ID NO: 2728535 - RNA, 19 nt, Artificial Sequence
  Description of Artificial Sequence: Synthetic oligonucleotide
ggcccuugacuggaugcgg

SEQ ID NO: 2728536 - RNA, 19 nt, Artificial Sequence
  Description of Artificial Sequence: Synthetic oligonucleotide
ggcuucucucuuccaggug

SEQ ID NO: 2728537 - RNA, 19 nt, Artificial Sequence
  Description of Artificial Sequence: Synthetic oligonucleotide
gggagugcuucggauguac

SEQ ID NO: 2728538 - RNA, 19 nt, Artificial Sequence
  Description of Artificial Sequence: Synthetic oligonucleotide
caggggugaauacaggcuu

SEQ ID NO: 2728539 - RNA, 19 nt, Artificial Sequence
  Description of Artificial Sequence: Synthetic oligonucleotide
caccgccauauuggcaggc

SEQ ID NO: 2728540 - RNA, 19 nt, Artificial Sequence
  Description of Artificial Sequence: Synthetic oligonucleotide
aguggaacuugagcucauu

SEQ ID NO: 2728541 - RNA, 19 nt, Artificial Sequence
  Description of Artificial Sequence: Synthetic oligonucleotide
gugcaccauguaguggaac

SEQ ID NO: 2728542 - RNA, 19 nt, Artificial Sequence
  Description of Artificial Sequence: Synthetic oligonucleotide
caucuaccacauccaggga

SEQ ID NO: 2728543 - RNA, 19 nt, Artificial Sequence
  Description of Artificial Sequence: Synthetic oligonucleotide
ggguuguagaagggguuac

SEQ ID NO: 2728544 - RNA, 19 nt, Artificial Sequence
  Description of Artificial Sequence: Synthetic oligonucleotide
cagggacgugugcaccaug

SEQ ID NO: 2728545 - RNA, 19 nt, Artificial Sequence
  Description of Artificial Sequence: Synthetic oligonucleotide
ccaggugacuaggggagag

SEQ ID NO: 2728546 - RNA, 19 nt, Artificial Sequence
  Description of Artificial Sequence: Synthetic oligonucleotide
guccagcucagcagaccug

SEQ ID NO: 2728547 - RNA, 19 nt, Artificial Sequence
  Description of Artificial Sequence: Synthetic oligonucleotide
gcggaucucauugucucga

SEQ ID NO: 2728548 - RNA, 19 nt, Artificial Sequence
  Description of Artificial Sequence: Synthetic oligonucleotide
ggaacauacugcggaucuc

SEQ ID NO: 2728549 - RNA, 19 nt, Artificial Sequence
  Description of Artificial Sequence: Synthetic oligonucleotide
caccuuggaauuggucaca

SEQ ID NO: 2728550 - RNA, 19 nt, Artificial Sequence
  Description of Artificial Sequence: Synthetic oligonucleotide
gcgcuuuaguagaaaggca

SEQ ID NO: 2728551 - RNA, 19 nt, Artificial Sequence
  Description of Artificial Sequence: Synthetic oligonucleotide
acacagcccugcccacggu

SEQ ID NO: 2728552 - RNA, 19 nt, Artificial Sequence
  Description of Artificial Sequence: Synthetic oligonucleotide
cauagccguauaccuugua

SEQ ID NO: 2728553 - RNA, 19 nt, Artificial Sequence
  Description of Artificial Sequence: Synthetic oligonucleotide
gugagcgcuuuaguagaaa

SEQ ID NO: 2728554 - RNA, 19 nt, Artificial Sequence
  Description of Artificial Sequence: Synthetic oligonucleotide
cgaaguuaccauguucuca

SEQ ID NO: 2728555 - RNA, 19 nt, Artificial Sequence
  Description of Artificial Sequence: Synthetic oligonucleotide
guaggcccagguacagcuc

SEQ ID NO: 2728556 - RNA, 19 nt, Artificial Sequence
  Description of Artificial Sequence: Synthetic oligonucleotide
acagcccugcccacgguuu

SEQ ID NO: 2728557 - RNA, 19 nt, Artificial Sequence
  Description of Artificial Sequence: Synthetic oligonucleotide
ggugacuaggggagagguc

SEQ ID NO: 2728558 - RNA, 19 nt, Artificial Sequence
  Description of Artificial Sequence: Synthetic oligonucleotide
ggcgaucaccgcgaugcac

SEQ ID NO: 2728559 - RNA, 19 nt, Artificial Sequence
  Description of Artificial Sequence: Synthetic oligonucleotide
ggguagaguaggcccaggu

SEQ ID NO: 2728560 - RNA, 19 nt, Artificial Sequence
  Description of Artificial Sequence: Synthetic oligonucleotide
ggucucccggguuguagaa

SEQ ID NO: 2728561 - RNA, 19 nt, Artificial Sequence
  Description of Artificial Sequence: Synthetic oligonucleotide
cccucugguccaccagugc

SEQ ID NO: 2728562 - RNA, 19 nt, Artificial Sequence
  Description of Artificial Sequence: Synthetic oligonucleotide
cucugguccaccagugcuu

SEQ ID NO: 2728563 - RNA, 19 nt, Artificial Sequence
  Description of Artificial Sequence: Synthetic oligonucleotide
cugugggagugcuucggau

SEQ ID NO: 2728564 - RNA, 19 nt, Artificial Sequence
  Description of Artificial Sequence: Synthetic oligonucleotide
ccagugcuuuucccauggc

SEQ ID NO: 2728565 - RNA, 19 nt, Artificial Sequence
  Description of Artificial Sequence: Synthetic oligonucleotide
ggagugcuucggauguaca

SEQ ID NO: 2728566 - RNA, 19 nt, Artificial Sequence
  Description of Artificial Sequence: Synthetic oligonucleotide
gcuuuucccauggcagaga

SEQ ID NO: 2728567 - RNA, 19 nt, Artificial Sequence
  Description of Artificial Sequence: Synthetic oligonucleotide
augcggucucccggguugu

SEQ ID NO: 2728568 - RNA, 19 nt, Artificial Sequence
  Description of Artificial Sequence: Synthetic oligonucleotide
gcggucucccggguuguag

SEQ ID NO: 2728569 - RNA, 19 nt, Artificial Sequence
  Description of Artificial Sequence: Synthetic oligonucleotide
cacaucuguguaggaguua

SEQ ID NO: 2728570 - RNA, 19 nt, Artificial Sequence
  Description of Artificial Sequence: Synthetic oligonucleotide
gcucauucucugugggagu

SEQ ID NO: 2728571 - RNA, 19 nt, Artificial Sequence
  Description of Artificial Sequence: Synthetic oligonucleotide
gggugaauacaggcuucuc

SEQ ID NO: 2728572 - RNA, 19 nt, Artificial Sequence
  Description of Artificial Sequence: Synthetic oligonucleotide
ccggaacauacugcggauc

SEQ ID NO: 2728573 - RNA, 19 nt, Artificial Sequence
  Description of Artificial Sequence: Synthetic oligonucleotide
cgaucaccgcgaugcacac

SEQ ID NO: 2728574 - RNA, 19 nt, Artificial Sequence
  Description of Artificial Sequence: Synthetic oligonucleotide
cggaacauacugcggaucu

SEQ ID NO: 2728575 - RNA, 19 nt, Artificial Sequence
  Description of Artificial Sequence: Synthetic oligonucleotide
ggggugaauacaggcuucu

SEQ ID NO: 2728576 - RNA, 19 nt, Artificial Sequence
  Description of Artificial Sequence: Synthetic oligonucleotide
cccggguuguagaaggggu

SEQ ID NO: 2728577 - RNA, 19 nt, Artificial Sequence
  Description of Artificial Sequence: Synthetic oligonucleotide
cuggaucaucaucgaaguu

SEQ ID NO: 2728578 - RNA, 19 nt, Artificial Sequence
  Description of Artificial Sequence: Synthetic oligonucleotide
gggacgugugcaccaugua

SEQ ID NO: 2728579 - RNA, 19 nt, Artificial Sequence
  Description of Artificial Sequence: Synthetic oligonucleotide
gcccagguacagcucccuc

SEQ ID NO: 2728580 - RNA, 19 nt, Artificial Sequence
  Description of Artificial Sequence: Synthetic oligonucleotide
cguauaccuuguaguccuc

SEQ ID NO: 2728581 - RNA, 19 nt, Artificial Sequence
  Description of Artificial Sequence: Synthetic oligonucleotide
gcacaccgccauauuggca

SEQ ID NO: 2728582 - RNA, 19 nt, Artificial Sequence
  Description of Artificial Sequence: Synthetic oligonucleotide
ugcggucucccggguugua

SEQ ID NO: 2728583 - RNA, 19 nt, Artificial Sequence
  Description of Artificial Sequence: Synthetic oligonucleotide
cuaccacauccagggacgu

SEQ ID NO: 2728584 - RNA, 19 nt, Artificial Sequence
  Description of Artificial Sequence: Synthetic oligonucleotide
ccauguucucaaaggcccu

SEQ ID NO: 2728585 - RNA, 19 nt, Artificial Sequence
  Description of Artificial Sequence: Synthetic oligonucleotide
cacagcccugcccacgguu

SEQ ID NO: 2728586 - RNA, 19 nt, Artificial Sequence
  Description of Artificial Sequence: Synthetic oligonucleotide
gcccacgguuuacauucaa

SEQ ID NO: 2728587 - RNA, 19 nt, Artificial Sequence
  Description of Artificial Sequence: Synthetic oligonucleotide
guccucaguuggguagagu

SEQ ID NO: 2728588 - RNA, 19 nt, Artificial Sequence
  Description of Artificial Sequence: Synthetic oligonucleotide
gcgaugcacaccgccauau

SEQ ID NO: 2728589 - RNA, 19 nt, Artificial Sequence
  Description of Artificial Sequence: Synthetic oligonucleotide
ccuugacuggaugcggucu

SEQ ID NO: 2728590 - RNA, 19 nt, Artificial Sequence
  Description of Artificial Sequence: Synthetic oligonucleotide
ccuuggaauuggucacaua

SEQ ID NO: 2728591 - RNA, 19 nt, Artificial Sequence
  Description of Artificial Sequence: Synthetic oligonucleotide
cggucucccggguuguaga

SEQ ID NO: 2728592 - RNA, 19 nt, Artificial Sequence
  Description of Artificial Sequence: Synthetic oligonucleotide
ccaugacaaauuucaccuu

SEQ ID NO: 2728593 - RNA, 19 nt, Artificial Sequence
  Description of Artificial Sequence: Synthetic oligonucleotide
gcccuugacuggaugcggu

SEQ ID NO: 2728594 - RNA, 19 nt, Artificial Sequence
  Description of Artificial Sequence: Synthetic oligonucleotide
cggguuguagaagggguua

SEQ ID NO: 2728595 - RNA, 19 nt, Artificial Sequence
  Description of Artificial Sequence: Synthetic oligonucleotide
ggaugcggucucccggguu

SEQ ID NO: 2728596 - RNA, 19 nt, Artificial Sequence
  Description of Artificial Sequence: Synthetic oligonucleotide
cggaucucauugucucgaa

SEQ ID NO: 2728597 - RNA, 19 nt, Artificial Sequence
  Description of Artificial Sequence: Synthetic oligonucleotide
ccggguuguagaagggguu

SEQ ID NO: 2728598 - RNA, 19 nt, Artificial Sequence
  Description of Artificial Sequence: Synthetic oligonucleotide
ccgcgaugcacaccgccau

SEQ ID NO: 2728599 - RNA, 19 nt, Artificial Sequence
  Description of Artificial Sequence: Synthetic oligonucleotide
cggauguacaaaggauaau

SEQ ID NO: 2728600 - RNA, 19 nt, Artificial Sequence
  Description of Artificial Sequence: Synthetic oligonucleotide
cccugcccacgguuuacau

SEQ ID NO: 2728601 - RNA, 19 nt, Artificial Sequence
  Description of Artificial Sequence: Synthetic oligonucleotide
cgcgaugcacaccgccaua

SEQ ID NO: 2728602 - RNA, 19 nt, Artificial Sequence
  Description of Artificial Sequence: Synthetic oligonucleotide
ccagggacgugugcaccau

SEQ ID NO: 2728603 - RNA, 19 nt, Artificial Sequence
  Description of Artificial Sequence: Synthetic oligonucleotide
cgaugcacaccgccauauu

SEQ ID NO: 2728604 - RNA, 19 nt, Artificial Sequence
  Description of Artificial Sequence: Synthetic oligonucleotide
aaaauaauagcucauccug

SEQ ID NO: 2728605 - RNA, 19 nt, Artificial Sequence
  Description of Artificial Sequence: Synthetic oligonucleotide
aagauaaugaugaagugcc

SEQ ID NO: 2728606 - RNA, 19 nt, Artificial Sequence
  Description of Artificial Sequence: Synthetic oligonucleotide
ugagaaaucgaacagaaug

SEQ ID NO: 2728607 - RNA, 19 nt, Artificial Sequence
  Description of Artificial Sequence: Synthetic oligonucleotide
aaugguggcauauggaaac

SEQ ID NO: 2728608 - RNA, 19 nt, Artificial Sequence
  Description of Artificial Sequence: Synthetic oligonucleotide
cuugcaauuucuaauaugc

SEQ ID NO: 2728609 - RNA, 19 nt, Artificial Sequence
  Description of Artificial Sequence: Synthetic oligonucleotide
aauaauguaaggcuacuca

SEQ ID NO: 2728610 - RNA, 19 nt, Artificial Sequence
  Description of Artificial Sequence: Synthetic oligonucleotide
aaaucgaacagaauggugg

SEQ ID NO: 2728611 - RNA, 19 nt, Artificial Sequence
  Description of Artificial Sequence: Synthetic oligonucleotide
uugauaagaagccaaacug

SEQ ID NO: 2728612 - RNA, 19 nt, Artificial Sequence
  Description of Artificial Sequence: Synthetic oligonucleotide
uucaaagugagcaaaauaa

SEQ ID NO: 2728613 - RNA, 19 nt, Artificial Sequence
  Description of Artificial Sequence: Synthetic oligonucleotide
ucaacuuugauaagaagcc

SEQ ID NO: 2728614 - RNA, 19 nt, Artificial Sequence
  Description of Artificial Sequence: Synthetic oligonucleotide
aucaacuuugauaagaagc

SEQ ID NO: 2728615 - RNA, 19 nt, Artificial Sequence
  Description of Artificial Sequence: Synthetic oligonucleotide
aaagugagcaaaauaauag

SEQ ID NO: 2728616 - RNA, 19 nt, Artificial Sequence
  Description of Artificial Sequence: Synthetic oligonucleotide
aaucgaacagaaugguggc

SEQ ID NO: 2728617 - RNA, 19 nt, Artificial Sequence
  Description of Artificial Sequence: Synthetic oligonucleotide
aauaauagcucauccugag

SEQ ID NO: 2728618 - RNA, 19 nt, Artificial Sequence
  Description of Artificial Sequence: Synthetic oligonucleotide
ucaaacuucaaagugagca

SEQ ID NO: 2728619 - RNA, 19 nt, Artificial Sequence
  Description of Artificial Sequence: Synthetic oligonucleotide
uaucuuugaagcaaauuag

SEQ ID NO: 2728620 - RNA, 19 nt, Artificial Sequence
  Description of Artificial Sequence: Synthetic oligonucleotide
gaaauuauuucucucaaga

SEQ ID NO: 2728621 - RNA, 19 nt, Artificial Sequence
  Description of Artificial Sequence: Synthetic oligonucleotide
uuugauaagaagccaaacu

SEQ ID NO: 2728622 - RNA, 19 nt, Artificial Sequence
  Description of Artificial Sequence: Synthetic oligonucleotide
agaaaauagaucugaaaug

SEQ ID NO: 2728623 - RNA, 19 nt, Artificial Sequence
  Description of Artificial Sequence: Synthetic oligonucleotide
aaaaccuucagacugcaau

SEQ ID NO: 2728624 - RNA, 19 nt, Artificial Sequence
  Description of Artificial Sequence: Synthetic oligonucleotide
ucaacugugacaaaccagu

SEQ ID NO: 2728625 - RNA, 19 nt, Artificial Sequence
  Description of Artificial Sequence: Synthetic oligonucleotide
uuuuccaacagcuaccaug

SEQ ID NO: 2728626 - RNA, 19 nt, Artificial Sequence
  Description of Artificial Sequence: Synthetic oligonucleotide
acugugacaaaccaguaag

SEQ ID NO: 2728627 - RNA, 19 nt, Artificial Sequence
  Description of Artificial Sequence: Synthetic oligonucleotide
acccagaaaaccuucagac

SEQ ID NO: 2728628 - RNA, 19 nt, Artificial Sequence
  Description of Artificial Sequence: Synthetic oligonucleotide
aaaccuucagacugcaauc

SEQ ID NO: 2728629 - RNA, 19 nt, Artificial Sequence
  Description of Artificial Sequence: Synthetic oligonucleotide
auaaucaacugugacaaac

SEQ ID NO: 2728630 - RNA, 19 nt, Artificial Sequence
  Description of Artificial Sequence: Synthetic oligonucleotide
gaaauguaauaauguaagg

SEQ ID NO: 2728631 - RNA, 19 nt, Artificial Sequence
  Description of Artificial Sequence: Synthetic oligonucleotide
auaucuuugaagcaaauua

SEQ ID NO: 2728632 - RNA, 19 nt, Artificial Sequence
  Description of Artificial Sequence: Synthetic oligonucleotide
uguaaggcuacucaguggu

SEQ ID NO: 2728633 - RNA, 19 nt, Artificial Sequence
  Description of Artificial Sequence: Synthetic oligonucleotide
gagaaaucgaacagaaugg

SEQ ID NO: 2728634 - RNA, 19 nt, Artificial Sequence
  Description of Artificial Sequence: Synthetic oligonucleotide
uguaauaauguaaggcuac

SEQ ID NO: 2728635 - RNA, 19 nt, Artificial Sequence
  Description of Artificial Sequence: Synthetic oligonucleotide
agugaaauuauuucucuca

SEQ ID NO: 2728636 - RNA, 19 nt, Artificial Sequence
  Description of Artificial Sequence: Synthetic oligonucleotide
uaaaucaacuuugauaaga

SEQ ID NO: 2728637 - RNA, 19 nt, Artificial Sequence
  Description of Artificial Sequence: Synthetic oligonucleotide
gguuugauaucuuugaagc

SEQ ID NO: 2728638 - RNA, 19 nt, Artificial Sequence
  Description of Artificial Sequence: Synthetic oligonucleotide
ugauaagaagccaaacugu

SEQ ID NO: 2728639 - RNA, 19 nt, Artificial Sequence
  Description of Artificial Sequence: Synthetic oligonucleotide
aaccauuucuaugugaucu

SEQ ID NO: 2728640 - RNA, 19 nt, Artificial Sequence
  Description of Artificial Sequence: Synthetic oligonucleotide
ucuuugaagcaaauuaggu

SEQ ID NO: 2728641 - RNA, 19 nt, Artificial Sequence
  Description of Artificial Sequence: Synthetic oligonucleotide
aacuuuucaagccaauaau

SEQ ID NO: 2728642 - RNA, 19 nt, Artificial Sequence
  Description of Artificial Sequence: Synthetic oligonucleotide
ucaagaauggcuuuuccaa

SEQ ID NO: 2728643 - RNA, 19 nt, Artificial Sequence
  Description of Artificial Sequence: Synthetic oligonucleotide
aaucaacuuugauaagaag

SEQ ID NO: 2728644 - RNA, 19 nt, Artificial Sequence
  Description of Artificial Sequence: Synthetic oligonucleotide
cugcaaucaaacuucaaag

SEQ ID NO: 2728645 - RNA, 19 nt, Artificial Sequence
  Description of Artificial Sequence: Synthetic oligonucleotide
uucuaauaugcuucuuugg

SEQ ID NO: 2728646 - RNA, 19 nt, Artificial Sequence
  Description of Artificial Sequence: Synthetic oligonucleotide
ugguuugauaucuuugaag

SEQ ID NO: 2728647 - RNA, 19 nt, Artificial Sequence
  Description of Artificial Sequence: Synthetic oligonucleotide
uaauaugcuucuuuggcac

SEQ ID NO: 2728648 - RNA, 19 nt, Artificial Sequence
  Description of Artificial Sequence: Synthetic oligonucleotide
aaucaacugugacaaacca

SEQ ID NO: 2728649 - RNA, 19 nt, Artificial Sequence
  Description of Artificial Sequence: Synthetic oligonucleotide
caagauaaugaugaagugc

SEQ ID NO: 2728650 - RNA, 19 nt, Artificial Sequence
  Description of Artificial Sequence: Synthetic oligonucleotide
cuuugaagcaaauuagguc

SEQ ID NO: 2728651 - RNA, 19 nt, Artificial Sequence
  Description of Artificial Sequence: Synthetic oligonucleotide
uuugauaucuuugaagcaa

SEQ ID NO: 2728652 - RNA, 19 nt, Artificial Sequence
  Description of Artificial Sequence: Synthetic oligonucleotide
uguguauacccagaaaacc

SEQ ID NO: 2728653 - RNA, 19 nt, Artificial Sequence
  Description of Artificial Sequence: Synthetic oligonucleotide
aagccaauaaucaacugug

SEQ ID NO: 2728654 - RNA, 19 nt, Artificial Sequence
  Description of Artificial Sequence: Synthetic oligonucleotide
uguagaugagaaaucgaac

SEQ ID NO: 2728655 - RNA, 19 nt, Artificial Sequence
  Description of Artificial Sequence: Synthetic oligonucleotide
caaacuguuugacuggugc

SEQ ID NO: 2728656 - RNA, 19 nt, Artificial Sequence
  Description of Artificial Sequence: Synthetic oligonucleotide
uucaagccaauaaucaacu

SEQ ID NO: 2728657 - RNA, 19 nt, Artificial Sequence
  Description of Artificial Sequence: Synthetic oligonucleotide
ucaaccauuucuaugugau

SEQ ID NO: 2728658 - RNA, 19 nt, Artificial Sequence
  Description of Artificial Sequence: Synthetic oligonucleotide
uaugacaugaagguguaga

SEQ ID NO: 2728659 - RNA, 19 nt, Artificial Sequence
  Description of Artificial Sequence: Synthetic oligonucleotide
agucagugaaauuauuucu

SEQ ID NO: 2728660 - RNA, 19 nt, Artificial Sequence
  Description of Artificial Sequence: Synthetic oligonucleotide
aaauagaucugaaauguaa

SEQ ID NO: 2728661 - RNA, 19 nt, Artificial Sequence
  Description of Artificial Sequence: Synthetic oligonucleotide
gaucugaaauguaauaaug

SEQ ID NO: 2728662 - RNA, 19 nt, Artificial Sequence
  Description of Artificial Sequence: Synthetic oligonucleotide
aauggcuuuuccaacagcu

SEQ ID NO: 2728663 - RNA, 19 nt, Artificial Sequence
  Description of Artificial Sequence: Synthetic oligonucleotide
acugcaaucaaacuucaaa

SEQ ID NO: 2728664 - RNA, 19 nt, Artificial Sequence
  Description of Artificial Sequence: Synthetic oligonucleotide
uugacuggugcuaugacau

SEQ ID NO: 2728665 - RNA, 19 nt, Artificial Sequence
  Description of Artificial Sequence: Synthetic oligonucleotide
aauagcucauccugaguca

SEQ ID NO: 2728666 - RNA, 19 nt, Artificial Sequence
  Description of Artificial Sequence: Synthetic oligonucleotide
ugcaaucaaacuucaaagu

SEQ ID NO: 2728667 - RNA, 19 nt, Artificial Sequence
  Description of Artificial Sequence: Synthetic oligonucleotide
gaaaauagaucugaaaugu

SEQ ID NO: 2728668 - RNA, 19 nt, Artificial Sequence
  Description of Artificial Sequence: Synthetic oligonucleotide
gguaguguuguguauaccc

SEQ ID NO: 2728669 - RNA, 19 nt, Artificial Sequence
  Description of Artificial Sequence: Synthetic oligonucleotide
cuucagacugcaaucaaac

SEQ ID NO: 2728670 - RNA, 19 nt, Artificial Sequence
  Description of Artificial Sequence: Synthetic oligonucleotide
auucucgcagugcaagagc

SEQ ID NO: 2728671 - RNA, 19 nt, Artificial Sequence
  Description of Artificial Sequence: Synthetic oligonucleotide
uuuucaagccaauaaucaa

SEQ ID NO: 2728672 - RNA, 19 nt, Artificial Sequence
  Description of Artificial Sequence: Synthetic oligonucleotide
agugcaagagcuccguguc

SEQ ID NO: 2728673 - RNA, 19 nt, Artificial Sequence
  Description of Artificial Sequence: Synthetic oligonucleotide
acuuuucaagccaauaauc

SEQ ID NO: 2728674 - RNA, 19 nt, Artificial Sequence
  Description of Artificial Sequence: Synthetic oligonucleotide
uuguguauacccagaaaac

SEQ ID NO: 2728675 - RNA, 19 nt, Artificial Sequence
  Description of Artificial Sequence: Synthetic oligonucleotide
uccugagucagguuaagga

SEQ ID NO: 2728676 - RNA, 19 nt, Artificial Sequence
  Description of Artificial Sequence: Synthetic oligonucleotide
uuugacuggugcuaugaca

SEQ ID NO: 2728677 - RNA, 19 nt, Artificial Sequence
  Description of Artificial Sequence: Synthetic oligonucleotide
aacccauucucacaucugu

SEQ ID NO: 2728678 - RNA, 19 nt, Artificial Sequence
  Description of Artificial Sequence: Synthetic oligonucleotide
agcuaccaugcucucaacc

SEQ ID NO: 2728679 - RNA, 19 nt, Artificial Sequence
  Description of Artificial Sequence: Synthetic oligonucleotide
uauggaaacccauucucac

SEQ ID NO: 2728680 - RNA, 19 nt, Artificial Sequence
  Description of Artificial Sequence: Synthetic oligonucleotide
ucagugaaauuauuucucu

SEQ ID NO: 2728681 - RNA, 19 nt, Artificial Sequence
  Description of Artificial Sequence: Synthetic oligonucleotide
auaaugaugaagugccgcu

SEQ ID NO: 2728682 - RNA, 19 nt, Artificial Sequence
  Description of Artificial Sequence: Synthetic oligonucleotide
ucaaagugagcaaaauaau

SEQ ID NO: 2728683 - RNA, 19 nt, Artificial Sequence
  Description of Artificial Sequence: Synthetic oligonucleotide
ucagaaaauagaucugaaa

SEQ ID NO: 2728684 - RNA, 19 nt, Artificial Sequence
  Description of Artificial Sequence: Synthetic oligonucleotide
ugcaauuucuaauaugcuu

SEQ ID NO: 2728685 - RNA, 19 nt, Artificial Sequence
  Description of Artificial Sequence: Synthetic oligonucleotide
auuucuaugugaucucugu

SEQ ID NO: 2728686 - RNA, 19 nt, Artificial Sequence
  Description of Artificial Sequence: Synthetic oligonucleotide
agaaugguggcauauggaa

SEQ ID NO: 2728687 - RNA, 19 nt, Artificial Sequence
  Description of Artificial Sequence: Synthetic oligonucleotide
uaugugaucucuguuuagc

SEQ ID NO: 2728688 - RNA, 19 nt, Artificial Sequence
  Description of Artificial Sequence: Synthetic oligonucleotide
uggucuguaaaucaacuuu

SEQ ID NO: 2728689 - RNA, 19 nt, Artificial Sequence
  Description of Artificial Sequence: Synthetic oligonucleotide
cagguuaaggaacuuuucc

SEQ ID NO: 2728690 - RNA, 19 nt, Artificial Sequence
  Description of Artificial Sequence: Synthetic oligonucleotide
caccacaagauaaugauga

SEQ ID NO: 2728691 - RNA, 19 nt, Artificial Sequence
  Description of Artificial Sequence: Synthetic oligonucleotide
cagacugcaaucaaacuuc

SEQ ID NO: 2728692 - RNA, 19 nt, Artificial Sequence
  Description of Artificial Sequence: Synthetic oligonucleotide
aaauaauagcucauccuga

SEQ ID NO: 2728693 - RNA, 19 nt, Artificial Sequence
  Description of Artificial Sequence: Synthetic oligonucleotide
cauauggaaacccauucuc

SEQ ID NO: 2728694 - RNA, 19 nt, Artificial Sequence
  Description of Artificial Sequence: Synthetic oligonucleotide
ucuggucuguaaaucaacu

SEQ ID NO: 2728695 - RNA, 19 nt, Artificial Sequence
  Description of Artificial Sequence: Synthetic oligonucleotide
gcaaauuaggucuucauuc

SEQ ID NO: 2728696 - RNA, 19 nt, Artificial Sequence
  Description of Artificial Sequence: Synthetic oligonucleotide
agguguagaugagaaaucg

SEQ ID NO: 2728697 - RNA, 19 nt, Artificial Sequence
  Description of Artificial Sequence: Synthetic oligonucleotide
aaacuguuugacuggugcu

SEQ ID NO: 2728698 - RNA, 19 nt, Artificial Sequence
  Description of Artificial Sequence: Synthetic oligonucleotide
agguuaaggaacuuuucca

SEQ ID NO: 2728699 - RNA, 19 nt, Artificial Sequence
  Description of Artificial Sequence: Synthetic oligonucleotide
agaucugaaauguaauaau

SEQ ID NO: 2728700 - RNA, 19 nt, Artificial Sequence
  Description of Artificial Sequence: Synthetic oligonucleotide
acaagauaaugaugaagug

SEQ ID NO: 2728701 - RNA, 19 nt, Artificial Sequence
  Description of Artificial Sequence: Synthetic oligonucleotide
aucuuugaagcaaauuagg

SEQ ID NO: 2728702 - RNA, 19 nt, Artificial Sequence
  Description of Artificial Sequence: Synthetic oligonucleotide
ucuaugugaucucuguuua

SEQ ID NO: 2728703 - RNA, 19 nt, Artificial Sequence
  Description of Artificial Sequence: Synthetic oligonucleotide
agaaucuggucuguaaauc

SEQ ID NO: 2728704 - RNA, 19 nt, Artificial Sequence
  Description of Artificial Sequence: Synthetic oligonucleotide
uggcuuuuccaacagcuac

SEQ ID NO: 2728705 - RNA, 19 nt, Artificial Sequence
  Description of Artificial Sequence: Synthetic oligonucleotide
gcaaucaaacuucaaagug

SEQ ID NO: 2728706 - RNA, 19 nt, Artificial Sequence
  Description of Artificial Sequence: Synthetic oligonucleotide
ugagucagguuaaggaacu

SEQ ID NO: 2728707 - RNA, 19 nt, Artificial Sequence
  Description of Artificial Sequence: Synthetic oligonucleotide
uaguguuguguauacccag

SEQ ID NO: 2728708 - RNA, 19 nt, Artificial Sequence
  Description of Artificial Sequence: Synthetic oligonucleotide
uauacccagaaaaccuuca

SEQ ID NO: 2728709 - RNA, 19 nt, Artificial Sequence
  Description of Artificial Sequence: Synthetic oligonucleotide
uaaggcuacucagugguag

SEQ ID NO: 2728710 - RNA, 19 nt, Artificial Sequence
  Description of Artificial Sequence: Synthetic oligonucleotide
ucuuaacuuuucaagccaa

SEQ ID NO: 2728711 - RNA, 19 nt, Artificial Sequence
  Description of Artificial Sequence: Synthetic oligonucleotide
aaaucaacuuugauaagaa

SEQ ID NO: 2728712 - RNA, 19 nt, Artificial Sequence
  Description of Artificial Sequence: Synthetic oligonucleotide
ucuguuuagcuccuugcaa

SEQ ID NO: 2728713 - RNA, 19 nt, Artificial Sequence
  Description of Artificial Sequence: Synthetic oligonucleotide
uucauucucgcagugcaag

SEQ ID NO: 2728714 - RNA, 19 nt, Artificial Sequence
  Description of Artificial Sequence: Synthetic oligonucleotide
agugccgcugguuugauau

SEQ ID NO: 2728715 - RNA, 19 nt, Artificial Sequence
  Description of Artificial Sequence: Synthetic oligonucleotide
uuuagcuccuugcaauuuc

SEQ ID NO: 2728716 - RNA, 19 nt, Artificial Sequence
  Description of Artificial Sequence: Synthetic oligonucleotide
aggaacuuuuccaugguuc

SEQ ID NO: 2728717 - RNA, 19 nt, Artificial Sequence
  Description of Artificial Sequence: Synthetic oligonucleotide
cuguaaaucaacuuugaua

SEQ ID NO: 2728718 - RNA, 19 nt, Artificial Sequence
  Description of Artificial Sequence: Synthetic oligonucleotide
ucucuguuuagcuccuugc

SEQ ID NO: 2728719 - RNA, 19 nt, Artificial Sequence
  Description of Artificial Sequence: Synthetic oligonucleotide
cugagucagguuaaggaac

SEQ ID NO: 2728720 - RNA, 19 nt, Artificial Sequence
  Description of Artificial Sequence: Synthetic oligonucleotide
aagguguagaugagaaauc

SEQ ID NO: 2728721 - RNA, 19 nt, Artificial Sequence
  Description of Artificial Sequence: Synthetic oligonucleotide
ucuguaaaucaacuuugau

SEQ ID NO: 2728722 - RNA, 19 nt, Artificial Sequence
  Description of Artificial Sequence: Synthetic oligonucleotide
ugugacaaaccaguaagaa

SEQ ID NO: 2728723 - RNA, 19 nt, Artificial Sequence
  Description of Artificial Sequence: Synthetic oligonucleotide
uguauacccagaaaaccuu

SEQ ID NO: 2728724 - RNA, 19 nt, Artificial Sequence
  Description of Artificial Sequence: Synthetic oligonucleotide
gaugagaaaucgaacagaa

SEQ ID NO: 2728725 - RNA, 19 nt, Artificial Sequence
  Description of Artificial Sequence: Synthetic oligonucleotide
ugcaagagcuccgugucgg

SEQ ID NO: 2728726 - RNA, 19 nt, Artificial Sequence
  Description of Artificial Sequence: Synthetic oligonucleotide
agaauggcuuuuccaacag

SEQ ID NO: 2728727 - RNA, 19 nt, Artificial Sequence
  Description of Artificial Sequence: Synthetic oligonucleotide
uacccagaaaaccuucaga

SEQ ID NO: 2728728 - RNA, 19 nt, Artificial Sequence
  Description of Artificial Sequence: Synthetic oligonucleotide
ucucaagaauggcuuuucc

SEQ ID NO: 2728729 - RNA, 19 nt, Artificial Sequence
  Description of Artificial Sequence: Synthetic oligonucleotide
auguaaggcuacucagugg

SEQ ID NO: 2728730 - RNA, 19 nt, Artificial Sequence
  Description of Artificial Sequence: Synthetic oligonucleotide
ccagaaaaccuucagacug

SEQ ID NO: 2728731 - RNA, 19 nt, Artificial Sequence
  Description of Artificial Sequence: Synthetic oligonucleotide
aacuuugauaagaagccaa

SEQ ID NO: 2728732 - RNA, 19 nt, Artificial Sequence
  Description of Artificial Sequence: Synthetic oligonucleotide
cagaaaauagaucugaaau

SEQ ID NO: 2728733 - RNA, 19 nt, Artificial Sequence
  Description of Artificial Sequence: Synthetic oligonucleotide
uucucgcagugcaagagcu

SEQ ID NO: 2728734 - RNA, 19 nt, Artificial Sequence
  Description of Artificial Sequence: Synthetic oligonucleotide
accauuucuaugugaucuc

SEQ ID NO: 2728735 - RNA, 19 nt, Artificial Sequence
  Description of Artificial Sequence: Synthetic oligonucleotide
ugugaucucuguuuagcuc

SEQ ID NO: 2728736 - RNA, 19 nt, Artificial Sequence
  Description of Artificial Sequence: Synthetic oligonucleotide
gaaaucgaacagaauggug

SEQ ID NO: 2728737 - RNA, 19 nt, Artificial Sequence
  Description of Artificial Sequence: Synthetic oligonucleotide
agaagccaaacuguuugac

SEQ ID NO: 2728738 - RNA, 19 nt, Artificial Sequence
  Description of Artificial Sequence: Synthetic oligonucleotide
uuagcuccuugcaauuucu

SEQ ID NO: 2728739 - RNA, 19 nt, Artificial Sequence
  Description of Artificial Sequence: Synthetic oligonucleotide
aagcaaauuaggucuucau

SEQ ID NO: 2728740 - RNA, 19 nt, Artificial Sequence
  Description of Artificial Sequence: Synthetic oligonucleotide
uugcaauuucuaauaugcu

SEQ ID NO: 2728741 - RNA, 19 nt, Artificial Sequence
  Description of Artificial Sequence: Synthetic oligonucleotide
caagaauggcuuuuccaac

SEQ ID NO: 2728742 - RNA, 19 nt, Artificial Sequence
  Description of Artificial Sequence: Synthetic oligonucleotide
auacccagaaaaccuucag

SEQ ID NO: 2728743 - RNA, 19 nt, Artificial Sequence
  Description of Artificial Sequence: Synthetic oligonucleotide
uguuugacuggugcuauga

SEQ ID NO: 2728744 - RNA, 19 nt, Artificial Sequence
  Description of Artificial Sequence: Synthetic oligonucleotide
acagcuaccaugcucucaa

SEQ ID NO: 2728745 - RNA, 19 nt, Artificial Sequence
  Description of Artificial Sequence: Synthetic oligonucleotide
ucagguuaaggaacuuuuc

SEQ ID NO: 2728746 - RNA, 19 nt, Artificial Sequence
  Description of Artificial Sequence: Synthetic oligonucleotide
gaagguguagaugagaaau

SEQ ID NO: 2728747 - RNA, 19 nt, Artificial Sequence
  Description of Artificial Sequence: Synthetic oligonucleotide
uguuguguauacccagaaa

SEQ ID NO: 2728748 - RNA, 19 nt, Artificial Sequence
  Description of Artificial Sequence: Synthetic oligonucleotide
ugacaugaagguguagaug

SEQ ID NO: 2728749 - RNA, 19 nt, Artificial Sequence
  Description of Artificial Sequence: Synthetic oligonucleotide
guaaaucaacuuugauaag

SEQ ID NO: 2728750 - RNA, 19 nt, Artificial Sequence
  Description of Artificial Sequence: Synthetic oligonucleotide
uauuucucucaagaauggc

SEQ ID NO: 2728751 - RNA, 19 nt, Artificial Sequence
  Description of Artificial Sequence: Synthetic oligonucleotide
auucucacaucuguaaagu

SEQ ID NO: 2728752 - RNA, 19 nt, Artificial Sequence
  Description of Artificial Sequence: Synthetic oligonucleotide
uaaggaacuuuuccauggu

SEQ ID NO: 2728753 - RNA, 19 nt, Artificial Sequence
  Description of Artificial Sequence: Synthetic oligonucleotide
caaagugagcaaaauaaua

SEQ ID NO: 2728754 - RNA, 19 nt, Artificial Sequence
  Description of Artificial Sequence: Synthetic oligonucleotide
aacagaaugguggcauaug

SEQ ID NO: 2728755 - RNA, 19 nt, Artificial Sequence
  Description of Artificial Sequence: Synthetic oligonucleotide
agaaaucgaacagaauggu

SEQ ID NO: 2728756 - RNA, 19 nt, Artificial Sequence
  Description of Artificial Sequence: Synthetic oligonucleotide
uacucagugguaguguugu

SEQ ID NO: 2728757 - RNA, 19 nt, Artificial Sequence
  Description of Artificial Sequence: Synthetic oligonucleotide
uggcaccacaagauaauga

SEQ ID NO: 2728758 - RNA, 19 nt, Artificial Sequence
  Description of Artificial Sequence: Synthetic oligonucleotide
agaugagaaaucgaacaga

SEQ ID NO: 2728759 - RNA, 19 nt, Artificial Sequence
  Description of Artificial Sequence: Synthetic oligonucleotide
cuuugauaagaagccaaac

SEQ ID NO: 2728760 - RNA, 19 nt, Artificial Sequence
  Description of Artificial Sequence: Synthetic oligonucleotide
uucagacugcaaucaaacu

SEQ ID NO: 2728761 - RNA, 19 nt, Artificial Sequence
  Description of Artificial Sequence: Synthetic oligonucleotide
ucaagccaauaaucaacug

SEQ ID NO: 2728762 - RNA, 19 nt, Artificial Sequence
  Description of Artificial Sequence: Synthetic oligonucleotide
ucagugguaguguugugua

SEQ ID NO: 2728763 - RNA, 19 nt, Artificial Sequence
  Description of Artificial Sequence: Synthetic oligonucleotide
gcaauuucuaauaugcuuc

SEQ ID NO: 2728764 - RNA, 19 nt, Artificial Sequence
  Description of Artificial Sequence: Synthetic oligonucleotide
augugaucucuguuuagcu

SEQ ID NO: 2728765 - RNA, 19 nt, Artificial Sequence
  Description of Artificial Sequence: Synthetic oligonucleotide
uaauaauguaaggcuacuc

SEQ ID NO: 2728766 - RNA, 19 nt, Artificial Sequence
  Description of Artificial Sequence: Synthetic oligonucleotide
augacaugaagguguagau

SEQ ID NO: 2728767 - RNA, 19 nt, Artificial Sequence
  Description of Artificial Sequence: Synthetic oligonucleotide
auaauagcucauccugagu

SEQ ID NO: 2728768 - RNA, 19 nt, Artificial Sequence
  Description of Artificial Sequence: Synthetic oligonucleotide
ucucaaccauuucuaugug

SEQ ID NO: 2728769 - RNA, 19 nt, Artificial Sequence
  Description of Artificial Sequence: Synthetic oligonucleotide
aauaaucaacugugacaaa

SEQ ID NO: 2728770 - RNA, 19 nt, Artificial Sequence
  Description of Artificial Sequence: Synthetic oligonucleotide
cucucaaccauuucuaugu

SEQ ID NO: 2728771 - RNA, 19 nt, Artificial Sequence
  Description of Artificial Sequence: Synthetic oligonucleotide
caaaauaauagcucauccu

SEQ ID NO: 2728772 - RNA, 19 nt, Artificial Sequence
  Description of Artificial Sequence: Synthetic oligonucleotide
cauuucuaugugaucucug

SEQ ID NO: 2728773 - RNA, 19 nt, Artificial Sequence
  Description of Artificial Sequence: Synthetic oligonucleotide
uaaagucagugaaauuauu

SEQ ID NO: 2728774 - RNA, 19 nt, Artificial Sequence
  Description of Artificial Sequence: Synthetic oligonucleotide
auggaaacccauucucaca

SEQ ID NO: 2728775 - RNA, 19 nt, Artificial Sequence
  Description of Artificial Sequence: Synthetic oligonucleotide
gugagcaaaauaauagcuc

SEQ ID NO: 2728776 - RNA, 19 nt, Artificial Sequence
  Description of Artificial Sequence: Synthetic oligonucleotide
gucagugaaauuauuucuc

SEQ ID NO: 2728777 - RNA, 19 nt, Artificial Sequence
  Description of Artificial Sequence: Synthetic oligonucleotide
ugcuucuuuggcaccacaa

SEQ ID NO: 2728778 - RNA, 19 nt, Artificial Sequence
  Description of Artificial Sequence: Synthetic oligonucleotide
aucaacugugacaaaccag

SEQ ID NO: 2728779 - RNA, 19 nt, Artificial Sequence
  Description of Artificial Sequence: Synthetic oligonucleotide
ggugcuaugacaugaaggu

SEQ ID NO: 2728780 - RNA, 19 nt, Artificial Sequence
  Description of Artificial Sequence: Synthetic oligonucleotide
gaaacccauucucacaucu

SEQ ID NO: 2728781 - RNA, 19 nt, Artificial Sequence
  Description of Artificial Sequence: Synthetic oligonucleotide
caucuguaaagucagugaa

SEQ ID NO: 2728782 - RNA, 19 nt, Artificial Sequence
  Description of Artificial Sequence: Synthetic oligonucleotide
aucucuguuuagcuccuug

SEQ ID NO: 2728783 - RNA, 19 nt, Artificial Sequence
  Description of Artificial Sequence: Synthetic oligonucleotide
cuaugugaucucuguuuag

SEQ ID NO: 2728784 - RNA, 19 nt, Artificial Sequence
  Description of Artificial Sequence: Synthetic oligonucleotide
cucgcagugcaagagcucc

SEQ ID NO: 2728785 - RNA, 19 nt, Artificial Sequence
  Description of Artificial Sequence: Synthetic oligonucleotide
auauggaaacccauucuca

SEQ ID NO: 2728786 - RNA, 19 nt, Artificial Sequence
  Description of Artificial Sequence: Synthetic oligonucleotide
ugauaucuuugaagcaaau

SEQ ID NO: 2728787 - RNA, 19 nt, Artificial Sequence
  Description of Artificial Sequence: Synthetic oligonucleotide
aucuggucuguaaaucaac

SEQ ID NO: 2728788 - RNA, 19 nt, Artificial Sequence
  Description of Artificial Sequence: Synthetic oligonucleotide
guaagaaucuggucuguaa

SEQ ID NO: 2728789 - RNA, 19 nt, Artificial Sequence
  Description of Artificial Sequence: Synthetic oligonucleotide
aacacgcaggcgcugucgu

SEQ ID NO: 2728790 - RNA, 19 nt, Artificial Sequence
  Description of Artificial Sequence: Synthetic oligonucleotide
cagugaaauuauuucucuc

SEQ ID NO: 2728791 - RNA, 19 nt, Artificial Sequence
  Description of Artificial Sequence: Synthetic oligonucleotide
ucauucucgcagugcaaga

SEQ ID NO: 2728792 - RNA, 19 nt, Artificial Sequence
  Description of Artificial Sequence: Synthetic oligonucleotide
auagcucauccugagucag

SEQ ID NO: 2728793 - RNA, 19 nt, Artificial Sequence
  Description of Artificial Sequence: Synthetic oligonucleotide
uccuugcaauuucuaauau

SEQ ID NO: 2728794 - RNA, 19 nt, Artificial Sequence
  Description of Artificial Sequence: Synthetic oligonucleotide
cuuuggcaccacaagauaa

SEQ ID NO: 2728795 - RNA, 19 nt, Artificial Sequence
  Description of Artificial Sequence: Synthetic oligonucleotide
aacuguuugacuggugcua

SEQ ID NO: 2728796 - RNA, 19 nt, Artificial Sequence
  Description of Artificial Sequence: Synthetic oligonucleotide
ccaauaaucaacugugaca

SEQ ID NO: 2728797 - RNA, 19 nt, Artificial Sequence
  Description of Artificial Sequence: Synthetic oligonucleotide
agauaaugaugaagugccg

SEQ ID NO: 2728798 - RNA, 19 nt, Artificial Sequence
  Description of Artificial Sequence: Synthetic oligonucleotide
guguagaugagaaaucgaa

SEQ ID NO: 2728799 - RNA, 19 nt, Artificial Sequence
  Description of Artificial Sequence: Synthetic oligonucleotide
uucucacaucuguaaaguc

SEQ ID NO: 2728800 - RNA, 19 nt, Artificial Sequence
  Description of Artificial Sequence: Synthetic oligonucleotide
augaagugccgcugguuug

SEQ ID NO: 2728801 - RNA, 19 nt, Artificial Sequence
  Description of Artificial Sequence: Synthetic oligonucleotide
uguuuagcuccuugcaauu

SEQ ID NO: 2728802 - RNA, 19 nt, Artificial Sequence
  Description of Artificial Sequence: Synthetic oligonucleotide
agagcuccgugucggguuc

SEQ ID NO: 2728803 - RNA, 19 nt, Artificial Sequence
  Description of Artificial Sequence: Synthetic oligonucleotide
aagagcuccgugucggguu

SEQ ID NO: 2728804 - RNA, 19 nt, Artificial Sequence
  Description of Artificial Sequence: Synthetic oligonucleotide
uccgugucggguuccuucc

SEQ ID NO: 2728805 - RNA, 19 nt, Artificial Sequence
  Description of Artificial Sequence: Synthetic oligonucleotide
caagccaauaaucaacugu

SEQ ID NO: 2728806 - RNA, 19 nt, Artificial Sequence
  Description of Artificial Sequence: Synthetic oligonucleotide
cauucucgcagugcaagag

SEQ ID NO: 2728807 - RNA, 19 nt, Artificial Sequence
  Description of Artificial Sequence: Synthetic oligonucleotide
ugaagugccgcugguuuga

SEQ ID NO: 2728808 - RNA, 19 nt, Artificial Sequence
  Description of Artificial Sequence: Synthetic oligonucleotide
ggaacuuuuccaugguuca

SEQ ID NO: 2728809 - RNA, 19 nt, Artificial Sequence
  Description of Artificial Sequence: Synthetic oligonucleotide
uugaagcaaauuaggucuu

SEQ ID NO: 2728810 - RNA, 19 nt, Artificial Sequence
  Description of Artificial Sequence: Synthetic oligonucleotide
ggcauauggaaacccauuc

SEQ ID NO: 2728811 - RNA, 19 nt, Artificial Sequence
  Description of Artificial Sequence: Synthetic oligonucleotide
uuggcaccacaagauaaug

SEQ ID NO: 2728812 - RNA, 19 nt, Artificial Sequence
  Description of Artificial Sequence: Synthetic oligonucleotide
gaagcaaauuaggucuuca

SEQ ID NO: 2728813 - RNA, 19 nt, Artificial Sequence
  Description of Artificial Sequence: Synthetic oligonucleotide
ugaucucuguuuagcuccu

SEQ ID NO: 2728814 - RNA, 19 nt, Artificial Sequence
  Description of Artificial Sequence: Synthetic oligonucleotide
gccaauaaucaacugugac

SEQ ID NO: 2728815 - RNA, 19 nt, Artificial Sequence
  Description of Artificial Sequence: Synthetic oligonucleotide
cuucaaagugagcaaaaua

SEQ ID NO: 2728816 - RNA, 19 nt, Artificial Sequence
  Description of Artificial Sequence: Synthetic oligonucleotide
aaacccauucucacaucug

SEQ ID NO: 2728817 - RNA, 19 nt, Artificial Sequence
  Description of Artificial Sequence: Synthetic oligonucleotide
gaagccaaacuguuugacu

SEQ ID NO: 2728818 - RNA, 19 nt, Artificial Sequence
  Description of Artificial Sequence: Synthetic oligonucleotide
agcuccuugcaauuucuaa

SEQ ID NO: 2728819 - RNA, 19 nt, Artificial Sequence
  Description of Artificial Sequence: Synthetic oligonucleotide
gugguaguguuguguauac

SEQ ID NO: 2728820 - RNA, 19 nt, Artificial Sequence
  Description of Artificial Sequence: Synthetic oligonucleotide
gaacacgcaggcgcugucg

SEQ ID NO: 2728821 - RNA, 19 nt, Artificial Sequence
  Description of Artificial Sequence: Synthetic oligonucleotide
gcugguuugauaucuuuga

SEQ ID NO: 2728822 - RNA, 19 nt, Artificial Sequence
  Description of Artificial Sequence: Synthetic oligonucleotide
ucgcagugcaagagcuccg

SEQ ID NO: 2728823 - RNA, 19 nt, Artificial Sequence
  Description of Artificial Sequence: Synthetic oligonucleotide
caaauuaggucuucauucu

SEQ ID NO: 2728824 - RNA, 19 nt, Artificial Sequence
  Description of Artificial Sequence: Synthetic oligonucleotide
uggcauauggaaacccauu

SEQ ID NO: 2728825 - RNA, 19 nt, Artificial Sequence
  Description of Artificial Sequence: Synthetic oligonucleotide
ucggguuccuucccgccgc

SEQ ID NO: 2728826 - RNA, 19 nt, Artificial Sequence
  Description of Artificial Sequence: Synthetic oligonucleotide
gacuggugcuaugacauga

SEQ ID NO: 2728827 - RNA, 19 nt, Artificial Sequence
  Description of Artificial Sequence: Synthetic oligonucleotide
gcuaccaugcucucaacca

SEQ ID NO: 2728828 - RNA, 19 nt, Artificial Sequence
  Description of Artificial Sequence: Synthetic oligonucleotide
cuacucagugguaguguug

SEQ ID NO: 2728829 - RNA, 19 nt, Artificial Sequence
  Description of Artificial Sequence: Synthetic oligonucleotide
uuccuucccgccgcgaugc

SEQ ID NO: 2728830 - RNA, 19 nt, Artificial Sequence
  Description of Artificial Sequence: Synthetic oligonucleotide
guuugacuggugcuaugac

SEQ ID NO: 2728831 - RNA, 19 nt, Artificial Sequence
  Description of Artificial Sequence: Synthetic oligonucleotide
gaugaagugccgcugguuu

SEQ ID NO: 2728832 - RNA, 19 nt, Artificial Sequence
  Description of Artificial Sequence: Synthetic oligonucleotide
agaacacgcaggcgcuguc

SEQ ID NO: 2728833 - RNA, 19 nt, Artificial Sequence
  Description of Artificial Sequence: Synthetic oligonucleotide
gauaagaagccaaacuguu

SEQ ID NO: 2728834 - RNA, 19 nt, Artificial Sequence
  Description of Artificial Sequence: Synthetic oligonucleotide
agugguaguguuguguaua

SEQ ID NO: 2728835 - RNA, 19 nt, Artificial Sequence
  Description of Artificial Sequence: Synthetic oligonucleotide
ugguggcauauggaaaccc

SEQ ID NO: 2728836 - RNA, 19 nt, Artificial Sequence
  Description of Artificial Sequence: Synthetic oligonucleotide
gucggguuccuucccgccg

SEQ ID NO: 2728837 - RNA, 19 nt, Artificial Sequence
  Description of Artificial Sequence: Synthetic oligonucleotide
uuuccaugguucacauuuu

SEQ ID NO: 2728838 - RNA, 19 nt, Artificial Sequence
  Description of Artificial Sequence: Synthetic oligonucleotide
guaguguuguguauaccca

SEQ ID NO: 2728839 - RNA, 19 nt, Artificial Sequence
  Description of Artificial Sequence: Synthetic oligonucleotide
cucaaccauuucuauguga

SEQ ID NO: 2728840 - RNA, 19 nt, Artificial Sequence
  Description of Artificial Sequence: Synthetic oligonucleotide
cuggugcuaugacaugaag

SEQ ID NO: 2728841 - RNA, 19 nt, Artificial Sequence
  Description of Artificial Sequence: Synthetic oligonucleotide
gaaugguggcauauggaaa

SEQ ID NO: 2728842 - RNA, 19 nt, Artificial Sequence
  Description of Artificial Sequence: Synthetic oligonucleotide
cucuguuuagcuccuugca

SEQ ID NO: 2728843 - RNA, 19 nt, Artificial Sequence
  Description of Artificial Sequence: Synthetic oligonucleotide
auccugagucagguuaagg

SEQ ID NO: 2728844 - RNA, 19 nt, Artificial Sequence
  Description of Artificial Sequence: Synthetic oligonucleotide
ugcucucaaccauuucuau

SEQ ID NO: 2728845 - RNA, 19 nt, Artificial Sequence
  Description of Artificial Sequence: Synthetic oligonucleotide
gaacuuuuccaugguucac

SEQ ID NO: 2728846 - RNA, 19 nt, Artificial Sequence
  Description of Artificial Sequence: Synthetic oligonucleotide
guguauacccagaaaaccu

SEQ ID NO: 2728847 - RNA, 19 nt, Artificial Sequence
  Description of Artificial Sequence: Synthetic oligonucleotide
agcucauccugagucaggu

SEQ ID NO: 2728848 - RNA, 19 nt, Artificial Sequence
  Description of Artificial Sequence: Synthetic oligonucleotide
accacaagauaaugaugaa

SEQ ID NO: 2728849 - RNA, 19 nt, Artificial Sequence
  Description of Artificial Sequence: Synthetic oligonucleotide
caaccauuucuaugugauc

SEQ ID NO: 2728850 - RNA, 19 nt, Artificial Sequence
  Description of Artificial Sequence: Synthetic oligonucleotide
caggcgcugucguaguccc

SEQ ID NO: 2728851 - RNA, 19 nt, Artificial Sequence
  Description of Artificial Sequence: Synthetic oligonucleotide
aguguuguguauacccaga

SEQ ID NO: 2728852 - RNA, 19 nt, Artificial Sequence
  Description of Artificial Sequence: Synthetic oligonucleotide
ugccgcugguuugauaucu

SEQ ID NO: 2728853 - RNA, 19 nt, Artificial Sequence
  Description of Artificial Sequence: Synthetic oligonucleotide
ugucggguuccuucccgcc

SEQ ID NO: 2728854 - RNA, 19 nt, Artificial Sequence
  Description of Artificial Sequence: Synthetic oligonucleotide
ugaagcaaauuaggucuuc

SEQ ID NO: 2728855 - RNA, 19 nt, Artificial Sequence
  Description of Artificial Sequence: Synthetic oligonucleotide
uaccaugcucucaaccauu

SEQ ID NO: 2728856 - RNA, 19 nt, Artificial Sequence
  Description of Artificial Sequence: Synthetic oligonucleotide
cugugacaaaccaguaaga

SEQ ID NO: 2728857 - RNA, 19 nt, Artificial Sequence
  Description of Artificial Sequence: Synthetic oligonucleotide
guauacccagaaaaccuuc

SEQ ID NO: 2728858 - RNA, 19 nt, Artificial Sequence
  Description of Artificial Sequence: Synthetic oligonucleotide
gugacaaaccaguaagaau

SEQ ID NO: 2728859 - RNA, 19 nt, Artificial Sequence
  Description of Artificial Sequence: Synthetic oligonucleotide
auaagaagccaaacuguuu

SEQ ID NO: 2728860 - RNA, 19 nt, Artificial Sequence
  Description of Artificial Sequence: Synthetic oligonucleotide
uaguccccgggcuccgagg

SEQ ID NO: 2728861 - RNA, 19 nt, Artificial Sequence
  Description of Artificial Sequence: Synthetic oligonucleotide
cacgcaggcgcugucguag

SEQ ID NO: 2728862 - RNA, 19 nt, Artificial Sequence
  Description of Artificial Sequence: Synthetic oligonucleotide
ugguaguguuguguauacc

SEQ ID NO: 2728863 - RNA, 19 nt, Artificial Sequence
  Description of Artificial Sequence: Synthetic oligonucleotide
cuccgugucggguuccuuc

SEQ ID NO: 2728864 - RNA, 19 nt, Artificial Sequence
  Description of Artificial Sequence: Synthetic oligonucleotide
acuguuugacuggugcuau

SEQ ID NO: 2728865 - RNA, 19 nt, Artificial Sequence
  Description of Artificial Sequence: Synthetic oligonucleotide
gucuguaaaucaacuuuga

SEQ ID NO: 2728866 - RNA, 19 nt, Artificial Sequence
  Description of Artificial Sequence: Synthetic oligonucleotide
gauaucuuugaagcaaauu

SEQ ID NO: 2728867 - RNA, 19 nt, Artificial Sequence
  Description of Artificial Sequence: Synthetic oligonucleotide
aucuguaaagucagugaaa

SEQ ID NO: 2728868 - RNA, 19 nt, Artificial Sequence
  Description of Artificial Sequence: Synthetic oligonucleotide
guguuguguauacccagaa

SEQ ID NO: 2728869 - RNA, 19 nt, Artificial Sequence
  Description of Artificial Sequence: Synthetic oligonucleotide
ucucgcagugcaagagcuc

SEQ ID NO: 2728870 - RNA, 19 nt, Artificial Sequence
  Description of Artificial Sequence: Synthetic oligonucleotide
agucagguuaaggaacuuu

SEQ ID NO: 2728871 - RNA, 19 nt, Artificial Sequence
  Description of Artificial Sequence: Synthetic oligonucleotide
caacuuugauaagaagcca

SEQ ID NO: 2728872 - RNA, 19 nt, Artificial Sequence
  Description of Artificial Sequence: Synthetic oligonucleotide
gugcuaugacaugaaggug

SEQ ID NO: 2728873 - RNA, 19 nt, Artificial Sequence
  Description of Artificial Sequence: Synthetic oligonucleotide
cucucaagaauggcuuuuc

SEQ ID NO: 2728874 - RNA, 19 nt, Artificial Sequence
  Description of Artificial Sequence: Synthetic oligonucleotide
guuccuucccgccgcgaug

SEQ ID NO: 2728875 - RNA, 19 nt, Artificial Sequence
  Description of Artificial Sequence: Synthetic oligonucleotide
cuguuuagcuccuugcaau

SEQ ID NO: 2728876 - RNA, 19 nt, Artificial Sequence
  Description of Artificial Sequence: Synthetic oligonucleotide
uccccgggcuccgaggucc

SEQ ID NO: 2728877 - RNA, 19 nt, Artificial Sequence
  Description of Artificial Sequence: Synthetic oligonucleotide
aguccccgggcuccgaggu

SEQ ID NO: 2728878 - RNA, 19 nt, Artificial Sequence
  Description of Artificial Sequence: Synthetic oligonucleotide
accuucagacugcaaucaa

SEQ ID NO: 2728879 - RNA, 19 nt, Artificial Sequence
  Description of Artificial Sequence: Synthetic oligonucleotide
ggcgcugucguaguccccg

SEQ ID NO: 2728880 - RNA, 19 nt, Artificial Sequence
  Description of Artificial Sequence: Synthetic oligonucleotide
cugguuugauaucuuugaa

SEQ ID NO: 2728881 - RNA, 19 nt, Artificial Sequence
  Description of Artificial Sequence: Synthetic oligonucleotide
uaugcuucuuuggcaccac

SEQ ID NO: 2728882 - RNA, 19 nt, Artificial Sequence
  Description of Artificial Sequence: Synthetic oligonucleotide
aucgaacagaaugguggca

SEQ ID NO: 2728883 - RNA, 19 nt, Artificial Sequence
  Description of Artificial Sequence: Synthetic oligonucleotide
ggcaccacaagauaaugau

SEQ ID NO: 2728884 - RNA, 19 nt, Artificial Sequence
  Description of Artificial Sequence: Synthetic oligonucleotide
aggcuacucagugguagug

SEQ ID NO: 2728885 - RNA, 19 nt, Artificial Sequence
  Description of Artificial Sequence: Synthetic oligonucleotide
guaauaauguaaggcuacu

SEQ ID NO: 2728886 - RNA, 19 nt, Artificial Sequence
  Description of Artificial Sequence: Synthetic oligonucleotide
cuguuugacuggugcuaug

SEQ ID NO: 2728887 - RNA, 19 nt, Artificial Sequence
  Description of Artificial Sequence: Synthetic oligonucleotide
cuaugacaugaagguguag

SEQ ID NO: 2728888 - RNA, 19 nt, Artificial Sequence
  Description of Artificial Sequence: Synthetic oligonucleotide
agccaauaaucaacuguga

SEQ ID NO: 2728889 - RNA, 19 nt, Artificial Sequence
  Description of Artificial Sequence: Synthetic oligonucleotide
gugucggguuccuucccgc

SEQ ID NO: 2728890 - RNA, 19 nt, Artificial Sequence
  Description of Artificial Sequence: Synthetic oligonucleotide
gccgcgaugcggcagaaca

SEQ ID NO: 2728891 - RNA, 19 nt, Artificial Sequence
  Description of Artificial Sequence: Synthetic oligonucleotide
ugaugaagugccgcugguu

SEQ ID NO: 2728892 - RNA, 19 nt, Artificial Sequence
  Description of Artificial Sequence: Synthetic oligonucleotide
acucagugguaguguugug

SEQ ID NO: 2728893 - RNA, 19 nt, Artificial Sequence
  Description of Artificial Sequence: Synthetic oligonucleotide
gcugucguaguccccgggc

SEQ ID NO: 2728894 - RNA, 19 nt, Artificial Sequence
  Description of Artificial Sequence: Synthetic oligonucleotide
uagcuccuugcaauuucua

SEQ ID NO: 2728895 - RNA, 19 nt, Artificial Sequence
  Description of Artificial Sequence: Synthetic oligonucleotide
ccaacagcuaccaugcucu

SEQ ID NO: 2728896 - RNA, 19 nt, Artificial Sequence
  Description of Artificial Sequence: Synthetic oligonucleotide
augcuucuuuggcaccaca

SEQ ID NO: 2728897 - RNA, 19 nt, Artificial Sequence
  Description of Artificial Sequence: Synthetic oligonucleotide
augcucucaaccauuucua

SEQ ID NO: 2728898 - RNA, 19 nt, Artificial Sequence
  Description of Artificial Sequence: Synthetic oligonucleotide
augagaaaucgaacagaau

SEQ ID NO: 2728899 - RNA, 19 nt, Artificial Sequence
  Description of Artificial Sequence: Synthetic oligonucleotide
gguguagaugagaaaucga

SEQ ID NO: 2728900 - RNA, 19 nt, Artificial Sequence
  Description of Artificial Sequence: Synthetic oligonucleotide
cauccugagucagguuaag

SEQ ID NO: 2728901 - RNA, 19 nt, Artificial Sequence
  Description of Artificial Sequence: Synthetic oligonucleotide
cggcagaacacgcaggcgc

SEQ ID NO: 2728902 - RNA, 19 nt, Artificial Sequence
  Description of Artificial Sequence: Synthetic oligonucleotide
gguggcauauggaaaccca

SEQ ID NO: 2728903 - RNA, 19 nt, Artificial Sequence
  Description of Artificial Sequence: Synthetic oligonucleotide
gcaccacaagauaaugaug

SEQ ID NO: 2728904 - RNA, 19 nt, Artificial Sequence
  Description of Artificial Sequence: Synthetic oligonucleotide
augcggcagaacacgcagg

SEQ ID NO: 2728905 - RNA, 19 nt, Artificial Sequence
  Description of Artificial Sequence: Synthetic oligonucleotide
uccgaggucccgggcgagg

SEQ ID NO: 2728906 - RNA, 19 nt, Artificial Sequence
  Description of Artificial Sequence: Synthetic oligonucleotide
cagugcaagagcuccgugu

SEQ ID NO: 2728907 - RNA, 19 nt, Artificial Sequence
  Description of Artificial Sequence: Synthetic oligonucleotide
gaacagaaugguggcauau

SEQ ID NO: 2728908 - RNA, 19 nt, Artificial Sequence
  Description of Artificial Sequence: Synthetic oligonucleotide
cuucauucucgcagugcaa

SEQ ID NO: 2728909 - RNA, 19 nt, Artificial Sequence
  Description of Artificial Sequence: Synthetic oligonucleotide
gucagguuaaggaacuuuu

SEQ ID NO: 2728910 - RNA, 19 nt, Artificial Sequence
  Description of Artificial Sequence: Synthetic oligonucleotide
gcauauggaaacccauucu

SEQ ID NO: 2728911 - RNA, 19 nt, Artificial Sequence
  Description of Artificial Sequence: Synthetic oligonucleotide
uccuucccgccgcgaugcg

SEQ ID NO: 2728912 - RNA, 19 nt, Artificial Sequence
  Description of Artificial Sequence: Synthetic oligonucleotide
acuggugcuaugacaugaa

SEQ ID NO: 2728913 - RNA, 19 nt, Artificial Sequence
  Description of Artificial Sequence: Synthetic oligonucleotide
ucguaguccccgggcuccg

SEQ ID NO: 2728914 - RNA, 19 nt, Artificial Sequence
  Description of Artificial Sequence: Synthetic oligonucleotide
aagugccgcugguuugaua

SEQ ID NO: 2728915 - RNA, 19 nt, Artificial Sequence
  Description of Artificial Sequence: Synthetic oligonucleotide
cucagugguaguguugugu

SEQ ID NO: 2728916 - RNA, 19 nt, Artificial Sequence
  Description of Artificial Sequence: Synthetic oligonucleotide
gagcaaaauaauagcucau

SEQ ID NO: 2728917 - RNA, 19 nt, Artificial Sequence
  Description of Artificial Sequence: Synthetic oligonucleotide
caacugugacaaaccagua

SEQ ID NO: 2728918 - RNA, 19 nt, Artificial Sequence
  Description of Artificial Sequence: Synthetic oligonucleotide
caacagcuaccaugcucuc

SEQ ID NO: 2728919 - RNA, 19 nt, Artificial Sequence
  Description of Artificial Sequence: Synthetic oligonucleotide
auggcuuuuccaacagcua

SEQ ID NO: 2728920 - RNA, 19 nt, Artificial Sequence
  Description of Artificial Sequence: Synthetic oligonucleotide
accaugcucucaaccauuu

SEQ ID NO: 2728921 - RNA, 19 nt, Artificial Sequence
  Description of Artificial Sequence: Synthetic oligonucleotide
ggaaacccauucucacauc

SEQ ID NO: 2728922 - RNA, 19 nt, Artificial Sequence
  Description of Artificial Sequence: Synthetic oligonucleotide
cuaccaugcucucaaccau

SEQ ID NO: 2728923 - RNA, 19 nt, Artificial Sequence
  Description of Artificial Sequence: Synthetic oligonucleotide
ccuucagacugcaaucaaa

SEQ ID NO: 2728924 - RNA, 19 nt, Artificial Sequence
  Description of Artificial Sequence: Synthetic oligonucleotide
cuggucuguaaaucaacuu

SEQ ID NO: 2728925 - RNA, 19 nt, Artificial Sequence
  Description of Artificial Sequence: Synthetic oligonucleotide
gcaggcgcugucguagucc

SEQ ID NO: 2728926 - RNA, 19 nt, Artificial Sequence
  Description of Artificial Sequence: Synthetic oligonucleotide
cagcuaccaugcucucaac

SEQ ID NO: 2728927 - RNA, 19 nt, Artificial Sequence
  Description of Artificial Sequence: Synthetic oligonucleotide
gcagugcaagagcuccgug

SEQ ID NO: 2728928 - RNA, 19 nt, Artificial Sequence
  Description of Artificial Sequence: Synthetic oligonucleotide
cgugucggguuccuucccg

SEQ ID NO: 2728929 - RNA, 19 nt, Artificial Sequence
  Description of Artificial Sequence: Synthetic oligonucleotide
guggcauauggaaacccau

SEQ ID NO: 2728930 - RNA, 19 nt, Artificial Sequence
  Description of Artificial Sequence: Synthetic oligonucleotide
cugucguaguccccgggcu

SEQ ID NO: 2728931 - RNA, 19 nt, Artificial Sequence
  Description of Artificial Sequence: Synthetic oligonucleotide
aggcgcugucguagucccc

SEQ ID NO: 2728932 - RNA, 19 nt, Artificial Sequence
  Description of Artificial Sequence: Synthetic oligonucleotide
guuuagcuccuugcaauuu

SEQ ID NO: 2728933 - RNA, 19 nt, Artificial Sequence
  Description of Artificial Sequence: Synthetic oligonucleotide
acacgcaggcgcugucgua

SEQ ID NO: 2728934 - RNA, 19 nt, Artificial Sequence
  Description of Artificial Sequence: Synthetic oligonucleotide
uucccgccgcgaugcggca

SEQ ID NO: 2728935 - RNA, 19 nt, Artificial Sequence
  Description of Artificial Sequence: Synthetic oligonucleotide
gcggcagaacacgcaggcg

SEQ ID NO: 2728936 - RNA, 19 nt, Artificial Sequence
  Description of Artificial Sequence: Synthetic oligonucleotide
gagcuccgugucggguucc

SEQ ID NO: 2728937 - RNA, 19 nt, Artificial Sequence
  Description of Artificial Sequence: Synthetic oligonucleotide
ucccgccgcgaugcggcag

SEQ ID NO: 2728938 - RNA, 19 nt, Artificial Sequence
  Description of Artificial Sequence: Synthetic oligonucleotide
guaaggcuacucaguggua

SEQ ID NO: 2728939 - RNA, 19 nt, Artificial Sequence
  Description of Artificial Sequence: Synthetic oligonucleotide
gcgaugcggcagaacacgc

SEQ ID NO: 2728940 - RNA, 19 nt, Artificial Sequence
  Description of Artificial Sequence: Synthetic oligonucleotide
ccgcgaugcggcagaacac

SEQ ID NO: 2728941 - RNA, 19 nt, Artificial Sequence
  Description of Artificial Sequence: Synthetic oligonucleotide
agcuccgugucggguuccu

SEQ ID NO: 2728942 - RNA, 19 nt, Artificial Sequence
  Description of Artificial Sequence: Synthetic oligonucleotide
gcgcugucguaguccccgg

SEQ ID NO: 2728943 - RNA, 19 nt, Artificial Sequence
  Description of Artificial Sequence: Synthetic oligonucleotide
cagugguaguguuguguau

SEQ ID NO: 2728944 - RNA, 19 nt, Artificial Sequence
  Description of Artificial Sequence: Synthetic oligonucleotide
cuccgaggucccgggcgag

SEQ ID NO: 2728945 - RNA, 19 nt, Artificial Sequence
  Description of Artificial Sequence: Synthetic oligonucleotide
ggcuacucagugguagugu

SEQ ID NO: 2728946 - RNA, 19 nt, Artificial Sequence
  Description of Artificial Sequence: Synthetic oligonucleotide
cuuuuccaacagcuaccau

SEQ ID NO: 2728947 - RNA, 19 nt, Artificial Sequence
  Description of Artificial Sequence: Synthetic oligonucleotide
cagaacacgcaggcgcugu

SEQ ID NO: 2728948 - RNA, 19 nt, Artificial Sequence
  Description of Artificial Sequence: Synthetic oligonucleotide
ggcagaacacgcaggcgcu

SEQ ID NO: 2728949 - RNA, 19 nt, Artificial Sequence
  Description of Artificial Sequence: Synthetic oligonucleotide
ccauuucuaugugaucucu

SEQ ID NO: 2728950 - RNA, 19 nt, Artificial Sequence
  Description of Artificial Sequence: Synthetic oligonucleotide
ccgugucggguuccuuccc

SEQ ID NO: 2728951 - RNA, 19 nt, Artificial Sequence
  Description of Artificial Sequence: Synthetic oligonucleotide
gagucagguuaaggaacuu

SEQ ID NO: 2728952 - RNA, 19 nt, Artificial Sequence
  Description of Artificial Sequence: Synthetic oligonucleotide
guccccgggcuccgagguc

SEQ ID NO: 2728953 - RNA, 19 nt, Artificial Sequence
  Description of Artificial Sequence: Synthetic oligonucleotide
gaagugccgcugguuugau

SEQ ID NO: 2728954 - RNA, 19 nt, Artificial Sequence
  Description of Artificial Sequence: Synthetic oligonucleotide
cgcugucguaguccccggg

SEQ ID NO: 2728955 - RNA, 19 nt, Artificial Sequence
  Description of Artificial Sequence: Synthetic oligonucleotide
ccgggcuccgaggucccgg

SEQ ID NO: 2728956 - RNA, 19 nt, Artificial Sequence
  Description of Artificial Sequence: Synthetic oligonucleotide
gggcuccgaggucccgggc

SEQ ID NO: 2728957 - RNA, 19 nt, Artificial Sequence
  Description of Artificial Sequence: Synthetic oligonucleotide
gaucucuguuuagcuccuu

SEQ ID NO: 2728958 - RNA, 19 nt, Artificial Sequence
  Description of Artificial Sequence: Synthetic oligonucleotide
cggguuccuucccgccgcg

SEQ ID NO: 2728959 - RNA, 19 nt, Artificial Sequence
  Description of Artificial Sequence: Synthetic oligonucleotide
cccgccgcgaugcggcaga

SEQ ID NO: 2728960 - RNA, 19 nt, Artificial Sequence
  Description of Artificial Sequence: Synthetic oligonucleotide
cgaggucccgggcgaggac

SEQ ID NO: 2728961 - RNA, 19 nt, Artificial Sequence
  Description of Artificial Sequence: Synthetic oligonucleotide
ccgaggucccgggcgagga

SEQ ID NO: 2728962 - RNA, 19 nt, Artificial Sequence
  Description of Artificial Sequence: Synthetic oligonucleotide
cgcaggcgcugucguaguc

SEQ ID NO: 2728963 - RNA, 19 nt, Artificial Sequence
  Description of Artificial Sequence: Synthetic oligonucleotide
ccgcugguuugauaucuuu

SEQ ID NO: 2728964 - RNA, 19 nt, Artificial Sequence
  Description of Artificial Sequence: Synthetic oligonucleotide
cgcagugcaagagcuccgu

SEQ ID NO: 2728965 - RNA, 19 nt, Artificial Sequence
  Description of Artificial Sequence: Synthetic oligonucleotide
gccgcugguuugauaucuu

SEQ ID NO: 2728966 - RNA, 19 nt, Artificial Sequence
  Description of Artificial Sequence: Synthetic oligonucleotide
cgccgcgaugcggcagaac

SEQ ID NO: 2728967 - RNA, 19 nt, Artificial Sequence
  Description of Artificial Sequence: Synthetic oligonucleotide
cguaguccccgggcuccga

SEQ ID NO: 2728968 - RNA, 19 nt, Artificial Sequence
  Description of Artificial Sequence: Synthetic oligonucleotide
gcuccgugucggguuccuu

SEQ ID NO: 2728969 - RNA, 19 nt, Artificial Sequence
  Description of Artificial Sequence: Synthetic oligonucleotide
ccgccgcgaugcggcagaa

SEQ ID NO: 2728970 - RNA, 19 nt, Artificial Sequence
  Description of Artificial Sequence: Synthetic oligonucleotide
aaagcaaacaccuuaccgc

SEQ ID NO: 2728971 - RNA, 19 nt, Artificial Sequence
  Description of Artificial Sequence: Synthetic oligonucleotide
aaaaguaugucaaacuacc

SEQ ID NO: 2728972 - RNA, 19 nt, Artificial Sequence
  Description of Artificial Sequence: Synthetic oligonucleotide
aaaagcaaacaccuuaccg

SEQ ID NO: 2728973 - RNA, 19 nt, Artificial Sequence
  Description of Artificial Sequence: Synthetic oligonucleotide
  modified_base (6)..(6): a, c, u, g, unknown or other
  modified_base (12)..(12): a, c, u, g, unknown or other
ucaaanaaauanaagaaaa

SEQ ID NO: 2728974 - RNA, 19 nt, Artificial Sequence
  Description of Artificial Sequence: Synthetic oligonucleotide
aagguaacaaaauucccac

SEQ ID NO: 2728975 - RNA, 19 nt, Artificial Sequence
  Description of Artificial Sequence: Synthetic oligonucleotide
agaaguucagaccaagugc

SEQ ID NO: 2728976 - RNA, 19 nt, Artificial Sequence
  Description of Artificial Sequence: Synthetic oligonucleotide
acuagcacuaaauauuccc

SEQ ID NO: 2728977 - RNA, 19 nt, Artificial Sequence
  Description of Artificial Sequence: Synthetic oligonucleotide
uaaagugaaaagaagaaaa

SEQ ID NO: 2728978 - RNA, 19 nt, Artificial Sequence
  Description of Artificial Sequence: Synthetic oligonucleotide
  modified_base (9)..(9): a, c, u, g, unknown or other
  modified_base (15)..(15): a, c, u, g, unknown or other
uccucaaanaaauanaaga

SEQ ID NO: 2728979 - RNA, 19 nt, Artificial Sequence
  Description of Artificial Sequence: Synthetic oligonucleotide
acgauaaauagcuaugugg

SEQ ID NO: 2728980 - RNA, 19 nt, Artificial Sequence
  Description of Artificial Sequence: Synthetic oligonucleotide
aaaagaaauucuuccuaac

SEQ ID NO: 2728981 - RNA, 19 nt, Artificial Sequence
  Description of Artificial Sequence: Synthetic oligonucleotide
uaaccuaaaauccaguaga

SEQ ID NO: 2728982 - RNA, 19 nt, Artificial Sequence
  Description of Artificial Sequence: Synthetic oligonucleotide
  modified_base (10)..(10): a, c, u, g, unknown or other
  modified_base (16)..(16): a, c, u, g, unknown or other
uuccucaaanaaauanaag

SEQ ID NO: 2728983 - RNA, 19 nt, Artificial Sequence
  Description of Artificial Sequence: Synthetic oligonucleotide
aagaaauucuuccuaaccu

SEQ ID NO: 2728984 - RNA, 19 nt, Artificial Sequence
  Description of Artificial Sequence: Synthetic oligonucleotide
ucuuccuaaccuaaaaucc

SEQ ID NO: 2728985 - RNA, 19 nt, Artificial Sequence
  Description of Artificial Sequence: Synthetic oligonucleotide
ucccacauuguauaaaucg

SEQ ID NO: 2728986 - RNA, 19 nt, Artificial Sequence
  Description of Artificial Sequence: Synthetic oligonucleotide
uaacaaaauucccacauug

SEQ ID NO: 2728987 - RNA, 19 nt, Artificial Sequence
  Description of Artificial Sequence: Synthetic oligonucleotide
ucaucaauaaagugaaaag

SEQ ID NO: 2728988 - RNA, 19 nt, Artificial Sequence
  Description of Artificial Sequence: Synthetic oligonucleotide
auagcuaugugguuagccc

SEQ ID NO: 2728989 - RNA, 19 nt, Artificial Sequence
  Description of Artificial Sequence: Synthetic oligonucleotide
aauagcuaugugguuagcc

SEQ ID NO: 2728990 - RNA, 19 nt, Artificial Sequence
  Description of Artificial Sequence: Synthetic oligonucleotide
ucuuucuucaaagacagag

SEQ ID NO: 2728991 - RNA, 19 nt, Artificial Sequence
  Description of Artificial Sequence: Synthetic oligonucleotide
aaagacgauaaauagcuau

SEQ ID NO: 2728992 - RNA, 19 nt, Artificial Sequence
  Description of Artificial Sequence: Synthetic oligonucleotide
aaauccaguagauacugug

SEQ ID NO: 2728993 - RNA, 19 nt, Artificial Sequence
  Description of Artificial Sequence: Synthetic oligonucleotide
aaaagguaacaaaauuccc

SEQ ID NO: 2728994 - RNA, 19 nt, Artificial Sequence
  Description of Artificial Sequence: Synthetic oligonucleotide
uuucuucaaagacagagcu

SEQ ID NO: 2728995 - RNA, 19 nt, Artificial Sequence
  Description of Artificial Sequence: Synthetic oligonucleotide
cauuguauaaaucgguucc

SEQ ID NO: 2728996 - RNA, 19 nt, Artificial Sequence
  Description of Artificial Sequence: Synthetic oligonucleotide
uuccaguauagcaagaggc

SEQ ID NO: 2728997 - RNA, 19 nt, Artificial Sequence
  Description of Artificial Sequence: Synthetic oligonucleotide
uccacaaagucuacgaugc

SEQ ID NO: 2728998 - RNA, 19 nt, Artificial Sequence
  Description of Artificial Sequence: Synthetic oligonucleotide
agcacuaaauauucccucc

SEQ ID NO: 2728999 - RNA, 19 nt, Artificial Sequence
  Description of Artificial Sequence: Synthetic oligonucleotide
uccaguauagcaagaggcg

SEQ ID NO: 2729000 - RNA, 19 nt, Artificial Sequence
  Description of Artificial Sequence: Synthetic oligonucleotide
agugcagaaguucagacca

SEQ ID NO: 2729001 - RNA, 19 nt, Artificial Sequence
  Description of Artificial Sequence: Synthetic oligonucleotide
aaaauucccacauuguaua

SEQ ID NO: 2729002 - RNA, 19 nt, Artificial Sequence
  Description of Artificial Sequence: Synthetic oligonucleotide
  modified_base (11)..(11): a, c, u, g, unknown or other
  modified_base (17)..(17): a, c, u, g, unknown or other
uuuccucaaanaaauanaa

SEQ ID NO: 2729003 - RNA, 19 nt, Artificial Sequence
  Description of Artificial Sequence: Synthetic oligonucleotide
auccaguagauacuguggc

SEQ ID NO: 2729004 - RNA, 19 nt, Artificial Sequence
  Description of Artificial Sequence: Synthetic oligonucleotide
aaagguaacaaaauuccca

SEQ ID NO: 2729005 - RNA, 19 nt, Artificial Sequence
  Description of Artificial Sequence: Synthetic oligonucleotide
acauuguauaaaucgguuc

SEQ ID NO: 2729006 - RNA, 19 nt, Artificial Sequence
  Description of Artificial Sequence: Synthetic oligonucleotide
ucggaagugcugaaaaggg

SEQ ID NO: 2729007 - RNA, 19 nt, Artificial Sequence
  Description of Artificial Sequence: Synthetic oligonucleotide
ucuuugucagugcagaagu

SEQ ID NO: 2729008 - RNA, 19 nt, Artificial Sequence
  Description of Artificial Sequence: Synthetic oligonucleotide
aaucgguuccaguauagca

SEQ ID NO: 2729009 - RNA, 19 nt, Artificial Sequence
  Description of Artificial Sequence: Synthetic oligonucleotide
uaaauagcuaugugguuag

SEQ ID NO: 2729010 - RNA, 19 nt, Artificial Sequence
  Description of Artificial Sequence: Synthetic oligonucleotide
gauacuguggcacuagcac

SEQ ID NO: 2729011 - RNA, 19 nt, Artificial Sequence
  Description of Artificial Sequence: Synthetic oligonucleotide
ccuaaaauccaguagauac

SEQ ID NO: 2729012 - RNA, 19 nt, Artificial Sequence
  Description of Artificial Sequence: Synthetic oligonucleotide
ucuucaaagacagagcuuc

SEQ ID NO: 2729013 - RNA, 19 nt, Artificial Sequence
  Description of Artificial Sequence: Synthetic oligonucleotide
  modified_base (7)..(7): a, c, u, g, unknown or other
  modified_base (13)..(13): a, c, u, g, unknown or other
cucaaanaaauanaagaaa

SEQ ID NO: 2729014 - RNA, 19 nt, Artificial Sequence
  Description of Artificial Sequence: Synthetic oligonucleotide
gaaguucagaccaagugcc

SEQ ID NO: 2729015 - RNA, 19 nt, Artificial Sequence
  Description of Artificial Sequence: Synthetic oligonucleotide
uaaaauccaguagauacug

SEQ ID NO: 2729016 - RNA, 19 nt, Artificial Sequence
  Description of Artificial Sequence: Synthetic oligonucleotide
ugagauggcauccucuucu

SEQ ID NO: 2729017 - RNA, 19 nt, Artificial Sequence
  Description of Artificial Sequence: Synthetic oligonucleotide
cuaaccuaaaauccaguag

SEQ ID NO: 2729018 - RNA, 19 nt, Artificial Sequence
  Description of Artificial Sequence: Synthetic oligonucleotide
aauucuuccuaaccuaaaa

SEQ ID NO: 2729019 - RNA, 19 nt, Artificial Sequence
  Description of Artificial Sequence: Synthetic oligonucleotide
aauccaguagauacugugg

SEQ ID NO: 2729020 - RNA, 19 nt, Artificial Sequence
  Description of Artificial Sequence: Synthetic oligonucleotide
aacugucaccuccacaaag

SEQ ID NO: 2729021 - RNA, 19 nt, Artificial Sequence
  Description of Artificial Sequence: Synthetic oligonucleotide
uucuuccuaaccuaaaauc

SEQ ID NO: 2729022 - RNA, 19 nt, Artificial Sequence
  Description of Artificial Sequence: Synthetic oligonucleotide
aagcaaacaccuuaccgcu

SEQ ID NO: 2729023 - RNA, 19 nt, Artificial Sequence
  Description of Artificial Sequence: Synthetic oligonucleotide
uauaaaucgguuccaguau

SEQ ID NO: 2729024 - RNA, 19 nt, Artificial Sequence
  Description of Artificial Sequence: Synthetic oligonucleotide
aguaugucaaacuaccuua

SEQ ID NO: 2729025 - RNA, 19 nt, Artificial Sequence
  Description of Artificial Sequence: Synthetic oligonucleotide
aaguaugucaaacuaccuu

SEQ ID NO: 2729026 - RNA, 19 nt, Artificial Sequence
  Description of Artificial Sequence: Synthetic oligonucleotide
cuuucuucaaagacagagc

SEQ ID NO: 2729027 - RNA, 19 nt, Artificial Sequence
  Description of Artificial Sequence: Synthetic oligonucleotide
aaaucgguuccaguauagc

SEQ ID NO: 2729028 - RNA, 19 nt, Artificial Sequence
  Description of Artificial Sequence: Synthetic oligonucleotide
auuucucugagauggcauc

SEQ ID NO: 2729029 - RNA, 19 nt, Artificial Sequence
  Description of Artificial Sequence: Synthetic oligonucleotide
uuccuaaccuaaaauccag

SEQ ID NO: 2729030 - RNA, 19 nt, Artificial Sequence
  Description of Artificial Sequence: Synthetic oligonucleotide
ugucccauuucucugagau

SEQ ID NO: 2729031 - RNA, 19 nt, Artificial Sequence
  Description of Artificial Sequence: Synthetic oligonucleotide
uucuccaacugucaccucc

SEQ ID NO: 2729032 - RNA, 19 nt, Artificial Sequence
  Description of Artificial Sequence: Synthetic oligonucleotide
uauagcaagaggcggggca

SEQ ID NO: 2729033 - RNA, 19 nt, Artificial Sequence
  Description of Artificial Sequence: Synthetic oligonucleotide
  modified_base (15)..(15): a, c, u, g, unknown or other
ucguuuuccucaaanaaau

SEQ ID NO: 2729034 - RNA, 19 nt, Artificial Sequence
  Description of Artificial Sequence: Synthetic oligonucleotide
uaaaucgguuccaguauag

SEQ ID NO: 2729035 - RNA, 19 nt, Artificial Sequence
  Description of Artificial Sequence: Synthetic oligonucleotide
uugucagugcagaaguuca

SEQ ID NO: 2729036 - RNA, 19 nt, Artificial Sequence
  Description of Artificial Sequence: Synthetic oligonucleotide
aucaauaaagugaaaagaa

SEQ ID NO: 2729037 - RNA, 19 nt, Artificial Sequence
  Description of Artificial Sequence: Synthetic oligonucleotide
acaaagucuacgaugcccg

SEQ ID NO: 2729038 - RNA, 19 nt, Artificial Sequence
  Description of Artificial Sequence: Synthetic oligonucleotide
aagacgauaaauagcuaug

SEQ ID NO: 2729039 - RNA, 19 nt, Artificial Sequence
  Description of Artificial Sequence: Synthetic oligonucleotide
uacgaugcccgacuccucg

SEQ ID NO: 2729040 - RNA, 19 nt, Artificial Sequence
  Description of Artificial Sequence: Synthetic oligonucleotide
aagucuacgaugcccgacu

SEQ ID NO: 2729041 - RNA, 19 nt, Artificial Sequence
  Description of Artificial Sequence: Synthetic oligonucleotide
aaagucuacgaugcccgac

SEQ ID NO: 2729042 - RNA, 19 nt, Artificial Sequence
  Description of Artificial Sequence: Synthetic oligonucleotide
gacgauaaauagcuaugug

SEQ ID NO: 2729043 - RNA, 19 nt, Artificial Sequence
  Description of Artificial Sequence: Synthetic oligonucleotide
guauaaaucgguuccagua

SEQ ID NO: 2729044 - RNA, 19 nt, Artificial Sequence
  Description of Artificial Sequence: Synthetic oligonucleotide
augugguuagcccuccuuc

SEQ ID NO: 2729045 - RNA, 19 nt, Artificial Sequence
  Description of Artificial Sequence: Synthetic oligonucleotide
guuccaguauagcaagagg

SEQ ID NO: 2729046 - RNA, 19 nt, Artificial Sequence
  Description of Artificial Sequence: Synthetic oligonucleotide
augucaaacuaccuuaaaa

SEQ ID NO: 2729047 - RNA, 19 nt, Artificial Sequence
  Description of Artificial Sequence: Synthetic oligonucleotide
uguauaaaucgguuccagu

SEQ ID NO: 2729048 - RNA, 19 nt, Artificial Sequence
  Description of Artificial Sequence: Synthetic oligonucleotide
cagaaguucagaccaagug

SEQ ID NO: 2729049 - RNA, 19 nt, Artificial Sequence
  Description of Artificial Sequence: Synthetic oligonucleotide
caguauagcaagaggcggg

SEQ ID NO: 2729050 - RNA, 19 nt, Artificial Sequence
  Description of Artificial Sequence: Synthetic oligonucleotide
auaaauagcuaugugguua

SEQ ID NO: 2729051 - RNA, 19 nt, Artificial Sequence
  Description of Artificial Sequence: Synthetic oligonucleotide
ucaaagacagagcuuccuc

SEQ ID NO: 2729052 - RNA, 19 nt, Artificial Sequence
  Description of Artificial Sequence: Synthetic oligonucleotide
aagggaguugcccucgacu

SEQ ID NO: 2729053 - RNA, 19 nt, Artificial Sequence
  Description of Artificial Sequence: Synthetic oligonucleotide
ucuucuccaacugucaccu

SEQ ID NO: 2729054 - RNA, 19 nt, Artificial Sequence
  Description of Artificial Sequence: Synthetic oligonucleotide
cucggaagugcugaaaagg

SEQ ID NO: 2729055 - RNA, 19 nt, Artificial Sequence
  Description of Artificial Sequence: Synthetic oligonucleotide
agaaauucuuccuaaccua

SEQ ID NO: 2729056 - RNA, 19 nt, Artificial Sequence
  Description of Artificial Sequence: Synthetic oligonucleotide
ucgguuccaguauagcaag

SEQ ID NO: 2729057 - RNA, 19 nt, Artificial Sequence
  Description of Artificial Sequence: Synthetic oligonucleotide
uguggcacuagcacuaaau

SEQ ID NO: 2729058 - RNA, 19 nt, Artificial Sequence
  Description of Artificial Sequence: Synthetic oligonucleotide
caucaauaaagugaaaaga

SEQ ID NO: 2729059 - RNA, 19 nt, Artificial Sequence
  Description of Artificial Sequence: Synthetic oligonucleotide
aaagggaguugcccucgac

SEQ ID NO: 2729060 - RNA, 19 nt, Artificial Sequence
  Description of Artificial Sequence: Synthetic oligonucleotide
auaaagugaaaagaagaaa

SEQ ID NO: 2729061 - RNA, 19 nt, Artificial Sequence
  Description of Artificial Sequence: Synthetic oligonucleotide
uuucuucuuucuucaaaga

SEQ ID NO: 2729062 - RNA, 19 nt, Artificial Sequence
  Description of Artificial Sequence: Synthetic oligonucleotide
auucccacauuguauaaau

SEQ ID NO: 2729063 - RNA, 19 nt, Artificial Sequence
  Description of Artificial Sequence: Synthetic oligonucleotide
ugugguuagcccuccuucc

SEQ ID NO: 2729064 - RNA, 19 nt, Artificial Sequence
  Description of Artificial Sequence: Synthetic oligonucleotide
aaagacagagcuuccucuu

SEQ ID NO: 2729065 - RNA, 19 nt, Artificial Sequence
  Description of Artificial Sequence: Synthetic oligonucleotide
uacucucugacuccagcug

SEQ ID NO: 2729066 - RNA, 19 nt, Artificial Sequence
  Description of Artificial Sequence: Synthetic oligonucleotide
auucuuccuaaccuaaaau

SEQ ID NO: 2729067 - RNA, 19 nt, Artificial Sequence
  Description of Artificial Sequence: Synthetic oligonucleotide
uuguauaaaucgguuccag

SEQ ID NO: 2729068 - RNA, 19 nt, Artificial Sequence
  Description of Artificial Sequence: Synthetic oligonucleotide
cacaaagucuacgaugccc

SEQ ID NO: 2729069 - RNA, 19 nt, Artificial Sequence
  Description of Artificial Sequence: Synthetic oligonucleotide
aguauagcaagaggcgggg

SEQ ID NO: 2729070 - RNA, 19 nt, Artificial Sequence
  Description of Artificial Sequence: Synthetic oligonucleotide
ucuacgaugcccgacuccu

SEQ ID NO: 2729071 - RNA, 19 nt, Artificial Sequence
  Description of Artificial Sequence: Synthetic oligonucleotide
aaauagcuaugugguuagc

SEQ ID NO: 2729072 - RNA, 19 nt, Artificial Sequence
  Description of Artificial Sequence: Synthetic oligonucleotide
  modified_base (8)..(8): a, c, u, g, unknown or other
  modified_base (14)..(14): a, c, u, g, unknown or other
ccucaaanaaauanaagaa

SEQ ID NO: 2729073 - RNA, 19 nt, Artificial Sequence
  Description of Artificial Sequence: Synthetic oligonucleotide
aaguucagaccaagugccc

SEQ ID NO: 2729074 - RNA, 19 nt, Artificial Sequence
  Description of Artificial Sequence: Synthetic oligonucleotide
aaauucccacauuguauaa

SEQ ID NO: 2729075 - RNA, 19 nt, Artificial Sequence
  Description of Artificial Sequence: Synthetic oligonucleotide
aacaccuuaccgcucggaa

SEQ ID NO: 2729076 - RNA, 19 nt, Artificial Sequence
  Description of Artificial Sequence: Synthetic oligonucleotide
gaaaagggaguugcccucg

SEQ ID NO: 2729077 - RNA, 19 nt, Artificial Sequence
  Description of Artificial Sequence: Synthetic oligonucleotide
agauggcauccucuucucc

SEQ ID NO: 2729078 - RNA, 19 nt, Artificial Sequence
  Description of Artificial Sequence: Synthetic oligonucleotide
ugucaccuccacaaagucu

SEQ ID NO: 2729079 - RNA, 19 nt, Artificial Sequence
  Description of Artificial Sequence: Synthetic oligonucleotide
uuccgcuacucucugacuc

SEQ ID NO: 2729080 - RNA, 19 nt, Artificial Sequence
  Description of Artificial Sequence: Synthetic oligonucleotide
cacuaaauauucccucccc

SEQ ID NO: 2729081 - RNA, 19 nt, Artificial Sequence
  Description of Artificial Sequence: Synthetic oligonucleotide
ucugacuccagcuguccca

SEQ ID NO: 2729082 - RNA, 19 nt, Artificial Sequence
  Description of Artificial Sequence: Synthetic oligonucleotide
ugucagugcagaaguucag

SEQ ID NO: 2729083 - RNA, 19 nt, Artificial Sequence
  Description of Artificial Sequence: Synthetic oligonucleotide
aaaguaugucaaacuaccu

SEQ ID NO: 2729084 - RNA, 19 nt, Artificial Sequence
  Description of Artificial Sequence: Synthetic oligonucleotide
cuuccuaaccuaaaaucca

SEQ ID NO: 2729085 - RNA, 19 nt, Artificial Sequence
  Description of Artificial Sequence: Synthetic oligonucleotide
uuagcccuccuuccugggg

SEQ ID NO: 2729086 - RNA, 19 nt, Artificial Sequence
  Description of Artificial Sequence: Synthetic oligonucleotide
uggcacuagcacuaaauau

SEQ ID NO: 2729087 - RNA, 19 nt, Artificial Sequence
  Description of Artificial Sequence: Synthetic oligonucleotide
auacuguggcacuagcacu

SEQ ID NO: 2729088 - RNA, 19 nt, Artificial Sequence
  Description of Artificial Sequence: Synthetic oligonucleotide
uagcuaugugguuagcccu

SEQ ID NO: 2729089 - RNA, 19 nt, Artificial Sequence
  Description of Artificial Sequence: Synthetic oligonucleotide
cucaucaauaaagugaaaa

SEQ ID NO: 2729090 - RNA, 19 nt, Artificial Sequence
  Description of Artificial Sequence: Synthetic oligonucleotide
ugaaaagggaguugcccuc

SEQ ID NO: 2729091 - RNA, 19 nt, Artificial Sequence
  Description of Artificial Sequence: Synthetic oligonucleotide
acaccuuaccgcucggaag

SEQ ID NO: 2729092 - RNA, 19 nt, Artificial Sequence
  Description of Artificial Sequence: Synthetic oligonucleotide
accuccacaaagucuacga

SEQ ID NO: 2729093 - RNA, 19 nt, Artificial Sequence
  Description of Artificial Sequence: Synthetic oligonucleotide
uagcacuaaauauucccuc

SEQ ID NO: 2729094 - RNA, 19 nt, Artificial Sequence
  Description of Artificial Sequence: Synthetic oligonucleotide
cucuucuccaacugucacc

SEQ ID NO: 2729095 - RNA, 19 nt, Artificial Sequence
  Description of Artificial Sequence: Synthetic oligonucleotide
uagauacuguggcacuagc

SEQ ID NO: 2729096 - RNA, 19 nt, Artificial Sequence
  Description of Artificial Sequence: Synthetic oligonucleotide
uaugucaaacuaccuuaaa

SEQ ID NO: 2729097 - RNA, 19 nt, Artificial Sequence
  Description of Artificial Sequence: Synthetic oligonucleotide
uccaguagauacuguggca

SEQ ID NO: 2729098 - RNA, 19 nt, Artificial Sequence
  Description of Artificial Sequence: Synthetic oligonucleotide
gcaaacaccuuaccgcucg

SEQ ID NO: 2729099 - RNA, 19 nt, Artificial Sequence
  Description of Artificial Sequence: Synthetic oligonucleotide
auaaaucgguuccaguaua

SEQ ID NO: 2729100 - RNA, 19 nt, Artificial Sequence
  Description of Artificial Sequence: Synthetic oligonucleotide
uacuguggcacuagcacua

SEQ ID NO: 2729101 - RNA, 19 nt, Artificial Sequence
  Description of Artificial Sequence: Synthetic oligonucleotide
agacagagcuuccucuuug

SEQ ID NO: 2729102 - RNA, 19 nt, Artificial Sequence
  Description of Artificial Sequence: Synthetic oligonucleotide
ucuccaacugucaccucca

SEQ ID NO: 2729103 - RNA, 19 nt, Artificial Sequence
  Description of Artificial Sequence: Synthetic oligonucleotide
cccacauuguauaaaucgg

SEQ ID NO: 2729104 - RNA, 19 nt, Artificial Sequence
  Description of Artificial Sequence: Synthetic oligonucleotide
uccuaaccuaaaauccagu

SEQ ID NO: 2729105 - RNA, 19 nt, Artificial Sequence
  Description of Artificial Sequence: Synthetic oligonucleotide
agacgauaaauagcuaugu

SEQ ID NO: 2729106 - RNA, 19 nt, Artificial Sequence
  Description of Artificial Sequence: Synthetic oligonucleotide
uccucuuugucagugcaga

SEQ ID NO: 2729107 - RNA, 19 nt, Artificial Sequence
  Description of Artificial Sequence: Synthetic oligonucleotide
ugcagaaguucagaccaag

SEQ ID NO: 2729108 - RNA, 19 nt, Artificial Sequence
  Description of Artificial Sequence: Synthetic oligonucleotide
uuccucuuugucagugcag

SEQ ID NO: 2729109 - RNA, 19 nt, Artificial Sequence
  Description of Artificial Sequence: Synthetic oligonucleotide
ucugagauggcauccucuu

SEQ ID NO: 2729110 - RNA, 19 nt, Artificial Sequence
  Description of Artificial Sequence: Synthetic oligonucleotide
auuguauaaaucgguucca

SEQ ID NO: 2729111 - RNA, 19 nt, Artificial Sequence
  Description of Artificial Sequence: Synthetic oligonucleotide
aauucccacauuguauaaa

SEQ ID NO: 2729112 - RNA, 19 nt, Artificial Sequence
  Description of Artificial Sequence: Synthetic oligonucleotide
gaaauucuuccuaaccuaa

SEQ ID NO: 2729113 - RNA, 19 nt, Artificial Sequence
  Description of Artificial Sequence: Synthetic oligonucleotide
uccucuucuccaacuguca

SEQ ID NO: 2729114 - RNA, 19 nt, Artificial Sequence
  Description of Artificial Sequence: Synthetic oligonucleotide
ugcugaaaagggaguugcc

SEQ ID NO: 2729115 - RNA, 19 nt, Artificial Sequence
  Description of Artificial Sequence: Synthetic oligonucleotide
cuucaaagacagagcuucc

SEQ ID NO: 2729116 - RNA, 19 nt, Artificial Sequence
  Description of Artificial Sequence: Synthetic oligonucleotide
uucaaagacagagcuuccu

SEQ ID NO: 2729117 - RNA, 19 nt, Artificial Sequence
  Description of Artificial Sequence: Synthetic oligonucleotide
  modified_base (18)..(18): a, c, u, g, unknown or other
uccucguuuuccucaaana

SEQ ID NO: 2729118 - RNA, 19 nt, Artificial Sequence
  Description of Artificial Sequence: Synthetic oligonucleotide
acucucugacuccagcugu

SEQ ID NO: 2729119 - RNA, 19 nt, Artificial Sequence
  Description of Artificial Sequence: Synthetic oligonucleotide
aagugcccugucuaggcau

SEQ ID NO: 2729120 - RNA, 19 nt, Artificial Sequence
  Description of Artificial Sequence: Synthetic oligonucleotide
gaccaagugcccugucuag

SEQ ID NO: 2729121 - RNA, 19 nt, Artificial Sequence
  Description of Artificial Sequence: Synthetic oligonucleotide
uccgcuacucucugacucc

SEQ ID NO: 2729122 - RNA, 19 nt, Artificial Sequence
  Description of Artificial Sequence: Synthetic oligonucleotide
uccaacugucaccuccaca

SEQ ID NO: 2729123 - RNA, 19 nt, Artificial Sequence
  Description of Artificial Sequence: Synthetic oligonucleotide
auagcaagaggcggggcag

SEQ ID NO: 2729124 - RNA, 19 nt, Artificial Sequence
  Description of Artificial Sequence: Synthetic oligonucleotide
aaccuaaaauccaguagau

SEQ ID NO: 2729125 - RNA, 19 nt, Artificial Sequence
  Description of Artificial Sequence: Synthetic oligonucleotide
gugcugaaaagggaguugc

SEQ ID NO: 2729126 - RNA, 19 nt, Artificial Sequence
  Description of Artificial Sequence: Synthetic oligonucleotide
agguaacaaaauucccaca

SEQ ID NO: 2729127 - RNA, 19 nt, Artificial Sequence
  Description of Artificial Sequence: Synthetic oligonucleotide
cuaaaauccaguagauacu

SEQ ID NO: 2729128 - RNA, 19 nt, Artificial Sequence
  Description of Artificial Sequence: Synthetic oligonucleotide
cacuagcacuaaauauucc

SEQ ID NO: 2729129 - RNA, 19 nt, Artificial Sequence
  Description of Artificial Sequence: Synthetic oligonucleotide
agucuacgaugcccgacuc

SEQ ID NO: 2729130 - RNA, 19 nt, Artificial Sequence
  Description of Artificial Sequence: Synthetic oligonucleotide
uucuucaaagacagagcuu

SEQ ID NO: 2729131 - RNA, 19 nt, Artificial Sequence
  Description of Artificial Sequence: Synthetic oligonucleotide
auccucuucuccaacuguc

SEQ ID NO: 2729132 - RNA, 19 nt, Artificial Sequence
  Description of Artificial Sequence: Synthetic oligonucleotide
aaaagggaguugcccucga

SEQ ID NO: 2729133 - RNA, 19 nt, Artificial Sequence
  Description of Artificial Sequence: Synthetic oligonucleotide
aagacagagcuuccucuuu

SEQ ID NO: 2729134 - RNA, 19 nt, Artificial Sequence
  Description of Artificial Sequence: Synthetic oligonucleotide
cagagcuuccucuuuguca

SEQ ID NO: 2729135 - RNA, 19 nt, Artificial Sequence
  Description of Artificial Sequence: Synthetic oligonucleotide
guucagaccaagugcccug

SEQ ID NO: 2729136 - RNA, 19 nt, Artificial Sequence
  Description of Artificial Sequence: Synthetic oligonucleotide
ucggagucgggcccugucc

SEQ ID NO: 2729137 - RNA, 19 nt, Artificial Sequence
  Description of Artificial Sequence: Synthetic oligonucleotide
aaaauccaguagauacugu

SEQ ID NO: 2729138 - RNA, 19 nt, Artificial Sequence
  Description of Artificial Sequence: Synthetic oligonucleotide
ucggagucggagucgggcc

SEQ ID NO: 2729139 - RNA, 19 nt, Artificial Sequence
  Description of Artificial Sequence: Synthetic oligonucleotide
caaaauucccacauuguau

SEQ ID NO: 2729140 - RNA, 19 nt, Artificial Sequence
  Description of Artificial Sequence: Synthetic oligonucleotide
guagauacuguggcacuag

SEQ ID NO: 2729141 - RNA, 19 nt, Artificial Sequence
  Description of Artificial Sequence: Synthetic oligonucleotide
agugcugaaaagggaguug

SEQ ID NO: 2729142 - RNA, 19 nt, Artificial Sequence
  Description of Artificial Sequence: Synthetic oligonucleotide
aaauucuuccuaaccuaaa

SEQ ID NO: 2729143 - RNA, 19 nt, Artificial Sequence
  Description of Artificial Sequence: Synthetic oligonucleotide
gguaacaaaauucccacau

SEQ ID NO: 2729144 - RNA, 19 nt, Artificial Sequence
  Description of Artificial Sequence: Synthetic oligonucleotide
uucccacauuguauaaauc

SEQ ID NO: 2729145 - RNA, 19 nt, Artificial Sequence
  Description of Artificial Sequence: Synthetic oligonucleotide
aagugcugaaaagggaguu

SEQ ID NO: 2729146 - RNA, 19 nt, Artificial Sequence
  Description of Artificial Sequence: Synthetic oligonucleotide
aucgguuccaguauagcaa

SEQ ID NO: 2729147 - RNA, 19 nt, Artificial Sequence
  Description of Artificial Sequence: Synthetic oligonucleotide
agaccaagugcccugucua

SEQ ID NO: 2729148 - RNA, 19 nt, Artificial Sequence
  Description of Artificial Sequence: Synthetic oligonucleotide
agggaguugcccucgacua

SEQ ID NO: 2729149 - RNA, 19 nt, Artificial Sequence
  Description of Artificial Sequence: Synthetic oligonucleotide
gguuccaguauagcaagag

SEQ ID NO: 2729150 - RNA, 19 nt, Artificial Sequence
  Description of Artificial Sequence: Synthetic oligonucleotide
aguucagaccaagugcccu

SEQ ID NO: 2729151 - RNA, 19 nt, Artificial Sequence
  Description of Artificial Sequence: Synthetic oligonucleotide
gguuagcccuccuuccugg

SEQ ID NO: 2729152 - RNA, 19 nt, Artificial Sequence
  Description of Artificial Sequence: Synthetic oligonucleotide
accaagugcccugucuagg

SEQ ID NO: 2729153 - RNA, 19 nt, Artificial Sequence
  Description of Artificial Sequence: Synthetic oligonucleotide
cuagcacuaaauauucccu

SEQ ID NO: 2729154 - RNA, 19 nt, Artificial Sequence
  Description of Artificial Sequence: Synthetic oligonucleotide
agcugucccauuucucuga

SEQ ID NO: 2729155 - RNA, 19 nt, Artificial Sequence
  Description of Artificial Sequence: Synthetic oligonucleotide
gucaccuccacaaagucua

SEQ ID NO: 2729156 - RNA, 19 nt, Artificial Sequence
  Description of Artificial Sequence: Synthetic oligonucleotide
agcuaugugguuagcccuc

SEQ ID NO: 2729157 - RNA, 19 nt, Artificial Sequence
  Description of Artificial Sequence: Synthetic oligonucleotide
gcugaaaagggaguugccc

SEQ ID NO: 2729158 - RNA, 19 nt, Artificial Sequence
  Description of Artificial Sequence: Synthetic oligonucleotide
gcacuaaauauucccuccc

SEQ ID NO: 2729159 - RNA, 19 nt, Artificial Sequence
  Description of Artificial Sequence: Synthetic oligonucleotide
agcaagaggcggggcagcc

SEQ ID NO: 2729160 - RNA, 19 nt, Artificial Sequence
  Description of Artificial Sequence: Synthetic oligonucleotide
cuaggcauggccggccucc

SEQ ID NO: 2729161 - RNA, 19 nt, Artificial Sequence
  Description of Artificial Sequence: Synthetic oligonucleotide
gauaaauagcuaugugguu

SEQ ID NO: 2729162 - RNA, 19 nt, Artificial Sequence
  Description of Artificial Sequence: Synthetic oligonucleotide
guuagcccuccuuccuggg

SEQ ID NO: 2729163 - RNA, 19 nt, Artificial Sequence
  Description of Artificial Sequence: Synthetic oligonucleotide
aaaagacgauaaauagcua

SEQ ID NO: 2729164 - RNA, 19 nt, Artificial Sequence
  Description of Artificial Sequence: Synthetic oligonucleotide
uggggcggggcuuucuucu

SEQ ID NO: 2729165 - RNA, 19 nt, Artificial Sequence
  Description of Artificial Sequence: Synthetic oligonucleotide
cugaaaagggaguugcccu

SEQ ID NO: 2729166 - RNA, 19 nt, Artificial Sequence
  Description of Artificial Sequence: Synthetic oligonucleotide
ugucccgcugugccuuccg

SEQ ID NO: 2729167 - RNA, 19 nt, Artificial Sequence
  Description of Artificial Sequence: Synthetic oligonucleotide
ccaacugucaccuccacaa

SEQ ID NO: 2729168 - RNA, 19 nt, Artificial Sequence
  Description of Artificial Sequence: Synthetic oligonucleotide
agauacuguggcacuagca

SEQ ID NO: 2729169 - RNA, 19 nt, Artificial Sequence
  Description of Artificial Sequence: Synthetic oligonucleotide
ccaguauagcaagaggcgg

SEQ ID NO: 2729170 - RNA, 19 nt, Artificial Sequence
  Description of Artificial Sequence: Synthetic oligonucleotide
cuuccucuuugucagugca

SEQ ID NO: 2729171 - RNA, 19 nt, Artificial Sequence
  Description of Artificial Sequence: Synthetic oligonucleotide
uuaccgcucggaagugcug

SEQ ID NO: 2729172 - RNA, 19 nt, Artificial Sequence
  Description of Artificial Sequence: Synthetic oligonucleotide
aaacaccuuaccgcucgga

SEQ ID NO: 2729173 - RNA, 19 nt, Artificial Sequence
  Description of Artificial Sequence: Synthetic oligonucleotide
ccccucaucaauaaaguga

SEQ ID NO: 2729174 - RNA, 19 nt, Artificial Sequence
  Description of Artificial Sequence: Synthetic oligonucleotide
caaagacagagcuuccucu

SEQ ID NO: 2729175 - RNA, 19 nt, Artificial Sequence
  Description of Artificial Sequence: Synthetic oligonucleotide
uccagcugucccauuucuc

SEQ ID NO: 2729176 - RNA, 19 nt, Artificial Sequence
  Description of Artificial Sequence: Synthetic oligonucleotide
gagauggcauccucuucuc

SEQ ID NO: 2729177 - RNA, 19 nt, Artificial Sequence
  Description of Artificial Sequence: Synthetic oligonucleotide
cugucaccuccacaaaguc

SEQ ID NO: 2729178 - RNA, 19 nt, Artificial Sequence
  Description of Artificial Sequence: Synthetic oligonucleotide
ugucuaggcauggccggcc

SEQ ID NO: 2729179 - RNA, 19 nt, Artificial Sequence
  Description of Artificial Sequence: Synthetic oligonucleotide
uaccgcucggaagugcuga

SEQ ID NO: 2729180 - RNA, 19 nt, Artificial Sequence
  Description of Artificial Sequence: Synthetic oligonucleotide
auggcauccucuucuccaa

SEQ ID NO: 2729181 - RNA, 19 nt, Artificial Sequence
  Description of Artificial Sequence: Synthetic oligonucleotide
gucuacgaugcccgacucc

SEQ ID NO: 2729182 - RNA, 19 nt, Artificial Sequence
  Description of Artificial Sequence: Synthetic oligonucleotide
caaacaccuuaccgcucgg

SEQ ID NO: 2729183 - RNA, 19 nt, Artificial Sequence
  Description of Artificial Sequence: Synthetic oligonucleotide
ccaguagauacuguggcac

SEQ ID NO: 2729184 - RNA, 19 nt, Artificial Sequence
  Description of Artificial Sequence: Synthetic oligonucleotide
cccugucuaggcauggccg

SEQ ID NO: 2729185 - RNA, 19 nt, Artificial Sequence
  Description of Artificial Sequence: Synthetic oligonucleotide
guggcacuagcacuaaaua

SEQ ID NO: 2729186 - RNA, 19 nt, Artificial Sequence
  Description of Artificial Sequence: Synthetic oligonucleotide
gcuacucucugacuccagc

SEQ ID NO: 2729187 - RNA, 19 nt, Artificial Sequence
  Description of Artificial Sequence: Synthetic oligonucleotide
aguagauacuguggcacua

SEQ ID NO: 2729188 - RNA, 19 nt, Artificial Sequence
  Description of Artificial Sequence: Synthetic oligonucleotide
ggcauggccggccuccgcg

SEQ ID NO: 2729189 - RNA, 19 nt, Artificial Sequence
  Description of Artificial Sequence: Synthetic oligonucleotide
gucccauuucucugagaug

SEQ ID NO: 2729190 - RNA, 19 nt, Artificial Sequence
  Description of Artificial Sequence: Synthetic oligonucleotide
gucggagucggagucgggc

SEQ ID NO: 2729191 - RNA, 19 nt, Artificial Sequence
  Description of Artificial Sequence: Synthetic oligonucleotide
cagcugucccauuucucug

SEQ ID NO: 2729192 - RNA, 19 nt, Artificial Sequence
  Description of Artificial Sequence: Synthetic oligonucleotide
cugucggagucggagucgg

SEQ ID NO: 2729193 - RNA, 19 nt, Artificial Sequence
  Description of Artificial Sequence: Synthetic oligonucleotide
uucagaccaagugcccugu

SEQ ID NO: 2729194 - RNA, 19 nt, Artificial Sequence
  Description of Artificial Sequence: Synthetic oligonucleotide
ccaagugcccugucuaggc

SEQ ID NO: 2729195 - RNA, 19 nt, Artificial Sequence
  Description of Artificial Sequence: Synthetic oligonucleotide
ugucggagucggagucggg

SEQ ID NO: 2729196 - RNA, 19 nt, Artificial Sequence
  Description of Artificial Sequence: Synthetic oligonucleotide
guaugucaaacuaccuuaa

SEQ ID NO: 2729197 - RNA, 19 nt, Artificial Sequence
  Description of Artificial Sequence: Synthetic oligonucleotide
agcaaacaccuuaccgcuc

SEQ ID NO: 2729198 - RNA, 19 nt, Artificial Sequence
  Description of Artificial Sequence: Synthetic oligonucleotide
cucucugacuccagcuguc

SEQ ID NO: 2729199 - RNA, 19 nt, Artificial Sequence
  Description of Artificial Sequence: Synthetic oligonucleotide
gcucggaagugcugaaaag

SEQ ID NO: 2729200 - RNA, 19 nt, Artificial Sequence
  Description of Artificial Sequence: Synthetic oligonucleotide
ucaccuccacaaagucuac

SEQ ID NO: 2729201 - RNA, 19 nt, Artificial Sequence
  Description of Artificial Sequence: Synthetic oligonucleotide
ugccuuccgcuacucucug

SEQ ID NO: 2729202 - RNA, 19 nt, Artificial Sequence
  Description of Artificial Sequence: Synthetic oligonucleotide
cccucaucaauaaagugaa

SEQ ID NO: 2729203 - RNA, 19 nt, Artificial Sequence
  Description of Artificial Sequence: Synthetic oligonucleotide
gucagugcagaaguucaga

SEQ ID NO: 2729204 - RNA, 19 nt, Artificial Sequence
  Description of Artificial Sequence: Synthetic oligonucleotide
cugagauggcauccucuuc

SEQ ID NO: 2729205 - RNA, 19 nt, Artificial Sequence
  Description of Artificial Sequence: Synthetic oligonucleotide
cgauaaauagcuauguggu

SEQ ID NO: 2729206 - RNA, 19 nt, Artificial Sequence
  Description of Artificial Sequence: Synthetic oligonucleotide
caccuccacaaagucuacg

SEQ ID NO: 2729207 - RNA, 19 nt, Artificial Sequence
  Description of Artificial Sequence: Synthetic oligonucleotide
accuaaaauccaguagaua

SEQ ID NO: 2729208 - RNA, 19 nt, Artificial Sequence
  Description of Artificial Sequence: Synthetic oligonucleotide
gaagugcugaaaagggagu

SEQ ID NO: 2729209 - RNA, 19 nt, Artificial Sequence
  Description of Artificial Sequence: Synthetic oligonucleotide
cacauuguauaaaucgguu

SEQ ID NO: 2729210 - RNA, 19 nt, Artificial Sequence
  Description of Artificial Sequence: Synthetic oligonucleotide
uggcauccucuucuccaac

SEQ ID NO: 2729211 - RNA, 19 nt, Artificial Sequence
  Description of Artificial Sequence: Synthetic oligonucleotide
gaggcggggcagccgcugg

SEQ ID NO: 2729212 - RNA, 19 nt, Artificial Sequence
  Description of Artificial Sequence: Synthetic oligonucleotide
ucccgcugugccuuccgcu

SEQ ID NO: 2729213 - RNA, 19 nt, Artificial Sequence
  Description of Artificial Sequence: Synthetic oligonucleotide
caccuuaccgcucggaagu

SEQ ID NO: 2729214 - RNA, 19 nt, Artificial Sequence
  Description of Artificial Sequence: Synthetic oligonucleotide
ccuuccgcuacucucugac

SEQ ID NO: 2729215 - RNA, 19 nt, Artificial Sequence
  Description of Artificial Sequence: Synthetic oligonucleotide
guaacaaaauucccacauu

SEQ ID NO: 2729216 - RNA, 19 nt, Artificial Sequence
  Description of Artificial Sequence: Synthetic oligonucleotide
ucuaggcauggccggccuc

SEQ ID NO: 2729217 - RNA, 19 nt, Artificial Sequence
  Description of Artificial Sequence: Synthetic oligonucleotide
guauagcaagaggcggggc

SEQ ID NO: 2729218 - RNA, 19 nt, Artificial Sequence
  Description of Artificial Sequence: Synthetic oligonucleotide
gacagagcuuccucuuugu

SEQ ID NO: 2729219 - RNA, 19 nt, Artificial Sequence
  Description of Artificial Sequence: Synthetic oligonucleotide
gacuccucguuuuccucaa

SEQ ID NO: 2729220 - RNA, 19 nt, Artificial Sequence
  Description of Artificial Sequence: Synthetic oligonucleotide
cauuucucugagauggcau

SEQ ID NO: 2729221 - RNA, 19 nt, Artificial Sequence
  Description of Artificial Sequence: Synthetic oligonucleotide
ucagaccaagugcccuguc

SEQ ID NO: 2729222 - RNA, 19 nt, Artificial Sequence
  Description of Artificial Sequence: Synthetic oligonucleotide
aggcauggccggccuccgc

SEQ ID NO: 2729223 - RNA, 19 nt, Artificial Sequence
  Description of Artificial Sequence: Synthetic oligonucleotide
cuuaccgcucggaagugcu

SEQ ID NO: 2729224 - RNA, 19 nt, Artificial Sequence
  Description of Artificial Sequence: Synthetic oligonucleotide
  modified_base (19)..(19): a, c, u, g, unknown or other
cuccucguuuuccucaaan

SEQ ID NO: 2729225 - RNA, 19 nt, Artificial Sequence
  Description of Artificial Sequence: Synthetic oligonucleotide
cuacucucugacuccagcu

SEQ ID NO: 2729226 - RNA, 19 nt, Artificial Sequence
  Description of Artificial Sequence: Synthetic oligonucleotide
uaggcauggccggccuccg

SEQ ID NO: 2729227 - RNA, 19 nt, Artificial Sequence
  Description of Artificial Sequence: Synthetic oligonucleotide
cugucuaggcauggccggc

SEQ ID NO: 2729228 - RNA, 19 nt, Artificial Sequence
  Description of Artificial Sequence: Synthetic oligonucleotide
ccuaaccuaaaauccagua

SEQ ID NO: 2729229 - RNA, 19 nt, Artificial Sequence
  Description of Artificial Sequence: Synthetic oligonucleotide
uagcaagaggcggggcagc

SEQ ID NO: 2729230 - RNA, 19 nt, Artificial Sequence
  Description of Artificial Sequence: Synthetic oligonucleotide
caaagucuacgaugcccga

SEQ ID NO: 2729231 - RNA, 19 nt, Artificial Sequence
  Description of Artificial Sequence: Synthetic oligonucleotide
ggcacuagcacuaaauauu

SEQ ID NO: 2729232 - RNA, 19 nt, Artificial Sequence
  Description of Artificial Sequence: Synthetic oligonucleotide
ugcccgacuccucguuuuc

SEQ ID NO: 2729233 - RNA, 19 nt, Artificial Sequence
  Description of Artificial Sequence: Synthetic oligonucleotide
agugcccugucuaggcaug

SEQ ID NO: 2729234 - RNA, 19 nt, Artificial Sequence
  Description of Artificial Sequence: Synthetic oligonucleotide
cauggccggccuccgcggg

SEQ ID NO: 2729235 - RNA, 19 nt, Artificial Sequence
  Description of Artificial Sequence: Synthetic oligonucleotide
acgaugcccgacuccucgu

SEQ ID NO: 2729236 - RNA, 19 nt, Artificial Sequence
  Description of Artificial Sequence: Synthetic oligonucleotide
augcccgacuccucguuuu

SEQ ID NO: 2729237 - RNA, 19 nt, Artificial Sequence
  Description of Artificial Sequence: Synthetic oligonucleotide
gcccugucuaggcauggcc

SEQ ID NO: 2729238 - RNA, 19 nt, Artificial Sequence
  Description of Artificial Sequence: Synthetic oligonucleotide
ggagucgggcccugucccg

SEQ ID NO: 2729239 - RNA, 19 nt, Artificial Sequence
  Description of Artificial Sequence: Synthetic oligonucleotide
cucugagauggcauccucu

SEQ ID NO: 2729240 - RNA, 19 nt, Artificial Sequence
  Description of Artificial Sequence: Synthetic oligonucleotide
gagucgggcccugucccgc

SEQ ID NO: 2729241 - RNA, 19 nt, Artificial Sequence
  Description of Artificial Sequence: Synthetic oligonucleotide
gacuccagcugucccauuu

SEQ ID NO: 2729242 - RNA, 19 nt, Artificial Sequence
  Description of Artificial Sequence: Synthetic oligonucleotide
ugcccugucuaggcauggc

SEQ ID NO: 2729243 - RNA, 19 nt, Artificial Sequence
  Description of Artificial Sequence: Synthetic oligonucleotide
cuacgaugcccgacuccuc

SEQ ID NO: 2729244 - RNA, 19 nt, Artificial Sequence
  Description of Artificial Sequence: Synthetic oligonucleotide
ccucuucuccaacugucac

SEQ ID NO: 2729245 - RNA, 19 nt, Artificial Sequence
  Description of Artificial Sequence: Synthetic oligonucleotide
gugcccugucuaggcaugg

SEQ ID NO: 2729246 - RNA, 19 nt, Artificial Sequence
  Description of Artificial Sequence: Synthetic oligonucleotide
gcugucggagucggagucg

SEQ ID NO: 2729247 - RNA, 19 nt, Artificial Sequence
  Description of Artificial Sequence: Synthetic oligonucleotide
caguagauacuguggcacu

SEQ ID NO: 2729248 - RNA, 19 nt, Artificial Sequence
  Description of Artificial Sequence: Synthetic oligonucleotide
ucgggcccugucccgcugu

SEQ ID NO: 2729249 - RNA, 19 nt, Artificial Sequence
  Description of Artificial Sequence: Synthetic oligonucleotide
cuggggcggggcuuucuuc

SEQ ID NO: 2729250 - RNA, 19 nt, Artificial Sequence
  Description of Artificial Sequence: Synthetic oligonucleotide
ccacauuguauaaaucggu

SEQ ID NO: 2729251 - RNA, 19 nt, Artificial Sequence
  Description of Artificial Sequence: Synthetic oligonucleotide
gcuaugugguuagcccucc

SEQ ID NO: 2729252 - RNA, 19 nt, Artificial Sequence
  Description of Artificial Sequence: Synthetic oligonucleotide
cauccucuucuccaacugu

SEQ ID NO: 2729253 - RNA, 19 nt, Artificial Sequence
  Description of Artificial Sequence: Synthetic oligonucleotide
accuuaccgcucggaagug

SEQ ID NO: 2729254 - RNA, 19 nt, Artificial Sequence
  Description of Artificial Sequence: Synthetic oligonucleotide
gucggagucgggcccuguc

SEQ ID NO: 2729255 - RNA, 19 nt, Artificial Sequence
  Description of Artificial Sequence: Synthetic oligonucleotide
gucccgcugugccuuccgc

SEQ ID NO: 2729256 - RNA, 19 nt, Artificial Sequence
  Description of Artificial Sequence: Synthetic oligonucleotide
cccauuucucugagauggc

SEQ ID NO: 2729257 - RNA, 19 nt, Artificial Sequence
  Description of Artificial Sequence: Synthetic oligonucleotide
gcauggccggccuccgcgg

SEQ ID NO: 2729258 - RNA, 19 nt, Artificial Sequence
  Description of Artificial Sequence: Synthetic oligonucleotide
cagaccaagugcccugucu

SEQ ID NO: 2729259 - RNA, 19 nt, Artificial Sequence
  Description of Artificial Sequence: Synthetic oligonucleotide
ccacaaagucuacgaugcc

SEQ ID NO: 2729260 - RNA, 19 nt, Artificial Sequence
  Description of Artificial Sequence: Synthetic oligonucleotide
ggaguugcccucgacuaaa

SEQ ID NO: 2729261 - RNA, 19 nt, Artificial Sequence
  Description of Artificial Sequence: Synthetic oligonucleotide
agucgggcccugucccgcu

SEQ ID NO: 2729262 - RNA, 19 nt, Artificial Sequence
  Description of Artificial Sequence: Synthetic oligonucleotide
acuguggcacuagcacuaa

SEQ ID NO: 2729263 - RNA, 19 nt, Artificial Sequence
  Description of Artificial Sequence: Synthetic oligonucleotide
agaggcggggcagccgcug

SEQ ID NO: 2729264 - RNA, 19 nt, Artificial Sequence
  Description of Artificial Sequence: Synthetic oligonucleotide
accgcucggaagugcugaa

SEQ ID NO: 2729265 - RNA, 19 nt, Artificial Sequence
  Description of Artificial Sequence: Synthetic oligonucleotide
cuucuccaacugucaccuc

SEQ ID NO: 2729266 - RNA, 19 nt, Artificial Sequence
  Description of Artificial Sequence: Synthetic oligonucleotide
ccagcugucccauuucucu

SEQ ID NO: 2729267 - RNA, 19 nt, Artificial Sequence
  Description of Artificial Sequence: Synthetic oligonucleotide
caacugucaccuccacaaa

SEQ ID NO: 2729268 - RNA, 19 nt, Artificial Sequence
  Description of Artificial Sequence: Synthetic oligonucleotide
acuccucguuuuccucaaa

SEQ ID NO: 2729269 - RNA, 19 nt, Artificial Sequence
  Description of Artificial Sequence: Synthetic oligonucleotide
gcaagaggcggggcagccg

SEQ ID NO: 2729270 - RNA, 19 nt, Artificial Sequence
  Description of Artificial Sequence: Synthetic oligonucleotide
ggcggggcuuucuucuuuc

SEQ ID NO: 2729271 - RNA, 19 nt, Artificial Sequence
  Description of Artificial Sequence: Synthetic oligonucleotide
ggcauccucuucuccaacu

SEQ ID NO: 2729272 - RNA, 19 nt, Artificial Sequence
  Description of Artificial Sequence: Synthetic oligonucleotide
gaugcccgacuccucguuu

SEQ ID NO: 2729273 - RNA, 19 nt, Artificial Sequence
  Description of Artificial Sequence: Synthetic oligonucleotide
aagaggcggggcagccgcu

SEQ ID NO: 2729274 - RNA, 19 nt, Artificial Sequence
  Description of Artificial Sequence: Synthetic oligonucleotide
cuuugucagugcagaaguu

SEQ ID NO: 2729275 - RNA, 19 nt, Artificial Sequence
  Description of Artificial Sequence: Synthetic oligonucleotide
cugucccauuucucugaga

SEQ ID NO: 2729276 - RNA, 19 nt, Artificial Sequence
  Description of Artificial Sequence: Synthetic oligonucleotide
gaguugcccucgacuaaaa

SEQ ID NO: 2729277 - RNA, 19 nt, Artificial Sequence
  Description of Artificial Sequence: Synthetic oligonucleotide
cuccagcugucccauuucu

SEQ ID NO: 2729278 - RNA, 19 nt, Artificial Sequence
  Description of Artificial Sequence: Synthetic oligonucleotide
  modified_base (14)..(14): a, c, u, g, unknown or other
cguuuuccucaaanaaaua

SEQ ID NO: 2729279 - RNA, 19 nt, Artificial Sequence
  Description of Artificial Sequence: Synthetic oligonucleotide
gggaguugcccucgacuaa

SEQ ID NO: 2729280 - RNA, 19 nt, Artificial Sequence
  Description of Artificial Sequence: Synthetic oligonucleotide
ccuuaccgcucggaagugc

SEQ ID NO: 2729281 - RNA, 19 nt, Artificial Sequence
  Description of Artificial Sequence: Synthetic oligonucleotide
cuuccgcuacucucugacu

SEQ ID NO: 2729282 - RNA, 19 nt, Artificial Sequence
  Description of Artificial Sequence: Synthetic oligonucleotide
cggagucgggcccuguccc

SEQ ID NO: 2729283 - RNA, 19 nt, Artificial Sequence
  Description of Artificial Sequence: Synthetic oligonucleotide
gagucggagucgggcccug

SEQ ID NO: 2729284 - RNA, 19 nt, Artificial Sequence
  Description of Artificial Sequence: Synthetic oligonucleotide
gucuaggcauggccggccu

SEQ ID NO: 2729285 - RNA, 19 nt, Artificial Sequence
  Description of Artificial Sequence: Synthetic oligonucleotide
gucgggcccugucccgcug

SEQ ID NO: 2729286 - RNA, 19 nt, Artificial Sequence
  Description of Artificial Sequence: Synthetic oligonucleotide
gugcagaaguucagaccaa

SEQ ID NO: 2729287 - RNA, 19 nt, Artificial Sequence
  Description of Artificial Sequence: Synthetic oligonucleotide
cugucccgcugugccuucc

SEQ ID NO: 2729288 - RNA, 19 nt, Artificial Sequence
  Description of Artificial Sequence: Synthetic oligonucleotide
ccgacuccucguuuuccuc

SEQ ID NO: 2729289 - RNA, 19 nt, Artificial Sequence
  Description of Artificial Sequence: Synthetic oligonucleotide
cuguggcacuagcacuaaa

SEQ ID NO: 2729290 - RNA, 19 nt, Artificial Sequence
  Description of Artificial Sequence: Synthetic oligonucleotide
cggagucggagucgggccc

SEQ ID NO: 2729291 - RNA, 19 nt, Artificial Sequence
  Description of Artificial Sequence: Synthetic oligonucleotide
gcagaaguucagaccaagu

SEQ ID NO: 2729292 - RNA, 19 nt, Artificial Sequence
  Description of Artificial Sequence: Synthetic oligonucleotide
cgacuccucguuuuccuca

SEQ ID NO: 2729293 - RNA, 19 nt, Artificial Sequence
  Description of Artificial Sequence: Synthetic oligonucleotide
cuaugugguuagcccuccu

SEQ ID NO: 2729294 - RNA, 19 nt, Artificial Sequence
  Description of Artificial Sequence: Synthetic oligonucleotide
cggggcagccgcuggggcg

SEQ ID NO: 2729295 - RNA, 19 nt, Artificial Sequence
  Description of Artificial Sequence: Synthetic oligonucleotide
agucggagucgggcccugu

SEQ ID NO: 2729296 - RNA, 19 nt, Artificial Sequence
  Description of Artificial Sequence: Synthetic oligonucleotide
gcccgacuccucguuuucc

SEQ ID NO: 2729297 - RNA, 19 nt, Artificial Sequence
  Description of Artificial Sequence: Synthetic oligonucleotide
cugacuccagcugucccau

SEQ ID NO: 2729298 - RNA, 19 nt, Artificial Sequence
  Description of Artificial Sequence: Synthetic oligonucleotide
cgcucggaagugcugaaaa

SEQ ID NO: 2729299 - RNA, 19 nt, Artificial Sequence
  Description of Artificial Sequence: Synthetic oligonucleotide
ccucaucaauaaagugaaa

SEQ ID NO: 2729300 - RNA, 19 nt, Artificial Sequence
  Description of Artificial Sequence: Synthetic oligonucleotide
ccgcugugccuuccgcuac

SEQ ID NO: 2729301 - RNA, 19 nt, Artificial Sequence
  Description of Artificial Sequence: Synthetic oligonucleotide
gcagccgcuggggcggggc

SEQ ID NO: 2729302 - RNA, 19 nt, Artificial Sequence
  Description of Artificial Sequence: Synthetic oligonucleotide
cugugccuuccgcuacucu

SEQ ID NO: 2729303 - RNA, 19 nt, Artificial Sequence
  Description of Artificial Sequence: Synthetic oligonucleotide
cgcuacucucugacuccag

SEQ ID NO: 2729304 - RNA, 19 nt, Artificial Sequence
  Description of Artificial Sequence: Synthetic oligonucleotide
gccuuccgcuacucucuga

SEQ ID NO: 2729305 - RNA, 19 nt, Artificial Sequence
  Description of Artificial Sequence: Synthetic oligonucleotide
cccgacuccucguuuuccu

SEQ ID NO: 2729306 - RNA, 19 nt, Artificial Sequence
  Description of Artificial Sequence: Synthetic oligonucleotide
gggcccugucccgcugugc

SEQ ID NO: 2729307 - RNA, 19 nt, Artificial Sequence
  Description of Artificial Sequence: Synthetic oligonucleotide
agccgcuggggcggggcuu

SEQ ID NO: 2729308 - RNA, 19 nt, Artificial Sequence
  Description of Artificial Sequence: Synthetic oligonucleotide
gcgcugucggagucggagu

SEQ ID NO: 2729309 - RNA, 19 nt, Artificial Sequence
  Description of Artificial Sequence: Synthetic oligonucleotide
ggagucggagucgggcccu

SEQ ID NO: 2729310 - RNA, 19 nt, Artificial Sequence
  Description of Artificial Sequence: Synthetic oligonucleotide
ccugucccgcugugccuuc

SEQ ID NO: 2729311 - RNA, 19 nt, Artificial Sequence
  Description of Artificial Sequence: Synthetic oligonucleotide
ccgcuacucucugacucca

SEQ ID NO: 2729312 - RNA, 19 nt, Artificial Sequence
  Description of Artificial Sequence: Synthetic oligonucleotide
cgguuccaguauagcaaga

SEQ ID NO: 2729313 - RNA, 19 nt, Artificial Sequence
  Description of Artificial Sequence: Synthetic oligonucleotide
gcggggcuuucuucuuucu

SEQ ID NO: 2729314 - RNA, 19 nt, Artificial Sequence
  Description of Artificial Sequence: Synthetic oligonucleotide
gcuggggcggggcuuucuu

SEQ ID NO: 2729315 - RNA, 19 nt, Artificial Sequence
  Description of Artificial Sequence: Synthetic oligonucleotide
gcccugucccgcugugccu

SEQ ID NO: 2729316 - RNA, 19 nt, Artificial Sequence
  Description of Artificial Sequence: Synthetic oligonucleotide
gggcggggcuuucuucuuu

SEQ ID NO: 2729317 - RNA, 19 nt, Artificial Sequence
  Description of Artificial Sequence: Synthetic oligonucleotide
cagccgcuggggcggggcu

SEQ ID NO: 2729318 - RNA, 19 nt, Artificial Sequence
  Description of Artificial Sequence: Synthetic oligonucleotide
ggggcggggcuuucuucuu

SEQ ID NO: 2729319 - RNA, 19 nt, Artificial Sequence
  Description of Artificial Sequence: Synthetic oligonucleotide
ccgcucggaagugcugaaa

SEQ ID NO: 2729320 - RNA, 19 nt, Artificial Sequence
  Description of Artificial Sequence: Synthetic oligonucleotide
cgggcccugucccgcugug

SEQ ID NO: 2729321 - RNA, 19 nt, Artificial Sequence
  Description of Artificial Sequence: Synthetic oligonucleotide
cccugucccgcugugccuu

SEQ ID NO: 2729322 - RNA, 19 nt, Artificial Sequence
  Description of Artificial Sequence: Synthetic oligonucleotide
cggggcuuucuucuuucuu

SEQ ID NO: 2729323 - RNA, 19 nt, Artificial Sequence
  Description of Artificial Sequence: Synthetic oligonucleotide
gccgcuggggcggggcuuu

SEQ ID NO: 2729324 - RNA, 19 nt, Artificial Sequence
  Description of Artificial Sequence: Synthetic oligonucleotide
cgaugcccgacuccucguu

SEQ ID NO: 2729325 - RNA, 19 nt, Artificial Sequence
  Description of Artificial Sequence: Synthetic oligonucleotide
ccgcuggggcggggcuuuc

SEQ ID NO: 2729326 - RNA, 19 nt, Artificial Sequence
  Description of Artificial Sequence: Synthetic oligonucleotide
cgcuggggcggggcuuucu

SEQ ID NO: 2729327 - RNA, 19 nt, Artificial Sequence
  Description of Artificial Sequence: Synthetic oligonucleotide
aagaagacaguucugauac

SEQ ID NO: 2729328 - RNA, 19 nt, Artificial Sequence
  Description of Artificial Sequence: Synthetic oligonucleotide
aaugguuuaauuuuauuug

SEQ ID NO: 2729329 - RNA, 19 nt, Artificial Sequence
  Description of Artificial Sequence: Synthetic oligonucleotide
cuuuugaugagaaacaacg

SEQ ID NO: 2729330 - RNA, 19 nt, Artificial Sequence
  Description of Artificial Sequence: Synthetic oligonucleotide
aauucacacagcuaguuac

SEQ ID NO: 2729331 - RNA, 19 nt, Artificial Sequence
  Description of Artificial Sequence: Synthetic oligonucleotide
ucaucuauuacaaauaaac

SEQ ID NO: 2729332 - RNA, 19 nt, Artificial Sequence
  Description of Artificial Sequence: Synthetic oligonucleotide
uuauugaucaucauugaag

SEQ ID NO: 2729333 - RNA, 19 nt, Artificial Sequence
  Description of Artificial Sequence: Synthetic oligonucleotide
acaaauaaacccuuccugc

SEQ ID NO: 2729334 - RNA, 19 nt, Artificial Sequence
  Description of Artificial Sequence: Synthetic oligonucleotide
ucuauuacaaauaaacccu

SEQ ID NO: 2729335 - RNA, 19 nt, Artificial Sequence
  Description of Artificial Sequence: Synthetic oligonucleotide
aaaguuaaacuacugagga

SEQ ID NO: 2729336 - RNA, 19 nt, Artificial Sequence
  Description of Artificial Sequence: Synthetic oligonucleotide
auuacaaauaaacccuucc

SEQ ID NO: 2729337 - RNA, 19 nt, Artificial Sequence
  Description of Artificial Sequence: Synthetic oligonucleotide
gaacaauucacacagcuag

SEQ ID NO: 2729338 - RNA, 19 nt, Artificial Sequence
  Description of Artificial Sequence: Synthetic oligonucleotide
uaacccauuaagaagacag

SEQ ID NO: 2729339 - RNA, 19 nt, Artificial Sequence
  Description of Artificial Sequence: Synthetic oligonucleotide
uuuauuugcauacaguggu

SEQ ID NO: 2729340 - RNA, 19 nt, Artificial Sequence
  Description of Artificial Sequence: Synthetic oligonucleotide
uaaagguuaacccauuaag

SEQ ID NO: 2729341 - RNA, 19 nt, Artificial Sequence
  Description of Artificial Sequence: Synthetic oligonucleotide
aguacauauuaauagaucu

SEQ ID NO: 2729342 - RNA, 19 nt, Artificial Sequence
  Description of Artificial Sequence: Synthetic oligonucleotide
aucaauccuaaauauauuc

SEQ ID NO: 2729343 - RNA, 19 nt, Artificial Sequence
  Description of Artificial Sequence: Synthetic oligonucleotide
aaaaguuaaacuacugagg

SEQ ID NO: 2729344 - RNA, 19 nt, Artificial Sequence
  Description of Artificial Sequence: Synthetic oligonucleotide
cauauuaauagaucugugg

SEQ ID NO: 2729345 - RNA, 19 nt, Artificial Sequence
  Description of Artificial Sequence: Synthetic oligonucleotide
aacucuguuugcuauuggc

SEQ ID NO: 2729346 - RNA, 19 nt, Artificial Sequence
  Description of Artificial Sequence: Synthetic oligonucleotide
uauugaucaucauugaagc

SEQ ID NO: 2729347 - RNA, 19 nt, Artificial Sequence
  Description of Artificial Sequence: Synthetic oligonucleotide
aauaaacccuuccugcaac

SEQ ID NO: 2729348 - RNA, 19 nt, Artificial Sequence
  Description of Artificial Sequence: Synthetic oligonucleotide
uagucaguaauuuuaauac

SEQ ID NO: 2729349 - RNA, 19 nt, Artificial Sequence
  Description of Artificial Sequence: Synthetic oligonucleotide
cauacaguggucauuaaag

SEQ ID NO: 2729350 - RNA, 19 nt, Artificial Sequence
  Description of Artificial Sequence: Synthetic oligonucleotide
auauuaauagaucuguggu

SEQ ID NO: 2729351 - RNA, 19 nt, Artificial Sequence
  Description of Artificial Sequence: Synthetic oligonucleotide
uaaacuacugaggaaaucc

SEQ ID NO: 2729352 - RNA, 19 nt, Artificial Sequence
  Description of Artificial Sequence: Synthetic oligonucleotide
cuugagaaaacucuguuug

SEQ ID NO: 2729353 - RNA, 19 nt, Artificial Sequence
  Description of Artificial Sequence: Synthetic oligonucleotide
uacaaauaaacccuuccug

SEQ ID NO: 2729354 - RNA, 19 nt, Artificial Sequence
  Description of Artificial Sequence: Synthetic oligonucleotide
aaauccuucacuguucuag

SEQ ID NO: 2729355 - RNA, 19 nt, Artificial Sequence
  Description of Artificial Sequence: Synthetic oligonucleotide
uuaaauucaaaagaaguuc

SEQ ID NO: 2729356 - RNA, 19 nt, Artificial Sequence
  Description of Artificial Sequence: Synthetic oligonucleotide
aucgagaacggacacaaac

SEQ ID NO: 2729357 - RNA, 19 nt, Artificial Sequence
  Description of Artificial Sequence: Synthetic oligonucleotide
ucuaccaacucuuuguuca

SEQ ID NO: 2729358 - RNA, 19 nt, Artificial Sequence
  Description of Artificial Sequence: Synthetic oligonucleotide
caaacuuuugaugagaaac

SEQ ID NO: 2729359 - RNA, 19 nt, Artificial Sequence
  Description of Artificial Sequence: Synthetic oligonucleotide
aaugauucauuauauucau

SEQ ID NO: 2729360 - RNA, 19 nt, Artificial Sequence
  Description of Artificial Sequence: Synthetic oligonucleotide
caucccaacaucgagaacg

SEQ ID NO: 2729361 - RNA, 19 nt, Artificial Sequence
  Description of Artificial Sequence: Synthetic oligonucleotide
auucauuauauucauuugu

SEQ ID NO: 2729362 - RNA, 19 nt, Artificial Sequence
  Description of Artificial Sequence: Synthetic oligonucleotide
agaaguuagacugcaaacg

SEQ ID NO: 2729363 - RNA, 19 nt, Artificial Sequence
  Description of Artificial Sequence: Synthetic oligonucleotide
aacagagcagaaguuagac

SEQ ID NO: 2729364 - RNA, 19 nt, Artificial Sequence
  Description of Artificial Sequence: Synthetic oligonucleotide
uagaaucacaguucgaagc

SEQ ID NO: 2729365 - RNA, 19 nt, Artificial Sequence
  Description of Artificial Sequence: Synthetic oligonucleotide
caucuauuacaaauaaacc

SEQ ID NO: 2729366 - RNA, 19 nt, Artificial Sequence
  Description of Artificial Sequence: Synthetic oligonucleotide
ugaagcaauugcuccaucg

SEQ ID NO: 2729367 - RNA, 19 nt, Artificial Sequence
  Description of Artificial Sequence: Synthetic oligonucleotide
ucaauccuaaauauauuca

SEQ ID NO: 2729368 - RNA, 19 nt, Artificial Sequence
  Description of Artificial Sequence: Synthetic oligonucleotide
aguaauuuuaauacuuuuc

SEQ ID NO: 2729369 - RNA, 19 nt, Artificial Sequence
  Description of Artificial Sequence: Synthetic oligonucleotide
ucugugguaaaucaauccu

SEQ ID NO: 2729370 - RNA, 19 nt, Artificial Sequence
  Description of Artificial Sequence: Synthetic oligonucleotide
ucauugaagcaauugcucc

SEQ ID NO: 2729371 - RNA, 19 nt, Artificial Sequence
  Description of Artificial Sequence: Synthetic oligonucleotide
uuacaaauaaacccuuccu

SEQ ID NO: 2729372 - RNA, 19 nt, Artificial Sequence
  Description of Artificial Sequence: Synthetic oligonucleotide
ugguaaaucaauccuaaau

SEQ ID NO: 2729373 - RNA, 19 nt, Artificial Sequence
  Description of Artificial Sequence: Synthetic oligonucleotide
acagcuaguuacuagcuag

SEQ ID NO: 2729374 - RNA, 19 nt, Artificial Sequence
  Description of Artificial Sequence: Synthetic oligonucleotide
uaauuuuaauacuuuucca

SEQ ID NO: 2729375 - RNA, 19 nt, Artificial Sequence
  Description of Artificial Sequence: Synthetic oligonucleotide
ucguuaaauucaaaagaag

SEQ ID NO: 2729376 - RNA, 19 nt, Artificial Sequence
  Description of Artificial Sequence: Synthetic oligonucleotide
ugcuccaucguuaaauuca

SEQ ID NO: 2729377 - RNA, 19 nt, Artificial Sequence
  Description of Artificial Sequence: Synthetic oligonucleotide
augagaaacaacguugacg

SEQ ID NO: 2729378 - RNA, 19 nt, Artificial Sequence
  Description of Artificial Sequence: Synthetic oligonucleotide
guucuagaaucacaguucg

SEQ ID NO: 2729379 - RNA, 19 nt, Artificial Sequence
  Description of Artificial Sequence: Synthetic oligonucleotide
uuugaugagaaacaacguu

SEQ ID NO: 2729380 - RNA, 19 nt, Artificial Sequence
  Description of Artificial Sequence: Synthetic oligonucleotide
uugccauucaucuauuaca

SEQ ID NO: 2729381 - RNA, 19 nt, Artificial Sequence
  Description of Artificial Sequence: Synthetic oligonucleotide
ucauuaaagguuaacccau

SEQ ID NO: 2729382 - RNA, 19 nt, Artificial Sequence
  Description of Artificial Sequence: Synthetic oligonucleotide
ugaugagaaacaacguuga

SEQ ID NO: 2729383 - RNA, 19 nt, Artificial Sequence
  Description of Artificial Sequence: Synthetic oligonucleotide
augaacaauucacacagcu

SEQ ID NO: 2729384 - RNA, 19 nt, Artificial Sequence
  Description of Artificial Sequence: Synthetic oligonucleotide
agguuaacccauuaagaag

SEQ ID NO: 2729385 - RNA, 19 nt, Artificial Sequence
  Description of Artificial Sequence: Synthetic oligonucleotide
agagcaaugauucauuaua

SEQ ID NO: 2729386 - RNA, 19 nt, Artificial Sequence
  Description of Artificial Sequence: Synthetic oligonucleotide
uuugccauucaucuauuac

SEQ ID NO: 2729387 - RNA, 19 nt, Artificial Sequence
  Description of Artificial Sequence: Synthetic oligonucleotide
uuuuaauacuuuuccaaau

SEQ ID NO: 2729388 - RNA, 19 nt, Artificial Sequence
  Description of Artificial Sequence: Synthetic oligonucleotide
uccaucguuaaauucaaaa

SEQ ID NO: 2729389 - RNA, 19 nt, Artificial Sequence
  Description of Artificial Sequence: Synthetic oligonucleotide
auuaagaagacaguucuga

SEQ ID NO: 2729390 - RNA, 19 nt, Artificial Sequence
  Description of Artificial Sequence: Synthetic oligonucleotide
auagaucugugguaaauca

SEQ ID NO: 2729391 - RNA, 19 nt, Artificial Sequence
  Description of Artificial Sequence: Synthetic oligonucleotide
ucuagaaucacaguucgaa

SEQ ID NO: 2729392 - RNA, 19 nt, Artificial Sequence
  Description of Artificial Sequence: Synthetic oligonucleotide
caaugauucauuauauuca

SEQ ID NO: 2729393 - RNA, 19 nt, Artificial Sequence
  Description of Artificial Sequence: Synthetic oligonucleotide
aguuaaacuacugaggaaa

SEQ ID NO: 2729394 - RNA, 19 nt, Artificial Sequence
  Description of Artificial Sequence: Synthetic oligonucleotide
uugaucaucauugaagcaa

SEQ ID NO: 2729395 - RNA, 19 nt, Artificial Sequence
  Description of Artificial Sequence: Synthetic oligonucleotide
uuuguucaauggaagaguc

SEQ ID NO: 2729396 - RNA, 19 nt, Artificial Sequence
  Description of Artificial Sequence: Synthetic oligonucleotide
aaauguagcuuaugaacaa

SEQ ID NO: 2729397 - RNA, 19 nt, Artificial Sequence
  Description of Artificial Sequence: Synthetic oligonucleotide
uuaaagguuaacccauuaa

SEQ ID NO: 2729398 - RNA, 19 nt, Artificial Sequence
  Description of Artificial Sequence: Synthetic oligonucleotide
uuuugaugagaaacaacgu

SEQ ID NO: 2729399 - RNA, 19 nt, Artificial Sequence
  Description of Artificial Sequence: Synthetic oligonucleotide
uggucauuaaagguuaacc

SEQ ID NO: 2729400 - RNA, 19 nt, Artificial Sequence
  Description of Artificial Sequence: Synthetic oligonucleotide
aagacaguucugauacucc

SEQ ID NO: 2729401 - RNA, 19 nt, Artificial Sequence
  Description of Artificial Sequence: Synthetic oligonucleotide
ucgaauacugaaaaguauu

SEQ ID NO: 2729402 - RNA, 19 nt, Artificial Sequence
  Description of Artificial Sequence: Synthetic oligonucleotide
ugugguaaaucaauccuaa

SEQ ID NO: 2729403 - RNA, 19 nt, Artificial Sequence
  Description of Artificial Sequence: Synthetic oligonucleotide
auuaauagaucugugguaa

SEQ ID NO: 2729404 - RNA, 19 nt, Artificial Sequence
  Description of Artificial Sequence: Synthetic oligonucleotide
gauacuccaacauccuuug

SEQ ID NO: 2729405 - RNA, 19 nt, Artificial Sequence
  Description of Artificial Sequence: Synthetic oligonucleotide
cacuguucuagaaucacag

SEQ ID NO: 2729406 - RNA, 19 nt, Artificial Sequence
  Description of Artificial Sequence: Synthetic oligonucleotide
gucauuaaagguuaaccca

SEQ ID NO: 2729407 - RNA, 19 nt, Artificial Sequence
  Description of Artificial Sequence: Synthetic oligonucleotide
caucguuaaauucaaaaga

SEQ ID NO: 2729408 - RNA, 19 nt, Artificial Sequence
  Description of Artificial Sequence: Synthetic oligonucleotide
ggucauuaaagguuaaccc

SEQ ID NO: 2729409 - RNA, 19 nt, Artificial Sequence
  Description of Artificial Sequence: Synthetic oligonucleotide
guuacuagcuaguaguaca

SEQ ID NO: 2729410 - RNA, 19 nt, Artificial Sequence
  Description of Artificial Sequence: Synthetic oligonucleotide
agaaucacaguucgaagcu

SEQ ID NO: 2729411 - RNA, 19 nt, Artificial Sequence
  Description of Artificial Sequence: Synthetic oligonucleotide
aaaacucuguuugcuauug

SEQ ID NO: 2729412 - RNA, 19 nt, Artificial Sequence
  Description of Artificial Sequence: Synthetic oligonucleotide
cacacagcuaguuacuagc

SEQ ID NO: 2729413 - RNA, 19 nt, Artificial Sequence
  Description of Artificial Sequence: Synthetic oligonucleotide
auccuaaauauauucauuu

SEQ ID NO: 2729414 - RNA, 19 nt, Artificial Sequence
  Description of Artificial Sequence: Synthetic oligonucleotide
aaauaaacccuuccugcaa

SEQ ID NO: 2729415 - RNA, 19 nt, Artificial Sequence
  Description of Artificial Sequence: Synthetic oligonucleotide
ugguuuaauuuuauuugca

SEQ ID NO: 2729416 - RNA, 19 nt, Artificial Sequence
  Description of Artificial Sequence: Synthetic oligonucleotide
uauuaauagaucuguggua

SEQ ID NO: 2729417 - RNA, 19 nt, Artificial Sequence
  Description of Artificial Sequence: Synthetic oligonucleotide
uccauccacaaccaugcag

SEQ ID NO: 2729418 - RNA, 19 nt, Artificial Sequence
  Description of Artificial Sequence: Synthetic oligonucleotide
ugcaggcaucccaacaucg

SEQ ID NO: 2729419 - RNA, 19 nt, Artificial Sequence
  Description of Artificial Sequence: Synthetic oligonucleotide
uacaguggucauuaaaggu

SEQ ID NO: 2729420 - RNA, 19 nt, Artificial Sequence
  Description of Artificial Sequence: Synthetic oligonucleotide
gacacaaacuuuugaugag

SEQ ID NO: 2729421 - RNA, 19 nt, Artificial Sequence
  Description of Artificial Sequence: Synthetic oligonucleotide
uuagacugcaaacguaguc

SEQ ID NO: 2729422 - RNA, 19 nt, Artificial Sequence
  Description of Artificial Sequence: Synthetic oligonucleotide
aguuagacugcaaacguag

SEQ ID NO: 2729423 - RNA, 19 nt, Artificial Sequence
  Description of Artificial Sequence: Synthetic oligonucleotide
ucucgaauacugaaaagua

SEQ ID NO: 2729424 - RNA, 19 nt, Artificial Sequence
  Description of Artificial Sequence: Synthetic oligonucleotide
uagcuaguaguacauauua

SEQ ID NO: 2729425 - RNA, 19 nt, Artificial Sequence
  Description of Artificial Sequence: Synthetic oligonucleotide
uaguacauauuaauagauc

SEQ ID NO: 2729426 - RNA, 19 nt, Artificial Sequence
  Description of Artificial Sequence: Synthetic oligonucleotide
uccuuugccauucaucuau

SEQ ID NO: 2729427 - RNA, 19 nt, Artificial Sequence
  Description of Artificial Sequence: Synthetic oligonucleotide
ucgagaacggacacaaacu

SEQ ID NO: 2729428 - RNA, 19 nt, Artificial Sequence
  Description of Artificial Sequence: Synthetic oligonucleotide
cuuaugaacaauucacaca

SEQ ID NO: 2729429 - RNA, 19 nt, Artificial Sequence
  Description of Artificial Sequence: Synthetic oligonucleotide
auucaucuauuacaaauaa

SEQ ID NO: 2729430 - RNA, 19 nt, Artificial Sequence
  Description of Artificial Sequence: Synthetic oligonucleotide
uagacugcaaacguaguca

SEQ ID NO: 2729431 - RNA, 19 nt, Artificial Sequence
  Description of Artificial Sequence: Synthetic oligonucleotide
ugauacuccaacauccuuu

SEQ ID NO: 2729432 - RNA, 19 nt, Artificial Sequence
  Description of Artificial Sequence: Synthetic oligonucleotide
ucuucgggacuguagagca

SEQ ID NO: 2729433 - RNA, 19 nt, Artificial Sequence
  Description of Artificial Sequence: Synthetic oligonucleotide
aaacucuguuugcuauugg

SEQ ID NO: 2729434 - RNA, 19 nt, Artificial Sequence
  Description of Artificial Sequence: Synthetic oligonucleotide
agaaacaacguugacggcu

SEQ ID NO: 2729435 - RNA, 19 nt, Artificial Sequence
  Description of Artificial Sequence: Synthetic oligonucleotide
ccaaauguagcuuaugaac

SEQ ID NO: 2729436 - RNA, 19 nt, Artificial Sequence
  Description of Artificial Sequence: Synthetic oligonucleotide
aaagaaguuccuccaucca

SEQ ID NO: 2729437 - RNA, 19 nt, Artificial Sequence
  Description of Artificial Sequence: Synthetic oligonucleotide
acuagcuaguaguacauau

SEQ ID NO: 2729438 - RNA, 19 nt, Artificial Sequence
  Description of Artificial Sequence: Synthetic oligonucleotide
gcaaugauucauuauauuc

SEQ ID NO: 2729439 - RNA, 19 nt, Artificial Sequence
  Description of Artificial Sequence: Synthetic oligonucleotide
ucaguaauuuuaauacuuu

SEQ ID NO: 2729440 - RNA, 19 nt, Artificial Sequence
  Description of Artificial Sequence: Synthetic oligonucleotide
cuagaaucacaguucgaag

SEQ ID NO: 2729441 - RNA, 19 nt, Artificial Sequence
  Description of Artificial Sequence: Synthetic oligonucleotide
uuugcuauuggcucucgaa

SEQ ID NO: 2729442 - RNA, 19 nt, Artificial Sequence
  Description of Artificial Sequence: Synthetic oligonucleotide
aauccuucacuguucuaga

SEQ ID NO: 2729443 - RNA, 19 nt, Artificial Sequence
  Description of Artificial Sequence: Synthetic oligonucleotide
acuacugaggaaauccuuc

SEQ ID NO: 2729444 - RNA, 19 nt, Artificial Sequence
  Description of Artificial Sequence: Synthetic oligonucleotide
ugccauucaucuauuacaa

SEQ ID NO: 2729445 - RNA, 19 nt, Artificial Sequence
  Description of Artificial Sequence: Synthetic oligonucleotide
uauuacaaauaaacccuuc

SEQ ID NO: 2729446 - RNA, 19 nt, Artificial Sequence
  Description of Artificial Sequence: Synthetic oligonucleotide
aacggacacaaacuuuuga

SEQ ID NO: 2729447 - RNA, 19 nt, Artificial Sequence
  Description of Artificial Sequence: Synthetic oligonucleotide
uccuccauccacaaccaug

SEQ ID NO: 2729448 - RNA, 19 nt, Artificial Sequence
  Description of Artificial Sequence: Synthetic oligonucleotide
aacguagucaguaauuuua

SEQ ID NO: 2729449 - RNA, 19 nt, Artificial Sequence
  Description of Artificial Sequence: Synthetic oligonucleotide
uaagaagacaguucugaua

SEQ ID NO: 2729450 - RNA, 19 nt, Artificial Sequence
  Description of Artificial Sequence: Synthetic oligonucleotide
uccaaauguagcuuaugaa

SEQ ID NO: 2729451 - RNA, 19 nt, Artificial Sequence
  Description of Artificial Sequence: Synthetic oligonucleotide
guagucaguaauuuuaaua

SEQ ID NO: 2729452 - RNA, 19 nt, Artificial Sequence
  Description of Artificial Sequence: Synthetic oligonucleotide
ucauuauauucauuuguua

SEQ ID NO: 2729453 - RNA, 19 nt, Artificial Sequence
  Description of Artificial Sequence: Synthetic oligonucleotide
uucaauggaagagucagau

SEQ ID NO: 2729454 - RNA, 19 nt, Artificial Sequence
  Description of Artificial Sequence: Synthetic oligonucleotide
agucaguaauuuuaauacu

SEQ ID NO: 2729455 - RNA, 19 nt, Artificial Sequence
  Description of Artificial Sequence: Synthetic oligonucleotide
aguuacuagcuaguaguac

SEQ ID NO: 2729456 - RNA, 19 nt, Artificial Sequence
  Description of Artificial Sequence: Synthetic oligonucleotide
ugagaaaacucuguuugcu

SEQ ID NO: 2729457 - RNA, 19 nt, Artificial Sequence
  Description of Artificial Sequence: Synthetic oligonucleotide
ugaucaucauugaagcaau

SEQ ID NO: 2729458 - RNA, 19 nt, Artificial Sequence
  Description of Artificial Sequence: Synthetic oligonucleotide
gguaaaucaauccuaaaua

SEQ ID NO: 2729459 - RNA, 19 nt, Artificial Sequence
  Description of Artificial Sequence: Synthetic oligonucleotide
cuaguuacuagcuaguagu

SEQ ID NO: 2729460 - RNA, 19 nt, Artificial Sequence
  Description of Artificial Sequence: Synthetic oligonucleotide
uucaucuauuacaaauaaa

SEQ ID NO: 2729461 - RNA, 19 nt, Artificial Sequence
  Description of Artificial Sequence: Synthetic oligonucleotide
uauuugcauacagugguca

SEQ ID NO: 2729462 - RNA, 19 nt, Artificial Sequence
  Description of Artificial Sequence: Synthetic oligonucleotide
aacucuuuguucaauggaa

SEQ ID NO: 2729463 - RNA, 19 nt, Artificial Sequence
  Description of Artificial Sequence: Synthetic oligonucleotide
aaacaacguugacggcugc

SEQ ID NO: 2729464 - RNA, 19 nt, Artificial Sequence
  Description of Artificial Sequence: Synthetic oligonucleotide
acuccaacauccuuugcca

SEQ ID NO: 2729465 - RNA, 19 nt, Artificial Sequence
  Description of Artificial Sequence: Synthetic oligonucleotide
acuuuugaugagaaacaac

SEQ ID NO: 2729466 - RNA, 19 nt, Artificial Sequence
  Description of Artificial Sequence: Synthetic oligonucleotide
ucugauacuccaacauccu

SEQ ID NO: 2729467 - RNA, 19 nt, Artificial Sequence
  Description of Artificial Sequence: Synthetic oligonucleotide
uguagagcaaugauucauu

SEQ ID NO: 2729468 - RNA, 19 nt, Artificial Sequence
  Description of Artificial Sequence: Synthetic oligonucleotide
agacugcaaacguagucag

SEQ ID NO: 2729469 - RNA, 19 nt, Artificial Sequence
  Description of Artificial Sequence: Synthetic oligonucleotide
aucaucauugaagcaauug

SEQ ID NO: 2729470 - RNA, 19 nt, Artificial Sequence
  Description of Artificial Sequence: Synthetic oligonucleotide
uuaagaagacaguucugau

SEQ ID NO: 2729471 - RNA, 19 nt, Artificial Sequence
  Description of Artificial Sequence: Synthetic oligonucleotide
aacuuuugaugagaaacaa

SEQ ID NO: 2729472 - RNA, 19 nt, Artificial Sequence
  Description of Artificial Sequence: Synthetic oligonucleotide
ucacacagcuaguuacuag

SEQ ID NO: 2729473 - RNA, 19 nt, Artificial Sequence
  Description of Artificial Sequence: Synthetic oligonucleotide
uuacuagcuaguaguacau

SEQ ID NO: 2729474 - RNA, 19 nt, Artificial Sequence
  Description of Artificial Sequence: Synthetic oligonucleotide
uuuugguucuucgggacug

SEQ ID NO: 2729475 - RNA, 19 nt, Artificial Sequence
  Description of Artificial Sequence: Synthetic oligonucleotide
guacauauuaauagaucug

SEQ ID NO: 2729476 - RNA, 19 nt, Artificial Sequence
  Description of Artificial Sequence: Synthetic oligonucleotide
ggacacaaacuuuugauga

SEQ ID NO: 2729477 - RNA, 19 nt, Artificial Sequence
  Description of Artificial Sequence: Synthetic oligonucleotide
ucaaaagaaguuccuccau

SEQ ID NO: 2729478 - RNA, 19 nt, Artificial Sequence
  Description of Artificial Sequence: Synthetic oligonucleotide
ccaucguuaaauucaaaag

SEQ ID NO: 2729479 - RNA, 19 nt, Artificial Sequence
  Description of Artificial Sequence: Synthetic oligonucleotide
gaagacaguucugauacuc

SEQ ID NO: 2729480 - RNA, 19 nt, Artificial Sequence
  Description of Artificial Sequence: Synthetic oligonucleotide
aaucacaguucgaagcuca

SEQ ID NO: 2729481 - RNA, 19 nt, Artificial Sequence
  Description of Artificial Sequence: Synthetic oligonucleotide
uugcuauuggcucucgaau

SEQ ID NO: 2729482 - RNA, 19 nt, Artificial Sequence
  Description of Artificial Sequence: Synthetic oligonucleotide
accaacucuuuguucaaug

SEQ ID NO: 2729483 - RNA, 19 nt, Artificial Sequence
  Description of Artificial Sequence: Synthetic oligonucleotide
gaaacaacguugacggcug

SEQ ID NO: 2729484 - RNA, 19 nt, Artificial Sequence
  Description of Artificial Sequence: Synthetic oligonucleotide
uccuaaauauauucauuua

SEQ ID NO: 2729485 - RNA, 19 nt, Artificial Sequence
  Description of Artificial Sequence: Synthetic oligonucleotide
aacguugacggcugcuuga

SEQ ID NO: 2729486 - RNA, 19 nt, Artificial Sequence
  Description of Artificial Sequence: Synthetic oligonucleotide
aaacguagucaguaauuuu

SEQ ID NO: 2729487 - RNA, 19 nt, Artificial Sequence
  Description of Artificial Sequence: Synthetic oligonucleotide
caaaagaaguuccuccauc

SEQ ID NO: 2729488 - RNA, 19 nt, Artificial Sequence
  Description of Artificial Sequence: Synthetic oligonucleotide
ugcaaacguagucaguaau

SEQ ID NO: 2729489 - RNA, 19 nt, Artificial Sequence
  Description of Artificial Sequence: Synthetic oligonucleotide
guaaaucaauccuaaauau

SEQ ID NO: 2729490 - RNA, 19 nt, Artificial Sequence
  Description of Artificial Sequence: Synthetic oligonucleotide
acggacacaaacuuuugau

SEQ ID NO: 2729491 - RNA, 19 nt, Artificial Sequence
  Description of Artificial Sequence: Synthetic oligonucleotide
uaugaacaauucacacagc

SEQ ID NO: 2729492 - RNA, 19 nt, Artificial Sequence
  Description of Artificial Sequence: Synthetic oligonucleotide
agagcagaaguuagacugc

SEQ ID NO: 2729493 - RNA, 19 nt, Artificial Sequence
  Description of Artificial Sequence: Synthetic oligonucleotide
gaaguuagacugcaaacgu

SEQ ID NO: 2729494 - RNA, 19 nt, Artificial Sequence
  Description of Artificial Sequence: Synthetic oligonucleotide
cuaguaguacauauuaaua

SEQ ID NO: 2729495 - RNA, 19 nt, Artificial Sequence
  Description of Artificial Sequence: Synthetic oligonucleotide
gguuaacccauuaagaaga

SEQ ID NO: 2729496 - RNA, 19 nt, Artificial Sequence
  Description of Artificial Sequence: Synthetic oligonucleotide
aauccuaaauauauucauu

SEQ ID NO: 2729497 - RNA, 19 nt, Artificial Sequence
  Description of Artificial Sequence: Synthetic oligonucleotide
uagaucugugguaaaucaa

SEQ ID NO: 2729498 - RNA, 19 nt, Artificial Sequence
  Description of Artificial Sequence: Synthetic oligonucleotide
ugaggaaauccuucacugu

SEQ ID NO: 2729499 - RNA, 19 nt, Artificial Sequence
  Description of Artificial Sequence: Synthetic oligonucleotide
caaauaaacccuuccugca

SEQ ID NO: 2729500 - RNA, 19 nt, Artificial Sequence
  Description of Artificial Sequence: Synthetic oligonucleotide
aagcaauugcuccaucguu

SEQ ID NO: 2729501 - RNA, 19 nt, Artificial Sequence
  Description of Artificial Sequence: Synthetic oligonucleotide
aaguuccuccauccacaac

SEQ ID NO: 2729502 - RNA, 19 nt, Artificial Sequence
  Description of Artificial Sequence: Synthetic oligonucleotide
ugguucuucgggacuguag

SEQ ID NO: 2729503 - RNA, 19 nt, Artificial Sequence
  Description of Artificial Sequence: Synthetic oligonucleotide
gcuuaugaacaauucacac

SEQ ID NO: 2729504 - RNA, 19 nt, Artificial Sequence
  Description of Artificial Sequence: Synthetic oligonucleotide
auuaaagguuaacccauua

SEQ ID NO: 2729505 - RNA, 19 nt, Artificial Sequence
  Description of Artificial Sequence: Synthetic oligonucleotide
aaacuacugaggaaauccu

SEQ ID NO: 2729506 - RNA, 19 nt, Artificial Sequence
  Description of Artificial Sequence: Synthetic oligonucleotide
aauguagcuuaugaacaau

SEQ ID NO: 2729507 - RNA, 19 nt, Artificial Sequence
  Description of Artificial Sequence: Synthetic oligonucleotide
gaugagaaacaacguugac

SEQ ID NO: 2729508 - RNA, 19 nt, Artificial Sequence
  Description of Artificial Sequence: Synthetic oligonucleotide
acauccuuugccauucauc

SEQ ID NO: 2729509 - RNA, 19 nt, Artificial Sequence
  Description of Artificial Sequence: Synthetic oligonucleotide
uaauagaucugugguaaau

SEQ ID NO: 2729510 - RNA, 19 nt, Artificial Sequence
  Description of Artificial Sequence: Synthetic oligonucleotide
uuggcucucgaauacugaa

SEQ ID NO: 2729511 - RNA, 19 nt, Artificial Sequence
  Description of Artificial Sequence: Synthetic oligonucleotide
uucuucgggacuguagagc

SEQ ID NO: 2729512 - RNA, 19 nt, Artificial Sequence
  Description of Artificial Sequence: Synthetic oligonucleotide
cauucaucuauuacaaaua

SEQ ID NO: 2729513 - RNA, 19 nt, Artificial Sequence
  Description of Artificial Sequence: Synthetic oligonucleotide
ugcuauuggcucucgaaua

SEQ ID NO: 2729514 - RNA, 19 nt, Artificial Sequence
  Description of Artificial Sequence: Synthetic oligonucleotide
ugcuugagaaaacucuguu

SEQ ID NO: 2729515 - RNA, 19 nt, Artificial Sequence
  Description of Artificial Sequence: Synthetic oligonucleotide
uucacuguucuagaaucac

SEQ ID NO: 2729516 - RNA, 19 nt, Artificial Sequence
  Description of Artificial Sequence: Synthetic oligonucleotide
gcuaguuacuagcuaguag

SEQ ID NO: 2729517 - RNA, 19 nt, Artificial Sequence
  Description of Artificial Sequence: Synthetic oligonucleotide
acugcaaacguagucagua

SEQ ID NO: 2729518 - RNA, 19 nt, Artificial Sequence
  Description of Artificial Sequence: Synthetic oligonucleotide
uuaaacuacugaggaaauc

SEQ ID NO: 2729519 - RNA, 19 nt, Artificial Sequence
  Description of Artificial Sequence: Synthetic oligonucleotide
acaaccaugcaggcauccc

SEQ ID NO: 2729520 - RNA, 19 nt, Artificial Sequence
  Description of Artificial Sequence: Synthetic oligonucleotide
auacuccaacauccuuugc

SEQ ID NO: 2729521 - RNA, 19 nt, Artificial Sequence
  Description of Artificial Sequence: Synthetic oligonucleotide
cauugaagcaauugcucca

SEQ ID NO: 2729522 - RNA, 19 nt, Artificial Sequence
  Description of Artificial Sequence: Synthetic oligonucleotide
uuaauagaucugugguaaa

SEQ ID NO: 2729523 - RNA, 19 nt, Artificial Sequence
  Description of Artificial Sequence: Synthetic oligonucleotide
guugacggcugcuugagaa

SEQ ID NO: 2729524 - RNA, 19 nt, Artificial Sequence
  Description of Artificial Sequence: Synthetic oligonucleotide
uaguuacuagcuaguagua

SEQ ID NO: 2729525 - RNA, 19 nt, Artificial Sequence
  Description of Artificial Sequence: Synthetic oligonucleotide
uagagcaaugauucauuau

SEQ ID NO: 2729526 - RNA, 19 nt, Artificial Sequence
  Description of Artificial Sequence: Synthetic oligonucleotide
acucuuuguucaauggaag

SEQ ID NO: 2729527 - RNA, 19 nt, Artificial Sequence
  Description of Artificial Sequence: Synthetic oligonucleotide
acaucgagaacggacacaa

SEQ ID NO: 2729528 - RNA, 19 nt, Artificial Sequence
  Description of Artificial Sequence: Synthetic oligonucleotide
aggaaauccuucacuguuc

SEQ ID NO: 2729529 - RNA, 19 nt, Artificial Sequence
  Description of Artificial Sequence: Synthetic oligonucleotide
auaaacccuuccugcaaca

SEQ ID NO: 2729530 - RNA, 19 nt, Artificial Sequence
  Description of Artificial Sequence: Synthetic oligonucleotide
agaacggacacaaacuuuu

SEQ ID NO: 2729531 - RNA, 19 nt, Artificial Sequence
  Description of Artificial Sequence: Synthetic oligonucleotide
aacaauucacacagcuagu

SEQ ID NO: 2729532 - RNA, 19 nt, Artificial Sequence
  Description of Artificial Sequence: Synthetic oligonucleotide
uaaacccuuccugcaacag

SEQ ID NO: 2729533 - RNA, 19 nt, Artificial Sequence
  Description of Artificial Sequence: Synthetic oligonucleotide
aacauccuuugccauucau

SEQ ID NO: 2729534 - RNA, 19 nt, Artificial Sequence
  Description of Artificial Sequence: Synthetic oligonucleotide
aaucaauccuaaauauauu

SEQ ID NO: 2729535 - RNA, 19 nt, Artificial Sequence
  Description of Artificial Sequence: Synthetic oligonucleotide
acuguucuagaaucacagu

SEQ ID NO: 2729536 - RNA, 19 nt, Artificial Sequence
  Description of Artificial Sequence: Synthetic oligonucleotide
ccuccauccacaaccaugc

SEQ ID NO: 2729537 - RNA, 19 nt, Artificial Sequence
  Description of Artificial Sequence: Synthetic oligonucleotide
acaguggucauuaaagguu

SEQ ID NO: 2729538 - RNA, 19 nt, Artificial Sequence
  Description of Artificial Sequence: Synthetic oligonucleotide
agaucugugguaaaucaau

SEQ ID NO: 2729539 - RNA, 19 nt, Artificial Sequence
  Description of Artificial Sequence: Synthetic oligonucleotide
uuuccaaauguagcuuaug

SEQ ID NO: 2729540 - RNA, 19 nt, Artificial Sequence
  Description of Artificial Sequence: Synthetic oligonucleotide
agaaguuccuccauccaca

SEQ ID NO: 2729541 - RNA, 19 nt, Artificial Sequence
  Description of Artificial Sequence: Synthetic oligonucleotide
auugcuccaucguuaaauu

SEQ ID NO: 2729542 - RNA, 19 nt, Artificial Sequence
  Description of Artificial Sequence: Synthetic oligonucleotide
agcaaugauucauuauauu

SEQ ID NO: 2729543 - RNA, 19 nt, Artificial Sequence
  Description of Artificial Sequence: Synthetic oligonucleotide
caucauugaagcaauugcu

SEQ ID NO: 2729544 - RNA, 19 nt, Artificial Sequence
  Description of Artificial Sequence: Synthetic oligonucleotide
guucuucgggacuguagag

SEQ ID NO: 2729545 - RNA, 19 nt, Artificial Sequence
  Description of Artificial Sequence: Synthetic oligonucleotide
uuaacccauuaagaagaca

SEQ ID NO: 2729546 - RNA, 19 nt, Artificial Sequence
  Description of Artificial Sequence: Synthetic oligonucleotide
acuguagagcaaugauuca

SEQ ID NO: 2729547 - RNA, 19 nt, Artificial Sequence
  Description of Artificial Sequence: Synthetic oligonucleotide
aacaucgagaacggacaca

SEQ ID NO: 2729548 - RNA, 19 nt, Artificial Sequence
  Description of Artificial Sequence: Synthetic oligonucleotide
ccaacucuuuguucaaugg

SEQ ID NO: 2729549 - RNA, 19 nt, Artificial Sequence
  Description of Artificial Sequence: Synthetic oligonucleotide
auuugcauacaguggucau

SEQ ID NO: 2729550 - RNA, 19 nt, Artificial Sequence
  Description of Artificial Sequence: Synthetic oligonucleotide
uccugcaacagagcagaag

SEQ ID NO: 2729551 - RNA, 19 nt, Artificial Sequence
  Description of Artificial Sequence: Synthetic oligonucleotide
aguucgaagcucaucuucu

SEQ ID NO: 2729552 - RNA, 19 nt, Artificial Sequence
  Description of Artificial Sequence: Synthetic oligonucleotide
caguucgaagcucaucuuc

SEQ ID NO: 2729553 - RNA, 19 nt, Artificial Sequence
  Description of Artificial Sequence: Synthetic oligonucleotide
gagaaaacucuguuugcua

SEQ ID NO: 2729554 - RNA, 19 nt, Artificial Sequence
  Description of Artificial Sequence: Synthetic oligonucleotide
aacccauuaagaagacagu

SEQ ID NO: 2729555 - RNA, 19 nt, Artificial Sequence
  Description of Artificial Sequence: Synthetic oligonucleotide
gaagcaauugcuccaucgu

SEQ ID NO: 2729556 - RNA, 19 nt, Artificial Sequence
  Description of Artificial Sequence: Synthetic oligonucleotide
caggcaucccaacaucgag

SEQ ID NO: 2729557 - RNA, 19 nt, Artificial Sequence
  Description of Artificial Sequence: Synthetic oligonucleotide
cuuccugcaacagagcaga

SEQ ID NO: 2729558 - RNA, 19 nt, Artificial Sequence
  Description of Artificial Sequence: Synthetic oligonucleotide
cuuuuccaaauguagcuua

SEQ ID NO: 2729559 - RNA, 19 nt, Artificial Sequence
  Description of Artificial Sequence: Synthetic oligonucleotide
ccuaaauauauucauuuaa

SEQ ID NO: 2729560 - RNA, 19 nt, Artificial Sequence
  Description of Artificial Sequence: Synthetic oligonucleotide
cacaguucgaagcucaucu

SEQ ID NO: 2729561 - RNA, 19 nt, Artificial Sequence
  Description of Artificial Sequence: Synthetic oligonucleotide
acucuguuugcuauuggcu

SEQ ID NO: 2729562 - RNA, 19 nt, Artificial Sequence
  Description of Artificial Sequence: Synthetic oligonucleotide
gagaaacaacguugacggc

SEQ ID NO: 2729563 - RNA, 19 nt, Artificial Sequence
  Description of Artificial Sequence: Synthetic oligonucleotide
uggcucucgaauacugaaa

SEQ ID NO: 2729564 - RNA, 19 nt, Artificial Sequence
  Description of Artificial Sequence: Synthetic oligonucleotide
gguucuucgggacuguaga

SEQ ID NO: 2729565 - RNA, 19 nt, Artificial Sequence
  Description of Artificial Sequence: Synthetic oligonucleotide
cccaacaucgagaacggac

SEQ ID NO: 2729566 - RNA, 19 nt, Artificial Sequence
  Description of Artificial Sequence: Synthetic oligonucleotide
cauccacaaccaugcaggc

SEQ ID NO: 2729567 - RNA, 19 nt, Artificial Sequence
  Description of Artificial Sequence: Synthetic oligonucleotide
caauccuaaauauauucau

SEQ ID NO: 2729568 - RNA, 19 nt, Artificial Sequence
  Description of Artificial Sequence: Synthetic oligonucleotide
auugaagcaauugcuccau

SEQ ID NO: 2729569 - RNA, 19 nt, Artificial Sequence
  Description of Artificial Sequence: Synthetic oligonucleotide
uugcuccaucguuaaauuc

SEQ ID NO: 2729570 - RNA, 19 nt, Artificial Sequence
  Description of Artificial Sequence: Synthetic oligonucleotide
gcuauuggcucucgaauac

SEQ ID NO: 2729571 - RNA, 19 nt, Artificial Sequence
  Description of Artificial Sequence: Synthetic oligonucleotide
uuugcauacaguggucauu

SEQ ID NO: 2729572 - RNA, 19 nt, Artificial Sequence
  Description of Artificial Sequence: Synthetic oligonucleotide
caacaucgagaacggacac

SEQ ID NO: 2729573 - RNA, 19 nt, Artificial Sequence
  Description of Artificial Sequence: Synthetic oligonucleotide
acccauuaagaagacaguu

SEQ ID NO: 2729574 - RNA, 19 nt, Artificial Sequence
  Description of Artificial Sequence: Synthetic oligonucleotide
aaguuagacugcaaacgua

SEQ ID NO: 2729575 - RNA, 19 nt, Artificial Sequence
  Description of Artificial Sequence: Synthetic oligonucleotide
aacuacugaggaaauccuu

SEQ ID NO: 2729576 - RNA, 19 nt, Artificial Sequence
  Description of Artificial Sequence: Synthetic oligonucleotide
guaguacauauuaauagau

SEQ ID NO: 2729577 - RNA, 19 nt, Artificial Sequence
  Description of Artificial Sequence: Synthetic oligonucleotide
uucgggacuguagagcaau

SEQ ID NO: 2729578 - RNA, 19 nt, Artificial Sequence
  Description of Artificial Sequence: Synthetic oligonucleotide
cucucgaauacugaaaagu

SEQ ID NO: 2729579 - RNA, 19 nt, Artificial Sequence
  Description of Artificial Sequence: Synthetic oligonucleotide
guagagcaaugauucauua

SEQ ID NO: 2729580 - RNA, 19 nt, Artificial Sequence
  Description of Artificial Sequence: Synthetic oligonucleotide
cccauuaagaagacaguuc

SEQ ID NO: 2729581 - RNA, 19 nt, Artificial Sequence
  Description of Artificial Sequence: Synthetic oligonucleotide
uguuugcuauuggcucucg

SEQ ID NO: 2729582 - RNA, 19 nt, Artificial Sequence
  Description of Artificial Sequence: Synthetic oligonucleotide
uugacggcugcuugagaaa

SEQ ID NO: 2729583 - RNA, 19 nt, Artificial Sequence
  Description of Artificial Sequence: Synthetic oligonucleotide
gaacggacacaaacuuuug

SEQ ID NO: 2729584 - RNA, 19 nt, Artificial Sequence
  Description of Artificial Sequence: Synthetic oligonucleotide
agaagacaguucugauacu

SEQ ID NO: 2729585 - RNA, 19 nt, Artificial Sequence
  Description of Artificial Sequence: Synthetic oligonucleotide
gcuaguaguacauauuaau

SEQ ID NO: 2729586 - RNA, 19 nt, Artificial Sequence
  Description of Artificial Sequence: Synthetic oligonucleotide
cugugguaaaucaauccua

SEQ ID NO: 2729587 - RNA, 19 nt, Artificial Sequence
  Description of Artificial Sequence: Synthetic oligonucleotide
ugacggcugcuugagaaaa

SEQ ID NO: 2729588 - RNA, 19 nt, Artificial Sequence
  Description of Artificial Sequence: Synthetic oligonucleotide
gcagaaguuagacugcaaa

SEQ ID NO: 2729589 - RNA, 19 nt, Artificial Sequence
  Description of Artificial Sequence: Synthetic oligonucleotide
gaaguuccuccauccacaa

SEQ ID NO: 2729590 - RNA, 19 nt, Artificial Sequence
  Description of Artificial Sequence: Synthetic oligonucleotide
gaaucacaguucgaagcuc

SEQ ID NO: 2729591 - RNA, 19 nt, Artificial Sequence
  Description of Artificial Sequence: Synthetic oligonucleotide
agcaauugcuccaucguua

SEQ ID NO: 2729592 - RNA, 19 nt, Artificial Sequence
  Description of Artificial Sequence: Synthetic oligonucleotide
guuaacccauuaagaagac

SEQ ID NO: 2729593 - RNA, 19 nt, Artificial Sequence
  Description of Artificial Sequence: Synthetic oligonucleotide
gucaguaauuuuaauacuu

SEQ ID NO: 2729594 - RNA, 19 nt, Artificial Sequence
  Description of Artificial Sequence: Synthetic oligonucleotide
uugaagcaauugcuccauc

SEQ ID NO: 2729595 - RNA, 19 nt, Artificial Sequence
  Description of Artificial Sequence: Synthetic oligonucleotide
caaccaugcaggcauccca

SEQ ID NO: 2729596 - RNA, 19 nt, Artificial Sequence
  Description of Artificial Sequence: Synthetic oligonucleotide
ccaacaucgagaacggaca

SEQ ID NO: 2729597 - RNA, 19 nt, Artificial Sequence
  Description of Artificial Sequence: Synthetic oligonucleotide
acggcugcuugagaaaacu

SEQ ID NO: 2729598 - RNA, 19 nt, Artificial Sequence
  Description of Artificial Sequence: Synthetic oligonucleotide
caacagagcagaaguuaga

SEQ ID NO: 2729599 - RNA, 19 nt, Artificial Sequence
  Description of Artificial Sequence: Synthetic oligonucleotide
ucgggacuguagagcaaug

SEQ ID NO: 2729600 - RNA, 19 nt, Artificial Sequence
  Description of Artificial Sequence: Synthetic oligonucleotide
caguggucauuaaagguua

SEQ ID NO: 2729601 - RNA, 19 nt, Artificial Sequence
  Description of Artificial Sequence: Synthetic oligonucleotide
cucgaauacugaaaaguau

SEQ ID NO: 2729602 - RNA, 19 nt, Artificial Sequence
  Description of Artificial Sequence: Synthetic oligonucleotide
ggcucucgaauacugaaaa

SEQ ID NO: 2729603 - RNA, 19 nt, Artificial Sequence
  Description of Artificial Sequence: Synthetic oligonucleotide
auccuucacuguucuagaa

SEQ ID NO: 2729604 - RNA, 19 nt, Artificial Sequence
  Description of Artificial Sequence: Synthetic oligonucleotide
gcucucgaauacugaaaag

SEQ ID NO: 2729605 - RNA, 19 nt, Artificial Sequence
  Description of Artificial Sequence: Synthetic oligonucleotide
guggucauuaaagguuaac

SEQ ID NO: 2729606 - RNA, 19 nt, Artificial Sequence
  Description of Artificial Sequence: Synthetic oligonucleotide
acacagcuaguuacuagcu

SEQ ID NO: 2729607 - RNA, 19 nt, Artificial Sequence
  Description of Artificial Sequence: Synthetic oligonucleotide
auuggcucucgaauacuga

SEQ ID NO: 2729608 - RNA, 19 nt, Artificial Sequence
  Description of Artificial Sequence: Synthetic oligonucleotide
acguugacggcugcuugag

SEQ ID NO: 2729609 - RNA, 19 nt, Artificial Sequence
  Description of Artificial Sequence: Synthetic oligonucleotide
caauucacacagcuaguua

SEQ ID NO: 2729610 - RNA, 19 nt, Artificial Sequence
  Description of Artificial Sequence: Synthetic oligonucleotide
acaguucgaagcucaucuu

SEQ ID NO: 2729611 - RNA, 19 nt, Artificial Sequence
  Description of Artificial Sequence: Synthetic oligonucleotide
ucacaguucgaagcucauc

SEQ ID NO: 2729612 - RNA, 19 nt, Artificial Sequence
  Description of Artificial Sequence: Synthetic oligonucleotide
cuauuacaaauaaacccuu

SEQ ID NO: 2729613 - RNA, 19 nt, Artificial Sequence
  Description of Artificial Sequence: Synthetic oligonucleotide
agcuaguaguacauauuaa

SEQ ID NO: 2729614 - RNA, 19 nt, Artificial Sequence
  Description of Artificial Sequence: Synthetic oligonucleotide
acguagucaguaauuuuaa

SEQ ID NO: 2729615 - RNA, 19 nt, Artificial Sequence
  Description of Artificial Sequence: Synthetic oligonucleotide
gacaguucugauacuccaa

SEQ ID NO: 2729616 - RNA, 19 nt, Artificial Sequence
  Description of Artificial Sequence: Synthetic oligonucleotide
gaaaacucuguuugcuauu

SEQ ID NO: 2729617 - RNA, 19 nt, Artificial Sequence
  Description of Artificial Sequence: Synthetic oligonucleotide
uuugguucuucgggacugu

SEQ ID NO: 2729618 - RNA, 19 nt, Artificial Sequence
  Description of Artificial Sequence: Synthetic oligonucleotide
gagcaaugauucauuauau

SEQ ID NO: 2729619 - RNA, 19 nt, Artificial Sequence
  Description of Artificial Sequence: Synthetic oligonucleotide
gugguaaaucaauccuaaa

SEQ ID NO: 2729620 - RNA, 19 nt, Artificial Sequence
  Description of Artificial Sequence: Synthetic oligonucleotide
guuugcuauuggcucucga

SEQ ID NO: 2729621 - RNA, 19 nt, Artificial Sequence
  Description of Artificial Sequence: Synthetic oligonucleotide
ugcauacaguggucauuaa

SEQ ID NO: 2729622 - RNA, 19 nt, Artificial Sequence
  Description of Artificial Sequence: Synthetic oligonucleotide
ccugcaacagagcagaagu

SEQ ID NO: 2729623 - RNA, 19 nt, Artificial Sequence
  Description of Artificial Sequence: Synthetic oligonucleotide
uacuagcuaguaguacaua

SEQ ID NO: 2729624 - RNA, 19 nt, Artificial Sequence
  Description of Artificial Sequence: Synthetic oligonucleotide
guucaauggaagagucaga

SEQ ID NO: 2729625 - RNA, 19 nt, Artificial Sequence
  Description of Artificial Sequence: Synthetic oligonucleotide
gacaaugguuuaauuuuau

SEQ ID NO: 2729626 - RNA, 19 nt, Artificial Sequence
  Description of Artificial Sequence: Synthetic oligonucleotide
agcuaguuacuagcuagua

SEQ ID NO: 2729627 - RNA, 19 nt, Artificial Sequence
  Description of Artificial Sequence: Synthetic oligonucleotide
cuagcuaguaguacauauu

SEQ ID NO: 2729628 - RNA, 19 nt, Artificial Sequence
  Description of Artificial Sequence: Synthetic oligonucleotide
gcaauugcuccaucguuaa

SEQ ID NO: 2729629 - RNA, 19 nt, Artificial Sequence
  Description of Artificial Sequence: Synthetic oligonucleotide
auccuuugccauucaucua

SEQ ID NO: 2729630 - RNA, 19 nt, Artificial Sequence
  Description of Artificial Sequence: Synthetic oligonucleotide
auccacaaccaugcaggca

SEQ ID NO: 2729631 - RNA, 19 nt, Artificial Sequence
  Description of Artificial Sequence: Synthetic oligonucleotide
caugcaggcaucccaacau

SEQ ID NO: 2729632 - RNA, 19 nt, Artificial Sequence
  Description of Artificial Sequence: Synthetic oligonucleotide
cuguuugcuauuggcucuc

SEQ ID NO: 2729633 - RNA, 19 nt, Artificial Sequence
  Description of Artificial Sequence: Synthetic oligonucleotide
cuaccaacucuuuguucaa

SEQ ID NO: 2729634 - RNA, 19 nt, Artificial Sequence
  Description of Artificial Sequence: Synthetic oligonucleotide
cugcaaacguagucaguaa

SEQ ID NO: 2729635 - RNA, 19 nt, Artificial Sequence
  Description of Artificial Sequence: Synthetic oligonucleotide
cuuugccauucaucuauua

SEQ ID NO: 2729636 - RNA, 19 nt, Artificial Sequence
  Description of Artificial Sequence: Synthetic oligonucleotide
caaacguagucaguaauuu

SEQ ID NO: 2729637 - RNA, 19 nt, Artificial Sequence
  Description of Artificial Sequence: Synthetic oligonucleotide
gacggcugcuugagaaaac

SEQ ID NO: 2729638 - RNA, 19 nt, Artificial Sequence
  Description of Artificial Sequence: Synthetic oligonucleotide
augauucauuauauucauu

SEQ ID NO: 2729639 - RNA, 19 nt, Artificial Sequence
  Description of Artificial Sequence: Synthetic oligonucleotide
cugcuugagaaaacucugu

SEQ ID NO: 2729640 - RNA, 19 nt, Artificial Sequence
  Description of Artificial Sequence: Synthetic oligonucleotide
cuguagagcaaugauucau

SEQ ID NO: 2729641 - RNA, 19 nt, Artificial Sequence
  Description of Artificial Sequence: Synthetic oligonucleotide
cacagcuaguuacuagcua

SEQ ID NO: 2729642 - RNA, 19 nt, Artificial Sequence
  Description of Artificial Sequence: Synthetic oligonucleotide
cauuaaagguuaacccauu

SEQ ID NO: 2729643 - RNA, 19 nt, Artificial Sequence
  Description of Artificial Sequence: Synthetic oligonucleotide
guuagacugcaaacguagu

SEQ ID NO: 2729644 - RNA, 19 nt, Artificial Sequence
  Description of Artificial Sequence: Synthetic oligonucleotide
ucccaacaucgagaacgga

SEQ ID NO: 2729645 - RNA, 19 nt, Artificial Sequence
  Description of Artificial Sequence: Synthetic oligonucleotide
gagaacggacacaaacuuu

SEQ ID NO: 2729646 - RNA, 19 nt, Artificial Sequence
  Description of Artificial Sequence: Synthetic oligonucleotide
aguggucauuaaagguuaa

SEQ ID NO: 2729647 - RNA, 19 nt, Artificial Sequence
  Description of Artificial Sequence: Synthetic oligonucleotide
gggacuguagagcaaugau

SEQ ID NO: 2729648 - RNA, 19 nt, Artificial Sequence
  Description of Artificial Sequence: Synthetic oligonucleotide
gcuugagaaaacucuguuu

SEQ ID NO: 2729649 - RNA, 19 nt, Artificial Sequence
  Description of Artificial Sequence: Synthetic oligonucleotide
cagcuaguuacuagcuagu

SEQ ID NO: 2729650 - RNA, 19 nt, Artificial Sequence
  Description of Artificial Sequence: Synthetic oligonucleotide
aucacaguucgaagcucau

SEQ ID NO: 2729651 - RNA, 19 nt, Artificial Sequence
  Description of Artificial Sequence: Synthetic oligonucleotide
cccuuccugcaacagagca

SEQ ID NO: 2729652 - RNA, 19 nt, Artificial Sequence
  Description of Artificial Sequence: Synthetic oligonucleotide
cuucgggacuguagagcaa

SEQ ID NO: 2729653 - RNA, 19 nt, Artificial Sequence
  Description of Artificial Sequence: Synthetic oligonucleotide
gcuccaucguuaaauucaa

SEQ ID NO: 2729654 - RNA, 19 nt, Artificial Sequence
  Description of Artificial Sequence: Synthetic oligonucleotide
caauugcuccaucguuaaa

SEQ ID NO: 2729655 - RNA, 19 nt, Artificial Sequence
  Description of Artificial Sequence: Synthetic oligonucleotide
cuccaucguuaaauucaaa

SEQ ID NO: 2729656 - RNA, 19 nt, Artificial Sequence
  Description of Artificial Sequence: Synthetic oligonucleotide
guucgaagcucaucuucuu

SEQ ID NO: 2729657 - RNA, 19 nt, Artificial Sequence
  Description of Artificial Sequence: Synthetic oligonucleotide
cuauuggcucucgaauacu

SEQ ID NO: 2729658 - RNA, 19 nt, Artificial Sequence
  Description of Artificial Sequence: Synthetic oligonucleotide
gacugcaaacguagucagu

SEQ ID NO: 2729659 - RNA, 19 nt, Artificial Sequence
  Description of Artificial Sequence: Synthetic oligonucleotide
ggacuguagagcaaugauu

SEQ ID NO: 2729660 - RNA, 19 nt, Artificial Sequence
  Description of Artificial Sequence: Synthetic oligonucleotide
ccaugcaggcaucccaaca

SEQ ID NO: 2729661 - RNA, 19 nt, Artificial Sequence
  Description of Artificial Sequence: Synthetic oligonucleotide
cugauacuccaacauccuu

SEQ ID NO: 2729662 - RNA, 19 nt, Artificial Sequence
  Description of Artificial Sequence: Synthetic oligonucleotide
caucgagaacggacacaaa

SEQ ID NO: 2729663 - RNA, 19 nt, Artificial Sequence
  Description of Artificial Sequence: Synthetic oligonucleotide
gcaaacguagucaguaauu

SEQ ID NO: 2729664 - RNA, 19 nt, Artificial Sequence
  Description of Artificial Sequence: Synthetic oligonucleotide
gcaggcaucccaacaucga

SEQ ID NO: 2729665 - RNA, 19 nt, Artificial Sequence
  Description of Artificial Sequence: Synthetic oligonucleotide
cuccauccacaaccaugca

SEQ ID NO: 2729666 - RNA, 19 nt, Artificial Sequence
  Description of Artificial Sequence: Synthetic oligonucleotide
cugcaacagagcagaaguu

SEQ ID NO: 2729667 - RNA, 19 nt, Artificial Sequence
  Description of Artificial Sequence: Synthetic oligonucleotide
cgaauacugaaaaguauuu

SEQ ID NO: 2729668 - RNA, 19 nt, Artificial Sequence
  Description of Artificial Sequence: Synthetic oligonucleotide
ccacaaccaugcaggcauc

SEQ ID NO: 2729669 - RNA, 19 nt, Artificial Sequence
  Description of Artificial Sequence: Synthetic oligonucleotide
cggcugcuugagaaaacuc

SEQ ID NO: 2729670 - RNA, 19 nt, Artificial Sequence
  Description of Artificial Sequence: Synthetic oligonucleotide
cgagaacggacacaaacuu

SEQ ID NO: 2729671 - RNA, 19 nt, Artificial Sequence
  Description of Artificial Sequence: Synthetic oligonucleotide
cguagucaguaauuuuaau

SEQ ID NO: 2729672 - RNA, 19 nt, Artificial Sequence
  Description of Artificial Sequence: Synthetic oligonucleotide
cgggacuguagagcaauga

SEQ ID NO: 2729673 - RNA, 19 nt, Artificial Sequence
  Description of Artificial Sequence: Synthetic oligonucleotide
cguugacggcugcuugaga

SEQ ID NO: 2729674 - RNA, 19 nt, Artificial Sequence
  Description of Artificial Sequence: Synthetic oligonucleotide
cucauaaugaucuacaacc

SEQ ID NO: 2729675 - RNA, 19 nt, Artificial Sequence
  Description of Artificial Sequence: Synthetic oligonucleotide
aaaucuggcauccacaauc

SEQ ID NO: 2729676 - RNA, 19 nt, Artificial Sequence
  Description of Artificial Sequence: Synthetic oligonucleotide
aauguuuuaaaucuggcau

SEQ ID NO: 2729677 - RNA, 19 nt, Artificial Sequence
  Description of Artificial Sequence: Synthetic oligonucleotide
uuuguaaucggcuagggca

SEQ ID NO: 2729678 - RNA, 19 nt, Artificial Sequence
  Description of Artificial Sequence: Synthetic oligonucleotide
aaauguuuuaaaucuggca

SEQ ID NO: 2729679 - RNA, 19 nt, Artificial Sequence
  Description of Artificial Sequence: Synthetic oligonucleotide
ucuuguuucaguuuguaau

SEQ ID NO: 2729680 - RNA, 19 nt, Artificial Sequence
  Description of Artificial Sequence: Synthetic oligonucleotide
uuuaaaucuggcauccaca

SEQ ID NO: 2729681 - RNA, 19 nt, Artificial Sequence
  Description of Artificial Sequence: Synthetic oligonucleotide
agccaaauguuuuaaaucu

SEQ ID NO: 2729682 - RNA, 19 nt, Artificial Sequence
  Description of Artificial Sequence: Synthetic oligonucleotide
auuccuaggauucucauaa

SEQ ID NO: 2729683 - RNA, 19 nt, Artificial Sequence
  Description of Artificial Sequence: Synthetic oligonucleotide
uggaucugcaguuucauga

SEQ ID NO: 2729684 - RNA, 19 nt, Artificial Sequence
  Description of Artificial Sequence: Synthetic oligonucleotide
aguuucaugacgucaccac

SEQ ID NO: 2729685 - RNA, 19 nt, Artificial Sequence
  Description of Artificial Sequence: Synthetic oligonucleotide
accgucuuucccuuuaccc

SEQ ID NO: 2729686 - RNA, 19 nt, Artificial Sequence
  Description of Artificial Sequence: Synthetic oligonucleotide
uuucucguagcguugaugu

SEQ ID NO: 2729687 - RNA, 19 nt, Artificial Sequence
  Description of Artificial Sequence: Synthetic oligonucleotide
auguuuuaaaucuggcauc

SEQ ID NO: 2729688 - RNA, 19 nt, Artificial Sequence
  Description of Artificial Sequence: Synthetic oligonucleotide
ucaguuuguaaucggcuag

SEQ ID NO: 2729689 - RNA, 19 nt, Artificial Sequence
  Description of Artificial Sequence: Synthetic oligonucleotide
uuugauggcgucuucugcc

SEQ ID NO: 2729690 - RNA, 19 nt, Artificial Sequence
  Description of Artificial Sequence: Synthetic oligonucleotide
guugauguggugcagggug

SEQ ID NO: 2729691 - RNA, 19 nt, Artificial Sequence
  Description of Artificial Sequence: Synthetic oligonucleotide
ucucauaaugaucuacaac

SEQ ID NO: 2729692 - RNA, 19 nt, Artificial Sequence
  Description of Artificial Sequence: Synthetic oligonucleotide
gcuagggcagcuuugaugg

SEQ ID NO: 2729693 - RNA, 19 nt, Artificial Sequence
  Description of Artificial Sequence: Synthetic oligonucleotide
ucucguagcguugaugugg

SEQ ID NO: 2729694 - RNA, 19 nt, Artificial Sequence
  Description of Artificial Sequence: Synthetic oligonucleotide
uuuggauguuuugucaagg

SEQ ID NO: 2729695 - RNA, 19 nt, Artificial Sequence
  Description of Artificial Sequence: Synthetic oligonucleotide
uuaaaucuggcauccacaa

SEQ ID NO: 2729696 - RNA, 19 nt, Artificial Sequence
  Description of Artificial Sequence: Synthetic oligonucleotide
ucauaaugaucuacaaccu

SEQ ID NO: 2729697 - RNA, 19 nt, Artificial Sequence
  Description of Artificial Sequence: Synthetic oligonucleotide
uuguaaucggcuagggcag

SEQ ID NO: 2729698 - RNA, 19 nt, Artificial Sequence
  Description of Artificial Sequence: Synthetic oligonucleotide
uuugugauagagccgggcu

SEQ ID NO: 2729699 - RNA, 19 nt, Artificial Sequence
  Description of Artificial Sequence: Synthetic oligonucleotide
uuucaguuuguaaucggcu

SEQ ID NO: 2729700 - RNA, 19 nt, Artificial Sequence
  Description of Artificial Sequence: Synthetic oligonucleotide
aggauucucauaaugaucu

SEQ ID NO: 2729701 - RNA, 19 nt, Artificial Sequence
  Description of Artificial Sequence: Synthetic oligonucleotide
cuuguuucaguuuguaauc

SEQ ID NO: 2729702 - RNA, 19 nt, Artificial Sequence
  Description of Artificial Sequence: Synthetic oligonucleotide
aacagugugcguuucucgu

SEQ ID NO: 2729703 - RNA, 19 nt, Artificial Sequence
  Description of Artificial Sequence: Synthetic oligonucleotide
uuuuggauguuuugucaag

SEQ ID NO: 2729704 - RNA, 19 nt, Artificial Sequence
  Description of Artificial Sequence: Synthetic oligonucleotide
ugugauagagccgggcugg

SEQ ID NO: 2729705 - RNA, 19 nt, Artificial Sequence
  Description of Artificial Sequence: Synthetic oligonucleotide
uccuaggauucucauaaug

SEQ ID NO: 2729706 - RNA, 19 nt, Artificial Sequence
  Description of Artificial Sequence: Synthetic oligonucleotide
gauguuuugucaagggacc

SEQ ID NO: 2729707 - RNA, 19 nt, Artificial Sequence
  Description of Artificial Sequence: Synthetic oligonucleotide
ucuggcauccacaaucuuc

SEQ ID NO: 2729708 - RNA, 19 nt, Artificial Sequence
  Description of Artificial Sequence: Synthetic oligonucleotide
uucaugacgucaccacacg

SEQ ID NO: 2729709 - RNA, 19 nt, Artificial Sequence
  Description of Artificial Sequence: Synthetic oligonucleotide
aguuucacgggcgggaggc

SEQ ID NO: 2729710 - RNA, 19 nt, Artificial Sequence
  Description of Artificial Sequence: Synthetic oligonucleotide
gauagagccgggcuggggc

SEQ ID NO: 2729711 - RNA, 19 nt, Artificial Sequence
  Description of Artificial Sequence: Synthetic oligonucleotide
caugacgucaccacacgcc

SEQ ID NO: 2729712 - RNA, 19 nt, Artificial Sequence
  Description of Artificial Sequence: Synthetic oligonucleotide
augacgucaccacacgccg

SEQ ID NO: 2729713 - RNA, 19 nt, Artificial Sequence
  Description of Artificial Sequence: Synthetic oligonucleotide
gaacagugugcguuucucg

SEQ ID NO: 2729714 - RNA, 19 nt, Artificial Sequence
  Description of Artificial Sequence: Synthetic oligonucleotide
uggauguuuugucaaggga

SEQ ID NO: 2729715 - RNA, 19 nt, Artificial Sequence
  Description of Artificial Sequence: Synthetic oligonucleotide
uugauguggugcagggugg

SEQ ID NO: 2729716 - RNA, 19 nt, Artificial Sequence
  Description of Artificial Sequence: Synthetic oligonucleotide
uaggauucucauaaugauc

SEQ ID NO: 2729717 - RNA, 19 nt, Artificial Sequence
  Description of Artificial Sequence: Synthetic oligonucleotide
ccaaauguuuuaaaucugg

SEQ ID NO: 2729718 - RNA, 19 nt, Artificial Sequence
  Description of Artificial Sequence: Synthetic oligonucleotide
caauggugaacagugugcg

SEQ ID NO: 2729719 - RNA, 19 nt, Artificial Sequence
  Description of Artificial Sequence: Synthetic oligonucleotide
gauucucauaaugaucuac

SEQ ID NO: 2729720 - RNA, 19 nt, Artificial Sequence
  Description of Artificial Sequence: Synthetic oligonucleotide
uuugucaagggaccccaca

SEQ ID NO: 2729721 - RNA, 19 nt, Artificial Sequence
  Description of Artificial Sequence: Synthetic oligonucleotide
agugcaguuucacgggcgg

SEQ ID NO: 2729722 - RNA, 19 nt, Artificial Sequence
  Description of Artificial Sequence: Synthetic oligonucleotide
agcagugcaguuucacggg

SEQ ID NO: 2729723 - RNA, 19 nt, Artificial Sequence
  Description of Artificial Sequence: Synthetic oligonucleotide
cagccaaauguuuuaaauc

SEQ ID NO: 2729724 - RNA, 19 nt, Artificial Sequence
  Description of Artificial Sequence: Synthetic oligonucleotide
auagagccgggcuggggcc

SEQ ID NO: 2729725 - RNA, 19 nt, Artificial Sequence
  Description of Artificial Sequence: Synthetic oligonucleotide
ugauggucaaagcuucuuc

SEQ ID NO: 2729726 - RNA, 19 nt, Artificial Sequence
  Description of Artificial Sequence: Synthetic oligonucleotide
gaggcagagcuccuuggcg

SEQ ID NO: 2729727 - RNA, 19 nt, Artificial Sequence
  Description of Artificial Sequence: Synthetic oligonucleotide
cuucucauccaccuggauc

SEQ ID NO: 2729728 - RNA, 19 nt, Artificial Sequence
  Description of Artificial Sequence: Synthetic oligonucleotide
auaaugaucuacaaccuuu

SEQ ID NO: 2729729 - RNA, 19 nt, Artificial Sequence
  Description of Artificial Sequence: Synthetic oligonucleotide
uucucauaaugaucuacaa

SEQ ID NO: 2729730 - RNA, 19 nt, Artificial Sequence
  Description of Artificial Sequence: Synthetic oligonucleotide
cuuugauggcgucuucugc

SEQ ID NO: 2729731 - RNA, 19 nt, Artificial Sequence
  Description of Artificial Sequence: Synthetic oligonucleotide
ucaugacgucaccacacgc

SEQ ID NO: 2729732 - RNA, 19 nt, Artificial Sequence
  Description of Artificial Sequence: Synthetic oligonucleotide
ucaagggaccccacauucc

SEQ ID NO: 2729733 - RNA, 19 nt, Artificial Sequence
  Description of Artificial Sequence: Synthetic oligonucleotide
auucucauaaugaucuaca

SEQ ID NO: 2729734 - RNA, 19 nt, Artificial Sequence
  Description of Artificial Sequence: Synthetic oligonucleotide
uuuugugauagagccgggc

SEQ ID NO: 2729735 - RNA, 19 nt, Artificial Sequence
  Description of Artificial Sequence: Synthetic oligonucleotide
caaagcuucuuccaccguc

SEQ ID NO: 2729736 - RNA, 19 nt, Artificial Sequence
  Description of Artificial Sequence: Synthetic oligonucleotide
aaagcuucuuccaccgucu

SEQ ID NO: 2729737 - RNA, 19 nt, Artificial Sequence
  Description of Artificial Sequence: Synthetic oligonucleotide
uguuuugucaagggacccc

SEQ ID NO: 2729738 - RNA, 19 nt, Artificial Sequence
  Description of Artificial Sequence: Synthetic oligonucleotide
uugucaagggaccccacau

SEQ ID NO: 2729739 - RNA, 19 nt, Artificial Sequence
  Description of Artificial Sequence: Synthetic oligonucleotide
ggauguuuugucaagggac

SEQ ID NO: 2729740 - RNA, 19 nt, Artificial Sequence
  Description of Artificial Sequence: Synthetic oligonucleotide
aaucuggcauccacaaucu

SEQ ID NO: 2729741 - RNA, 19 nt, Artificial Sequence
  Description of Artificial Sequence: Synthetic oligonucleotide
uucuuguuucaguuuguaa

SEQ ID NO: 2729742 - RNA, 19 nt, Artificial Sequence
  Description of Artificial Sequence: Synthetic oligonucleotide
uccucagacggcccgcucc

SEQ ID NO: 2729743 - RNA, 19 nt, Artificial Sequence
  Description of Artificial Sequence: Synthetic oligonucleotide
uuggguucuuguuucaguu

SEQ ID NO: 2729744 - RNA, 19 nt, Artificial Sequence
  Description of Artificial Sequence: Synthetic oligonucleotide
gucaagggaccccacauuc

SEQ ID NO: 2729745 - RNA, 19 nt, Artificial Sequence
  Description of Artificial Sequence: Synthetic oligonucleotide
gacgucaccacacgccggc

SEQ ID NO: 2729746 - RNA, 19 nt, Artificial Sequence
  Description of Artificial Sequence: Synthetic oligonucleotide
uccguggcuagggagcugg

SEQ ID NO: 2729747 - RNA, 19 nt, Artificial Sequence
  Description of Artificial Sequence: Synthetic oligonucleotide
agugugcguuucucguagc

SEQ ID NO: 2729748 - RNA, 19 nt, Artificial Sequence
  Description of Artificial Sequence: Synthetic oligonucleotide
ggguucuuguuucaguuug

SEQ ID NO: 2729749 - RNA, 19 nt, Artificial Sequence
  Description of Artificial Sequence: Synthetic oligonucleotide
guagcguugauguggugca

SEQ ID NO: 2729750 - RNA, 19 nt, Artificial Sequence
  Description of Artificial Sequence: Synthetic oligonucleotide
ggucaaagcuucuuccacc

SEQ ID NO: 2729751 - RNA, 19 nt, Artificial Sequence
  Description of Artificial Sequence: Synthetic oligonucleotide
uuacccacuccguggcuag

SEQ ID NO: 2729752 - RNA, 19 nt, Artificial Sequence
  Description of Artificial Sequence: Synthetic oligonucleotide
accaauccggucccgacgu

SEQ ID NO: 2729753 - RNA, 19 nt, Artificial Sequence
  Description of Artificial Sequence: Synthetic oligonucleotide
cacuccguggcuagggagc

SEQ ID NO: 2729754 - RNA, 19 nt, Artificial Sequence
  Description of Artificial Sequence: Synthetic oligonucleotide
gugugcguuucucguagcg

SEQ ID NO: 2729755 - RNA, 19 nt, Artificial Sequence
  Description of Artificial Sequence: Synthetic oligonucleotide
cagugugcguuucucguag

SEQ ID NO: 2729756 - RNA, 19 nt, Artificial Sequence
  Description of Artificial Sequence: Synthetic oligonucleotide
ugcguuucucguagcguug

SEQ ID NO: 2729757 - RNA, 19 nt, Artificial Sequence
  Description of Artificial Sequence: Synthetic oligonucleotide
ugacgucaccacacgccgg

SEQ ID NO: 2729758 - RNA, 19 nt, Artificial Sequence
  Description of Artificial Sequence: Synthetic oligonucleotide
agacggcccgcuccgaccg

SEQ ID NO: 2729759 - RNA, 19 nt, Artificial Sequence
  Description of Artificial Sequence: Synthetic oligonucleotide
ugaacagugugcguuucuc

SEQ ID NO: 2729760 - RNA, 19 nt, Artificial Sequence
  Description of Artificial Sequence: Synthetic oligonucleotide
aaucggcuagggcagcuuu

SEQ ID NO: 2729761 - RNA, 19 nt, Artificial Sequence
  Description of Artificial Sequence: Synthetic oligonucleotide
uucccuuuacccacuccgu

SEQ ID NO: 2729762 - RNA, 19 nt, Artificial Sequence
  Description of Artificial Sequence: Synthetic oligonucleotide
cagugcaguuucacgggcg

SEQ ID NO: 2729763 - RNA, 19 nt, Artificial Sequence
  Description of Artificial Sequence: Synthetic oligonucleotide
aggcagagcuccuuggcga

SEQ ID NO: 2729764 - RNA, 19 nt, Artificial Sequence
  Description of Artificial Sequence: Synthetic oligonucleotide
agcguugauguggugcagg

SEQ ID NO: 2729765 - RNA, 19 nt, Artificial Sequence
  Description of Artificial Sequence: Synthetic oligonucleotide
aucugcaguuucaugacgu

SEQ ID NO: 2729766 - RNA, 19 nt, Artificial Sequence
  Description of Artificial Sequence: Synthetic oligonucleotide
ccuaggauucucauaauga

SEQ ID NO: 2729767 - RNA, 19 nt, Artificial Sequence
  Description of Artificial Sequence: Synthetic oligonucleotide
ugauggcgucuucugccag

SEQ ID NO: 2729768 - RNA, 19 nt, Artificial Sequence
  Description of Artificial Sequence: Synthetic oligonucleotide
caccaauccggucccgacg

SEQ ID NO: 2729769 - RNA, 19 nt, Artificial Sequence
  Description of Artificial Sequence: Synthetic oligonucleotide
cuggcucucccuucuuggg

SEQ ID NO: 2729770 - RNA, 19 nt, Artificial Sequence
  Description of Artificial Sequence: Synthetic oligonucleotide
agccgcccuccucagacgg

SEQ ID NO: 2729771 - RNA, 19 nt, Artificial Sequence
  Description of Artificial Sequence: Synthetic oligonucleotide
ugugcguuucucguagcgu

SEQ ID NO: 2729772 - RNA, 19 nt, Artificial Sequence
  Description of Artificial Sequence: Synthetic oligonucleotide
aagccgcccuccucagacg

SEQ ID NO: 2729773 - RNA, 19 nt, Artificial Sequence
  Description of Artificial Sequence: Synthetic oligonucleotide
uucucguagcguugaugug

SEQ ID NO: 2729774 - RNA, 19 nt, Artificial Sequence
  Description of Artificial Sequence: Synthetic oligonucleotide
uuggcgauguccguguuuu

SEQ ID NO: 2729775 - RNA, 19 nt, Artificial Sequence
  Description of Artificial Sequence: Synthetic oligonucleotide
uuuugucaagggaccccac

SEQ ID NO: 2729776 - RNA, 19 nt, Artificial Sequence
  Description of Artificial Sequence: Synthetic oligonucleotide
acauuccuaggauucucau

SEQ ID NO: 2729777 - RNA, 19 nt, Artificial Sequence
  Description of Artificial Sequence: Synthetic oligonucleotide
ucaaagcuucuuccaccgu

SEQ ID NO: 2729778 - RNA, 19 nt, Artificial Sequence
  Description of Artificial Sequence: Synthetic oligonucleotide
ugucaagggaccccacauu

SEQ ID NO: 2729779 - RNA, 19 nt, Artificial Sequence
  Description of Artificial Sequence: Synthetic oligonucleotide
uuucacgggcgggaggcag

SEQ ID NO: 2729780 - RNA, 19 nt, Artificial Sequence
  Description of Artificial Sequence: Synthetic oligonucleotide
ugauagagccgggcugggg

SEQ ID NO: 2729781 - RNA, 19 nt, Artificial Sequence
  Description of Artificial Sequence: Synthetic oligonucleotide
gcaauggugaacagugugc

SEQ ID NO: 2729782 - RNA, 19 nt, Artificial Sequence
  Description of Artificial Sequence: Synthetic oligonucleotide
guuucucguagcguugaug

SEQ ID NO: 2729783 - RNA, 19 nt, Artificial Sequence
  Description of Artificial Sequence: Synthetic oligonucleotide
guuuugucaagggacccca

SEQ ID NO: 2729784 - RNA, 19 nt, Artificial Sequence
  Description of Artificial Sequence: Synthetic oligonucleotide
cuaggauucucauaaugau

SEQ ID NO: 2729785 - RNA, 19 nt, Artificial Sequence
  Description of Artificial Sequence: Synthetic oligonucleotide
ggaucugcaguuucaugac

SEQ ID NO: 2729786 - RNA, 19 nt, Artificial Sequence
  Description of Artificial Sequence: Synthetic oligonucleotide
uuuacccacuccguggcua

SEQ ID NO: 2729787 - RNA, 19 nt, Artificial Sequence
  Description of Artificial Sequence: Synthetic oligonucleotide
cuuucccuuuacccacucc

SEQ ID NO: 2729788 - RNA, 19 nt, Artificial Sequence
  Description of Artificial Sequence: Synthetic oligonucleotide
cacauuccuaggauucuca

SEQ ID NO: 2729789 - RNA, 19 nt, Artificial Sequence
  Description of Artificial Sequence: Synthetic oligonucleotide
uccaccgucuuucccuuua

SEQ ID NO: 2729790 - RNA, 19 nt, Artificial Sequence
  Description of Artificial Sequence: Synthetic oligonucleotide
ugauguggugcaggguggc

SEQ ID NO: 2729791 - RNA, 19 nt, Artificial Sequence
  Description of Artificial Sequence: Synthetic oligonucleotide
uccgaccgccgccauguug

SEQ ID NO: 2729792 - RNA, 19 nt, Artificial Sequence
  Description of Artificial Sequence: Synthetic oligonucleotide
cccuuuacccacuccgugg

SEQ ID NO: 2729793 - RNA, 19 nt, Artificial Sequence
  Description of Artificial Sequence: Synthetic oligonucleotide
uguaaucggcuagggcagc

SEQ ID NO: 2729794 - RNA, 19 nt, Artificial Sequence
  Description of Artificial Sequence: Synthetic oligonucleotide
ucuuucccuuuacccacuc

SEQ ID NO: 2729795 - RNA, 19 nt, Artificial Sequence
  Description of Artificial Sequence: Synthetic oligonucleotide
agcuuugauggcgucuucu

SEQ ID NO: 2729796 - RNA, 19 nt, Artificial Sequence
  Description of Artificial Sequence: Synthetic oligonucleotide
uugauggucaaagcuucuu

SEQ ID NO: 2729797 - RNA, 19 nt, Artificial Sequence
  Description of Artificial Sequence: Synthetic oligonucleotide
uggagcagugcaguuucac

SEQ ID NO: 2729798 - RNA, 19 nt, Artificial Sequence
  Description of Artificial Sequence: Synthetic oligonucleotide
ucggcuagggcagcuuuga

SEQ ID NO: 2729799 - RNA, 19 nt, Artificial Sequence
  Description of Artificial Sequence: Synthetic oligonucleotide
uggguucuuguuucaguuu

SEQ ID NO: 2729800 - RNA, 19 nt, Artificial Sequence
  Description of Artificial Sequence: Synthetic oligonucleotide
uucacgggcgggaggcaga

SEQ ID NO: 2729801 - RNA, 19 nt, Artificial Sequence
  Description of Artificial Sequence: Synthetic oligonucleotide
cuucugccagcauggagca

SEQ ID NO: 2729802 - RNA, 19 nt, Artificial Sequence
  Description of Artificial Sequence: Synthetic oligonucleotide
agcgcggaagccgcccucc

SEQ ID NO: 2729803 - RNA, 19 nt, Artificial Sequence
  Description of Artificial Sequence: Synthetic oligonucleotide
accacacgccggcgcaccc

SEQ ID NO: 2729804 - RNA, 19 nt, Artificial Sequence
  Description of Artificial Sequence: Synthetic oligonucleotide
agcagcgcggaagccgccc

SEQ ID NO: 2729805 - RNA, 19 nt, Artificial Sequence
  Description of Artificial Sequence: Synthetic oligonucleotide
gcguugauguggugcaggg

SEQ ID NO: 2729806 - RNA, 19 nt, Artificial Sequence
  Description of Artificial Sequence: Synthetic oligonucleotide
uggugaacagugugcguuu

SEQ ID NO: 2729807 - RNA, 19 nt, Artificial Sequence
  Description of Artificial Sequence: Synthetic oligonucleotide
gccagcauggagcagugca

SEQ ID NO: 2729808 - RNA, 19 nt, Artificial Sequence
  Description of Artificial Sequence: Synthetic oligonucleotide
gggcucacugcuucucugg

SEQ ID NO: 2729809 - RNA, 19 nt, Artificial Sequence
  Description of Artificial Sequence: Synthetic oligonucleotide
acagugugcguuucucgua

SEQ ID NO: 2729810 - RNA, 19 nt, Artificial Sequence
  Description of Artificial Sequence: Synthetic oligonucleotide
ccgaccgccgccauguugc

SEQ ID NO: 2729811 - RNA, 19 nt, Artificial Sequence
  Description of Artificial Sequence: Synthetic oligonucleotide
gcgucuucugccagcaugg

SEQ ID NO: 2729812 - RNA, 19 nt, Artificial Sequence
  Description of Artificial Sequence: Synthetic oligonucleotide
ccuuuacccacuccguggc

SEQ ID NO: 2729813 - RNA, 19 nt, Artificial Sequence
  Description of Artificial Sequence: Synthetic oligonucleotide
caguuucacgggcgggagg

SEQ ID NO: 2729814 - RNA, 19 nt, Artificial Sequence
  Description of Artificial Sequence: Synthetic oligonucleotide
ggcgcacccaccaauccgg

SEQ ID NO: 2729815 - RNA, 19 nt, Artificial Sequence
  Description of Artificial Sequence: Synthetic oligonucleotide
cagacggcccgcuccgacc

SEQ ID NO: 2729816 - RNA, 19 nt, Artificial Sequence
  Description of Artificial Sequence: Synthetic oligonucleotide
caccgucuuucccuuuacc

SEQ ID NO: 2729817 - RNA, 19 nt, Artificial Sequence
  Description of Artificial Sequence: Synthetic oligonucleotide
ggaggcagagcuccuuggc

SEQ ID NO: 2729818 - RNA, 19 nt, Artificial Sequence
  Description of Artificial Sequence: Synthetic oligonucleotide
gccaaauguuuuaaaucug

SEQ ID NO: 2729819 - RNA, 19 nt, Artificial Sequence
  Description of Artificial Sequence: Synthetic oligonucleotide
cauuccuaggauucucaua

SEQ ID NO: 2729820 - RNA, 19 nt, Artificial Sequence
  Description of Artificial Sequence: Synthetic oligonucleotide
gcauccacaaucuuccccu

SEQ ID NO: 2729821 - RNA, 19 nt, Artificial Sequence
  Description of Artificial Sequence: Synthetic oligonucleotide
cuagggcagcuuugauggc

SEQ ID NO: 2729822 - RNA, 19 nt, Artificial Sequence
  Description of Artificial Sequence: Synthetic oligonucleotide
acccacuccguggcuaggg

SEQ ID NO: 2729823 - RNA, 19 nt, Artificial Sequence
  Description of Artificial Sequence: Synthetic oligonucleotide
agucgcgggcuccggagca

SEQ ID NO: 2729824 - RNA, 19 nt, Artificial Sequence
  Description of Artificial Sequence: Synthetic oligonucleotide
uggaggcgauggcggagcc

SEQ ID NO: 2729825 - RNA, 19 nt, Artificial Sequence
  Description of Artificial Sequence: Synthetic oligonucleotide
cguagcguugauguggugc

SEQ ID NO: 2729826 - RNA, 19 nt, Artificial Sequence
  Description of Artificial Sequence: Synthetic oligonucleotide
uuccuaggauucucauaau

SEQ ID NO: 2729827 - RNA, 19 nt, Artificial Sequence
  Description of Artificial Sequence: Synthetic oligonucleotide
uccagggcucacugcuucu

SEQ ID NO: 2729828 - RNA, 19 nt, Artificial Sequence
  Description of Artificial Sequence: Synthetic oligonucleotide
ucacgggcgggaggcagag

SEQ ID NO: 2729829 - RNA, 19 nt, Artificial Sequence
  Description of Artificial Sequence: Synthetic oligonucleotide
ucccgggcgggcagucgcg

SEQ ID NO: 2729830 - RNA, 19 nt, Artificial Sequence
  Description of Artificial Sequence: Synthetic oligonucleotide
gcaguuucaugacgucacc

SEQ ID NO: 2729831 - RNA, 19 nt, Artificial Sequence
  Description of Artificial Sequence: Synthetic oligonucleotide
cauaaugaucuacaaccuu

SEQ ID NO: 2729832 - RNA, 19 nt, Artificial Sequence
  Description of Artificial Sequence: Synthetic oligonucleotide
gcuccggagcagcagcgcg

SEQ ID NO: 2729833 - RNA, 19 nt, Artificial Sequence
  Description of Artificial Sequence: Synthetic oligonucleotide
ugugacccgcuggagcuuc

SEQ ID NO: 2729834 - RNA, 19 nt, Artificial Sequence
  Description of Artificial Sequence: Synthetic oligonucleotide
guuuuaaaucuggcaucca

SEQ ID NO: 2729835 - RNA, 19 nt, Artificial Sequence
  Description of Artificial Sequence: Synthetic oligonucleotide
accccacauuccuaggauu

SEQ ID NO: 2729836 - RNA, 19 nt, Artificial Sequence
  Description of Artificial Sequence: Synthetic oligonucleotide
cugcaguuucaugacguca

SEQ ID NO: 2729837 - RNA, 19 nt, Artificial Sequence
  Description of Artificial Sequence: Synthetic oligonucleotide
cuccuuggcgauguccgug

SEQ ID NO: 2729838 - RNA, 19 nt, Artificial Sequence
  Description of Artificial Sequence: Synthetic oligonucleotide
cgucuuucccuuuacccac

SEQ ID NO: 2729839 - RNA, 19 nt, Artificial Sequence
  Description of Artificial Sequence: Synthetic oligonucleotide
caguuucaugacgucacca

SEQ ID NO: 2729840 - RNA, 19 nt, Artificial Sequence
  Description of Artificial Sequence: Synthetic oligonucleotide
uagcguugauguggugcag

SEQ ID NO: 2729841 - RNA, 19 nt, Artificial Sequence
  Description of Artificial Sequence: Synthetic oligonucleotide
cucccgggcgggcagucgc

SEQ ID NO: 2729842 - RNA, 19 nt, Artificial Sequence
  Description of Artificial Sequence: Synthetic oligonucleotide
caagggaccccacauuccu

SEQ ID NO: 2729843 - RNA, 19 nt, Artificial Sequence
  Description of Artificial Sequence: Synthetic oligonucleotide
gccgacagcucccgggcgg

SEQ ID NO: 2729844 - RNA, 19 nt, Artificial Sequence
  Description of Artificial Sequence: Synthetic oligonucleotide
acuccguggcuagggagcu

SEQ ID NO: 2729845 - RNA, 19 nt, Artificial Sequence
  Description of Artificial Sequence: Synthetic oligonucleotide
ggcuggggccgacagcucc

SEQ ID NO: 2729846 - RNA, 19 nt, Artificial Sequence
  Description of Artificial Sequence: Synthetic oligonucleotide
gcagucgcgggcuccggag

SEQ ID NO: 2729847 - RNA, 19 nt, Artificial Sequence
  Description of Artificial Sequence: Synthetic oligonucleotide
cagucgcgggcuccggagc

SEQ ID NO: 2729848 - RNA, 19 nt, Artificial Sequence
  Description of Artificial Sequence: Synthetic oligonucleotide
ccgucuuucccuuuaccca

SEQ ID NO: 2729849 - RNA, 19 nt, Artificial Sequence
  Description of Artificial Sequence: Synthetic oligonucleotide
aucggcuagggcagcuuug

SEQ ID NO: 2729850 - RNA, 19 nt, Artificial Sequence
  Description of Artificial Sequence: Synthetic oligonucleotide
gauguggugcaggguggca

SEQ ID NO: 2729851 - RNA, 19 nt, Artificial Sequence
  Description of Artificial Sequence: Synthetic oligonucleotide
acggcccgcuccgaccgcc

SEQ ID NO: 2729852 - RNA, 19 nt, Artificial Sequence
  Description of Artificial Sequence: Synthetic oligonucleotide
cacacgccggcgcacccac

SEQ ID NO: 2729853 - RNA, 19 nt, Artificial Sequence
  Description of Artificial Sequence: Synthetic oligonucleotide
gcuggagcuucuccagggc

SEQ ID NO: 2729854 - RNA, 19 nt, Artificial Sequence
  Description of Artificial Sequence: Synthetic oligonucleotide
uacccacuccguggcuagg

SEQ ID NO: 2729855 - RNA, 19 nt, Artificial Sequence
  Description of Artificial Sequence: Synthetic oligonucleotide
cucguagcguugauguggu

SEQ ID NO: 2729856 - RNA, 19 nt, Artificial Sequence
  Description of Artificial Sequence: Synthetic oligonucleotide
gugcguuucucguagcguu

SEQ ID NO: 2729857 - RNA, 19 nt, Artificial Sequence
  Description of Artificial Sequence: Synthetic oligonucleotide
uaaucggcuagggcagcuu

SEQ ID NO: 2729858 - RNA, 19 nt, Artificial Sequence
  Description of Artificial Sequence: Synthetic oligonucleotide
ccucagacggcccgcuccg

SEQ ID NO: 2729859 - RNA, 19 nt, Artificial Sequence
  Description of Artificial Sequence: Synthetic oligonucleotide
ucguagcguugauguggug

SEQ ID NO: 2729860 - RNA, 19 nt, Artificial Sequence
  Description of Artificial Sequence: Synthetic oligonucleotide
gcggaagccgcccuccuca

SEQ ID NO: 2729861 - RNA, 19 nt, Artificial Sequence
  Description of Artificial Sequence: Synthetic oligonucleotide
cucccuucuuggguucuug

SEQ ID NO: 2729862 - RNA, 19 nt, Artificial Sequence
  Description of Artificial Sequence: Synthetic oligonucleotide
ccacuccguggcuagggag

SEQ ID NO: 2729863 - RNA, 19 nt, Artificial Sequence
  Description of Artificial Sequence: Synthetic oligonucleotide
gcaguuucacgggcgggag

SEQ ID NO: 2729864 - RNA, 19 nt, Artificial Sequence
  Description of Artificial Sequence: Synthetic oligonucleotide
gcagcagcgcggaagccgc

SEQ ID NO: 2729865 - RNA, 19 nt, Artificial Sequence
  Description of Artificial Sequence: Synthetic oligonucleotide
aagggaccccacauuccua

SEQ ID NO: 2729866 - RNA, 19 nt, Artificial Sequence
  Description of Artificial Sequence: Synthetic oligonucleotide
gggccgacagcucccgggc

SEQ ID NO: 2729867 - RNA, 19 nt, Artificial Sequence
  Description of Artificial Sequence: Synthetic oligonucleotide
ggcuagggagcuggaggcg

SEQ ID NO: 2729868 - RNA, 19 nt, Artificial Sequence
  Description of Artificial Sequence: Synthetic oligonucleotide
cccgcuggagcuucuccag

SEQ ID NO: 2729869 - RNA, 19 nt, Artificial Sequence
  Description of Artificial Sequence: Synthetic oligonucleotide
caccacacgccggcgcacc

SEQ ID NO: 2729870 - RNA, 19 nt, Artificial Sequence
  Description of Artificial Sequence: Synthetic oligonucleotide
cuggggccgacagcucccg

SEQ ID NO: 2729871 - RNA, 19 nt, Artificial Sequence
  Description of Artificial Sequence: Synthetic oligonucleotide
agccgcagccaaauguuuu

SEQ ID NO: 2729872 - RNA, 19 nt, Artificial Sequence
  Description of Artificial Sequence: Synthetic oligonucleotide
gacagcucccgggcgggca

SEQ ID NO: 2729873 - RNA, 19 nt, Artificial Sequence
  Description of Artificial Sequence: Synthetic oligonucleotide
aggcagcugugacccgcug

SEQ ID NO: 2729874 - RNA, 19 nt, Artificial Sequence
  Description of Artificial Sequence: Synthetic oligonucleotide
ugccagcauggagcagugc

SEQ ID NO: 2729875 - RNA, 19 nt, Artificial Sequence
  Description of Artificial Sequence: Synthetic oligonucleotide
ggauucucauaaugaucua

SEQ ID NO: 2729876 - RNA, 19 nt, Artificial Sequence
  Description of Artificial Sequence: Synthetic oligonucleotide
ccaccaauccggucccgac

SEQ ID NO: 2729877 - RNA, 19 nt, Artificial Sequence
  Description of Artificial Sequence: Synthetic oligonucleotide
cagcuuugauggcgucuuc

SEQ ID NO: 2729878 - RNA, 19 nt, Artificial Sequence
  Description of Artificial Sequence: Synthetic oligonucleotide
gcuagggagcuggaggcga

SEQ ID NO: 2729879 - RNA, 19 nt, Artificial Sequence
  Description of Artificial Sequence: Synthetic oligonucleotide
gcgauggcggagccgcagc

SEQ ID NO: 2729880 - RNA, 19 nt, Artificial Sequence
  Description of Artificial Sequence: Synthetic oligonucleotide
uggcggagccgcagccaaa

SEQ ID NO: 2729881 - RNA, 19 nt, Artificial Sequence
  Description of Artificial Sequence: Synthetic oligonucleotide
ggccgacagcucccgggcg

SEQ ID NO: 2729882 - RNA, 19 nt, Artificial Sequence
  Description of Artificial Sequence: Synthetic oligonucleotide
ccacauuccuaggauucuc

SEQ ID NO: 2729883 - RNA, 19 nt, Artificial Sequence
  Description of Artificial Sequence: Synthetic oligonucleotide
gccgcagccaaauguuuua

SEQ ID NO: 2729884 - RNA, 19 nt, Artificial Sequence
  Description of Artificial Sequence: Synthetic oligonucleotide
ggcgauggcggagccgcag

SEQ ID NO: 2729885 - RNA, 19 nt, Artificial Sequence
  Description of Artificial Sequence: Synthetic oligonucleotide
guaaucggcuagggcagcu

SEQ ID NO: 2729886 - RNA, 19 nt, Artificial Sequence
  Description of Artificial Sequence: Synthetic oligonucleotide
ugacccgcuggagcuucuc

SEQ ID NO: 2729887 - RNA, 19 nt, Artificial Sequence
  Description of Artificial Sequence: Synthetic oligonucleotide
ucucccuucuuggguucuu

SEQ ID NO: 2729888 - RNA, 19 nt, Artificial Sequence
  Description of Artificial Sequence: Synthetic oligonucleotide
auggagcagugcaguuuca

SEQ ID NO: 2729889 - RNA, 19 nt, Artificial Sequence
  Description of Artificial Sequence: Synthetic oligonucleotide
agcucccgggcgggcaguc

SEQ ID NO: 2729890 - RNA, 19 nt, Artificial Sequence
  Description of Artificial Sequence: Synthetic oligonucleotide
gacggcccgcuccgaccgc

SEQ ID NO: 2729891 - RNA, 19 nt, Artificial Sequence
  Description of Artificial Sequence: Synthetic oligonucleotide
ccgcuggagcuucuccagg

SEQ ID NO: 2729892 - RNA, 19 nt, Artificial Sequence
  Description of Artificial Sequence: Synthetic oligonucleotide
cuccucagacggcccgcuc

SEQ ID NO: 2729893 - RNA, 19 nt, Artificial Sequence
  Description of Artificial Sequence: Synthetic oligonucleotide
acccaccaauccggucccg

SEQ ID NO: 2729894 - RNA, 19 nt, Artificial Sequence
  Description of Artificial Sequence: Synthetic oligonucleotide
uggcgucuucugccagcau

SEQ ID NO: 2729895 - RNA, 19 nt, Artificial Sequence
  Description of Artificial Sequence: Synthetic oligonucleotide
uuccaccgucuuucccuuu

SEQ ID NO: 2729896 - RNA, 19 nt, Artificial Sequence
  Description of Artificial Sequence: Synthetic oligonucleotide
cggcgcacccaccaauccg

SEQ ID NO: 2729897 - RNA, 19 nt, Artificial Sequence
  Description of Artificial Sequence: Synthetic oligonucleotide
cagcauggagcagugcagu

SEQ ID NO: 2729898 - RNA, 19 nt, Artificial Sequence
  Description of Artificial Sequence: Synthetic oligonucleotide
guuucacgggcgggaggca

SEQ ID NO: 2729899 - RNA, 19 nt, Artificial Sequence
  Description of Artificial Sequence: Synthetic oligonucleotide
cuuuacccacuccguggcu

SEQ ID NO: 2729900 - RNA, 19 nt, Artificial Sequence
  Description of Artificial Sequence: Synthetic oligonucleotide
gcguuucucguagcguuga

SEQ ID NO: 2729901 - RNA, 19 nt, Artificial Sequence
  Description of Artificial Sequence: Synthetic oligonucleotide
ccggcgcacccaccaaucc

SEQ ID NO: 2729902 - RNA, 19 nt, Artificial Sequence
  Description of Artificial Sequence: Synthetic oligonucleotide
gguucuuguuucaguuugu

SEQ ID NO: 2729903 - RNA, 19 nt, Artificial Sequence
  Description of Artificial Sequence: Synthetic oligonucleotide
ccaccgucuuucccuuuac

SEQ ID NO: 2729904 - RNA, 19 nt, Artificial Sequence
  Description of Artificial Sequence: Synthetic oligonucleotide
cgucaccacacgccggcgc

SEQ ID NO: 2729905 - RNA, 19 nt, Artificial Sequence
  Description of Artificial Sequence: Synthetic oligonucleotide
cagcgcggaagccgcccuc

SEQ ID NO: 2729906 - RNA, 19 nt, Artificial Sequence
  Description of Artificial Sequence: Synthetic oligonucleotide
ggcagucgcgggcuccgga

SEQ ID NO: 2729907 - RNA, 19 nt, Artificial Sequence
  Description of Artificial Sequence: Synthetic oligonucleotide
agagccgggcuggggccga

SEQ ID NO: 2729908 - RNA, 19 nt, Artificial Sequence
  Description of Artificial Sequence: Synthetic oligonucleotide
ggaagccgcccuccucaga

SEQ ID NO: 2729909 - RNA, 19 nt, Artificial Sequence
  Description of Artificial Sequence: Synthetic oligonucleotide
gcuccgaccgccgccaugu

SEQ ID NO: 2729910 - RNA, 19 nt, Artificial Sequence
  Description of Artificial Sequence: Synthetic oligonucleotide
gcagcuuugauggcgucuu

SEQ ID NO: 2729911 - RNA, 19 nt, Artificial Sequence
  Description of Artificial Sequence: Synthetic oligonucleotide
ggcagcuuugauggcgucu

SEQ ID NO: 2729912 - RNA, 19 nt, Artificial Sequence
  Description of Artificial Sequence: Synthetic oligonucleotide
cccuucucauccaccugga

SEQ ID NO: 2729913 - RNA, 19 nt, Artificial Sequence
  Description of Artificial Sequence: Synthetic oligonucleotide
cuccguggcuagggagcug

SEQ ID NO: 2729914 - RNA, 19 nt, Artificial Sequence
  Description of Artificial Sequence: Synthetic oligonucleotide
acgccggcgcacccaccaa

SEQ ID NO: 2729915 - RNA, 19 nt, Artificial Sequence
  Description of Artificial Sequence: Synthetic oligonucleotide
cguggcuagggagcuggag

SEQ ID NO: 2729916 - RNA, 19 nt, Artificial Sequence
  Description of Artificial Sequence: Synthetic oligonucleotide
gcggagccgcagccaaaug

SEQ ID NO: 2729917 - RNA, 19 nt, Artificial Sequence
  Description of Artificial Sequence: Synthetic oligonucleotide
ccagggcucacugcuucuc

SEQ ID NO: 2729918 - RNA, 19 nt, Artificial Sequence
  Description of Artificial Sequence: Synthetic oligonucleotide
ggcagagcuccuuggcgau

SEQ ID NO: 2729919 - RNA, 19 nt, Artificial Sequence
  Description of Artificial Sequence: Synthetic oligonucleotide
gagccgcagccaaauguuu

SEQ ID NO: 2729920 - RNA, 19 nt, Artificial Sequence
  Description of Artificial Sequence: Synthetic oligonucleotide
caauccggucccgacguuu

SEQ ID NO: 2729921 - RNA, 19 nt, Artificial Sequence
  Description of Artificial Sequence: Synthetic oligonucleotide
gcgggcuccggagcagcag

SEQ ID NO: 2729922 - RNA, 19 nt, Artificial Sequence
  Description of Artificial Sequence: Synthetic oligonucleotide
cacgggcgggaggcagagc

SEQ ID NO: 2729923 - RNA, 19 nt, Artificial Sequence
  Description of Artificial Sequence: Synthetic oligonucleotide
gccggcgcacccaccaauc

SEQ ID NO: 2729924 - RNA, 19 nt, Artificial Sequence
  Description of Artificial Sequence: Synthetic oligonucleotide
gcucccgggcgggcagucg

SEQ ID NO: 2729925 - RNA, 19 nt, Artificial Sequence
  Description of Artificial Sequence: Synthetic oligonucleotide
cucagacggcccgcuccga

SEQ ID NO: 2729926 - RNA, 19 nt, Artificial Sequence
  Description of Artificial Sequence: Synthetic oligonucleotide
cccacuccguggcuaggga

SEQ ID NO: 2729927 - RNA, 19 nt, Artificial Sequence
  Description of Artificial Sequence: Synthetic oligonucleotide
cggagccgcagccaaaugu

SEQ ID NO: 2729928 - RNA, 19 nt, Artificial Sequence
  Description of Artificial Sequence: Synthetic oligonucleotide
gggcagucgcgggcuccgg

SEQ ID NO: 2729929 - RNA, 19 nt, Artificial Sequence
  Description of Artificial Sequence: Synthetic oligonucleotide
agccgggcuggggccgaca

SEQ ID NO: 2729930 - RNA, 19 nt, Artificial Sequence
  Description of Artificial Sequence: Synthetic oligonucleotide
ggcggagccgcagccaaau

SEQ ID NO: 2729931 - RNA, 19 nt, Artificial Sequence
  Description of Artificial Sequence: Synthetic oligonucleotide
cgcacccaccaauccgguc

SEQ ID NO: 2729932 - RNA, 19 nt, Artificial Sequence
  Description of Artificial Sequence: Synthetic oligonucleotide
cgggcagucgcgggcuccg

SEQ ID NO: 2729933 - RNA, 19 nt, Artificial Sequence
  Description of Artificial Sequence: Synthetic oligonucleotide
cccaccaauccggucccga

SEQ ID NO: 2729934 - RNA, 19 nt, Artificial Sequence
  Description of Artificial Sequence: Synthetic oligonucleotide
cccgggcgggcagucgcgg

SEQ ID NO: 2729935 - RNA, 19 nt, Artificial Sequence
  Description of Artificial Sequence: Synthetic oligonucleotide
gccgcccuccucagacggc

SEQ ID NO: 2729936 - RNA, 19 nt, Artificial Sequence
  Description of Artificial Sequence: Synthetic oligonucleotide
cccuucuuggguucuuguu

SEQ ID NO: 2729937 - RNA, 19 nt, Artificial Sequence
  Description of Artificial Sequence: Synthetic oligonucleotide
cgaccgccgccauguugcc

SEQ ID NO: 2729938 - RNA, 19 nt, Artificial Sequence
  Description of Artificial Sequence: Synthetic oligonucleotide
gagccgggcuggggccgac

SEQ ID NO: 2729939 - RNA, 19 nt, Artificial Sequence
  Description of Artificial Sequence: Synthetic oligonucleotide
ccgcagccaaauguuuuaa

SEQ ID NO: 2729940 - RNA, 19 nt, Artificial Sequence
  Description of Artificial Sequence: Synthetic oligonucleotide
gcagcgcggaagccgcccu

SEQ ID NO: 2729941 - RNA, 19 nt, Artificial Sequence
  Description of Artificial Sequence: Synthetic oligonucleotide
cccgcuccgaccgccgcca

SEQ ID NO: 2729942 - RNA, 19 nt, Artificial Sequence
  Description of Artificial Sequence: Synthetic oligonucleotide
cgggcgggaggcagagcuc

SEQ ID NO: 2729943 - RNA, 19 nt, Artificial Sequence
  Description of Artificial Sequence: Synthetic oligonucleotide
gugacccgcuggagcuucu

SEQ ID NO: 2729944 - RNA, 19 nt, Artificial Sequence
  Description of Artificial Sequence: Synthetic oligonucleotide
ccuucucauccaccuggau

SEQ ID NO: 2729945 - RNA, 19 nt, Artificial Sequence
  Description of Artificial Sequence: Synthetic oligonucleotide
ccacacgccggcgcaccca

SEQ ID NO: 2729946 - RNA, 19 nt, Artificial Sequence
  Description of Artificial Sequence: Synthetic oligonucleotide
cugugacccgcuggagcuu

SEQ ID NO: 2729947 - RNA, 19 nt, Artificial Sequence
  Description of Artificial Sequence: Synthetic oligonucleotide
ccguggcuagggagcugga

SEQ ID NO: 2729948 - RNA, 19 nt, Artificial Sequence
  Description of Artificial Sequence: Synthetic oligonucleotide
cguugauguggugcagggu

SEQ ID NO: 2729949 - RNA, 19 nt, Artificial Sequence
  Description of Artificial Sequence: Synthetic oligonucleotide
gcgcggaagccgcccuccu

SEQ ID NO: 2729950 - RNA, 19 nt, Artificial Sequence
  Description of Artificial Sequence: Synthetic oligonucleotide
gcgcacccaccaauccggu

SEQ ID NO: 2729951 - RNA, 19 nt, Artificial Sequence
  Description of Artificial Sequence: Synthetic oligonucleotide
cguuucucguagcguugau

SEQ ID NO: 2729952 - RNA, 19 nt, Artificial Sequence
  Description of Artificial Sequence: Synthetic oligonucleotide
cagcucccgggcgggcagu

SEQ ID NO: 2729953 - RNA, 19 nt, Artificial Sequence
  Description of Artificial Sequence: Synthetic oligonucleotide
cuccgaccgccgccauguu

SEQ ID NO: 2729954 - RNA, 19 nt, Artificial Sequence
  Description of Artificial Sequence: Synthetic oligonucleotide
ccaauccggucccgacguu

SEQ ID NO: 2729955 - RNA, 19 nt, Artificial Sequence
  Description of Artificial Sequence: Synthetic oligonucleotide
ccggagcagcagcgcggaa

SEQ ID NO: 2729956 - RNA, 19 nt, Artificial Sequence
  Description of Artificial Sequence: Synthetic oligonucleotide
cgccggcgcacccaccaau

SEQ ID NO: 2729957 - RNA, 19 nt, Artificial Sequence
  Description of Artificial Sequence: Synthetic oligonucleotide
cggcuagggcagcuuugau

SEQ ID NO: 2729958 - RNA, 19 nt, Artificial Sequence
  Description of Artificial Sequence: Synthetic oligonucleotide
ccgcuccgaccgccgccau

SEQ ID NO: 2729959 - RNA, 19 nt, Artificial Sequence
  Description of Artificial Sequence: Synthetic oligonucleotide
cgccgccauguugccggcu

SEQ ID NO: 2729960 - RNA, 19 nt, Artificial Sequence
  Description of Artificial Sequence: Synthetic oligonucleotide
ucuagcaucauccucaagu

SEQ ID NO: 2729961 - RNA, 19 nt, Artificial Sequence
  Description of Artificial Sequence: Synthetic oligonucleotide
gagacauaaaacuuggcag

SEQ ID NO: 2729962 - RNA, 19 nt, Artificial Sequence
  Description of Artificial Sequence: Synthetic oligonucleotide
ugagacauaaaacuuggca

SEQ ID NO: 2729963 - RNA, 19 nt, Artificial Sequence
  Description of Artificial Sequence: Synthetic oligonucleotide
agaucugagacauaaaacu

SEQ ID NO: 2729964 - RNA, 19 nt, Artificial Sequence
  Description of Artificial Sequence: Synthetic oligonucleotide
ucugagacauaaaacuugg

SEQ ID NO: 2729965 - RNA, 19 nt, Artificial Sequence
  Description of Artificial Sequence: Synthetic oligonucleotide
gauaacucuagcaucaucc

SEQ ID NO: 2729966 - RNA, 19 nt, Artificial Sequence
  Description of Artificial Sequence: Synthetic oligonucleotide
agggguucaguucauagcc

SEQ ID NO: 2729967 - RNA, 19 nt, Artificial Sequence
  Description of Artificial Sequence: Synthetic oligonucleotide
aaugacaacauuggaguac

SEQ ID NO: 2729968 - RNA, 19 nt, Artificial Sequence
  Description of Artificial Sequence: Synthetic oligonucleotide
cauaaaacuuggcagagcc

SEQ ID NO: 2729969 - RNA, 19 nt, Artificial Sequence
  Description of Artificial Sequence: Synthetic oligonucleotide
augucauacgcccauacgg

SEQ ID NO: 2729970 - RNA, 19 nt, Artificial Sequence
  Description of Artificial Sequence: Synthetic oligonucleotide
ugauaaauggcguagccac

SEQ ID NO: 2729971 - RNA, 19 nt, Artificial Sequence
  Description of Artificial Sequence: Synthetic oligonucleotide
aaauggcaaacacacuuuc

SEQ ID NO: 2729972 - RNA, 19 nt, Artificial Sequence
  Description of Artificial Sequence: Synthetic oligonucleotide
aaacugucggacuccaaac

SEQ ID NO: 2729973 - RNA, 19 nt, Artificial Sequence
  Description of Artificial Sequence: Synthetic oligonucleotide
aguaauguggucugggguc

SEQ ID NO: 2729974 - RNA, 19 nt, Artificial Sequence
  Description of Artificial Sequence: Synthetic oligonucleotide
aaugucaccagugucccac

SEQ ID NO: 2729975 - RNA, 19 nt, Artificial Sequence
  Description of Artificial Sequence: Synthetic oligonucleotide
aacauuggaguacugugug

SEQ ID NO: 2729976 - RNA, 19 nt, Artificial Sequence
  Description of Artificial Sequence: Synthetic oligonucleotide
guagccacagcauacaaug

SEQ ID NO: 2729977 - RNA, 19 nt, Artificial Sequence
  Description of Artificial Sequence: Synthetic oligonucleotide
ugucgcaacaucuucacga

SEQ ID NO: 2729978 - RNA, 19 nt, Artificial Sequence
  Description of Artificial Sequence: Synthetic oligonucleotide
guucauagcccacagcugg

SEQ ID NO: 2729979 - RNA, 19 nt, Artificial Sequence
  Description of Artificial Sequence: Synthetic oligonucleotide
ucaaguuucuucuccagcu

SEQ ID NO: 2729980 - RNA, 19 nt, Artificial Sequence
  Description of Artificial Sequence: Synthetic oligonucleotide
uggaauaccaaaccagcca

SEQ ID NO: 2729981 - RNA, 19 nt, Artificial Sequence
  Description of Artificial Sequence: Synthetic oligonucleotide
acaacauuggaguacugug

SEQ ID NO: 2729982 - RNA, 19 nt, Artificial Sequence
  Description of Artificial Sequence: Synthetic oligonucleotide
ucggacuccaaacuggcag

SEQ ID NO: 2729983 - RNA, 19 nt, Artificial Sequence
  Description of Artificial Sequence: Synthetic oligonucleotide
uccaguguggaaaagggaa

SEQ ID NO: 2729984 - RNA, 19 nt, Artificial Sequence
  Description of Artificial Sequence: Synthetic oligonucleotide
cuucacgacauuuucaauc

SEQ ID NO: 2729985 - RNA, 19 nt, Artificial Sequence
  Description of Artificial Sequence: Synthetic oligonucleotide
uaucuggaauaccaaacca

SEQ ID NO: 2729986 - RNA, 19 nt, Artificial Sequence
  Description of Artificial Sequence: Synthetic oligonucleotide
acaucuucacgacauuuuc

SEQ ID NO: 2729987 - RNA, 19 nt, Artificial Sequence
  Description of Artificial Sequence: Synthetic oligonucleotide
ugcagcugcgaucacaaug

SEQ ID NO: 2729988 - RNA, 19 nt, Artificial Sequence
  Description of Artificial Sequence: Synthetic oligonucleotide
uucacgacauuuucaaucu

SEQ ID NO: 2729989 - RNA, 19 nt, Artificial Sequence
  Description of Artificial Sequence: Synthetic oligonucleotide
aacuguucuucuucaaacu

SEQ ID NO: 2729990 - RNA, 19 nt, Artificial Sequence
  Description of Artificial Sequence: Synthetic oligonucleotide
acagaucugagacauaaaa

SEQ ID NO: 2729991 - RNA, 19 nt, Artificial Sequence
  Description of Artificial Sequence: Synthetic oligonucleotide
aaggugaccuuccacagau

SEQ ID NO: 2729992 - RNA, 19 nt, Artificial Sequence
  Description of Artificial Sequence: Synthetic oligonucleotide
guaucuggaauaccaaacc

SEQ ID NO: 2729993 - RNA, 19 nt, Artificial Sequence
  Description of Artificial Sequence: Synthetic oligonucleotide
auacaaugucaccaguguc

SEQ ID NO: 2729994 - RNA, 19 nt, Artificial Sequence
  Description of Artificial Sequence: Synthetic oligonucleotide
aaauggcguagccacagca

SEQ ID NO: 2729995 - RNA, 19 nt, Artificial Sequence
  Description of Artificial Sequence: Synthetic oligonucleotide
ucacaaugcguccaucgcc

SEQ ID NO: 2729996 - RNA, 19 nt, Artificial Sequence
  Description of Artificial Sequence: Synthetic oligonucleotide
aaagggaaccggcaggcga

SEQ ID NO: 2729997 - RNA, 19 nt, Artificial Sequence
  Description of Artificial Sequence: Synthetic oligonucleotide
aucgccacugccaaugucc

SEQ ID NO: 2729998 - RNA, 19 nt, Artificial Sequence
  Description of Artificial Sequence: Synthetic oligonucleotide
cacgacauuuucaaucugc

SEQ ID NO: 2729999 - RNA, 19 nt, Artificial Sequence
  Description of Artificial Sequence: Synthetic oligonucleotide
aaugcguccaucgccacug

SEQ ID NO: 2730000 - RNA, 19 nt, Artificial Sequence
  Description of Artificial Sequence: Synthetic oligonucleotide
uacugugugaaggugaccu

SEQ ID NO: 2730001 - RNA, 19 nt, Artificial Sequence
  Description of Artificial Sequence: Synthetic oligonucleotide
agccacagcauacaauguc

SEQ ID NO: 2730002 - RNA, 19 nt, Artificial Sequence
  Description of Artificial Sequence: Synthetic oligonucleotide
cagaucugagacauaaaac

SEQ ID NO: 2730003 - RNA, 19 nt, Artificial Sequence
  Description of Artificial Sequence: Synthetic oligonucleotide
uuugcagcugcgaucacaa

SEQ ID NO: 2730004 - RNA, 19 nt, Artificial Sequence
  Description of Artificial Sequence: Synthetic oligonucleotide
ugucauacgcccauacggu

SEQ ID NO: 2730005 - RNA, 19 nt, Artificial Sequence
  Description of Artificial Sequence: Synthetic oligonucleotide
aggcacaaauggcaaacac

SEQ ID NO: 2730006 - RNA, 19 nt, Artificial Sequence
  Description of Artificial Sequence: Synthetic oligonucleotide
caaucugcuuggaaguugc

SEQ ID NO: 2730007 - RNA, 19 nt, Artificial Sequence
  Description of Artificial Sequence: Synthetic oligonucleotide
aacugucggacuccaaacu

SEQ ID NO: 2730008 - RNA, 19 nt, Artificial Sequence
  Description of Artificial Sequence: Synthetic oligonucleotide
ggaauaccaaaccagccag

SEQ ID NO: 2730009 - RNA, 19 nt, Artificial Sequence
  Description of Artificial Sequence: Synthetic oligonucleotide
auagcccacagcugggaac

SEQ ID NO: 2730010 - RNA, 19 nt, Artificial Sequence
  Description of Artificial Sequence: Synthetic oligonucleotide
cugccaauguccaccaggg

SEQ ID NO: 2730011 - RNA, 19 nt, Artificial Sequence
  Description of Artificial Sequence: Synthetic oligonucleotide
cuggaauaccaaaccagcc

SEQ ID NO: 2730012 - RNA, 19 nt, Artificial Sequence
  Description of Artificial Sequence: Synthetic oligonucleotide
gcuggugugauaaauggcg

SEQ ID NO: 2730013 - RNA, 19 nt, Artificial Sequence
  Description of Artificial Sequence: Synthetic oligonucleotide
auaaauggcguagccacag

SEQ ID NO: 2730014 - RNA, 19 nt, Artificial Sequence
  Description of Artificial Sequence: Synthetic oligonucleotide
aucuucacgacauuuucaa

SEQ ID NO: 2730015 - RNA, 19 nt, Artificial Sequence
  Description of Artificial Sequence: Synthetic oligonucleotide
gaaguugcaggcacaaaug

SEQ ID NO: 2730016 - RNA, 19 nt, Artificial Sequence
  Description of Artificial Sequence: Synthetic oligonucleotide
gaaaagggaaccggcaggc

SEQ ID NO: 2730017 - RNA, 19 nt, Artificial Sequence
  Description of Artificial Sequence: Synthetic oligonucleotide
uggucugggguccagugug

SEQ ID NO: 2730018 - RNA, 19 nt, Artificial Sequence
  Description of Artificial Sequence: Synthetic oligonucleotide
aggcgauaacucuagcauc

SEQ ID NO: 2730019 - RNA, 19 nt, Artificial Sequence
  Description of Artificial Sequence: Synthetic oligonucleotide
auaacucuagcaucauccu

SEQ ID NO: 2730020 - RNA, 19 nt, Artificial Sequence
  Description of Artificial Sequence: Synthetic oligonucleotide
ucuucugugucgcaacauc

SEQ ID NO: 2730021 - RNA, 19 nt, Artificial Sequence
  Description of Artificial Sequence: Synthetic oligonucleotide
aaaugacaacauuggagua

SEQ ID NO: 2730022 - RNA, 19 nt, Artificial Sequence
  Description of Artificial Sequence: Synthetic oligonucleotide
ucuccaguaauguggucug

SEQ ID NO: 2730023 - RNA, 19 nt, Artificial Sequence
  Description of Artificial Sequence: Synthetic oligonucleotide
acugucggacuccaaacug

SEQ ID NO: 2730024 - RNA, 19 nt, Artificial Sequence
  Description of Artificial Sequence: Synthetic oligonucleotide
ugucccaccaaugauccca

SEQ ID NO: 2730025 - RNA, 19 nt, Artificial Sequence
  Description of Artificial Sequence: Synthetic oligonucleotide
aguacugugugaaggugac

SEQ ID NO: 2730026 - RNA, 19 nt, Artificial Sequence
  Description of Artificial Sequence: Synthetic oligonucleotide
uccaguaauguggucuggg

SEQ ID NO: 2730027 - RNA, 19 nt, Artificial Sequence
  Description of Artificial Sequence: Synthetic oligonucleotide
gugaaggugaccuuccaca

SEQ ID NO: 2730028 - RNA, 19 nt, Artificial Sequence
  Description of Artificial Sequence: Synthetic oligonucleotide
uccuuugcagcugcgauca

SEQ ID NO: 2730029 - RNA, 19 nt, Artificial Sequence
  Description of Artificial Sequence: Synthetic oligonucleotide
cugucggacuccaaacugg

SEQ ID NO: 2730030 - RNA, 19 nt, Artificial Sequence
  Description of Artificial Sequence: Synthetic oligonucleotide
caugucauacgcccauacg

SEQ ID NO: 2730031 - RNA, 19 nt, Artificial Sequence
  Description of Artificial Sequence: Synthetic oligonucleotide
ugugaaggugaccuuccac

SEQ ID NO: 2730032 - RNA, 19 nt, Artificial Sequence
  Description of Artificial Sequence: Synthetic oligonucleotide
ucauacgcccauacggugu

SEQ ID NO: 2730033 - RNA, 19 nt, Artificial Sequence
  Description of Artificial Sequence: Synthetic oligonucleotide
ucaugucauacgcccauac

SEQ ID NO: 2730034 - RNA, 19 nt, Artificial Sequence
  Description of Artificial Sequence: Synthetic oligonucleotide
ugucaauccccucuccagu

SEQ ID NO: 2730035 - RNA, 19 nt, Artificial Sequence
  Description of Artificial Sequence: Synthetic oligonucleotide
ugucggacuccaaacuggc

SEQ ID NO: 2730036 - RNA, 19 nt, Artificial Sequence
  Description of Artificial Sequence: Synthetic oligonucleotide
ucugugucgcaacaucuuc

SEQ ID NO: 2730037 - RNA, 19 nt, Artificial Sequence
  Description of Artificial Sequence: Synthetic oligonucleotide
ggaaaagggaaccggcagg

SEQ ID NO: 2730038 - RNA, 19 nt, Artificial Sequence
  Description of Artificial Sequence: Synthetic oligonucleotide
ugugucgcaacaucuucac

SEQ ID NO: 2730039 - RNA, 19 nt, Artificial Sequence
  Description of Artificial Sequence: Synthetic oligonucleotide
cacgguaucuggaauacca

SEQ ID NO: 2730040 - RNA, 19 nt, Artificial Sequence
  Description of Artificial Sequence: Synthetic oligonucleotide
uggaguacugugugaaggu

SEQ ID NO: 2730041 - RNA, 19 nt, Artificial Sequence
  Description of Artificial Sequence: Synthetic oligonucleotide
cugcuuggaaguugcaggc

SEQ ID NO: 2730042 - RNA, 19 nt, Artificial Sequence
  Description of Artificial Sequence: Synthetic oligonucleotide
aguguggaaaagggaaccg

SEQ ID NO: 2730043 - RNA, 19 nt, Artificial Sequence
  Description of Artificial Sequence: Synthetic oligonucleotide
auuggaguacugugugaag

SEQ ID NO: 2730044 - RNA, 19 nt, Artificial Sequence
  Description of Artificial Sequence: Synthetic oligonucleotide
guugcaggcacaaauggca

SEQ ID NO: 2730045 - RNA, 19 nt, Artificial Sequence
  Description of Artificial Sequence: Synthetic oligonucleotide
accagugucccaccaauga

SEQ ID NO: 2730046 - RNA, 19 nt, Artificial Sequence
  Description of Artificial Sequence: Synthetic oligonucleotide
aacacacuuuccggagggc

SEQ ID NO: 2730047 - RNA, 19 nt, Artificial Sequence
  Description of Artificial Sequence: Synthetic oligonucleotide
uaacucuagcaucauccuc

SEQ ID NO: 2730048 - RNA, 19 nt, Artificial Sequence
  Description of Artificial Sequence: Synthetic oligonucleotide
ucaaucugcuuggaaguug

SEQ ID NO: 2730049 - RNA, 19 nt, Artificial Sequence
  Description of Artificial Sequence: Synthetic oligonucleotide
ccuuccacagaucugagac

SEQ ID NO: 2730050 - RNA, 19 nt, Artificial Sequence
  Description of Artificial Sequence: Synthetic oligonucleotide
ugcacaccuuccuuccagg

SEQ ID NO: 2730051 - RNA, 19 nt, Artificial Sequence
  Description of Artificial Sequence: Synthetic oligonucleotide
gcacaaauggcaaacacac

SEQ ID NO: 2730052 - RNA, 19 nt, Artificial Sequence
  Description of Artificial Sequence: Synthetic oligonucleotide
uccaucgccacugccaaug

SEQ ID NO: 2730053 - RNA, 19 nt, Artificial Sequence
  Description of Artificial Sequence: Synthetic oligonucleotide
aaaagggaaccggcaggcg

SEQ ID NO: 2730054 - RNA, 19 nt, Artificial Sequence
  Description of Artificial Sequence: Synthetic oligonucleotide
gugucaauccccucuccag

SEQ ID NO: 2730055 - RNA, 19 nt, Artificial Sequence
  Description of Artificial Sequence: Synthetic oligonucleotide
uuccacagaucugagacau

SEQ ID NO: 2730056 - RNA, 19 nt, Artificial Sequence
  Description of Artificial Sequence: Synthetic oligonucleotide
cagggguucaguucauagc

SEQ ID NO: 2730057 - RNA, 19 nt, Artificial Sequence
  Description of Artificial Sequence: Synthetic oligonucleotide
cagcauacaaugucaccag

SEQ ID NO: 2730058 - RNA, 19 nt, Artificial Sequence
  Description of Artificial Sequence: Synthetic oligonucleotide
cacagcauacaaugucacc

SEQ ID NO: 2730059 - RNA, 19 nt, Artificial Sequence
  Description of Artificial Sequence: Synthetic oligonucleotide
uguggucugggguccagug

SEQ ID NO: 2730060 - RNA, 19 nt, Artificial Sequence
  Description of Artificial Sequence: Synthetic oligonucleotide
augacaacauuggaguacu

SEQ ID NO: 2730061 - RNA, 19 nt, Artificial Sequence
  Description of Artificial Sequence: Synthetic oligonucleotide
ggugugauaaauggcguag

SEQ ID NO: 2730062 - RNA, 19 nt, Artificial Sequence
  Description of Artificial Sequence: Synthetic oligonucleotide
ucaccagugucccaccaau

SEQ ID NO: 2730063 - RNA, 19 nt, Artificial Sequence
  Description of Artificial Sequence: Synthetic oligonucleotide
uaaauggcguagccacagc

SEQ ID NO: 2730064 - RNA, 19 nt, Artificial Sequence
  Description of Artificial Sequence: Synthetic oligonucleotide
caaugaucccaguaaacaa

SEQ ID NO: 2730065 - RNA, 19 nt, Artificial Sequence
  Description of Artificial Sequence: Synthetic oligonucleotide
guguggaaaagggaaccgg

SEQ ID NO: 2730066 - RNA, 19 nt, Artificial Sequence
  Description of Artificial Sequence: Synthetic oligonucleotide
acccuuccuuugcagcugc

SEQ ID NO: 2730067 - RNA, 19 nt, Artificial Sequence
  Description of Artificial Sequence: Synthetic oligonucleotide
gguaucuggaauaccaaac

SEQ ID NO: 2730068 - RNA, 19 nt, Artificial Sequence
  Description of Artificial Sequence: Synthetic oligonucleotide
cugagacauaaaacuuggc

SEQ ID NO: 2730069 - RNA, 19 nt, Artificial Sequence
  Description of Artificial Sequence: Synthetic oligonucleotide
augucaccagugucccacc

SEQ ID NO: 2730070 - RNA, 19 nt, Artificial Sequence
  Description of Artificial Sequence: Synthetic oligonucleotide
uuuccggagggcuggugug

SEQ ID NO: 2730071 - RNA, 19 nt, Artificial Sequence
  Description of Artificial Sequence: Synthetic oligonucleotide
ucacgacauuuucaaucug

SEQ ID NO: 2730072 - RNA, 19 nt, Artificial Sequence
  Description of Artificial Sequence: Synthetic oligonucleotide
cacaaugcguccaucgcca

SEQ ID NO: 2730073 - RNA, 19 nt, Artificial Sequence
  Description of Artificial Sequence: Synthetic oligonucleotide
gucauacgcccauacggug

SEQ ID NO: 2730074 - RNA, 19 nt, Artificial Sequence
  Description of Artificial Sequence: Synthetic oligonucleotide
uggcguagccacagcauac

SEQ ID NO: 2730075 - RNA, 19 nt, Artificial Sequence
  Description of Artificial Sequence: Synthetic oligonucleotide
aaaacuuggcagagccaug

SEQ ID NO: 2730076 - RNA, 19 nt, Artificial Sequence
  Description of Artificial Sequence: Synthetic oligonucleotide
guaauguggucuggggucc

SEQ ID NO: 2730077 - RNA, 19 nt, Artificial Sequence
  Description of Artificial Sequence: Synthetic oligonucleotide
uugcaggcacaaauggcaa

SEQ ID NO: 2730078 - RNA, 19 nt, Artificial Sequence
  Description of Artificial Sequence: Synthetic oligonucleotide
agcauacaaugucaccagu

SEQ ID NO: 2730079 - RNA, 19 nt, Artificial Sequence
  Description of Artificial Sequence: Synthetic oligonucleotide
caaacugucggacuccaaa

SEQ ID NO: 2730080 - RNA, 19 nt, Artificial Sequence
  Description of Artificial Sequence: Synthetic oligonucleotide
cuucaaacugucggacucc

SEQ ID NO: 2730081 - RNA, 19 nt, Artificial Sequence
  Description of Artificial Sequence: Synthetic oligonucleotide
uuccuuugcagcugcgauc

SEQ ID NO: 2730082 - RNA, 19 nt, Artificial Sequence
  Description of Artificial Sequence: Synthetic oligonucleotide
cacacuuuccggagggcug

SEQ ID NO: 2730083 - RNA, 19 nt, Artificial Sequence
  Description of Artificial Sequence: Synthetic oligonucleotide
gaguacugugugaagguga

SEQ ID NO: 2730084 - RNA, 19 nt, Artificial Sequence
  Description of Artificial Sequence: Synthetic oligonucleotide
acaaugcguccaucgccac

SEQ ID NO: 2730085 - RNA, 19 nt, Artificial Sequence
  Description of Artificial Sequence: Synthetic oligonucleotide
aacuuggcagagccaugca

SEQ ID NO: 2730086 - RNA, 19 nt, Artificial Sequence
  Description of Artificial Sequence: Synthetic oligonucleotide
gucgcaacaucuucacgac

SEQ ID NO: 2730087 - RNA, 19 nt, Artificial Sequence
  Description of Artificial Sequence: Synthetic oligonucleotide
acauuggaguacuguguga

SEQ ID NO: 2730088 - RNA, 19 nt, Artificial Sequence
  Description of Artificial Sequence: Synthetic oligonucleotide
uucugugucgcaacaucuu

SEQ ID NO: 2730089 - RNA, 19 nt, Artificial Sequence
  Description of Artificial Sequence: Synthetic oligonucleotide
acacuuuccggagggcugg

SEQ ID NO: 2730090 - RNA, 19 nt, Artificial Sequence
  Description of Artificial Sequence: Synthetic oligonucleotide
aauggcguagccacagcau

SEQ ID NO: 2730091 - RNA, 19 nt, Artificial Sequence
  Description of Artificial Sequence: Synthetic oligonucleotide
uucaaacugucggacucca

SEQ ID NO: 2730092 - RNA, 19 nt, Artificial Sequence
  Description of Artificial Sequence: Synthetic oligonucleotide
cugggaacccuuccuuugc

SEQ ID NO: 2730093 - RNA, 19 nt, Artificial Sequence
  Description of Artificial Sequence: Synthetic oligonucleotide
gcagcugcgaucacaaugc

SEQ ID NO: 2730094 - RNA, 19 nt, Artificial Sequence
  Description of Artificial Sequence: Synthetic oligonucleotide
ugaucccaguaaacaagaa

SEQ ID NO: 2730095 - RNA, 19 nt, Artificial Sequence
  Description of Artificial Sequence: Synthetic oligonucleotide
gcugcgaucacaaugcguc

SEQ ID NO: 2730096 - RNA, 19 nt, Artificial Sequence
  Description of Artificial Sequence: Synthetic oligonucleotide
caucuucacgacauuuuca

SEQ ID NO: 2730097 - RNA, 19 nt, Artificial Sequence
  Description of Artificial Sequence: Synthetic oligonucleotide
ucaauccccucuccaguaa

SEQ ID NO: 2730098 - RNA, 19 nt, Artificial Sequence
  Description of Artificial Sequence: Synthetic oligonucleotide
aauccccucuccaguaaug

SEQ ID NO: 2730099 - RNA, 19 nt, Artificial Sequence
  Description of Artificial Sequence: Synthetic oligonucleotide
ugcgaucacaaugcgucca

SEQ ID NO: 2730100 - RNA, 19 nt, Artificial Sequence
  Description of Artificial Sequence: Synthetic oligonucleotide
cauacaaugucaccagugu

SEQ ID NO: 2730101 - RNA, 19 nt, Artificial Sequence
  Description of Artificial Sequence: Synthetic oligonucleotide
gugauaaauggcguagcca

SEQ ID NO: 2730102 - RNA, 19 nt, Artificial Sequence
  Description of Artificial Sequence: Synthetic oligonucleotide
ggaacccuuccuuugcagc

SEQ ID NO: 2730103 - RNA, 19 nt, Artificial Sequence
  Description of Artificial Sequence: Synthetic oligonucleotide
caucaucuggggcacacca

SEQ ID NO: 2730104 - RNA, 19 nt, Artificial Sequence
  Description of Artificial Sequence: Synthetic oligonucleotide
uccaggcacgguaucugga

SEQ ID NO: 2730105 - RNA, 19 nt, Artificial Sequence
  Description of Artificial Sequence: Synthetic oligonucleotide
ucuucacgacauuuucaau

SEQ ID NO: 2730106 - RNA, 19 nt, Artificial Sequence
  Description of Artificial Sequence: Synthetic oligonucleotide
gauaaauggcguagccaca

SEQ ID NO: 2730107 - RNA, 19 nt, Artificial Sequence
  Description of Artificial Sequence: Synthetic oligonucleotide
acgacauuuucaaucugcu

SEQ ID NO: 2730108 - RNA, 19 nt, Artificial Sequence
  Description of Artificial Sequence: Synthetic oligonucleotide
ucgcaacaucuucacgaca

SEQ ID NO: 2730109 - RNA, 19 nt, Artificial Sequence
  Description of Artificial Sequence: Synthetic oligonucleotide
gaaggugaccuuccacaga

SEQ ID NO: 2730110 - RNA, 19 nt, Artificial Sequence
  Description of Artificial Sequence: Synthetic oligonucleotide
ugucaccagugucccacca

SEQ ID NO: 2730111 - RNA, 19 nt, Artificial Sequence
  Description of Artificial Sequence: Synthetic oligonucleotide
uagccacagcauacaaugu

SEQ ID NO: 2730112 - RNA, 19 nt, Artificial Sequence
  Description of Artificial Sequence: Synthetic oligonucleotide
ggcaaacacacuuuccgga

SEQ ID NO: 2730113 - RNA, 19 nt, Artificial Sequence
  Description of Artificial Sequence: Synthetic oligonucleotide
accggcaggcgauaacucu

SEQ ID NO: 2730114 - RNA, 19 nt, Artificial Sequence
  Description of Artificial Sequence: Synthetic oligonucleotide
ucgccacugccaaugucca

SEQ ID NO: 2730115 - RNA, 19 nt, Artificial Sequence
  Description of Artificial Sequence: Synthetic oligonucleotide
uuggaaguugcaggcacaa

SEQ ID NO: 2730116 - RNA, 19 nt, Artificial Sequence
  Description of Artificial Sequence: Synthetic oligonucleotide
gcccauacggugucaaucc

SEQ ID NO: 2730117 - RNA, 19 nt, Artificial Sequence
  Description of Artificial Sequence: Synthetic oligonucleotide
aaccggcaggcgauaacuc

SEQ ID NO: 2730118 - RNA, 19 nt, Artificial Sequence
  Description of Artificial Sequence: Synthetic oligonucleotide
aggcagaacauggcccggc

SEQ ID NO: 2730119 - RNA, 19 nt, Artificial Sequence
  Description of Artificial Sequence: Synthetic oligonucleotide
aacauggcccggcugccuu

SEQ ID NO: 2730120 - RNA, 19 nt, Artificial Sequence
  Description of Artificial Sequence: Synthetic oligonucleotide
ccaguaauguggucugggg

SEQ ID NO: 2730121 - RNA, 19 nt, Artificial Sequence
  Description of Artificial Sequence: Synthetic oligonucleotide
gugucgcaacaucuucacg

SEQ ID NO: 2730122 - RNA, 19 nt, Artificial Sequence
  Description of Artificial Sequence: Synthetic oligonucleotide
gaacccuuccuuugcagcu

SEQ ID NO: 2730123 - RNA, 19 nt, Artificial Sequence
  Description of Artificial Sequence: Synthetic oligonucleotide
accagggagccucuucugu

SEQ ID NO: 2730124 - RNA, 19 nt, Artificial Sequence
  Description of Artificial Sequence: Synthetic oligonucleotide
gugugauaaauggcguagc

SEQ ID NO: 2730125 - RNA, 19 nt, Artificial Sequence
  Description of Artificial Sequence: Synthetic oligonucleotide
aacuggcaggcagaacaug

SEQ ID NO: 2730126 - RNA, 19 nt, Artificial Sequence
  Description of Artificial Sequence: Synthetic oligonucleotide
uccccucuccaguaaugug

SEQ ID NO: 2730127 - RNA, 19 nt, Artificial Sequence
  Description of Artificial Sequence: Synthetic oligonucleotide
ugacaacauuggaguacug

SEQ ID NO: 2730128 - RNA, 19 nt, Artificial Sequence
  Description of Artificial Sequence: Synthetic oligonucleotide
gacaacauuggaguacugu

SEQ ID NO: 2730129 - RNA, 19 nt, Artificial Sequence
  Description of Artificial Sequence: Synthetic oligonucleotide
cugcgaucacaaugcgucc

SEQ ID NO: 2730130 - RNA, 19 nt, Artificial Sequence
  Description of Artificial Sequence: Synthetic oligonucleotide
gcauacaaugucaccagug

SEQ ID NO: 2730131 - RNA, 19 nt, Artificial Sequence
  Description of Artificial Sequence: Synthetic oligonucleotide
cauacgcccauacgguguc

SEQ ID NO: 2730132 - RNA, 19 nt, Artificial Sequence
  Description of Artificial Sequence: Synthetic oligonucleotide
auggcguagccacagcaua

SEQ ID NO: 2730133 - RNA, 19 nt, Artificial Sequence
  Description of Artificial Sequence: Synthetic oligonucleotide
cauuggaguacugugugaa

SEQ ID NO: 2730134 - RNA, 19 nt, Artificial Sequence
  Description of Artificial Sequence: Synthetic oligonucleotide
cugugucgcaacaucuuca

SEQ ID NO: 2730135 - RNA, 19 nt, Artificial Sequence
  Description of Artificial Sequence: Synthetic oligonucleotide
caauguccaccagggagcc

SEQ ID NO: 2730136 - RNA, 19 nt, Artificial Sequence
  Description of Artificial Sequence: Synthetic oligonucleotide
ugcaggcacaaauggcaaa

SEQ ID NO: 2730137 - RNA, 19 nt, Artificial Sequence
  Description of Artificial Sequence: Synthetic oligonucleotide
uuccuuccaggcacgguau

SEQ ID NO: 2730138 - RNA, 19 nt, Artificial Sequence
  Description of Artificial Sequence: Synthetic oligonucleotide
aaacuggcaggcagaacau

SEQ ID NO: 2730139 - RNA, 19 nt, Artificial Sequence
  Description of Artificial Sequence: Synthetic oligonucleotide
acacacuuuccggagggcu

SEQ ID NO: 2730140 - RNA, 19 nt, Artificial Sequence
  Description of Artificial Sequence: Synthetic oligonucleotide
cuuccuuccaggcacggua

SEQ ID NO: 2730141 - RNA, 19 nt, Artificial Sequence
  Description of Artificial Sequence: Synthetic oligonucleotide
ggaaguugcaggcacaaau

SEQ ID NO: 2730142 - RNA, 19 nt, Artificial Sequence
  Description of Artificial Sequence: Synthetic oligonucleotide
gcuuggaaguugcaggcac

SEQ ID NO: 2730143 - RNA, 19 nt, Artificial Sequence
  Description of Artificial Sequence: Synthetic oligonucleotide
uccaaacuggcaggcagaa

SEQ ID NO: 2730144 - RNA, 19 nt, Artificial Sequence
  Description of Artificial Sequence: Synthetic oligonucleotide
ggcgauaacucuagcauca

SEQ ID NO: 2730145 - RNA, 19 nt, Artificial Sequence
  Description of Artificial Sequence: Synthetic oligonucleotide
gaucugagacauaaaacuu

SEQ ID NO: 2730146 - RNA, 19 nt, Artificial Sequence
  Description of Artificial Sequence: Synthetic oligonucleotide
auacggugucaauccccuc

SEQ ID NO: 2730147 - RNA, 19 nt, Artificial Sequence
  Description of Artificial Sequence: Synthetic oligonucleotide
ggguccaguguggaaaagg

SEQ ID NO: 2730148 - RNA, 19 nt, Artificial Sequence
  Description of Artificial Sequence: Synthetic oligonucleotide
cuuggaaguugcaggcaca

SEQ ID NO: 2730149 - RNA, 19 nt, Artificial Sequence
  Description of Artificial Sequence: Synthetic oligonucleotide
agggcuggugugauaaaug

SEQ ID NO: 2730150 - RNA, 19 nt, Artificial Sequence
  Description of Artificial Sequence: Synthetic oligonucleotide
uucaaucugcuuggaaguu

SEQ ID NO: 2730151 - RNA, 19 nt, Artificial Sequence
  Description of Artificial Sequence: Synthetic oligonucleotide
gcuguggcaucaucugggg

SEQ ID NO: 2730152 - RNA, 19 nt, Artificial Sequence
  Description of Artificial Sequence: Synthetic oligonucleotide
ggcacaaauggcaaacaca

SEQ ID NO: 2730153 - RNA, 19 nt, Artificial Sequence
  Description of Artificial Sequence: Synthetic oligonucleotide
ccauacggugucaaucccc

SEQ ID NO: 2730154 - RNA, 19 nt, Artificial Sequence
  Description of Artificial Sequence: Synthetic oligonucleotide
accuuccacagaucugaga

SEQ ID NO: 2730155 - RNA, 19 nt, Artificial Sequence
  Description of Artificial Sequence: Synthetic oligonucleotide
cuuccacagaucugagaca

SEQ ID NO: 2730156 - RNA, 19 nt, Artificial Sequence
  Description of Artificial Sequence: Synthetic oligonucleotide
ugcuuggaaguugcaggca

SEQ ID NO: 2730157 - RNA, 19 nt, Artificial Sequence
  Description of Artificial Sequence: Synthetic oligonucleotide
cuucugugucgcaacaucu

SEQ ID NO: 2730158 - RNA, 19 nt, Artificial Sequence
  Description of Artificial Sequence: Synthetic oligonucleotide
ugccaauguccaccaggga

SEQ ID NO: 2730159 - RNA, 19 nt, Artificial Sequence
  Description of Artificial Sequence: Synthetic oligonucleotide
ucaaacugucggacuccaa

SEQ ID NO: 2730160 - RNA, 19 nt, Artificial Sequence
  Description of Artificial Sequence: Synthetic oligonucleotide
ugggguccaguguggaaaa

SEQ ID NO: 2730161 - RNA, 19 nt, Artificial Sequence
  Description of Artificial Sequence: Synthetic oligonucleotide
ccagggguucaguucauag

SEQ ID NO: 2730162 - RNA, 19 nt, Artificial Sequence
  Description of Artificial Sequence: Synthetic oligonucleotide
cuguggcaucaucuggggc

SEQ ID NO: 2730163 - RNA, 19 nt, Artificial Sequence
  Description of Artificial Sequence: Synthetic oligonucleotide
cauacggugucaauccccu

SEQ ID NO: 2730164 - RNA, 19 nt, Artificial Sequence
  Description of Artificial Sequence: Synthetic oligonucleotide
aggcacgguaucuggaaua

SEQ ID NO: 2730165 - RNA, 19 nt, Artificial Sequence
  Description of Artificial Sequence: Synthetic oligonucleotide
uccucaaguuccugcucaa

SEQ ID NO: 2730166 - RNA, 19 nt, Artificial Sequence
  Description of Artificial Sequence: Synthetic oligonucleotide
gcaggcgauaacucuagca

SEQ ID NO: 2730167 - RNA, 19 nt, Artificial Sequence
  Description of Artificial Sequence: Synthetic oligonucleotide
caggcgauaacucuagcau

SEQ ID NO: 2730168 - RNA, 19 nt, Artificial Sequence
  Description of Artificial Sequence: Synthetic oligonucleotide
ggguucaguucauagccca

SEQ ID NO: 2730169 - RNA, 19 nt, Artificial Sequence
  Description of Artificial Sequence: Synthetic oligonucleotide
augcguccaucgccacugc

SEQ ID NO: 2730170 - RNA, 19 nt, Artificial Sequence
  Description of Artificial Sequence: Synthetic oligonucleotide
ccaaugaucccaguaaaca

SEQ ID NO: 2730171 - RNA, 19 nt, Artificial Sequence
  Description of Artificial Sequence: Synthetic oligonucleotide
ccaugcacaccuuccuucc

SEQ ID NO: 2730172 - RNA, 19 nt, Artificial Sequence
  Description of Artificial Sequence: Synthetic oligonucleotide
gcugggaacccuuccuuug

SEQ ID NO: 2730173 - RNA, 19 nt, Artificial Sequence
  Description of Artificial Sequence: Synthetic oligonucleotide
ccaguguggaaaagggaac

SEQ ID NO: 2730174 - RNA, 19 nt, Artificial Sequence
  Description of Artificial Sequence: Synthetic oligonucleotide
caccaaugaucccaguaaa

SEQ ID NO: 2730175 - RNA, 19 nt, Artificial Sequence
  Description of Artificial Sequence: Synthetic oligonucleotide
ggugucaauccccucucca

SEQ ID NO: 2730176 - RNA, 19 nt, Artificial Sequence
  Description of Artificial Sequence: Synthetic oligonucleotide
gaaccggcaggcgauaacu

SEQ ID NO: 2730177 - RNA, 19 nt, Artificial Sequence
  Description of Artificial Sequence: Synthetic oligonucleotide
cccaguaaacaagaacccc

SEQ ID NO: 2730178 - RNA, 19 nt, Artificial Sequence
  Description of Artificial Sequence: Synthetic oligonucleotide
caccagugucccaccaaug

SEQ ID NO: 2730179 - RNA, 19 nt, Artificial Sequence
  Description of Artificial Sequence: Synthetic oligonucleotide
cuuugcagcugcgaucaca

SEQ ID NO: 2730180 - RNA, 19 nt, Artificial Sequence
  Description of Artificial Sequence: Synthetic oligonucleotide
cuccaaacuggcaggcaga

SEQ ID NO: 2730181 - RNA, 19 nt, Artificial Sequence
  Description of Artificial Sequence: Synthetic oligonucleotide
ggaguacugugugaaggug

SEQ ID NO: 2730182 - RNA, 19 nt, Artificial Sequence
  Description of Artificial Sequence: Synthetic oligonucleotide
agcugggaacccuuccuuu

SEQ ID NO: 2730183 - RNA, 19 nt, Artificial Sequence
  Description of Artificial Sequence: Synthetic oligonucleotide
gucaauccccucuccagua

SEQ ID NO: 2730184 - RNA, 19 nt, Artificial Sequence
  Description of Artificial Sequence: Synthetic oligonucleotide
cuagcaucauccucaaguu

SEQ ID NO: 2730185 - RNA, 19 nt, Artificial Sequence
  Description of Artificial Sequence: Synthetic oligonucleotide
cagagccaugcacaccuuc

SEQ ID NO: 2730186 - RNA, 19 nt, Artificial Sequence
  Description of Artificial Sequence: Synthetic oligonucleotide
gugaccuuccacagaucug

SEQ ID NO: 2730187 - RNA, 19 nt, Artificial Sequence
  Description of Artificial Sequence: Synthetic oligonucleotide
gggaacccuuccuuugcag

SEQ ID NO: 2730188 - RNA, 19 nt, Artificial Sequence
  Description of Artificial Sequence: Synthetic oligonucleotide
gaccuuccacagaucugag

SEQ ID NO: 2730189 - RNA, 19 nt, Artificial Sequence
  Description of Artificial Sequence: Synthetic oligonucleotide
caguaauguggucuggggu

SEQ ID NO: 2730190 - RNA, 19 nt, Artificial Sequence
  Description of Artificial Sequence: Synthetic oligonucleotide
gccaugcacaccuuccuuc

SEQ ID NO: 2730191 - RNA, 19 nt, Artificial Sequence
  Description of Artificial Sequence: Synthetic oligonucleotide
ccacagcauacaaugucac

SEQ ID NO: 2730192 - RNA, 19 nt, Artificial Sequence
  Description of Artificial Sequence: Synthetic oligonucleotide
agccaugcacaccuuccuu

SEQ ID NO: 2730193 - RNA, 19 nt, Artificial Sequence
  Description of Artificial Sequence: Synthetic oligonucleotide
uaauguggucuggggucca

SEQ ID NO: 2730194 - RNA, 19 nt, Artificial Sequence
  Description of Artificial Sequence: Synthetic oligonucleotide
uuccggagggcugguguga

SEQ ID NO: 2730195 - RNA, 19 nt, Artificial Sequence
  Description of Artificial Sequence: Synthetic oligonucleotide
gucccaccaaugaucccag

SEQ ID NO: 2730196 - RNA, 19 nt, Artificial Sequence
  Description of Artificial Sequence: Synthetic oligonucleotide
ggcuggugugauaaauggc

SEQ ID NO: 2730197 - RNA, 19 nt, Artificial Sequence
  Description of Artificial Sequence: Synthetic oligonucleotide
cugggguccaguguggaaa

SEQ ID NO: 2730198 - RNA, 19 nt, Artificial Sequence
  Description of Artificial Sequence: Synthetic oligonucleotide
cuggugugauaaauggcgu

SEQ ID NO: 2730199 - RNA, 19 nt, Artificial Sequence
  Description of Artificial Sequence: Synthetic oligonucleotide
uacgcccauacggugucaa

SEQ ID NO: 2730200 - RNA, 19 nt, Artificial Sequence
  Description of Artificial Sequence: Synthetic oligonucleotide
ggcacgguaucuggaauac

SEQ ID NO: 2730201 - RNA, 19 nt, Artificial Sequence
  Description of Artificial Sequence: Synthetic oligonucleotide
uccacagaucugagacaua

SEQ ID NO: 2730202 - RNA, 19 nt, Artificial Sequence
  Description of Artificial Sequence: Synthetic oligonucleotide
agcugcgaucacaaugcgu

SEQ ID NO: 2730203 - RNA, 19 nt, Artificial Sequence
  Description of Artificial Sequence: Synthetic oligonucleotide
guacugugugaaggugacc

SEQ ID NO: 2730204 - RNA, 19 nt, Artificial Sequence
  Description of Artificial Sequence: Synthetic oligonucleotide
aauguccaccagggagccu

SEQ ID NO: 2730205 - RNA, 19 nt, Artificial Sequence
  Description of Artificial Sequence: Synthetic oligonucleotide
cuuuccggagggcuggugu

SEQ ID NO: 2730206 - RNA, 19 nt, Artificial Sequence
  Description of Artificial Sequence: Synthetic oligonucleotide
accuuccuuccaggcacgg

SEQ ID NO: 2730207 - RNA, 19 nt, Artificial Sequence
  Description of Artificial Sequence: Synthetic oligonucleotide
gcacaccuuccuuccaggc

SEQ ID NO: 2730208 - RNA, 19 nt, Artificial Sequence
  Description of Artificial Sequence: Synthetic oligonucleotide
acgguaucuggaauaccaa

SEQ ID NO: 2730209 - RNA, 19 nt, Artificial Sequence
  Description of Artificial Sequence: Synthetic oligonucleotide
caucgccacugccaauguc

SEQ ID NO: 2730210 - RNA, 19 nt, Artificial Sequence
  Description of Artificial Sequence: Synthetic oligonucleotide
ccaccaaugaucccaguaa

SEQ ID NO: 2730211 - RNA, 19 nt, Artificial Sequence
  Description of Artificial Sequence: Synthetic oligonucleotide
ccagggagccucuucugug

SEQ ID NO: 2730212 - RNA, 19 nt, Artificial Sequence
  Description of Artificial Sequence: Synthetic oligonucleotide
cuuccuuugcagcugcgau

SEQ ID NO: 2730213 - RNA, 19 nt, Artificial Sequence
  Description of Artificial Sequence: Synthetic oligonucleotide
cauagcccacagcugggaa

SEQ ID NO: 2730214 - RNA, 19 nt, Artificial Sequence
  Description of Artificial Sequence: Synthetic oligonucleotide
cacaaauggcaaacacacu

SEQ ID NO: 2730215 - RNA, 19 nt, Artificial Sequence
  Description of Artificial Sequence: Synthetic oligonucleotide
gugucccaccaaugauccc

SEQ ID NO: 2730216 - RNA, 19 nt, Artificial Sequence
  Description of Artificial Sequence: Synthetic oligonucleotide
ggaaccggcaggcgauaac

SEQ ID NO: 2730217 - RNA, 19 nt, Artificial Sequence
  Description of Artificial Sequence: Synthetic oligonucleotide
cccauacggugucaauccc

SEQ ID NO: 2730218 - RNA, 19 nt, Artificial Sequence
  Description of Artificial Sequence: Synthetic oligonucleotide
gguucaguucauagcccac

SEQ ID NO: 2730219 - RNA, 19 nt, Artificial Sequence
  Description of Artificial Sequence: Synthetic oligonucleotide
aucaucuggggcacaccaa

SEQ ID NO: 2730220 - RNA, 19 nt, Artificial Sequence
  Description of Artificial Sequence: Synthetic oligonucleotide
acuuuccggagggcuggug

SEQ ID NO: 2730221 - RNA, 19 nt, Artificial Sequence
  Description of Artificial Sequence: Synthetic oligonucleotide
uugcagcugcgaucacaau

SEQ ID NO: 2730222 - RNA, 19 nt, Artificial Sequence
  Description of Artificial Sequence: Synthetic oligonucleotide
cacugccaauguccaccag

SEQ ID NO: 2730223 - RNA, 19 nt, Artificial Sequence
  Description of Artificial Sequence: Synthetic oligonucleotide
ggcaggcgauaacucuagc

SEQ ID NO: 2730224 - RNA, 19 nt, Artificial Sequence
  Description of Artificial Sequence: Synthetic oligonucleotide
uccggagggcuggugugau

SEQ ID NO: 2730225 - RNA, 19 nt, Artificial Sequence
  Description of Artificial Sequence: Synthetic oligonucleotide
acgcccauacggugucaau

SEQ ID NO: 2730226 - RNA, 19 nt, Artificial Sequence
  Description of Artificial Sequence: Synthetic oligonucleotide
acauggcccggcugccuuu

SEQ ID NO: 2730227 - RNA, 19 nt, Artificial Sequence
  Description of Artificial Sequence: Synthetic oligonucleotide
ggcguagccacagcauaca

SEQ ID NO: 2730228 - RNA, 19 nt, Artificial Sequence
  Description of Artificial Sequence: Synthetic oligonucleotide
gucggacuccaaacuggca

SEQ ID NO: 2730229 - RNA, 19 nt, Artificial Sequence
  Description of Artificial Sequence: Synthetic oligonucleotide
ggcccggcugccuuucuuc

SEQ ID NO: 2730230 - RNA, 19 nt, Artificial Sequence
  Description of Artificial Sequence: Synthetic oligonucleotide
gagccucuucugugucgca

SEQ ID NO: 2730231 - RNA, 19 nt, Artificial Sequence
  Description of Artificial Sequence: Synthetic oligonucleotide
cgauaacucuagcaucauc

SEQ ID NO: 2730232 - RNA, 19 nt, Artificial Sequence
  Description of Artificial Sequence: Synthetic oligonucleotide
gcguccaucgccacugcca

SEQ ID NO: 2730233 - RNA, 19 nt, Artificial Sequence
  Description of Artificial Sequence: Synthetic oligonucleotide
gcccggcugccuuucuucc

SEQ ID NO: 2730234 - RNA, 19 nt, Artificial Sequence
  Description of Artificial Sequence: Synthetic oligonucleotide
cauggcccggcugccuuuc

SEQ ID NO: 2730235 - RNA, 19 nt, Artificial Sequence
  Description of Artificial Sequence: Synthetic oligonucleotide
gucugggguccagugugga

SEQ ID NO: 2730236 - RNA, 19 nt, Artificial Sequence
  Description of Artificial Sequence: Synthetic oligonucleotide
auacgcccauacgguguca

SEQ ID NO: 2730237 - RNA, 19 nt, Artificial Sequence
  Description of Artificial Sequence: Synthetic oligonucleotide
cccaccaaugaucccagua

SEQ ID NO: 2730238 - RNA, 19 nt, Artificial Sequence
  Description of Artificial Sequence: Synthetic oligonucleotide
ccggcugccuuucuuccuc

SEQ ID NO: 2730239 - RNA, 19 nt, Artificial Sequence
  Description of Artificial Sequence: Synthetic oligonucleotide
caaugcguccaucgccacu

SEQ ID NO: 2730240 - RNA, 19 nt, Artificial Sequence
  Description of Artificial Sequence: Synthetic oligonucleotide
gcacgguaucuggaauacc

SEQ ID NO: 2730241 - RNA, 19 nt, Artificial Sequence
  Description of Artificial Sequence: Synthetic oligonucleotide
cggcaggcgauaacucuag

SEQ ID NO: 2730242 - RNA, 19 nt, Artificial Sequence
  Description of Artificial Sequence: Synthetic oligonucleotide
caauccccucuccaguaau

SEQ ID NO: 2730243 - RNA, 19 nt, Artificial Sequence
  Description of Artificial Sequence: Synthetic oligonucleotide
ccccaacuguucuucuuca

SEQ ID NO: 2730244 - RNA, 19 nt, Artificial Sequence
  Description of Artificial Sequence: Synthetic oligonucleotide
uggcaucaucuggggcaca

SEQ ID NO: 2730245 - RNA, 19 nt, Artificial Sequence
  Description of Artificial Sequence: Synthetic oligonucleotide
gaacauggcccggcugccu

SEQ ID NO: 2730246 - RNA, 19 nt, Artificial Sequence
  Description of Artificial Sequence: Synthetic oligonucleotide
cucaugucauacgcccaua

SEQ ID NO: 2730247 - RNA, 19 nt, Artificial Sequence
  Description of Artificial Sequence: Synthetic oligonucleotide
gcguagccacagcauacaa

SEQ ID NO: 2730248 - RNA, 19 nt, Artificial Sequence
  Description of Artificial Sequence: Synthetic oligonucleotide
cgcccauacggugucaauc

SEQ ID NO: 2730249 - RNA, 19 nt, Artificial Sequence
  Description of Artificial Sequence: Synthetic oligonucleotide
gggguccaguguggaaaag

SEQ ID NO: 2730250 - RNA, 19 nt, Artificial Sequence
  Description of Artificial Sequence: Synthetic oligonucleotide
caggcacgguaucuggaau

SEQ ID NO: 2730251 - RNA, 19 nt, Artificial Sequence
  Description of Artificial Sequence: Synthetic oligonucleotide
ccggcaggcgauaacucua

SEQ ID NO: 2730252 - RNA, 19 nt, Artificial Sequence
  Description of Artificial Sequence: Synthetic oligonucleotide
agggaaccggcaggcgaua

SEQ ID NO: 2730253 - RNA, 19 nt, Artificial Sequence
  Description of Artificial Sequence: Synthetic oligonucleotide
ggagggcuggugugauaaa

SEQ ID NO: 2730254 - RNA, 19 nt, Artificial Sequence
  Description of Artificial Sequence: Synthetic oligonucleotide
ccaccagggagccucuucu

SEQ ID NO: 2730255 - RNA, 19 nt, Artificial Sequence
  Description of Artificial Sequence: Synthetic oligonucleotide
gcgaucacaaugcguccau

SEQ ID NO: 2730256 - RNA, 19 nt, Artificial Sequence
  Description of Artificial Sequence: Synthetic oligonucleotide
cagcugggaacccuuccuu

SEQ ID NO: 2730257 - RNA, 19 nt, Artificial Sequence
  Description of Artificial Sequence: Synthetic oligonucleotide
ccucuccaguaaugugguc

SEQ ID NO: 2730258 - RNA, 19 nt, Artificial Sequence
  Description of Artificial Sequence: Synthetic oligonucleotide
cguccaucgccacugccaa

SEQ ID NO: 2730259 - RNA, 19 nt, Artificial Sequence
  Description of Artificial Sequence: Synthetic oligonucleotide
ccagugucccaccaaugau

SEQ ID NO: 2730260 - RNA, 19 nt, Artificial Sequence
  Description of Artificial Sequence: Synthetic oligonucleotide
cggagggcuggugugauaa

SEQ ID NO: 2730261 - RNA, 19 nt, Artificial Sequence
  Description of Artificial Sequence: Synthetic oligonucleotide
gggaaccggcaggcgauaa

SEQ ID NO: 2730262 - RNA, 19 nt, Artificial Sequence
  Description of Artificial Sequence: Synthetic oligonucleotide
cguagccacagcauacaau

SEQ ID NO: 2730263 - RNA, 19 nt, Artificial Sequence
  Description of Artificial Sequence: Synthetic oligonucleotide
cgaucacaaugcguccauc

SEQ ID NO: 2730264 - RNA, 19 nt, Artificial Sequence
  Description of Artificial Sequence: Synthetic oligonucleotide
guccaucgccacugccaau

SEQ ID NO: 2730265 - RNA, 19 nt, Artificial Sequence
  Description of Artificial Sequence: Synthetic oligonucleotide
gcgauaacucuagcaucau

SEQ ID NO: 2730266 - RNA, 19 nt, Artificial Sequence
  Description of Artificial Sequence: Synthetic oligonucleotide
cacuuuccggagggcuggu

SEQ ID NO: 2730267 - RNA, 19 nt, Artificial Sequence
  Description of Artificial Sequence: Synthetic oligonucleotide
gcccacagcugggaacccu

SEQ ID NO: 2730268 - RNA, 19 nt, Artificial Sequence
  Description of Artificial Sequence: Synthetic oligonucleotide
cggcugccuuucuuccuca

SEQ ID NO: 2730269 - RNA, 19 nt, Artificial Sequence
  Description of Artificial Sequence: Synthetic oligonucleotide
cccggcugccuuucuuccu

SEQ ID NO: 2730270 - RNA, 19 nt, Artificial Sequence
  Description of Artificial Sequence: Synthetic oligonucleotide
ccuuccuuccaggcacggu

SEQ ID NO: 2730271 - RNA, 19 nt, Artificial Sequence
  Description of Artificial Sequence: Synthetic oligonucleotide
ccggagggcuggugugaua

SEQ ID NO: 2730272 - RNA, 19 nt, Artificial Sequence
  Description of Artificial Sequence: Synthetic oligonucleotide
aaacuucuauccuagcccc

SEQ ID NO: 2730273 - RNA, 19 nt, Artificial Sequence
  Description of Artificial Sequence: Synthetic oligonucleotide
uaaacuucuauccuagccc

SEQ ID NO: 2730274 - RNA, 19 nt, Artificial Sequence
  Description of Artificial Sequence: Synthetic oligonucleotide
ucacccuaaacuucuaucc

SEQ ID NO: 2730275 - RNA, 19 nt, Artificial Sequence
  Description of Artificial Sequence: Synthetic oligonucleotide
cuaaacuucuauccuagcc

SEQ ID NO: 2730276 - RNA, 19 nt, Artificial Sequence
  Description of Artificial Sequence: Synthetic oligonucleotide
aucacccuaaacuucuauc

SEQ ID NO: 2730277 - RNA, 19 nt, Artificial Sequence
  Description of Artificial Sequence: Synthetic oligonucleotide
aauggugccacucccugaa

SEQ ID NO: 2730278 - RNA, 19 nt, Artificial Sequence
  Description of Artificial Sequence: Synthetic oligonucleotide
acucccugaauuugggguc

SEQ ID NO: 2730279 - RNA, 19 nt, Artificial Sequence
  Description of Artificial Sequence: Synthetic oligonucleotide
ugccacucccugaauuugg

SEQ ID NO: 2730280 - RNA, 19 nt, Artificial Sequence
  Description of Artificial Sequence: Synthetic oligonucleotide
aaucacccuaaacuucuau

SEQ ID NO: 2730281 - RNA, 19 nt, Artificial Sequence
  Description of Artificial Sequence: Synthetic oligonucleotide
uccaccuccaccccggcgu

SEQ ID NO: 2730282 - RNA, 19 nt, Artificial Sequence
  Description of Artificial Sequence: Synthetic oligonucleotide
ugggcgucagcacuuugcc

SEQ ID NO: 2730283 - RNA, 19 nt, Artificial Sequence
  Description of Artificial Sequence: Synthetic oligonucleotide
aaauggugccacucccuga

SEQ ID NO: 2730284 - RNA, 19 nt, Artificial Sequence
  Description of Artificial Sequence: Synthetic oligonucleotide
ucguccaccuccugcaggc

SEQ ID NO: 2730285 - RNA, 19 nt, Artificial Sequence
  Description of Artificial Sequence: Synthetic oligonucleotide
guaggcgacccgcagcgcg

SEQ ID NO: 2730286 - RNA, 19 nt, Artificial Sequence
  Description of Artificial Sequence: Synthetic oligonucleotide
gaaaucacccuaaacuucu

SEQ ID NO: 2730287 - RNA, 19 nt, Artificial Sequence
  Description of Artificial Sequence: Synthetic oligonucleotide
accacuggcugaugucggc

SEQ ID NO: 2730288 - RNA, 19 nt, Artificial Sequence
  Description of Artificial Sequence: Synthetic oligonucleotide
aggcucagcggcccggacc

SEQ ID NO: 2730289 - RNA, 19 nt, Artificial Sequence
  Description of Artificial Sequence: Synthetic oligonucleotide
ucguccaccuccaccccgg

SEQ ID NO: 2730290 - RNA, 19 nt, Artificial Sequence
  Description of Artificial Sequence: Synthetic oligonucleotide
cugaugucggcaggcaugg

SEQ ID NO: 2730291 - RNA, 19 nt, Artificial Sequence
  Description of Artificial Sequence: Synthetic oligonucleotide
cacuuugcccagcucgucc

SEQ ID NO: 2730292 - RNA, 19 nt, Artificial Sequence
  Description of Artificial Sequence: Synthetic oligonucleotide
acuggcugaugucggcagg

SEQ ID NO: 2730293 - RNA, 19 nt, Artificial Sequence
  Description of Artificial Sequence: Synthetic oligonucleotide
acuuugcccagcucgucca

SEQ ID NO: 2730294 - RNA, 19 nt, Artificial Sequence
  Description of Artificial Sequence: Synthetic oligonucleotide
cuacuucccggagagcugc

SEQ ID NO: 2730295 - RNA, 19 nt, Artificial Sequence
  Description of Artificial Sequence: Synthetic oligonucleotide
ggcgucagcacuuugccca

SEQ ID NO: 2730296 - RNA, 19 nt, Artificial Sequence
  Description of Artificial Sequence: Synthetic oligonucleotide
uccaccccggcguaggcga

SEQ ID NO: 2730297 - RNA, 19 nt, Artificial Sequence
  Description of Artificial Sequence: Synthetic oligonucleotide
cccuaaacuucuauccuag

SEQ ID NO: 2730298 - RNA, 19 nt, Artificial Sequence
  Description of Artificial Sequence: Synthetic oligonucleotide
ggaccacuggcugaugucg

SEQ ID NO: 2730299 - RNA, 19 nt, Artificial Sequence
  Description of Artificial Sequence: Synthetic oligonucleotide
ucagcggcccggaccacug

SEQ ID NO: 2730300 - RNA, 19 nt, Artificial Sequence
  Description of Artificial Sequence: Synthetic oligonucleotide
gaccacuggcugaugucgg

SEQ ID NO: 2730301 - RNA, 19 nt, Artificial Sequence
  Description of Artificial Sequence: Synthetic oligonucleotide
cucguccaccuccugcagg

SEQ ID NO: 2730302 - RNA, 19 nt, Artificial Sequence
  Description of Artificial Sequence: Synthetic oligonucleotide
cacuggcugaugucggcag

SEQ ID NO: 2730303 - RNA, 19 nt, Artificial Sequence
  Description of Artificial Sequence: Synthetic oligonucleotide
ggaaaucacccuaaacuuc

SEQ ID NO: 2730304 - RNA, 19 nt, Artificial Sequence
  Description of Artificial Sequence: Synthetic oligonucleotide
uggugccacucccugaauu

SEQ ID NO: 2730305 - RNA, 19 nt, Artificial Sequence
  Description of Artificial Sequence: Synthetic oligonucleotide
gcguaggcgacccgcagcg

SEQ ID NO: 2730306 - RNA, 19 nt, Artificial Sequence
  Description of Artificial Sequence: Synthetic oligonucleotide
uugcccagcucguccaccu

SEQ ID NO: 2730307 - RNA, 19 nt, Artificial Sequence
  Description of Artificial Sequence: Synthetic oligonucleotide
cucguccaccuccaccccg

SEQ ID NO: 2730308 - RNA, 19 nt, Artificial Sequence
  Description of Artificial Sequence: Synthetic oligonucleotide
uuugcccagcucguccacc

SEQ ID NO: 2730309 - RNA, 19 nt, Artificial Sequence
  Description of Artificial Sequence: Synthetic oligonucleotide
cucccugaauuuggggucc

SEQ ID NO: 2730310 - RNA, 19 nt, Artificial Sequence
  Description of Artificial Sequence: Synthetic oligonucleotide
cuggcugaugucggcaggc

SEQ ID NO: 2730311 - RNA, 19 nt, Artificial Sequence
  Description of Artificial Sequence: Synthetic oligonucleotide
gugggcgucagcacuuugc

SEQ ID NO: 2730312 - RNA, 19 nt, Artificial Sequence
  Description of Artificial Sequence: Synthetic oligonucleotide
gggacgcucguccaccucc

SEQ ID NO: 2730313 - RNA, 19 nt, Artificial Sequence
  Description of Artificial Sequence: Synthetic oligonucleotide
cacucccugaauuuggggu

SEQ ID NO: 2730314 - RNA, 19 nt, Artificial Sequence
  Description of Artificial Sequence: Synthetic oligonucleotide
augucggcaggcauggcga

SEQ ID NO: 2730315 - RNA, 19 nt, Artificial Sequence
  Description of Artificial Sequence: Synthetic oligonucleotide
ucagcacuuugcccagcuc

SEQ ID NO: 2730316 - RNA, 19 nt, Artificial Sequence
  Description of Artificial Sequence: Synthetic oligonucleotide
uaggcgacccgcagcgcgu

SEQ ID NO: 2730317 - RNA, 19 nt, Artificial Sequence
  Description of Artificial Sequence: Synthetic oligonucleotide
gggaaaucacccuaaacuu

SEQ ID NO: 2730318 - RNA, 19 nt, Artificial Sequence
  Description of Artificial Sequence: Synthetic oligonucleotide
gcugaugucggcaggcaug

SEQ ID NO: 2730319 - RNA, 19 nt, Artificial Sequence
  Description of Artificial Sequence: Synthetic oligonucleotide
ugcaggcucagcggcccgg

SEQ ID NO: 2730320 - RNA, 19 nt, Artificial Sequence
  Description of Artificial Sequence: Synthetic oligonucleotide
ccuaaacuucuauccuagc

SEQ ID NO: 2730321 - RNA, 19 nt, Artificial Sequence
  Description of Artificial Sequence: Synthetic oligonucleotide
agcacuuugcccagcucgu

SEQ ID NO: 2730322 - RNA, 19 nt, Artificial Sequence
  Description of Artificial Sequence: Synthetic oligonucleotide
cuggggacgcucguccacc

SEQ ID NO: 2730323 - RNA, 19 nt, Artificial Sequence
  Description of Artificial Sequence: Synthetic oligonucleotide
ugcuggggacgcucgucca

SEQ ID NO: 2730324 - RNA, 19 nt, Artificial Sequence
  Description of Artificial Sequence: Synthetic oligonucleotide
accccggcguaggcgaccc

SEQ ID NO: 2730325 - RNA, 19 nt, Artificial Sequence
  Description of Artificial Sequence: Synthetic oligonucleotide
accuccaccccggcguagg

SEQ ID NO: 2730326 - RNA, 19 nt, Artificial Sequence
  Description of Artificial Sequence: Synthetic oligonucleotide
aaaucacccuaaacuucua

SEQ ID NO: 2730327 - RNA, 19 nt, Artificial Sequence
  Description of Artificial Sequence: Synthetic oligonucleotide
gugccacucccugaauuug

SEQ ID NO: 2730328 - RNA, 19 nt, Artificial Sequence
  Description of Artificial Sequence: Synthetic oligonucleotide
ggcucagcggcccggacca

SEQ ID NO: 2730329 - RNA, 19 nt, Artificial Sequence
  Description of Artificial Sequence: Synthetic oligonucleotide
uggcugaugucggcaggca

SEQ ID NO: 2730330 - RNA, 19 nt, Artificial Sequence
  Description of Artificial Sequence: Synthetic oligonucleotide
uacuucccggagagcugcu

SEQ ID NO: 2730331 - RNA, 19 nt, Artificial Sequence
  Description of Artificial Sequence: Synthetic oligonucleotide
ggcguaggcgacccgcagc

SEQ ID NO: 2730332 - RNA, 19 nt, Artificial Sequence
  Description of Artificial Sequence: Synthetic oligonucleotide
cacccuaaacuucuauccu

SEQ ID NO: 2730333 - RNA, 19 nt, Artificial Sequence
  Description of Artificial Sequence: Synthetic oligonucleotide
ccacucccugaauuugggg

SEQ ID NO: 2730334 - RNA, 19 nt, Artificial Sequence
  Description of Artificial Sequence: Synthetic oligonucleotide
uggggacgcucguccaccu

SEQ ID NO: 2730335 - RNA, 19 nt, Artificial Sequence
  Description of Artificial Sequence: Synthetic oligonucleotide
ugucggcaggcauggcgau

SEQ ID NO: 2730336 - RNA, 19 nt, Artificial Sequence
  Description of Artificial Sequence: Synthetic oligonucleotide
cuccaccccggcguaggcg

SEQ ID NO: 2730337 - RNA, 19 nt, Artificial Sequence
  Description of Artificial Sequence: Synthetic oligonucleotide
gccacucccugaauuuggg

SEQ ID NO: 2730338 - RNA, 19 nt, Artificial Sequence
  Description of Artificial Sequence: Synthetic oligonucleotide
guccaccuccugcaggcuc

SEQ ID NO: 2730339 - RNA, 19 nt, Artificial Sequence
  Description of Artificial Sequence: Synthetic oligonucleotide
ccuacuucccggagagcug

SEQ ID NO: 2730340 - RNA, 19 nt, Artificial Sequence
  Description of Artificial Sequence: Synthetic oligonucleotide
gucagcacuuugcccagcu

SEQ ID NO: 2730341 - RNA, 19 nt, Artificial Sequence
  Description of Artificial Sequence: Synthetic oligonucleotide
gacgcucguccaccuccug

SEQ ID NO: 2730342 - RNA, 19 nt, Artificial Sequence
  Description of Artificial Sequence: Synthetic oligonucleotide
gggcgucagcacuuugccc

SEQ ID NO: 2730343 - RNA, 19 nt, Artificial Sequence
  Description of Artificial Sequence: Synthetic oligonucleotide
cugcaggcucagcggcccg

SEQ ID NO: 2730344 - RNA, 19 nt, Artificial Sequence
  Description of Artificial Sequence: Synthetic oligonucleotide
gcgucagcacuuugcccag

SEQ ID NO: 2730345 - RNA, 19 nt, Artificial Sequence
  Description of Artificial Sequence: Synthetic oligonucleotide
auggugccacucccugaau

SEQ ID NO: 2730346 - RNA, 19 nt, Artificial Sequence
  Description of Artificial Sequence: Synthetic oligonucleotide
ggugccacucccugaauuu

SEQ ID NO: 2730347 - RNA, 19 nt, Artificial Sequence
  Description of Artificial Sequence: Synthetic oligonucleotide
cagcgcgugcuggggacgc

SEQ ID NO: 2730348 - RNA, 19 nt, Artificial Sequence
  Description of Artificial Sequence: Synthetic oligonucleotide
gcuggggacgcucguccac

SEQ ID NO: 2730349 - RNA, 19 nt, Artificial Sequence
  Description of Artificial Sequence: Synthetic oligonucleotide
ggugggcgucagcacuuug

SEQ ID NO: 2730350 - RNA, 19 nt, Artificial Sequence
  Description of Artificial Sequence: Synthetic oligonucleotide
cagcggcccggaccacugg

SEQ ID NO: 2730351 - RNA, 19 nt, Artificial Sequence
  Description of Artificial Sequence: Synthetic oligonucleotide
caggcucagcggcccggac

SEQ ID NO: 2730352 - RNA, 19 nt, Artificial Sequence
  Description of Artificial Sequence: Synthetic oligonucleotide
gcucguccaccuccacccc

SEQ ID NO: 2730353 - RNA, 19 nt, Artificial Sequence
  Description of Artificial Sequence: Synthetic oligonucleotide
caccccggcguaggcgacc

SEQ ID NO: 2730354 - RNA, 19 nt, Artificial Sequence
  Description of Artificial Sequence: Synthetic oligonucleotide
gcagcgcgugcuggggacg

SEQ ID NO: 2730355 - RNA, 19 nt, Artificial Sequence
  Description of Artificial Sequence: Synthetic oligonucleotide
cccggcguaggcgacccgc

SEQ ID NO: 2730356 - RNA, 19 nt, Artificial Sequence
  Description of Artificial Sequence: Synthetic oligonucleotide
aggcgacccgcagcgcgug

SEQ ID NO: 2730357 - RNA, 19 nt, Artificial Sequence
  Description of Artificial Sequence: Synthetic oligonucleotide
cccuacuucccggagagcu

SEQ ID NO: 2730358 - RNA, 19 nt, Artificial Sequence
  Description of Artificial Sequence: Synthetic oligonucleotide
ggcccggaccacuggcuga

SEQ ID NO: 2730359 - RNA, 19 nt, Artificial Sequence
  Description of Artificial Sequence: Synthetic oligonucleotide
cgcgugcuggggacgcucg

SEQ ID NO: 2730360 - RNA, 19 nt, Artificial Sequence
  Description of Artificial Sequence: Synthetic oligonucleotide
caccuccaccccggcguag

SEQ ID NO: 2730361 - RNA, 19 nt, Artificial Sequence
  Description of Artificial Sequence: Synthetic oligonucleotide
cggaccacuggcugauguc

SEQ ID NO: 2730362 - RNA, 19 nt, Artificial Sequence
  Description of Artificial Sequence: Synthetic oligonucleotide
ggcugaugucggcaggcau

SEQ ID NO: 2730363 - RNA, 19 nt, Artificial Sequence
  Description of Artificial Sequence: Synthetic oligonucleotide
ccuccaccccggcguaggc

SEQ ID NO: 2730364 - RNA, 19 nt, Artificial Sequence
  Description of Artificial Sequence: Synthetic oligonucleotide
gcacuuugcccagcucguc

SEQ ID NO: 2730365 - RNA, 19 nt, Artificial Sequence
  Description of Artificial Sequence: Synthetic oligonucleotide
caccuccugcaggcucagc

SEQ ID NO: 2730366 - RNA, 19 nt, Artificial Sequence
  Description of Artificial Sequence: Synthetic oligonucleotide
cgcagcgcgugcuggggac

SEQ ID NO: 2730367 - RNA, 19 nt, Artificial Sequence
  Description of Artificial Sequence: Synthetic oligonucleotide
cccgcagcgcgugcugggg

SEQ ID NO: 2730368 - RNA, 19 nt, Artificial Sequence
  Description of Artificial Sequence: Synthetic oligonucleotide
agcgcgugcuggggacgcu

SEQ ID NO: 2730369 - RNA, 19 nt, Artificial Sequence
  Description of Artificial Sequence: Synthetic oligonucleotide
ggggacgcucguccaccuc

SEQ ID NO: 2730370 - RNA, 19 nt, Artificial Sequence
  Description of Artificial Sequence: Synthetic oligonucleotide
ggcgacccgcagcgcgugc

SEQ ID NO: 2730371 - RNA, 19 nt, Artificial Sequence
  Description of Artificial Sequence: Synthetic oligonucleotide
cucagcggcccggaccacu

SEQ ID NO: 2730372 - RNA, 19 nt, Artificial Sequence
  Description of Artificial Sequence: Synthetic oligonucleotide
gcaggcucagcggcccgga

SEQ ID NO: 2730373 - RNA, 19 nt, Artificial Sequence
  Description of Artificial Sequence: Synthetic oligonucleotide
ccggcguaggcgacccgca

SEQ ID NO: 2730374 - RNA, 19 nt, Artificial Sequence
  Description of Artificial Sequence: Synthetic oligonucleotide
cggcguaggcgacccgcag

SEQ ID NO: 2730375 - RNA, 19 nt, Artificial Sequence
  Description of Artificial Sequence: Synthetic oligonucleotide
ccggaccacuggcugaugu

SEQ ID NO: 2730376 - RNA, 19 nt, Artificial Sequence
  Description of Artificial Sequence: Synthetic oligonucleotide
ccaccuccugcaggcucag

SEQ ID NO: 2730377 - RNA, 19 nt, Artificial Sequence
  Description of Artificial Sequence: Synthetic oligonucleotide
gcgcgugcuggggacgcuc

SEQ ID NO: 2730378 - RNA, 19 nt, Artificial Sequence
  Description of Artificial Sequence: Synthetic oligonucleotide
ccaccccggcguaggcgac

SEQ ID NO: 2730379 - RNA, 19 nt, Artificial Sequence
  Description of Artificial Sequence: Synthetic oligonucleotide
ggacgcucguccaccuccu

SEQ ID NO: 2730380 - RNA, 19 nt, Artificial Sequence
  Description of Artificial Sequence: Synthetic oligonucleotide
ccccuacuucccggagagc

SEQ ID NO: 2730381 - RNA, 19 nt, Artificial Sequence
  Description of Artificial Sequence: Synthetic oligonucleotide
cgacccgcagcgcgugcug

SEQ ID NO: 2730382 - RNA, 19 nt, Artificial Sequence
  Description of Artificial Sequence: Synthetic oligonucleotide
cgucagcacuuugcccagc

SEQ ID NO: 2730383 - RNA, 19 nt, Artificial Sequence
  Description of Artificial Sequence: Synthetic oligonucleotide
cguaggcgacccgcagcgc

SEQ ID NO: 2730384 - RNA, 19 nt, Artificial Sequence
  Description of Artificial Sequence: Synthetic oligonucleotide
ccgcagcgcgugcugggga

SEQ ID NO: 2730385 - RNA, 19 nt, Artificial Sequence
  Description of Artificial Sequence: Synthetic oligonucleotide
gcgugcuggggacgcucgu

SEQ ID NO: 2730386 - RNA, 19 nt, Artificial Sequence
  Description of Artificial Sequence: Synthetic oligonucleotide
gcccggaccacuggcugau

SEQ ID NO: 2730387 - RNA, 19 nt, Artificial Sequence
  Description of Artificial Sequence: Synthetic oligonucleotide
ccccggcguaggcgacccg

SEQ ID NO: 2730388 - RNA, 19 nt, Artificial Sequence
  Description of Artificial Sequence: Synthetic oligonucleotide
ccaccuccaccccggcgua

SEQ ID NO: 2730389 - RNA, 19 nt, Artificial Sequence
  Description of Artificial Sequence: Synthetic oligonucleotide
gcggcccggaccacuggcu

SEQ ID NO: 2730390 - RNA, 19 nt, Artificial Sequence
  Description of Artificial Sequence: Synthetic oligonucleotide
gcucagcggcccggaccac

SEQ ID NO: 2730391 - RNA, 19 nt, Artificial Sequence
  Description of Artificial Sequence: Synthetic oligonucleotide
cccggaccacuggcugaug

SEQ ID NO: 2730392 - RNA, 19 nt, Artificial Sequence
  Description of Artificial Sequence: Synthetic oligonucleotide
cguccaccuccugcaggcu

SEQ ID NO: 2730393 - RNA, 19 nt, Artificial Sequence
  Description of Artificial Sequence: Synthetic oligonucleotide
auggcaauuacucaaauac

SEQ ID NO: 2730394 - RNA, 19 nt, Artificial Sequence
  Description of Artificial Sequence: Synthetic oligonucleotide
auauuaaucauuaauaguc

SEQ ID NO: 2730395 - RNA, 19 nt, Artificial Sequence
  Description of Artificial Sequence: Synthetic oligonucleotide
uauauauauauauauauuc

SEQ ID NO: 2730396 - RNA, 19 nt, Artificial Sequence
  Description of Artificial Sequence: Synthetic oligonucleotide
aaacauguugcuuaauacg

SEQ ID NO: 2730397 - RNA, 19 nt, Artificial Sequence
  Description of Artificial Sequence: Synthetic oligonucleotide
uaauauuaaucauuaauag

SEQ ID NO: 2730398 - RNA, 19 nt, Artificial Sequence
  Description of Artificial Sequence: Synthetic oligonucleotide
uacucaaauacgaaaaggg

SEQ ID NO: 2730399 - RNA, 19 nt, Artificial Sequence
  Description of Artificial Sequence: Synthetic oligonucleotide
uuaauauuaaucauuaaua

SEQ ID NO: 2730400 - RNA, 19 nt, Artificial Sequence
  Description of Artificial Sequence: Synthetic oligonucleotide
uauauauauauauauauau

SEQ ID NO: 2730401 - RNA, 19 nt, Artificial Sequence
  Description of Artificial Sequence: Synthetic oligonucleotide
uauauauauauauauuccc

SEQ ID NO: 2730402 - RNA, 19 nt, Artificial Sequence
  Description of Artificial Sequence: Synthetic oligonucleotide
aauauuaaucauuaauagu

SEQ ID NO: 2730403 - RNA, 19 nt, Artificial Sequence
  Description of Artificial Sequence: Synthetic oligonucleotide
auuauauaccuucauuagc

SEQ ID NO: 2730404 - RNA, 19 nt, Artificial Sequence
  Description of Artificial Sequence: Synthetic oligonucleotide
uuauauaccuucauuagca

SEQ ID NO: 2730405 - RNA, 19 nt, Artificial Sequence
  Description of Artificial Sequence: Synthetic oligonucleotide
uguaguaugaagguguucg

SEQ ID NO: 2730406 - RNA, 19 nt, Artificial Sequence
  Description of Artificial Sequence: Synthetic oligonucleotide
uuuuauuuagagaagcaca

SEQ ID NO: 2730407 - RNA, 19 nt, Artificial Sequence
  Description of Artificial Sequence: Synthetic oligonucleotide
auauauauauauauauucc

SEQ ID NO: 2730408 - RNA, 19 nt, Artificial Sequence
  Description of Artificial Sequence: Synthetic oligonucleotide
auuaauagucaccaucccc

SEQ ID NO: 2730409 - RNA, 19 nt, Artificial Sequence
  Description of Artificial Sequence: Synthetic oligonucleotide
aacauguugcuuaauacgc

SEQ ID NO: 2730410 - RNA, 19 nt, Artificial Sequence
  Description of Artificial Sequence: Synthetic oligonucleotide
ucauuaauagucaccaucc

SEQ ID NO: 2730411 - RNA, 19 nt, Artificial Sequence
  Description of Artificial Sequence: Synthetic oligonucleotide
auauauuccccuuacauug

SEQ ID NO: 2730412 - RNA, 19 nt, Artificial Sequence
  Description of Artificial Sequence: Synthetic oligonucleotide
uuaccucuguaaaagaugg

SEQ ID NO: 2730413 - RNA, 19 nt, Artificial Sequence
  Description of Artificial Sequence: Synthetic oligonucleotide
uaaaagauggcaauuacuc

SEQ ID NO: 2730414 - RNA, 19 nt, Artificial Sequence
  Description of Artificial Sequence: Synthetic oligonucleotide
aaauuuaccucuguaaaag

SEQ ID NO: 2730415 - RNA, 19 nt, Artificial Sequence
  Description of Artificial Sequence: Synthetic oligonucleotide
auauauauauauauucccc

SEQ ID NO: 2730416 - RNA, 19 nt, Artificial Sequence
  Description of Artificial Sequence: Synthetic oligonucleotide
acauuguuaauauuaauca

SEQ ID NO: 2730417 - RNA, 19 nt, Artificial Sequence
  Description of Artificial Sequence: Synthetic oligonucleotide
aucauuaauagucaccauc

SEQ ID NO: 2730418 - RNA, 19 nt, Artificial Sequence
  Description of Artificial Sequence: Synthetic oligonucleotide
uuaauagucaccauccccu

SEQ ID NO: 2730419 - RNA, 19 nt, Artificial Sequence
  Description of Artificial Sequence: Synthetic oligonucleotide
uuuagagaagcacacacac

SEQ ID NO: 2730420 - RNA, 19 nt, Artificial Sequence
  Description of Artificial Sequence: Synthetic oligonucleotide
uacauauauauauauauau

SEQ ID NO: 2730421 - RNA, 19 nt, Artificial Sequence
  Description of Artificial Sequence: Synthetic oligonucleotide
ucaaauacgaaaagggaac

SEQ ID NO: 2730422 - RNA, 19 nt, Artificial Sequence
  Description of Artificial Sequence: Synthetic oligonucleotide
uuaaucauuaauagucacc

SEQ ID NO: 2730423 - RNA, 19 nt, Artificial Sequence
  Description of Artificial Sequence: Synthetic oligonucleotide
auuaaucauuaauagucac

SEQ ID NO: 2730424 - RNA, 19 nt, Artificial Sequence
  Description of Artificial Sequence: Synthetic oligonucleotide
auauauauauuccccuuac

SEQ ID NO: 2730425 - RNA, 19 nt, Artificial Sequence
  Description of Artificial Sequence: Synthetic oligonucleotide
aguaugaagguguucgucg

SEQ ID NO: 2730426 - RNA, 19 nt, Artificial Sequence
  Description of Artificial Sequence: Synthetic oligonucleotide
auugcgaagaaacauguug

SEQ ID NO: 2730427 - RNA, 19 nt, Artificial Sequence
  Description of Artificial Sequence: Synthetic oligonucleotide
uauauauauauauuccccu

SEQ ID NO: 2730428 - RNA, 19 nt, Artificial Sequence
  Description of Artificial Sequence: Synthetic oligonucleotide
uaaucauuaauagucacca

SEQ ID NO: 2730429 - RNA, 19 nt, Artificial Sequence
  Description of Artificial Sequence: Synthetic oligonucleotide
uguacagucaaguuacacc

SEQ ID NO: 2730430 - RNA, 19 nt, Artificial Sequence
  Description of Artificial Sequence: Synthetic oligonucleotide
uauuaaucauuaauaguca

SEQ ID NO: 2730431 - RNA, 19 nt, Artificial Sequence
  Description of Artificial Sequence: Synthetic oligonucleotide
augaacaucacauuguuaa

SEQ ID NO: 2730432 - RNA, 19 nt, Artificial Sequence
  Description of Artificial Sequence: Synthetic oligonucleotide
aauuuucccugucagucuc

SEQ ID NO: 2730433 - RNA, 19 nt, Artificial Sequence
  Description of Artificial Sequence: Synthetic oligonucleotide
uugguuucgaaauuuaccu

SEQ ID NO: 2730434 - RNA, 19 nt, Artificial Sequence
  Description of Artificial Sequence: Synthetic oligonucleotide
guuucaggaagucagacug

SEQ ID NO: 2730435 - RNA, 19 nt, Artificial Sequence
  Description of Artificial Sequence: Synthetic oligonucleotide
uauaccuucauuagcaguc

SEQ ID NO: 2730436 - RNA, 19 nt, Artificial Sequence
  Description of Artificial Sequence: Synthetic oligonucleotide
ucugaauuuucccugucag

SEQ ID NO: 2730437 - RNA, 19 nt, Artificial Sequence
  Description of Artificial Sequence: Synthetic oligonucleotide
aaucugccuuuccaaagcc

SEQ ID NO: 2730438 - RNA, 19 nt, Artificial Sequence
  Description of Artificial Sequence: Synthetic oligonucleotide
auugcaacuggacauugcg

SEQ ID NO: 2730439 - RNA, 19 nt, Artificial Sequence
  Description of Artificial Sequence: Synthetic oligonucleotide
uuuaccucuguaaaagaug

SEQ ID NO: 2730440 - RNA, 19 nt, Artificial Sequence
  Description of Artificial Sequence: Synthetic oligonucleotide
cacauuguuaauauuaauc

SEQ ID NO: 2730441 - RNA, 19 nt, Artificial Sequence
  Description of Artificial Sequence: Synthetic oligonucleotide
aagcgaguccaguagaguc

SEQ ID NO: 2730442 - RNA, 19 nt, Artificial Sequence
  Description of Artificial Sequence: Synthetic oligonucleotide
auugguuucgaaauuuacc

SEQ ID NO: 2730443 - RNA, 19 nt, Artificial Sequence
  Description of Artificial Sequence: Synthetic oligonucleotide
aaggucuguaguaugaagg

SEQ ID NO: 2730444 - RNA, 19 nt, Artificial Sequence
  Description of Artificial Sequence: Synthetic oligonucleotide
auagucaccauccccugcc

SEQ ID NO: 2730445 - RNA, 19 nt, Artificial Sequence
  Description of Artificial Sequence: Synthetic oligonucleotide
uuacucaaauacgaaaagg

SEQ ID NO: 2730446 - RNA, 19 nt, Artificial Sequence
  Description of Artificial Sequence: Synthetic oligonucleotide
cauuauauaccuucauuag

SEQ ID NO: 2730447 - RNA, 19 nt, Artificial Sequence
  Description of Artificial Sequence: Synthetic oligonucleotide
caggaagucagacugagcc

SEQ ID NO: 2730448 - RNA, 19 nt, Artificial Sequence
  Description of Artificial Sequence: Synthetic oligonucleotide
uaucugguuggauaagugg

SEQ ID NO: 2730449 - RNA, 19 nt, Artificial Sequence
  Description of Artificial Sequence: Synthetic oligonucleotide
aauagucaccauccccugc

SEQ ID NO: 2730450 - RNA, 19 nt, Artificial Sequence
  Description of Artificial Sequence: Synthetic oligonucleotide
uguaugaacaucacauugu

SEQ ID NO: 2730451 - RNA, 19 nt, Artificial Sequence
  Description of Artificial Sequence: Synthetic oligonucleotide
uuguuaauauuaaucauua

SEQ ID NO: 2730452 - RNA, 19 nt, Artificial Sequence
  Description of Artificial Sequence: Synthetic oligonucleotide
gaaacauguugcuuaauac

SEQ ID NO: 2730453 - RNA, 19 nt, Artificial Sequence
  Description of Artificial Sequence: Synthetic oligonucleotide
aauacgaaaagggaacaug

SEQ ID NO: 2730454 - RNA, 19 nt, Artificial Sequence
  Description of Artificial Sequence: Synthetic oligonucleotide
agugguugaguacuuguac

SEQ ID NO: 2730455 - RNA, 19 nt, Artificial Sequence
  Description of Artificial Sequence: Synthetic oligonucleotide
auguaugaacaucacauug

SEQ ID NO: 2730456 - RNA, 19 nt, Artificial Sequence
  Description of Artificial Sequence: Synthetic oligonucleotide
uugcgaagaaacauguugc

SEQ ID NO: 2730457 - RNA, 19 nt, Artificial Sequence
  Description of Artificial Sequence: Synthetic oligonucleotide
auuacucaaauacgaaaag

SEQ ID NO: 2730458 - RNA, 19 nt, Artificial Sequence
  Description of Artificial Sequence: Synthetic oligonucleotide
aauuacucaaauacgaaaa

SEQ ID NO: 2730459 - RNA, 19 nt, Artificial Sequence
  Description of Artificial Sequence: Synthetic oligonucleotide
cuucguuucaggaagucag

SEQ ID NO: 2730460 - RNA, 19 nt, Artificial Sequence
  Description of Artificial Sequence: Synthetic oligonucleotide
ucaaguuacaccugcuuug

SEQ ID NO: 2730461 - RNA, 19 nt, Artificial Sequence
  Description of Artificial Sequence: Synthetic oligonucleotide
uggcaauuacucaaauacg

SEQ ID NO: 2730462 - RNA, 19 nt, Artificial Sequence
  Description of Artificial Sequence: Synthetic oligonucleotide
uguaaaagauggcaauuac

SEQ ID NO: 2730463 - RNA, 19 nt, Artificial Sequence
  Description of Artificial Sequence: Synthetic oligonucleotide
cacacacacacauacauac

SEQ ID NO: 2730464 - RNA, 19 nt, Artificial Sequence
  Description of Artificial Sequence: Synthetic oligonucleotide
uacauacauauauauauau

SEQ ID NO: 2730465 - RNA, 19 nt, Artificial Sequence
  Description of Artificial Sequence: Synthetic oligonucleotide
cuggacauugcgaagaaac

SEQ ID NO: 2730466 - RNA, 19 nt, Artificial Sequence
  Description of Artificial Sequence: Synthetic oligonucleotide
gaagcacacacacacacac

SEQ ID NO: 2730467 - RNA, 19 nt, Artificial Sequence
  Description of Artificial Sequence: Synthetic oligonucleotide
caucugaaagccuugggag

SEQ ID NO: 2730468 - RNA, 19 nt, Artificial Sequence
  Description of Artificial Sequence: Synthetic oligonucleotide
uauauuccccuuacauugg

SEQ ID NO: 2730469 - RNA, 19 nt, Artificial Sequence
  Description of Artificial Sequence: Synthetic oligonucleotide
gaaaagggaacauguauga

SEQ ID NO: 2730470 - RNA, 19 nt, Artificial Sequence
  Description of Artificial Sequence: Synthetic oligonucleotide
ugaauuuucccugucaguc

SEQ ID NO: 2730471 - RNA, 19 nt, Artificial Sequence
  Description of Artificial Sequence: Synthetic oligonucleotide
aauuuaccucuguaaaaga

SEQ ID NO: 2730472 - RNA, 19 nt, Artificial Sequence
  Description of Artificial Sequence: Synthetic oligonucleotide
guuaauauuaaucauuaau

SEQ ID NO: 2730473 - RNA, 19 nt, Artificial Sequence
  Description of Artificial Sequence: Synthetic oligonucleotide
aagguguucgucgauuuuc

SEQ ID NO: 2730474 - RNA, 19 nt, Artificial Sequence
  Description of Artificial Sequence: Synthetic oligonucleotide
ugaaucugccuuuccaaag

SEQ ID NO: 2730475 - RNA, 19 nt, Artificial Sequence
  Description of Artificial Sequence: Synthetic oligonucleotide
ucgaaauuuaccucuguaa

SEQ ID NO: 2730476 - RNA, 19 nt, Artificial Sequence
  Description of Artificial Sequence: Synthetic oligonucleotide
uauauauuccccuuacauu

SEQ ID NO: 2730477 - RNA, 19 nt, Artificial Sequence
  Description of Artificial Sequence: Synthetic oligonucleotide
cauauauauauauauauau

SEQ ID NO: 2730478 - RNA, 19 nt, Artificial Sequence
  Description of Artificial Sequence: Synthetic oligonucleotide
uauauaccuucauuagcag

SEQ ID NO: 2730479 - RNA, 19 nt, Artificial Sequence
  Description of Artificial Sequence: Synthetic oligonucleotide
acauguaugaacaucacau

SEQ ID NO: 2730480 - RNA, 19 nt, Artificial Sequence
  Description of Artificial Sequence: Synthetic oligonucleotide
cauguugcuuaauacgccc

SEQ ID NO: 2730481 - RNA, 19 nt, Artificial Sequence
  Description of Artificial Sequence: Synthetic oligonucleotide
gagaagcacacacacacac

SEQ ID NO: 2730482 - RNA, 19 nt, Artificial Sequence
  Description of Artificial Sequence: Synthetic oligonucleotide
uauauauauuccccuuaca

SEQ ID NO: 2730483 - RNA, 19 nt, Artificial Sequence
  Description of Artificial Sequence: Synthetic oligonucleotide
cacacacacacacacauac

SEQ ID NO: 2730484 - RNA, 19 nt, Artificial Sequence
  Description of Artificial Sequence: Synthetic oligonucleotide
gaaucugccuuuccaaagc

SEQ ID NO: 2730485 - RNA, 19 nt, Artificial Sequence
  Description of Artificial Sequence: Synthetic oligonucleotide
uucccugucagucucuccc

SEQ ID NO: 2730486 - RNA, 19 nt, Artificial Sequence
  Description of Artificial Sequence: Synthetic oligonucleotide
uacuuguacagucaaguua

SEQ ID NO: 2730487 - RNA, 19 nt, Artificial Sequence
  Description of Artificial Sequence: Synthetic oligonucleotide
uuugaaucugccuuuccaa

SEQ ID NO: 2730488 - RNA, 19 nt, Artificial Sequence
  Description of Artificial Sequence: Synthetic oligonucleotide
ugagaagugguugaguacu

SEQ ID NO: 2730489 - RNA, 19 nt, Artificial Sequence
  Description of Artificial Sequence: Synthetic oligonucleotide
cauacauauauauauauau

SEQ ID NO: 2730490 - RNA, 19 nt, Artificial Sequence
  Description of Artificial Sequence: Synthetic oligonucleotide
ugcuuaauacgcccuaugu

SEQ ID NO: 2730491 - RNA, 19 nt, Artificial Sequence
  Description of Artificial Sequence: Synthetic oligonucleotide
guuacaccugcuuugaauc

SEQ ID NO: 2730492 - RNA, 19 nt, Artificial Sequence
  Description of Artificial Sequence: Synthetic oligonucleotide
uggauaaguggguugagaa

SEQ ID NO: 2730493 - RNA, 19 nt, Artificial Sequence
  Description of Artificial Sequence: Synthetic oligonucleotide
ucgauuuucucuuggagua

SEQ ID NO: 2730494 - RNA, 19 nt, Artificial Sequence
  Description of Artificial Sequence: Synthetic oligonucleotide
agucucucccagaugaucc

SEQ ID NO: 2730495 - RNA, 19 nt, Artificial Sequence
  Description of Artificial Sequence: Synthetic oligonucleotide
gucagagccuccuaucugg

SEQ ID NO: 2730496 - RNA, 19 nt, Artificial Sequence
  Description of Artificial Sequence: Synthetic oligonucleotide
ugcuauugcaacuggacau

SEQ ID NO: 2730497 - RNA, 19 nt, Artificial Sequence
  Description of Artificial Sequence: Synthetic oligonucleotide
gaaauuuaccucuguaaaa

SEQ ID NO: 2730498 - RNA, 19 nt, Artificial Sequence
  Description of Artificial Sequence: Synthetic oligonucleotide
ugcaacuggacauugcgaa

SEQ ID NO: 2730499 - RNA, 19 nt, Artificial Sequence
  Description of Artificial Sequence: Synthetic oligonucleotide
uugcuauugcaacuggaca

SEQ ID NO: 2730500 - RNA, 19 nt, Artificial Sequence
  Description of Artificial Sequence: Synthetic oligonucleotide
ugcucuuuugcuauugcaa

SEQ ID NO: 2730501 - RNA, 19 nt, Artificial Sequence
  Description of Artificial Sequence: Synthetic oligonucleotide
gaugugcuucuccaacucg

SEQ ID NO: 2730502 - RNA, 19 nt, Artificial Sequence
  Description of Artificial Sequence: Synthetic oligonucleotide
aucugguuggauaaguggg

SEQ ID NO: 2730503 - RNA, 19 nt, Artificial Sequence
  Description of Artificial Sequence: Synthetic oligonucleotide
guagaagcgaguccaguag

SEQ ID NO: 2730504 - RNA, 19 nt, Artificial Sequence
  Description of Artificial Sequence: Synthetic oligonucleotide
ucccagaugauccugggau

SEQ ID NO: 2730505 - RNA, 19 nt, Artificial Sequence
  Description of Artificial Sequence: Synthetic oligonucleotide
uucgucgauuuucucuugg

SEQ ID NO: 2730506 - RNA, 19 nt, Artificial Sequence
  Description of Artificial Sequence: Synthetic oligonucleotide
cucaaauacgaaaagggaa

SEQ ID NO: 2730507 - RNA, 19 nt, Artificial Sequence
  Description of Artificial Sequence: Synthetic oligonucleotide
uugaguacuuguacaguca

SEQ ID NO: 2730508 - RNA, 19 nt, Artificial Sequence
  Description of Artificial Sequence: Synthetic oligonucleotide
agagccuccuaucugguug

SEQ ID NO: 2730509 - RNA, 19 nt, Artificial Sequence
  Description of Artificial Sequence: Synthetic oligonucleotide
ugugcuucuccaacucggg

SEQ ID NO: 2730510 - RNA, 19 nt, Artificial Sequence
  Description of Artificial Sequence: Synthetic oligonucleotide
gacauugcgaagaaacaug

SEQ ID NO: 2730511 - RNA, 19 nt, Artificial Sequence
  Description of Artificial Sequence: Synthetic oligonucleotide
acgaaaagggaacauguau

SEQ ID NO: 2730512 - RNA, 19 nt, Artificial Sequence
  Description of Artificial Sequence: Synthetic oligonucleotide
guugaguacuuguacaguc

SEQ ID NO: 2730513 - RNA, 19 nt, Artificial Sequence
  Description of Artificial Sequence: Synthetic oligonucleotide
auauauauauauuccccuu

SEQ ID NO: 2730514 - RNA, 19 nt, Artificial Sequence
  Description of Artificial Sequence: Synthetic oligonucleotide
ugcuucuccaacucgggug

SEQ ID NO: 2730515 - RNA, 19 nt, Artificial Sequence
  Description of Artificial Sequence: Synthetic oligonucleotide
uuagagaagcacacacaca

SEQ ID NO: 2730516 - RNA, 19 nt, Artificial Sequence
  Description of Artificial Sequence: Synthetic oligonucleotide
ucugaaagccuugggaggc

SEQ ID NO: 2730517 - RNA, 19 nt, Artificial Sequence
  Description of Artificial Sequence: Synthetic oligonucleotide
auauaccuucauuagcagu

SEQ ID NO: 2730518 - RNA, 19 nt, Artificial Sequence
  Description of Artificial Sequence: Synthetic oligonucleotide
ugaguacuuguacagucaa

SEQ ID NO: 2730519 - RNA, 19 nt, Artificial Sequence
  Description of Artificial Sequence: Synthetic oligonucleotide
gucagucucucccagauga

SEQ ID NO: 2730520 - RNA, 19 nt, Artificial Sequence
  Description of Artificial Sequence: Synthetic oligonucleotide
acauguugcuuaauacgcc

SEQ ID NO: 2730521 - RNA, 19 nt, Artificial Sequence
  Description of Artificial Sequence: Synthetic oligonucleotide
ugagaaggucuguaguaug

SEQ ID NO: 2730522 - RNA, 19 nt, Artificial Sequence
  Description of Artificial Sequence: Synthetic oligonucleotide
agcacacacacacacacau

SEQ ID NO: 2730523 - RNA, 19 nt, Artificial Sequence
  Description of Artificial Sequence: Synthetic oligonucleotide
uucgaaauuuaccucugua

SEQ ID NO: 2730524 - RNA, 19 nt, Artificial Sequence
  Description of Artificial Sequence: Synthetic oligonucleotide
ucugguuggauaagugggu

SEQ ID NO: 2730525 - RNA, 19 nt, Artificial Sequence
  Description of Artificial Sequence: Synthetic oligonucleotide
agagcuucccgucugaauu

SEQ ID NO: 2730526 - RNA, 19 nt, Artificial Sequence
  Description of Artificial Sequence: Synthetic oligonucleotide
uuggaguagaagcgagucc

SEQ ID NO: 2730527 - RNA, 19 nt, Artificial Sequence
  Description of Artificial Sequence: Synthetic oligonucleotide
cauugguuucgaaauuuac

SEQ ID NO: 2730528 - RNA, 19 nt, Artificial Sequence
  Description of Artificial Sequence: Synthetic oligonucleotide
aguuacaccugcuuugaau

SEQ ID NO: 2730529 - RNA, 19 nt, Artificial Sequence
  Description of Artificial Sequence: Synthetic oligonucleotide
auacgaaaagggaacaugu

SEQ ID NO: 2730530 - RNA, 19 nt, Artificial Sequence
  Description of Artificial Sequence: Synthetic oligonucleotide
auauauauauauauauaua

SEQ ID NO: 2730531 - RNA, 19 nt, Artificial Sequence
  Description of Artificial Sequence: Synthetic oligonucleotide
auauauauauauauauauu

SEQ ID NO: 2730532 - RNA, 19 nt, Artificial Sequence
  Description of Artificial Sequence: Synthetic oligonucleotide
uguucgucgauuuucucuu

SEQ ID NO: 2730533 - RNA, 19 nt, Artificial Sequence
  Description of Artificial Sequence: Synthetic oligonucleotide
uauugcaacuggacauugc

SEQ ID NO: 2730534 - RNA, 19 nt, Artificial Sequence
  Description of Artificial Sequence: Synthetic oligonucleotide
guacagucaaguuacaccu

SEQ ID NO: 2730535 - RNA, 19 nt, Artificial Sequence
  Description of Artificial Sequence: Synthetic oligonucleotide
uguuaauauuaaucauuaa

SEQ ID NO: 2730536 - RNA, 19 nt, Artificial Sequence
  Description of Artificial Sequence: Synthetic oligonucleotide
cauuaauagucaccauccc

SEQ ID NO: 2730537 - RNA, 19 nt, Artificial Sequence
  Description of Artificial Sequence: Synthetic oligonucleotide
cuucccgucugaauuuucc

SEQ ID NO: 2730538 - RNA, 19 nt, Artificial Sequence
  Description of Artificial Sequence: Synthetic oligonucleotide
uuauuuagagaagcacaca

SEQ ID NO: 2730539 - RNA, 19 nt, Artificial Sequence
  Description of Artificial Sequence: Synthetic oligonucleotide
cugggaucaucugaaagcc

SEQ ID NO: 2730540 - RNA, 19 nt, Artificial Sequence
  Description of Artificial Sequence: Synthetic oligonucleotide
aaucauuaauagucaccau

SEQ ID NO: 2730541 - RNA, 19 nt, Artificial Sequence
  Description of Artificial Sequence: Synthetic oligonucleotide
caauuacucaaauacgaaa

SEQ ID NO: 2730542 - RNA, 19 nt, Artificial Sequence
  Description of Artificial Sequence: Synthetic oligonucleotide
aggucuguaguaugaaggu

SEQ ID NO: 2730543 - RNA, 19 nt, Artificial Sequence
  Description of Artificial Sequence: Synthetic oligonucleotide
uagaagcgaguccaguaga

SEQ ID NO: 2730544 - RNA, 19 nt, Artificial Sequence
  Description of Artificial Sequence: Synthetic oligonucleotide
ggacacauuauauaccuuc

SEQ ID NO: 2730545 - RNA, 19 nt, Artificial Sequence
  Description of Artificial Sequence: Synthetic oligonucleotide
accucuguaaaagauggca

SEQ ID NO: 2730546 - RNA, 19 nt, Artificial Sequence
  Description of Artificial Sequence: Synthetic oligonucleotide
uugcuuaauacgcccuaug

SEQ ID NO: 2730547 - RNA, 19 nt, Artificial Sequence
  Description of Artificial Sequence: Synthetic oligonucleotide
uugagaagugguugaguac

SEQ ID NO: 2730548 - RNA, 19 nt, Artificial Sequence
  Description of Artificial Sequence: Synthetic oligonucleotide
aaagccuugggaggccacg

SEQ ID NO: 2730549 - RNA, 19 nt, Artificial Sequence
  Description of Artificial Sequence: Synthetic oligonucleotide
ucauuagcagucagagccu

SEQ ID NO: 2730550 - RNA, 19 nt, Artificial Sequence
  Description of Artificial Sequence: Synthetic oligonucleotide
ugcgaagaaacauguugcu

SEQ ID NO: 2730551 - RNA, 19 nt, Artificial Sequence
  Description of Artificial Sequence: Synthetic oligonucleotide
ucugcucuuuugcuauugc

SEQ ID NO: 2730552 - RNA, 19 nt, Artificial Sequence
  Description of Artificial Sequence: Synthetic oligonucleotide
uggguugagaagugguuga

SEQ ID NO: 2730553 - RNA, 19 nt, Artificial Sequence
  Description of Artificial Sequence: Synthetic oligonucleotide
acucaaauacgaaaaggga

SEQ ID NO: 2730554 - RNA, 19 nt, Artificial Sequence
  Description of Artificial Sequence: Synthetic oligonucleotide
aguagaagcgaguccagua

SEQ ID NO: 2730555 - RNA, 19 nt, Artificial Sequence
  Description of Artificial Sequence: Synthetic oligonucleotide
aaauacgaaaagggaacau

SEQ ID NO: 2730556 - RNA, 19 nt, Artificial Sequence
  Description of Artificial Sequence: Synthetic oligonucleotide
uccccuuacauugguuucg

SEQ ID NO: 2730557 - RNA, 19 nt, Artificial Sequence
  Description of Artificial Sequence: Synthetic oligonucleotide
cuucauuagcagucagagc

SEQ ID NO: 2730558 - RNA, 19 nt, Artificial Sequence
  Description of Artificial Sequence: Synthetic oligonucleotide
uuucgaaauuuaccucugu

SEQ ID NO: 2730559 - RNA, 19 nt, Artificial Sequence
  Description of Artificial Sequence: Synthetic oligonucleotide
uuucaggaagucagacuga

SEQ ID NO: 2730560 - RNA, 19 nt, Artificial Sequence
  Description of Artificial Sequence: Synthetic oligonucleotide
ggaacauguaugaacauca

SEQ ID NO: 2730561 - RNA, 19 nt, Artificial Sequence
  Description of Artificial Sequence: Synthetic oligonucleotide
acauauauauauauauaua

SEQ ID NO: 2730562 - RNA, 19 nt, Artificial Sequence
  Description of Artificial Sequence: Synthetic oligonucleotide
uugcaacuggacauugcga

SEQ ID NO: 2730563 - RNA, 19 nt, Artificial Sequence
  Description of Artificial Sequence: Synthetic oligonucleotide
cuuugaaucugccuuucca

SEQ ID NO: 2730564 - RNA, 19 nt, Artificial Sequence
  Description of Artificial Sequence: Synthetic oligonucleotide
ucacauuguuaauauuaau

SEQ ID NO: 2730565 - RNA, 19 nt, Artificial Sequence
  Description of Artificial Sequence: Synthetic oligonucleotide
auuccccuuacauugguuu

SEQ ID NO: 2730566 - RNA, 19 nt, Artificial Sequence
  Description of Artificial Sequence: Synthetic oligonucleotide
gucaccauccccugccagg

SEQ ID NO: 2730567 - RNA, 19 nt, Artificial Sequence
  Description of Artificial Sequence: Synthetic oligonucleotide
uucguuucaggaagucaga

SEQ ID NO: 2730568 - RNA, 19 nt, Artificial Sequence
  Description of Artificial Sequence: Synthetic oligonucleotide
ucuguaaaagauggcaauu

SEQ ID NO: 2730569 - RNA, 19 nt, Artificial Sequence
  Description of Artificial Sequence: Synthetic oligonucleotide
cuuggaguagaagcgaguc

SEQ ID NO: 2730570 - RNA, 19 nt, Artificial Sequence
  Description of Artificial Sequence: Synthetic oligonucleotide
gagccuccuaucugguugg

SEQ ID NO: 2730571 - RNA, 19 nt, Artificial Sequence
  Description of Artificial Sequence: Synthetic oligonucleotide
uuacaccugcuuugaaucu

SEQ ID NO: 2730572 - RNA, 19 nt, Artificial Sequence
  Description of Artificial Sequence: Synthetic oligonucleotide
uuacauugguuucgaaauu

SEQ ID NO: 2730573 - RNA, 19 nt, Artificial Sequence
  Description of Artificial Sequence: Synthetic oligonucleotide
ugguuggauaaguggguug

SEQ ID NO: 2730574 - RNA, 19 nt, Artificial Sequence
  Description of Artificial Sequence: Synthetic oligonucleotide
uacgaaaagggaacaugua

SEQ ID NO: 2730575 - RNA, 19 nt, Artificial Sequence
  Description of Artificial Sequence: Synthetic oligonucleotide
ucucccagaugauccuggg

SEQ ID NO: 2730576 - RNA, 19 nt, Artificial Sequence
  Description of Artificial Sequence: Synthetic oligonucleotide
uucccgucugaauuuuccc

SEQ ID NO: 2730577 - RNA, 19 nt, Artificial Sequence
  Description of Artificial Sequence: Synthetic oligonucleotide
auacauauauauauauaua

SEQ ID NO: 2730578 - RNA, 19 nt, Artificial Sequence
  Description of Artificial Sequence: Synthetic oligonucleotide
gacacauuauauaccuuca

SEQ ID NO: 2730579 - RNA, 19 nt, Artificial Sequence
  Description of Artificial Sequence: Synthetic oligonucleotide
uguugcuuaauacgcccua

SEQ ID NO: 2730580 - RNA, 19 nt, Artificial Sequence
  Description of Artificial Sequence: Synthetic oligonucleotide
uacauugguuucgaaauuu

SEQ ID NO: 2730581 - RNA, 19 nt, Artificial Sequence
  Description of Artificial Sequence: Synthetic oligonucleotide
aaaagggaacauguaugaa

SEQ ID NO: 2730582 - RNA, 19 nt, Artificial Sequence
  Description of Artificial Sequence: Synthetic oligonucleotide
auuuaccucuguaaaagau

SEQ ID NO: 2730583 - RNA, 19 nt, Artificial Sequence
  Description of Artificial Sequence: Synthetic oligonucleotide
ggaagucagacugagccag

SEQ ID NO: 2730584 - RNA, 19 nt, Artificial Sequence
  Description of Artificial Sequence: Synthetic oligonucleotide
ugguuucgaaauuuaccuc

SEQ ID NO: 2730585 - RNA, 19 nt, Artificial Sequence
  Description of Artificial Sequence: Synthetic oligonucleotide
ggcaauuacucaaauacga

SEQ ID NO: 2730586 - RNA, 19 nt, Artificial Sequence
  Description of Artificial Sequence: Synthetic oligonucleotide
gauggcaauuacucaaaua

SEQ ID NO: 2730587 - RNA, 19 nt, Artificial Sequence
  Description of Artificial Sequence: Synthetic oligonucleotide
acauugcgaagaaacaugu

SEQ ID NO: 2730588 - RNA, 19 nt, Artificial Sequence
  Description of Artificial Sequence: Synthetic oligonucleotide
ucccgucugaauuuucccu

SEQ ID NO: 2730589 - RNA, 19 nt, Artificial Sequence
  Description of Artificial Sequence: Synthetic oligonucleotide
uuggauaaguggguugaga

SEQ ID NO: 2730590 - RNA, 19 nt, Artificial Sequence
  Description of Artificial Sequence: Synthetic oligonucleotide
uaccuucauuagcagucag

SEQ ID NO: 2730591 - RNA, 19 nt, Artificial Sequence
  Description of Artificial Sequence: Synthetic oligonucleotide
acaccugcuuugaaucugc

SEQ ID NO: 2730592 - RNA, 19 nt, Artificial Sequence
  Description of Artificial Sequence: Synthetic oligonucleotide
gagucuuccuucguuucag

SEQ ID NO: 2730593 - RNA, 19 nt, Artificial Sequence
  Description of Artificial Sequence: Synthetic oligonucleotide
ucuguaguaugaagguguu

SEQ ID NO: 2730594 - RNA, 19 nt, Artificial Sequence
  Description of Artificial Sequence: Synthetic oligonucleotide
gaacaucacauuguuaaua

SEQ ID NO: 2730595 - RNA, 19 nt, Artificial Sequence
  Description of Artificial Sequence: Synthetic oligonucleotide
ccuucauuagcagucagag

SEQ ID NO: 2730596 - RNA, 19 nt, Artificial Sequence
  Description of Artificial Sequence: Synthetic oligonucleotide
aacucgggugagaaggucu

SEQ ID NO: 2730597 - RNA, 19 nt, Artificial Sequence
  Description of Artificial Sequence: Synthetic oligonucleotide
agucuuccuucguuucagg

SEQ ID NO: 2730598 - RNA, 19 nt, Artificial Sequence
  Description of Artificial Sequence: Synthetic oligonucleotide
cacgaugugcuucuccaac

SEQ ID NO: 2730599 - RNA, 19 nt, Artificial Sequence
  Description of Artificial Sequence: Synthetic oligonucleotide
aacuggacauugcgaagaa

SEQ ID NO: 2730600 - RNA, 19 nt, Artificial Sequence
  Description of Artificial Sequence: Synthetic oligonucleotide
uacaccugcuuugaaucug

SEQ ID NO: 2730601 - RNA, 19 nt, Artificial Sequence
  Description of Artificial Sequence: Synthetic oligonucleotide
aggaagucagacugagcca

SEQ ID NO: 2730602 - RNA, 19 nt, Artificial Sequence
  Description of Artificial Sequence: Synthetic oligonucleotide
aucacauuguuaauauuaa

SEQ ID NO: 2730603 - RNA, 19 nt, Artificial Sequence
  Description of Artificial Sequence: Synthetic oligonucleotide
acgaugugcuucuccaacu

SEQ ID NO: 2730604 - RNA, 19 nt, Artificial Sequence
  Description of Artificial Sequence: Synthetic oligonucleotide
ugaagguguucgucgauuu

SEQ ID NO: 2730605 - RNA, 19 nt, Artificial Sequence
  Description of Artificial Sequence: Synthetic oligonucleotide
auuagcagucagagccucc

SEQ ID NO: 2730606 - RNA, 19 nt, Artificial Sequence
  Description of Artificial Sequence: Synthetic oligonucleotide
gaagugguugaguacuugu

SEQ ID NO: 2730607 - RNA, 19 nt, Artificial Sequence
  Description of Artificial Sequence: Synthetic oligonucleotide
gagaaggucuguaguauga

SEQ ID NO: 2730608 - RNA, 19 nt, Artificial Sequence
  Description of Artificial Sequence: Synthetic oligonucleotide
auauuccccuuacauuggu

SEQ ID NO: 2730609 - RNA, 19 nt, Artificial Sequence
  Description of Artificial Sequence: Synthetic oligonucleotide
agucaaguuacaccugcuu

SEQ ID NO: 2730610 - RNA, 19 nt, Artificial Sequence
  Description of Artificial Sequence: Synthetic oligonucleotide
cgaaaagggaacauguaug

SEQ ID NO: 2730611 - RNA, 19 nt, Artificial Sequence
  Description of Artificial Sequence: Synthetic oligonucleotide
uaccucuguaaaagauggc

SEQ ID NO: 2730612 - RNA, 19 nt, Artificial Sequence
  Description of Artificial Sequence: Synthetic oligonucleotide
uagagucuuccuucguuuc

SEQ ID NO: 2730613 - RNA, 19 nt, Artificial Sequence
  Description of Artificial Sequence: Synthetic oligonucleotide
uaguaugaagguguucguc

SEQ ID NO: 2730614 - RNA, 19 nt, Artificial Sequence
  Description of Artificial Sequence: Synthetic oligonucleotide
gguuucgaaauuuaccucu

SEQ ID NO: 2730615 - RNA, 19 nt, Artificial Sequence
  Description of Artificial Sequence: Synthetic oligonucleotide
ucgucgauuuucucuugga

SEQ ID NO: 2730616 - RNA, 19 nt, Artificial Sequence
  Description of Artificial Sequence: Synthetic oligonucleotide
guaugaagguguucgucga

SEQ ID NO: 2730617 - RNA, 19 nt, Artificial Sequence
  Description of Artificial Sequence: Synthetic oligonucleotide
guggguugagaagugguug

SEQ ID NO: 2730618 - RNA, 19 nt, Artificial Sequence
  Description of Artificial Sequence: Synthetic oligonucleotide
acauacauauauauauaua

SEQ ID NO: 2730619 - RNA, 19 nt, Artificial Sequence
  Description of Artificial Sequence: Synthetic oligonucleotide
gcucuuuugcuauugcaac

SEQ ID NO: 2730620 - RNA, 19 nt, Artificial Sequence
  Description of Artificial Sequence: Synthetic oligonucleotide
uaugaagguguucgucgau

SEQ ID NO: 2730621 - RNA, 19 nt, Artificial Sequence
  Description of Artificial Sequence: Synthetic oligonucleotide
agaugauccugggaucauc

SEQ ID NO: 2730622 - RNA, 19 nt, Artificial Sequence
  Description of Artificial Sequence: Synthetic oligonucleotide
agaagcgaguccaguagag

SEQ ID NO: 2730623 - RNA, 19 nt, Artificial Sequence
  Description of Artificial Sequence: Synthetic oligonucleotide
aagucagacugagccagcu

SEQ ID NO: 2730624 - RNA, 19 nt, Artificial Sequence
  Description of Artificial Sequence: Synthetic oligonucleotide
guuucgaaauuuaccucug

SEQ ID NO: 2730625 - RNA, 19 nt, Artificial Sequence
  Description of Artificial Sequence: Synthetic oligonucleotide
ucguuucaggaagucagac

SEQ ID NO: 2730626 - RNA, 19 nt, Artificial Sequence
  Description of Artificial Sequence: Synthetic oligonucleotide
ucuccaacucgggugagaa

SEQ ID NO: 2730627 - RNA, 19 nt, Artificial Sequence
  Description of Artificial Sequence: Synthetic oligonucleotide
aguccaguagagucuuccu

SEQ ID NO: 2730628 - RNA, 19 nt, Artificial Sequence
  Description of Artificial Sequence: Synthetic oligonucleotide
gaacauguaugaacaucac

SEQ ID NO: 2730629 - RNA, 19 nt, Artificial Sequence
  Description of Artificial Sequence: Synthetic oligonucleotide
agcagucagagccuccuau

SEQ ID NO: 2730630 - RNA, 19 nt, Artificial Sequence
  Description of Artificial Sequence: Synthetic oligonucleotide
uuccccuuacauugguuuc

SEQ ID NO: 2730631 - RNA, 19 nt, Artificial Sequence
  Description of Artificial Sequence: Synthetic oligonucleotide
gaauuuucccugucagucu

SEQ ID NO: 2730632 - RNA, 19 nt, Artificial Sequence
  Description of Artificial Sequence: Synthetic oligonucleotide
gucagacugagccagcucu

SEQ ID NO: 2730633 - RNA, 19 nt, Artificial Sequence
  Description of Artificial Sequence: Synthetic oligonucleotide
ugggaucaucugaaagccu

SEQ ID NO: 2730634 - RNA, 19 nt, Artificial Sequence
  Description of Artificial Sequence: Synthetic oligonucleotide
caaauacgaaaagggaaca

SEQ ID NO: 2730635 - RNA, 19 nt, Artificial Sequence
  Description of Artificial Sequence: Synthetic oligonucleotide
cauuguuaauauuaaucau

SEQ ID NO: 2730636 - RNA, 19 nt, Artificial Sequence
  Description of Artificial Sequence: Synthetic oligonucleotide
ccaggacacauuauauacc

SEQ ID NO: 2730637 - RNA, 19 nt, Artificial Sequence
  Description of Artificial Sequence: Synthetic oligonucleotide
ucagagccuccuaucuggu

SEQ ID NO: 2730638 - RNA, 19 nt, Artificial Sequence
  Description of Artificial Sequence: Synthetic oligonucleotide
auaaguggguugagaagug

SEQ ID NO: 2730639 - RNA, 19 nt, Artificial Sequence
  Description of Artificial Sequence: Synthetic oligonucleotide
gucuguaguaugaaggugu

SEQ ID NO: 2730640 - RNA, 19 nt, Artificial Sequence
  Description of Artificial Sequence: Synthetic oligonucleotide
agucaccauccccugccag

SEQ ID NO: 2730641 - RNA, 19 nt, Artificial Sequence
  Description of Artificial Sequence: Synthetic oligonucleotide
agaagugguugaguacuug

SEQ ID NO: 2730642 - RNA, 19 nt, Artificial Sequence
  Description of Artificial Sequence: Synthetic oligonucleotide
accauccccugccaggaca

SEQ ID NO: 2730643 - RNA, 19 nt, Artificial Sequence
  Description of Artificial Sequence: Synthetic oligonucleotide
ucaccauccccugccagga

SEQ ID NO: 2730644 - RNA, 19 nt, Artificial Sequence
  Description of Artificial Sequence: Synthetic oligonucleotide
uuucccugucagucucucc

SEQ ID NO: 2730645 - RNA, 19 nt, Artificial Sequence
  Description of Artificial Sequence: Synthetic oligonucleotide
aagugguugaguacuugua

SEQ ID NO: 2730646 - RNA, 19 nt, Artificial Sequence
  Description of Artificial Sequence: Synthetic oligonucleotide
guguucgucgauuuucucu

SEQ ID NO: 2730647 - RNA, 19 nt, Artificial Sequence
  Description of Artificial Sequence: Synthetic oligonucleotide
uauuccccuuacauugguu

SEQ ID NO: 2730648 - RNA, 19 nt, Artificial Sequence
  Description of Artificial Sequence: Synthetic oligonucleotide
uccuaucugguuggauaag

SEQ ID NO: 2730649 - RNA, 19 nt, Artificial Sequence
  Description of Artificial Sequence: Synthetic oligonucleotide
cuccuaucugguuggauaa

SEQ ID NO: 2730650 - RNA, 19 nt, Artificial Sequence
  Description of Artificial Sequence: Synthetic oligonucleotide
caacuggacauugcgaaga

SEQ ID NO: 2730651 - RNA, 19 nt, Artificial Sequence
  Description of Artificial Sequence: Synthetic oligonucleotide
auaccuucauuagcaguca

SEQ ID NO: 2730652 - RNA, 19 nt, Artificial Sequence
  Description of Artificial Sequence: Synthetic oligonucleotide
ugaaagccuugggaggcca

SEQ ID NO: 2730653 - RNA, 19 nt, Artificial Sequence
  Description of Artificial Sequence: Synthetic oligonucleotide
gaugauccugggaucaucu

SEQ ID NO: 2730654 - RNA, 19 nt, Artificial Sequence
  Description of Artificial Sequence: Synthetic oligonucleotide
ggugagaaggucuguagua

SEQ ID NO: 2730655 - RNA, 19 nt, Artificial Sequence
  Description of Artificial Sequence: Synthetic oligonucleotide
gcaacuggacauugcgaag

SEQ ID NO: 2730656 - RNA, 19 nt, Artificial Sequence
  Description of Artificial Sequence: Synthetic oligonucleotide
agacugagccagcucugcu

SEQ ID NO: 2730657 - RNA, 19 nt, Artificial Sequence
  Description of Artificial Sequence: Synthetic oligonucleotide
guaugaacaucacauuguu

SEQ ID NO: 2730658 - RNA, 19 nt, Artificial Sequence
  Description of Artificial Sequence: Synthetic oligonucleotide
uagucaccauccccugcca

SEQ ID NO: 2730659 - RNA, 19 nt, Artificial Sequence
  Description of Artificial Sequence: Synthetic oligonucleotide
guuggauaaguggguugag

SEQ ID NO: 2730660 - RNA, 19 nt, Artificial Sequence
  Description of Artificial Sequence: Synthetic oligonucleotide
gguuggauaaguggguuga

SEQ ID NO: 2730661 - RNA, 19 nt, Artificial Sequence
  Description of Artificial Sequence: Synthetic oligonucleotide
cacacacacacacauacau

SEQ ID NO: 2730662 - RNA, 19 nt, Artificial Sequence
  Description of Artificial Sequence: Synthetic oligonucleotide
agaagcacacacacacaca

SEQ ID NO: 2730663 - RNA, 19 nt, Artificial Sequence
  Description of Artificial Sequence: Synthetic oligonucleotide
ucccugucagucucuccca

SEQ ID NO: 2730664 - RNA, 19 nt, Artificial Sequence
  Description of Artificial Sequence: Synthetic oligonucleotide
cugcucuuuugcuauugca

SEQ ID NO: 2730665 - RNA, 19 nt, Artificial Sequence
  Description of Artificial Sequence: Synthetic oligonucleotide
caaguuacaccugcuuuga

SEQ ID NO: 2730666 - RNA, 19 nt, Artificial Sequence
  Description of Artificial Sequence: Synthetic oligonucleotide
aagcacacacacacacaca

SEQ ID NO: 2730667 - RNA, 19 nt, Artificial Sequence
  Description of Artificial Sequence: Synthetic oligonucleotide
ucagucucucccagaugau

SEQ ID NO: 2730668 - RNA, 19 nt, Artificial Sequence
  Description of Artificial Sequence: Synthetic oligonucleotide
gucaaguuacaccugcuuu

SEQ ID NO: 2730669 - RNA, 19 nt, Artificial Sequence
  Description of Artificial Sequence: Synthetic oligonucleotide
gaagucagacugagccagc

SEQ ID NO: 2730670 - RNA, 19 nt, Artificial Sequence
  Description of Artificial Sequence: Synthetic oligonucleotide
agggaacauguaugaacau

SEQ ID NO: 2730671 - RNA, 19 nt, Artificial Sequence
  Description of Artificial Sequence: Synthetic oligonucleotide
gggaacauguaugaacauc

SEQ ID NO: 2730672 - RNA, 19 nt, Artificial Sequence
  Description of Artificial Sequence: Synthetic oligonucleotide
agccagagcuucccgucug

SEQ ID NO: 2730673 - RNA, 19 nt, Artificial Sequence
  Description of Artificial Sequence: Synthetic oligonucleotide
cauuagcagucagagccuc

SEQ ID NO: 2730674 - RNA, 19 nt, Artificial Sequence
  Description of Artificial Sequence: Synthetic oligonucleotide
ugcuuugaaucugccuuuc

SEQ ID NO: 2730675 - RNA, 19 nt, Artificial Sequence
  Description of Artificial Sequence: Synthetic oligonucleotide
ccuuacauugguuucgaaa

SEQ ID NO: 2730676 - RNA, 19 nt, Artificial Sequence
  Description of Artificial Sequence: Synthetic oligonucleotide
guucgucgauuuucucuug

SEQ ID NO: 2730677 - RNA, 19 nt, Artificial Sequence
  Description of Artificial Sequence: Synthetic oligonucleotide
accuucauuagcagucaga

SEQ ID NO: 2730678 - RNA, 19 nt, Artificial Sequence
  Description of Artificial Sequence: Synthetic oligonucleotide
cucuuuugcuauugcaacu

SEQ ID NO: 2730679 - RNA, 19 nt, Artificial Sequence
  Description of Artificial Sequence: Synthetic oligonucleotide
ggucuguaguaugaaggug

SEQ ID NO: 2730680 - RNA, 19 nt, Artificial Sequence
  Description of Artificial Sequence: Synthetic oligonucleotide
cagacugagccagcucugc

SEQ ID NO: 2730681 - RNA, 19 nt, Artificial Sequence
  Description of Artificial Sequence: Synthetic oligonucleotide
agagaagcacacacacaca

SEQ ID NO: 2730682 - RNA, 19 nt, Artificial Sequence
  Description of Artificial Sequence: Synthetic oligonucleotide
auguugcuuaauacgcccu

SEQ ID NO: 2730683 - RNA, 19 nt, Artificial Sequence
  Description of Artificial Sequence: Synthetic oligonucleotide
cuugggaggccacgaugug

SEQ ID NO: 2730684 - RNA, 19 nt, Artificial Sequence
  Description of Artificial Sequence: Synthetic oligonucleotide
cgaagaaacauguugcuua

SEQ ID NO: 2730685 - RNA, 19 nt, Artificial Sequence
  Description of Artificial Sequence: Synthetic oligonucleotide
augaagguguucgucgauu

SEQ ID NO: 2730686 - RNA, 19 nt, Artificial Sequence
  Description of Artificial Sequence: Synthetic oligonucleotide
cuccaacucgggugagaag

SEQ ID NO: 2730687 - RNA, 19 nt, Artificial Sequence
  Description of Artificial Sequence: Synthetic oligonucleotide
gaggccacgaugugcuucu

SEQ ID NO: 2730688 - RNA, 19 nt, Artificial Sequence
  Description of Artificial Sequence: Synthetic oligonucleotide
cccgucugaauuuucccug

SEQ ID NO: 2730689 - RNA, 19 nt, Artificial Sequence
  Description of Artificial Sequence: Synthetic oligonucleotide
aguggguugagaagugguu

SEQ ID NO: 2730690 - RNA, 19 nt, Artificial Sequence
  Description of Artificial Sequence: Synthetic oligonucleotide
acauugguuucgaaauuua

SEQ ID NO: 2730691 - RNA, 19 nt, Artificial Sequence
  Description of Artificial Sequence: Synthetic oligonucleotide
gcuuugaaucugccuuucc

SEQ ID NO: 2730692 - RNA, 19 nt, Artificial Sequence
  Description of Artificial Sequence: Synthetic oligonucleotide
uccuucguuucaggaaguc

SEQ ID NO: 2730693 - RNA, 19 nt, Artificial Sequence
  Description of Artificial Sequence: Synthetic oligonucleotide
cugaauuuucccugucagu

SEQ ID NO: 2730694 - RNA, 19 nt, Artificial Sequence
  Description of Artificial Sequence: Synthetic oligonucleotide
cagucucucccagaugauc

SEQ ID NO: 2730695 - RNA, 19 nt, Artificial Sequence
  Description of Artificial Sequence: Synthetic oligonucleotide
cauguaugaacaucacauu

SEQ ID NO: 2730696 - RNA, 19 nt, Artificial Sequence
  Description of Artificial Sequence: Synthetic oligonucleotide
acacacacacacacauaca

SEQ ID NO: 2730697 - RNA, 19 nt, Artificial Sequence
  Description of Artificial Sequence: Synthetic oligonucleotide
cuguaguaugaagguguuc

SEQ ID NO: 2730698 - RNA, 19 nt, Artificial Sequence
  Description of Artificial Sequence: Synthetic oligonucleotide
acacacacacacauacaua

SEQ ID NO: 2730699 - RNA, 19 nt, Artificial Sequence
  Description of Artificial Sequence: Synthetic oligonucleotide
cgucgauuuucucuuggag

SEQ ID NO: 2730700 - RNA, 19 nt, Artificial Sequence
  Description of Artificial Sequence: Synthetic oligonucleotide
ccaaagccagagcuucccg

SEQ ID NO: 2730701 - RNA, 19 nt, Artificial Sequence
  Description of Artificial Sequence: Synthetic oligonucleotide
caaagccagagcuucccgu

SEQ ID NO: 2730702 - RNA, 19 nt, Artificial Sequence
  Description of Artificial Sequence: Synthetic oligonucleotide
gaagcgaguccaguagagu

SEQ ID NO: 2730703 - RNA, 19 nt, Artificial Sequence
  Description of Artificial Sequence: Synthetic oligonucleotide
ggaguagaagcgaguccag

SEQ ID NO: 2730704 - RNA, 19 nt, Artificial Sequence
  Description of Artificial Sequence: Synthetic oligonucleotide
cuuuccaaagccagagcuu

SEQ ID NO: 2730705 - RNA, 19 nt, Artificial Sequence
  Description of Artificial Sequence: Synthetic oligonucleotide
uagcagucagagccuccua

SEQ ID NO: 2730706 - RNA, 19 nt, Artificial Sequence
  Description of Artificial Sequence: Synthetic oligonucleotide
gccuugggaggccacgaug

SEQ ID NO: 2730707 - RNA, 19 nt, Artificial Sequence
  Description of Artificial Sequence: Synthetic oligonucleotide
acuggacauugcgaagaaa

SEQ ID NO: 2730708 - RNA, 19 nt, Artificial Sequence
  Description of Artificial Sequence: Synthetic oligonucleotide
gugagaaggucuguaguau

SEQ ID NO: 2730709 - RNA, 19 nt, Artificial Sequence
  Description of Artificial Sequence: Synthetic oligonucleotide
caacucgggugagaagguc

SEQ ID NO: 2730710 - RNA, 19 nt, Artificial Sequence
  Description of Artificial Sequence: Synthetic oligonucleotide
ggccacgaugugcuucucc

SEQ ID NO: 2730711 - RNA, 19 nt, Artificial Sequence
  Description of Artificial Sequence: Synthetic oligonucleotide
ccuccuaucugguuggaua

SEQ ID NO: 2730712 - RNA, 19 nt, Artificial Sequence
  Description of Artificial Sequence: Synthetic oligonucleotide
ggacauugcgaagaaacau

SEQ ID NO: 2730713 - RNA, 19 nt, Artificial Sequence
  Description of Artificial Sequence: Synthetic oligonucleotide
gccuuuccaaagccagagc

SEQ ID NO: 2730714 - RNA, 19 nt, Artificial Sequence
  Description of Artificial Sequence: Synthetic oligonucleotide
gaguagaagcgaguccagu

SEQ ID NO: 2730715 - RNA, 19 nt, Artificial Sequence
  Description of Artificial Sequence: Synthetic oligonucleotide
gaagguguucgucgauuuu

SEQ ID NO: 2730716 - RNA, 19 nt, Artificial Sequence
  Description of Artificial Sequence: Synthetic oligonucleotide
cucccagaugauccuggga

SEQ ID NO: 2730717 - RNA, 19 nt, Artificial Sequence
  Description of Artificial Sequence: Synthetic oligonucleotide
cugccaggacacauuauau

SEQ ID NO: 2730718 - RNA, 19 nt, Artificial Sequence
  Description of Artificial Sequence: Synthetic oligonucleotide
gguguucgucgauuuucuc

SEQ ID NO: 2730719 - RNA, 19 nt, Artificial Sequence
  Description of Artificial Sequence: Synthetic oligonucleotide
agccuugggaggccacgau

SEQ ID NO: 2730720 - RNA, 19 nt, Artificial Sequence
  Description of Artificial Sequence: Synthetic oligonucleotide
cccagaugauccugggauc

SEQ ID NO: 2730721 - RNA, 19 nt, Artificial Sequence
  Description of Artificial Sequence: Synthetic oligonucleotide
cuucuccaacucgggugag

SEQ ID NO: 2730722 - RNA, 19 nt, Artificial Sequence
  Description of Artificial Sequence: Synthetic oligonucleotide
guccaguagagucuuccuu

SEQ ID NO: 2730723 - RNA, 19 nt, Artificial Sequence
  Description of Artificial Sequence: Synthetic oligonucleotide
ccauccccugccaggacac

SEQ ID NO: 2730724 - RNA, 19 nt, Artificial Sequence
  Description of Artificial Sequence: Synthetic oligonucleotide
gagcuucccgucugaauuu

SEQ ID NO: 2730725 - RNA, 19 nt, Artificial Sequence
  Description of Artificial Sequence: Synthetic oligonucleotide
guugcuuaauacgcccuau

SEQ ID NO: 2730726 - RNA, 19 nt, Artificial Sequence
  Description of Artificial Sequence: Synthetic oligonucleotide
aggacacauuauauaccuu

SEQ ID NO: 2730727 - RNA, 19 nt, Artificial Sequence
  Description of Artificial Sequence: Synthetic oligonucleotide
ggaggccacgaugugcuuc

SEQ ID NO: 2730728 - RNA, 19 nt, Artificial Sequence
  Description of Artificial Sequence: Synthetic oligonucleotide
cagucaaguuacaccugcu

SEQ ID NO: 2730729 - RNA, 19 nt, Artificial Sequence
  Description of Artificial Sequence: Synthetic oligonucleotide
agcuucccgucugaauuuu

SEQ ID NO: 2730730 - RNA, 19 nt, Artificial Sequence
  Description of Artificial Sequence: Synthetic oligonucleotide
gguugaguacuuguacagu

SEQ ID NO: 2730731 - RNA, 19 nt, Artificial Sequence
  Description of Artificial Sequence: Synthetic oligonucleotide
cgaugugcuucuccaacuc

SEQ ID NO: 2730732 - RNA, 19 nt, Artificial Sequence
  Description of Artificial Sequence: Synthetic oligonucleotide
cugcuuugaaucugccuuu

SEQ ID NO: 2730733 - RNA, 19 nt, Artificial Sequence
  Description of Artificial Sequence: Synthetic oligonucleotide
cauugcgaagaaacauguu

SEQ ID NO: 2730734 - RNA, 19 nt, Artificial Sequence
  Description of Artificial Sequence: Synthetic oligonucleotide
cgauuuucucuuggaguag

SEQ ID NO: 2730735 - RNA, 19 nt, Artificial Sequence
  Description of Artificial Sequence: Synthetic oligonucleotide
ccuucguuucaggaaguca

SEQ ID NO: 2730736 - RNA, 19 nt, Artificial Sequence
  Description of Artificial Sequence: Synthetic oligonucleotide
caccauccccugccaggac

SEQ ID NO: 2730737 - RNA, 19 nt, Artificial Sequence
  Description of Artificial Sequence: Synthetic oligonucleotide
gagaagugguugaguacuu

SEQ ID NO: 2730738 - RNA, 19 nt, Artificial Sequence
  Description of Artificial Sequence: Synthetic oligonucleotide
aggccacgaugugcuucuc

SEQ ID NO: 2730739 - RNA, 19 nt, Artificial Sequence
  Description of Artificial Sequence: Synthetic oligonucleotide
cugguuggauaaguggguu

SEQ ID NO: 2730740 - RNA, 19 nt, Artificial Sequence
  Description of Artificial Sequence: Synthetic oligonucleotide
gcuauugcaacuggacauu

SEQ ID NO: 2730741 - RNA, 19 nt, Artificial Sequence
  Description of Artificial Sequence: Synthetic oligonucleotide
caguagagucuuccuucgu

SEQ ID NO: 2730742 - RNA, 19 nt, Artificial Sequence
  Description of Artificial Sequence: Synthetic oligonucleotide
ccugucagucucucccaga

SEQ ID NO: 2730743 - RNA, 19 nt, Artificial Sequence
  Description of Artificial Sequence: Synthetic oligonucleotide
agccuccuaucugguugga

SEQ ID NO: 2730744 - RNA, 19 nt, Artificial Sequence
  Description of Artificial Sequence: Synthetic oligonucleotide
gagccagcucugcucuuuu

SEQ ID NO: 2730745 - RNA, 19 nt, Artificial Sequence
  Description of Artificial Sequence: Synthetic oligonucleotide
gcgaagaaacauguugcuu

SEQ ID NO: 2730746 - RNA, 19 nt, Artificial Sequence
  Description of Artificial Sequence: Synthetic oligonucleotide
gcuucccgucugaauuuuc

SEQ ID NO: 2730747 - RNA, 19 nt, Artificial Sequence
  Description of Artificial Sequence: Synthetic oligonucleotide
gcacacacacacacacaua

SEQ ID NO: 2730748 - RNA, 19 nt, Artificial Sequence
  Description of Artificial Sequence: Synthetic oligonucleotide
ccgucugaauuuucccugu

SEQ ID NO: 2730749 - RNA, 19 nt, Artificial Sequence
  Description of Artificial Sequence: Synthetic oligonucleotide
cauccccugccaggacaca

SEQ ID NO: 2730750 - RNA, 19 nt, Artificial Sequence
  Description of Artificial Sequence: Synthetic oligonucleotide
cagagccuccuaucugguu

SEQ ID NO: 2730751 - RNA, 19 nt, Artificial Sequence
  Description of Artificial Sequence: Synthetic oligonucleotide
ccccuuacauugguuucga

SEQ ID NO: 2730752 - RNA, 19 nt, Artificial Sequence
  Description of Artificial Sequence: Synthetic oligonucleotide
cucgggugagaaggucugu

SEQ ID NO: 2730753 - RNA, 19 nt, Artificial Sequence
  Description of Artificial Sequence: Synthetic oligonucleotide
cccuuacauugguuucgaa

SEQ ID NO: 2730754 - RNA, 19 nt, Artificial Sequence
  Description of Artificial Sequence: Synthetic oligonucleotide
cgaguccaguagagucuuc

SEQ ID NO: 2730755 - RNA, 19 nt, Artificial Sequence
  Description of Artificial Sequence: Synthetic oligonucleotide
gccuccuaucugguuggau

SEQ ID NO: 2730756 - RNA, 19 nt, Artificial Sequence
  Description of Artificial Sequence: Synthetic oligonucleotide
gggaggccacgaugugcuu

SEQ ID NO: 2730757 - RNA, 19 nt, Artificial Sequence
  Description of Artificial Sequence: Synthetic oligonucleotide
aauauguuagcacuggagc

SEQ ID NO: 2730758 - RNA, 19 nt, Artificial Sequence
  Description of Artificial Sequence: Synthetic oligonucleotide
uaaaagaagaucaagguca

SEQ ID NO: 2730759 - RNA, 19 nt, Artificial Sequence
  Description of Artificial Sequence: Synthetic oligonucleotide
uacagagucaauauguuag

SEQ ID NO: 2730760 - RNA, 19 nt, Artificial Sequence
  Description of Artificial Sequence: Synthetic oligonucleotide
ucuuguacagguaaaagaa

SEQ ID NO: 2730761 - RNA, 19 nt, Artificial Sequence
  Description of Artificial Sequence: Synthetic oligonucleotide
aauuacagagucaauaugu

SEQ ID NO: 2730762 - RNA, 19 nt, Artificial Sequence
  Description of Artificial Sequence: Synthetic oligonucleotide
aaggucaccacagagagca

SEQ ID NO: 2730763 - RNA, 19 nt, Artificial Sequence
  Description of Artificial Sequence: Synthetic oligonucleotide
acugcaaugagugcugugc

SEQ ID NO: 2730764 - RNA, 19 nt, Artificial Sequence
  Description of Artificial Sequence: Synthetic oligonucleotide
cuauaggugucauaagcgg

SEQ ID NO: 2730765 - RNA, 19 nt, Artificial Sequence
  Description of Artificial Sequence: Synthetic oligonucleotide
uaauuacagagucaauaug

SEQ ID NO: 2730766 - RNA, 19 nt, Artificial Sequence
  Description of Artificial Sequence: Synthetic oligonucleotide
cucaaugccacucacuggc

SEQ ID NO: 2730767 - RNA, 19 nt, Artificial Sequence
  Description of Artificial Sequence: Synthetic oligonucleotide
ugagucacucuccaucugg

SEQ ID NO: 2730768 - RNA, 19 nt, Artificial Sequence
  Description of Artificial Sequence: Synthetic oligonucleotide
agguaaaagaagaucaagg

SEQ ID NO: 2730769 - RNA, 19 nt, Artificial Sequence
  Description of Artificial Sequence: Synthetic oligonucleotide
acagagucaauauguuagc

SEQ ID NO: 2730770 - RNA, 19 nt, Artificial Sequence
  Description of Artificial Sequence: Synthetic oligonucleotide
uucucugugucccuggacc

SEQ ID NO: 2730771 - RNA, 19 nt, Artificial Sequence
  Description of Artificial Sequence: Synthetic oligonucleotide
uauaggugucauaagcggc

SEQ ID NO: 2730772 - RNA, 19 nt, Artificial Sequence
  Description of Artificial Sequence: Synthetic oligonucleotide
aaaagaagaucaaggucac

SEQ ID NO: 2730773 - RNA, 19 nt, Artificial Sequence
  Description of Artificial Sequence: Synthetic oligonucleotide
auaacgacugcaaugagug

SEQ ID NO: 2730774 - RNA, 19 nt, Artificial Sequence
  Description of Artificial Sequence: Synthetic oligonucleotide
guaaaagaagaucaagguc

SEQ ID NO: 2730775 - RNA, 19 nt, Artificial Sequence
  Description of Artificial Sequence: Synthetic oligonucleotide
ucaucaguucuccaggaga

SEQ ID NO: 2730776 - RNA, 19 nt, Artificial Sequence
  Description of Artificial Sequence: Synthetic oligonucleotide
caauauguuagcacuggag

SEQ ID NO: 2730777 - RNA, 19 nt, Artificial Sequence
  Description of Artificial Sequence: Synthetic oligonucleotide
acuguccuuaccaaggccc

SEQ ID NO: 2730778 - RNA, 19 nt, Artificial Sequence
  Description of Artificial Sequence: Synthetic oligonucleotide
aaguacucuuccuucucuc

SEQ ID NO: 2730779 - RNA, 19 nt, Artificial Sequence
  Description of Artificial Sequence: Synthetic oligonucleotide
agaauuggccccuccaguc

SEQ ID NO: 2730780 - RNA, 19 nt, Artificial Sequence
  Description of Artificial Sequence: Synthetic oligonucleotide
uggucaucaguucuccagg

SEQ ID NO: 2730781 - RNA, 19 nt, Artificial Sequence
  Description of Artificial Sequence: Synthetic oligonucleotide
aaacguucccuaauuacag

SEQ ID NO: 2730782 - RNA, 19 nt, Artificial Sequence
  Description of Artificial Sequence: Synthetic oligonucleotide
ucauaagcggcuuucucug

SEQ ID NO: 2730783 - RNA, 19 nt, Artificial Sequence
  Description of Artificial Sequence: Synthetic oligonucleotide
aagaucaaggucaccacag

SEQ ID NO: 2730784 - RNA, 19 nt, Artificial Sequence
  Description of Artificial Sequence: Synthetic oligonucleotide
ucaguucuccaggagaagg

SEQ ID NO: 2730785 - RNA, 19 nt, Artificial Sequence
  Description of Artificial Sequence: Synthetic oligonucleotide
gaucaaggucaccacagag

SEQ ID NO: 2730786 - RNA, 19 nt, Artificial Sequence
  Description of Artificial Sequence: Synthetic oligonucleotide
ugccaucucacucaaugcc

SEQ ID NO: 2730787 - RNA, 19 nt, Artificial Sequence
  Description of Artificial Sequence: Synthetic oligonucleotide
aacgacugcaaugagugcu

SEQ ID NO: 2730788 - RNA, 19 nt, Artificial Sequence
  Description of Artificial Sequence: Synthetic oligonucleotide
gagaagguguagcugguag

SEQ ID NO: 2730789 - RNA, 19 nt, Artificial Sequence
  Description of Artificial Sequence: Synthetic oligonucleotide
cuuguacagguaaaagaag

SEQ ID NO: 2730790 - RNA, 19 nt, Artificial Sequence
  Description of Artificial Sequence: Synthetic oligonucleotide
aaugagugcugugcuggcc

SEQ ID NO: 2730791 - RNA, 19 nt, Artificial Sequence
  Description of Artificial Sequence: Synthetic oligonucleotide
aagaauuggccccuccagu

SEQ ID NO: 2730792 - RNA, 19 nt, Artificial Sequence
  Description of Artificial Sequence: Synthetic oligonucleotide
gaugcugguauuuggggac

SEQ ID NO: 2730793 - RNA, 19 nt, Artificial Sequence
  Description of Artificial Sequence: Synthetic oligonucleotide
acuggagccaagaauuggc

SEQ ID NO: 2730794 - RNA, 19 nt, Artificial Sequence
  Description of Artificial Sequence: Synthetic oligonucleotide
auuagaugaaguacucuuc

SEQ ID NO: 2730795 - RNA, 19 nt, Artificial Sequence
  Description of Artificial Sequence: Synthetic oligonucleotide
agaagguguagcugguagg

SEQ ID NO: 2730796 - RNA, 19 nt, Artificial Sequence
  Description of Artificial Sequence: Synthetic oligonucleotide
ugugcuggccucuucagcu

SEQ ID NO: 2730797 - RNA, 19 nt, Artificial Sequence
  Description of Artificial Sequence: Synthetic oligonucleotide
acguucccuaauuacagag

SEQ ID NO: 2730798 - RNA, 19 nt, Artificial Sequence
  Description of Artificial Sequence: Synthetic oligonucleotide
gucacucuccaucuggagg

SEQ ID NO: 2730799 - RNA, 19 nt, Artificial Sequence
  Description of Artificial Sequence: Synthetic oligonucleotide
uggauuugccaucucacuc

SEQ ID NO: 2730800 - RNA, 19 nt, Artificial Sequence
  Description of Artificial Sequence: Synthetic oligonucleotide
ggugauaacgacugcaaug

SEQ ID NO: 2730801 - RNA, 19 nt, Artificial Sequence
  Description of Artificial Sequence: Synthetic oligonucleotide
acuggcuucagagcaaacg

SEQ ID NO: 2730802 - RNA, 19 nt, Artificial Sequence
  Description of Artificial Sequence: Synthetic oligonucleotide
ucaauauguuagcacugga

SEQ ID NO: 2730803 - RNA, 19 nt, Artificial Sequence
  Description of Artificial Sequence: Synthetic oligonucleotide
uggaggauggugcugggcu

SEQ ID NO: 2730804 - RNA, 19 nt, Artificial Sequence
  Description of Artificial Sequence: Synthetic oligonucleotide
ugguaggcuggucaucgcg

SEQ ID NO: 2730805 - RNA, 19 nt, Artificial Sequence
  Description of Artificial Sequence: Synthetic oligonucleotide
cacucaaugccacucacug

SEQ ID NO: 2730806 - RNA, 19 nt, Artificial Sequence
  Description of Artificial Sequence: Synthetic oligonucleotide
ugaugcugguauuugggga

SEQ ID NO: 2730807 - RNA, 19 nt, Artificial Sequence
  Description of Artificial Sequence: Synthetic oligonucleotide
ugucccuggacccuggagu

SEQ ID NO: 2730808 - RNA, 19 nt, Artificial Sequence
  Description of Artificial Sequence: Synthetic oligonucleotide
gaacaccacggugauaacg

SEQ ID NO: 2730809 - RNA, 19 nt, Artificial Sequence
  Description of Artificial Sequence: Synthetic oligonucleotide
uccaacucaggcacggccc

SEQ ID NO: 2730810 - RNA, 19 nt, Artificial Sequence
  Description of Artificial Sequence: Synthetic oligonucleotide
gagucaauauguuagcacu

SEQ ID NO: 2730811 - RNA, 19 nt, Artificial Sequence
  Description of Artificial Sequence: Synthetic oligonucleotide
gaagguguagcugguaggc

SEQ ID NO: 2730812 - RNA, 19 nt, Artificial Sequence
  Description of Artificial Sequence: Synthetic oligonucleotide
uguccugggaugugagugg

SEQ ID NO: 2730813 - RNA, 19 nt, Artificial Sequence
  Description of Artificial Sequence: Synthetic oligonucleotide
guucccuaauuacagaguc

SEQ ID NO: 2730814 - RNA, 19 nt, Artificial Sequence
  Description of Artificial Sequence: Synthetic oligonucleotide
gucaauauguuagcacugg

SEQ ID NO: 2730815 - RNA, 19 nt, Artificial Sequence
  Description of Artificial Sequence: Synthetic oligonucleotide
aauuggccccuccagucug

SEQ ID NO: 2730816 - RNA, 19 nt, Artificial Sequence
  Description of Artificial Sequence: Synthetic oligonucleotide
uuccaacucaggcacggcc

SEQ ID NO: 2730817 - RNA, 19 nt, Artificial Sequence
  Description of Artificial Sequence: Synthetic oligonucleotide
agcuuguggggacaggguc

SEQ ID NO: 2730818 - RNA, 19 nt, Artificial Sequence
  Description of Artificial Sequence: Synthetic oligonucleotide
cugaugcugguauuugggg

SEQ ID NO: 2730819 - RNA, 19 nt, Artificial Sequence
  Description of Artificial Sequence: Synthetic oligonucleotide
caaacguucccuaauuaca

SEQ ID NO: 2730820 - RNA, 19 nt, Artificial Sequence
  Description of Artificial Sequence: Synthetic oligonucleotide
gaugugaguggauuugcca

SEQ ID NO: 2730821 - RNA, 19 nt, Artificial Sequence
  Description of Artificial Sequence: Synthetic oligonucleotide
uauuuggggacuguguccu

SEQ ID NO: 2730822 - RNA, 19 nt, Artificial Sequence
  Description of Artificial Sequence: Synthetic oligonucleotide
ggcuauaggugucauaagc

SEQ ID NO: 2730823 - RNA, 19 nt, Artificial Sequence
  Description of Artificial Sequence: Synthetic oligonucleotide
gaccugaagaacuggugug

SEQ ID NO: 2730824 - RNA, 19 nt, Artificial Sequence
  Description of Artificial Sequence: Synthetic oligonucleotide
guauuuggggacugugucc

SEQ ID NO: 2730825 - RNA, 19 nt, Artificial Sequence
  Description of Artificial Sequence: Synthetic oligonucleotide
gugauaacgacugcaauga

SEQ ID NO: 2730826 - RNA, 19 nt, Artificial Sequence
  Description of Artificial Sequence: Synthetic oligonucleotide
caagaauuggccccuccag

SEQ ID NO: 2730827 - RNA, 19 nt, Artificial Sequence
  Description of Artificial Sequence: Synthetic oligonucleotide
aucauuagaugaaguacuc

SEQ ID NO: 2730828 - RNA, 19 nt, Artificial Sequence
  Description of Artificial Sequence: Synthetic oligonucleotide
gcuauaggugucauaagcg

SEQ ID NO: 2730829 - RNA, 19 nt, Artificial Sequence
  Description of Artificial Sequence: Synthetic oligonucleotide
gaucauuagaugaaguacu

SEQ ID NO: 2730830 - RNA, 19 nt, Artificial Sequence
  Description of Artificial Sequence: Synthetic oligonucleotide
uggucaucgcggccgaggg

SEQ ID NO: 2730831 - RNA, 19 nt, Artificial Sequence
  Description of Artificial Sequence: Synthetic oligonucleotide
acucaaugccacucacugg

SEQ ID NO: 2730832 - RNA, 19 nt, Artificial Sequence
  Description of Artificial Sequence: Synthetic oligonucleotide
uuacagagucaauauguua

SEQ ID NO: 2730833 - RNA, 19 nt, Artificial Sequence
  Description of Artificial Sequence: Synthetic oligonucleotide
aacguucccuaauuacaga

SEQ ID NO: 2730834 - RNA, 19 nt, Artificial Sequence
  Description of Artificial Sequence: Synthetic oligonucleotide
ugauaacgacugcaaugag

SEQ ID NO: 2730835 - RNA, 19 nt, Artificial Sequence
  Description of Artificial Sequence: Synthetic oligonucleotide
uggagccaagaauuggccc

SEQ ID NO: 2730836 - RNA, 19 nt, Artificial Sequence
  Description of Artificial Sequence: Synthetic oligonucleotide
agcggcuuucucugugucc

SEQ ID NO: 2730837 - RNA, 19 nt, Artificial Sequence
  Description of Artificial Sequence: Synthetic oligonucleotide
uuuggggacuguguccugg

SEQ ID NO: 2730838 - RNA, 19 nt, Artificial Sequence
  Description of Artificial Sequence: Synthetic oligonucleotide
uugccaucucacucaaugc

SEQ ID NO: 2730839 - RNA, 19 nt, Artificial Sequence
  Description of Artificial Sequence: Synthetic oligonucleotide
agagagcagggugaggaac

SEQ ID NO: 2730840 - RNA, 19 nt, Artificial Sequence
  Description of Artificial Sequence: Synthetic oligonucleotide
guucuuguacagguaaaag

SEQ ID NO: 2730841 - RNA, 19 nt, Artificial Sequence
  Description of Artificial Sequence: Synthetic oligonucleotide
uucccuaauuacagaguca

SEQ ID NO: 2730842 - RNA, 19 nt, Artificial Sequence
  Description of Artificial Sequence: Synthetic oligonucleotide
cagguaaaagaagaucaag

SEQ ID NO: 2730843 - RNA, 19 nt, Artificial Sequence
  Description of Artificial Sequence: Synthetic oligonucleotide
uguucuuguacagguaaaa

SEQ ID NO: 2730844 - RNA, 19 nt, Artificial Sequence
  Description of Artificial Sequence: Synthetic oligonucleotide
auaagcggcuuucucugug

SEQ ID NO: 2730845 - RNA, 19 nt, Artificial Sequence
  Description of Artificial Sequence: Synthetic oligonucleotide
ggaucauuagaugaaguac

SEQ ID NO: 2730846 - RNA, 19 nt, Artificial Sequence
  Description of Artificial Sequence: Synthetic oligonucleotide
gguaaaagaagaucaaggu

SEQ ID NO: 2730847 - RNA, 19 nt, Artificial Sequence
  Description of Artificial Sequence: Synthetic oligonucleotide
ggagccaagaauuggcccc

SEQ ID NO: 2730848 - RNA, 19 nt, Artificial Sequence
  Description of Artificial Sequence: Synthetic oligonucleotide
ugccuuuguucuuguacag

SEQ ID NO: 2730849 - RNA, 19 nt, Artificial Sequence
  Description of Artificial Sequence: Synthetic oligonucleotide
accugaagaacuggugugg

SEQ ID NO: 2730850 - RNA, 19 nt, Artificial Sequence
  Description of Artificial Sequence: Synthetic oligonucleotide
aguacucuuccuucucucu

SEQ ID NO: 2730851 - RNA, 19 nt, Artificial Sequence
  Description of Artificial Sequence: Synthetic oligonucleotide
cuuggcugagucacucucc

SEQ ID NO: 2730852 - RNA, 19 nt, Artificial Sequence
  Description of Artificial Sequence: Synthetic oligonucleotide
ugucauaagcggcuuucuc

SEQ ID NO: 2730853 - RNA, 19 nt, Artificial Sequence
  Description of Artificial Sequence: Synthetic oligonucleotide
aagcggcuuucucuguguc

SEQ ID NO: 2730854 - RNA, 19 nt, Artificial Sequence
  Description of Artificial Sequence: Synthetic oligonucleotide
guagcugguaggcugguca

SEQ ID NO: 2730855 - RNA, 19 nt, Artificial Sequence
  Description of Artificial Sequence: Synthetic oligonucleotide
ucucugugucccuggaccc

SEQ ID NO: 2730856 - RNA, 19 nt, Artificial Sequence
  Description of Artificial Sequence: Synthetic oligonucleotide
ugcaaugagugcugugcug

SEQ ID NO: 2730857 - RNA, 19 nt, Artificial Sequence
  Description of Artificial Sequence: Synthetic oligonucleotide
cuggagccaagaauuggcc

SEQ ID NO: 2730858 - RNA, 19 nt, Artificial Sequence
  Description of Artificial Sequence: Synthetic oligonucleotide
agggugaggaacaccacgg

SEQ ID NO: 2730859 - RNA, 19 nt, Artificial Sequence
  Description of Artificial Sequence: Synthetic oligonucleotide
cuaauuacagagucaauau

SEQ ID NO: 2730860 - RNA, 19 nt, Artificial Sequence
  Description of Artificial Sequence: Synthetic oligonucleotide
aggcucauaggugacguag

SEQ ID NO: 2730861 - RNA, 19 nt, Artificial Sequence
  Description of Artificial Sequence: Synthetic oligonucleotide
ugugaguggauuugccauc

SEQ ID NO: 2730862 - RNA, 19 nt, Artificial Sequence
  Description of Artificial Sequence: Synthetic oligonucleotide
aaggcccggcuauaggugu

SEQ ID NO: 2730863 - RNA, 19 nt, Artificial Sequence
  Description of Artificial Sequence: Synthetic oligonucleotide
gaguggauuugccaucuca

SEQ ID NO: 2730864 - RNA, 19 nt, Artificial Sequence
  Description of Artificial Sequence: Synthetic oligonucleotide
cagaggaucucgcaggguc

SEQ ID NO: 2730865 - RNA, 19 nt, Artificial Sequence
  Description of Artificial Sequence: Synthetic oligonucleotide
agaacugguguggucauca

SEQ ID NO: 2730866 - RNA, 19 nt, Artificial Sequence
  Description of Artificial Sequence: Synthetic oligonucleotide
agagcaaacguucccuaau

SEQ ID NO: 2730867 - RNA, 19 nt, Artificial Sequence
  Description of Artificial Sequence: Synthetic oligonucleotide
uagcacuggagccaagaau

SEQ ID NO: 2730868 - RNA, 19 nt, Artificial Sequence
  Description of Artificial Sequence: Synthetic oligonucleotide
uggggaucauuagaugaag

SEQ ID NO: 2730869 - RNA, 19 nt, Artificial Sequence
  Description of Artificial Sequence: Synthetic oligonucleotide
cuguccuuaccaaggcccg

SEQ ID NO: 2730870 - RNA, 19 nt, Artificial Sequence
  Description of Artificial Sequence: Synthetic oligonucleotide
agcacuggagccaagaauu

SEQ ID NO: 2730871 - RNA, 19 nt, Artificial Sequence
  Description of Artificial Sequence: Synthetic oligonucleotide
guacagguaaaagaagauc

SEQ ID NO: 2730872 - RNA, 19 nt, Artificial Sequence
  Description of Artificial Sequence: Synthetic oligonucleotide
gagcacuguccuuaccaag

SEQ ID NO: 2730873 - RNA, 19 nt, Artificial Sequence
  Description of Artificial Sequence: Synthetic oligonucleotide
uuguucuuguacagguaaa

SEQ ID NO: 2730874 - RNA, 19 nt, Artificial Sequence
  Description of Artificial Sequence: Synthetic oligonucleotide
auaggugucauaagcggcu

SEQ ID NO: 2730875 - RNA, 19 nt, Artificial Sequence
  Description of Artificial Sequence: Synthetic oligonucleotide
gguauuuggggacuguguc

SEQ ID NO: 2730876 - RNA, 19 nt, Artificial Sequence
  Description of Artificial Sequence: Synthetic oligonucleotide
guacucuuccuucucucug

SEQ ID NO: 2730877 - RNA, 19 nt, Artificial Sequence
  Description of Artificial Sequence: Synthetic oligonucleotide
ugggaugugaguggauuug

SEQ ID NO: 2730878 - RNA, 19 nt, Artificial Sequence
  Description of Artificial Sequence: Synthetic oligonucleotide
gcaaugagugcugugcugg

SEQ ID NO: 2730879 - RNA, 19 nt, Artificial Sequence
  Description of Artificial Sequence: Synthetic oligonucleotide
agucaauauguuagcacug

SEQ ID NO: 2730880 - RNA, 19 nt, Artificial Sequence
  Description of Artificial Sequence: Synthetic oligonucleotide
cacggccccauguuguugg

SEQ ID NO: 2730881 - RNA, 19 nt, Artificial Sequence
  Description of Artificial Sequence: Synthetic oligonucleotide
aucaaggucaccacagaga

SEQ ID NO: 2730882 - RNA, 19 nt, Artificial Sequence
  Description of Artificial Sequence: Synthetic oligonucleotide
gcaaacguucccuaauuac

SEQ ID NO: 2730883 - RNA, 19 nt, Artificial Sequence
  Description of Artificial Sequence: Synthetic oligonucleotide
acguagcugccuuuguucu

SEQ ID NO: 2730884 - RNA, 19 nt, Artificial Sequence
  Description of Artificial Sequence: Synthetic oligonucleotide
uuggggacuguguccuggg

SEQ ID NO: 2730885 - RNA, 19 nt, Artificial Sequence
  Description of Artificial Sequence: Synthetic oligonucleotide
acaccacggugauaacgac

SEQ ID NO: 2730886 - RNA, 19 nt, Artificial Sequence
  Description of Artificial Sequence: Synthetic oligonucleotide
ugagcacuguccuuaccaa

SEQ ID NO: 2730887 - RNA, 19 nt, Artificial Sequence
  Description of Artificial Sequence: Synthetic oligonucleotide
gucaucaguucuccaggag

SEQ ID NO: 2730888 - RNA, 19 nt, Artificial Sequence
  Description of Artificial Sequence: Synthetic oligonucleotide
acugguguggucaucaguu

SEQ ID NO: 2730889 - RNA, 19 nt, Artificial Sequence
  Description of Artificial Sequence: Synthetic oligonucleotide
guguccugggaugugagug

SEQ ID NO: 2730890 - RNA, 19 nt, Artificial Sequence
  Description of Artificial Sequence: Synthetic oligonucleotide
gucauaagcggcuuucucu

SEQ ID NO: 2730891 - RNA, 19 nt, Artificial Sequence
  Description of Artificial Sequence: Synthetic oligonucleotide
uuucucugugucccuggac

SEQ ID NO: 2730892 - RNA, 19 nt, Artificial Sequence
  Description of Artificial Sequence: Synthetic oligonucleotide
uuguuggccaggugugagc

SEQ ID NO: 2730893 - RNA, 19 nt, Artificial Sequence
  Description of Artificial Sequence: Synthetic oligonucleotide
gauaacgacugcaaugagu

SEQ ID NO: 2730894 - RNA, 19 nt, Artificial Sequence
  Description of Artificial Sequence: Synthetic oligonucleotide
ggauuugccaucucacuca

SEQ ID NO: 2730895 - RNA, 19 nt, Artificial Sequence
  Description of Artificial Sequence: Synthetic oligonucleotide
guagcugccuuuguucuug

SEQ ID NO: 2730896 - RNA, 19 nt, Artificial Sequence
  Description of Artificial Sequence: Synthetic oligonucleotide
cauaggugacguagcugcc

SEQ ID NO: 2730897 - RNA, 19 nt, Artificial Sequence
  Description of Artificial Sequence: Synthetic oligonucleotide
uaagcggcuuucucugugu

SEQ ID NO: 2730898 - RNA, 19 nt, Artificial Sequence
  Description of Artificial Sequence: Synthetic oligonucleotide
caccacagagagcagggug

SEQ ID NO: 2730899 - RNA, 19 nt, Artificial Sequence
  Description of Artificial Sequence: Synthetic oligonucleotide
uaacgacugcaaugagugc

SEQ ID NO: 2730900 - RNA, 19 nt, Artificial Sequence
  Description of Artificial Sequence: Synthetic oligonucleotide
accaaggcccggcuauagg

SEQ ID NO: 2730901 - RNA, 19 nt, Artificial Sequence
  Description of Artificial Sequence: Synthetic oligonucleotide
caucaguucuccaggagaa

SEQ ID NO: 2730902 - RNA, 19 nt, Artificial Sequence
  Description of Artificial Sequence: Synthetic oligonucleotide
ugugagcacuguccuuacc

SEQ ID NO: 2730903 - RNA, 19 nt, Artificial Sequence
  Description of Artificial Sequence: Synthetic oligonucleotide
ugcaggcucauaggugacg

SEQ ID NO: 2730904 - RNA, 19 nt, Artificial Sequence
  Description of Artificial Sequence: Synthetic oligonucleotide
gcugaugcugguauuuggg

SEQ ID NO: 2730905 - RNA, 19 nt, Artificial Sequence
  Description of Artificial Sequence: Synthetic oligonucleotide
gcugccuuuguucuuguac

SEQ ID NO: 2730906 - RNA, 19 nt, Artificial Sequence
  Description of Artificial Sequence: Synthetic oligonucleotide
ucaaugccacucacuggcu

SEQ ID NO: 2730907 - RNA, 19 nt, Artificial Sequence
  Description of Artificial Sequence: Synthetic oligonucleotide
auuacagagucaauauguu

SEQ ID NO: 2730908 - RNA, 19 nt, Artificial Sequence
  Description of Artificial Sequence: Synthetic oligonucleotide
cacuggagccaagaauugg

SEQ ID NO: 2730909 - RNA, 19 nt, Artificial Sequence
  Description of Artificial Sequence: Synthetic oligonucleotide
ugacguagcugccuuuguu

SEQ ID NO: 2730910 - RNA, 19 nt, Artificial Sequence
  Description of Artificial Sequence: Synthetic oligonucleotide
uuggccaggugugagcacu

SEQ ID NO: 2730911 - RNA, 19 nt, Artificial Sequence
  Description of Artificial Sequence: Synthetic oligonucleotide
caaugagugcugugcuggc

SEQ ID NO: 2730912 - RNA, 19 nt, Artificial Sequence
  Description of Artificial Sequence: Synthetic oligonucleotide
ugcuggccucuucagcuug

SEQ ID NO: 2730913 - RNA, 19 nt, Artificial Sequence
  Description of Artificial Sequence: Synthetic oligonucleotide
gccuucugcaggcucauag

SEQ ID NO: 2730914 - RNA, 19 nt, Artificial Sequence
  Description of Artificial Sequence: Synthetic oligonucleotide
gcugguaggcuggucaucg

SEQ ID NO: 2730915 - RNA, 19 nt, Artificial Sequence
  Description of Artificial Sequence: Synthetic oligonucleotide
guaggcuggucaucgcggc

SEQ ID NO: 2730916 - RNA, 19 nt, Artificial Sequence
  Description of Artificial Sequence: Synthetic oligonucleotide
caaggcccggcuauaggug

SEQ ID NO: 2730917 - RNA, 19 nt, Artificial Sequence
  Description of Artificial Sequence: Synthetic oligonucleotide
aggcuggucaucgcggccg

SEQ ID NO: 2730918 - RNA, 19 nt, Artificial Sequence
  Description of Artificial Sequence: Synthetic oligonucleotide
uguccuuaccaaggcccgg

SEQ ID NO: 2730919 - RNA, 19 nt, Artificial Sequence
  Description of Artificial Sequence: Synthetic oligonucleotide
cacuguccuuaccaaggcc

SEQ ID NO: 2730920 - RNA, 19 nt, Artificial Sequence
  Description of Artificial Sequence: Synthetic oligonucleotide
gacugcaaugagugcugug

SEQ ID NO: 2730921 - RNA, 19 nt, Artificial Sequence
  Description of Artificial Sequence: Synthetic oligonucleotide
gucuggggaucauuagaug

SEQ ID NO: 2730922 - RNA, 19 nt, Artificial Sequence
  Description of Artificial Sequence: Synthetic oligonucleotide
acagguaaaagaagaucaa

SEQ ID NO: 2730923 - RNA, 19 nt, Artificial Sequence
  Description of Artificial Sequence: Synthetic oligonucleotide
auguuguuggccaggugug

SEQ ID NO: 2730924 - RNA, 19 nt, Artificial Sequence
  Description of Artificial Sequence: Synthetic oligonucleotide
uaggugacguagcugccuu

SEQ ID NO: 2730925 - RNA, 19 nt, Artificial Sequence
  Description of Artificial Sequence: Synthetic oligonucleotide
cucauaggugacguagcug

SEQ ID NO: 2730926 - RNA, 19 nt, Artificial Sequence
  Description of Artificial Sequence: Synthetic oligonucleotide
gguaggcuggucaucgcgg

SEQ ID NO: 2730927 - RNA, 19 nt, Artificial Sequence
  Description of Artificial Sequence: Synthetic oligonucleotide
gaggaucucgcagggucag

SEQ ID NO: 2730928 - RNA, 19 nt, Artificial Sequence
  Description of Artificial Sequence: Synthetic oligonucleotide
ucuucagcuuguggggaca

SEQ ID NO: 2730929 - RNA, 19 nt, Artificial Sequence
  Description of Artificial Sequence: Synthetic oligonucleotide
ggcagaggaucucgcaggg

SEQ ID NO: 2730930 - RNA, 19 nt, Artificial Sequence
  Description of Artificial Sequence: Synthetic oligonucleotide
uguuguuggccagguguga

SEQ ID NO: 2730931 - RNA, 19 nt, Artificial Sequence
  Description of Artificial Sequence: Synthetic oligonucleotide
gggaucauuagaugaagua

SEQ ID NO: 2730932 - RNA, 19 nt, Artificial Sequence
  Description of Artificial Sequence: Synthetic oligonucleotide
auaggugacguagcugccu

SEQ ID NO: 2730933 - RNA, 19 nt, Artificial Sequence
  Description of Artificial Sequence: Synthetic oligonucleotide
ggucaccacagagagcagg

SEQ ID NO: 2730934 - RNA, 19 nt, Artificial Sequence
  Description of Artificial Sequence: Synthetic oligonucleotide
gucaucgcggccgagggca

SEQ ID NO: 2730935 - RNA, 19 nt, Artificial Sequence
  Description of Artificial Sequence: Synthetic oligonucleotide
ucaggcacggccccauguu

SEQ ID NO: 2730936 - RNA, 19 nt, Artificial Sequence
  Description of Artificial Sequence: Synthetic oligonucleotide
cuggggaucauuagaugaa

SEQ ID NO: 2730937 - RNA, 19 nt, Artificial Sequence
  Description of Artificial Sequence: Synthetic oligonucleotide
cugugcuggccucuucagc

SEQ ID NO: 2730938 - RNA, 19 nt, Artificial Sequence
  Description of Artificial Sequence: Synthetic oligonucleotide
ccuucugcaggcucauagg

SEQ ID NO: 2730939 - RNA, 19 nt, Artificial Sequence
  Description of Artificial Sequence: Synthetic oligonucleotide
cuggucaucgcggccgagg

SEQ ID NO: 2730940 - RNA, 19 nt, Artificial Sequence
  Description of Artificial Sequence: Synthetic oligonucleotide
cagucuggggaucauuaga

SEQ ID NO: 2730941 - RNA, 19 nt, Artificial Sequence
  Description of Artificial Sequence: Synthetic oligonucleotide
aucaguucuccaggagaag

SEQ ID NO: 2730942 - RNA, 19 nt, Artificial Sequence
  Description of Artificial Sequence: Synthetic oligonucleotide
uaccaaggcccggcuauag

SEQ ID NO: 2730943 - RNA, 19 nt, Artificial Sequence
  Description of Artificial Sequence: Synthetic oligonucleotide
uccuuaccaaggcccggcu

SEQ ID NO: 2730944 - RNA, 19 nt, Artificial Sequence
  Description of Artificial Sequence: Synthetic oligonucleotide
cacuuccaacucaggcacg

SEQ ID NO: 2730945 - RNA, 19 nt, Artificial Sequence
  Description of Artificial Sequence: Synthetic oligonucleotide
ucgcugaugcugguauuug

SEQ ID NO: 2730946 - RNA, 19 nt, Artificial Sequence
  Description of Artificial Sequence: Synthetic oligonucleotide
gaucucgcagggucagauc

SEQ ID NO: 2730947 - RNA, 19 nt, Artificial Sequence
  Description of Artificial Sequence: Synthetic oligonucleotide
acgacugcaaugagugcug

SEQ ID NO: 2730948 - RNA, 19 nt, Artificial Sequence
  Description of Artificial Sequence: Synthetic oligonucleotide
gaauuggccccuccagucu

SEQ ID NO: 2730949 - RNA, 19 nt, Artificial Sequence
  Description of Artificial Sequence: Synthetic oligonucleotide
cacggugauaacgacugca

SEQ ID NO: 2730950 - RNA, 19 nt, Artificial Sequence
  Description of Artificial Sequence: Synthetic oligonucleotide
ggcuucagagcaaacguuc

SEQ ID NO: 2730951 - RNA, 19 nt, Artificial Sequence
  Description of Artificial Sequence: Synthetic oligonucleotide
uagcugguaggcuggucau

SEQ ID NO: 2730952 - RNA, 19 nt, Artificial Sequence
  Description of Artificial Sequence: Synthetic oligonucleotide
acggccccauguuguuggc

SEQ ID NO: 2730953 - RNA, 19 nt, Artificial Sequence
  Description of Artificial Sequence: Synthetic oligonucleotide
gucccuggacccuggaguc

SEQ ID NO: 2730954 - RNA, 19 nt, Artificial Sequence
  Description of Artificial Sequence: Synthetic oligonucleotide
uggccaggugugagcacug

SEQ ID NO: 2730955 - RNA, 19 nt, Artificial Sequence
  Description of Artificial Sequence: Synthetic oligonucleotide
gcggcuuucucuguguccc

SEQ ID NO: 2730956 - RNA, 19 nt, Artificial Sequence
  Description of Artificial Sequence: Synthetic oligonucleotide
guccuuaccaaggcccggc

SEQ ID NO: 2730957 - RNA, 19 nt, Artificial Sequence
  Description of Artificial Sequence: Synthetic oligonucleotide
uggggacuguguccuggga

SEQ ID NO: 2730958 - RNA, 19 nt, Artificial Sequence
  Description of Artificial Sequence: Synthetic oligonucleotide
agaggaucucgcaggguca

SEQ ID NO: 2730959 - RNA, 19 nt, Artificial Sequence
  Description of Artificial Sequence: Synthetic oligonucleotide
ugugucccuggacccugga

SEQ ID NO: 2730960 - RNA, 19 nt, Artificial Sequence
  Description of Artificial Sequence: Synthetic oligonucleotide
cuuaccaaggcccggcuau

SEQ ID NO: 2730961 - RNA, 19 nt, Artificial Sequence
  Description of Artificial Sequence: Synthetic oligonucleotide
auuuggggacuguguccug

SEQ ID NO: 2730962 - RNA, 19 nt, Artificial Sequence
  Description of Artificial Sequence: Synthetic oligonucleotide
cucgccuucugcaggcuca

SEQ ID NO: 2730963 - RNA, 19 nt, Artificial Sequence
  Description of Artificial Sequence: Synthetic oligonucleotide
ggaccugaagaacuggugu

SEQ ID NO: 2730964 - RNA, 19 nt, Artificial Sequence
  Description of Artificial Sequence: Synthetic oligonucleotide
ucaucgcggccgagggcag

SEQ ID NO: 2730965 - RNA, 19 nt, Artificial Sequence
  Description of Artificial Sequence: Synthetic oligonucleotide
acggugauaacgacugcaa

SEQ ID NO: 2730966 - RNA, 19 nt, Artificial Sequence
  Description of Artificial Sequence: Synthetic oligonucleotide
guggauuugccaucucacu

SEQ ID NO: 2730967 - RNA, 19 nt, Artificial Sequence
  Description of Artificial Sequence: Synthetic oligonucleotide
ggugacguagcugccuuug

SEQ ID NO: 2730968 - RNA, 19 nt, Artificial Sequence
  Description of Artificial Sequence: Synthetic oligonucleotide
cugagucacucuccaucug

SEQ ID NO: 2730969 - RNA, 19 nt, Artificial Sequence
  Description of Artificial Sequence: Synthetic oligonucleotide
ugcugguauuuggggacug

SEQ ID NO: 2730970 - RNA, 19 nt, Artificial Sequence
  Description of Artificial Sequence: Synthetic oligonucleotide
cuucagcuuguggggacag

SEQ ID NO: 2730971 - RNA, 19 nt, Artificial Sequence
  Description of Artificial Sequence: Synthetic oligonucleotide
gagucgcugaugcugguau

SEQ ID NO: 2730972 - RNA, 19 nt, Artificial Sequence
  Description of Artificial Sequence: Synthetic oligonucleotide
ccaucucacucaaugccac

SEQ ID NO: 2730973 - RNA, 19 nt, Artificial Sequence
  Description of Artificial Sequence: Synthetic oligonucleotide
ugaguggauuugccaucuc

SEQ ID NO: 2730974 - RNA, 19 nt, Artificial Sequence
  Description of Artificial Sequence: Synthetic oligonucleotide
ggaugugaguggauuugcc

SEQ ID NO: 2730975 - RNA, 19 nt, Artificial Sequence
  Description of Artificial Sequence: Synthetic oligonucleotide
caggcacggccccauguug

SEQ ID NO: 2730976 - RNA, 19 nt, Artificial Sequence
  Description of Artificial Sequence: Synthetic oligonucleotide
cugguaggcuggucaucgc

SEQ ID NO: 2730977 - RNA, 19 nt, Artificial Sequence
  Description of Artificial Sequence: Synthetic oligonucleotide
agcugguaggcuggucauc

SEQ ID NO: 2730978 - RNA, 19 nt, Artificial Sequence
  Description of Artificial Sequence: Synthetic oligonucleotide
gggaugugaguggauuugc

SEQ ID NO: 2730979 - RNA, 19 nt, Artificial Sequence
  Description of Artificial Sequence: Synthetic oligonucleotide
aacucaggcacggccccau

SEQ ID NO: 2730980 - RNA, 19 nt, Artificial Sequence
  Description of Artificial Sequence: Synthetic oligonucleotide
gaagaacugguguggucau

SEQ ID NO: 2730981 - RNA, 19 nt, Artificial Sequence
  Description of Artificial Sequence: Synthetic oligonucleotide
cagagcaaacguucccuaa

SEQ ID NO: 2730982 - RNA, 19 nt, Artificial Sequence
  Description of Artificial Sequence: Synthetic oligonucleotide
gagcaaacguucccuaauu

SEQ ID NO: 2730983 - RNA, 19 nt, Artificial Sequence
  Description of Artificial Sequence: Synthetic oligonucleotide
ggugugagcacuguccuua

SEQ ID NO: 2730984 - RNA, 19 nt, Artificial Sequence
  Description of Artificial Sequence: Synthetic oligonucleotide
ggccccauguuguuggcca

SEQ ID NO: 2730985 - RNA, 19 nt, Artificial Sequence
  Description of Artificial Sequence: Synthetic oligonucleotide
uuggccccuccagucuggg

SEQ ID NO: 2730986 - RNA, 19 nt, Artificial Sequence
  Description of Artificial Sequence: Synthetic oligonucleotide
uggccccuccagucugggg

SEQ ID NO: 2730987 - RNA, 19 nt, Artificial Sequence
  Description of Artificial Sequence: Synthetic oligonucleotide
cuucucucugcccuuggcu

SEQ ID NO: 2730988 - RNA, 19 nt, Artificial Sequence
  Description of Artificial Sequence: Synthetic oligonucleotide
cugcaggcucauaggugac

SEQ ID NO: 2730989 - RNA, 19 nt, Artificial Sequence
  Description of Artificial Sequence: Synthetic oligonucleotide
ccagucuggggaucauuag

SEQ ID NO: 2730990 - RNA, 19 nt, Artificial Sequence
  Description of Artificial Sequence: Synthetic oligonucleotide
uguagcugguaggcugguc

SEQ ID NO: 2730991 - RNA, 19 nt, Artificial Sequence
  Description of Artificial Sequence: Synthetic oligonucleotide
gcugagucacucuccaucu

SEQ ID NO: 2730992 - RNA, 19 nt, Artificial Sequence
  Description of Artificial Sequence: Synthetic oligonucleotide
caucuggaggauggugcug

SEQ ID NO: 2730993 - RNA, 19 nt, Artificial Sequence
  Description of Artificial Sequence: Synthetic oligonucleotide
ccaacucaggcacggcccc

SEQ ID NO: 2730994 - RNA, 19 nt, Artificial Sequence
  Description of Artificial Sequence: Synthetic oligonucleotide
cucugcccuuggcugaguc

SEQ ID NO: 2730995 - RNA, 19 nt, Artificial Sequence
  Description of Artificial Sequence: Synthetic oligonucleotide
ccuuggcugagucacucuc

SEQ ID NO: 2730996 - RNA, 19 nt, Artificial Sequence
  Description of Artificial Sequence: Synthetic oligonucleotide
uaggugucauaagcggcuu

SEQ ID NO: 2730997 - RNA, 19 nt, Artificial Sequence
  Description of Artificial Sequence: Synthetic oligonucleotide
ccggcuauaggugucauaa

SEQ ID NO: 2730998 - RNA, 19 nt, Artificial Sequence
  Description of Artificial Sequence: Synthetic oligonucleotide
agucgcugaugcugguauu

SEQ ID NO: 2730999 - RNA, 19 nt, Artificial Sequence
  Description of Artificial Sequence: Synthetic oligonucleotide
cgcugaugcugguauuugg

SEQ ID NO: 2731000 - RNA, 19 nt, Artificial Sequence
  Description of Artificial Sequence: Synthetic oligonucleotide
guuggccaggugugagcac

SEQ ID NO: 2731001 - RNA, 19 nt, Artificial Sequence
  Description of Artificial Sequence: Synthetic oligonucleotide
uuaccaaggcccggcuaua

SEQ ID NO: 2731002 - RNA, 19 nt, Artificial Sequence
  Description of Artificial Sequence: Synthetic oligonucleotide
aggugucauaagcggcuuu

SEQ ID NO: 2731003 - RNA, 19 nt, Artificial Sequence
  Description of Artificial Sequence: Synthetic oligonucleotide
gccaucucacucaaugcca

SEQ ID NO: 2731004 - RNA, 19 nt, Artificial Sequence
  Description of Artificial Sequence: Synthetic oligonucleotide
aggcacggccccauguugu

SEQ ID NO: 2731005 - RNA, 19 nt, Artificial Sequence
  Description of Artificial Sequence: Synthetic oligonucleotide
acucaggcacggccccaug

SEQ ID NO: 2731006 - RNA, 19 nt, Artificial Sequence
  Description of Artificial Sequence: Synthetic oligonucleotide
gugaguggauuugccaucu

SEQ ID NO: 2731007 - RNA, 19 nt, Artificial Sequence
  Description of Artificial Sequence: Synthetic oligonucleotide
cugcaaugagugcugugcu

SEQ ID NO: 2731008 - RNA, 19 nt, Artificial Sequence
  Description of Artificial Sequence: Synthetic oligonucleotide
uggcugagucacucuccau

SEQ ID NO: 2731009 - RNA, 19 nt, Artificial Sequence
  Description of Artificial Sequence: Synthetic oligonucleotide
caccacggugauaacgacu

SEQ ID NO: 2731010 - RNA, 19 nt, Artificial Sequence
  Description of Artificial Sequence: Synthetic oligonucleotide
gggcucgccuucugcaggc

SEQ ID NO: 2731011 - RNA, 19 nt, Artificial Sequence
  Description of Artificial Sequence: Synthetic oligonucleotide
cagagagcagggugaggaa

SEQ ID NO: 2731012 - RNA, 19 nt, Artificial Sequence
  Description of Artificial Sequence: Synthetic oligonucleotide
gcacuggagccaagaauug

SEQ ID NO: 2731013 - RNA, 19 nt, Artificial Sequence
  Description of Artificial Sequence: Synthetic oligonucleotide
gagccaagaauuggccccu

SEQ ID NO: 2731014 - RNA, 19 nt, Artificial Sequence
  Description of Artificial Sequence: Synthetic oligonucleotide
ccgagggcagaggaucucg

SEQ ID NO: 2731015 - RNA, 19 nt, Artificial Sequence
  Description of Artificial Sequence: Synthetic oligonucleotide
gcucauaggugacguagcu

SEQ ID NO: 2731016 - RNA, 19 nt, Artificial Sequence
  Description of Artificial Sequence: Synthetic oligonucleotide
ggcuuucucugugucccug

SEQ ID NO: 2731017 - RNA, 19 nt, Artificial Sequence
  Description of Artificial Sequence: Synthetic oligonucleotide
ggucaucgcggccgagggc

SEQ ID NO: 2731018 - RNA, 19 nt, Artificial Sequence
  Description of Artificial Sequence: Synthetic oligonucleotide
cauaagcggcuuucucugu

SEQ ID NO: 2731019 - RNA, 19 nt, Artificial Sequence
  Description of Artificial Sequence: Synthetic oligonucleotide
aggugacguagcugccuuu

SEQ ID NO: 2731020 - RNA, 19 nt, Artificial Sequence
  Description of Artificial Sequence: Synthetic oligonucleotide
ggaacaccacggugauaac

SEQ ID NO: 2731021 - RNA, 19 nt, Artificial Sequence
  Description of Artificial Sequence: Synthetic oligonucleotide
cuggccucuucagcuugug

SEQ ID NO: 2731022 - RNA, 19 nt, Artificial Sequence
  Description of Artificial Sequence: Synthetic oligonucleotide
cuggacccuggagucgcug

SEQ ID NO: 2731023 - RNA, 19 nt, Artificial Sequence
  Description of Artificial Sequence: Synthetic oligonucleotide
caucucacucaaugccacu

SEQ ID NO: 2731024 - RNA, 19 nt, Artificial Sequence
  Description of Artificial Sequence: Synthetic oligonucleotide
gccaggugugagcacuguc

SEQ ID NO: 2731025 - RNA, 19 nt, Artificial Sequence
  Description of Artificial Sequence: Synthetic oligonucleotide
gugacguagcugccuuugu

SEQ ID NO: 2731026 - RNA, 19 nt, Artificial Sequence
  Description of Artificial Sequence: Synthetic oligonucleotide
ucgccuucugcaggcucau

SEQ ID NO: 2731027 - RNA, 19 nt, Artificial Sequence
  Description of Artificial Sequence: Synthetic oligonucleotide
ccaaggcccggcuauaggu

SEQ ID NO: 2731028 - RNA, 19 nt, Artificial Sequence
  Description of Artificial Sequence: Synthetic oligonucleotide
aggaucucgcagggucaga

SEQ ID NO: 2731029 - RNA, 19 nt, Artificial Sequence
  Description of Artificial Sequence: Synthetic oligonucleotide
cucaggcacggccccaugu

SEQ ID NO: 2731030 - RNA, 19 nt, Artificial Sequence
  Description of Artificial Sequence: Synthetic oligonucleotide
gucgcugaugcugguauuu

SEQ ID NO: 2731031 - RNA, 19 nt, Artificial Sequence
  Description of Artificial Sequence: Synthetic oligonucleotide
aggucaccacagagagcag

SEQ ID NO: 2731032 - RNA, 19 nt, Artificial Sequence
  Description of Artificial Sequence: Synthetic oligonucleotide
auuugccaucucacucaau

SEQ ID NO: 2731033 - RNA, 19 nt, Artificial Sequence
  Description of Artificial Sequence: Synthetic oligonucleotide
cgagggcagaggaucucgc

SEQ ID NO: 2731034 - RNA, 19 nt, Artificial Sequence
  Description of Artificial Sequence: Synthetic oligonucleotide
ggggaucauuagaugaagu

SEQ ID NO: 2731035 - RNA, 19 nt, Artificial Sequence
  Description of Artificial Sequence: Synthetic oligonucleotide
cagcuuguggggacagggu

SEQ ID NO: 2731036 - RNA, 19 nt, Artificial Sequence
  Description of Artificial Sequence: Synthetic oligonucleotide
ucucugcccuuggcugagu

SEQ ID NO: 2731037 - RNA, 19 nt, Artificial Sequence
  Description of Artificial Sequence: Synthetic oligonucleotide
ccccauguuguuggccagg

SEQ ID NO: 2731038 - RNA, 19 nt, Artificial Sequence
  Description of Artificial Sequence: Synthetic oligonucleotide
gcuuguggggacagggucu

SEQ ID NO: 2731039 - RNA, 19 nt, Artificial Sequence
  Description of Artificial Sequence: Synthetic oligonucleotide
cggcuauaggugucauaag

SEQ ID NO: 2731040 - RNA, 19 nt, Artificial Sequence
  Description of Artificial Sequence: Synthetic oligonucleotide
ccacggugauaacgacugc

SEQ ID NO: 2731041 - RNA, 19 nt, Artificial Sequence
  Description of Artificial Sequence: Synthetic oligonucleotide
gcaggcucauaggugacgu

SEQ ID NO: 2731042 - RNA, 19 nt, Artificial Sequence
  Description of Artificial Sequence: Synthetic oligonucleotide
gcucgccuucugcaggcuc

SEQ ID NO: 2731043 - RNA, 19 nt, Artificial Sequence
  Description of Artificial Sequence: Synthetic oligonucleotide
ggaucucgcagggucagau

SEQ ID NO: 2731044 - RNA, 19 nt, Artificial Sequence
  Description of Artificial Sequence: Synthetic oligonucleotide
caggcucauaggugacgua

SEQ ID NO: 2731045 - RNA, 19 nt, Artificial Sequence
  Description of Artificial Sequence: Synthetic oligonucleotide
gcccuuggcugagucacuc

SEQ ID NO: 2731046 - RNA, 19 nt, Artificial Sequence
  Description of Artificial Sequence: Synthetic oligonucleotide
ggagaagguguagcuggua

SEQ ID NO: 2731047 - RNA, 19 nt, Artificial Sequence
  Description of Artificial Sequence: Synthetic oligonucleotide
gcacggccccauguuguug

SEQ ID NO: 2731048 - RNA, 19 nt, Artificial Sequence
  Description of Artificial Sequence: Synthetic oligonucleotide
ggcuggucaucgcggccga

SEQ ID NO: 2731049 - RNA, 19 nt, Artificial Sequence
  Description of Artificial Sequence: Synthetic oligonucleotide
cucugugucccuggacccu

SEQ ID NO: 2731050 - RNA, 19 nt, Artificial Sequence
  Description of Artificial Sequence: Synthetic oligonucleotide
cguucccuaauuacagagu

SEQ ID NO: 2731051 - RNA, 19 nt, Artificial Sequence
  Description of Artificial Sequence: Synthetic oligonucleotide
ggcccggcuauagguguca

SEQ ID NO: 2731052 - RNA, 19 nt, Artificial Sequence
  Description of Artificial Sequence: Synthetic oligonucleotide
cggccgagggcagaggauc

SEQ ID NO: 2731053 - RNA, 19 nt, Artificial Sequence
  Description of Artificial Sequence: Synthetic oligonucleotide
ccugaagaacugguguggu

SEQ ID NO: 2731054 - RNA, 19 nt, Artificial Sequence
  Description of Artificial Sequence: Synthetic oligonucleotide
ccuuaccaaggcccggcua

SEQ ID NO: 2731055 - RNA, 19 nt, Artificial Sequence
  Description of Artificial Sequence: Synthetic oligonucleotide
gcugguauuuggggacugu

SEQ ID NO: 2731056 - RNA, 19 nt, Artificial Sequence
  Description of Artificial Sequence: Synthetic oligonucleotide
gcuggucaucgcggccgag

SEQ ID NO: 2731057 - RNA, 19 nt, Artificial Sequence
  Description of Artificial Sequence: Synthetic oligonucleotide
guguagcugguaggcuggu

SEQ ID NO: 2731058 - RNA, 19 nt, Artificial Sequence
  Description of Artificial Sequence: Synthetic oligonucleotide
ccugggaugugaguggauu

SEQ ID NO: 2731059 - RNA, 19 nt, Artificial Sequence
  Description of Artificial Sequence: Synthetic oligonucleotide
gccgagggcagaggaucuc

SEQ ID NO: 2731060 - RNA, 19 nt, Artificial Sequence
  Description of Artificial Sequence: Synthetic oligonucleotide
ggcacggccccauguuguu

SEQ ID NO: 2731061 - RNA, 19 nt, Artificial Sequence
  Description of Artificial Sequence: Synthetic oligonucleotide
cuccagucuggggaucauu

SEQ ID NO: 2731062 - RNA, 19 nt, Artificial Sequence
  Description of Artificial Sequence: Synthetic oligonucleotide
ggccgagggcagaggaucu

SEQ ID NO: 2731063 - RNA, 19 nt, Artificial Sequence
  Description of Artificial Sequence: Synthetic oligonucleotide
cccauguuguuggccaggu

SEQ ID NO: 2731064 - RNA, 19 nt, Artificial Sequence
  Description of Artificial Sequence: Synthetic oligonucleotide
cggccccauguuguuggcc

SEQ ID NO: 2731065 - RNA, 19 nt, Artificial Sequence
  Description of Artificial Sequence: Synthetic oligonucleotide
gccccuccagucuggggau

SEQ ID NO: 2731066 - RNA, 19 nt, Artificial Sequence
  Description of Artificial Sequence: Synthetic oligonucleotide
cccggcuauaggugucaua

SEQ ID NO: 2731067 - RNA, 19 nt, Artificial Sequence
  Description of Artificial Sequence: Synthetic oligonucleotide
gcuggccucuucagcuugu

SEQ ID NO: 2731068 - RNA, 19 nt, Artificial Sequence
  Description of Artificial Sequence: Synthetic oligonucleotide
cggugauaacgacugcaau

SEQ ID NO: 2731069 - RNA, 19 nt, Artificial Sequence
  Description of Artificial Sequence: Synthetic oligonucleotide
cccuuggcugagucacucu

SEQ ID NO: 2731070 - RNA, 19 nt, Artificial Sequence
  Description of Artificial Sequence: Synthetic oligonucleotide
ccccuccagucuggggauc

SEQ ID NO: 2731071 - RNA, 19 nt, Artificial Sequence
  Description of Artificial Sequence: Synthetic oligonucleotide
ggcucgccuucugcaggcu

SEQ ID NO: 2731072 - RNA, 19 nt, Artificial Sequence
  Description of Artificial Sequence: Synthetic oligonucleotide
gcggccgagggcagaggau

SEQ ID NO: 2731073 - RNA, 19 nt, Artificial Sequence
  Description of Artificial Sequence: Synthetic oligonucleotide
cgacugcaaugagugcugu

SEQ ID NO: 2731074 - RNA, 19 nt, Artificial Sequence
  Description of Artificial Sequence: Synthetic oligonucleotide
gcccggcuauaggugucau

SEQ ID NO: 2731075 - RNA, 19 nt, Artificial Sequence
  Description of Artificial Sequence: Synthetic oligonucleotide
cgccuucugcaggcucaua

SEQ ID NO: 2731076 - RNA, 19 nt, Artificial Sequence
  Description of Artificial Sequence: Synthetic oligonucleotide
uuuuguuuugcgaagaaga

SEQ ID NO: 2731077 - RNA, 19 nt, Artificial Sequence
  Description of Artificial Sequence: Synthetic oligonucleotide
aagaagaaucgucugcagc

SEQ ID NO: 2731078 - RNA, 19 nt, Artificial Sequence
  Description of Artificial Sequence: Synthetic oligonucleotide
aagucgaaauuccacuugc

SEQ ID NO: 2731079 - RNA, 19 nt, Artificial Sequence
  Description of Artificial Sequence: Synthetic oligonucleotide
uguuuugcgaagaagaauc

SEQ ID NO: 2731080 - RNA, 19 nt, Artificial Sequence
  Description of Artificial Sequence: Synthetic oligonucleotide
uuugacaucuuccuccccg

SEQ ID NO: 2731081 - RNA, 19 nt, Artificial Sequence
  Description of Artificial Sequence: Synthetic oligonucleotide
auuugcuccaccaaaugcc

SEQ ID NO: 2731082 - RNA, 19 nt, Artificial Sequence
  Description of Artificial Sequence: Synthetic oligonucleotide
agcucuucgugauugaccg

SEQ ID NO: 2731083 - RNA, 19 nt, Artificial Sequence
  Description of Artificial Sequence: Synthetic oligonucleotide
aaucgucugcagcaggucg

SEQ ID NO: 2731084 - RNA, 19 nt, Artificial Sequence
  Description of Artificial Sequence: Synthetic oligonucleotide
uguaguagaacuccggcaa

SEQ ID NO: 2731085 - RNA, 19 nt, Artificial Sequence
  Description of Artificial Sequence: Synthetic oligonucleotide
cuugugauucugaaagucg

SEQ ID NO: 2731086 - RNA, 19 nt, Artificial Sequence
  Description of Artificial Sequence: Synthetic oligonucleotide
uagaacuccggcaagcugc

SEQ ID NO: 2731087 - RNA, 19 nt, Artificial Sequence
  Description of Artificial Sequence: Synthetic oligonucleotide
aagagguuucugcaggcgg

SEQ ID NO: 2731088 - RNA, 19 nt, Artificial Sequence
  Description of Artificial Sequence: Synthetic oligonucleotide
agaagaaucgucugcagca

SEQ ID NO: 2731089 - RNA, 19 nt, Artificial Sequence
  Description of Artificial Sequence: Synthetic oligonucleotide
ugaaagucgaaauuccacu

SEQ ID NO: 2731090 - RNA, 19 nt, Artificial Sequence
  Description of Artificial Sequence: Synthetic oligonucleotide
aaagucgaaauuccacuug

SEQ ID NO: 2731091 - RNA, 19 nt, Artificial Sequence
  Description of Artificial Sequence: Synthetic oligonucleotide
uuagauacucguacguuug

SEQ ID NO: 2731092 - RNA, 19 nt, Artificial Sequence
  Description of Artificial Sequence: Synthetic oligonucleotide
uuugcgaagaagaaucguc

SEQ ID NO: 2731093 - RNA, 19 nt, Artificial Sequence
  Description of Artificial Sequence: Synthetic oligonucleotide
aauugaaggcaccgccugg

SEQ ID NO: 2731094 - RNA, 19 nt, Artificial Sequence
  Description of Artificial Sequence: Synthetic oligonucleotide
ucgaaauuccacuugcgcu

SEQ ID NO: 2731095 - RNA, 19 nt, Artificial Sequence
  Description of Artificial Sequence: Synthetic oligonucleotide
uucgugauugaccgggccg

SEQ ID NO: 2731096 - RNA, 19 nt, Artificial Sequence
  Description of Artificial Sequence: Synthetic oligonucleotide
uugugauucugaaagucga

SEQ ID NO: 2731097 - RNA, 19 nt, Artificial Sequence
  Description of Artificial Sequence: Synthetic oligonucleotide
uuuguuuugcgaagaagaa

SEQ ID NO: 2731098 - RNA, 19 nt, Artificial Sequence
  Description of Artificial Sequence: Synthetic oligonucleotide
ucugaaagucgaaauucca

SEQ ID NO: 2731099 - RNA, 19 nt, Artificial Sequence
  Description of Artificial Sequence: Synthetic oligonucleotide
uuugccugggacccaauug

SEQ ID NO: 2731100 - RNA, 19 nt, Artificial Sequence
  Description of Artificial Sequence: Synthetic oligonucleotide
acugguaucugccuuccag

SEQ ID NO: 2731101 - RNA, 19 nt, Artificial Sequence
  Description of Artificial Sequence: Synthetic oligonucleotide
aagaaucgucugcagcagg

SEQ ID NO: 2731102 - RNA, 19 nt, Artificial Sequence
  Description of Artificial Sequence: Synthetic oligonucleotide
ucagaguuugccugggacc

SEQ ID NO: 2731103 - RNA, 19 nt, Artificial Sequence
  Description of Artificial Sequence: Synthetic oligonucleotide
uggacuguccgucggauca

SEQ ID NO: 2731104 - RNA, 19 nt, Artificial Sequence
  Description of Artificial Sequence: Synthetic oligonucleotide
guaucugccuuccaggggc

SEQ ID NO: 2731105 - RNA, 19 nt, Artificial Sequence
  Description of Artificial Sequence: Synthetic oligonucleotide
cauuugcuccaccaaaugc

SEQ ID NO: 2731106 - RNA, 19 nt, Artificial Sequence
  Description of Artificial Sequence: Synthetic oligonucleotide
auuccacuugcgcugacuc

SEQ ID NO: 2731107 - RNA, 19 nt, Artificial Sequence
  Description of Artificial Sequence: Synthetic oligonucleotide
aaugccgguccucagaguu

SEQ ID NO: 2731108 - RNA, 19 nt, Artificial Sequence
  Description of Artificial Sequence: Synthetic oligonucleotide
uugcgaagaagaaucgucu

SEQ ID NO: 2731109 - RNA, 19 nt, Artificial Sequence
  Description of Artificial Sequence: Synthetic oligonucleotide
cugaaagucgaaauuccac

SEQ ID NO: 2731110 - RNA, 19 nt, Artificial Sequence
  Description of Artificial Sequence: Synthetic oligonucleotide
gggcuugugauucugaaag

SEQ ID NO: 2731111 - RNA, 19 nt, Artificial Sequence
  Description of Artificial Sequence: Synthetic oligonucleotide
ugauugaccgggccgaaga

SEQ ID NO: 2731112 - RNA, 19 nt, Artificial Sequence
  Description of Artificial Sequence: Synthetic oligonucleotide
ugguaucugccuuccaggg

SEQ ID NO: 2731113 - RNA, 19 nt, Artificial Sequence
  Description of Artificial Sequence: Synthetic oligonucleotide
ugauucugaaagucgaaau

SEQ ID NO: 2731114 - RNA, 19 nt, Artificial Sequence
  Description of Artificial Sequence: Synthetic oligonucleotide
aguuugguuccuucuguuc

SEQ ID NO: 2731115 - RNA, 19 nt, Artificial Sequence
  Description of Artificial Sequence: Synthetic oligonucleotide
auugaaggcaccgccuggc

SEQ ID NO: 2731116 - RNA, 19 nt, Artificial Sequence
  Description of Artificial Sequence: Synthetic oligonucleotide
ucccguuagauacucguac

SEQ ID NO: 2731117 - RNA, 19 nt, Artificial Sequence
  Description of Artificial Sequence: Synthetic oligonucleotide
auacucguacguuugacau

SEQ ID NO: 2731118 - RNA, 19 nt, Artificial Sequence
  Description of Artificial Sequence: Synthetic oligonucleotide
ucgggcucccguuagauac

SEQ ID NO: 2731119 - RNA, 19 nt, Artificial Sequence
  Description of Artificial Sequence: Synthetic oligonucleotide
uugccugggacccaauuga

SEQ ID NO: 2731120 - RNA, 19 nt, Artificial Sequence
  Description of Artificial Sequence: Synthetic oligonucleotide
ucuuccauaucucggcagu

SEQ ID NO: 2731121 - RNA, 19 nt, Artificial Sequence
  Description of Artificial Sequence: Synthetic oligonucleotide
gaagaagaaucgucugcag

SEQ ID NO: 2731122 - RNA, 19 nt, Artificial Sequence
  Description of Artificial Sequence: Synthetic oligonucleotide
cagugcuucuccaaguccc

SEQ ID NO: 2731123 - RNA, 19 nt, Artificial Sequence
  Description of Artificial Sequence: Synthetic oligonucleotide
aucucggcagugcuucucc

SEQ ID NO: 2731124 - RNA, 19 nt, Artificial Sequence
  Description of Artificial Sequence: Synthetic oligonucleotide
gauacucguacguuugaca

SEQ ID NO: 2731125 - RNA, 19 nt, Artificial Sequence
  Description of Artificial Sequence: Synthetic oligonucleotide
gucgaaauuccacuugcgc

SEQ ID NO: 2731126 - RNA, 19 nt, Artificial Sequence
  Description of Artificial Sequence: Synthetic oligonucleotide
uugacaucuuccuccccgg

SEQ ID NO: 2731127 - RNA, 19 nt, Artificial Sequence
  Description of Artificial Sequence: Synthetic oligonucleotide
ugaaggcaccgccuggcgg

SEQ ID NO: 2731128 - RNA, 19 nt, Artificial Sequence
  Description of Artificial Sequence: Synthetic oligonucleotide
uugaccgggccgaagaggu

SEQ ID NO: 2731129 - RNA, 19 nt, Artificial Sequence
  Description of Artificial Sequence: Synthetic oligonucleotide
ugcgccggcaccuugcgag

SEQ ID NO: 2731130 - RNA, 19 nt, Artificial Sequence
  Description of Artificial Sequence: Synthetic oligonucleotide
aaccccgcuggacuguccg

SEQ ID NO: 2731131 - RNA, 19 nt, Artificial Sequence
  Description of Artificial Sequence: Synthetic oligonucleotide
acucguacguuugacaucu

SEQ ID NO: 2731132 - RNA, 19 nt, Artificial Sequence
  Description of Artificial Sequence: Synthetic oligonucleotide
cucuucgugauugaccggg

SEQ ID NO: 2731133 - RNA, 19 nt, Artificial Sequence
  Description of Artificial Sequence: Synthetic oligonucleotide
ucgcuucuuccauaucucg

SEQ ID NO: 2731134 - RNA, 19 nt, Artificial Sequence
  Description of Artificial Sequence: Synthetic oligonucleotide
aacuccggcaagcugcccu

SEQ ID NO: 2731135 - RNA, 19 nt, Artificial Sequence
  Description of Artificial Sequence: Synthetic oligonucleotide
gaaggcaccgccuggcggc

SEQ ID NO: 2731136 - RNA, 19 nt, Artificial Sequence
  Description of Artificial Sequence: Synthetic oligonucleotide
ugcgaagaagaaucgucug

SEQ ID NO: 2731137 - RNA, 19 nt, Artificial Sequence
  Description of Artificial Sequence: Synthetic oligonucleotide
caaaugccgguccucagag

SEQ ID NO: 2731138 - RNA, 19 nt, Artificial Sequence
  Description of Artificial Sequence: Synthetic oligonucleotide
uguccgucggaucaggcau

SEQ ID NO: 2731139 - RNA, 19 nt, Artificial Sequence
  Description of Artificial Sequence: Synthetic oligonucleotide
uucuuccauaucucggcag

SEQ ID NO: 2731140 - RNA, 19 nt, Artificial Sequence
  Description of Artificial Sequence: Synthetic oligonucleotide
uccauaucucggcagugcu

SEQ ID NO: 2731141 - RNA, 19 nt, Artificial Sequence
  Description of Artificial Sequence: Synthetic oligonucleotide
ucggcagugcuucuccaag

SEQ ID NO: 2731142 - RNA, 19 nt, Artificial Sequence
  Description of Artificial Sequence: Synthetic oligonucleotide
agauacucguacguuugac

SEQ ID NO: 2731143 - RNA, 19 nt, Artificial Sequence
  Description of Artificial Sequence: Synthetic oligonucleotide
uccacuugcgcugacucgc

SEQ ID NO: 2731144 - RNA, 19 nt, Artificial Sequence
  Description of Artificial Sequence: Synthetic oligonucleotide
ucuguuggcccuuuuguuu

SEQ ID NO: 2731145 - RNA, 19 nt, Artificial Sequence
  Description of Artificial Sequence: Synthetic oligonucleotide
acuugcgcugacucgcuuc

SEQ ID NO: 2731146 - RNA, 19 nt, Artificial Sequence
  Description of Artificial Sequence: Synthetic oligonucleotide
uugaaggcaccgccuggcg

SEQ ID NO: 2731147 - RNA, 19 nt, Artificial Sequence
  Description of Artificial Sequence: Synthetic oligonucleotide
gaagaaucgucugcagcag

SEQ ID NO: 2731148 - RNA, 19 nt, Artificial Sequence
  Description of Artificial Sequence: Synthetic oligonucleotide
uuccacuugcgcugacucg

SEQ ID NO: 2731149 - RNA, 19 nt, Artificial Sequence
  Description of Artificial Sequence: Synthetic oligonucleotide
cucagaguuugccugggac

SEQ ID NO: 2731150 - RNA, 19 nt, Artificial Sequence
  Description of Artificial Sequence: Synthetic oligonucleotide
ucuggcguccauccucucc

SEQ ID NO: 2731151 - RNA, 19 nt, Artificial Sequence
  Description of Artificial Sequence: Synthetic oligonucleotide
cagaguuugccugggaccc

SEQ ID NO: 2731152 - RNA, 19 nt, Artificial Sequence
  Description of Artificial Sequence: Synthetic oligonucleotide
caucccugggcacugcucc

SEQ ID NO: 2731153 - RNA, 19 nt, Artificial Sequence
  Description of Artificial Sequence: Synthetic oligonucleotide
cauaucucggcagugcuuc

SEQ ID NO: 2731154 - RNA, 19 nt, Artificial Sequence
  Description of Artificial Sequence: Synthetic oligonucleotide
caauugaaggcaccgccug

SEQ ID NO: 2731155 - RNA, 19 nt, Artificial Sequence
  Description of Artificial Sequence: Synthetic oligonucleotide
gauugaccgggccgaagag

SEQ ID NO: 2731156 - RNA, 19 nt, Artificial Sequence
  Description of Artificial Sequence: Synthetic oligonucleotide
cucaguuugguuccuucug

SEQ ID NO: 2731157 - RNA, 19 nt, Artificial Sequence
  Description of Artificial Sequence: Synthetic oligonucleotide
uacguuugacaucuuccuc

SEQ ID NO: 2731158 - RNA, 19 nt, Artificial Sequence
  Description of Artificial Sequence: Synthetic oligonucleotide
cugggacccaauugaaggc

SEQ ID NO: 2731159 - RNA, 19 nt, Artificial Sequence
  Description of Artificial Sequence: Synthetic oligonucleotide
uagauacucguacguuuga

SEQ ID NO: 2731160 - RNA, 19 nt, Artificial Sequence
  Description of Artificial Sequence: Synthetic oligonucleotide
agggcguuggggugcgucc

SEQ ID NO: 2731161 - RNA, 19 nt, Artificial Sequence
  Description of Artificial Sequence: Synthetic oligonucleotide
ugacaucuuccuccccggg

SEQ ID NO: 2731162 - RNA, 19 nt, Artificial Sequence
  Description of Artificial Sequence: Synthetic oligonucleotide
uaguagaacuccggcaagc

SEQ ID NO: 2731163 - RNA, 19 nt, Artificial Sequence
  Description of Artificial Sequence: Synthetic oligonucleotide
guaguagaacuccggcaag

SEQ ID NO: 2731164 - RNA, 19 nt, Artificial Sequence
  Description of Artificial Sequence: Synthetic oligonucleotide
acucaguuugguuccuucu

SEQ ID NO: 2731165 - RNA, 19 nt, Artificial Sequence
  Description of Artificial Sequence: Synthetic oligonucleotide
uuguuuugcgaagaagaau

SEQ ID NO: 2731166 - RNA, 19 nt, Artificial Sequence
  Description of Artificial Sequence: Synthetic oligonucleotide
uggaccaccgccucggcuc

SEQ ID NO: 2731167 - RNA, 19 nt, Artificial Sequence
  Description of Artificial Sequence: Synthetic oligonucleotide
aucgucugcagcaggucgc

SEQ ID NO: 2731168 - RNA, 19 nt, Artificial Sequence
  Description of Artificial Sequence: Synthetic oligonucleotide
ugucuggcguccauccucu

SEQ ID NO: 2731169 - RNA, 19 nt, Artificial Sequence
  Description of Artificial Sequence: Synthetic oligonucleotide
auugaccgggccgaagagg

SEQ ID NO: 2731170 - RNA, 19 nt, Artificial Sequence
  Description of Artificial Sequence: Synthetic oligonucleotide
uuccauaucucggcagugc

SEQ ID NO: 2731171 - RNA, 19 nt, Artificial Sequence
  Description of Artificial Sequence: Synthetic oligonucleotide
acauccuggcucuccugcg

SEQ ID NO: 2731172 - RNA, 19 nt, Artificial Sequence
  Description of Artificial Sequence: Synthetic oligonucleotide
ucguacguuugacaucuuc

SEQ ID NO: 2731173 - RNA, 19 nt, Artificial Sequence
  Description of Artificial Sequence: Synthetic oligonucleotide
ugcuccaccaaaugccggu

SEQ ID NO: 2731174 - RNA, 19 nt, Artificial Sequence
  Description of Artificial Sequence: Synthetic oligonucleotide
uccaccaaaugccgguccu

SEQ ID NO: 2731175 - RNA, 19 nt, Artificial Sequence
  Description of Artificial Sequence: Synthetic oligonucleotide
uuggcccuuuuguuuugcg

SEQ ID NO: 2731176 - RNA, 19 nt, Artificial Sequence
  Description of Artificial Sequence: Synthetic oligonucleotide
agaacuccggcaagcugcc

SEQ ID NO: 2731177 - RNA, 19 nt, Artificial Sequence
  Description of Artificial Sequence: Synthetic oligonucleotide
gucuguaguagaacuccgg

SEQ ID NO: 2731178 - RNA, 19 nt, Artificial Sequence
  Description of Artificial Sequence: Synthetic oligonucleotide
ucuucgugauugaccgggc

SEQ ID NO: 2731179 - RNA, 19 nt, Artificial Sequence
  Description of Artificial Sequence: Synthetic oligonucleotide
acccaauugaaggcaccgc

SEQ ID NO: 2731180 - RNA, 19 nt, Artificial Sequence
  Description of Artificial Sequence: Synthetic oligonucleotide
guagaacuccggcaagcug

SEQ ID NO: 2731181 - RNA, 19 nt, Artificial Sequence
  Description of Artificial Sequence: Synthetic oligonucleotide
ucggaucaggcauuugcuc

SEQ ID NO: 2731182 - RNA, 19 nt, Artificial Sequence
  Description of Artificial Sequence: Synthetic oligonucleotide
agucgaaauuccacuugcg

SEQ ID NO: 2731183 - RNA, 19 nt, Artificial Sequence
  Description of Artificial Sequence: Synthetic oligonucleotide
cuguaguagaacuccggca

SEQ ID NO: 2731184 - RNA, 19 nt, Artificial Sequence
  Description of Artificial Sequence: Synthetic oligonucleotide
gguuccuucuguucuguug

SEQ ID NO: 2731185 - RNA, 19 nt, Artificial Sequence
  Description of Artificial Sequence: Synthetic oligonucleotide
cucgcuucuuccauaucuc

SEQ ID NO: 2731186 - RNA, 19 nt, Artificial Sequence
  Description of Artificial Sequence: Synthetic oligonucleotide
cguacguuugacaucuucc

SEQ ID NO: 2731187 - RNA, 19 nt, Artificial Sequence
  Description of Artificial Sequence: Synthetic oligonucleotide
ugggacccaauugaaggca

SEQ ID NO: 2731188 - RNA, 19 nt, Artificial Sequence
  Description of Artificial Sequence: Synthetic oligonucleotide
gguaucugccuuccagggg

SEQ ID NO: 2731189 - RNA, 19 nt, Artificial Sequence
  Description of Artificial Sequence: Synthetic oligonucleotide
cuucgugauugaccgggcc

SEQ ID NO: 2731190 - RNA, 19 nt, Artificial Sequence
  Description of Artificial Sequence: Synthetic oligonucleotide
aggcauuugcuccaccaaa

SEQ ID NO: 2731191 - RNA, 19 nt, Artificial Sequence
  Description of Artificial Sequence: Synthetic oligonucleotide
uggcccuuuuguuuugcga

SEQ ID NO: 2731192 - RNA, 19 nt, Artificial Sequence
  Description of Artificial Sequence: Synthetic oligonucleotide
ucgugauugaccgggccga

SEQ ID NO: 2731193 - RNA, 19 nt, Artificial Sequence
  Description of Artificial Sequence: Synthetic oligonucleotide
aguagaacuccggcaagcu

SEQ ID NO: 2731194 - RNA, 19 nt, Artificial Sequence
  Description of Artificial Sequence: Synthetic oligonucleotide
ugacucgcuucuuccauau

SEQ ID NO: 2731195 - RNA, 19 nt, Artificial Sequence
  Description of Artificial Sequence: Synthetic oligonucleotide
gaaagucgaaauuccacuu

SEQ ID NO: 2731196 - RNA, 19 nt, Artificial Sequence
  Description of Artificial Sequence: Synthetic oligonucleotide
gcgaagaagaaucgucugc

SEQ ID NO: 2731197 - RNA, 19 nt, Artificial Sequence
  Description of Artificial Sequence: Synthetic oligonucleotide
uucuguuggcccuuuuguu

SEQ ID NO: 2731198 - RNA, 19 nt, Artificial Sequence
  Description of Artificial Sequence: Synthetic oligonucleotide
aaaugccgguccucagagu

SEQ ID NO: 2731199 - RNA, 19 nt, Artificial Sequence
  Description of Artificial Sequence: Synthetic oligonucleotide
guuagauacucguacguuu

SEQ ID NO: 2731200 - RNA, 19 nt, Artificial Sequence
  Description of Artificial Sequence: Synthetic oligonucleotide
ugcgcugacucgcuucuuc

SEQ ID NO: 2731201 - RNA, 19 nt, Artificial Sequence
  Description of Artificial Sequence: Synthetic oligonucleotide
cgaaauuccacuugcgcug

SEQ ID NO: 2731202 - RNA, 19 nt, Artificial Sequence
  Description of Artificial Sequence: Synthetic oligonucleotide
uacucguacguuugacauc

SEQ ID NO: 2731203 - RNA, 19 nt, Artificial Sequence
  Description of Artificial Sequence: Synthetic oligonucleotide
uugcgaggcgccguugggg

SEQ ID NO: 2731204 - RNA, 19 nt, Artificial Sequence
  Description of Artificial Sequence: Synthetic oligonucleotide
guacguuugacaucuuccu

SEQ ID NO: 2731205 - RNA, 19 nt, Artificial Sequence
  Description of Artificial Sequence: Synthetic oligonucleotide
agaaucgucugcagcaggu

SEQ ID NO: 2731206 - RNA, 19 nt, Artificial Sequence
  Description of Artificial Sequence: Synthetic oligonucleotide
cccaauugaaggcaccgcc

SEQ ID NO: 2731207 - RNA, 19 nt, Artificial Sequence
  Description of Artificial Sequence: Synthetic oligonucleotide
guuggggugcguccgcuug

SEQ ID NO: 2731208 - RNA, 19 nt, Artificial Sequence
  Description of Artificial Sequence: Synthetic oligonucleotide
gggucuguaguagaacucc

SEQ ID NO: 2731209 - RNA, 19 nt, Artificial Sequence
  Description of Artificial Sequence: Synthetic oligonucleotide
accaaaugccgguccucag

SEQ ID NO: 2731210 - RNA, 19 nt, Artificial Sequence
  Description of Artificial Sequence: Synthetic oligonucleotide
accuccugccacugguauc

SEQ ID NO: 2731211 - RNA, 19 nt, Artificial Sequence
  Description of Artificial Sequence: Synthetic oligonucleotide
gaaauuccacuugcgcuga

SEQ ID NO: 2731212 - RNA, 19 nt, Artificial Sequence
  Description of Artificial Sequence: Synthetic oligonucleotide
gcuugucuggcguccaucc

SEQ ID NO: 2731213 - RNA, 19 nt, Artificial Sequence
  Description of Artificial Sequence: Synthetic oligonucleotide
uuccuucuguucuguuggc

SEQ ID NO: 2731214 - RNA, 19 nt, Artificial Sequence
  Description of Artificial Sequence: Synthetic oligonucleotide
cccguuagauacucguacg

SEQ ID NO: 2731215 - RNA, 19 nt, Artificial Sequence
  Description of Artificial Sequence: Synthetic oligonucleotide
guucuguuggcccuuuugu

SEQ ID NO: 2731216 - RNA, 19 nt, Artificial Sequence
  Description of Artificial Sequence: Synthetic oligonucleotide
cuugcgaggcgccguuggg

SEQ ID NO: 2731217 - RNA, 19 nt, Artificial Sequence
  Description of Artificial Sequence: Synthetic oligonucleotide
gagguuucugcaggcggag

SEQ ID NO: 2731218 - RNA, 19 nt, Artificial Sequence
  Description of Artificial Sequence: Synthetic oligonucleotide
ccgaagagguuucugcagg

SEQ ID NO: 2731219 - RNA, 19 nt, Artificial Sequence
  Description of Artificial Sequence: Synthetic oligonucleotide
ggcacugcuccgcuaaccc

SEQ ID NO: 2731220 - RNA, 19 nt, Artificial Sequence
  Description of Artificial Sequence: Synthetic oligonucleotide
ugccgguccucagaguuug

SEQ ID NO: 2731221 - RNA, 19 nt, Artificial Sequence
  Description of Artificial Sequence: Synthetic oligonucleotide
guguggaccaccgccucgg

SEQ ID NO: 2731222 - RNA, 19 nt, Artificial Sequence
  Description of Artificial Sequence: Synthetic oligonucleotide
cuccaccaaaugccggucc

SEQ ID NO: 2731223 - RNA, 19 nt, Artificial Sequence
  Description of Artificial Sequence: Synthetic oligonucleotide
uccugcgccggcaccuugc

SEQ ID NO: 2731224 - RNA, 19 nt, Artificial Sequence
  Description of Artificial Sequence: Synthetic oligonucleotide
gugauucugaaagucgaaa

SEQ ID NO: 2731225 - RNA, 19 nt, Artificial Sequence
  Description of Artificial Sequence: Synthetic oligonucleotide
ugcagcaggucgcuuccuc

SEQ ID NO: 2731226 - RNA, 19 nt, Artificial Sequence
  Description of Artificial Sequence: Synthetic oligonucleotide
uccuggcucuccugcgccg

SEQ ID NO: 2731227 - RNA, 19 nt, Artificial Sequence
  Description of Artificial Sequence: Synthetic oligonucleotide
ugacauccuggcucuccug

SEQ ID NO: 2731228 - RNA, 19 nt, Artificial Sequence
  Description of Artificial Sequence: Synthetic oligonucleotide
ucugccuuccaggggcuug

SEQ ID NO: 2731229 - RNA, 19 nt, Artificial Sequence
  Description of Artificial Sequence: Synthetic oligonucleotide
agagguuucugcaggcgga

SEQ ID NO: 2731230 - RNA, 19 nt, Artificial Sequence
  Description of Artificial Sequence: Synthetic oligonucleotide
acuguccgucggaucaggc

SEQ ID NO: 2731231 - RNA, 19 nt, Artificial Sequence
  Description of Artificial Sequence: Synthetic oligonucleotide
ucaucccugggcacugcuc

SEQ ID NO: 2731232 - RNA, 19 nt, Artificial Sequence
  Description of Artificial Sequence: Synthetic oligonucleotide
aucccugggcacugcuccg

SEQ ID NO: 2731233 - RNA, 19 nt, Artificial Sequence
  Description of Artificial Sequence: Synthetic oligonucleotide
gggccgaagagguuucugc

SEQ ID NO: 2731234 - RNA, 19 nt, Artificial Sequence
  Description of Artificial Sequence: Synthetic oligonucleotide
gcguccauccucuccaggc

SEQ ID NO: 2731235 - RNA, 19 nt, Artificial Sequence
  Description of Artificial Sequence: Synthetic oligonucleotide
ggucuguaguagaacuccg

SEQ ID NO: 2731236 - RNA, 19 nt, Artificial Sequence
  Description of Artificial Sequence: Synthetic oligonucleotide
aggcggagggcguuggggu

SEQ ID NO: 2731237 - RNA, 19 nt, Artificial Sequence
  Description of Artificial Sequence: Synthetic oligonucleotide
cuggcguccauccucucca

SEQ ID NO: 2731238 - RNA, 19 nt, Artificial Sequence
  Description of Artificial Sequence: Synthetic oligonucleotide
gcauuugcuccaccaaaug

SEQ ID NO: 2731239 - RNA, 19 nt, Artificial Sequence
  Description of Artificial Sequence: Synthetic oligonucleotide
gacuguccgucggaucagg

SEQ ID NO: 2731240 - RNA, 19 nt, Artificial Sequence
  Description of Artificial Sequence: Synthetic oligonucleotide
uccgcuaaccccgcuggac

SEQ ID NO: 2731241 - RNA, 19 nt, Artificial Sequence
  Description of Artificial Sequence: Synthetic oligonucleotide
cuucuuccauaucucggca

SEQ ID NO: 2731242 - RNA, 19 nt, Artificial Sequence
  Description of Artificial Sequence: Synthetic oligonucleotide
ugccugggacccaauugaa

SEQ ID NO: 2731243 - RNA, 19 nt, Artificial Sequence
  Description of Artificial Sequence: Synthetic oligonucleotide
cucccgcugacauccuggc

SEQ ID NO: 2731244 - RNA, 19 nt, Artificial Sequence
  Description of Artificial Sequence: Synthetic oligonucleotide
gcuugugauucugaaaguc

SEQ ID NO: 2731245 - RNA, 19 nt, Artificial Sequence
  Description of Artificial Sequence: Synthetic oligonucleotide
cggaucaggcauuugcucc

SEQ ID NO: 2731246 - RNA, 19 nt, Artificial Sequence
  Description of Artificial Sequence: Synthetic oligonucleotide
gcuccgcuaaccccgcugg

SEQ ID NO: 2731247 - RNA, 19 nt, Artificial Sequence
  Description of Artificial Sequence: Synthetic oligonucleotide
gccgaagagguuucugcag

SEQ ID NO: 2731248 - RNA, 19 nt, Artificial Sequence
  Description of Artificial Sequence: Synthetic oligonucleotide
cuuccauaucucggcagug

SEQ ID NO: 2731249 - RNA, 19 nt, Artificial Sequence
  Description of Artificial Sequence: Synthetic oligonucleotide
guuugacaucuuccucccc

SEQ ID NO: 2731250 - RNA, 19 nt, Artificial Sequence
  Description of Artificial Sequence: Synthetic oligonucleotide
uuggggugcguccgcuugu

SEQ ID NO: 2731251 - RNA, 19 nt, Artificial Sequence
  Description of Artificial Sequence: Synthetic oligonucleotide
accgccuggcggcucccgc

SEQ ID NO: 2731252 - RNA, 19 nt, Artificial Sequence
  Description of Artificial Sequence: Synthetic oligonucleotide
ugccacugguaucugccuu

SEQ ID NO: 2731253 - RNA, 19 nt, Artificial Sequence
  Description of Artificial Sequence: Synthetic oligonucleotide
ggcccuuuuguuuugcgaa

SEQ ID NO: 2731254 - RNA, 19 nt, Artificial Sequence
  Description of Artificial Sequence: Synthetic oligonucleotide
cgucggaucaggcauuugc

SEQ ID NO: 2731255 - RNA, 19 nt, Artificial Sequence
  Description of Artificial Sequence: Synthetic oligonucleotide
uugguuccuucuguucugu

SEQ ID NO: 2731256 - RNA, 19 nt, Artificial Sequence
  Description of Artificial Sequence: Synthetic oligonucleotide
ucccgggugagcucuucgu

SEQ ID NO: 2731257 - RNA, 19 nt, Artificial Sequence
  Description of Artificial Sequence: Synthetic oligonucleotide
gaaucgucugcagcagguc

SEQ ID NO: 2731258 - RNA, 19 nt, Artificial Sequence
  Description of Artificial Sequence: Synthetic oligonucleotide
ggaucaggcauuugcucca

SEQ ID NO: 2731259 - RNA, 19 nt, Artificial Sequence
  Description of Artificial Sequence: Synthetic oligonucleotide
ucgcuuccucaucccuggg

SEQ ID NO: 2731260 - RNA, 19 nt, Artificial Sequence
  Description of Artificial Sequence: Synthetic oligonucleotide
gcggguguggaccaccgcc

SEQ ID NO: 2731261 - RNA, 19 nt, Artificial Sequence
  Description of Artificial Sequence: Synthetic oligonucleotide
acugcuccgcuaaccccgc

SEQ ID NO: 2731262 - RNA, 19 nt, Artificial Sequence
  Description of Artificial Sequence: Synthetic oligonucleotide
ucucggcagugcuucucca

SEQ ID NO: 2731263 - RNA, 19 nt, Artificial Sequence
  Description of Artificial Sequence: Synthetic oligonucleotide
aggucgcuuccucaucccu

SEQ ID NO: 2731264 - RNA, 19 nt, Artificial Sequence
  Description of Artificial Sequence: Synthetic oligonucleotide
gcugcccuuguccaccucc

SEQ ID NO: 2731265 - RNA, 19 nt, Artificial Sequence
  Description of Artificial Sequence: Synthetic oligonucleotide
auaucucggcagugcuucu

SEQ ID NO: 2731266 - RNA, 19 nt, Artificial Sequence
  Description of Artificial Sequence: Synthetic oligonucleotide
caggcggagggcguugggg

SEQ ID NO: 2731267 - RNA, 19 nt, Artificial Sequence
  Description of Artificial Sequence: Synthetic oligonucleotide
uguggaccaccgccucggc

SEQ ID NO: 2731268 - RNA, 19 nt, Artificial Sequence
  Description of Artificial Sequence: Synthetic oligonucleotide
cccgcugacauccuggcuc

SEQ ID NO: 2731269 - RNA, 19 nt, Artificial Sequence
  Description of Artificial Sequence: Synthetic oligonucleotide
gcccuuuuguuuugcgaag

SEQ ID NO: 2731270 - RNA, 19 nt, Artificial Sequence
  Description of Artificial Sequence: Synthetic oligonucleotide
ugcguccgcuugucuggcg

SEQ ID NO: 2731271 - RNA, 19 nt, Artificial Sequence
  Description of Artificial Sequence: Synthetic oligonucleotide
cuguccgucggaucaggca

SEQ ID NO: 2731272 - RNA, 19 nt, Artificial Sequence
  Description of Artificial Sequence: Synthetic oligonucleotide
uccggcaagcugcccuugu

SEQ ID NO: 2731273 - RNA, 19 nt, Artificial Sequence
  Description of Artificial Sequence: Synthetic oligonucleotide
ugcccuuguccaccuccug

SEQ ID NO: 2731274 - RNA, 19 nt, Artificial Sequence
  Description of Artificial Sequence: Synthetic oligonucleotide
uaucucggcagugcuucuc

SEQ ID NO: 2731275 - RNA, 19 nt, Artificial Sequence
  Description of Artificial Sequence: Synthetic oligonucleotide
cguuugacaucuuccuccc

SEQ ID NO: 2731276 - RNA, 19 nt, Artificial Sequence
  Description of Artificial Sequence: Synthetic oligonucleotide
uccaggcucgggcucccgu

SEQ ID NO: 2731277 - RNA, 19 nt, Artificial Sequence
  Description of Artificial Sequence: Synthetic oligonucleotide
uaaccccgcuggacugucc

SEQ ID NO: 2731278 - RNA, 19 nt, Artificial Sequence
  Description of Artificial Sequence: Synthetic oligonucleotide
gggugcguccgcuugucug

SEQ ID NO: 2731279 - RNA, 19 nt, Artificial Sequence
  Description of Artificial Sequence: Synthetic oligonucleotide
ggcaagcugcccuugucca

SEQ ID NO: 2731280 - RNA, 19 nt, Artificial Sequence
  Description of Artificial Sequence: Synthetic oligonucleotide
gaucaggcauuugcuccac

SEQ ID NO: 2731281 - RNA, 19 nt, Artificial Sequence
  Description of Artificial Sequence: Synthetic oligonucleotide
gcggcucccgcugacaucc

SEQ ID NO: 2731282 - RNA, 19 nt, Artificial Sequence
  Description of Artificial Sequence: Synthetic oligonucleotide
uggcguccauccucuccag

SEQ ID NO: 2731283 - RNA, 19 nt, Artificial Sequence
  Description of Artificial Sequence: Synthetic oligonucleotide
aggcucgggcucccguuag

SEQ ID NO: 2731284 - RNA, 19 nt, Artificial Sequence
  Description of Artificial Sequence: Synthetic oligonucleotide
uccaggggcuugugauucu

SEQ ID NO: 2731285 - RNA, 19 nt, Artificial Sequence
  Description of Artificial Sequence: Synthetic oligonucleotide
cuggacuguccgucggauc

SEQ ID NO: 2731286 - RNA, 19 nt, Artificial Sequence
  Description of Artificial Sequence: Synthetic oligonucleotide
gcccuuguccaccuccugc

SEQ ID NO: 2731287 - RNA, 19 nt, Artificial Sequence
  Description of Artificial Sequence: Synthetic oligonucleotide
gugauugaccgggccgaag

SEQ ID NO: 2731288 - RNA, 19 nt, Artificial Sequence
  Description of Artificial Sequence: Synthetic oligonucleotide
ggccgaagagguuucugca

SEQ ID NO: 2731289 - RNA, 19 nt, Artificial Sequence
  Description of Artificial Sequence: Synthetic oligonucleotide
uggcggcucccgcugacau

SEQ ID NO: 2731290 - RNA, 19 nt, Artificial Sequence
  Description of Artificial Sequence: Synthetic oligonucleotide
ccccacucaguuugguucc

SEQ ID NO: 2731291 - RNA, 19 nt, Artificial Sequence
  Description of Artificial Sequence: Synthetic oligonucleotide
ucgucugcagcaggucgcu

SEQ ID NO: 2731292 - RNA, 19 nt, Artificial Sequence
  Description of Artificial Sequence: Synthetic oligonucleotide
ucccgcugacauccuggcu

SEQ ID NO: 2731293 - RNA, 19 nt, Artificial Sequence
  Description of Artificial Sequence: Synthetic oligonucleotide
cuucuguucuguuggcccu

SEQ ID NO: 2731294 - RNA, 19 nt, Artificial Sequence
  Description of Artificial Sequence: Synthetic oligonucleotide
ugggcacugcuccgcuaac

SEQ ID NO: 2731295 - RNA, 19 nt, Artificial Sequence
  Description of Artificial Sequence: Synthetic oligonucleotide
ucccugggcacugcuccgc

SEQ ID NO: 2731296 - RNA, 19 nt, Artificial Sequence
  Description of Artificial Sequence: Synthetic oligonucleotide
ccuugcgaggcgccguugg

SEQ ID NO: 2731297 - RNA, 19 nt, Artificial Sequence
  Description of Artificial Sequence: Synthetic oligonucleotide
caggcauuugcuccaccaa

SEQ ID NO: 2731298 - RNA, 19 nt, Artificial Sequence
  Description of Artificial Sequence: Synthetic oligonucleotide
cugggcacugcuccgcuaa

SEQ ID NO: 2731299 - RNA, 19 nt, Artificial Sequence
  Description of Artificial Sequence: Synthetic oligonucleotide
ggucgcuuccucaucccug

SEQ ID NO: 2731300 - RNA, 19 nt, Artificial Sequence
  Description of Artificial Sequence: Synthetic oligonucleotide
gccacugguaucugccuuc

SEQ ID NO: 2731301 - RNA, 19 nt, Artificial Sequence
  Description of Artificial Sequence: Synthetic oligonucleotide
gcacugcuccgcuaacccc

SEQ ID NO: 2731302 - RNA, 19 nt, Artificial Sequence
  Description of Artificial Sequence: Synthetic oligonucleotide
gcugacauccuggcucucc

SEQ ID NO: 2731303 - RNA, 19 nt, Artificial Sequence
  Description of Artificial Sequence: Synthetic oligonucleotide
gcucuucgugauugaccgg

SEQ ID NO: 2731304 - RNA, 19 nt, Artificial Sequence
  Description of Artificial Sequence: Synthetic oligonucleotide
gucggaucaggcauuugcu

SEQ ID NO: 2731305 - RNA, 19 nt, Artificial Sequence
  Description of Artificial Sequence: Synthetic oligonucleotide
gaguuugccugggacccaa

SEQ ID NO: 2731306 - RNA, 19 nt, Artificial Sequence
  Description of Artificial Sequence: Synthetic oligonucleotide
uucuguucuguuggcccuu

SEQ ID NO: 2731307 - RNA, 19 nt, Artificial Sequence
  Description of Artificial Sequence: Synthetic oligonucleotide
guccgcuugucuggcgucc

SEQ ID NO: 2731308 - RNA, 19 nt, Artificial Sequence
  Description of Artificial Sequence: Synthetic oligonucleotide
cuugcgcugacucgcuucu

SEQ ID NO: 2731309 - RNA, 19 nt, Artificial Sequence
  Description of Artificial Sequence: Synthetic oligonucleotide
gagggcguuggggugcguc

SEQ ID NO: 2731310 - RNA, 19 nt, Artificial Sequence
  Description of Artificial Sequence: Synthetic oligonucleotide
cucccguuagauacucgua

SEQ ID NO: 2731311 - RNA, 19 nt, Artificial Sequence
  Description of Artificial Sequence: Synthetic oligonucleotide
cugacucgcuucuuccaua

SEQ ID NO: 2731312 - RNA, 19 nt, Artificial Sequence
  Description of Artificial Sequence: Synthetic oligonucleotide
agaguuugccugggaccca

SEQ ID NO: 2731313 - RNA, 19 nt, Artificial Sequence
  Description of Artificial Sequence: Synthetic oligonucleotide
cgaagaagaaucgucugca

SEQ ID NO: 2731314 - RNA, 19 nt, Artificial Sequence
  Description of Artificial Sequence: Synthetic oligonucleotide
cuaaccccgcuggacuguc

SEQ ID NO: 2731315 - RNA, 19 nt, Artificial Sequence
  Description of Artificial Sequence: Synthetic oligonucleotide
gcucccguuagauacucgu

SEQ ID NO: 2731316 - RNA, 19 nt, Artificial Sequence
  Description of Artificial Sequence: Synthetic oligonucleotide
ggacccaauugaaggcacc

SEQ ID NO: 2731317 - RNA, 19 nt, Artificial Sequence
  Description of Artificial Sequence: Synthetic oligonucleotide
agucccgggugagcucuuc

SEQ ID NO: 2731318 - RNA, 19 nt, Artificial Sequence
  Description of Artificial Sequence: Synthetic oligonucleotide
cucggcagugcuucuccaa

SEQ ID NO: 2731319 - RNA, 19 nt, Artificial Sequence
  Description of Artificial Sequence: Synthetic oligonucleotide
gcagcaggucgcuuccuca

SEQ ID NO: 2731320 - RNA, 19 nt, Artificial Sequence
  Description of Artificial Sequence: Synthetic oligonucleotide
accgggccgaagagguuuc

SEQ ID NO: 2731321 - RNA, 19 nt, Artificial Sequence
  Description of Artificial Sequence: Synthetic oligonucleotide
cuguuggcccuuuuguuuu

SEQ ID NO: 2731322 - RNA, 19 nt, Artificial Sequence
  Description of Artificial Sequence: Synthetic oligonucleotide
ccaaaugccgguccucaga

SEQ ID NO: 2731323 - RNA, 19 nt, Artificial Sequence
  Description of Artificial Sequence: Synthetic oligonucleotide
gcaagcugcccuuguccac

SEQ ID NO: 2731324 - RNA, 19 nt, Artificial Sequence
  Description of Artificial Sequence: Synthetic oligonucleotide
ggggcuugugauucugaaa

SEQ ID NO: 2731325 - RNA, 19 nt, Artificial Sequence
  Description of Artificial Sequence: Synthetic oligonucleotide
ggcaccuugcgaggcgccg

SEQ ID NO: 2731326 - RNA, 19 nt, Artificial Sequence
  Description of Artificial Sequence: Synthetic oligonucleotide
ggggucuguaguagaacuc

SEQ ID NO: 2731327 - RNA, 19 nt, Artificial Sequence
  Description of Artificial Sequence: Synthetic oligonucleotide
uccgucggaucaggcauuu

SEQ ID NO: 2731328 - RNA, 19 nt, Artificial Sequence
  Description of Artificial Sequence: Synthetic oligonucleotide
gggacccaauugaaggcac

SEQ ID NO: 2731329 - RNA, 19 nt, Artificial Sequence
  Description of Artificial Sequence: Synthetic oligonucleotide
cccgcuggacuguccgucg

SEQ ID NO: 2731330 - RNA, 19 nt, Artificial Sequence
  Description of Artificial Sequence: Synthetic oligonucleotide
cggcaagcugcccuugucc

SEQ ID NO: 2731331 - RNA, 19 nt, Artificial Sequence
  Description of Artificial Sequence: Synthetic oligonucleotide
ugaccgggccgaagagguu

SEQ ID NO: 2731332 - RNA, 19 nt, Artificial Sequence
  Description of Artificial Sequence: Synthetic oligonucleotide
uggggugcguccgcuuguc

SEQ ID NO: 2731333 - RNA, 19 nt, Artificial Sequence
  Description of Artificial Sequence: Synthetic oligonucleotide
uggcucuccugcgccggca

SEQ ID NO: 2731334 - RNA, 19 nt, Artificial Sequence
  Description of Artificial Sequence: Synthetic oligonucleotide
gccggcaccuugcgaggcg

SEQ ID NO: 2731335 - RNA, 19 nt, Artificial Sequence
  Description of Artificial Sequence: Synthetic oligonucleotide
ggacuguccgucggaucag

SEQ ID NO: 2731336 - RNA, 19 nt, Artificial Sequence
  Description of Artificial Sequence: Synthetic oligonucleotide
guuugccugggacccaauu

SEQ ID NO: 2731337 - RNA, 19 nt, Artificial Sequence
  Description of Artificial Sequence: Synthetic oligonucleotide
accccgcuggacuguccgu

SEQ ID NO: 2731338 - RNA, 19 nt, Artificial Sequence
  Description of Artificial Sequence: Synthetic oligonucleotide
ccaauugaaggcaccgccu

SEQ ID NO: 2731339 - RNA, 19 nt, Artificial Sequence
  Description of Artificial Sequence: Synthetic oligonucleotide
ggcaccgccuggcggcucc

SEQ ID NO: 2731340 - RNA, 19 nt, Artificial Sequence
  Description of Artificial Sequence: Synthetic oligonucleotide
ggcuugugauucugaaagu

SEQ ID NO: 2731341 - RNA, 19 nt, Artificial Sequence
  Description of Artificial Sequence: Synthetic oligonucleotide
ccuuuuguuuugcgaagaa

SEQ ID NO: 2731342 - RNA, 19 nt, Artificial Sequence
  Description of Artificial Sequence: Synthetic oligonucleotide
gggcacugcuccgcuaacc

SEQ ID NO: 2731343 - RNA, 19 nt, Artificial Sequence
  Description of Artificial Sequence: Synthetic oligonucleotide
ccacugguaucugccuucc

SEQ ID NO: 2731344 - RNA, 19 nt, Artificial Sequence
  Description of Artificial Sequence: Synthetic oligonucleotide
uccccgggcggguguggac

SEQ ID NO: 2731345 - RNA, 19 nt, Artificial Sequence
  Description of Artificial Sequence: Synthetic oligonucleotide
ccgggugagcucuucguga

SEQ ID NO: 2731346 - RNA, 19 nt, Artificial Sequence
  Description of Artificial Sequence: Synthetic oligonucleotide
ccgguccucagaguuugcc

SEQ ID NO: 2731347 - RNA, 19 nt, Artificial Sequence
  Description of Artificial Sequence: Synthetic oligonucleotide
gugcguccgcuugucuggc

SEQ ID NO: 2731348 - RNA, 19 nt, Artificial Sequence
  Description of Artificial Sequence: Synthetic oligonucleotide
uccuccccgggcgggugug

SEQ ID NO: 2731349 - RNA, 19 nt, Artificial Sequence
  Description of Artificial Sequence: Synthetic oligonucleotide
cuugucuggcguccauccu

SEQ ID NO: 2731350 - RNA, 19 nt, Artificial Sequence
  Description of Artificial Sequence: Synthetic oligonucleotide
ggcauuugcuccaccaaau

SEQ ID NO: 2731351 - RNA, 19 nt, Artificial Sequence
  Description of Artificial Sequence: Synthetic oligonucleotide
gaccgggccgaagagguuu

SEQ ID NO: 2731352 - RNA, 19 nt, Artificial Sequence
  Description of Artificial Sequence: Synthetic oligonucleotide
ccugcgccggcaccuugcg

SEQ ID NO: 2731353 - RNA, 19 nt, Artificial Sequence
  Description of Artificial Sequence: Synthetic oligonucleotide
ggcguuggggugcguccgc

SEQ ID NO: 2731354 - RNA, 19 nt, Artificial Sequence
  Description of Artificial Sequence: Synthetic oligonucleotide
ggcucccguuagauacucg

SEQ ID NO: 2731355 - RNA, 19 nt, Artificial Sequence
  Description of Artificial Sequence: Synthetic oligonucleotide
gcaggcggagggcguuggg

SEQ ID NO: 2731356 - RNA, 19 nt, Artificial Sequence
  Description of Artificial Sequence: Synthetic oligonucleotide
gcgccggcaccuugcgagg

SEQ ID NO: 2731357 - RNA, 19 nt, Artificial Sequence
  Description of Artificial Sequence: Synthetic oligonucleotide
ggcucccgcugacauccug

SEQ ID NO: 2731358 - RNA, 19 nt, Artificial Sequence
  Description of Artificial Sequence: Synthetic oligonucleotide
cuccugcgccggcaccuug

SEQ ID NO: 2731359 - RNA, 19 nt, Artificial Sequence
  Description of Artificial Sequence: Synthetic oligonucleotide
gggcggguguggaccaccg

SEQ ID NO: 2731360 - RNA, 19 nt, Artificial Sequence
  Description of Artificial Sequence: Synthetic oligonucleotide
cucgggcucccguuagaua

SEQ ID NO: 2731361 - RNA, 19 nt, Artificial Sequence
  Description of Artificial Sequence: Synthetic oligonucleotide
cccuuuuguuuugcgaaga

SEQ ID NO: 2731362 - RNA, 19 nt, Artificial Sequence
  Description of Artificial Sequence: Synthetic oligonucleotide
ggguguggaccaccgccuc

SEQ ID NO: 2731363 - RNA, 19 nt, Artificial Sequence
  Description of Artificial Sequence: Synthetic oligonucleotide
ccuggcucuccugcgccgg

SEQ ID NO: 2731364 - RNA, 19 nt, Artificial Sequence
  Description of Artificial Sequence: Synthetic oligonucleotide
gcugacucgcuucuuccau

SEQ ID NO: 2731365 - RNA, 19 nt, Artificial Sequence
  Description of Artificial Sequence: Synthetic oligonucleotide
cugccacugguaucugccu

SEQ ID NO: 2731366 - RNA, 19 nt, Artificial Sequence
  Description of Artificial Sequence: Synthetic oligonucleotide
gcggagggcguuggggugc

SEQ ID NO: 2731367 - RNA, 19 nt, Artificial Sequence
  Description of Artificial Sequence: Synthetic oligonucleotide
guggaccaccgccucggcu

SEQ ID NO: 2731368 - RNA, 19 nt, Artificial Sequence
  Description of Artificial Sequence: Synthetic oligonucleotide
cugcccuuguccaccuccu

SEQ ID NO: 2731369 - RNA, 19 nt, Artificial Sequence
  Description of Artificial Sequence: Synthetic oligonucleotide
cgcuaaccccgcuggacug

SEQ ID NO: 2731370 - RNA, 19 nt, Artificial Sequence
  Description of Artificial Sequence: Synthetic oligonucleotide
ccguuagauacucguacgu

SEQ ID NO: 2731371 - RNA, 19 nt, Artificial Sequence
  Description of Artificial Sequence: Synthetic oligonucleotide
cagcaggucgcuuccucau

SEQ ID NO: 2731372 - RNA, 19 nt, Artificial Sequence
  Description of Artificial Sequence: Synthetic oligonucleotide
augccgguccucagaguuu

SEQ ID NO: 2731373 - RNA, 19 nt, Artificial Sequence
  Description of Artificial Sequence: Synthetic oligonucleotide
ggcggguguggaccaccgc

SEQ ID NO: 2731374 - RNA, 19 nt, Artificial Sequence
  Description of Artificial Sequence: Synthetic oligonucleotide
ccgcuggacuguccgucgg

SEQ ID NO: 2731375 - RNA, 19 nt, Artificial Sequence
  Description of Artificial Sequence: Synthetic oligonucleotide
cucaucccugggcacugcu

SEQ ID NO: 2731376 - RNA, 19 nt, Artificial Sequence
  Description of Artificial Sequence: Synthetic oligonucleotide
gcucuccugcgccggcacc

SEQ ID NO: 2731377 - RNA, 19 nt, Artificial Sequence
  Description of Artificial Sequence: Synthetic oligonucleotide
cuccgcuaaccccgcugga

SEQ ID NO: 2731378 - RNA, 19 nt, Artificial Sequence
  Description of Artificial Sequence: Synthetic oligonucleotide
cuccggcaagcugcccuug

SEQ ID NO: 2731379 - RNA, 19 nt, Artificial Sequence
  Description of Artificial Sequence: Synthetic oligonucleotide
caggcucgggcucccguua

SEQ ID NO: 2731380 - RNA, 19 nt, Artificial Sequence
  Description of Artificial Sequence: Synthetic oligonucleotide
cuccaggcucgggcucccg

SEQ ID NO: 2731381 - RNA, 19 nt, Artificial Sequence
  Description of Artificial Sequence: Synthetic oligonucleotide
ccauccucuccaggcucgg

SEQ ID NO: 2731382 - RNA, 19 nt, Artificial Sequence
  Description of Artificial Sequence: Synthetic oligonucleotide
aguuugccugggacccaau

SEQ ID NO: 2731383 - RNA, 19 nt, Artificial Sequence
  Description of Artificial Sequence: Synthetic oligonucleotide
gucuggcguccauccucuc

SEQ ID NO: 2731384 - RNA, 19 nt, Artificial Sequence
  Description of Artificial Sequence: Synthetic oligonucleotide
gggcucccguuagauacuc

SEQ ID NO: 2731385 - RNA, 19 nt, Artificial Sequence
  Description of Artificial Sequence: Synthetic oligonucleotide
ccggcaagcugcccuuguc

SEQ ID NO: 2731386 - RNA, 19 nt, Artificial Sequence
  Description of Artificial Sequence: Synthetic oligonucleotide
caccgccuggcggcucccg

SEQ ID NO: 2731387 - RNA, 19 nt, Artificial Sequence
  Description of Artificial Sequence: Synthetic oligonucleotide
ccccgggcggguguggacc

SEQ ID NO: 2731388 - RNA, 19 nt, Artificial Sequence
  Description of Artificial Sequence: Synthetic oligonucleotide
ccaccaaaugccgguccuc

SEQ ID NO: 2731389 - RNA, 19 nt, Artificial Sequence
  Description of Artificial Sequence: Synthetic oligonucleotide
ccggcaccuugcgaggcgc

SEQ ID NO: 2731390 - RNA, 19 nt, Artificial Sequence
  Description of Artificial Sequence: Synthetic oligonucleotide
uugcgcugacucgcuucuu

SEQ ID NO: 2731391 - RNA, 19 nt, Artificial Sequence
  Description of Artificial Sequence: Synthetic oligonucleotide
ggcggcucccgcugacauc

SEQ ID NO: 2731392 - RNA, 19 nt, Artificial Sequence
  Description of Artificial Sequence: Synthetic oligonucleotide
cuggcggcucccgcugaca

SEQ ID NO: 2731393 - RNA, 19 nt, Artificial Sequence
  Description of Artificial Sequence: Synthetic oligonucleotide
gcguccgcuugucuggcgu

SEQ ID NO: 2731394 - RNA, 19 nt, Artificial Sequence
  Description of Artificial Sequence: Synthetic oligonucleotide
cugcgccggcaccuugcga

SEQ ID NO: 2731395 - RNA, 19 nt, Artificial Sequence
  Description of Artificial Sequence: Synthetic oligonucleotide
ccuggcggcucccgcugac

SEQ ID NO: 2731396 - RNA, 19 nt, Artificial Sequence
  Description of Artificial Sequence: Synthetic oligonucleotide
cugccuuccaggggcuugu

SEQ ID NO: 2731397 - RNA, 19 nt, Artificial Sequence
  Description of Artificial Sequence: Synthetic oligonucleotide
ccccgcuggacuguccguc

SEQ ID NO: 2731398 - RNA, 19 nt, Artificial Sequence
  Description of Artificial Sequence: Synthetic oligonucleotide
cgcugacucgcuucuucca

SEQ ID NO: 2731399 - RNA, 19 nt, Artificial Sequence
  Description of Artificial Sequence: Synthetic oligonucleotide
ccgcuaaccccgcuggacu

SEQ ID NO: 2731400 - RNA, 19 nt, Artificial Sequence
  Description of Artificial Sequence: Synthetic oligonucleotide
cguccgcuugucuggcguc

SEQ ID NO: 2731401 - RNA, 19 nt, Artificial Sequence
  Description of Artificial Sequence: Synthetic oligonucleotide
ccucaucccugggcacugc

SEQ ID NO: 2731402 - RNA, 19 nt, Artificial Sequence
  Description of Artificial Sequence: Synthetic oligonucleotide
cuccccgggcgggugugga

SEQ ID NO: 2731403 - RNA, 19 nt, Artificial Sequence
  Description of Artificial Sequence: Synthetic oligonucleotide
gcuaaccccgcuggacugu

SEQ ID NO: 2731404 - RNA, 19 nt, Artificial Sequence
  Description of Artificial Sequence: Synthetic oligonucleotide
ccauaucucggcagugcuu

SEQ ID NO: 2731405 - RNA, 19 nt, Artificial Sequence
  Description of Artificial Sequence: Synthetic oligonucleotide
ccgcugacauccuggcucu

SEQ ID NO: 2731406 - RNA, 19 nt, Artificial Sequence
  Description of Artificial Sequence: Synthetic oligonucleotide
cgcuugucuggcguccauc

SEQ ID NO: 2731407 - RNA, 19 nt, Artificial Sequence
  Description of Artificial Sequence: Synthetic oligonucleotide
cguuagauacucguacguu

SEQ ID NO: 2731408 - RNA, 19 nt, Artificial Sequence
  Description of Artificial Sequence: Synthetic oligonucleotide
cgggccgaagagguuucug

SEQ ID NO: 2731409 - RNA, 19 nt, Artificial Sequence
  Description of Artificial Sequence: Synthetic oligonucleotide
guccgucggaucaggcauu

SEQ ID NO: 2731410 - RNA, 19 nt, Artificial Sequence
  Description of Artificial Sequence: Synthetic oligonucleotide
gccgguccucagaguuugc

SEQ ID NO: 2731411 - RNA, 19 nt, Artificial Sequence
  Description of Artificial Sequence: Synthetic oligonucleotide
caccuugcgaggcgccguu

SEQ ID NO: 2731412 - RNA, 19 nt, Artificial Sequence
  Description of Artificial Sequence: Synthetic oligonucleotide
gcucgggcucccguuagau

SEQ ID NO: 2731413 - RNA, 19 nt, Artificial Sequence
  Description of Artificial Sequence: Synthetic oligonucleotide
cacuugcgcugacucgcuu

SEQ ID NO: 2731414 - RNA, 19 nt, Artificial Sequence
  Description of Artificial Sequence: Synthetic oligonucleotide
cgccuggcggcucccgcug

SEQ ID NO: 2731415 - RNA, 19 nt, Artificial Sequence
  Description of Artificial Sequence: Synthetic oligonucleotide
cggagggcguuggggugcg

SEQ ID NO: 2731416 - RNA, 19 nt, Artificial Sequence
  Description of Artificial Sequence: Synthetic oligonucleotide
cccgggcggguguggacca

SEQ ID NO: 2731417 - RNA, 19 nt, Artificial Sequence
  Description of Artificial Sequence: Synthetic oligonucleotide
gcaccuugcgaggcgccgu

SEQ ID NO: 2731418 - RNA, 19 nt, Artificial Sequence
  Description of Artificial Sequence: Synthetic oligonucleotide
cgggcggguguggaccacc

SEQ ID NO: 2731419 - RNA, 19 nt, Artificial Sequence
  Description of Artificial Sequence: Synthetic oligonucleotide
ggggugcguccgcuugucu

SEQ ID NO: 2731420 - RNA, 19 nt, Artificial Sequence
  Description of Artificial Sequence: Synthetic oligonucleotide
ccuccccgggcgggugugg

SEQ ID NO: 2731421 - RNA, 19 nt, Artificial Sequence
  Description of Artificial Sequence: Synthetic oligonucleotide
gggugagcucuucgugauu

SEQ ID NO: 2731422 - RNA, 19 nt, Artificial Sequence
  Description of Artificial Sequence: Synthetic oligonucleotide
ccacuugcgcugacucgcu

SEQ ID NO: 2731423 - RNA, 19 nt, Artificial Sequence
  Description of Artificial Sequence: Synthetic oligonucleotide
cgcuggacuguccgucgga

SEQ ID NO: 2731424 - RNA, 19 nt, Artificial Sequence
  Description of Artificial Sequence: Synthetic oligonucleotide
ccgucggaucaggcauuug

SEQ ID NO: 2731425 - RNA, 19 nt, Artificial Sequence
  Description of Artificial Sequence: Synthetic oligonucleotide
cucguacguuugacaucuu

SEQ ID NO: 2731426 - RNA, 19 nt, Artificial Sequence
  Description of Artificial Sequence: Synthetic oligonucleotide
cgccggcaccuugcgaggc

SEQ ID NO: 2731427 - RNA, 19 nt, Artificial Sequence
  Description of Artificial Sequence: Synthetic oligonucleotide
ccugggcacugcuccgcua

SEQ ID NO: 2731428 - RNA, 19 nt, Artificial Sequence
  Description of Artificial Sequence: Synthetic oligonucleotide
cggcagugcuucuccaagu

SEQ ID NO: 2731429 - RNA, 19 nt, Artificial Sequence
  Description of Artificial Sequence: Synthetic oligonucleotide
cugcuccgcuaaccccgcu

SEQ ID NO: 2731430 - RNA, 19 nt, Artificial Sequence
  Description of Artificial Sequence: Synthetic oligonucleotide
gcguuggggugcguccgcu

SEQ ID NO: 2731431 - RNA, 19 nt, Artificial Sequence
  Description of Artificial Sequence: Synthetic oligonucleotide
cgugauugaccgggccgaa

SEQ ID NO: 2731432 - RNA, 19 nt, Artificial Sequence
  Description of Artificial Sequence: Synthetic oligonucleotide
ccgccuggcggcucccgcu

SEQ ID NO: 2731433 - RNA, 19 nt, Artificial Sequence
  Description of Artificial Sequence: Synthetic oligonucleotide
cgggcucccguuagauacu

SEQ ID NO: 2731434 - RNA, 19 nt, Artificial Sequence
  Description of Artificial Sequence: Synthetic oligonucleotide
ccgggcggguguggaccac

SEQ ID NO: 2731435 - RNA, 19 nt, Artificial Sequence
  Description of Artificial Sequence: Synthetic oligonucleotide
cccacucaguuugguuccu

SEQ ID NO: 2731436 - RNA, 19 nt, Artificial Sequence
  Description of Artificial Sequence: Synthetic oligonucleotide
ccgcuugucuggcguccau

SEQ ID NO: 2731437 - RNA, 19 nt, Artificial Sequence
  Description of Artificial Sequence: Synthetic oligonucleotide
cguuggggugcguccgcuu

SEQ ID NO: 2731438 - RNA, 19 nt, Artificial Sequence
  Description of Artificial Sequence: Synthetic oligonucleotide
ccgggccgaagagguuucu

SEQ ID NO: 2731439 - RNA, 19 nt, Artificial Sequence
  Description of Artificial Sequence: Synthetic oligonucleotide
ggagggcguuggggugcgu

SEQ ID NO: 2731440 - RNA, 19 nt, Artificial Sequence
  Description of Artificial Sequence: Synthetic oligonucleotide
cggcucccgcugacauccu

SEQ ID NO: 2731441 - RNA, 19 nt, Artificial Sequence
  Description of Artificial Sequence: Synthetic oligonucleotide
aagguugaaacgcugaggg

SEQ ID NO: 2731442 - RNA, 19 nt, Artificial Sequence
  Description of Artificial Sequence: Synthetic oligonucleotide
gagguugucaucuugauca

SEQ ID NO: 2731443 - RNA, 19 nt, Artificial Sequence
  Description of Artificial Sequence: Synthetic oligonucleotide
uuaacuguugccauggaac

SEQ ID NO: 2731444 - RNA, 19 nt, Artificial Sequence
  Description of Artificial Sequence: Synthetic oligonucleotide
aaucuuucccuucacggag

SEQ ID NO: 2731445 - RNA, 19 nt, Artificial Sequence
  Description of Artificial Sequence: Synthetic oligonucleotide
uggagacucaauauugugg

SEQ ID NO: 2731446 - RNA, 19 nt, Artificial Sequence
  Description of Artificial Sequence: Synthetic oligonucleotide
auuggcaccacacgugucc

SEQ ID NO: 2731447 - RNA, 19 nt, Artificial Sequence
  Description of Artificial Sequence: Synthetic oligonucleotide
aagacccuggaguacauag

SEQ ID NO: 2731448 - RNA, 19 nt, Artificial Sequence
  Description of Artificial Sequence: Synthetic oligonucleotide
aacaguaaucuuucccuuc

SEQ ID NO: 2731449 - RNA, 19 nt, Artificial Sequence
  Description of Artificial Sequence: Synthetic oligonucleotide
uaagccuugucaaagcccc

SEQ ID NO: 2731450 - RNA, 19 nt, Artificial Sequence
  Description of Artificial Sequence: Synthetic oligonucleotide
uucuuuagcaccagaaacu

SEQ ID NO: 2731451 - RNA, 19 nt, Artificial Sequence
  Description of Artificial Sequence: Synthetic oligonucleotide
acaacaguaaucuuucccu

SEQ ID NO: 2731452 - RNA, 19 nt, Artificial Sequence
  Description of Artificial Sequence: Synthetic oligonucleotide
auuacaagaaggcaucaca

SEQ ID NO: 2731453 - RNA, 19 nt, Artificial Sequence
  Description of Artificial Sequence: Synthetic oligonucleotide
ugaauggagggagaaaagg

SEQ ID NO: 2731454 - RNA, 19 nt, Artificial Sequence
  Description of Artificial Sequence: Synthetic oligonucleotide
caggacuucaccaaucccg

SEQ ID NO: 2731455 - RNA, 19 nt, Artificial Sequence
  Description of Artificial Sequence: Synthetic oligonucleotide
aaaguuaacuguugccaug

SEQ ID NO: 2731456 - RNA, 19 nt, Artificial Sequence
  Description of Artificial Sequence: Synthetic oligonucleotide
uuacaagaaggcaucacac

SEQ ID NO: 2731457 - RNA, 19 nt, Artificial Sequence
  Description of Artificial Sequence: Synthetic oligonucleotide
gacaacaguaaucuuuccc

SEQ ID NO: 2731458 - RNA, 19 nt, Artificial Sequence
  Description of Artificial Sequence: Synthetic oligonucleotide
aggagaaaggcaugcaagg

SEQ ID NO: 2731459 - RNA, 19 nt, Artificial Sequence
  Description of Artificial Sequence: Synthetic oligonucleotide
ucgaaggcacccaaaacag

SEQ ID NO: 2731460 - RNA, 19 nt, Artificial Sequence
  Description of Artificial Sequence: Synthetic oligonucleotide
aguaaucuuucccuucacg

SEQ ID NO: 2731461 - RNA, 19 nt, Artificial Sequence
  Description of Artificial Sequence: Synthetic oligonucleotide
aaggcaucacaccauucuc

SEQ ID NO: 2731462 - RNA, 19 nt, Artificial Sequence
  Description of Artificial Sequence: Synthetic oligonucleotide
aaagguugaaacgcugagg

SEQ ID NO: 2731463 - RNA, 19 nt, Artificial Sequence
  Description of Artificial Sequence: Synthetic oligonucleotide
ucccaaaagacccuggagu

SEQ ID NO: 2731464 - RNA, 19 nt, Artificial Sequence
  Description of Artificial Sequence: Synthetic oligonucleotide
gaagucacggugcuuuugg

SEQ ID NO: 2731465 - RNA, 19 nt, Artificial Sequence
  Description of Artificial Sequence: Synthetic oligonucleotide
aacagaucgugaauggagg

SEQ ID NO: 2731466 - RNA, 19 nt, Artificial Sequence
  Description of Artificial Sequence: Synthetic oligonucleotide
caugcaagggcaagaaucc

SEQ ID NO: 2731467 - RNA, 19 nt, Artificial Sequence
  Description of Artificial Sequence: Synthetic oligonucleotide
cagaaacuggccaaggacc

SEQ ID NO: 2731468 - RNA, 19 nt, Artificial Sequence
  Description of Artificial Sequence: Synthetic oligonucleotide
agugugacaacaguaaucu

SEQ ID NO: 2731469 - RNA, 19 nt, Artificial Sequence
  Description of Artificial Sequence: Synthetic oligonucleotide
auuggggaaaguuaacugu

SEQ ID NO: 2731470 - RNA, 19 nt, Artificial Sequence
  Description of Artificial Sequence: Synthetic oligonucleotide
uacauuacaagaaggcauc

SEQ ID NO: 2731471 - RNA, 19 nt, Artificial Sequence
  Description of Artificial Sequence: Synthetic oligonucleotide
ucuuucuuuagcaccagaa

SEQ ID NO: 2731472 - RNA, 19 nt, Artificial Sequence
  Description of Artificial Sequence: Synthetic oligonucleotide
gacucaauauuguggcugg

SEQ ID NO: 2731473 - RNA, 19 nt, Artificial Sequence
  Description of Artificial Sequence: Synthetic oligonucleotide
acagggaggagccccaccc

SEQ ID NO: 2731474 - RNA, 19 nt, Artificial Sequence
  Description of Artificial Sequence: Synthetic oligonucleotide
gagaaaggcaugcaagggc

SEQ ID NO: 2731475 - RNA, 19 nt, Artificial Sequence
  Description of Artificial Sequence: Synthetic oligonucleotide
caucacaccauucucgaag

SEQ ID NO: 2731476 - RNA, 19 nt, Artificial Sequence
  Description of Artificial Sequence: Synthetic oligonucleotide
uccaacagaucgugaaugg

SEQ ID NO: 2731477 - RNA, 19 nt, Artificial Sequence
  Description of Artificial Sequence: Synthetic oligonucleotide
aagggcuaggaauccauug

SEQ ID NO: 2731478 - RNA, 19 nt, Artificial Sequence
  Description of Artificial Sequence: Synthetic oligonucleotide
caacagaucgugaauggag

SEQ ID NO: 2731479 - RNA, 19 nt, Artificial Sequence
  Description of Artificial Sequence: Synthetic oligonucleotide
gaguacauuacaagaaggc

SEQ ID NO: 2731480 - RNA, 19 nt, Artificial Sequence
  Description of Artificial Sequence: Synthetic oligonucleotide
acugcuuggcauuggcacc

SEQ ID NO: 2731481 - RNA, 19 nt, Artificial Sequence
  Description of Artificial Sequence: Synthetic oligonucleotide
uguccuucagccauucucu

SEQ ID NO: 2731482 - RNA, 19 nt, Artificial Sequence
  Description of Artificial Sequence: Synthetic oligonucleotide
aaaacagucccgggacugc

SEQ ID NO: 2731483 - RNA, 19 nt, Artificial Sequence
  Description of Artificial Sequence: Synthetic oligonucleotide
agggcuaggaauccauugg

SEQ ID NO: 2731484 - RNA, 19 nt, Artificial Sequence
  Description of Artificial Sequence: Synthetic oligonucleotide
uaaucuuucccuucacgga

SEQ ID NO: 2731485 - RNA, 19 nt, Artificial Sequence
  Description of Artificial Sequence: Synthetic oligonucleotide
cagaguacauuacaagaag

SEQ ID NO: 2731486 - RNA, 19 nt, Artificial Sequence
  Description of Artificial Sequence: Synthetic oligonucleotide
aagccaaaggacauccaac

SEQ ID NO: 2731487 - RNA, 19 nt, Artificial Sequence
  Description of Artificial Sequence: Synthetic oligonucleotide
agaguacauuacaagaagg

SEQ ID NO: 2731488 - RNA, 19 nt, Artificial Sequence
  Description of Artificial Sequence: Synthetic oligonucleotide
auaagccuugucaaagccc

SEQ ID NO: 2731489 - RNA, 19 nt, Artificial Sequence
  Description of Artificial Sequence: Synthetic oligonucleotide
ggagacucaauauuguggc

SEQ ID NO: 2731490 - RNA, 19 nt, Artificial Sequence
  Description of Artificial Sequence: Synthetic oligonucleotide
agaaaagggcuaggaaucc

SEQ ID NO: 2731491 - RNA, 19 nt, Artificial Sequence
  Description of Artificial Sequence: Synthetic oligonucleotide
gagagaacucccaaaagac

SEQ ID NO: 2731492 - RNA, 19 nt, Artificial Sequence
  Description of Artificial Sequence: Synthetic oligonucleotide
gacuucaccaaucccggcc

SEQ ID NO: 2731493 - RNA, 19 nt, Artificial Sequence
  Description of Artificial Sequence: Synthetic oligonucleotide
acagaucgugaauggaggg

SEQ ID NO: 2731494 - RNA, 19 nt, Artificial Sequence
  Description of Artificial Sequence: Synthetic oligonucleotide
gacugcuuggcauuggcac

SEQ ID NO: 2731495 - RNA, 19 nt, Artificial Sequence
  Description of Artificial Sequence: Synthetic oligonucleotide
aaggcacccaaaacagucc

SEQ ID NO: 2731496 - RNA, 19 nt, Artificial Sequence
  Description of Artificial Sequence: Synthetic oligonucleotide
aguacauuacaagaaggca

SEQ ID NO: 2731497 - RNA, 19 nt, Artificial Sequence
  Description of Artificial Sequence: Synthetic oligonucleotide
aggcacccaaaacaguccc

SEQ ID NO: 2731498 - RNA, 19 nt, Artificial Sequence
  Description of Artificial Sequence: Synthetic oligonucleotide
cauuggggaaaguuaacug

SEQ ID NO: 2731499 - RNA, 19 nt, Artificial Sequence
  Description of Artificial Sequence: Synthetic oligonucleotide
uuuugggagguugucaucu

SEQ ID NO: 2731500 - RNA, 19 nt, Artificial Sequence
  Description of Artificial Sequence: Synthetic oligonucleotide
uaacuguugccauggaacu

SEQ ID NO: 2731501 - RNA, 19 nt, Artificial Sequence
  Description of Artificial Sequence: Synthetic oligonucleotide
ucuggagacucaauauugu

SEQ ID NO: 2731502 - RNA, 19 nt, Artificial Sequence
  Description of Artificial Sequence: Synthetic oligonucleotide
accaaucccggccaggcuc

SEQ ID NO: 2731503 - RNA, 19 nt, Artificial Sequence
  Description of Artificial Sequence: Synthetic oligonucleotide
gucaaagccccuuuccucc

SEQ ID NO: 2731504 - RNA, 19 nt, Artificial Sequence
  Description of Artificial Sequence: Synthetic oligonucleotide
acaguaaucuuucccuuca

SEQ ID NO: 2731505 - RNA, 19 nt, Artificial Sequence
  Description of Artificial Sequence: Synthetic oligonucleotide
agccaaaggacauccaaca

SEQ ID NO: 2731506 - RNA, 19 nt, Artificial Sequence
  Description of Artificial Sequence: Synthetic oligonucleotide
uugucaaagccccuuuccu

SEQ ID NO: 2731507 - RNA, 19 nt, Artificial Sequence
  Description of Artificial Sequence: Synthetic oligonucleotide
uaggaggugagugugacaa

SEQ ID NO: 2731508 - RNA, 19 nt, Artificial Sequence
  Description of Artificial Sequence: Synthetic oligonucleotide
acaccauucucgaaggcac

SEQ ID NO: 2731509 - RNA, 19 nt, Artificial Sequence
  Description of Artificial Sequence: Synthetic oligonucleotide
cucgaaggcacccaaaaca

SEQ ID NO: 2731510 - RNA, 19 nt, Artificial Sequence
  Description of Artificial Sequence: Synthetic oligonucleotide
aagucacggugcuuuuggg

SEQ ID NO: 2731511 - RNA, 19 nt, Artificial Sequence
  Description of Artificial Sequence: Synthetic oligonucleotide
agaucgugaauggagggag

SEQ ID NO: 2731512 - RNA, 19 nt, Artificial Sequence
  Description of Artificial Sequence: Synthetic oligonucleotide
agacucaauauuguggcug

SEQ ID NO: 2731513 - RNA, 19 nt, Artificial Sequence
  Description of Artificial Sequence: Synthetic oligonucleotide
gaaggcacccaaaacaguc

SEQ ID NO: 2731514 - RNA, 19 nt, Artificial Sequence
  Description of Artificial Sequence: Synthetic oligonucleotide
uucucgaaggcacccaaaa

SEQ ID NO: 2731515 - RNA, 19 nt, Artificial Sequence
  Description of Artificial Sequence: Synthetic oligonucleotide
uuagcaccagaaacuggcc

SEQ ID NO: 2731516 - RNA, 19 nt, Artificial Sequence
  Description of Artificial Sequence: Synthetic oligonucleotide
cuuuagcaccagaaacugg

SEQ ID NO: 2731517 - RNA, 19 nt, Artificial Sequence
  Description of Artificial Sequence: Synthetic oligonucleotide
aaaggcaugcaagggcaag

SEQ ID NO: 2731518 - RNA, 19 nt, Artificial Sequence
  Description of Artificial Sequence: Synthetic oligonucleotide
uggggaaaguuaacuguug

SEQ ID NO: 2731519 - RNA, 19 nt, Artificial Sequence
  Description of Artificial Sequence: Synthetic oligonucleotide
cucaauauuguggcugggg

SEQ ID NO: 2731520 - RNA, 19 nt, Artificial Sequence
  Description of Artificial Sequence: Synthetic oligonucleotide
ugggagguugucaucuuga

SEQ ID NO: 2731521 - RNA, 19 nt, Artificial Sequence
  Description of Artificial Sequence: Synthetic oligonucleotide
ugagugugacaacaguaau

SEQ ID NO: 2731522 - RNA, 19 nt, Artificial Sequence
  Description of Artificial Sequence: Synthetic oligonucleotide
uggcauuggcaccacacgu

SEQ ID NO: 2731523 - RNA, 19 nt, Artificial Sequence
  Description of Artificial Sequence: Synthetic oligonucleotide
cuucacggaggacagggag

SEQ ID NO: 2731524 - RNA, 19 nt, Artificial Sequence
  Description of Artificial Sequence: Synthetic oligonucleotide
uuggggaaaguuaacuguu

SEQ ID NO: 2731525 - RNA, 19 nt, Artificial Sequence
  Description of Artificial Sequence: Synthetic oligonucleotide
ggagagaacucccaaaaga

SEQ ID NO: 2731526 - RNA, 19 nt, Artificial Sequence
  Description of Artificial Sequence: Synthetic oligonucleotide
gaagccaaaggacauccaa

SEQ ID NO: 2731527 - RNA, 19 nt, Artificial Sequence
  Description of Artificial Sequence: Synthetic oligonucleotide
accauucucgaaggcaccc

SEQ ID NO: 2731528 - RNA, 19 nt, Artificial Sequence
  Description of Artificial Sequence: Synthetic oligonucleotide
aagaaggcaucacaccauu

SEQ ID NO: 2731529 - RNA, 19 nt, Artificial Sequence
  Description of Artificial Sequence: Synthetic oligonucleotide
ugucaaagccccuuuccuc

SEQ ID NO: 2731530 - RNA, 19 nt, Artificial Sequence
  Description of Artificial Sequence: Synthetic oligonucleotide
agaggagaaaggcaugcaa

SEQ ID NO: 2731531 - RNA, 19 nt, Artificial Sequence
  Description of Artificial Sequence: Synthetic oligonucleotide
agaaaggcaugcaagggca

SEQ ID NO: 2731532 - RNA, 19 nt, Artificial Sequence
  Description of Artificial Sequence: Synthetic oligonucleotide
uagcaccagaaacuggcca

SEQ ID NO: 2731533 - RNA, 19 nt, Artificial Sequence
  Description of Artificial Sequence: Synthetic oligonucleotide
gacccuggaguacauagga

SEQ ID NO: 2731534 - RNA, 19 nt, Artificial Sequence
  Description of Artificial Sequence: Synthetic oligonucleotide
ugaaacgcugaggggagag

SEQ ID NO: 2731535 - RNA, 19 nt, Artificial Sequence
  Description of Artificial Sequence: Synthetic oligonucleotide
ucucgaaggcacccaaaac

SEQ ID NO: 2731536 - RNA, 19 nt, Artificial Sequence
  Description of Artificial Sequence: Synthetic oligonucleotide
cuggagacucaauauugug

SEQ ID NO: 2731537 - RNA, 19 nt, Artificial Sequence
  Description of Artificial Sequence: Synthetic oligonucleotide
ucugccacgaagucacggu

SEQ ID NO: 2731538 - RNA, 19 nt, Artificial Sequence
  Description of Artificial Sequence: Synthetic oligonucleotide
gaaggcaucacaccauucu

SEQ ID NO: 2731539 - RNA, 19 nt, Artificial Sequence
  Description of Artificial Sequence: Synthetic oligonucleotide
ggaaaguuaacuguugcca

SEQ ID NO: 2731540 - RNA, 19 nt, Artificial Sequence
  Description of Artificial Sequence: Synthetic oligonucleotide
accacacguguccuucagc

SEQ ID NO: 2731541 - RNA, 19 nt, Artificial Sequence
  Description of Artificial Sequence: Synthetic oligonucleotide
ugccacgaagucacggugc

SEQ ID NO: 2731542 - RNA, 19 nt, Artificial Sequence
  Description of Artificial Sequence: Synthetic oligonucleotide
ucacggugcuuuugggagg

SEQ ID NO: 2731543 - RNA, 19 nt, Artificial Sequence
  Description of Artificial Sequence: Synthetic oligonucleotide
agguugaaacgcugagggg

SEQ ID NO: 2731544 - RNA, 19 nt, Artificial Sequence
  Description of Artificial Sequence: Synthetic oligonucleotide
uugggagguugucaucuug

SEQ ID NO: 2731545 - RNA, 19 nt, Artificial Sequence
  Description of Artificial Sequence: Synthetic oligonucleotide
guguccuucagccauucuc

SEQ ID NO: 2731546 - RNA, 19 nt, Artificial Sequence
  Description of Artificial Sequence: Synthetic oligonucleotide
ugaagaggucuucaucuuu

SEQ ID NO: 2731547 - RNA, 19 nt, Artificial Sequence
  Description of Artificial Sequence: Synthetic oligonucleotide
gugacaacaguaaucuuuc

SEQ ID NO: 2731548 - RNA, 19 nt, Artificial Sequence
  Description of Artificial Sequence: Synthetic oligonucleotide
ugcaagggcaagaauccua

SEQ ID NO: 2731549 - RNA, 19 nt, Artificial Sequence
  Description of Artificial Sequence: Synthetic oligonucleotide
aggacuucaccaaucccgg

SEQ ID NO: 2731550 - RNA, 19 nt, Artificial Sequence
  Description of Artificial Sequence: Synthetic oligonucleotide
cccuggaguacauaggagg

SEQ ID NO: 2731551 - RNA, 19 nt, Artificial Sequence
  Description of Artificial Sequence: Synthetic oligonucleotide
gagugugacaacaguaauc

SEQ ID NO: 2731552 - RNA, 19 nt, Artificial Sequence
  Description of Artificial Sequence: Synthetic oligonucleotide
gggaaaguuaacuguugcc

SEQ ID NO: 2731553 - RNA, 19 nt, Artificial Sequence
  Description of Artificial Sequence: Synthetic oligonucleotide
acccaaaacagucccggga

SEQ ID NO: 2731554 - RNA, 19 nt, Artificial Sequence
  Description of Artificial Sequence: Synthetic oligonucleotide
aaacgcugaggggagagaa

SEQ ID NO: 2731555 - RNA, 19 nt, Artificial Sequence
  Description of Artificial Sequence: Synthetic oligonucleotide
aaaagggcuaggaauccau

SEQ ID NO: 2731556 - RNA, 19 nt, Artificial Sequence
  Description of Artificial Sequence: Synthetic oligonucleotide
aggcaucacaccauucucg

SEQ ID NO: 2731557 - RNA, 19 nt, Artificial Sequence
  Description of Artificial Sequence: Synthetic oligonucleotide
ugaggggagagaacuccca

SEQ ID NO: 2731558 - RNA, 19 nt, Artificial Sequence
  Description of Artificial Sequence: Synthetic oligonucleotide
agacucuggagacucaaua

SEQ ID NO: 2731559 - RNA, 19 nt, Artificial Sequence
  Description of Artificial Sequence: Synthetic oligonucleotide
guugaaacgcugaggggag

SEQ ID NO: 2731560 - RNA, 19 nt, Artificial Sequence
  Description of Artificial Sequence: Synthetic oligonucleotide
acacguguccuucagccau

SEQ ID NO: 2731561 - RNA, 19 nt, Artificial Sequence
  Description of Artificial Sequence: Synthetic oligonucleotide
cuaggaauccauuggggaa

SEQ ID NO: 2731562 - RNA, 19 nt, Artificial Sequence
  Description of Artificial Sequence: Synthetic oligonucleotide
gaaaguuaacuguugccau

SEQ ID NO: 2731563 - RNA, 19 nt, Artificial Sequence
  Description of Artificial Sequence: Synthetic oligonucleotide
ugacaacaguaaucuuucc

SEQ ID NO: 2731564 - RNA, 19 nt, Artificial Sequence
  Description of Artificial Sequence: Synthetic oligonucleotide
uccauuggggaaaguuaac

SEQ ID NO: 2731565 - RNA, 19 nt, Artificial Sequence
  Description of Artificial Sequence: Synthetic oligonucleotide
gguugaaacgcugagggga

SEQ ID NO: 2731566 - RNA, 19 nt, Artificial Sequence
  Description of Artificial Sequence: Synthetic oligonucleotide
ucacggaggacagggagga

SEQ ID NO: 2731567 - RNA, 19 nt, Artificial Sequence
  Description of Artificial Sequence: Synthetic oligonucleotide
agggaggagccccacccgg

SEQ ID NO: 2731568 - RNA, 19 nt, Artificial Sequence
  Description of Artificial Sequence: Synthetic oligonucleotide
cucccaaaagacccuggag

SEQ ID NO: 2731569 - RNA, 19 nt, Artificial Sequence
  Description of Artificial Sequence: Synthetic oligonucleotide
ucaccaaucccggccaggc

SEQ ID NO: 2731570 - RNA, 19 nt, Artificial Sequence
  Description of Artificial Sequence: Synthetic oligonucleotide
acucccaaaagacccugga

SEQ ID NO: 2731571 - RNA, 19 nt, Artificial Sequence
  Description of Artificial Sequence: Synthetic oligonucleotide
ggagaaaggcaugcaaggg

SEQ ID NO: 2731572 - RNA, 19 nt, Artificial Sequence
  Description of Artificial Sequence: Synthetic oligonucleotide
guuaacuguugccauggaa

SEQ ID NO: 2731573 - RNA, 19 nt, Artificial Sequence
  Description of Artificial Sequence: Synthetic oligonucleotide
caaaacagucccgggacug

SEQ ID NO: 2731574 - RNA, 19 nt, Artificial Sequence
  Description of Artificial Sequence: Synthetic oligonucleotide
gggcuaggaauccauuggg

SEQ ID NO: 2731575 - RNA, 19 nt, Artificial Sequence
  Description of Artificial Sequence: Synthetic oligonucleotide
ggggaaaguuaacuguugc

SEQ ID NO: 2731576 - RNA, 19 nt, Artificial Sequence
  Description of Artificial Sequence: Synthetic oligonucleotide
cuucagacucuggagacuc

SEQ ID NO: 2731577 - RNA, 19 nt, Artificial Sequence
  Description of Artificial Sequence: Synthetic oligonucleotide
agaaacuggccaaggacca

SEQ ID NO: 2731578 - RNA, 19 nt, Artificial Sequence
  Description of Artificial Sequence: Synthetic oligonucleotide
aacucccaaaagacccugg

SEQ ID NO: 2731579 - RNA, 19 nt, Artificial Sequence
  Description of Artificial Sequence: Synthetic oligonucleotide
cauuacaagaaggcaucac

SEQ ID NO: 2731580 - RNA, 19 nt, Artificial Sequence
  Description of Artificial Sequence: Synthetic oligonucleotide
ggagaaaagggcuaggaau

SEQ ID NO: 2731581 - RNA, 19 nt, Artificial Sequence
  Description of Artificial Sequence: Synthetic oligonucleotide
cauaggaggugagugugac

SEQ ID NO: 2731582 - RNA, 19 nt, Artificial Sequence
  Description of Artificial Sequence: Synthetic oligonucleotide
aggugagugugacaacagu

SEQ ID NO: 2731583 - RNA, 19 nt, Artificial Sequence
  Description of Artificial Sequence: Synthetic oligonucleotide
uggagggagaaaagggcua

SEQ ID NO: 2731584 - RNA, 19 nt, Artificial Sequence
  Description of Artificial Sequence: Synthetic oligonucleotide
agguugucaucuugaucag

SEQ ID NO: 2731585 - RNA, 19 nt, Artificial Sequence
  Description of Artificial Sequence: Synthetic oligonucleotide
acagucccgggacugcuug

SEQ ID NO: 2731586 - RNA, 19 nt, Artificial Sequence
  Description of Artificial Sequence: Synthetic oligonucleotide
gcaugcaagggcaagaauc

SEQ ID NO: 2731587 - RNA, 19 nt, Artificial Sequence
  Description of Artificial Sequence: Synthetic oligonucleotide
gugaauggagggagaaaag

SEQ ID NO: 2731588 - RNA, 19 nt, Artificial Sequence
  Description of Artificial Sequence: Synthetic oligonucleotide
auggagggagaaaagggcu

SEQ ID NO: 2731589 - RNA, 19 nt, Artificial Sequence
  Description of Artificial Sequence: Synthetic oligonucleotide
guacauuacaagaaggcau

SEQ ID NO: 2731590 - RNA, 19 nt, Artificial Sequence
  Description of Artificial Sequence: Synthetic oligonucleotide
gaggugagugugacaacag

SEQ ID NO: 2731591 - RNA, 19 nt, Artificial Sequence
  Description of Artificial Sequence: Synthetic oligonucleotide
caaaagacccuggaguaca

SEQ ID NO: 2731592 - RNA, 19 nt, Artificial Sequence
  Description of Artificial Sequence: Synthetic oligonucleotide
uucaccaaucccggccagg

SEQ ID NO: 2731593 - RNA, 19 nt, Artificial Sequence
  Description of Artificial Sequence: Synthetic oligonucleotide
agccauucucugaagaggu

SEQ ID NO: 2731594 - RNA, 19 nt, Artificial Sequence
  Description of Artificial Sequence: Synthetic oligonucleotide
aggaggugagugugacaac

SEQ ID NO: 2731595 - RNA, 19 nt, Artificial Sequence
  Description of Artificial Sequence: Synthetic oligonucleotide
gcuaggaauccauugggga

SEQ ID NO: 2731596 - RNA, 19 nt, Artificial Sequence
  Description of Artificial Sequence: Synthetic oligonucleotide
agucccgggacugcuuggc

SEQ ID NO: 2731597 - RNA, 19 nt, Artificial Sequence
  Description of Artificial Sequence: Synthetic oligonucleotide
caugggcucugccacgaag

SEQ ID NO: 2731598 - RNA, 19 nt, Artificial Sequence
  Description of Artificial Sequence: Synthetic oligonucleotide
aggagccccacccggcuuc

SEQ ID NO: 2731599 - RNA, 19 nt, Artificial Sequence
  Description of Artificial Sequence: Synthetic oligonucleotide
aucuuucuuuagcaccaga

SEQ ID NO: 2731600 - RNA, 19 nt, Artificial Sequence
  Description of Artificial Sequence: Synthetic oligonucleotide
gaacucccaaaagacccug

SEQ ID NO: 2731601 - RNA, 19 nt, Artificial Sequence
  Description of Artificial Sequence: Synthetic oligonucleotide
uugcccaggacuucaccaa

SEQ ID NO: 2731602 - RNA, 19 nt, Artificial Sequence
  Description of Artificial Sequence: Synthetic oligonucleotide
aaacagucccgggacugcu

SEQ ID NO: 2731603 - RNA, 19 nt, Artificial Sequence
  Description of Artificial Sequence: Synthetic oligonucleotide
gugagugugacaacaguaa

SEQ ID NO: 2731604 - RNA, 19 nt, Artificial Sequence
  Description of Artificial Sequence: Synthetic oligonucleotide
ucagacucuggagacucaa

SEQ ID NO: 2731605 - RNA, 19 nt, Artificial Sequence
  Description of Artificial Sequence: Synthetic oligonucleotide
acgcugaggggagagaacu

SEQ ID NO: 2731606 - RNA, 19 nt, Artificial Sequence
  Description of Artificial Sequence: Synthetic oligonucleotide
agggagaaaagggcuagga

SEQ ID NO: 2731607 - RNA, 19 nt, Artificial Sequence
  Description of Artificial Sequence: Synthetic oligonucleotide
aucuuucccuucacggagg

SEQ ID NO: 2731608 - RNA, 19 nt, Artificial Sequence
  Description of Artificial Sequence: Synthetic oligonucleotide
agacccuggaguacauagg

SEQ ID NO: 2731609 - RNA, 19 nt, Artificial Sequence
  Description of Artificial Sequence: Synthetic oligonucleotide
cacccaaaacagucccggg

SEQ ID NO: 2731610 - RNA, 19 nt, Artificial Sequence
  Description of Artificial Sequence: Synthetic oligonucleotide
gaaaagggcuaggaaucca

SEQ ID NO: 2731611 - RNA, 19 nt, Artificial Sequence
  Description of Artificial Sequence: Synthetic oligonucleotide
acauuacaagaaggcauca

SEQ ID NO: 2731612 - RNA, 19 nt, Artificial Sequence
  Description of Artificial Sequence: Synthetic oligonucleotide
gacucuggagacucaauau

SEQ ID NO: 2731613 - RNA, 19 nt, Artificial Sequence
  Description of Artificial Sequence: Synthetic oligonucleotide
aaggaccacauaagccuug

SEQ ID NO: 2731614 - RNA, 19 nt, Artificial Sequence
  Description of Artificial Sequence: Synthetic oligonucleotide
gagggagaaaagggcuagg

SEQ ID NO: 2731615 - RNA, 19 nt, Artificial Sequence
  Description of Artificial Sequence: Synthetic oligonucleotide
gaggaguccccagaguaca

SEQ ID NO: 2731616 - RNA, 19 nt, Artificial Sequence
  Description of Artificial Sequence: Synthetic oligonucleotide
agaaggcaucacaccauuc

SEQ ID NO: 2731617 - RNA, 19 nt, Artificial Sequence
  Description of Artificial Sequence: Synthetic oligonucleotide
cuuuugggagguugucauc

SEQ ID NO: 2731618 - RNA, 19 nt, Artificial Sequence
  Description of Artificial Sequence: Synthetic oligonucleotide
auaggaggugagugugaca

SEQ ID NO: 2731619 - RNA, 19 nt, Artificial Sequence
  Description of Artificial Sequence: Synthetic oligonucleotide
caccauucucgaaggcacc

SEQ ID NO: 2731620 - RNA, 19 nt, Artificial Sequence
  Description of Artificial Sequence: Synthetic oligonucleotide
gucaucuugaucagguuua

SEQ ID NO: 2731621 - RNA, 19 nt, Artificial Sequence
  Description of Artificial Sequence: Synthetic oligonucleotide
cucugccacgaagucacgg

SEQ ID NO: 2731622 - RNA, 19 nt, Artificial Sequence
  Description of Artificial Sequence: Synthetic oligonucleotide
cccagaguacauuacaaga

SEQ ID NO: 2731623 - RNA, 19 nt, Artificial Sequence
  Description of Artificial Sequence: Synthetic oligonucleotide
gcacccaaaacagucccgg

SEQ ID NO: 2731624 - RNA, 19 nt, Artificial Sequence
  Description of Artificial Sequence: Synthetic oligonucleotide
aguuaacuguugccaugga

SEQ ID NO: 2731625 - RNA, 19 nt, Artificial Sequence
  Description of Artificial Sequence: Synthetic oligonucleotide
cuucagccauucucugaag

SEQ ID NO: 2731626 - RNA, 19 nt, Artificial Sequence
  Description of Artificial Sequence: Synthetic oligonucleotide
aggacauccaacagaucgu

SEQ ID NO: 2731627 - RNA, 19 nt, Artificial Sequence
  Description of Artificial Sequence: Synthetic oligonucleotide
acucaauauuguggcuggg

SEQ ID NO: 2731628 - RNA, 19 nt, Artificial Sequence
  Description of Artificial Sequence: Synthetic oligonucleotide
ggcuaggaauccauugggg

SEQ ID NO: 2731629 - RNA, 19 nt, Artificial Sequence
  Description of Artificial Sequence: Synthetic oligonucleotide
cccaaaacagucccgggac

SEQ ID NO: 2731630 - RNA, 19 nt, Artificial Sequence
  Description of Artificial Sequence: Synthetic oligonucleotide
gaauccauuggggaaaguu

SEQ ID NO: 2731631 - RNA, 19 nt, Artificial Sequence
  Description of Artificial Sequence: Synthetic oligonucleotide
aaucccggccaggcucccc

SEQ ID NO: 2731632 - RNA, 19 nt, Artificial Sequence
  Description of Artificial Sequence: Synthetic oligonucleotide
cugccacgaagucacggug

SEQ ID NO: 2731633 - RNA, 19 nt, Artificial Sequence
  Description of Artificial Sequence: Synthetic oligonucleotide
agaacucccaaaagacccu

SEQ ID NO: 2731634 - RNA, 19 nt, Artificial Sequence
  Description of Artificial Sequence: Synthetic oligonucleotide
gacagggaggagccccacc

SEQ ID NO: 2731635 - RNA, 19 nt, Artificial Sequence
  Description of Artificial Sequence: Synthetic oligonucleotide
ugggcucugccacgaaguc

SEQ ID NO: 2731636 - RNA, 19 nt, Artificial Sequence
  Description of Artificial Sequence: Synthetic oligonucleotide
aucgugaauggagggagaa

SEQ ID NO: 2731637 - RNA, 19 nt, Artificial Sequence
  Description of Artificial Sequence: Synthetic oligonucleotide
ggcaucacaccauucucga

SEQ ID NO: 2731638 - RNA, 19 nt, Artificial Sequence
  Description of Artificial Sequence: Synthetic oligonucleotide
ggaggugagugugacaaca

SEQ ID NO: 2731639 - RNA, 19 nt, Artificial Sequence
  Description of Artificial Sequence: Synthetic oligonucleotide
augggcucugccacgaagu

SEQ ID NO: 2731640 - RNA, 19 nt, Artificial Sequence
  Description of Artificial Sequence: Synthetic oligonucleotide
aaaagacccuggaguacau

SEQ ID NO: 2731641 - RNA, 19 nt, Artificial Sequence
  Description of Artificial Sequence: Synthetic oligonucleotide
agaggucuucaucuuucuu

SEQ ID NO: 2731642 - RNA, 19 nt, Artificial Sequence
  Description of Artificial Sequence: Synthetic oligonucleotide
ugcccaggacuucaccaau

SEQ ID NO: 2731643 - RNA, 19 nt, Artificial Sequence
  Description of Artificial Sequence: Synthetic oligonucleotide
aaagggcuaggaauccauu

SEQ ID NO: 2731644 - RNA, 19 nt, Artificial Sequence
  Description of Artificial Sequence: Synthetic oligonucleotide
caccagaaacuggccaagg

SEQ ID NO: 2731645 - RNA, 19 nt, Artificial Sequence
  Description of Artificial Sequence: Synthetic oligonucleotide
gcugaggggagagaacucc

SEQ ID NO: 2731646 - RNA, 19 nt, Artificial Sequence
  Description of Artificial Sequence: Synthetic oligonucleotide
ggacauccaacagaucgug

SEQ ID NO: 2731647 - RNA, 19 nt, Artificial Sequence
  Description of Artificial Sequence: Synthetic oligonucleotide
ggggagagaacucccaaaa

SEQ ID NO: 2731648 - RNA, 19 nt, Artificial Sequence
  Description of Artificial Sequence: Synthetic oligonucleotide
guccuucagccauucucug

SEQ ID NO: 2731649 - RNA, 19 nt, Artificial Sequence
  Description of Artificial Sequence: Synthetic oligonucleotide
uuugggagguugucaucuu

SEQ ID NO: 2731650 - RNA, 19 nt, Artificial Sequence
  Description of Artificial Sequence: Synthetic oligonucleotide
ccccagaguacauuacaag

SEQ ID NO: 2731651 - RNA, 19 nt, Artificial Sequence
  Description of Artificial Sequence: Synthetic oligonucleotide
ggagguugucaucuugauc

SEQ ID NO: 2731652 - RNA, 19 nt, Artificial Sequence
  Description of Artificial Sequence: Synthetic oligonucleotide
cccaggacuucaccaaucc

SEQ ID NO: 2731653 - RNA, 19 nt, Artificial Sequence
  Description of Artificial Sequence: Synthetic oligonucleotide
gagacucaauauuguggcu

SEQ ID NO: 2731654 - RNA, 19 nt, Artificial Sequence
  Description of Artificial Sequence: Synthetic oligonucleotide
cuucaccaaucccggccag

SEQ ID NO: 2731655 - RNA, 19 nt, Artificial Sequence
  Description of Artificial Sequence: Synthetic oligonucleotide
ggugagugugacaacagua

SEQ ID NO: 2731656 - RNA, 19 nt, Artificial Sequence
  Description of Artificial Sequence: Synthetic oligonucleotide
caaagccccuuuccuccag

SEQ ID NO: 2731657 - RNA, 19 nt, Artificial Sequence
  Description of Artificial Sequence: Synthetic oligonucleotide
ucccgggacugcuuggcau

SEQ ID NO: 2731658 - RNA, 19 nt, Artificial Sequence
  Description of Artificial Sequence: Synthetic oligonucleotide
ucgugaauggagggagaaa

SEQ ID NO: 2731659 - RNA, 19 nt, Artificial Sequence
  Description of Artificial Sequence: Synthetic oligonucleotide
gccccuuuccuccagcuuc

SEQ ID NO: 2731660 - RNA, 19 nt, Artificial Sequence
  Description of Artificial Sequence: Synthetic oligonucleotide
gggacugcuuggcauuggc

SEQ ID NO: 2731661 - RNA, 19 nt, Artificial Sequence
  Description of Artificial Sequence: Synthetic oligonucleotide
cauuggcaccacacguguc

SEQ ID NO: 2731662 - RNA, 19 nt, Artificial Sequence
  Description of Artificial Sequence: Synthetic oligonucleotide
gacauccaacagaucguga

SEQ ID NO: 2731663 - RNA, 19 nt, Artificial Sequence
  Description of Artificial Sequence: Synthetic oligonucleotide
aaagacccuggaguacaua

SEQ ID NO: 2731664 - RNA, 19 nt, Artificial Sequence
  Description of Artificial Sequence: Synthetic oligonucleotide
cauucucgaaggcacccaa

SEQ ID NO: 2731665 - RNA, 19 nt, Artificial Sequence
  Description of Artificial Sequence: Synthetic oligonucleotide
uugaaacgcugaggggaga

SEQ ID NO: 2731666 - RNA, 19 nt, Artificial Sequence
  Description of Artificial Sequence: Synthetic oligonucleotide
acccuggaguacauaggag

SEQ ID NO: 2731667 - RNA, 19 nt, Artificial Sequence
  Description of Artificial Sequence: Synthetic oligonucleotide
gaucgugaauggagggaga

SEQ ID NO: 2731668 - RNA, 19 nt, Artificial Sequence
  Description of Artificial Sequence: Synthetic oligonucleotide
cagaucgugaauggaggga

SEQ ID NO: 2731669 - RNA, 19 nt, Artificial Sequence
  Description of Artificial Sequence: Synthetic oligonucleotide
acauaggaggugaguguga

SEQ ID NO: 2731670 - RNA, 19 nt, Artificial Sequence
  Description of Artificial Sequence: Synthetic oligonucleotide
gaaacgcugaggggagaga

SEQ ID NO: 2731671 - RNA, 19 nt, Artificial Sequence
  Description of Artificial Sequence: Synthetic oligonucleotide
ccggcuucagacucuggag

SEQ ID NO: 2731672 - RNA, 19 nt, Artificial Sequence
  Description of Artificial Sequence: Synthetic oligonucleotide
cagucccgggacugcuugg

SEQ ID NO: 2731673 - RNA, 19 nt, Artificial Sequence
  Description of Artificial Sequence: Synthetic oligonucleotide
augcaagggcaagaauccu

SEQ ID NO: 2731674 - RNA, 19 nt, Artificial Sequence
  Description of Artificial Sequence: Synthetic oligonucleotide
aggcaugcaagggcaagaa

SEQ ID NO: 2731675 - RNA, 19 nt, Artificial Sequence
  Description of Artificial Sequence: Synthetic oligonucleotide
cacacguguccuucagcca

SEQ ID NO: 2731676 - RNA, 19 nt, Artificial Sequence
  Description of Artificial Sequence: Synthetic oligonucleotide
caagaaggcaucacaccau

SEQ ID NO: 2731677 - RNA, 19 nt, Artificial Sequence
  Description of Artificial Sequence: Synthetic oligonucleotide
ccaaucccggccaggcucc

SEQ ID NO: 2731678 - RNA, 19 nt, Artificial Sequence
  Description of Artificial Sequence: Synthetic oligonucleotide
cugcuuggcauuggcacca

SEQ ID NO: 2731679 - RNA, 19 nt, Artificial Sequence
  Description of Artificial Sequence: Synthetic oligonucleotide
ccaggacuucaccaauccc

SEQ ID NO: 2731680 - RNA, 19 nt, Artificial Sequence
  Description of Artificial Sequence: Synthetic oligonucleotide
ggaguacauaggaggugag

SEQ ID NO: 2731681 - RNA, 19 nt, Artificial Sequence
  Description of Artificial Sequence: Synthetic oligonucleotide
ucccuucacggaggacagg

SEQ ID NO: 2731682 - RNA, 19 nt, Artificial Sequence
  Description of Artificial Sequence: Synthetic oligonucleotide
gcaagggcaagaauccuaa

SEQ ID NO: 2731683 - RNA, 19 nt, Artificial Sequence
  Description of Artificial Sequence: Synthetic oligonucleotide
aagccuugucaaagccccu

SEQ ID NO: 2731684 - RNA, 19 nt, Artificial Sequence
  Description of Artificial Sequence: Synthetic oligonucleotide
ccaaaagacccuggaguac

SEQ ID NO: 2731685 - RNA, 19 nt, Artificial Sequence
  Description of Artificial Sequence: Synthetic oligonucleotide
cccaaaagacccuggagua

SEQ ID NO: 2731686 - RNA, 19 nt, Artificial Sequence
  Description of Artificial Sequence: Synthetic oligonucleotide
acgaagucacggugcuuuu

SEQ ID NO: 2731687 - RNA, 19 nt, Artificial Sequence
  Description of Artificial Sequence: Synthetic oligonucleotide
ggacuucaccaaucccggc

SEQ ID NO: 2731688 - RNA, 19 nt, Artificial Sequence
  Description of Artificial Sequence: Synthetic oligonucleotide
gcaccagaaacuggccaag

SEQ ID NO: 2731689 - RNA, 19 nt, Artificial Sequence
  Description of Artificial Sequence: Synthetic oligonucleotide
auucucgaaggcacccaaa

SEQ ID NO: 2731690 - RNA, 19 nt, Artificial Sequence
  Description of Artificial Sequence: Synthetic oligonucleotide
caacaguaaucuuucccuu

SEQ ID NO: 2731691 - RNA, 19 nt, Artificial Sequence
  Description of Artificial Sequence: Synthetic oligonucleotide
agccuugucaaagccccuu

SEQ ID NO: 2731692 - RNA, 19 nt, Artificial Sequence
  Description of Artificial Sequence: Synthetic oligonucleotide
cgugaauggagggagaaaa

SEQ ID NO: 2731693 - RNA, 19 nt, Artificial Sequence
  Description of Artificial Sequence: Synthetic oligonucleotide
ccuugucaaagccccuuuc

SEQ ID NO: 2731694 - RNA, 19 nt, Artificial Sequence
  Description of Artificial Sequence: Synthetic oligonucleotide
cuuucccuucacggaggac

SEQ ID NO: 2731695 - RNA, 19 nt, Artificial Sequence
  Description of Artificial Sequence: Synthetic oligonucleotide
cacgaagucacggugcuuu

SEQ ID NO: 2731696 - RNA, 19 nt, Artificial Sequence
  Description of Artificial Sequence: Synthetic oligonucleotide
gugcuuuugggagguuguc

SEQ ID NO: 2731697 - RNA, 19 nt, Artificial Sequence
  Description of Artificial Sequence: Synthetic oligonucleotide
gcauuggcaccacacgugu

SEQ ID NO: 2731698 - RNA, 19 nt, Artificial Sequence
  Description of Artificial Sequence: Synthetic oligonucleotide
caagggcaagaauccuaaa

SEQ ID NO: 2731699 - RNA, 19 nt, Artificial Sequence
  Description of Artificial Sequence: Synthetic oligonucleotide
caaggaccacauaagccuu

SEQ ID NO: 2731700 - RNA, 19 nt, Artificial Sequence
  Description of Artificial Sequence: Synthetic oligonucleotide
gccccacccggcuucagac

SEQ ID NO: 2731701 - RNA, 19 nt, Artificial Sequence
  Description of Artificial Sequence: Synthetic oligonucleotide
ggccaggcuccccacuggc

SEQ ID NO: 2731702 - RNA, 19 nt, Artificial Sequence
  Description of Artificial Sequence: Synthetic oligonucleotide
ccuggaguacauaggaggu

SEQ ID NO: 2731703 - RNA, 19 nt, Artificial Sequence
  Description of Artificial Sequence: Synthetic oligonucleotide
cccacccggcuucagacuc

SEQ ID NO: 2731704 - RNA, 19 nt, Artificial Sequence
  Description of Artificial Sequence: Synthetic oligonucleotide
cacccggcuucagacucug

SEQ ID NO: 2731705 - RNA, 19 nt, Artificial Sequence
  Description of Artificial Sequence: Synthetic oligonucleotide
ccacauaagccuugucaaa

SEQ ID NO: 2731706 - RNA, 19 nt, Artificial Sequence
  Description of Artificial Sequence: Synthetic oligonucleotide
ccaacagaucgugaaugga

SEQ ID NO: 2731707 - RNA, 19 nt, Artificial Sequence
  Description of Artificial Sequence: Synthetic oligonucleotide
ggacugcuuggcauuggca

SEQ ID NO: 2731708 - RNA, 19 nt, Artificial Sequence
  Description of Artificial Sequence: Synthetic oligonucleotide
ccauucucugaagaggucu

SEQ ID NO: 2731709 - RNA, 19 nt, Artificial Sequence
  Description of Artificial Sequence: Synthetic oligonucleotide
ggaccacauaagccuuguc

SEQ ID NO: 2731710 - RNA, 19 nt, Artificial Sequence
  Description of Artificial Sequence: Synthetic oligonucleotide
aggaguccccagaguacau

SEQ ID NO: 2731711 - RNA, 19 nt, Artificial Sequence
  Description of Artificial Sequence: Synthetic oligonucleotide
ccauuggggaaaguuaacu

SEQ ID NO: 2731712 - RNA, 19 nt, Artificial Sequence
  Description of Artificial Sequence: Synthetic oligonucleotide
gggaggagccccacccggc

SEQ ID NO: 2731713 - RNA, 19 nt, Artificial Sequence
  Description of Artificial Sequence: Synthetic oligonucleotide
ccccaugggcucugccacg

SEQ ID NO: 2731714 - RNA, 19 nt, Artificial Sequence
  Description of Artificial Sequence: Synthetic oligonucleotide
cacggaggacagggaggag

SEQ ID NO: 2731715 - RNA, 19 nt, Artificial Sequence
  Description of Artificial Sequence: Synthetic oligonucleotide
ucccggccaggcuccccac

SEQ ID NO: 2731716 - RNA, 19 nt, Artificial Sequence
  Description of Artificial Sequence: Synthetic oligonucleotide
caaucccggccaggcuccc

SEQ ID NO: 2731717 - RNA, 19 nt, Artificial Sequence
  Description of Artificial Sequence: Synthetic oligonucleotide
gccacgaagucacggugcu

SEQ ID NO: 2731718 - RNA, 19 nt, Artificial Sequence
  Description of Artificial Sequence: Synthetic oligonucleotide
cacggugcuuuugggaggu

SEQ ID NO: 2731719 - RNA, 19 nt, Artificial Sequence
  Description of Artificial Sequence: Synthetic oligonucleotide
ccggccaggcuccccacug

SEQ ID NO: 2731720 - RNA, 19 nt, Artificial Sequence
  Description of Artificial Sequence: Synthetic oligonucleotide
gccauucucugaagagguc

SEQ ID NO: 2731721 - RNA, 19 nt, Artificial Sequence
  Description of Artificial Sequence: Synthetic oligonucleotide
acccggcuucagacucugg

SEQ ID NO: 2731722 - RNA, 19 nt, Artificial Sequence
  Description of Artificial Sequence: Synthetic oligonucleotide
cgaagucacggugcuuuug

SEQ ID NO: 2731723 - RNA, 19 nt, Artificial Sequence
  Description of Artificial Sequence: Synthetic oligonucleotide
ggaggagccccacccggcu

SEQ ID NO: 2731724 - RNA, 19 nt, Artificial Sequence
  Description of Artificial Sequence: Synthetic oligonucleotide
cggugcuuuugggagguug

SEQ ID NO: 2731725 - RNA, 19 nt, Artificial Sequence
  Description of Artificial Sequence: Synthetic oligonucleotide
ggcaugcaagggcaagaau

SEQ ID NO: 2731726 - RNA, 19 nt, Artificial Sequence
  Description of Artificial Sequence: Synthetic oligonucleotide
gcucugccacgaagucacg

SEQ ID NO: 2731727 - RNA, 19 nt, Artificial Sequence
  Description of Artificial Sequence: Synthetic oligonucleotide
ccaaaacagucccgggacu

SEQ ID NO: 2731728 - RNA, 19 nt, Artificial Sequence
  Description of Artificial Sequence: Synthetic oligonucleotide
ccauucucgaaggcaccca

SEQ ID NO: 2731729 - RNA, 19 nt, Artificial Sequence
  Description of Artificial Sequence: Synthetic oligonucleotide
gaggagccccacccggcuu

SEQ ID NO: 2731730 - RNA, 19 nt, Artificial Sequence
  Description of Artificial Sequence: Synthetic oligonucleotide
cgcugaggggagagaacuc

SEQ ID NO: 2731731 - RNA, 19 nt, Artificial Sequence
  Description of Artificial Sequence: Synthetic oligonucleotide
caccaaucccggccaggcu

SEQ ID NO: 2731732 - RNA, 19 nt, Artificial Sequence
  Description of Artificial Sequence: Synthetic oligonucleotide
ccgggacugcuuggcauug

SEQ ID NO: 2731733 - RNA, 19 nt, Artificial Sequence
  Description of Artificial Sequence: Synthetic oligonucleotide
cacguguccuucagccauu

SEQ ID NO: 2731734 - RNA, 19 nt, Artificial Sequence
  Description of Artificial Sequence: Synthetic oligonucleotide
caggcuccccacuggcuuu

SEQ ID NO: 2731735 - RNA, 19 nt, Artificial Sequence
  Description of Artificial Sequence: Synthetic oligonucleotide
cggccaggcuccccacugg

SEQ ID NO: 2731736 - RNA, 19 nt, Artificial Sequence
  Description of Artificial Sequence: Synthetic oligonucleotide
gccuugucaaagccccuuu

SEQ ID NO: 2731737 - RNA, 19 nt, Artificial Sequence
  Description of Artificial Sequence: Synthetic oligonucleotide
cccaugggcucugccacga

SEQ ID NO: 2731738 - RNA, 19 nt, Artificial Sequence
  Description of Artificial Sequence: Synthetic oligonucleotide
ggaguccccagaguacauu

SEQ ID NO: 2731739 - RNA, 19 nt, Artificial Sequence
  Description of Artificial Sequence: Synthetic oligonucleotide
cgaaggcacccaaaacagu

SEQ ID NO: 2731740 - RNA, 19 nt, Artificial Sequence
  Description of Artificial Sequence: Synthetic oligonucleotide
ggaauccauuggggaaagu

SEQ ID NO: 2731741 - RNA, 19 nt, Artificial Sequence
  Description of Artificial Sequence: Synthetic oligonucleotide
ccccuuuccuccagcuucu

SEQ ID NO: 2731742 - RNA, 19 nt, Artificial Sequence
  Description of Artificial Sequence: Synthetic oligonucleotide
acggugcuuuugggagguu

SEQ ID NO: 2731743 - RNA, 19 nt, Artificial Sequence
  Description of Artificial Sequence: Synthetic oligonucleotide
cccgggacugcuuggcauu

SEQ ID NO: 2731744 - RNA, 19 nt, Artificial Sequence
  Description of Artificial Sequence: Synthetic oligonucleotide
gccaggcuccccacuggcu

SEQ ID NO: 2731745 - RNA, 19 nt, Artificial Sequence
  Description of Artificial Sequence: Synthetic oligonucleotide
ccacccggcuucagacucu

SEQ ID NO: 2731746 - RNA, 19 nt, Artificial Sequence
  Description of Artificial Sequence: Synthetic oligonucleotide
ccaugggcucugccacgaa

SEQ ID NO: 2731747 - RNA, 19 nt, Artificial Sequence
  Description of Artificial Sequence: Synthetic oligonucleotide
ccccacccggcuucagacu

SEQ ID NO: 2731748 - RNA, 19 nt, Artificial Sequence
  Description of Artificial Sequence: Synthetic oligonucleotide
cguguccuucagccauucu

SEQ ID NO: 2731749 - RNA, 19 nt, Artificial Sequence
  Description of Artificial Sequence: Synthetic oligonucleotide
cccggccaggcuccccacu

SEQ ID NO: 2731750 - RNA, 19 nt, Artificial Sequence
  Description of Artificial Sequence: Synthetic oligonucleotide
cuuuacaauacugagagag

SEQ ID NO: 2731751 - RNA, 19 nt, Artificial Sequence
  Description of Artificial Sequence: Synthetic oligonucleotide
acaauacugagagagacac

SEQ ID NO: 2731752 - RNA, 19 nt, Artificial Sequence
  Description of Artificial Sequence: Synthetic oligonucleotide
aauacugagagagacacau

SEQ ID NO: 2731753 - RNA, 19 nt, Artificial Sequence
  Description of Artificial Sequence: Synthetic oligonucleotide
uacugagagagacacaucu

SEQ ID NO: 2731754 - RNA, 19 nt, Artificial Sequence
  Description of Artificial Sequence: Synthetic oligonucleotide
aucaccuuucccaauaccc

SEQ ID NO: 2731755 - RNA, 19 nt, Artificial Sequence
  Description of Artificial Sequence: Synthetic oligonucleotide
uuuacaauacugagagaga

SEQ ID NO: 2731756 - RNA, 19 nt, Artificial Sequence
  Description of Artificial Sequence: Synthetic oligonucleotide
uuacaauacugagagagac

SEQ ID NO: 2731757 - RNA, 19 nt, Artificial Sequence
  Description of Artificial Sequence: Synthetic oligonucleotide
ugacaucagggguagaagc

SEQ ID NO: 2731758 - RNA, 19 nt, Artificial Sequence
  Description of Artificial Sequence: Synthetic oligonucleotide
ucaccuuucccaauacccc

SEQ ID NO: 2731759 - RNA, 19 nt, Artificial Sequence
  Description of Artificial Sequence: Synthetic oligonucleotide
acaucugagcucugggaac

SEQ ID NO: 2731760 - RNA, 19 nt, Artificial Sequence
  Description of Artificial Sequence: Synthetic oligonucleotide
uacaauacugagagagaca

SEQ ID NO: 2731761 - RNA, 19 nt, Artificial Sequence
  Description of Artificial Sequence: Synthetic oligonucleotide
acaucagggguagaagccc

SEQ ID NO: 2731762 - RNA, 19 nt, Artificial Sequence
  Description of Artificial Sequence: Synthetic oligonucleotide
aagggucuggucuccacca

SEQ ID NO: 2731763 - RNA, 19 nt, Artificial Sequence
  Description of Artificial Sequence: Synthetic oligonucleotide
agggcaccaccagagaugc

SEQ ID NO: 2731764 - RNA, 19 nt, Artificial Sequence
  Description of Artificial Sequence: Synthetic oligonucleotide
caccuuucccaauaccccg

SEQ ID NO: 2731765 - RNA, 19 nt, Artificial Sequence
  Description of Artificial Sequence: Synthetic oligonucleotide
gacaucagggguagaagcc

SEQ ID NO: 2731766 - RNA, 19 nt, Artificial Sequence
  Description of Artificial Sequence: Synthetic oligonucleotide
aggggugaugacaucaggg

SEQ ID NO: 2731767 - RNA, 19 nt, Artificial Sequence
  Description of Artificial Sequence: Synthetic oligonucleotide
ucugccaggggugaugaca

SEQ ID NO: 2731768 - RNA, 19 nt, Artificial Sequence
  Description of Artificial Sequence: Synthetic oligonucleotide
agaagggucuggucuccac

SEQ ID NO: 2731769 - RNA, 19 nt, Artificial Sequence
  Description of Artificial Sequence: Synthetic oligonucleotide
gaugacaucagggguagaa

SEQ ID NO: 2731770 - RNA, 19 nt, Artificial Sequence
  Description of Artificial Sequence: Synthetic oligonucleotide
aagggcaccaccagagaug

SEQ ID NO: 2731771 - RNA, 19 nt, Artificial Sequence
  Description of Artificial Sequence: Synthetic oligonucleotide
ucagggugcaucaccuuuc

SEQ ID NO: 2731772 - RNA, 19 nt, Artificial Sequence
  Description of Artificial Sequence: Synthetic oligonucleotide
agugcgagcucgcuugugu

SEQ ID NO: 2731773 - RNA, 19 nt, Artificial Sequence
  Description of Artificial Sequence: Synthetic oligonucleotide
augacaucagggguagaag

SEQ ID NO: 2731774 - RNA, 19 nt, Artificial Sequence
  Description of Artificial Sequence: Synthetic oligonucleotide
cagggguagaagcccaggg

SEQ ID NO: 2731775 - RNA, 19 nt, Artificial Sequence
  Description of Artificial Sequence: Synthetic oligonucleotide
agcaccucagggugcauca

SEQ ID NO: 2731776 - RNA, 19 nt, Artificial Sequence
  Description of Artificial Sequence: Synthetic oligonucleotide
ucagggguagaagcccagg

SEQ ID NO: 2731777 - RNA, 19 nt, Artificial Sequence
  Description of Artificial Sequence: Synthetic oligonucleotide
gugaugacaucagggguag

SEQ ID NO: 2731778 - RNA, 19 nt, Artificial Sequence
  Description of Artificial Sequence: Synthetic oligonucleotide
uccucccucugccaggggu

SEQ ID NO: 2731779 - RNA, 19 nt, Artificial Sequence
  Description of Artificial Sequence: Synthetic oligonucleotide
agggugcaucaccuuuccc

SEQ ID NO: 2731780 - RNA, 19 nt, Artificial Sequence
  Description of Artificial Sequence: Synthetic oligonucleotide
gggugcaucaccuuuccca

SEQ ID NO: 2731781 - RNA, 19 nt, Artificial Sequence
  Description of Artificial Sequence: Synthetic oligonucleotide
agccccucaugcuccuccc

SEQ ID NO: 2731782 - RNA, 19 nt, Artificial Sequence
  Description of Artificial Sequence: Synthetic oligonucleotide
ugcgagcucgcuugugucu

SEQ ID NO: 2731783 - RNA, 19 nt, Artificial Sequence
  Description of Artificial Sequence: Synthetic oligonucleotide
cacaucugagcucugggaa

SEQ ID NO: 2731784 - RNA, 19 nt, Artificial Sequence
  Description of Artificial Sequence: Synthetic oligonucleotide
caggggugaugacaucagg

SEQ ID NO: 2731785 - RNA, 19 nt, Artificial Sequence
  Description of Artificial Sequence: Synthetic oligonucleotide
agaagggcaccaccagaga

SEQ ID NO: 2731786 - RNA, 19 nt, Artificial Sequence
  Description of Artificial Sequence: Synthetic oligonucleotide
cagggugcaucaccuuucc

SEQ ID NO: 2731787 - RNA, 19 nt, Artificial Sequence
  Description of Artificial Sequence: Synthetic oligonucleotide
auacugagagagacacauc

SEQ ID NO: 2731788 - RNA, 19 nt, Artificial Sequence
  Description of Artificial Sequence: Synthetic oligonucleotide
ucugagcucugggaacugu

SEQ ID NO: 2731789 - RNA, 19 nt, Artificial Sequence
  Description of Artificial Sequence: Synthetic oligonucleotide
aggcagccccucaugcucc

SEQ ID NO: 2731790 - RNA, 19 nt, Artificial Sequence
  Description of Artificial Sequence: Synthetic oligonucleotide
agggucuggucuccaccag

SEQ ID NO: 2731791 - RNA, 19 nt, Artificial Sequence
  Description of Artificial Sequence: Synthetic oligonucleotide
ggugcaucaccuuucccaa

SEQ ID NO: 2731792 - RNA, 19 nt, Artificial Sequence
  Description of Artificial Sequence: Synthetic oligonucleotide
caucagggguagaagccca

SEQ ID NO: 2731793 - RNA, 19 nt, Artificial Sequence
  Description of Artificial Sequence: Synthetic oligonucleotide
cagccccucaugcuccucc

SEQ ID NO: 2731794 - RNA, 19 nt, Artificial Sequence
  Description of Artificial Sequence: Synthetic oligonucleotide
accucagggugcaucaccu

SEQ ID NO: 2731795 - RNA, 19 nt, Artificial Sequence
  Description of Artificial Sequence: Synthetic oligonucleotide
caauacugagagagacaca

SEQ ID NO: 2731796 - RNA, 19 nt, Artificial Sequence
  Description of Artificial Sequence: Synthetic oligonucleotide
ggugaugacaucaggggua

SEQ ID NO: 2731797 - RNA, 19 nt, Artificial Sequence
  Description of Artificial Sequence: Synthetic oligonucleotide
agcgagugcgagcucgcuu

SEQ ID NO: 2731798 - RNA, 19 nt, Artificial Sequence
  Description of Artificial Sequence: Synthetic oligonucleotide
aucagggguagaagcccag

SEQ ID NO: 2731799 - RNA, 19 nt, Artificial Sequence
  Description of Artificial Sequence: Synthetic oligonucleotide
gugcgagcucgcuuguguc

SEQ ID NO: 2731800 - RNA, 19 nt, Artificial Sequence
  Description of Artificial Sequence: Synthetic oligonucleotide
gcaucaccuuucccaauac

SEQ ID NO: 2731801 - RNA, 19 nt, Artificial Sequence
  Description of Artificial Sequence: Synthetic oligonucleotide
aucugagcucugggaacug

SEQ ID NO: 2731802 - RNA, 19 nt, Artificial Sequence
  Description of Artificial Sequence: Synthetic oligonucleotide
gccaggggugaugacauca

SEQ ID NO: 2731803 - RNA, 19 nt, Artificial Sequence
  Description of Artificial Sequence: Synthetic oligonucleotide
ugaugacaucagggguaga

SEQ ID NO: 2731804 - RNA, 19 nt, Artificial Sequence
  Description of Artificial Sequence: Synthetic oligonucleotide
gagugcgagcucgcuugug

SEQ ID NO: 2731805 - RNA, 19 nt, Artificial Sequence
  Description of Artificial Sequence: Synthetic oligonucleotide
caucugagcucugggaacu

SEQ ID NO: 2731806 - RNA, 19 nt, Artificial Sequence
  Description of Artificial Sequence: Synthetic oligonucleotide
cagcaccucagggugcauc

SEQ ID NO: 2731807 - RNA, 19 nt, Artificial Sequence
  Description of Artificial Sequence: Synthetic oligonucleotide
cugccaggggugaugacau

SEQ ID NO: 2731808 - RNA, 19 nt, Artificial Sequence
  Description of Artificial Sequence: Synthetic oligonucleotide
cucagggugcaucaccuuu

SEQ ID NO: 2731809 - RNA, 19 nt, Artificial Sequence
  Description of Artificial Sequence: Synthetic oligonucleotide
cucugccaggggugaugac

SEQ ID NO: 2731810 - RNA, 19 nt, Artificial Sequence
  Description of Artificial Sequence: Synthetic oligonucleotide
ugccaggggugaugacauc

SEQ ID NO: 2731811 - RNA, 19 nt, Artificial Sequence
  Description of Artificial Sequence: Synthetic oligonucleotide
ccagaagggucuggucucc

SEQ ID NO: 2731812 - RNA, 19 nt, Artificial Sequence
  Description of Artificial Sequence: Synthetic oligonucleotide
ccccagaagggcaccacca

SEQ ID NO: 2731813 - RNA, 19 nt, Artificial Sequence
  Description of Artificial Sequence: Synthetic oligonucleotide
ccccagaagggucuggucu

SEQ ID NO: 2731814 - RNA, 19 nt, Artificial Sequence
  Description of Artificial Sequence: Synthetic oligonucleotide
cagaagggucuggucucca

SEQ ID NO: 2731815 - RNA, 19 nt, Artificial Sequence
  Description of Artificial Sequence: Synthetic oligonucleotide
cucccucugccagggguga

SEQ ID NO: 2731816 - RNA, 19 nt, Artificial Sequence
  Description of Artificial Sequence: Synthetic oligonucleotide
gccccucaugcuccucccc

SEQ ID NO: 2731817 - RNA, 19 nt, Artificial Sequence
  Description of Artificial Sequence: Synthetic oligonucleotide
gugcaucaccuuucccaau

SEQ ID NO: 2731818 - RNA, 19 nt, Artificial Sequence
  Description of Artificial Sequence: Synthetic oligonucleotide
ggcagccccucaugcuccu

SEQ ID NO: 2731819 - RNA, 19 nt, Artificial Sequence
  Description of Artificial Sequence: Synthetic oligonucleotide
cagcgagugcgagcucgcu

SEQ ID NO: 2731820 - RNA, 19 nt, Artificial Sequence
  Description of Artificial Sequence: Synthetic oligonucleotide
gcagccccucaugcuccuc

SEQ ID NO: 2731821 - RNA, 19 nt, Artificial Sequence
  Description of Artificial Sequence: Synthetic oligonucleotide
ccucagggugcaucaccuu

SEQ ID NO: 2731822 - RNA, 19 nt, Artificial Sequence
  Description of Artificial Sequence: Synthetic oligonucleotide
ccgcagcgagugcgagcuc

SEQ ID NO: 2731823 - RNA, 19 nt, Artificial Sequence
  Description of Artificial Sequence: Synthetic oligonucleotide
cgagugcgagcucgcuugu

SEQ ID NO: 2731824 - RNA, 19 nt, Artificial Sequence
  Description of Artificial Sequence: Synthetic oligonucleotide
uauacaaacaauccgaugc

SEQ ID NO: 2731825 - RNA, 19 nt, Artificial Sequence
  Description of Artificial Sequence: Synthetic oligonucleotide
uguuuauacaaacaauccg

SEQ ID NO: 2731826 - RNA, 19 nt, Artificial Sequence
  Description of Artificial Sequence: Synthetic oligonucleotide
aagaucauuguuuauacaa

SEQ ID NO: 2731827 - RNA, 19 nt, Artificial Sequence
  Description of Artificial Sequence: Synthetic oligonucleotide
auuguuuauacaaacaauc

SEQ ID NO: 2731828 - RNA, 19 nt, Artificial Sequence
  Description of Artificial Sequence: Synthetic oligonucleotide
aagaagaaacuguccaucg

SEQ ID NO: 2731829 - RNA, 19 nt, Artificial Sequence
  Description of Artificial Sequence: Synthetic oligonucleotide
aaacuguccaucgugacgg

SEQ ID NO: 2731830 - RNA, 19 nt, Artificial Sequence
  Description of Artificial Sequence: Synthetic oligonucleotide
uuguuuauacaaacaaucc

SEQ ID NO: 2731831 - RNA, 19 nt, Artificial Sequence
  Description of Artificial Sequence: Synthetic oligonucleotide
ucauuguuuauacaaacaa

SEQ ID NO: 2731832 - RNA, 19 nt, Artificial Sequence
  Description of Artificial Sequence: Synthetic oligonucleotide
aacuuguccaggaacauac

SEQ ID NO: 2731833 - RNA, 19 nt, Artificial Sequence
  Description of Artificial Sequence: Synthetic oligonucleotide
auacaaacaauccgaugcc

SEQ ID NO: 2731834 - RNA, 19 nt, Artificial Sequence
  Description of Artificial Sequence: Synthetic oligonucleotide
cucucuugauucaagaagg

SEQ ID NO: 2731835 - RNA, 19 nt, Artificial Sequence
  Description of Artificial Sequence: Synthetic oligonucleotide
ugugcuuucuggcaggaag

SEQ ID NO: 2731836 - RNA, 19 nt, Artificial Sequence
  Description of Artificial Sequence: Synthetic oligonucleotide
ugaaacuuguccaggaaca

SEQ ID NO: 2731837 - RNA, 19 nt, Artificial Sequence
  Description of Artificial Sequence: Synthetic oligonucleotide
uguagcaagcggcuaaccg

SEQ ID NO: 2731838 - RNA, 19 nt, Artificial Sequence
  Description of Artificial Sequence: Synthetic oligonucleotide
gaaagaucauuguuuauac

SEQ ID NO: 2731839 - RNA, 19 nt, Artificial Sequence
  Description of Artificial Sequence: Synthetic oligonucleotide
aacauacggugcaugaugc

SEQ ID NO: 2731840 - RNA, 19 nt, Artificial Sequence
  Description of Artificial Sequence: Synthetic oligonucleotide
gaagguuacaggugguugg

SEQ ID NO: 2731841 - RNA, 19 nt, Artificial Sequence
  Description of Artificial Sequence: Synthetic oligonucleotide
cuugauucaagaaggcuag

SEQ ID NO: 2731842 - RNA, 19 nt, Artificial Sequence
  Description of Artificial Sequence: Synthetic oligonucleotide
uucagaaagaucauuguuu

SEQ ID NO: 2731843 - RNA, 19 nt, Artificial Sequence
  Description of Artificial Sequence: Synthetic oligonucleotide
gaagaaacuguccaucgug

SEQ ID NO: 2731844 - RNA, 19 nt, Artificial Sequence
  Description of Artificial Sequence: Synthetic oligonucleotide
gaucauuguuuauacaaac

SEQ ID NO: 2731845 - RNA, 19 nt, Artificial Sequence
  Description of Artificial Sequence: Synthetic oligonucleotide
gaaacuguccaucgugacg

SEQ ID NO: 2731846 - RNA, 19 nt, Artificial Sequence
  Description of Artificial Sequence: Synthetic oligonucleotide
caagauaaccucagguugg

SEQ ID NO: 2731847 - RNA, 19 nt, Artificial Sequence
  Description of Artificial Sequence: Synthetic oligonucleotide
aggaacugcaaucuccugg

SEQ ID NO: 2731848 - RNA, 19 nt, Artificial Sequence
  Description of Artificial Sequence: Synthetic oligonucleotide
guugucaugaucccgggcc

SEQ ID NO: 2731849 - RNA, 19 nt, Artificial Sequence
  Description of Artificial Sequence: Synthetic oligonucleotide
aaacaauccgaugccggcc

SEQ ID NO: 2731850 - RNA, 19 nt, Artificial Sequence
  Description of Artificial Sequence: Synthetic oligonucleotide
accggagagggcuagggcc

SEQ ID NO: 2731851 - RNA, 19 nt, Artificial Sequence
  Description of Artificial Sequence: Synthetic oligonucleotide
guagcaagcggcuaaccgg

SEQ ID NO: 2731852 - RNA, 19 nt, Artificial Sequence
  Description of Artificial Sequence: Synthetic oligonucleotide
ucacaaccgaagaagaaac

SEQ ID NO: 2731853 - RNA, 19 nt, Artificial Sequence
  Description of Artificial Sequence: Synthetic oligonucleotide
auaaccucagguuggccac

SEQ ID NO: 2731854 - RNA, 19 nt, Artificial Sequence
  Description of Artificial Sequence: Synthetic oligonucleotide
aacugcaaucuccugguug

SEQ ID NO: 2731855 - RNA, 19 nt, Artificial Sequence
  Description of Artificial Sequence: Synthetic oligonucleotide
aggcacagcauguucaacg

SEQ ID NO: 2731856 - RNA, 19 nt, Artificial Sequence
  Description of Artificial Sequence: Synthetic oligonucleotide
gaacauacggugcaugaug

SEQ ID NO: 2731857 - RNA, 19 nt, Artificial Sequence
  Description of Artificial Sequence: Synthetic oligonucleotide
agaaggcuagagcagcagc

SEQ ID NO: 2731858 - RNA, 19 nt, Artificial Sequence
  Description of Artificial Sequence: Synthetic oligonucleotide
aaccuugaaagugaaggag

SEQ ID NO: 2731859 - RNA, 19 nt, Artificial Sequence
  Description of Artificial Sequence: Synthetic oligonucleotide
uuggagcuggaaaucaucc

SEQ ID NO: 2731860 - RNA, 19 nt, Artificial Sequence
  Description of Artificial Sequence: Synthetic oligonucleotide
acuuccaccacauuacacu

SEQ ID NO: 2731861 - RNA, 19 nt, Artificial Sequence
  Description of Artificial Sequence: Synthetic oligonucleotide
uguccaggaacauacggug

SEQ ID NO: 2731862 - RNA, 19 nt, Artificial Sequence
  Description of Artificial Sequence: Synthetic oligonucleotide
acaacuuccaccacauuac

SEQ ID NO: 2731863 - RNA, 19 nt, Artificial Sequence
  Description of Artificial Sequence: Synthetic oligonucleotide
aagauaaccucagguuggc

SEQ ID NO: 2731864 - RNA, 19 nt, Artificial Sequence
  Description of Artificial Sequence: Synthetic oligonucleotide
gauaaccucagguuggcca

SEQ ID NO: 2731865 - RNA, 19 nt, Artificial Sequence
  Description of Artificial Sequence: Synthetic oligonucleotide
auucuugaaacuuguccag

SEQ ID NO: 2731866 - RNA, 19 nt, Artificial Sequence
  Description of Artificial Sequence: Synthetic oligonucleotide
ucagaaagaucauuguuua

SEQ ID NO: 2731867 - RNA, 19 nt, Artificial Sequence
  Description of Artificial Sequence: Synthetic oligonucleotide
aaagaucauuguuuauaca

SEQ ID NO: 2731868 - RNA, 19 nt, Artificial Sequence
  Description of Artificial Sequence: Synthetic oligonucleotide
aaagugaaggagcgggugu

SEQ ID NO: 2731869 - RNA, 19 nt, Artificial Sequence
  Description of Artificial Sequence: Synthetic oligonucleotide
uuucuggcaggaaggaugc

SEQ ID NO: 2731870 - RNA, 19 nt, Artificial Sequence
  Description of Artificial Sequence: Synthetic oligonucleotide
aaccgaagaagaaacuguc

SEQ ID NO: 2731871 - RNA, 19 nt, Artificial Sequence
  Description of Artificial Sequence: Synthetic oligonucleotide
ugauucaagaaggcuagag

SEQ ID NO: 2731872 - RNA, 19 nt, Artificial Sequence
  Description of Artificial Sequence: Synthetic oligonucleotide
aacgccagcauguguuccg

SEQ ID NO: 2731873 - RNA, 19 nt, Artificial Sequence
  Description of Artificial Sequence: Synthetic oligonucleotide
agcuggaaaucauccagac

SEQ ID NO: 2731874 - RNA, 19 nt, Artificial Sequence
  Description of Artificial Sequence: Synthetic oligonucleotide
auccagacugagcaugggc

SEQ ID NO: 2731875 - RNA, 19 nt, Artificial Sequence
  Description of Artificial Sequence: Synthetic oligonucleotide
cacauuacacucuuccuug

SEQ ID NO: 2731876 - RNA, 19 nt, Artificial Sequence
  Description of Artificial Sequence: Synthetic oligonucleotide
ucagguuggccacaggaac

SEQ ID NO: 2731877 - RNA, 19 nt, Artificial Sequence
  Description of Artificial Sequence: Synthetic oligonucleotide
ucuugaaacuuguccagga

SEQ ID NO: 2731878 - RNA, 19 nt, Artificial Sequence
  Description of Artificial Sequence: Synthetic oligonucleotide
uccucaaccuugaaaguga

SEQ ID NO: 2731879 - RNA, 19 nt, Artificial Sequence
  Description of Artificial Sequence: Synthetic oligonucleotide
aaccggagagggcuagggc

SEQ ID NO: 2731880 - RNA, 19 nt, Artificial Sequence
  Description of Artificial Sequence: Synthetic oligonucleotide
gaugccuguagcaagcggc

SEQ ID NO: 2731881 - RNA, 19 nt, Artificial Sequence
  Description of Artificial Sequence: Synthetic oligonucleotide
caccacauuacacucuucc

SEQ ID NO: 2731882 - RNA, 19 nt, Artificial Sequence
  Description of Artificial Sequence: Synthetic oligonucleotide
uuguccaggaacauacggu

SEQ ID NO: 2731883 - RNA, 19 nt, Artificial Sequence
  Description of Artificial Sequence: Synthetic oligonucleotide
uacaaacaauccgaugccg

SEQ ID NO: 2731884 - RNA, 19 nt, Artificial Sequence
  Description of Artificial Sequence: Synthetic oligonucleotide
cucgguaaggcacagcaug

SEQ ID NO: 2731885 - RNA, 19 nt, Artificial Sequence
  Description of Artificial Sequence: Synthetic oligonucleotide
aacaauccgaugccggcca

SEQ ID NO: 2731886 - RNA, 19 nt, Artificial Sequence
  Description of Artificial Sequence: Synthetic oligonucleotide
caaacaauccgaugccggc

SEQ ID NO: 2731887 - RNA, 19 nt, Artificial Sequence
  Description of Artificial Sequence: Synthetic oligonucleotide
uucaacgccagcauguguu

SEQ ID NO: 2731888 - RNA, 19 nt, Artificial Sequence
  Description of Artificial Sequence: Synthetic oligonucleotide
agaacccgacuucaggcgg

SEQ ID NO: 2731889 - RNA, 19 nt, Artificial Sequence
  Description of Artificial Sequence: Synthetic oligonucleotide
agaaagaucauuguuuaua

SEQ ID NO: 2731890 - RNA, 19 nt, Artificial Sequence
  Description of Artificial Sequence: Synthetic oligonucleotide
acaaccgaagaagaaacug

SEQ ID NO: 2731891 - RNA, 19 nt, Artificial Sequence
  Description of Artificial Sequence: Synthetic oligonucleotide
uucuugaaacuuguccagg

SEQ ID NO: 2731892 - RNA, 19 nt, Artificial Sequence
  Description of Artificial Sequence: Synthetic oligonucleotide
gaagaagaaacuguccauc

SEQ ID NO: 2731893 - RNA, 19 nt, Artificial Sequence
  Description of Artificial Sequence: Synthetic oligonucleotide
aacuuccaccacauuacac

SEQ ID NO: 2731894 - RNA, 19 nt, Artificial Sequence
  Description of Artificial Sequence: Synthetic oligonucleotide
gcaagauaaccucagguug

SEQ ID NO: 2731895 - RNA, 19 nt, Artificial Sequence
  Description of Artificial Sequence: Synthetic oligonucleotide
ucaggcggaagguuacagg

SEQ ID NO: 2731896 - RNA, 19 nt, Artificial Sequence
  Description of Artificial Sequence: Synthetic oligonucleotide
uuccucaaccuugaaagug

SEQ ID NO: 2731897 - RNA, 19 nt, Artificial Sequence
  Description of Artificial Sequence: Synthetic oligonucleotide
acaaacaauccgaugccgg

SEQ ID NO: 2731898 - RNA, 19 nt, Artificial Sequence
  Description of Artificial Sequence: Synthetic oligonucleotide
acauacggugcaugaugcc

SEQ ID NO: 2731899 - RNA, 19 nt, Artificial Sequence
  Description of Artificial Sequence: Synthetic oligonucleotide
gcucucuugauucaagaag

SEQ ID NO: 2731900 - RNA, 19 nt, Artificial Sequence
  Description of Artificial Sequence: Synthetic oligonucleotide
acauuacacucuuccuugg

SEQ ID NO: 2731901 - RNA, 19 nt, Artificial Sequence
  Description of Artificial Sequence: Synthetic oligonucleotide
cagugaugcgcacaggccc

SEQ ID NO: 2731902 - RNA, 19 nt, Artificial Sequence
  Description of Artificial Sequence: Synthetic oligonucleotide
uagcaagcggcuaaccgga

SEQ ID NO: 2731903 - RNA, 19 nt, Artificial Sequence
  Description of Artificial Sequence: Synthetic oligonucleotide
augggcuggcaagauaacc

SEQ ID NO: 2731904 - RNA, 19 nt, Artificial Sequence
  Description of Artificial Sequence: Synthetic oligonucleotide
accgaagaagaaacugucc

SEQ ID NO: 2731905 - RNA, 19 nt, Artificial Sequence
  Description of Artificial Sequence: Synthetic oligonucleotide
caagcggcuaaccggagag

SEQ ID NO: 2731906 - RNA, 19 nt, Artificial Sequence
  Description of Artificial Sequence: Synthetic oligonucleotide
aggaacauacggugcauga

SEQ ID NO: 2731907 - RNA, 19 nt, Artificial Sequence
  Description of Artificial Sequence: Synthetic oligonucleotide
agaagaaacuguccaucgu

SEQ ID NO: 2731908 - RNA, 19 nt, Artificial Sequence
  Description of Artificial Sequence: Synthetic oligonucleotide
uccgaugccggccagugau

SEQ ID NO: 2731909 - RNA, 19 nt, Artificial Sequence
  Description of Artificial Sequence: Synthetic oligonucleotide
cagaacccgacuucaggcg

SEQ ID NO: 2731910 - RNA, 19 nt, Artificial Sequence
  Description of Artificial Sequence: Synthetic oligonucleotide
ggcggaagguuacaggugg

SEQ ID NO: 2731911 - RNA, 19 nt, Artificial Sequence
  Description of Artificial Sequence: Synthetic oligonucleotide
cugagcaugggcuggcaag

SEQ ID NO: 2731912 - RNA, 19 nt, Artificial Sequence
  Description of Artificial Sequence: Synthetic oligonucleotide
agcauguucaacgccagca

SEQ ID NO: 2731913 - RNA, 19 nt, Artificial Sequence
  Description of Artificial Sequence: Synthetic oligonucleotide
cuguccaucgugacgggag

SEQ ID NO: 2731914 - RNA, 19 nt, Artificial Sequence
  Description of Artificial Sequence: Synthetic oligonucleotide
ccuugaaagugaaggagcg

SEQ ID NO: 2731915 - RNA, 19 nt, Artificial Sequence
  Description of Artificial Sequence: Synthetic oligonucleotide
uacaggugguuggagcugg

SEQ ID NO: 2731916 - RNA, 19 nt, Artificial Sequence
  Description of Artificial Sequence: Synthetic oligonucleotide
aucauuguuuauacaaaca

SEQ ID NO: 2731917 - RNA, 19 nt, Artificial Sequence
  Description of Artificial Sequence: Synthetic oligonucleotide
ucgguaaggcacagcaugu

SEQ ID NO: 2731918 - RNA, 19 nt, Artificial Sequence
  Description of Artificial Sequence: Synthetic oligonucleotide
aagugaaggagcgggugug

SEQ ID NO: 2731919 - RNA, 19 nt, Artificial Sequence
  Description of Artificial Sequence: Synthetic oligonucleotide
augaucccgggccacaacu

SEQ ID NO: 2731920 - RNA, 19 nt, Artificial Sequence
  Description of Artificial Sequence: Synthetic oligonucleotide
cauuacacucuuccuuggc

SEQ ID NO: 2731921 - RNA, 19 nt, Artificial Sequence
  Description of Artificial Sequence: Synthetic oligonucleotide
aaucauccagacugagcau

SEQ ID NO: 2731922 - RNA, 19 nt, Artificial Sequence
  Description of Artificial Sequence: Synthetic oligonucleotide
gagggcuagggccuguccc

SEQ ID NO: 2731923 - RNA, 19 nt, Artificial Sequence
  Description of Artificial Sequence: Synthetic oligonucleotide
aauccgaugccggccagug

SEQ ID NO: 2731924 - RNA, 19 nt, Artificial Sequence
  Description of Artificial Sequence: Synthetic oligonucleotide
augccggccagugaugcgc

SEQ ID NO: 2731925 - RNA, 19 nt, Artificial Sequence
  Description of Artificial Sequence: Synthetic oligonucleotide
cauguucaacgccagcaug

SEQ ID NO: 2731926 - RNA, 19 nt, Artificial Sequence
  Description of Artificial Sequence: Synthetic oligonucleotide
uaaccggagagggcuaggg

SEQ ID NO: 2731927 - RNA, 19 nt, Artificial Sequence
  Description of Artificial Sequence: Synthetic oligonucleotide
uguccaucgugacgggagc

SEQ ID NO: 2731928 - RNA, 19 nt, Artificial Sequence
  Description of Artificial Sequence: Synthetic oligonucleotide
uugucaugaucccgggcca

SEQ ID NO: 2731929 - RNA, 19 nt, Artificial Sequence
  Description of Artificial Sequence: Synthetic oligonucleotide
agcggcuaaccggagaggg

SEQ ID NO: 2731930 - RNA, 19 nt, Artificial Sequence
  Description of Artificial Sequence: Synthetic oligonucleotide
cauguguuccguguccucc

SEQ ID NO: 2731931 - RNA, 19 nt, Artificial Sequence
  Description of Artificial Sequence: Synthetic oligonucleotide
agagcucacaaccgaagaa

SEQ ID NO: 2731932 - RNA, 19 nt, Artificial Sequence
  Description of Artificial Sequence: Synthetic oligonucleotide
uggagcuggaaaucaucca

SEQ ID NO: 2731933 - RNA, 19 nt, Artificial Sequence
  Description of Artificial Sequence: Synthetic oligonucleotide
gaaggcuagagcagcagca

SEQ ID NO: 2731934 - RNA, 19 nt, Artificial Sequence
  Description of Artificial Sequence: Synthetic oligonucleotide
gguuacaggugguuggagc

SEQ ID NO: 2731935 - RNA, 19 nt, Artificial Sequence
  Description of Artificial Sequence: Synthetic oligonucleotide
agagggcuagggccugucc

SEQ ID NO: 2731936 - RNA, 19 nt, Artificial Sequence
  Description of Artificial Sequence: Synthetic oligonucleotide
uccaccacauuacacucuu

SEQ ID NO: 2731937 - RNA, 19 nt, Artificial Sequence
  Description of Artificial Sequence: Synthetic oligonucleotide
gagagcucacaaccgaaga

SEQ ID NO: 2731938 - RNA, 19 nt, Artificial Sequence
  Description of Artificial Sequence: Synthetic oligonucleotide
uccaucgugacgggagccg

SEQ ID NO: 2731939 - RNA, 19 nt, Artificial Sequence
  Description of Artificial Sequence: Synthetic oligonucleotide
aagguuacaggugguugga

SEQ ID NO: 2731940 - RNA, 19 nt, Artificial Sequence
  Description of Artificial Sequence: Synthetic oligonucleotide
ucggcucucuugauucaag

SEQ ID NO: 2731941 - RNA, 19 nt, Artificial Sequence
  Description of Artificial Sequence: Synthetic oligonucleotide
acuucaggcggaagguuac

SEQ ID NO: 2731942 - RNA, 19 nt, Artificial Sequence
  Description of Artificial Sequence: Synthetic oligonucleotide
uucaggcggaagguuacag

SEQ ID NO: 2731943 - RNA, 19 nt, Artificial Sequence
  Description of Artificial Sequence: Synthetic oligonucleotide
guaaggcacagcauguuca

SEQ ID NO: 2731944 - RNA, 19 nt, Artificial Sequence
  Description of Artificial Sequence: Synthetic oligonucleotide
agauaaccucagguuggcc

SEQ ID NO: 2731945 - RNA, 19 nt, Artificial Sequence
  Description of Artificial Sequence: Synthetic oligonucleotide
uguucaacgccagcaugug

SEQ ID NO: 2731946 - RNA, 19 nt, Artificial Sequence
  Description of Artificial Sequence: Synthetic oligonucleotide
agaucauuguuuauacaaa

SEQ ID NO: 2731947 - RNA, 19 nt, Artificial Sequence
  Description of Artificial Sequence: Synthetic oligonucleotide
auguucaacgccagcaugu

SEQ ID NO: 2731948 - RNA, 19 nt, Artificial Sequence
  Description of Artificial Sequence: Synthetic oligonucleotide
cugucccugugcuuucugg

SEQ ID NO: 2731949 - RNA, 19 nt, Artificial Sequence
  Description of Artificial Sequence: Synthetic oligonucleotide
cuggcaagauaaccucagg

SEQ ID NO: 2731950 - RNA, 19 nt, Artificial Sequence
  Description of Artificial Sequence: Synthetic oligonucleotide
ggugcaugaugccuguagc

SEQ ID NO: 2731951 - RNA, 19 nt, Artificial Sequence
  Description of Artificial Sequence: Synthetic oligonucleotide
aggaaggaugccacacagc

SEQ ID NO: 2731952 - RNA, 19 nt, Artificial Sequence
  Description of Artificial Sequence: Synthetic oligonucleotide
ugguuggagcuggaaauca

SEQ ID NO: 2731953 - RNA, 19 nt, Artificial Sequence
  Description of Artificial Sequence: Synthetic oligonucleotide
ccagaacccgacuucaggc

SEQ ID NO: 2731954 - RNA, 19 nt, Artificial Sequence
  Description of Artificial Sequence: Synthetic oligonucleotide
aggcccagaacccgacuuc

SEQ ID NO: 2731955 - RNA, 19 nt, Artificial Sequence
  Description of Artificial Sequence: Synthetic oligonucleotide
acaggaacugcaaucuccu

SEQ ID NO: 2731956 - RNA, 19 nt, Artificial Sequence
  Description of Artificial Sequence: Synthetic oligonucleotide
ggcuagagcagcagcagcg

SEQ ID NO: 2731957 - RNA, 19 nt, Artificial Sequence
  Description of Artificial Sequence: Synthetic oligonucleotide
gaugccggccagugaugcg

SEQ ID NO: 2731958 - RNA, 19 nt, Artificial Sequence
  Description of Artificial Sequence: Synthetic oligonucleotide
aaacuuguccaggaacaua

SEQ ID NO: 2731959 - RNA, 19 nt, Artificial Sequence
  Description of Artificial Sequence: Synthetic oligonucleotide
aaggagcggguguggccgg

SEQ ID NO: 2731960 - RNA, 19 nt, Artificial Sequence
  Description of Artificial Sequence: Synthetic oligonucleotide
agacugagcaugggcuggc

SEQ ID NO: 2731961 - RNA, 19 nt, Artificial Sequence
  Description of Artificial Sequence: Synthetic oligonucleotide
ggcacagcauguucaacgc

SEQ ID NO: 2731962 - RNA, 19 nt, Artificial Sequence
  Description of Artificial Sequence: Synthetic oligonucleotide
gcaugaugccuguagcaag

SEQ ID NO: 2731963 - RNA, 19 nt, Artificial Sequence
  Description of Artificial Sequence: Synthetic oligonucleotide
uuacaggugguuggagcug

SEQ ID NO: 2731964 - RNA, 19 nt, Artificial Sequence
  Description of Artificial Sequence: Synthetic oligonucleotide
cucacaaccgaagaagaaa

SEQ ID NO: 2731965 - RNA, 19 nt, Artificial Sequence
  Description of Artificial Sequence: Synthetic oligonucleotide
cagcauguguuccgugucc

SEQ ID NO: 2731966 - RNA, 19 nt, Artificial Sequence
  Description of Artificial Sequence: Synthetic oligonucleotide
ucaacgccagcauguguuc

SEQ ID NO: 2731967 - RNA, 19 nt, Artificial Sequence
  Description of Artificial Sequence: Synthetic oligonucleotide
auacggugcaugaugccug

SEQ ID NO: 2731968 - RNA, 19 nt, Artificial Sequence
  Description of Artificial Sequence: Synthetic oligonucleotide
agcggguguggccggagag

SEQ ID NO: 2731969 - RNA, 19 nt, Artificial Sequence
  Description of Artificial Sequence: Synthetic oligonucleotide
auguguuccguguccuccu

SEQ ID NO: 2731970 - RNA, 19 nt, Artificial Sequence
  Description of Artificial Sequence: Synthetic oligonucleotide
cacuuucuucagaaagauc

SEQ ID NO: 2731971 - RNA, 19 nt, Artificial Sequence
  Description of Artificial Sequence: Synthetic oligonucleotide
caaccgaagaagaaacugu

SEQ ID NO: 2731972 - RNA, 19 nt, Artificial Sequence
  Description of Artificial Sequence: Synthetic oligonucleotide
aagcggcuaaccggagagg

SEQ ID NO: 2731973 - RNA, 19 nt, Artificial Sequence
  Description of Artificial Sequence: Synthetic oligonucleotide
gguaaggcacagcauguuc

SEQ ID NO: 2731974 - RNA, 19 nt, Artificial Sequence
  Description of Artificial Sequence: Synthetic oligonucleotide
ggaagguuacaggugguug

SEQ ID NO: 2731975 - RNA, 19 nt, Artificial Sequence
  Description of Artificial Sequence: Synthetic oligonucleotide
gaucccgggccacaacuuc

SEQ ID NO: 2731976 - RNA, 19 nt, Artificial Sequence
  Description of Artificial Sequence: Synthetic oligonucleotide
agggcuagggccugucccu

SEQ ID NO: 2731977 - RNA, 19 nt, Artificial Sequence
  Description of Artificial Sequence: Synthetic oligonucleotide
aaccucagguuggccacag

SEQ ID NO: 2731978 - RNA, 19 nt, Artificial Sequence
  Description of Artificial Sequence: Synthetic oligonucleotide
cuugaaacuuguccaggaa

SEQ ID NO: 2731979 - RNA, 19 nt, Artificial Sequence
  Description of Artificial Sequence: Synthetic oligonucleotide
agcucacaaccgaagaaga

SEQ ID NO: 2731980 - RNA, 19 nt, Artificial Sequence
  Description of Artificial Sequence: Synthetic oligonucleotide
cccgacuucaggcggaagg

SEQ ID NO: 2731981 - RNA, 19 nt, Artificial Sequence
  Description of Artificial Sequence: Synthetic oligonucleotide
acuuguccaggaacauacg

SEQ ID NO: 2731982 - RNA, 19 nt, Artificial Sequence
  Description of Artificial Sequence: Synthetic oligonucleotide
caucgugacgggagccggg

SEQ ID NO: 2731983 - RNA, 19 nt, Artificial Sequence
  Description of Artificial Sequence: Synthetic oligonucleotide
uacggugcaugaugccugu

SEQ ID NO: 2731984 - RNA, 19 nt, Artificial Sequence
  Description of Artificial Sequence: Synthetic oligonucleotide
uguuccguguccuccucuu

SEQ ID NO: 2731985 - RNA, 19 nt, Artificial Sequence
  Description of Artificial Sequence: Synthetic oligonucleotide
ccgaagaagaaacugucca

SEQ ID NO: 2731986 - RNA, 19 nt, Artificial Sequence
  Description of Artificial Sequence: Synthetic oligonucleotide
agguuggccacaggaacug

SEQ ID NO: 2731987 - RNA, 19 nt, Artificial Sequence
  Description of Artificial Sequence: Synthetic oligonucleotide
ucccgggccacaacuucca

SEQ ID NO: 2731988 - RNA, 19 nt, Artificial Sequence
  Description of Artificial Sequence: Synthetic oligonucleotide
caaucuccugguugucaug

SEQ ID NO: 2731989 - RNA, 19 nt, Artificial Sequence
  Description of Artificial Sequence: Synthetic oligonucleotide
uugauucaagaaggcuaga

SEQ ID NO: 2731990 - RNA, 19 nt, Artificial Sequence
  Description of Artificial Sequence: Synthetic oligonucleotide
ggcucggcucucuugauuc

SEQ ID NO: 2731991 - RNA, 19 nt, Artificial Sequence
  Description of Artificial Sequence: Synthetic oligonucleotide
uguguuccguguccuccuc

SEQ ID NO: 2731992 - RNA, 19 nt, Artificial Sequence
  Description of Artificial Sequence: Synthetic oligonucleotide
cucagguuggccacaggaa

SEQ ID NO: 2731993 - RNA, 19 nt, Artificial Sequence
  Description of Artificial Sequence: Synthetic oligonucleotide
agcauguguuccguguccu

SEQ ID NO: 2731994 - RNA, 19 nt, Artificial Sequence
  Description of Artificial Sequence: Synthetic oligonucleotide
caugggcuggcaagauaac

SEQ ID NO: 2731995 - RNA, 19 nt, Artificial Sequence
  Description of Artificial Sequence: Synthetic oligonucleotide
gcuggcaagauaaccucag

SEQ ID NO: 2731996 - RNA, 19 nt, Artificial Sequence
  Description of Artificial Sequence: Synthetic oligonucleotide
ugaucccgggccacaacuu

SEQ ID NO: 2731997 - RNA, 19 nt, Artificial Sequence
  Description of Artificial Sequence: Synthetic oligonucleotide
agugaugcgcacaggccca

SEQ ID NO: 2731998 - RNA, 19 nt, Artificial Sequence
  Description of Artificial Sequence: Synthetic oligonucleotide
gugacgggagccgggaccc

SEQ ID NO: 2731999 - RNA, 19 nt, Artificial Sequence
  Description of Artificial Sequence: Synthetic oligonucleotide
caggcggaagguuacaggu

SEQ ID NO: 2732000 - RNA, 19 nt, Artificial Sequence
  Description of Artificial Sequence: Synthetic oligonucleotide
gacuucaggcggaagguua

SEQ ID NO: 2732001 - RNA, 19 nt, Artificial Sequence
  Description of Artificial Sequence: Synthetic oligonucleotide
acugagcaugggcuggcaa

SEQ ID NO: 2732002 - RNA, 19 nt, Artificial Sequence
  Description of Artificial Sequence: Synthetic oligonucleotide
gucccugugcuuucuggca

SEQ ID NO: 2732003 - RNA, 19 nt, Artificial Sequence
  Description of Artificial Sequence: Synthetic oligonucleotide
cccagaacccgacuucagg

SEQ ID NO: 2732004 - RNA, 19 nt, Artificial Sequence
  Description of Artificial Sequence: Synthetic oligonucleotide
caggaacauacggugcaug

SEQ ID NO: 2732005 - RNA, 19 nt, Artificial Sequence
  Description of Artificial Sequence: Synthetic oligonucleotide
ggccacaggaacugcaauc

SEQ ID NO: 2732006 - RNA, 19 nt, Artificial Sequence
  Description of Artificial Sequence: Synthetic oligonucleotide
ggugguuggagcuggaaau

SEQ ID NO: 2732007 - RNA, 19 nt, Artificial Sequence
  Description of Artificial Sequence: Synthetic oligonucleotide
acccgcaggccgcccacac

SEQ ID NO: 2732008 - RNA, 19 nt, Artificial Sequence
  Description of Artificial Sequence: Synthetic oligonucleotide
caacuuccaccacauuaca

SEQ ID NO: 2732009 - RNA, 19 nt, Artificial Sequence
  Description of Artificial Sequence: Synthetic oligonucleotide
ugucaugaucccgggccac

SEQ ID NO: 2732010 - RNA, 19 nt, Artificial Sequence
  Description of Artificial Sequence: Synthetic oligonucleotide
cuaaccggagagggcuagg

SEQ ID NO: 2732011 - RNA, 19 nt, Artificial Sequence
  Description of Artificial Sequence: Synthetic oligonucleotide
agguuacaggugguuggag

SEQ ID NO: 2732012 - RNA, 19 nt, Artificial Sequence
  Description of Artificial Sequence: Synthetic oligonucleotide
caggaacugcaaucuccug

SEQ ID NO: 2732013 - RNA, 19 nt, Artificial Sequence
  Description of Artificial Sequence: Synthetic oligonucleotide
ucaugaucccgggccacaa

SEQ ID NO: 2732014 - RNA, 19 nt, Artificial Sequence
  Description of Artificial Sequence: Synthetic oligonucleotide
ggcaagauaaccucagguu

SEQ ID NO: 2732015 - RNA, 19 nt, Artificial Sequence
  Description of Artificial Sequence: Synthetic oligonucleotide
gugaaggagcggguguggc

SEQ ID NO: 2732016 - RNA, 19 nt, Artificial Sequence
  Description of Artificial Sequence: Synthetic oligonucleotide
gguugucaugaucccgggc

SEQ ID NO: 2732017 - RNA, 19 nt, Artificial Sequence
  Description of Artificial Sequence: Synthetic oligonucleotide
caacgccagcauguguucc

SEQ ID NO: 2732018 - RNA, 19 nt, Artificial Sequence
  Description of Artificial Sequence: Synthetic oligonucleotide
cuguagcaagcggcuaacc

SEQ ID NO: 2732019 - RNA, 19 nt, Artificial Sequence
  Description of Artificial Sequence: Synthetic oligonucleotide
caugaucccgggccacaac

SEQ ID NO: 2732020 - RNA, 19 nt, Artificial Sequence
  Description of Artificial Sequence: Synthetic oligonucleotide
gugguuggagcuggaaauc

SEQ ID NO: 2732021 - RNA, 19 nt, Artificial Sequence
  Description of Artificial Sequence: Synthetic oligonucleotide
cauacggugcaugaugccu

SEQ ID NO: 2732022 - RNA, 19 nt, Artificial Sequence
  Description of Artificial Sequence: Synthetic oligonucleotide
ugccggccagugaugcgca

SEQ ID NO: 2732023 - RNA, 19 nt, Artificial Sequence
  Description of Artificial Sequence: Synthetic oligonucleotide
agcaugggcuggcaagaua

SEQ ID NO: 2732024 - RNA, 19 nt, Artificial Sequence
  Description of Artificial Sequence: Synthetic oligonucleotide
augccuguagcaagcggcu

SEQ ID NO: 2732025 - RNA, 19 nt, Artificial Sequence
  Description of Artificial Sequence: Synthetic oligonucleotide
gcaugggcuggcaagauaa

SEQ ID NO: 2732026 - RNA, 19 nt, Artificial Sequence
  Description of Artificial Sequence: Synthetic oligonucleotide
ccugguugucaugaucccg

SEQ ID NO: 2732027 - RNA, 19 nt, Artificial Sequence
  Description of Artificial Sequence: Synthetic oligonucleotide
gaaacuuguccaggaacau

SEQ ID NO: 2732028 - RNA, 19 nt, Artificial Sequence
  Description of Artificial Sequence: Synthetic oligonucleotide
gcacagcauguucaacgcc

SEQ ID NO: 2732029 - RNA, 19 nt, Artificial Sequence
  Description of Artificial Sequence: Synthetic oligonucleotide
aucgugacgggagccggga

SEQ ID NO: 2732030 - RNA, 19 nt, Artificial Sequence
  Description of Artificial Sequence: Synthetic oligonucleotide
aggcggaagguuacaggug

SEQ ID NO: 2732031 - RNA, 19 nt, Artificial Sequence
  Description of Artificial Sequence: Synthetic oligonucleotide
ucgugacgggagccgggac

SEQ ID NO: 2732032 - RNA, 19 nt, Artificial Sequence
  Description of Artificial Sequence: Synthetic oligonucleotide
guccaucgugacgggagcc

SEQ ID NO: 2732033 - RNA, 19 nt, Artificial Sequence
  Description of Artificial Sequence: Synthetic oligonucleotide
acuguccaucgugacggga

SEQ ID NO: 2732034 - RNA, 19 nt, Artificial Sequence
  Description of Artificial Sequence: Synthetic oligonucleotide
cccucgguaaggcacagca

SEQ ID NO: 2732035 - RNA, 19 nt, Artificial Sequence
  Description of Artificial Sequence: Synthetic oligonucleotide
gaacccgacuucaggcgga

SEQ ID NO: 2732036 - RNA, 19 nt, Artificial Sequence
  Description of Artificial Sequence: Synthetic oligonucleotide
cacaaccgaagaagaaacu

SEQ ID NO: 2732037 - RNA, 19 nt, Artificial Sequence
  Description of Artificial Sequence: Synthetic oligonucleotide
cuuccucaaccuugaaagu

SEQ ID NO: 2732038 - RNA, 19 nt, Artificial Sequence
  Description of Artificial Sequence: Synthetic oligonucleotide
gccggagagcucacaaccg

SEQ ID NO: 2732039 - RNA, 19 nt, Artificial Sequence
  Description of Artificial Sequence: Synthetic oligonucleotide
gacgggagccgggacccgc

SEQ ID NO: 2732040 - RNA, 19 nt, Artificial Sequence
  Description of Artificial Sequence: Synthetic oligonucleotide
cagguuggccacaggaacu

SEQ ID NO: 2732041 - RNA, 19 nt, Artificial Sequence
  Description of Artificial Sequence: Synthetic oligonucleotide
guuccguguccuccucuuc

SEQ ID NO: 2732042 - RNA, 19 nt, Artificial Sequence
  Description of Artificial Sequence: Synthetic oligonucleotide
auccgaugccggccaguga

SEQ ID NO: 2732043 - RNA, 19 nt, Artificial Sequence
  Description of Artificial Sequence: Synthetic oligonucleotide
gcuaaccggagagggcuag

SEQ ID NO: 2732044 - RNA, 19 nt, Artificial Sequence
  Description of Artificial Sequence: Synthetic oligonucleotide
gccacacagcuugacuucc

SEQ ID NO: 2732045 - RNA, 19 nt, Artificial Sequence
  Description of Artificial Sequence: Synthetic oligonucleotide
aacccgacuucaggcggaa

SEQ ID NO: 2732046 - RNA, 19 nt, Artificial Sequence
  Description of Artificial Sequence: Synthetic oligonucleotide
guucaacgccagcaugugu

SEQ ID NO: 2732047 - RNA, 19 nt, Artificial Sequence
  Description of Artificial Sequence: Synthetic oligonucleotide
cggugcaugaugccuguag

SEQ ID NO: 2732048 - RNA, 19 nt, Artificial Sequence
  Description of Artificial Sequence: Synthetic oligonucleotide
gucaugaucccgggccaca

SEQ ID NO: 2732049 - RNA, 19 nt, Artificial Sequence
  Description of Artificial Sequence: Synthetic oligonucleotide
gugaugcgcacaggcccag

SEQ ID NO: 2732050 - RNA, 19 nt, Artificial Sequence
  Description of Artificial Sequence: Synthetic oligonucleotide
gcuagggccugucccugug

SEQ ID NO: 2732051 - RNA, 19 nt, Artificial Sequence
  Description of Artificial Sequence: Synthetic oligonucleotide
cgugacgggagccgggacc

SEQ ID NO: 2732052 - RNA, 19 nt, Artificial Sequence
  Description of Artificial Sequence: Synthetic oligonucleotide
ugacgggagccgggacccg

SEQ ID NO: 2732053 - RNA, 19 nt, Artificial Sequence
  Description of Artificial Sequence: Synthetic oligonucleotide
gccuguagcaagcggcuaa

SEQ ID NO: 2732054 - RNA, 19 nt, Artificial Sequence
  Description of Artificial Sequence: Synthetic oligonucleotide
ugaugcgcacaggcccaga

SEQ ID NO: 2732055 - RNA, 19 nt, Artificial Sequence
  Description of Artificial Sequence: Synthetic oligonucleotide
agcaagcggcuaaccggag

SEQ ID NO: 2732056 - RNA, 19 nt, Artificial Sequence
  Description of Artificial Sequence: Synthetic oligonucleotide
gccacaggaacugcaaucu

SEQ ID NO: 2732057 - RNA, 19 nt, Artificial Sequence
  Description of Artificial Sequence: Synthetic oligonucleotide
gagcggguguggccggaga

SEQ ID NO: 2732058 - RNA, 19 nt, Artificial Sequence
  Description of Artificial Sequence: Synthetic oligonucleotide
gcaagcggcuaaccggaga

SEQ ID NO: 2732059 - RNA, 19 nt, Artificial Sequence
  Description of Artificial Sequence: Synthetic oligonucleotide
acgccagcauguguuccgu

SEQ ID NO: 2732060 - RNA, 19 nt, Artificial Sequence
  Description of Artificial Sequence: Synthetic oligonucleotide
ccaucgugacgggagccgg

SEQ ID NO: 2732061 - RNA, 19 nt, Artificial Sequence
  Description of Artificial Sequence: Synthetic oligonucleotide
gggagccgggacccgcagg

SEQ ID NO: 2732062 - RNA, 19 nt, Artificial Sequence
  Description of Artificial Sequence: Synthetic oligonucleotide
gagagggcuagggccuguc

SEQ ID NO: 2732063 - RNA, 19 nt, Artificial Sequence
  Description of Artificial Sequence: Synthetic oligonucleotide
ccuguagcaagcggcuaac

SEQ ID NO: 2732064 - RNA, 19 nt, Artificial Sequence
  Description of Artificial Sequence: Synthetic oligonucleotide
gccagcauguguuccgugu

SEQ ID NO: 2732065 - RNA, 19 nt, Artificial Sequence
  Description of Artificial Sequence: Synthetic oligonucleotide
cuucaggcggaagguuaca

SEQ ID NO: 2732066 - RNA, 19 nt, Artificial Sequence
  Description of Artificial Sequence: Synthetic oligonucleotide
cugcaaucuccugguuguc

SEQ ID NO: 2732067 - RNA, 19 nt, Artificial Sequence
  Description of Artificial Sequence: Synthetic oligonucleotide
gcucacaaccgaagaagaa

SEQ ID NO: 2732068 - RNA, 19 nt, Artificial Sequence
  Description of Artificial Sequence: Synthetic oligonucleotide
gcauguguuccguguccuc

SEQ ID NO: 2732069 - RNA, 19 nt, Artificial Sequence
  Description of Artificial Sequence: Synthetic oligonucleotide
ggaugccacacagcuugac

SEQ ID NO: 2732070 - RNA, 19 nt, Artificial Sequence
  Description of Artificial Sequence: Synthetic oligonucleotide
cucggcucucuugauucaa

SEQ ID NO: 2732071 - RNA, 19 nt, Artificial Sequence
  Description of Artificial Sequence: Synthetic oligonucleotide
ggcccagaacccgacuuca

SEQ ID NO: 2732072 - RNA, 19 nt, Artificial Sequence
  Description of Artificial Sequence: Synthetic oligonucleotide
ccacaggaacugcaaucuc

SEQ ID NO: 2732073 - RNA, 19 nt, Artificial Sequence
  Description of Artificial Sequence: Synthetic oligonucleotide
ggaacauacggugcaugau

SEQ ID NO: 2732074 - RNA, 19 nt, Artificial Sequence
  Description of Artificial Sequence: Synthetic oligonucleotide
gaacugcaaucuccugguu

SEQ ID NO: 2732075 - RNA, 19 nt, Artificial Sequence
  Description of Artificial Sequence: Synthetic oligonucleotide
ccggagagcucacaaccga

SEQ ID NO: 2732076 - RNA, 19 nt, Artificial Sequence
  Description of Artificial Sequence: Synthetic oligonucleotide
gcggcuaaccggagagggc

SEQ ID NO: 2732077 - RNA, 19 nt, Artificial Sequence
  Description of Artificial Sequence: Synthetic oligonucleotide
gcggguguggccggagagc

SEQ ID NO: 2732078 - RNA, 19 nt, Artificial Sequence
  Description of Artificial Sequence: Synthetic oligonucleotide
acccgacuucaggcggaag

SEQ ID NO: 2732079 - RNA, 19 nt, Artificial Sequence
  Description of Artificial Sequence: Synthetic oligonucleotide
cgaugccggccagugaugc

SEQ ID NO: 2732080 - RNA, 19 nt, Artificial Sequence
  Description of Artificial Sequence: Synthetic oligonucleotide
ccugucccugugcuuucug

SEQ ID NO: 2732081 - RNA, 19 nt, Artificial Sequence
  Description of Artificial Sequence: Synthetic oligonucleotide
gcccagaacccgacuucag

SEQ ID NO: 2732082 - RNA, 19 nt, Artificial Sequence
  Description of Artificial Sequence: Synthetic oligonucleotide
ccgggcucggcucucuuga

SEQ ID NO: 2732083 - RNA, 19 nt, Artificial Sequence
  Description of Artificial Sequence: Synthetic oligonucleotide
ccgaugccggccagugaug

SEQ ID NO: 2732084 - RNA, 19 nt, Artificial Sequence
  Description of Artificial Sequence: Synthetic oligonucleotide
acgggagccgggacccgca

SEQ ID NO: 2732085 - RNA, 19 nt, Artificial Sequence
  Description of Artificial Sequence: Synthetic oligonucleotide
ggagcggguguggccggag

SEQ ID NO: 2732086 - RNA, 19 nt, Artificial Sequence
  Description of Artificial Sequence: Synthetic oligonucleotide
ggacccgcaggccgcccac

SEQ ID NO: 2732087 - RNA, 19 nt, Artificial Sequence
  Description of Artificial Sequence: Synthetic oligonucleotide
ccaccacauuacacucuuc

SEQ ID NO: 2732088 - RNA, 19 nt, Artificial Sequence
  Description of Artificial Sequence: Synthetic oligonucleotide
gggcuagggccugucccug

SEQ ID NO: 2732089 - RNA, 19 nt, Artificial Sequence
  Description of Artificial Sequence: Synthetic oligonucleotide
gguuggagcuggaaaucau

SEQ ID NO: 2732090 - RNA, 19 nt, Artificial Sequence
  Description of Artificial Sequence: Synthetic oligonucleotide
aggagcggguguggccgga

SEQ ID NO: 2732091 - RNA, 19 nt, Artificial Sequence
  Description of Artificial Sequence: Synthetic oligonucleotide
cggcucucuugauucaaga

SEQ ID NO: 2732092 - RNA, 19 nt, Artificial Sequence
  Description of Artificial Sequence: Synthetic oligonucleotide
ggccugucccugugcuuuc

SEQ ID NO: 2732093 - RNA, 19 nt, Artificial Sequence
  Description of Artificial Sequence: Synthetic oligonucleotide
gggacccgcaggccgccca

SEQ ID NO: 2732094 - RNA, 19 nt, Artificial Sequence
  Description of Artificial Sequence: Synthetic oligonucleotide
gacccgcaggccgcccaca

SEQ ID NO: 2732095 - RNA, 19 nt, Artificial Sequence
  Description of Artificial Sequence: Synthetic oligonucleotide
cccgcaggccgcccacacc

SEQ ID NO: 2732096 - RNA, 19 nt, Artificial Sequence
  Description of Artificial Sequence: Synthetic oligonucleotide
ccggagagggcuagggccu

SEQ ID NO: 2732097 - RNA, 19 nt, Artificial Sequence
  Description of Artificial Sequence: Synthetic oligonucleotide
acggugcaugaugccugua

SEQ ID NO: 2732098 - RNA, 19 nt, Artificial Sequence
  Description of Artificial Sequence: Synthetic oligonucleotide
guguggccggagagcucac

SEQ ID NO: 2732099 - RNA, 19 nt, Artificial Sequence
  Description of Artificial Sequence: Synthetic oligonucleotide
gggccugucccugugcuuu

SEQ ID NO: 2732100 - RNA, 19 nt, Artificial Sequence
  Description of Artificial Sequence: Synthetic oligonucleotide
ccgacuucaggcggaaggu

SEQ ID NO: 2732101 - RNA, 19 nt, Artificial Sequence
  Description of Artificial Sequence: Synthetic oligonucleotide
ggcuaaccggagagggcua

SEQ ID NO: 2732102 - RNA, 19 nt, Artificial Sequence
  Description of Artificial Sequence: Synthetic oligonucleotide
ggcuagggccugucccugu

SEQ ID NO: 2732103 - RNA, 19 nt, Artificial Sequence
  Description of Artificial Sequence: Synthetic oligonucleotide
gccggccagugaugcgcac

SEQ ID NO: 2732104 - RNA, 19 nt, Artificial Sequence
  Description of Artificial Sequence: Synthetic oligonucleotide
cgccagcauguguuccgug

SEQ ID NO: 2732105 - RNA, 19 nt, Artificial Sequence
  Description of Artificial Sequence: Synthetic oligonucleotide
cggcuaaccggagagggcu

SEQ ID NO: 2732106 - RNA, 19 nt, Artificial Sequence
  Description of Artificial Sequence: Synthetic oligonucleotide
gggcucggcucucuugauu

SEQ ID NO: 2732107 - RNA, 19 nt, Artificial Sequence
  Description of Artificial Sequence: Synthetic oligonucleotide
ccccucgguaaggcacagc

SEQ ID NO: 2732108 - RNA, 19 nt, Artificial Sequence
  Description of Artificial Sequence: Synthetic oligonucleotide
ccucgguaaggcacagcau

SEQ ID NO: 2732109 - RNA, 19 nt, Artificial Sequence
  Description of Artificial Sequence: Synthetic oligonucleotide
gcggaagguuacagguggu

SEQ ID NO: 2732110 - RNA, 19 nt, Artificial Sequence
  Description of Artificial Sequence: Synthetic oligonucleotide
ggagagggcuagggccugu

SEQ ID NO: 2732111 - RNA, 19 nt, Artificial Sequence
  Description of Artificial Sequence: Synthetic oligonucleotide
cggguguggccggagagcu

SEQ ID NO: 2732112 - RNA, 19 nt, Artificial Sequence
  Description of Artificial Sequence: Synthetic oligonucleotide
cggaagguuacaggugguu

SEQ ID NO: 2732113 - RNA, 19 nt, Artificial Sequence
  Description of Artificial Sequence: Synthetic oligonucleotide
cgguaaggcacagcauguu

SEQ ID NO: 2732114 - RNA, 19 nt, Artificial Sequence
  Description of Artificial Sequence: Synthetic oligonucleotide
cgacuucaggcggaagguu

SEQ ID NO: 2732115 - RNA, 19 nt, Artificial Sequence
  Description of Artificial Sequence: Synthetic oligonucleotide
ccggcccgggcucggcucu

SEQ ID NO: 2732116 - RNA, 19 nt, Artificial Sequence
  Description of Artificial Sequence: Synthetic oligonucleotide
cgggacccgcaggccgccc

SEQ ID NO: 2732117 - RNA, 19 nt, Artificial Sequence
  Description of Artificial Sequence: Synthetic oligonucleotide
cagcagcgccggccgccau

SEQ ID NO: 2732118 - RNA, 19 nt, Artificial Sequence
  Description of Artificial Sequence: Synthetic oligonucleotide
gcccgggcucggcucucuu

SEQ ID NO: 2732119 - RNA, 19 nt, Artificial Sequence
  Description of Artificial Sequence: Synthetic oligonucleotide
ucuuauuuaggauaguggg

SEQ ID NO: 2732120 - RNA, 19 nt, Artificial Sequence
  Description of Artificial Sequence: Synthetic oligonucleotide
aaaggaagugugcagacac

SEQ ID NO: 2732121 - RNA, 19 nt, Artificial Sequence
  Description of Artificial Sequence: Synthetic oligonucleotide
ucaaucuuauuuaggauag

SEQ ID NO: 2732122 - RNA, 19 nt, Artificial Sequence
  Description of Artificial Sequence: Synthetic oligonucleotide
aacagcuuuucagugagcc

SEQ ID NO: 2732123 - RNA, 19 nt, Artificial Sequence
  Description of Artificial Sequence: Synthetic oligonucleotide
uuauuuaggauagugggcc

SEQ ID NO: 2732124 - RNA, 19 nt, Artificial Sequence
  Description of Artificial Sequence: Synthetic oligonucleotide
acaacaacugcccuuccgc

SEQ ID NO: 2732125 - RNA, 19 nt, Artificial Sequence
  Description of Artificial Sequence: Synthetic oligonucleotide
aacucguacuugcugaggg

SEQ ID NO: 2732126 - RNA, 19 nt, Artificial Sequence
  Description of Artificial Sequence: Synthetic oligonucleotide
accacaaacucguacuugc

SEQ ID NO: 2732127 - RNA, 19 nt, Artificial Sequence
  Description of Artificial Sequence: Synthetic oligonucleotide
ugugugaaccuccacaaca

SEQ ID NO: 2732128 - RNA, 19 nt, Artificial Sequence
  Description of Artificial Sequence: Synthetic oligonucleotide
cuugcugagggacaggucg

SEQ ID NO: 2732129 - RNA, 19 nt, Artificial Sequence
  Description of Artificial Sequence: Synthetic oligonucleotide
accacaugccuucaggagc

SEQ ID NO: 2732130 - RNA, 19 nt, Artificial Sequence
  Description of Artificial Sequence: Synthetic oligonucleotide
uucaaucuuauuuaggaua

SEQ ID NO: 2732131 - RNA, 19 nt, Artificial Sequence
  Description of Artificial Sequence: Synthetic oligonucleotide
uaagucagcaagcuucucc

SEQ ID NO: 2732132 - RNA, 19 nt, Artificial Sequence
  Description of Artificial Sequence: Synthetic oligonucleotide
auugucccaacuuucugac

SEQ ID NO: 2732133 - RNA, 19 nt, Artificial Sequence
  Description of Artificial Sequence: Synthetic oligonucleotide
cucuaagucagcaagcuuc

SEQ ID NO: 2732134 - RNA, 19 nt, Artificial Sequence
  Description of Artificial Sequence: Synthetic oligonucleotide
ucgucacuggucaaggagg

SEQ ID NO: 2732135 - RNA, 19 nt, Artificial Sequence
  Description of Artificial Sequence: Synthetic oligonucleotide
aaacugcuccgccucaaac

SEQ ID NO: 2732136 - RNA, 19 nt, Artificial Sequence
  Description of Artificial Sequence: Synthetic oligonucleotide
uuuucagugagccggcuac

SEQ ID NO: 2732137 - RNA, 19 nt, Artificial Sequence
  Description of Artificial Sequence: Synthetic oligonucleotide
ucaggagccaggcaaagga

SEQ ID NO: 2732138 - RNA, 19 nt, Artificial Sequence
  Description of Artificial Sequence: Synthetic oligonucleotide
gaagugugcagacacgccc

SEQ ID NO: 2732139 - RNA, 19 nt, Artificial Sequence
  Description of Artificial Sequence: Synthetic oligonucleotide
acaggucguccucacaucc

SEQ ID NO: 2732140 - RNA, 19 nt, Artificial Sequence
  Description of Artificial Sequence: Synthetic oligonucleotide
acaacugcccuuccgcacc

SEQ ID NO: 2732141 - RNA, 19 nt, Artificial Sequence
  Description of Artificial Sequence: Synthetic oligonucleotide
ugcuucaaucuuauuuagg

SEQ ID NO: 2732142 - RNA, 19 nt, Artificial Sequence
  Description of Artificial Sequence: Synthetic oligonucleotide
ugucccaacuuucugacuc

SEQ ID NO: 2732143 - RNA, 19 nt, Artificial Sequence
  Description of Artificial Sequence: Synthetic oligonucleotide
aucuuauuuaggauagugg

SEQ ID NO: 2732144 - RNA, 19 nt, Artificial Sequence
  Description of Artificial Sequence: Synthetic oligonucleotide
ugagccggcuaccacaugc

SEQ ID NO: 2732145 - RNA, 19 nt, Artificial Sequence
  Description of Artificial Sequence: Synthetic oligonucleotide
acauccaaacugcuccgcc

SEQ ID NO: 2732146 - RNA, 19 nt, Artificial Sequence
  Description of Artificial Sequence: Synthetic oligonucleotide
aggauagugggcccaacuc

SEQ ID NO: 2732147 - RNA, 19 nt, Artificial Sequence
  Description of Artificial Sequence: Synthetic oligonucleotide
aaccuccacaacaacugcc

SEQ ID NO: 2732148 - RNA, 19 nt, Artificial Sequence
  Description of Artificial Sequence: Synthetic oligonucleotide
ucuaagucagcaagcuucu

SEQ ID NO: 2732149 - RNA, 19 nt, Artificial Sequence
  Description of Artificial Sequence: Synthetic oligonucleotide
uguguucauccuuugggca

SEQ ID NO: 2732150 - RNA, 19 nt, Artificial Sequence
  Description of Artificial Sequence: Synthetic oligonucleotide
uucggccucagaauugucc

SEQ ID NO: 2732151 - RNA, 19 nt, Artificial Sequence
  Description of Artificial Sequence: Synthetic oligonucleotide
guugccguuucucuggugc

SEQ ID NO: 2732152 - RNA, 19 nt, Artificial Sequence
  Description of Artificial Sequence: Synthetic oligonucleotide
cauccuuugggcacgcugc

SEQ ID NO: 2732153 - RNA, 19 nt, Artificial Sequence
  Description of Artificial Sequence: Synthetic oligonucleotide
cuguguucauccuuugggc

SEQ ID NO: 2732154 - RNA, 19 nt, Artificial Sequence
  Description of Artificial Sequence: Synthetic oligonucleotide
gaucuuccccaguaggaag

SEQ ID NO: 2732155 - RNA, 19 nt, Artificial Sequence
  Description of Artificial Sequence: Synthetic oligonucleotide
gcuguguucauccuuuggg

SEQ ID NO: 2732156 - RNA, 19 nt, Artificial Sequence
  Description of Artificial Sequence: Synthetic oligonucleotide
ugcagacacgcccacaggu

SEQ ID NO: 2732157 - RNA, 19 nt, Artificial Sequence
  Description of Artificial Sequence: Synthetic oligonucleotide
uccaucuggaccagggugu

SEQ ID NO: 2732158 - RNA, 19 nt, Artificial Sequence
  Description of Artificial Sequence: Synthetic oligonucleotide
ucugguuggucagagcugc

SEQ ID NO: 2732159 - RNA, 19 nt, Artificial Sequence
  Description of Artificial Sequence: Synthetic oligonucleotide
gaguucauugaugaucccc

SEQ ID NO: 2732160 - RNA, 19 nt, Artificial Sequence
  Description of Artificial Sequence: Synthetic oligonucleotide
agcguugccguuucucugg

SEQ ID NO: 2732161 - RNA, 19 nt, Artificial Sequence
  Description of Artificial Sequence: Synthetic oligonucleotide
ucggccucagaauuguccc

SEQ ID NO: 2732162 - RNA, 19 nt, Artificial Sequence
  Description of Artificial Sequence: Synthetic oligonucleotide
gaauugucccaacuuucug

SEQ ID NO: 2732163 - RNA, 19 nt, Artificial Sequence
  Description of Artificial Sequence: Synthetic oligonucleotide
uauuuaggauagugggccc

SEQ ID NO: 2732164 - RNA, 19 nt, Artificial Sequence
  Description of Artificial Sequence: Synthetic oligonucleotide
ugugggugcacccuccaac

SEQ ID NO: 2732165 - RNA, 19 nt, Artificial Sequence
  Description of Artificial Sequence: Synthetic oligonucleotide
ucugacucuuccucuaagu

SEQ ID NO: 2732166 - RNA, 19 nt, Artificial Sequence
  Description of Artificial Sequence: Synthetic oligonucleotide
uguucauccuuugggcacg

SEQ ID NO: 2732167 - RNA, 19 nt, Artificial Sequence
  Description of Artificial Sequence: Synthetic oligonucleotide
cuugcccuggaguucauug

SEQ ID NO: 2732168 - RNA, 19 nt, Artificial Sequence
  Description of Artificial Sequence: Synthetic oligonucleotide
uccaacagcuuuucaguga

SEQ ID NO: 2732169 - RNA, 19 nt, Artificial Sequence
  Description of Artificial Sequence: Synthetic oligonucleotide
ugcuccgccucaaacaccu

SEQ ID NO: 2732170 - RNA, 19 nt, Artificial Sequence
  Description of Artificial Sequence: Synthetic oligonucleotide
accuccacaacaacugccc

SEQ ID NO: 2732171 - RNA, 19 nt, Artificial Sequence
  Description of Artificial Sequence: Synthetic oligonucleotide
gauagugggcccaacucug

SEQ ID NO: 2732172 - RNA, 19 nt, Artificial Sequence
  Description of Artificial Sequence: Synthetic oligonucleotide
aaacucguacuugcugagg

SEQ ID NO: 2732173 - RNA, 19 nt, Artificial Sequence
  Description of Artificial Sequence: Synthetic oligonucleotide
uggagguuugagcgugugg

SEQ ID NO: 2732174 - RNA, 19 nt, Artificial Sequence
  Description of Artificial Sequence: Synthetic oligonucleotide
caugccuucaggagccagg

SEQ ID NO: 2732175 - RNA, 19 nt, Artificial Sequence
  Description of Artificial Sequence: Synthetic oligonucleotide
cuggaguucauugaugauc

SEQ ID NO: 2732176 - RNA, 19 nt, Artificial Sequence
  Description of Artificial Sequence: Synthetic oligonucleotide
gcugcggacauccaaacug

SEQ ID NO: 2732177 - RNA, 19 nt, Artificial Sequence
  Description of Artificial Sequence: Synthetic oligonucleotide
uaggauagugggcccaacu

SEQ ID NO: 2732178 - RNA, 19 nt, Artificial Sequence
  Description of Artificial Sequence: Synthetic oligonucleotide
ucugcagccacagggcucc

SEQ ID NO: 2732179 - RNA, 19 nt, Artificial Sequence
  Description of Artificial Sequence: Synthetic oligonucleotide
ccggauggagguuugagcg

SEQ ID NO: 2732180 - RNA, 19 nt, Artificial Sequence
  Description of Artificial Sequence: Synthetic oligonucleotide
cucuggugcaggaagggug

SEQ ID NO: 2732181 - RNA, 19 nt, Artificial Sequence
  Description of Artificial Sequence: Synthetic oligonucleotide
uugagcguguggcugugug

SEQ ID NO: 2732182 - RNA, 19 nt, Artificial Sequence
  Description of Artificial Sequence: Synthetic oligonucleotide
uucugguuggucagagcug

SEQ ID NO: 2732183 - RNA, 19 nt, Artificial Sequence
  Description of Artificial Sequence: Synthetic oligonucleotide
uccgccucaaacaccuuga

SEQ ID NO: 2732184 - RNA, 19 nt, Artificial Sequence
  Description of Artificial Sequence: Synthetic oligonucleotide
cugcuucaaucuuauuuag

SEQ ID NO: 2732185 - RNA, 19 nt, Artificial Sequence
  Description of Artificial Sequence: Synthetic oligonucleotide
caaacucguacuugcugag

SEQ ID NO: 2732186 - RNA, 19 nt, Artificial Sequence
  Description of Artificial Sequence: Synthetic oligonucleotide
aaggaagugugcagacacg

SEQ ID NO: 2732187 - RNA, 19 nt, Artificial Sequence
  Description of Artificial Sequence: Synthetic oligonucleotide
agguugucgucacugguca

SEQ ID NO: 2732188 - RNA, 19 nt, Artificial Sequence
  Description of Artificial Sequence: Synthetic oligonucleotide
cacaaacucguacuugcug

SEQ ID NO: 2732189 - RNA, 19 nt, Artificial Sequence
  Description of Artificial Sequence: Synthetic oligonucleotide
cacaacaacugcccuuccg

SEQ ID NO: 2732190 - RNA, 19 nt, Artificial Sequence
  Description of Artificial Sequence: Synthetic oligonucleotide
ugugaaccuccacaacaac

SEQ ID NO: 2732191 - RNA, 19 nt, Artificial Sequence
  Description of Artificial Sequence: Synthetic oligonucleotide
ucguccucacauccugccg

SEQ ID NO: 2732192 - RNA, 19 nt, Artificial Sequence
  Description of Artificial Sequence: Synthetic oligonucleotide
cugcggacauccaaacugc

SEQ ID NO: 2732193 - RNA, 19 nt, Artificial Sequence
  Description of Artificial Sequence: Synthetic oligonucleotide
ggagguuugagcguguggc

SEQ ID NO: 2732194 - RNA, 19 nt, Artificial Sequence
  Description of Artificial Sequence: Synthetic oligonucleotide
uccacaacaacugcccuuc

SEQ ID NO: 2732195 - RNA, 19 nt, Artificial Sequence
  Description of Artificial Sequence: Synthetic oligonucleotide
augccuucaggagccaggc

SEQ ID NO: 2732196 - RNA, 19 nt, Artificial Sequence
  Description of Artificial Sequence: Synthetic oligonucleotide
ucagagagcgggcagcguu

SEQ ID NO: 2732197 - RNA, 19 nt, Artificial Sequence
  Description of Artificial Sequence: Synthetic oligonucleotide
acuggucaccacaaacucg

SEQ ID NO: 2732198 - RNA, 19 nt, Artificial Sequence
  Description of Artificial Sequence: Synthetic oligonucleotide
gcuaccacaugccuucagg

SEQ ID NO: 2732199 - RNA, 19 nt, Artificial Sequence
  Description of Artificial Sequence: Synthetic oligonucleotide
guucugguuggucagagcu

SEQ ID NO: 2732200 - RNA, 19 nt, Artificial Sequence
  Description of Artificial Sequence: Synthetic oligonucleotide
aggcaaaggaagugugcag

SEQ ID NO: 2732201 - RNA, 19 nt, Artificial Sequence
  Description of Artificial Sequence: Synthetic oligonucleotide
aucuuccccaguaggaagg

SEQ ID NO: 2732202 - RNA, 19 nt, Artificial Sequence
  Description of Artificial Sequence: Synthetic oligonucleotide
agaauugucccaacuuucu

SEQ ID NO: 2732203 - RNA, 19 nt, Artificial Sequence
  Description of Artificial Sequence: Synthetic oligonucleotide
agugugcagacacgcccac

SEQ ID NO: 2732204 - RNA, 19 nt, Artificial Sequence
  Description of Artificial Sequence: Synthetic oligonucleotide
caagcuucuccaucuggac

SEQ ID NO: 2732205 - RNA, 19 nt, Artificial Sequence
  Description of Artificial Sequence: Synthetic oligonucleotide
aagggugugaaggcugugu

SEQ ID NO: 2732206 - RNA, 19 nt, Artificial Sequence
  Description of Artificial Sequence: Synthetic oligonucleotide
ugucugcagccacagggcu

SEQ ID NO: 2732207 - RNA, 19 nt, Artificial Sequence
  Description of Artificial Sequence: Synthetic oligonucleotide
guugucgucacuggucaag

SEQ ID NO: 2732208 - RNA, 19 nt, Artificial Sequence
  Description of Artificial Sequence: Synthetic oligonucleotide
auccuuugggcacgcugcg

SEQ ID NO: 2732209 - RNA, 19 nt, Artificial Sequence
  Description of Artificial Sequence: Synthetic oligonucleotide
uacuugcugagggacaggu

SEQ ID NO: 2732210 - RNA, 19 nt, Artificial Sequence
  Description of Artificial Sequence: Synthetic oligonucleotide
ucguacuugcugagggaca

SEQ ID NO: 2732211 - RNA, 19 nt, Artificial Sequence
  Description of Artificial Sequence: Synthetic oligonucleotide
acagguugucgucacuggu

SEQ ID NO: 2732212 - RNA, 19 nt, Artificial Sequence
  Description of Artificial Sequence: Synthetic oligonucleotide
gucaccacaaacucguacu

SEQ ID NO: 2732213 - RNA, 19 nt, Artificial Sequence
  Description of Artificial Sequence: Synthetic oligonucleotide
ucuucggccucagaauugu

SEQ ID NO: 2732214 - RNA, 19 nt, Artificial Sequence
  Description of Artificial Sequence: Synthetic oligonucleotide
uccucuucggccucagaau

SEQ ID NO: 2732215 - RNA, 19 nt, Artificial Sequence
  Description of Artificial Sequence: Synthetic oligonucleotide
aggucguccucacauccug

SEQ ID NO: 2732216 - RNA, 19 nt, Artificial Sequence
  Description of Artificial Sequence: Synthetic oligonucleotide
uugcccuggaguucauuga

SEQ ID NO: 2732217 - RNA, 19 nt, Artificial Sequence
  Description of Artificial Sequence: Synthetic oligonucleotide
cagguugucgucacugguc

SEQ ID NO: 2732218 - RNA, 19 nt, Artificial Sequence
  Description of Artificial Sequence: Synthetic oligonucleotide
cucguacuugcugagggac

SEQ ID NO: 2732219 - RNA, 19 nt, Artificial Sequence
  Description of Artificial Sequence: Synthetic oligonucleotide
acgcugcggacauccaaac

SEQ ID NO: 2732220 - RNA, 19 nt, Artificial Sequence
  Description of Artificial Sequence: Synthetic oligonucleotide
ccaacagcuuuucagugag

SEQ ID NO: 2732221 - RNA, 19 nt, Artificial Sequence
  Description of Artificial Sequence: Synthetic oligonucleotide
auuuaggauagugggccca

SEQ ID NO: 2732222 - RNA, 19 nt, Artificial Sequence
  Description of Artificial Sequence: Synthetic oligonucleotide
ucagugagccggcuaccac

SEQ ID NO: 2732223 - RNA, 19 nt, Artificial Sequence
  Description of Artificial Sequence: Synthetic oligonucleotide
gcugcuucaaucuuauuua

SEQ ID NO: 2732224 - RNA, 19 nt, Artificial Sequence
  Description of Artificial Sequence: Synthetic oligonucleotide
cagacacgcccacagguug

SEQ ID NO: 2732225 - RNA, 19 nt, Artificial Sequence
  Description of Artificial Sequence: Synthetic oligonucleotide
cuaccacaugccuucagga

SEQ ID NO: 2732226 - RNA, 19 nt, Artificial Sequence
  Description of Artificial Sequence: Synthetic oligonucleotide
aaggcuguguucauccuuu

SEQ ID NO: 2732227 - RNA, 19 nt, Artificial Sequence
  Description of Artificial Sequence: Synthetic oligonucleotide
ugcacccuccaacagcuuu

SEQ ID NO: 2732228 - RNA, 19 nt, Artificial Sequence
  Description of Artificial Sequence: Synthetic oligonucleotide
cggacauccaaacugcucc

SEQ ID NO: 2732229 - RNA, 19 nt, Artificial Sequence
  Description of Artificial Sequence: Synthetic oligonucleotide
gucguccucacauccugcc

SEQ ID NO: 2732230 - RNA, 19 nt, Artificial Sequence
  Description of Artificial Sequence: Synthetic oligonucleotide
ucagagcugcuucaaucuu

SEQ ID NO: 2732231 - RNA, 19 nt, Artificial Sequence
  Description of Artificial Sequence: Synthetic oligonucleotide
uccaaacugcuccgccuca

SEQ ID NO: 2732232 - RNA, 19 nt, Artificial Sequence
  Description of Artificial Sequence: Synthetic oligonucleotide
agggacaggucguccucac

SEQ ID NO: 2732233 - RNA, 19 nt, Artificial Sequence
  Description of Artificial Sequence: Synthetic oligonucleotide
ugggugcacccuccaacag

SEQ ID NO: 2732234 - RNA, 19 nt, Artificial Sequence
  Description of Artificial Sequence: Synthetic oligonucleotide
ggugugaaggcuguguuca

SEQ ID NO: 2732235 - RNA, 19 nt, Artificial Sequence
  Description of Artificial Sequence: Synthetic oligonucleotide
aggagccaggcaaaggaag

SEQ ID NO: 2732236 - RNA, 19 nt, Artificial Sequence
  Description of Artificial Sequence: Synthetic oligonucleotide
uuuaggauagugggcccaa

SEQ ID NO: 2732237 - RNA, 19 nt, Artificial Sequence
  Description of Artificial Sequence: Synthetic oligonucleotide
ggucagagcugcuucaauc

SEQ ID NO: 2732238 - RNA, 19 nt, Artificial Sequence
  Description of Artificial Sequence: Synthetic oligonucleotide
cccuccaacagcuuuucag

SEQ ID NO: 2732239 - RNA, 19 nt, Artificial Sequence
  Description of Artificial Sequence: Synthetic oligonucleotide
uucagugagccggcuacca

SEQ ID NO: 2732240 - RNA, 19 nt, Artificial Sequence
  Description of Artificial Sequence: Synthetic oligonucleotide
ugcccuuccgcacccucug

SEQ ID NO: 2732241 - RNA, 19 nt, Artificial Sequence
  Description of Artificial Sequence: Synthetic oligonucleotide
agguuugagcguguggcug

SEQ ID NO: 2732242 - RNA, 19 nt, Artificial Sequence
  Description of Artificial Sequence: Synthetic oligonucleotide
gucagagcugcuucaaucu

SEQ ID NO: 2732243 - RNA, 19 nt, Artificial Sequence
  Description of Artificial Sequence: Synthetic oligonucleotide
ugaaggcuguguucauccu

SEQ ID NO: 2732244 - RNA, 19 nt, Artificial Sequence
  Description of Artificial Sequence: Synthetic oligonucleotide
guuggucagagcugcuuca

SEQ ID NO: 2732245 - RNA, 19 nt, Artificial Sequence
  Description of Artificial Sequence: Synthetic oligonucleotide
acucguacuugcugaggga

SEQ ID NO: 2732246 - RNA, 19 nt, Artificial Sequence
  Description of Artificial Sequence: Synthetic oligonucleotide
ugugaaggcuguguucauc

SEQ ID NO: 2732247 - RNA, 19 nt, Artificial Sequence
  Description of Artificial Sequence: Synthetic oligonucleotide
gacauccaaacugcuccgc

SEQ ID NO: 2732248 - RNA, 19 nt, Artificial Sequence
  Description of Artificial Sequence: Synthetic oligonucleotide
aacucugucugcagccaca

SEQ ID NO: 2732249 - RNA, 19 nt, Artificial Sequence
  Description of Artificial Sequence: Synthetic oligonucleotide
uuucagugagccggcuacc

SEQ ID NO: 2732250 - RNA, 19 nt, Artificial Sequence
  Description of Artificial Sequence: Synthetic oligonucleotide
ugcggacauccaaacugcu

SEQ ID NO: 2732251 - RNA, 19 nt, Artificial Sequence
  Description of Artificial Sequence: Synthetic oligonucleotide
cuccgccucaaacaccuug

SEQ ID NO: 2732252 - RNA, 19 nt, Artificial Sequence
  Description of Artificial Sequence: Synthetic oligonucleotide
ccacaugccuucaggagcc

SEQ ID NO: 2732253 - RNA, 19 nt, Artificial Sequence
  Description of Artificial Sequence: Synthetic oligonucleotide
ugccggauggagguuugag

SEQ ID NO: 2732254 - RNA, 19 nt, Artificial Sequence
  Description of Artificial Sequence: Synthetic oligonucleotide
ggcugugugaaccuccaca

SEQ ID NO: 2732255 - RNA, 19 nt, Artificial Sequence
  Description of Artificial Sequence: Synthetic oligonucleotide
acgcccacagguugucguc

SEQ ID NO: 2732256 - RNA, 19 nt, Artificial Sequence
  Description of Artificial Sequence: Synthetic oligonucleotide
uuugggcacgcugcggaca

SEQ ID NO: 2732257 - RNA, 19 nt, Artificial Sequence
  Description of Artificial Sequence: Synthetic oligonucleotide
aggaagggugugaaggcug

SEQ ID NO: 2732258 - RNA, 19 nt, Artificial Sequence
  Description of Artificial Sequence: Synthetic oligonucleotide
gacaggucguccucacauc

SEQ ID NO: 2732259 - RNA, 19 nt, Artificial Sequence
  Description of Artificial Sequence: Synthetic oligonucleotide
caggcaaaggaagugugca

SEQ ID NO: 2732260 - RNA, 19 nt, Artificial Sequence
  Description of Artificial Sequence: Synthetic oligonucleotide
uuccgcacccucuggcaca

SEQ ID NO: 2732261 - RNA, 19 nt, Artificial Sequence
  Description of Artificial Sequence: Synthetic oligonucleotide
ggucaccacaaacucguac

SEQ ID NO: 2732262 - RNA, 19 nt, Artificial Sequence
  Description of Artificial Sequence: Synthetic oligonucleotide
ggcuguguucauccuuugg

SEQ ID NO: 2732263 - RNA, 19 nt, Artificial Sequence
  Description of Artificial Sequence: Synthetic oligonucleotide
agcguguggcugugugaac

SEQ ID NO: 2732264 - RNA, 19 nt, Artificial Sequence
  Description of Artificial Sequence: Synthetic oligonucleotide
gugggugcacccuccaaca

SEQ ID NO: 2732265 - RNA, 19 nt, Artificial Sequence
  Description of Artificial Sequence: Synthetic oligonucleotide
cuuccgcacccucuggcac

SEQ ID NO: 2732266 - RNA, 19 nt, Artificial Sequence
  Description of Artificial Sequence: Synthetic oligonucleotide
uccuuugggcacgcugcgg

SEQ ID NO: 2732267 - RNA, 19 nt, Artificial Sequence
  Description of Artificial Sequence: Synthetic oligonucleotide
cagugagccggcuaccaca

SEQ ID NO: 2732268 - RNA, 19 nt, Artificial Sequence
  Description of Artificial Sequence: Synthetic oligonucleotide
agggugugaaggcuguguu

SEQ ID NO: 2732269 - RNA, 19 nt, Artificial Sequence
  Description of Artificial Sequence: Synthetic oligonucleotide
ucucuggugcaggaagggu

SEQ ID NO: 2732270 - RNA, 19 nt, Artificial Sequence
  Description of Artificial Sequence: Synthetic oligonucleotide
cccaacucugucugcagcc

SEQ ID NO: 2732271 - RNA, 19 nt, Artificial Sequence
  Description of Artificial Sequence: Synthetic oligonucleotide
gguuggucagagcugcuuc

SEQ ID NO: 2732272 - RNA, 19 nt, Artificial Sequence
  Description of Artificial Sequence: Synthetic oligonucleotide
agccaggcaaaggaagugu

SEQ ID NO: 2732273 - RNA, 19 nt, Artificial Sequence
  Description of Artificial Sequence: Synthetic oligonucleotide
agagcugcuucaaucuuau

SEQ ID NO: 2732274 - RNA, 19 nt, Artificial Sequence
  Description of Artificial Sequence: Synthetic oligonucleotide
uugucccaacuuucugacu

SEQ ID NO: 2732275 - RNA, 19 nt, Artificial Sequence
  Description of Artificial Sequence: Synthetic oligonucleotide
cugugugaaccuccacaac

SEQ ID NO: 2732276 - RNA, 19 nt, Artificial Sequence
  Description of Artificial Sequence: Synthetic oligonucleotide
gugcagacacgcccacagg

SEQ ID NO: 2732277 - RNA, 19 nt, Artificial Sequence
  Description of Artificial Sequence: Synthetic oligonucleotide
caacagcuuuucagugagc

SEQ ID NO: 2732278 - RNA, 19 nt, Artificial Sequence
  Description of Artificial Sequence: Synthetic oligonucleotide
caacucugucugcagccac

SEQ ID NO: 2732279 - RNA, 19 nt, Artificial Sequence
  Description of Artificial Sequence: Synthetic oligonucleotide
cuuucugacucuuccucua

SEQ ID NO: 2732280 - RNA, 19 nt, Artificial Sequence
  Description of Artificial Sequence: Synthetic oligonucleotide
cuuugggcacgcugcggac

SEQ ID NO: 2732281 - RNA, 19 nt, Artificial Sequence
  Description of Artificial Sequence: Synthetic oligonucleotide
uggucagagcugcuucaau

SEQ ID NO: 2732282 - RNA, 19 nt, Artificial Sequence
  Description of Artificial Sequence: Synthetic oligonucleotide
cuucaaucuuauuuaggau

SEQ ID NO: 2732283 - RNA, 19 nt, Artificial Sequence
  Description of Artificial Sequence: Synthetic oligonucleotide
gaagggccaggaguugaug

SEQ ID NO: 2732284 - RNA, 19 nt, Artificial Sequence
  Description of Artificial Sequence: Synthetic oligonucleotide
caccacaaacucguacuug

SEQ ID NO: 2732285 - RNA, 19 nt, Artificial Sequence
  Description of Artificial Sequence: Synthetic oligonucleotide
cagcguugccguuucucug

SEQ ID NO: 2732286 - RNA, 19 nt, Artificial Sequence
  Description of Artificial Sequence: Synthetic oligonucleotide
gagcguguggcugugugaa

SEQ ID NO: 2732287 - RNA, 19 nt, Artificial Sequence
  Description of Artificial Sequence: Synthetic oligonucleotide
gccggauggagguuugagc

SEQ ID NO: 2732288 - RNA, 19 nt, Artificial Sequence
  Description of Artificial Sequence: Synthetic oligonucleotide
uuggucagagcugcuucaa

SEQ ID NO: 2732289 - RNA, 19 nt, Artificial Sequence
  Description of Artificial Sequence: Synthetic oligonucleotide
caguaggaagggccaggag

SEQ ID NO: 2732290 - RNA, 19 nt, Artificial Sequence
  Description of Artificial Sequence: Synthetic oligonucleotide
gugugaaccuccacaacaa

SEQ ID NO: 2732291 - RNA, 19 nt, Artificial Sequence
  Description of Artificial Sequence: Synthetic oligonucleotide
gugaaccuccacaacaacu

SEQ ID NO: 2732292 - RNA, 19 nt, Artificial Sequence
  Description of Artificial Sequence: Synthetic oligonucleotide
cauccugccggauggaggu

SEQ ID NO: 2732293 - RNA, 19 nt, Artificial Sequence
  Description of Artificial Sequence: Synthetic oligonucleotide
uaggaagggccaggaguug

SEQ ID NO: 2732294 - RNA, 19 nt, Artificial Sequence
  Description of Artificial Sequence: Synthetic oligonucleotide
gagccggcuaccacaugcc

SEQ ID NO: 2732295 - RNA, 19 nt, Artificial Sequence
  Description of Artificial Sequence: Synthetic oligonucleotide
cacgcugcggacauccaaa

SEQ ID NO: 2732296 - RNA, 19 nt, Artificial Sequence
  Description of Artificial Sequence: Synthetic oligonucleotide
cacauccugccggauggag

SEQ ID NO: 2732297 - RNA, 19 nt, Artificial Sequence
  Description of Artificial Sequence: Synthetic oligonucleotide
ggauagugggcccaacucu

SEQ ID NO: 2732298 - RNA, 19 nt, Artificial Sequence
  Description of Artificial Sequence: Synthetic oligonucleotide
cucagaauugucccaacuu

SEQ ID NO: 2732299 - RNA, 19 nt, Artificial Sequence
  Description of Artificial Sequence: Synthetic oligonucleotide
acaugccuucaggagccag

SEQ ID NO: 2732300 - RNA, 19 nt, Artificial Sequence
  Description of Artificial Sequence: Synthetic oligonucleotide
aaacaccuugagggccuug

SEQ ID NO: 2732301 - RNA, 19 nt, Artificial Sequence
  Description of Artificial Sequence: Synthetic oligonucleotide
gagguuugagcguguggcu

SEQ ID NO: 2732302 - RNA, 19 nt, Artificial Sequence
  Description of Artificial Sequence: Synthetic oligonucleotide
cguccucacauccugccgg

SEQ ID NO: 2732303 - RNA, 19 nt, Artificial Sequence
  Description of Artificial Sequence: Synthetic oligonucleotide
uccgcacccucuggcacag

SEQ ID NO: 2732304 - RNA, 19 nt, Artificial Sequence
  Description of Artificial Sequence: Synthetic oligonucleotide
guacuugcugagggacagg

SEQ ID NO: 2732305 - RNA, 19 nt, Artificial Sequence
  Description of Artificial Sequence: Synthetic oligonucleotide
ggaagugugcagacacgcc

SEQ ID NO: 2732306 - RNA, 19 nt, Artificial Sequence
  Description of Artificial Sequence: Synthetic oligonucleotide
ugacagguucugguugguc

SEQ ID NO: 2732307 - RNA, 19 nt, Artificial Sequence
  Description of Artificial Sequence: Synthetic oligonucleotide
agccggcuaccacaugccu

SEQ ID NO: 2732308 - RNA, 19 nt, Artificial Sequence
  Description of Artificial Sequence: Synthetic oligonucleotide
ccaggguguccucuguggg

SEQ ID NO: 2732309 - RNA, 19 nt, Artificial Sequence
  Description of Artificial Sequence: Synthetic oligonucleotide
cccuggaguucauugauga

SEQ ID NO: 2732310 - RNA, 19 nt, Artificial Sequence
  Description of Artificial Sequence: Synthetic oligonucleotide
cauccacugacagguucug

SEQ ID NO: 2732311 - RNA, 19 nt, Artificial Sequence
  Description of Artificial Sequence: Synthetic oligonucleotide
gcguguggcugugugaacc

SEQ ID NO: 2732312 - RNA, 19 nt, Artificial Sequence
  Description of Artificial Sequence: Synthetic oligonucleotide
ccggcuaccacaugccuuc

SEQ ID NO: 2732313 - RNA, 19 nt, Artificial Sequence
  Description of Artificial Sequence: Synthetic oligonucleotide
agugagccggcuaccacau

SEQ ID NO: 2732314 - RNA, 19 nt, Artificial Sequence
  Description of Artificial Sequence: Synthetic oligonucleotide
cuuuucagugagccggcua

SEQ ID NO: 2732315 - RNA, 19 nt, Artificial Sequence
  Description of Artificial Sequence: Synthetic oligonucleotide
ugggcccaacucugucugc

SEQ ID NO: 2732316 - RNA, 19 nt, Artificial Sequence
  Description of Artificial Sequence: Synthetic oligonucleotide
cuuccccaguaggaagggc

SEQ ID NO: 2732317 - RNA, 19 nt, Artificial Sequence
  Description of Artificial Sequence: Synthetic oligonucleotide
guaggaagggccaggaguu

SEQ ID NO: 2732318 - RNA, 19 nt, Artificial Sequence
  Description of Artificial Sequence: Synthetic oligonucleotide
caacuuucugacucuuccu

SEQ ID NO: 2732319 - RNA, 19 nt, Artificial Sequence
  Description of Artificial Sequence: Synthetic oligonucleotide
auagugggcccaacucugu

SEQ ID NO: 2732320 - RNA, 19 nt, Artificial Sequence
  Description of Artificial Sequence: Synthetic oligonucleotide
guuugagcguguggcugug

SEQ ID NO: 2732321 - RNA, 19 nt, Artificial Sequence
  Description of Artificial Sequence: Synthetic oligonucleotide
gagggacaggucguccuca

SEQ ID NO: 2732322 - RNA, 19 nt, Artificial Sequence
  Description of Artificial Sequence: Synthetic oligonucleotide
cagcaagcuucuccaucug

SEQ ID NO: 2732323 - RNA, 19 nt, Artificial Sequence
  Description of Artificial Sequence: Synthetic oligonucleotide
gggugugaaggcuguguuc

SEQ ID NO: 2732324 - RNA, 19 nt, Artificial Sequence
  Description of Artificial Sequence: Synthetic oligonucleotide
uuugagcguguggcugugu

SEQ ID NO: 2732325 - RNA, 19 nt, Artificial Sequence
  Description of Artificial Sequence: Synthetic oligonucleotide
caggagccaggcaaaggaa

SEQ ID NO: 2732326 - RNA, 19 nt, Artificial Sequence
  Description of Artificial Sequence: Synthetic oligonucleotide
acacgcccacagguugucg

SEQ ID NO: 2732327 - RNA, 19 nt, Artificial Sequence
  Description of Artificial Sequence: Synthetic oligonucleotide
cuaagucagcaagcuucuc

SEQ ID NO: 2732328 - RNA, 19 nt, Artificial Sequence
  Description of Artificial Sequence: Synthetic oligonucleotide
agacacgcccacagguugu

SEQ ID NO: 2732329 - RNA, 19 nt, Artificial Sequence
  Description of Artificial Sequence: Synthetic oligonucleotide
guccucacauccugccgga

SEQ ID NO: 2732330 - RNA, 19 nt, Artificial Sequence
  Description of Artificial Sequence: Synthetic oligonucleotide
gcccaacucugucugcagc

SEQ ID NO: 2732331 - RNA, 19 nt, Artificial Sequence
  Description of Artificial Sequence: Synthetic oligonucleotide
ggaucuuccccaguaggaa

SEQ ID NO: 2732332 - RNA, 19 nt, Artificial Sequence
  Description of Artificial Sequence: Synthetic oligonucleotide
ggacaggucguccucacau

SEQ ID NO: 2732333 - RNA, 19 nt, Artificial Sequence
  Description of Artificial Sequence: Synthetic oligonucleotide
gccguuucucuggugcagg

SEQ ID NO: 2732334 - RNA, 19 nt, Artificial Sequence
  Description of Artificial Sequence: Synthetic oligonucleotide
cuucggccucagaauuguc

SEQ ID NO: 2732335 - RNA, 19 nt, Artificial Sequence
  Description of Artificial Sequence: Synthetic oligonucleotide
uccugccggauggagguuu

SEQ ID NO: 2732336 - RNA, 19 nt, Artificial Sequence
  Description of Artificial Sequence: Synthetic oligonucleotide
cguacuugcugagggacag

SEQ ID NO: 2732337 - RNA, 19 nt, Artificial Sequence
  Description of Artificial Sequence: Synthetic oligonucleotide
uggucaccacaaacucgua

SEQ ID NO: 2732338 - RNA, 19 nt, Artificial Sequence
  Description of Artificial Sequence: Synthetic oligonucleotide
ccacagguugucgucacug

SEQ ID NO: 2732339 - RNA, 19 nt, Artificial Sequence
  Description of Artificial Sequence: Synthetic oligonucleotide
gggcacgcugcggacaucc

SEQ ID NO: 2732340 - RNA, 19 nt, Artificial Sequence
  Description of Artificial Sequence: Synthetic oligonucleotide
guucauccuuugggcacgc

SEQ ID NO: 2732341 - RNA, 19 nt, Artificial Sequence
  Description of Artificial Sequence: Synthetic oligonucleotide
gacacgcccacagguuguc

SEQ ID NO: 2732342 - RNA, 19 nt, Artificial Sequence
  Description of Artificial Sequence: Synthetic oligonucleotide
ggcuaccacaugccuucag

SEQ ID NO: 2732343 - RNA, 19 nt, Artificial Sequence
  Description of Artificial Sequence: Synthetic oligonucleotide
ggugcaggaagggugugaa

SEQ ID NO: 2732344 - RNA, 19 nt, Artificial Sequence
  Description of Artificial Sequence: Synthetic oligonucleotide
ucccaacuuucugacucuu

SEQ ID NO: 2732345 - RNA, 19 nt, Artificial Sequence
  Description of Artificial Sequence: Synthetic oligonucleotide
cgccucaaacaccuugagg

SEQ ID NO: 2732346 - RNA, 19 nt, Artificial Sequence
  Description of Artificial Sequence: Synthetic oligonucleotide
gguuugagcguguggcugu

SEQ ID NO: 2732347 - RNA, 19 nt, Artificial Sequence
  Description of Artificial Sequence: Synthetic oligonucleotide
caaacugcuccgccucaaa

SEQ ID NO: 2732348 - RNA, 19 nt, Artificial Sequence
  Description of Artificial Sequence: Synthetic oligonucleotide
ggugcacccuccaacagcu

SEQ ID NO: 2732349 - RNA, 19 nt, Artificial Sequence
  Description of Artificial Sequence: Synthetic oligonucleotide
ccuccaacagcuuuucagu

SEQ ID NO: 2732350 - RNA, 19 nt, Artificial Sequence
  Description of Artificial Sequence: Synthetic oligonucleotide
gucccaacuuucugacucu

SEQ ID NO: 2732351 - RNA, 19 nt, Artificial Sequence
  Description of Artificial Sequence: Synthetic oligonucleotide
acuggucaaggaggucaga

SEQ ID NO: 2732352 - RNA, 19 nt, Artificial Sequence
  Description of Artificial Sequence: Synthetic oligonucleotide
ccuuugggcacgcugcgga

SEQ ID NO: 2732353 - RNA, 19 nt, Artificial Sequence
  Description of Artificial Sequence: Synthetic oligonucleotide
cacccuccaacagcuuuuc

SEQ ID NO: 2732354 - RNA, 19 nt, Artificial Sequence
  Description of Artificial Sequence: Synthetic oligonucleotide
ccacuggucaccacaaacu

SEQ ID NO: 2732355 - RNA, 19 nt, Artificial Sequence
  Description of Artificial Sequence: Synthetic oligonucleotide
gcugagggacaggucgucc

SEQ ID NO: 2732356 - RNA, 19 nt, Artificial Sequence
  Description of Artificial Sequence: Synthetic oligonucleotide
ggaggucagagagcgggca

SEQ ID NO: 2732357 - RNA, 19 nt, Artificial Sequence
  Description of Artificial Sequence: Synthetic oligonucleotide
ggucguccucacauccugc

SEQ ID NO: 2732358 - RNA, 19 nt, Artificial Sequence
  Description of Artificial Sequence: Synthetic oligonucleotide
cccuuccgcacccucuggc

SEQ ID NO: 2732359 - RNA, 19 nt, Artificial Sequence
  Description of Artificial Sequence: Synthetic oligonucleotide
cccggaucuuccccaguag

SEQ ID NO: 2732360 - RNA, 19 nt, Artificial Sequence
  Description of Artificial Sequence: Synthetic oligonucleotide
cacgcccacagguugucgu

SEQ ID NO: 2732361 - RNA, 19 nt, Artificial Sequence
  Description of Artificial Sequence: Synthetic oligonucleotide
cuccacaacaacugcccuu

SEQ ID NO: 2732362 - RNA, 19 nt, Artificial Sequence
  Description of Artificial Sequence: Synthetic oligonucleotide
aacugcccuuccgcacccu

SEQ ID NO: 2732363 - RNA, 19 nt, Artificial Sequence
  Description of Artificial Sequence: Synthetic oligonucleotide
guguggcugugugaaccuc

SEQ ID NO: 2732364 - RNA, 19 nt, Artificial Sequence
  Description of Artificial Sequence: Synthetic oligonucleotide
ggagccaggcaaaggaagu

SEQ ID NO: 2732365 - RNA, 19 nt, Artificial Sequence
  Description of Artificial Sequence: Synthetic oligonucleotide
gccucagaauugucccaac

SEQ ID NO: 2732366 - RNA, 19 nt, Artificial Sequence
  Description of Artificial Sequence: Synthetic oligonucleotide
ggguguccucugugggugc

SEQ ID NO: 2732367 - RNA, 19 nt, Artificial Sequence
  Description of Artificial Sequence: Synthetic oligonucleotide
gugagccggcuaccacaug

SEQ ID NO: 2732368 - RNA, 19 nt, Artificial Sequence
  Description of Artificial Sequence: Synthetic oligonucleotide
gauggagguuugagcgugu

SEQ ID NO: 2732369 - RNA, 19 nt, Artificial Sequence
  Description of Artificial Sequence: Synthetic oligonucleotide
ggccucagaauugucccaa

SEQ ID NO: 2732370 - RNA, 19 nt, Artificial Sequence
  Description of Artificial Sequence: Synthetic oligonucleotide
ggccuugcccuggaguuca

SEQ ID NO: 2732371 - RNA, 19 nt, Artificial Sequence
  Description of Artificial Sequence: Synthetic oligonucleotide
cggaucuuccccaguagga

SEQ ID NO: 2732372 - RNA, 19 nt, Artificial Sequence
  Description of Artificial Sequence: Synthetic oligonucleotide
caggaagggugugaaggcu

SEQ ID NO: 2732373 - RNA, 19 nt, Artificial Sequence
  Description of Artificial Sequence: Synthetic oligonucleotide
gcccuggaguucauugaug

SEQ ID NO: 2732374 - RNA, 19 nt, Artificial Sequence
  Description of Artificial Sequence: Synthetic oligonucleotide
caaucuuauuuaggauagu

SEQ ID NO: 2732375 - RNA, 19 nt, Artificial Sequence
  Description of Artificial Sequence: Synthetic oligonucleotide
ccgccucaaacaccuugag

SEQ ID NO: 2732376 - RNA, 19 nt, Artificial Sequence
  Description of Artificial Sequence: Synthetic oligonucleotide
caggucguccucacauccu

SEQ ID NO: 2732377 - RNA, 19 nt, Artificial Sequence
  Description of Artificial Sequence: Synthetic oligonucleotide
gcccuuccgcacccucugg

SEQ ID NO: 2732378 - RNA, 19 nt, Artificial Sequence
  Description of Artificial Sequence: Synthetic oligonucleotide
ccugccggauggagguuug

SEQ ID NO: 2732379 - RNA, 19 nt, Artificial Sequence
  Description of Artificial Sequence: Synthetic oligonucleotide
gcacgcugcggacauccaa

SEQ ID NO: 2732380 - RNA, 19 nt, Artificial Sequence
  Description of Artificial Sequence: Synthetic oligonucleotide
ccacaacaacugcccuucc

SEQ ID NO: 2732381 - RNA, 19 nt, Artificial Sequence
  Description of Artificial Sequence: Synthetic oligonucleotide
cugugggugcacccuccaa

SEQ ID NO: 2732382 - RNA, 19 nt, Artificial Sequence
  Description of Artificial Sequence: Synthetic oligonucleotide
gggacaggucguccucaca

SEQ ID NO: 2732383 - RNA, 19 nt, Artificial Sequence
  Description of Artificial Sequence: Synthetic oligonucleotide
ggaagggugugaaggcugu

SEQ ID NO: 2732384 - RNA, 19 nt, Artificial Sequence
  Description of Artificial Sequence: Synthetic oligonucleotide
gguugucgucacuggucaa

SEQ ID NO: 2732385 - RNA, 19 nt, Artificial Sequence
  Description of Artificial Sequence: Synthetic oligonucleotide
ccaguaggaagggccagga

SEQ ID NO: 2732386 - RNA, 19 nt, Artificial Sequence
  Description of Artificial Sequence: Synthetic oligonucleotide
cugcccuuccgcacccucu

SEQ ID NO: 2732387 - RNA, 19 nt, Artificial Sequence
  Description of Artificial Sequence: Synthetic oligonucleotide
gguguccucugugggugca

SEQ ID NO: 2732388 - RNA, 19 nt, Artificial Sequence
  Description of Artificial Sequence: Synthetic oligonucleotide
ccucagaauugucccaacu

SEQ ID NO: 2732389 - RNA, 19 nt, Artificial Sequence
  Description of Artificial Sequence: Synthetic oligonucleotide
ccaacucugucugcagcca

SEQ ID NO: 2732390 - RNA, 19 nt, Artificial Sequence
  Description of Artificial Sequence: Synthetic oligonucleotide
ccaucuggaccaggguguc

SEQ ID NO: 2732391 - RNA, 19 nt, Artificial Sequence
  Description of Artificial Sequence: Synthetic oligonucleotide
ccguuucucuggugcagga

SEQ ID NO: 2732392 - RNA, 19 nt, Artificial Sequence
  Description of Artificial Sequence: Synthetic oligonucleotide
ccacaaacucguacuugcu

SEQ ID NO: 2732393 - RNA, 19 nt, Artificial Sequence
  Description of Artificial Sequence: Synthetic oligonucleotide
cacaugccuucaggagcca

SEQ ID NO: 2732394 - RNA, 19 nt, Artificial Sequence
  Description of Artificial Sequence: Synthetic oligonucleotide
ggaccaggguguccucugu

SEQ ID NO: 2732395 - RNA, 19 nt, Artificial Sequence
  Description of Artificial Sequence: Synthetic oligonucleotide
ugggcacgcugcggacauc

SEQ ID NO: 2732396 - RNA, 19 nt, Artificial Sequence
  Description of Artificial Sequence: Synthetic oligonucleotide
gagcugcuucaaucuuauu

SEQ ID NO: 2732397 - RNA, 19 nt, Artificial Sequence
  Description of Artificial Sequence: Synthetic oligonucleotide
cugccggauggagguuuga

SEQ ID NO: 2732398 - RNA, 19 nt, Artificial Sequence
  Description of Artificial Sequence: Synthetic oligonucleotide
auccugccggauggagguu

SEQ ID NO: 2732399 - RNA, 19 nt, Artificial Sequence
  Description of Artificial Sequence: Synthetic oligonucleotide
gucagagagcgggcagcgu

SEQ ID NO: 2732400 - RNA, 19 nt, Artificial Sequence
  Description of Artificial Sequence: Synthetic oligonucleotide
cgucacuggucaaggaggu

SEQ ID NO: 2732401 - RNA, 19 nt, Artificial Sequence
  Description of Artificial Sequence: Synthetic oligonucleotide
ggaagggccaggaguugau

SEQ ID NO: 2732402 - RNA, 19 nt, Artificial Sequence
  Description of Artificial Sequence: Synthetic oligonucleotide
cguugccguuucucuggug

SEQ ID NO: 2732403 - RNA, 19 nt, Artificial Sequence
  Description of Artificial Sequence: Synthetic oligonucleotide
ccuggaguucauugaugau

SEQ ID NO: 2732404 - RNA, 19 nt, Artificial Sequence
  Description of Artificial Sequence: Synthetic oligonucleotide
gcagacacgcccacagguu

SEQ ID NO: 2732405 - RNA, 19 nt, Artificial Sequence
  Description of Artificial Sequence: Synthetic oligonucleotide
ccuccacaacaacugcccu

SEQ ID NO: 2732406 - RNA, 19 nt, Artificial Sequence
  Description of Artificial Sequence: Synthetic oligonucleotide
cgggcagcguugccguuuc

SEQ ID NO: 2732407 - RNA, 19 nt, Artificial Sequence
  Description of Artificial Sequence: Synthetic oligonucleotide
gcuuuucagugagccggcu

SEQ ID NO: 2732408 - RNA, 19 nt, Artificial Sequence
  Description of Artificial Sequence: Synthetic oligonucleotide
gcguugccguuucucuggu

SEQ ID NO: 2732409 - RNA, 19 nt, Artificial Sequence
  Description of Artificial Sequence: Synthetic oligonucleotide
cggccucagaauuguccca

SEQ ID NO: 2732410 - RNA, 19 nt, Artificial Sequence
  Description of Artificial Sequence: Synthetic oligonucleotide
gcacccuccaacagcuuuu

SEQ ID NO: 2732411 - RNA, 19 nt, Artificial Sequence
  Description of Artificial Sequence: Synthetic oligonucleotide
gggcucccacuggucacca

SEQ ID NO: 2732412 - RNA, 19 nt, Artificial Sequence
  Description of Artificial Sequence: Synthetic oligonucleotide
ggcacgcugcggacaucca

SEQ ID NO: 2732413 - RNA, 19 nt, Artificial Sequence
  Description of Artificial Sequence: Synthetic oligonucleotide
cguuucucuggugcaggaa

SEQ ID NO: 2732414 - RNA, 19 nt, Artificial Sequence
  Description of Artificial Sequence: Synthetic oligonucleotide
cggauggagguuugagcgu

SEQ ID NO: 2732415 - RNA, 19 nt, Artificial Sequence
  Description of Artificial Sequence: Synthetic oligonucleotide
caaacaccuugagggccuu

SEQ ID NO: 2732416 - RNA, 19 nt, Artificial Sequence
  Description of Artificial Sequence: Synthetic oligonucleotide
gccggcuaccacaugccuu

SEQ ID NO: 2732417 - RNA, 19 nt, Artificial Sequence
  Description of Artificial Sequence: Synthetic oligonucleotide
cgcccacagguugucguca

SEQ ID NO: 2732418 - RNA, 19 nt, Artificial Sequence
  Description of Artificial Sequence: Synthetic oligonucleotide
cccacagguugucgucacu

SEQ ID NO: 2732419 - RNA, 19 nt, Artificial Sequence
  Description of Artificial Sequence: Synthetic oligonucleotide
cgcugcggacauccaaacu

SEQ ID NO: 2732420 - RNA, 19 nt, Artificial Sequence
  Description of Artificial Sequence: Synthetic oligonucleotide
gcgggcagcguugccguuu

SEQ ID NO: 2732421 - RNA, 19 nt, Artificial Sequence
  Description of Artificial Sequence: Synthetic oligonucleotide
gugcacccuccaacagcuu

SEQ ID NO: 2732422 - RNA, 19 nt, Artificial Sequence
  Description of Artificial Sequence: Synthetic oligonucleotide
gggcagcguugccguuucu

SEQ ID NO: 2732423 - RNA, 19 nt, Artificial Sequence
  Description of Artificial Sequence: Synthetic oligonucleotide
ccgcacccucuggcacagc

SEQ ID NO: 2732424 - RNA, 19 nt, Artificial Sequence
  Description of Artificial Sequence: Synthetic oligonucleotide
cggcuaccacaugccuuca

SEQ ID NO: 2732425 - RNA, 19 nt, Artificial Sequence
  Description of Artificial Sequence: Synthetic oligonucleotide
ccuugcccuggaguucauu

SEQ ID NO: 2732426 - RNA, 19 nt, Artificial Sequence
  Description of Artificial Sequence: Synthetic oligonucleotide
gcuccgccucaaacaccuu

SEQ ID NO: 2732427 - RNA, 19 nt, Artificial Sequence
  Description of Artificial Sequence: Synthetic oligonucleotide
gccuugcccuggaguucau

SEQ ID NO: 2732428 - RNA, 19 nt, Artificial Sequence
  Description of Artificial Sequence: Synthetic oligonucleotide
aauuacaaggccuaagugc

SEQ ID NO: 2732429 - RNA, 19 nt, Artificial Sequence
  Description of Artificial Sequence: Synthetic oligonucleotide
cuuaacuagaauuacaagg

SEQ ID NO: 2732430 - RNA, 19 nt, Artificial Sequence
  Description of Artificial Sequence: Synthetic oligonucleotide
uuaacuagaauuacaaggc

SEQ ID NO: 2732431 - RNA, 19 nt, Artificial Sequence
  Description of Artificial Sequence: Synthetic oligonucleotide
uaacauucaagcaaacugg

SEQ ID NO: 2732432 - RNA, 19 nt, Artificial Sequence
  Description of Artificial Sequence: Synthetic oligonucleotide
acugauucuaaucaacccc

SEQ ID NO: 2732433 - RNA, 19 nt, Artificial Sequence
  Description of Artificial Sequence: Synthetic oligonucleotide
gaaacuacaacaaaucucc

SEQ ID NO: 2732434 - RNA, 19 nt, Artificial Sequence
  Description of Artificial Sequence: Synthetic oligonucleotide
aacugauucuaaucaaccc

SEQ ID NO: 2732435 - RNA, 19 nt, Artificial Sequence
  Description of Artificial Sequence: Synthetic oligonucleotide
acaaacaacacucacaaga

SEQ ID NO: 2732436 - RNA, 19 nt, Artificial Sequence
  Description of Artificial Sequence: Synthetic oligonucleotide
auucaagcaaacuggauac

SEQ ID NO: 2732437 - RNA, 19 nt, Artificial Sequence
  Description of Artificial Sequence: Synthetic oligonucleotide
cuaagugcaauuaacauuc

SEQ ID NO: 2732438 - RNA, 19 nt, Artificial Sequence
  Description of Artificial Sequence: Synthetic oligonucleotide
cuuguggucacuauggucc

SEQ ID NO: 2732439 - RNA, 19 nt, Artificial Sequence
  Description of Artificial Sequence: Synthetic oligonucleotide
aggaccaagaaguuggccc

SEQ ID NO: 2732440 - RNA, 19 nt, Artificial Sequence
  Description of Artificial Sequence: Synthetic oligonucleotide
aaacugauucuaaucaacc

SEQ ID NO: 2732441 - RNA, 19 nt, Artificial Sequence
  Description of Artificial Sequence: Synthetic oligonucleotide
aaugacagaaaccaagaaa

SEQ ID NO: 2732442 - RNA, 19 nt, Artificial Sequence
  Description of Artificial Sequence: Synthetic oligonucleotide
uucuaaucaaccccaaaag

SEQ ID NO: 2732443 - RNA, 19 nt, Artificial Sequence
  Description of Artificial Sequence: Synthetic oligonucleotide
ucuaaucaaccccaaaagc

SEQ ID NO: 2732444 - RNA, 19 nt, Artificial Sequence
  Description of Artificial Sequence: Synthetic oligonucleotide
uuggguggaaaccaggagg

SEQ ID NO: 2732445 - RNA, 19 nt, Artificial Sequence
  Description of Artificial Sequence: Synthetic oligonucleotide
aacagaaggaaacucgcug

SEQ ID NO: 2732446 - RNA, 19 nt, Artificial Sequence
  Description of Artificial Sequence: Synthetic oligonucleotide
ucuacaacacccuuggcug

SEQ ID NO: 2732447 - RNA, 19 nt, Artificial Sequence
  Description of Artificial Sequence: Synthetic oligonucleotide
acuacaacaaaucucccug

SEQ ID NO: 2732448 - RNA, 19 nt, Artificial Sequence
  Description of Artificial Sequence: Synthetic oligonucleotide
agguaggugacccacacgg

SEQ ID NO: 2732449 - RNA, 19 nt, Artificial Sequence
  Description of Artificial Sequence: Synthetic oligonucleotide
ucucccaguagccagaggc

SEQ ID NO: 2732450 - RNA, 19 nt, Artificial Sequence
  Description of Artificial Sequence: Synthetic oligonucleotide
ucacuauggucccuaaugg

SEQ ID NO: 2732451 - RNA, 19 nt, Artificial Sequence
  Description of Artificial Sequence: Synthetic oligonucleotide
gugcaauuaacauucaagc

SEQ ID NO: 2732452 - RNA, 19 nt, Artificial Sequence
  Description of Artificial Sequence: Synthetic oligonucleotide
caaacucucuacaacaccc

SEQ ID NO: 2732453 - RNA, 19 nt, Artificial Sequence
  Description of Artificial Sequence: Synthetic oligonucleotide
aaaucucccugcuaaaacu

SEQ ID NO: 2732454 - RNA, 19 nt, Artificial Sequence
  Description of Artificial Sequence: Synthetic oligonucleotide
guucccuuaagacaguggg

SEQ ID NO: 2732455 - RNA, 19 nt, Artificial Sequence
  Description of Artificial Sequence: Synthetic oligonucleotide
gaaaccaggagguagguga

SEQ ID NO: 2732456 - RNA, 19 nt, Artificial Sequence
  Description of Artificial Sequence: Synthetic oligonucleotide
agaaacuacaacaaaucuc

SEQ ID NO: 2732457 - RNA, 19 nt, Artificial Sequence
  Description of Artificial Sequence: Synthetic oligonucleotide
cacaacagaaggaaacucg

SEQ ID NO: 2732458 - RNA, 19 nt, Artificial Sequence
  Description of Artificial Sequence: Synthetic oligonucleotide
ucccuaaugggccuugugg

SEQ ID NO: 2732459 - RNA, 19 nt, Artificial Sequence
  Description of Artificial Sequence: Synthetic oligonucleotide
ucaggguggacaaacaaac

SEQ ID NO: 2732460 - RNA, 19 nt, Artificial Sequence
  Description of Artificial Sequence: Synthetic oligonucleotide
agaauuacaaggccuaagu

SEQ ID NO: 2732461 - RNA, 19 nt, Artificial Sequence
  Description of Artificial Sequence: Synthetic oligonucleotide
cuccaaacaaacaacacuc

SEQ ID NO: 2732462 - RNA, 19 nt, Artificial Sequence
  Description of Artificial Sequence: Synthetic oligonucleotide
cacaaugacagaaaccaag

SEQ ID NO: 2732463 - RNA, 19 nt, Artificial Sequence
  Description of Artificial Sequence: Synthetic oligonucleotide
aguaggaggaccaagaagu

SEQ ID NO: 2732464 - RNA, 19 nt, Artificial Sequence
  Description of Artificial Sequence: Synthetic oligonucleotide
aaccccaaaagcuucagau

SEQ ID NO: 2732465 - RNA, 19 nt, Artificial Sequence
  Description of Artificial Sequence: Synthetic oligonucleotide
ugcaauuaacauucaagca

SEQ ID NO: 2732466 - RNA, 19 nt, Artificial Sequence
  Description of Artificial Sequence: Synthetic oligonucleotide
aaacucaggguggacaaac

SEQ ID NO: 2732467 - RNA, 19 nt, Artificial Sequence
  Description of Artificial Sequence: Synthetic oligonucleotide
auucuaaucaaccccaaaa

SEQ ID NO: 2732468 - RNA, 19 nt, Artificial Sequence
  Description of Artificial Sequence: Synthetic oligonucleotide
acuauggucccuaaugggc

SEQ ID NO: 2732469 - RNA, 19 nt, Artificial Sequence
  Description of Artificial Sequence: Synthetic oligonucleotide
uaagcaaacucucuacaac

SEQ ID NO: 2732470 - RNA, 19 nt, Artificial Sequence
  Description of Artificial Sequence: Synthetic oligonucleotide
uaacuagaauuacaaggcc

SEQ ID NO: 2732471 - RNA, 19 nt, Artificial Sequence
  Description of Artificial Sequence: Synthetic oligonucleotide
aagacagugggcaugggag

SEQ ID NO: 2732472 - RNA, 19 nt, Artificial Sequence
  Description of Artificial Sequence: Synthetic oligonucleotide
agugcaauuaacauucaag

SEQ ID NO: 2732473 - RNA, 19 nt, Artificial Sequence
  Description of Artificial Sequence: Synthetic oligonucleotide
gaauagggcacguagguga

SEQ ID NO: 2732474 - RNA, 19 nt, Artificial Sequence
  Description of Artificial Sequence: Synthetic oligonucleotide
uccucaagacccaaguacc

SEQ ID NO: 2732475 - RNA, 19 nt, Artificial Sequence
  Description of Artificial Sequence: Synthetic oligonucleotide
uucaaggcaggacuuuggg

SEQ ID NO: 2732476 - RNA, 19 nt, Artificial Sequence
  Description of Artificial Sequence: Synthetic oligonucleotide
gauacccuccucaagaccc

SEQ ID NO: 2732477 - RNA, 19 nt, Artificial Sequence
  Description of Artificial Sequence: Synthetic oligonucleotide
caaggcaggacuuugggug

SEQ ID NO: 2732478 - RNA, 19 nt, Artificial Sequence
  Description of Artificial Sequence: Synthetic oligonucleotide
caaacaacacucacaagac

SEQ ID NO: 2732479 - RNA, 19 nt, Artificial Sequence
  Description of Artificial Sequence: Synthetic oligonucleotide
gaauuacaaggccuaagug

SEQ ID NO: 2732480 - RNA, 19 nt, Artificial Sequence
  Description of Artificial Sequence: Synthetic oligonucleotide
acaacagaaggaaacucgc

SEQ ID NO: 2732481 - RNA, 19 nt, Artificial Sequence
  Description of Artificial Sequence: Synthetic oligonucleotide
acuuaacuagaauuacaag

SEQ ID NO: 2732482 - RNA, 19 nt, Artificial Sequence
  Description of Artificial Sequence: Synthetic oligonucleotide
acucacaagacuucaucuc

SEQ ID NO: 2732483 - RNA, 19 nt, Artificial Sequence
  Description of Artificial Sequence: Synthetic oligonucleotide
aacacccuuggcugggccc

SEQ ID NO: 2732484 - RNA, 19 nt, Artificial Sequence
  Description of Artificial Sequence: Synthetic oligonucleotide
aaacuggauacccuccuca

SEQ ID NO: 2732485 - RNA, 19 nt, Artificial Sequence
  Description of Artificial Sequence: Synthetic oligonucleotide
ugucugaggagaaacuaca

SEQ ID NO: 2732486 - RNA, 19 nt, Artificial Sequence
  Description of Artificial Sequence: Synthetic oligonucleotide
uaguaggaggaccaagaag

SEQ ID NO: 2732487 - RNA, 19 nt, Artificial Sequence
  Description of Artificial Sequence: Synthetic oligonucleotide
ucccugcuaaaacucaggg

SEQ ID NO: 2732488 - RNA, 19 nt, Artificial Sequence
  Description of Artificial Sequence: Synthetic oligonucleotide
aggacuuuggguggaaacc

SEQ ID NO: 2732489 - RNA, 19 nt, Artificial Sequence
  Description of Artificial Sequence: Synthetic oligonucleotide
ugugcuagcgcuacgcaac

SEQ ID NO: 2732490 - RNA, 19 nt, Artificial Sequence
  Description of Artificial Sequence: Synthetic oligonucleotide
auuacaaggccuaagugca

SEQ ID NO: 2732491 - RNA, 19 nt, Artificial Sequence
  Description of Artificial Sequence: Synthetic oligonucleotide
acaagacuucaucucuccc

SEQ ID NO: 2732492 - RNA, 19 nt, Artificial Sequence
  Description of Artificial Sequence: Synthetic oligonucleotide
acacucacaagacuucauc

SEQ ID NO: 2732493 - RNA, 19 nt, Artificial Sequence
  Description of Artificial Sequence: Synthetic oligonucleotide
aggaggaccaagaaguugg

SEQ ID NO: 2732494 - RNA, 19 nt, Artificial Sequence
  Description of Artificial Sequence: Synthetic oligonucleotide
aacuagaauuacaaggccu

SEQ ID NO: 2732495 - RNA, 19 nt, Artificial Sequence
  Description of Artificial Sequence: Synthetic oligonucleotide
ucaagcaaacuggauaccc

SEQ ID NO: 2732496 - RNA, 19 nt, Artificial Sequence
  Description of Artificial Sequence: Synthetic oligonucleotide
uuuggguggaaaccaggag

SEQ ID NO: 2732497 - RNA, 19 nt, Artificial Sequence
  Description of Artificial Sequence: Synthetic oligonucleotide
aauuaacauucaagcaaac

SEQ ID NO: 2732498 - RNA, 19 nt, Artificial Sequence
  Description of Artificial Sequence: Synthetic oligonucleotide
aaacaacacucacaagacu

SEQ ID NO: 2732499 - RNA, 19 nt, Artificial Sequence
  Description of Artificial Sequence: Synthetic oligonucleotide
uggcauucaaggcaggacu

SEQ ID NO: 2732500 - RNA, 19 nt, Artificial Sequence
  Description of Artificial Sequence: Synthetic oligonucleotide
ccugcuaaaacucagggug

SEQ ID NO: 2732501 - RNA, 19 nt, Artificial Sequence
  Description of Artificial Sequence: Synthetic oligonucleotide
aacaacacucacaagacuu

SEQ ID NO: 2732502 - RNA, 19 nt, Artificial Sequence
  Description of Artificial Sequence: Synthetic oligonucleotide
aaucucccugcuaaaacuc

SEQ ID NO: 2732503 - RNA, 19 nt, Artificial Sequence
  Description of Artificial Sequence: Synthetic oligonucleotide
uaaaacucaggguggacaa

SEQ ID NO: 2732504 - RNA, 19 nt, Artificial Sequence
  Description of Artificial Sequence: Synthetic oligonucleotide
acuuguggucacuaugguc

SEQ ID NO: 2732505 - RNA, 19 nt, Artificial Sequence
  Description of Artificial Sequence: Synthetic oligonucleotide
gaaacugauucuaaucaac

SEQ ID NO: 2732506 - RNA, 19 nt, Artificial Sequence
  Description of Artificial Sequence: Synthetic oligonucleotide
cuauggucccuaaugggcc

SEQ ID NO: 2732507 - RNA, 19 nt, Artificial Sequence
  Description of Artificial Sequence: Synthetic oligonucleotide
uguucccuuaagacagugg

SEQ ID NO: 2732508 - RNA, 19 nt, Artificial Sequence
  Description of Artificial Sequence: Synthetic oligonucleotide
ucugaugccggcuagcgua

SEQ ID NO: 2732509 - RNA, 19 nt, Artificial Sequence
  Description of Artificial Sequence: Synthetic oligonucleotide
agaugugcuagcgcuacgc

SEQ ID NO: 2732510 - RNA, 19 nt, Artificial Sequence
  Description of Artificial Sequence: Synthetic oligonucleotide
ucccuuaagacagugggca

SEQ ID NO: 2732511 - RNA, 19 nt, Artificial Sequence
  Description of Artificial Sequence: Synthetic oligonucleotide
agacuuguggucacuaugg

SEQ ID NO: 2732512 - RNA, 19 nt, Artificial Sequence
  Description of Artificial Sequence: Synthetic oligonucleotide
cuucaucucucccaguagc

SEQ ID NO: 2732513 - RNA, 19 nt, Artificial Sequence
  Description of Artificial Sequence: Synthetic oligonucleotide
aagcuucagaugugcuagc

SEQ ID NO: 2732514 - RNA, 19 nt, Artificial Sequence
  Description of Artificial Sequence: Synthetic oligonucleotide
aacaucugaugccggcuag

SEQ ID NO: 2732515 - RNA, 19 nt, Artificial Sequence
  Description of Artificial Sequence: Synthetic oligonucleotide
acguaggugagguggugcc

SEQ ID NO: 2732516 - RNA, 19 nt, Artificial Sequence
  Description of Artificial Sequence: Synthetic oligonucleotide
cuaaucaaccccaaaagcu

SEQ ID NO: 2732517 - RNA, 19 nt, Artificial Sequence
  Description of Artificial Sequence: Synthetic oligonucleotide
agguguucccuuaagacag

SEQ ID NO: 2732518 - RNA, 19 nt, Artificial Sequence
  Description of Artificial Sequence: Synthetic oligonucleotide
auuaacauucaagcaaacu

SEQ ID NO: 2732519 - RNA, 19 nt, Artificial Sequence
  Description of Artificial Sequence: Synthetic oligonucleotide
ucaagacccaaguaccacu

SEQ ID NO: 2732520 - RNA, 19 nt, Artificial Sequence
  Description of Artificial Sequence: Synthetic oligonucleotide
guaccacuguaguaggagg

SEQ ID NO: 2732521 - RNA, 19 nt, Artificial Sequence
  Description of Artificial Sequence: Synthetic oligonucleotide
caauuaacauucaagcaaa

SEQ ID NO: 2732522 - RNA, 19 nt, Artificial Sequence
  Description of Artificial Sequence: Synthetic oligonucleotide
uagaauuacaaggccuaag

SEQ ID NO: 2732523 - RNA, 19 nt, Artificial Sequence
  Description of Artificial Sequence: Synthetic oligonucleotide
agaaacugauucuaaucaa

SEQ ID NO: 2732524 - RNA, 19 nt, Artificial Sequence
  Description of Artificial Sequence: Synthetic oligonucleotide
aguaccacuguaguaggag

SEQ ID NO: 2732525 - RNA, 19 nt, Artificial Sequence
  Description of Artificial Sequence: Synthetic oligonucleotide
uaccacuguaguaggagga

SEQ ID NO: 2732526 - RNA, 19 nt, Artificial Sequence
  Description of Artificial Sequence: Synthetic oligonucleotide
aacauucaagcaaacugga

SEQ ID NO: 2732527 - RNA, 19 nt, Artificial Sequence
  Description of Artificial Sequence: Synthetic oligonucleotide
cugcuaaaacucagggugg

SEQ ID NO: 2732528 - RNA, 19 nt, Artificial Sequence
  Description of Artificial Sequence: Synthetic oligonucleotide
cuagcguaagcaaacucuc

SEQ ID NO: 2732529 - RNA, 19 nt, Artificial Sequence
  Description of Artificial Sequence: Synthetic oligonucleotide
cuacgcaacaucugaugcc

SEQ ID NO: 2732530 - RNA, 19 nt, Artificial Sequence
  Description of Artificial Sequence: Synthetic oligonucleotide
aggguggacaaacaaacaa

SEQ ID NO: 2732531 - RNA, 19 nt, Artificial Sequence
  Description of Artificial Sequence: Synthetic oligonucleotide
ggcacaaugacagaaacca

SEQ ID NO: 2732532 - RNA, 19 nt, Artificial Sequence
  Description of Artificial Sequence: Synthetic oligonucleotide
ucucccugcuaaaacucag

SEQ ID NO: 2732533 - RNA, 19 nt, Artificial Sequence
  Description of Artificial Sequence: Synthetic oligonucleotide
cacuuaacuagaauuacaa

SEQ ID NO: 2732534 - RNA, 19 nt, Artificial Sequence
  Description of Artificial Sequence: Synthetic oligonucleotide
cugauucuaaucaacccca

SEQ ID NO: 2732535 - RNA, 19 nt, Artificial Sequence
  Description of Artificial Sequence: Synthetic oligonucleotide
ugggcacaaugacagaaac

SEQ ID NO: 2732536 - RNA, 19 nt, Artificial Sequence
  Description of Artificial Sequence: Synthetic oligonucleotide
aaggccuaagugcaauuaa

SEQ ID NO: 2732537 - RNA, 19 nt, Artificial Sequence
  Description of Artificial Sequence: Synthetic oligonucleotide
cuacaacaaaucucccugc

SEQ ID NO: 2732538 - RNA, 19 nt, Artificial Sequence
  Description of Artificial Sequence: Synthetic oligonucleotide
aagugcaauuaacauucaa

SEQ ID NO: 2732539 - RNA, 19 nt, Artificial Sequence
  Description of Artificial Sequence: Synthetic oligonucleotide
uucccuuaagacagugggc

SEQ ID NO: 2732540 - RNA, 19 nt, Artificial Sequence
  Description of Artificial Sequence: Synthetic oligonucleotide
ugcacuuaacuagaauuac

SEQ ID NO: 2732541 - RNA, 19 nt, Artificial Sequence
  Description of Artificial Sequence: Synthetic oligonucleotide
gggagaauagggcacguag

SEQ ID NO: 2732542 - RNA, 19 nt, Artificial Sequence
  Description of Artificial Sequence: Synthetic oligonucleotide
cacaagacuucaucucucc

SEQ ID NO: 2732543 - RNA, 19 nt, Artificial Sequence
  Description of Artificial Sequence: Synthetic oligonucleotide
ucgcuggcauucaaggcag

SEQ ID NO: 2732544 - RNA, 19 nt, Artificial Sequence
  Description of Artificial Sequence: Synthetic oligonucleotide
agcgcuacgcaacaucuga

SEQ ID NO: 2732545 - RNA, 19 nt, Artificial Sequence
  Description of Artificial Sequence: Synthetic oligonucleotide
cugucugaggagaaacuac

SEQ ID NO: 2732546 - RNA, 19 nt, Artificial Sequence
  Description of Artificial Sequence: Synthetic oligonucleotide
ggacaaacaaacaaaccug

SEQ ID NO: 2732547 - RNA, 19 nt, Artificial Sequence
  Description of Artificial Sequence: Synthetic oligonucleotide
ccaaguaccacuguaguag

SEQ ID NO: 2732548 - RNA, 19 nt, Artificial Sequence
  Description of Artificial Sequence: Synthetic oligonucleotide
acaaugacagaaaccaaga

SEQ ID NO: 2732549 - RNA, 19 nt, Artificial Sequence
  Description of Artificial Sequence: Synthetic oligonucleotide
aggugacccacacggaguc

SEQ ID NO: 2732550 - RNA, 19 nt, Artificial Sequence
  Description of Artificial Sequence: Synthetic oligonucleotide
aacaaaucucccugcuaaa

SEQ ID NO: 2732551 - RNA, 19 nt, Artificial Sequence
  Description of Artificial Sequence: Synthetic oligonucleotide
aggagaaacuacaacaaau

SEQ ID NO: 2732552 - RNA, 19 nt, Artificial Sequence
  Description of Artificial Sequence: Synthetic oligonucleotide
cucagggaccccacgaccc

SEQ ID NO: 2732553 - RNA, 19 nt, Artificial Sequence
  Description of Artificial Sequence: Synthetic oligonucleotide
acaacacucacaagacuuc

SEQ ID NO: 2732554 - RNA, 19 nt, Artificial Sequence
  Description of Artificial Sequence: Synthetic oligonucleotide
caacaaaucucccugcuaa

SEQ ID NO: 2732555 - RNA, 19 nt, Artificial Sequence
  Description of Artificial Sequence: Synthetic oligonucleotide
caagacccaaguaccacug

SEQ ID NO: 2732556 - RNA, 19 nt, Artificial Sequence
  Description of Artificial Sequence: Synthetic oligonucleotide
ucaaggcaggacuuugggu

SEQ ID NO: 2732557 - RNA, 19 nt, Artificial Sequence
  Description of Artificial Sequence: Synthetic oligonucleotide
ucacaagacuucaucucuc

SEQ ID NO: 2732558 - RNA, 19 nt, Artificial Sequence
  Description of Artificial Sequence: Synthetic oligonucleotide
gacccaaguaccacuguag

SEQ ID NO: 2732559 - RNA, 19 nt, Artificial Sequence
  Description of Artificial Sequence: Synthetic oligonucleotide
guaagcaaacucucuacaa

SEQ ID NO: 2732560 - RNA, 19 nt, Artificial Sequence
  Description of Artificial Sequence: Synthetic oligonucleotide
cuggauacccuccucaaga

SEQ ID NO: 2732561 - RNA, 19 nt, Artificial Sequence
  Description of Artificial Sequence: Synthetic oligonucleotide
acuggauacccuccucaag

SEQ ID NO: 2732562 - RNA, 19 nt, Artificial Sequence
  Description of Artificial Sequence: Synthetic oligonucleotide
aggaaacucgcuggcauuc

SEQ ID NO: 2732563 - RNA, 19 nt, Artificial Sequence
  Description of Artificial Sequence: Synthetic oligonucleotide
cuacaacacccuuggcugg

SEQ ID NO: 2732564 - RNA, 19 nt, Artificial Sequence
  Description of Artificial Sequence: Synthetic oligonucleotide
cagacuuguggucacuaug

SEQ ID NO: 2732565 - RNA, 19 nt, Artificial Sequence
  Description of Artificial Sequence: Synthetic oligonucleotide
aggccuaagugcaauuaac

SEQ ID NO: 2732566 - RNA, 19 nt, Artificial Sequence
  Description of Artificial Sequence: Synthetic oligonucleotide
ugagguggugccucugggc

SEQ ID NO: 2732567 - RNA, 19 nt, Artificial Sequence
  Description of Artificial Sequence: Synthetic oligonucleotide
cuaaugggccuugugggag

SEQ ID NO: 2732568 - RNA, 19 nt, Artificial Sequence
  Description of Artificial Sequence: Synthetic oligonucleotide
uacaacacccuuggcuggg

SEQ ID NO: 2732569 - RNA, 19 nt, Artificial Sequence
  Description of Artificial Sequence: Synthetic oligonucleotide
gcuacgcaacaucugaugc

SEQ ID NO: 2732570 - RNA, 19 nt, Artificial Sequence
  Description of Artificial Sequence: Synthetic oligonucleotide
aaacucgcuggcauucaag

SEQ ID NO: 2732571 - RNA, 19 nt, Artificial Sequence
  Description of Artificial Sequence: Synthetic oligonucleotide
gagaauagggcacguaggu

SEQ ID NO: 2732572 - RNA, 19 nt, Artificial Sequence
  Description of Artificial Sequence: Synthetic oligonucleotide
guagccagaggcuggccag

SEQ ID NO: 2732573 - RNA, 19 nt, Artificial Sequence
  Description of Artificial Sequence: Synthetic oligonucleotide
accacuguaguaggaggac

SEQ ID NO: 2732574 - RNA, 19 nt, Artificial Sequence
  Description of Artificial Sequence: Synthetic oligonucleotide
agcguaagcaaacucucua

SEQ ID NO: 2732575 - RNA, 19 nt, Artificial Sequence
  Description of Artificial Sequence: Synthetic oligonucleotide
ggagaaacuacaacaaauc

SEQ ID NO: 2732576 - RNA, 19 nt, Artificial Sequence
  Description of Artificial Sequence: Synthetic oligonucleotide
guggacaaacaaacaaacc

SEQ ID NO: 2732577 - RNA, 19 nt, Artificial Sequence
  Description of Artificial Sequence: Synthetic oligonucleotide
cuaaaacucaggguggaca

SEQ ID NO: 2732578 - RNA, 19 nt, Artificial Sequence
  Description of Artificial Sequence: Synthetic oligonucleotide
cucccugcuaaaacucagg

SEQ ID NO: 2732579 - RNA, 19 nt, Artificial Sequence
  Description of Artificial Sequence: Synthetic oligonucleotide
aacucucuacaacacccuu

SEQ ID NO: 2732580 - RNA, 19 nt, Artificial Sequence
  Description of Artificial Sequence: Synthetic oligonucleotide
ucagaugugcuagcgcuac

SEQ ID NO: 2732581 - RNA, 19 nt, Artificial Sequence
  Description of Artificial Sequence: Synthetic oligonucleotide
acuagaauuacaaggccua

SEQ ID NO: 2732582 - RNA, 19 nt, Artificial Sequence
  Description of Artificial Sequence: Synthetic oligonucleotide
uggauacccuccucaagac

SEQ ID NO: 2732583 - RNA, 19 nt, Artificial Sequence
  Description of Artificial Sequence: Synthetic oligonucleotide
ugauucuaaucaaccccaa

SEQ ID NO: 2732584 - RNA, 19 nt, Artificial Sequence
  Description of Artificial Sequence: Synthetic oligonucleotide
caggacuuuggguggaaac

SEQ ID NO: 2732585 - RNA, 19 nt, Artificial Sequence
  Description of Artificial Sequence: Synthetic oligonucleotide
gacuucaucucucccagua

SEQ ID NO: 2732586 - RNA, 19 nt, Artificial Sequence
  Description of Artificial Sequence: Synthetic oligonucleotide
ccucugggcacaaugacag

SEQ ID NO: 2732587 - RNA, 19 nt, Artificial Sequence
  Description of Artificial Sequence: Synthetic oligonucleotide
cagguguucccuuaagaca

SEQ ID NO: 2732588 - RNA, 19 nt, Artificial Sequence
  Description of Artificial Sequence: Synthetic oligonucleotide
aaggaaacucgcuggcauu

SEQ ID NO: 2732589 - RNA, 19 nt, Artificial Sequence
  Description of Artificial Sequence: Synthetic oligonucleotide
aaacucucuacaacacccu

SEQ ID NO: 2732590 - RNA, 19 nt, Artificial Sequence
  Description of Artificial Sequence: Synthetic oligonucleotide
uaggaggaccaagaaguug

SEQ ID NO: 2732591 - RNA, 19 nt, Artificial Sequence
  Description of Artificial Sequence: Synthetic oligonucleotide
agcuucagaugugcuagcg

SEQ ID NO: 2732592 - RNA, 19 nt, Artificial Sequence
  Description of Artificial Sequence: Synthetic oligonucleotide
acaucugaugccggcuagc

SEQ ID NO: 2732593 - RNA, 19 nt, Artificial Sequence
  Description of Artificial Sequence: Synthetic oligonucleotide
acccaaguaccacuguagu

SEQ ID NO: 2732594 - RNA, 19 nt, Artificial Sequence
  Description of Artificial Sequence: Synthetic oligonucleotide
uagcguaagcaaacucucu

SEQ ID NO: 2732595 - RNA, 19 nt, Artificial Sequence
  Description of Artificial Sequence: Synthetic oligonucleotide
ggagaauagggcacguagg

SEQ ID NO: 2732596 - RNA, 19 nt, Artificial Sequence
  Description of Artificial Sequence: Synthetic oligonucleotide
cacccuccaaacaaacaac

SEQ ID NO: 2732597 - RNA, 19 nt, Artificial Sequence
  Description of Artificial Sequence: Synthetic oligonucleotide
gauucuaaucaaccccaaa

SEQ ID NO: 2732598 - RNA, 19 nt, Artificial Sequence
  Description of Artificial Sequence: Synthetic oligonucleotide
cuucagaugugcuagcgcu

SEQ ID NO: 2732599 - RNA, 19 nt, Artificial Sequence
  Description of Artificial Sequence: Synthetic oligonucleotide
caucugaugccggcuagcg

SEQ ID NO: 2732600 - RNA, 19 nt, Artificial Sequence
  Description of Artificial Sequence: Synthetic oligonucleotide
agaauagggcacguaggug

SEQ ID NO: 2732601 - RNA, 19 nt, Artificial Sequence
  Description of Artificial Sequence: Synthetic oligonucleotide
ugcuaaaacucagggugga

SEQ ID NO: 2732602 - RNA, 19 nt, Artificial Sequence
  Description of Artificial Sequence: Synthetic oligonucleotide
ccuugugggagaauagggc

SEQ ID NO: 2732603 - RNA, 19 nt, Artificial Sequence
  Description of Artificial Sequence: Synthetic oligonucleotide
ucaucucucccaguagcca

SEQ ID NO: 2732604 - RNA, 19 nt, Artificial Sequence
  Description of Artificial Sequence: Synthetic oligonucleotide
acucaggguggacaaacaa

SEQ ID NO: 2732605 - RNA, 19 nt, Artificial Sequence
  Description of Artificial Sequence: Synthetic oligonucleotide
ugccucugggcacaaugac

SEQ ID NO: 2732606 - RNA, 19 nt, Artificial Sequence
  Description of Artificial Sequence: Synthetic oligonucleotide
gggcccugcacuuaacuag

SEQ ID NO: 2732607 - RNA, 19 nt, Artificial Sequence
  Description of Artificial Sequence: Synthetic oligonucleotide
cacuguaguaggaggacca

SEQ ID NO: 2732608 - RNA, 19 nt, Artificial Sequence
  Description of Artificial Sequence: Synthetic oligonucleotide
cugcacuuaacuagaauua

SEQ ID NO: 2732609 - RNA, 19 nt, Artificial Sequence
  Description of Artificial Sequence: Synthetic oligonucleotide
gaugccggcuagcguaagc

SEQ ID NO: 2732610 - RNA, 19 nt, Artificial Sequence
  Description of Artificial Sequence: Synthetic oligonucleotide
cucuacaacacccuuggcu

SEQ ID NO: 2732611 - RNA, 19 nt, Artificial Sequence
  Description of Artificial Sequence: Synthetic oligonucleotide
uagggcacguaggugaggu

SEQ ID NO: 2732612 - RNA, 19 nt, Artificial Sequence
  Description of Artificial Sequence: Synthetic oligonucleotide
gcaaacucucuacaacacc

SEQ ID NO: 2732613 - RNA, 19 nt, Artificial Sequence
  Description of Artificial Sequence: Synthetic oligonucleotide
acaacaaaucucccugcua

SEQ ID NO: 2732614 - RNA, 19 nt, Artificial Sequence
  Description of Artificial Sequence: Synthetic oligonucleotide
ccagguguucccuuaagac

SEQ ID NO: 2732615 - RNA, 19 nt, Artificial Sequence
  Description of Artificial Sequence: Synthetic oligonucleotide
ucaaccccaaaagcuucag

SEQ ID NO: 2732616 - RNA, 19 nt, Artificial Sequence
  Description of Artificial Sequence: Synthetic oligonucleotide
gaugugcuagcgcuacgca

SEQ ID NO: 2732617 - RNA, 19 nt, Artificial Sequence
  Description of Artificial Sequence: Synthetic oligonucleotide
gacuuuggguggaaaccag

SEQ ID NO: 2732618 - RNA, 19 nt, Artificial Sequence
  Description of Artificial Sequence: Synthetic oligonucleotide
gugagguggugccucuggg

SEQ ID NO: 2732619 - RNA, 19 nt, Artificial Sequence
  Description of Artificial Sequence: Synthetic oligonucleotide
uaaugggccuugugggaga

SEQ ID NO: 2732620 - RNA, 19 nt, Artificial Sequence
  Description of Artificial Sequence: Synthetic oligonucleotide
agguggugccucugggcac

SEQ ID NO: 2732621 - RNA, 19 nt, Artificial Sequence
  Description of Artificial Sequence: Synthetic oligonucleotide
ggugccucugggcacaaug

SEQ ID NO: 2732622 - RNA, 19 nt, Artificial Sequence
  Description of Artificial Sequence: Synthetic oligonucleotide
acucucuacaacacccuug

SEQ ID NO: 2732623 - RNA, 19 nt, Artificial Sequence
  Description of Artificial Sequence: Synthetic oligonucleotide
agacccaaguaccacugua

SEQ ID NO: 2732624 - RNA, 19 nt, Artificial Sequence
  Description of Artificial Sequence: Synthetic oligonucleotide
cucaagacccaaguaccac

SEQ ID NO: 2732625 - RNA, 19 nt, Artificial Sequence
  Description of Artificial Sequence: Synthetic oligonucleotide
ucucuacaacacccuuggc

SEQ ID NO: 2732626 - RNA, 19 nt, Artificial Sequence
  Description of Artificial Sequence: Synthetic oligonucleotide
uuacaaggccuaagugcaa

SEQ ID NO: 2732627 - RNA, 19 nt, Artificial Sequence
  Description of Artificial Sequence: Synthetic oligonucleotide
cucaggguggacaaacaaa

SEQ ID NO: 2732628 - RNA, 19 nt, Artificial Sequence
  Description of Artificial Sequence: Synthetic oligonucleotide
augugcuagcgcuacgcaa

SEQ ID NO: 2732629 - RNA, 19 nt, Artificial Sequence
  Description of Artificial Sequence: Synthetic oligonucleotide
uagcgcuacgcaacaucug

SEQ ID NO: 2732630 - RNA, 19 nt, Artificial Sequence
  Description of Artificial Sequence: Synthetic oligonucleotide
guaguaggaggaccaagaa

SEQ ID NO: 2732631 - RNA, 19 nt, Artificial Sequence
  Description of Artificial Sequence: Synthetic oligonucleotide
gggcacguaggugaggugg

SEQ ID NO: 2732632 - RNA, 19 nt, Artificial Sequence
  Description of Artificial Sequence: Synthetic oligonucleotide
uacaaggccuaagugcaau

SEQ ID NO: 2732633 - RNA, 19 nt, Artificial Sequence
  Description of Artificial Sequence: Synthetic oligonucleotide
ggugagguggugccucugg

SEQ ID NO: 2732634 - RNA, 19 nt, Artificial Sequence
  Description of Artificial Sequence: Synthetic oligonucleotide
cuguaguaggaggaccaag

SEQ ID NO: 2732635 - RNA, 19 nt, Artificial Sequence
  Description of Artificial Sequence: Synthetic oligonucleotide
cucacaagacuucaucucu

SEQ ID NO: 2732636 - RNA, 19 nt, Artificial Sequence
  Description of Artificial Sequence: Synthetic oligonucleotide
agaaggaaacucgcuggca

SEQ ID NO: 2732637 - RNA, 19 nt, Artificial Sequence
  Description of Artificial Sequence: Synthetic oligonucleotide
uuaagacagugggcauggg

SEQ ID NO: 2732638 - RNA, 19 nt, Artificial Sequence
  Description of Artificial Sequence: Synthetic oligonucleotide
aaaacucaggguggacaaa

SEQ ID NO: 2732639 - RNA, 19 nt, Artificial Sequence
  Description of Artificial Sequence: Synthetic oligonucleotide
ugggccuugugggagaaua

SEQ ID NO: 2732640 - RNA, 19 nt, Artificial Sequence
  Description of Artificial Sequence: Synthetic oligonucleotide
gugacccacacggaguccc

SEQ ID NO: 2732641 - RNA, 19 nt, Artificial Sequence
  Description of Artificial Sequence: Synthetic oligonucleotide
aacacucacaagacuucau

SEQ ID NO: 2732642 - RNA, 19 nt, Artificial Sequence
  Description of Artificial Sequence: Synthetic oligonucleotide
gccuugugggagaauaggg

SEQ ID NO: 2732643 - RNA, 19 nt, Artificial Sequence
  Description of Artificial Sequence: Synthetic oligonucleotide
cacguaggugagguggugc

SEQ ID NO: 2732644 - RNA, 19 nt, Artificial Sequence
  Description of Artificial Sequence: Synthetic oligonucleotide
aacucaggguggacaaaca

SEQ ID NO: 2732645 - RNA, 19 nt, Artificial Sequence
  Description of Artificial Sequence: Synthetic oligonucleotide
acaacacccuuggcugggc

SEQ ID NO: 2732646 - RNA, 19 nt, Artificial Sequence
  Description of Artificial Sequence: Synthetic oligonucleotide
cuagcgcuacgcaacaucu

SEQ ID NO: 2732647 - RNA, 19 nt, Artificial Sequence
  Description of Artificial Sequence: Synthetic oligonucleotide
cacucacaagacuucaucu

SEQ ID NO: 2732648 - RNA, 19 nt, Artificial Sequence
  Description of Artificial Sequence: Synthetic oligonucleotide
gaaacucgcuggcauucaa

SEQ ID NO: 2732649 - RNA, 19 nt, Artificial Sequence
  Description of Artificial Sequence: Synthetic oligonucleotide
ugggcccugcacuuaacua

SEQ ID NO: 2732650 - RNA, 19 nt, Artificial Sequence
  Description of Artificial Sequence: Synthetic oligonucleotide
ucucucccaguagccagag

SEQ ID NO: 2732651 - RNA, 19 nt, Artificial Sequence
  Description of Artificial Sequence: Synthetic oligonucleotide
aaguaccacuguaguagga

SEQ ID NO: 2732652 - RNA, 19 nt, Artificial Sequence
  Description of Artificial Sequence: Synthetic oligonucleotide
ggauacccuccucaagacc

SEQ ID NO: 2732653 - RNA, 19 nt, Artificial Sequence
  Description of Artificial Sequence: Synthetic oligonucleotide
caggagguaggugacccac

SEQ ID NO: 2732654 - RNA, 19 nt, Artificial Sequence
  Description of Artificial Sequence: Synthetic oligonucleotide
gcuucagaugugcuagcgc

SEQ ID NO: 2732655 - RNA, 19 nt, Artificial Sequence
  Description of Artificial Sequence: Synthetic oligonucleotide
gcguaagcaaacucucuac

SEQ ID NO: 2732656 - RNA, 19 nt, Artificial Sequence
  Description of Artificial Sequence: Synthetic oligonucleotide
aucugaugccggcuagcgu

SEQ ID NO: 2732657 - RNA, 19 nt, Artificial Sequence
  Description of Artificial Sequence: Synthetic oligonucleotide
ggagguaggugacccacac

SEQ ID NO: 2732658 - RNA, 19 nt, Artificial Sequence
  Description of Artificial Sequence: Synthetic oligonucleotide
ggccuugugggagaauagg

SEQ ID NO: 2732659 - RNA, 19 nt, Artificial Sequence
  Description of Artificial Sequence: Synthetic oligonucleotide
augccggcuagcguaagca

SEQ ID NO: 2732660 - RNA, 19 nt, Artificial Sequence
  Description of Artificial Sequence: Synthetic oligonucleotide
accaagaaacugauucuaa

SEQ ID NO: 2732661 - RNA, 19 nt, Artificial Sequence
  Description of Artificial Sequence: Synthetic oligonucleotide
acccacacggaguccccag

SEQ ID NO: 2732662 - RNA, 19 nt, Artificial Sequence
  Description of Artificial Sequence: Synthetic oligonucleotide
acagugggcaugggagggg

SEQ ID NO: 2732663 - RNA, 19 nt, Artificial Sequence
  Description of Artificial Sequence: Synthetic oligonucleotide
cagaugugcuagcgcuacg

SEQ ID NO: 2732664 - RNA, 19 nt, Artificial Sequence
  Description of Artificial Sequence: Synthetic oligonucleotide
acaaggccuaagugcaauu

SEQ ID NO: 2732665 - RNA, 19 nt, Artificial Sequence
  Description of Artificial Sequence: Synthetic oligonucleotide
aucaaccccaaaagcuuca

SEQ ID NO: 2732666 - RNA, 19 nt, Artificial Sequence
  Description of Artificial Sequence: Synthetic oligonucleotide
caagcaaacuggauacccu

SEQ ID NO: 2732667 - RNA, 19 nt, Artificial Sequence
  Description of Artificial Sequence: Synthetic oligonucleotide
ugggaggggccugucugag

SEQ ID NO: 2732668 - RNA, 19 nt, Artificial Sequence
  Description of Artificial Sequence: Synthetic oligonucleotide
ggccuaagugcaauuaaca

SEQ ID NO: 2732669 - RNA, 19 nt, Artificial Sequence
  Description of Artificial Sequence: Synthetic oligonucleotide
aguccccagcucagggacc

SEQ ID NO: 2732670 - RNA, 19 nt, Artificial Sequence
  Description of Artificial Sequence: Synthetic oligonucleotide
caggguggacaaacaaaca

SEQ ID NO: 2732671 - RNA, 19 nt, Artificial Sequence
  Description of Artificial Sequence: Synthetic oligonucleotide
auagggcacguaggugagg

SEQ ID NO: 2732672 - RNA, 19 nt, Artificial Sequence
  Description of Artificial Sequence: Synthetic oligonucleotide
gucccuaaugggccuugug

SEQ ID NO: 2732673 - RNA, 19 nt, Artificial Sequence
  Description of Artificial Sequence: Synthetic oligonucleotide
caacacucacaagacuuca

SEQ ID NO: 2732674 - RNA, 19 nt, Artificial Sequence
  Description of Artificial Sequence: Synthetic oligonucleotide
caacacccuuggcugggcc

SEQ ID NO: 2732675 - RNA, 19 nt, Artificial Sequence
  Description of Artificial Sequence: Synthetic oligonucleotide
aucucccugcuaaaacuca

SEQ ID NO: 2732676 - RNA, 19 nt, Artificial Sequence
  Description of Artificial Sequence: Synthetic oligonucleotide
gcuagcguaagcaaacucu

SEQ ID NO: 2732677 - RNA, 19 nt, Artificial Sequence
  Description of Artificial Sequence: Synthetic oligonucleotide
gcuagcgcuacgcaacauc

SEQ ID NO: 2732678 - RNA, 19 nt, Artificial Sequence
  Description of Artificial Sequence: Synthetic oligonucleotide
ggacuuuggguggaaacca

SEQ ID NO: 2732679 - RNA, 19 nt, Artificial Sequence
  Description of Artificial Sequence: Synthetic oligonucleotide
ucccgggcacccuccaaac

SEQ ID NO: 2732680 - RNA, 19 nt, Artificial Sequence
  Description of Artificial Sequence: Synthetic oligonucleotide
ugccggcuagcguaagcaa

SEQ ID NO: 2732681 - RNA, 19 nt, Artificial Sequence
  Description of Artificial Sequence: Synthetic oligonucleotide
agugggcaugggaggggcc

SEQ ID NO: 2732682 - RNA, 19 nt, Artificial Sequence
  Description of Artificial Sequence: Synthetic oligonucleotide
gaccaagaaguuggcccug

SEQ ID NO: 2732683 - RNA, 19 nt, Artificial Sequence
  Description of Artificial Sequence: Synthetic oligonucleotide
cugggcacaaugacagaaa

SEQ ID NO: 2732684 - RNA, 19 nt, Artificial Sequence
  Description of Artificial Sequence: Synthetic oligonucleotide
gacuuguggucacuauggu

SEQ ID NO: 2732685 - RNA, 19 nt, Artificial Sequence
  Description of Artificial Sequence: Synthetic oligonucleotide
ggcccuggcuccuggaagc

SEQ ID NO: 2732686 - RNA, 19 nt, Artificial Sequence
  Description of Artificial Sequence: Synthetic oligonucleotide
gcacuuaacuagaauuaca

SEQ ID NO: 2732687 - RNA, 19 nt, Artificial Sequence
  Description of Artificial Sequence: Synthetic oligonucleotide
ccggcuagcguaagcaaac

SEQ ID NO: 2732688 - RNA, 19 nt, Artificial Sequence
  Description of Artificial Sequence: Synthetic oligonucleotide
gggcacaaugacagaaacc

SEQ ID NO: 2732689 - RNA, 19 nt, Artificial Sequence
  Description of Artificial Sequence: Synthetic oligonucleotide
gaggggccugucugaggag

SEQ ID NO: 2732690 - RNA, 19 nt, Artificial Sequence
  Description of Artificial Sequence: Synthetic oligonucleotide
cacuucccgggcacccucc

SEQ ID NO: 2732691 - RNA, 19 nt, Artificial Sequence
  Description of Artificial Sequence: Synthetic oligonucleotide
cuagaauuacaaggccuaa

SEQ ID NO: 2732692 - RNA, 19 nt, Artificial Sequence
  Description of Artificial Sequence: Synthetic oligonucleotide
gcucagggaccccacgacc

SEQ ID NO: 2732693 - RNA, 19 nt, Artificial Sequence
  Description of Artificial Sequence: Synthetic oligonucleotide
acacccuuggcugggcccu

SEQ ID NO: 2732694 - RNA, 19 nt, Artificial Sequence
  Description of Artificial Sequence: Synthetic oligonucleotide
uggccagacuuguggucac

SEQ ID NO: 2732695 - RNA, 19 nt, Artificial Sequence
  Description of Artificial Sequence: Synthetic oligonucleotide
ccuuaagacagugggcaug

SEQ ID NO: 2732696 - RNA, 19 nt, Artificial Sequence
  Description of Artificial Sequence: Synthetic oligonucleotide
caacagaaggaaacucgcu

SEQ ID NO: 2732697 - RNA, 19 nt, Artificial Sequence
  Description of Artificial Sequence: Synthetic oligonucleotide
cccaaaagcuucagaugug

SEQ ID NO: 2732698 - RNA, 19 nt, Artificial Sequence
  Description of Artificial Sequence: Synthetic oligonucleotide
ccugcacuuaacuagaauu

SEQ ID NO: 2732699 - RNA, 19 nt, Artificial Sequence
  Description of Artificial Sequence: Synthetic oligonucleotide
ggcuagcguaagcaaacuc

SEQ ID NO: 2732700 - RNA, 19 nt, Artificial Sequence
  Description of Artificial Sequence: Synthetic oligonucleotide
aggggccugucugaggaga

SEQ ID NO: 2732701 - RNA, 19 nt, Artificial Sequence
  Description of Artificial Sequence: Synthetic oligonucleotide
ggaccaagaaguuggcccu

SEQ ID NO: 2732702 - RNA, 19 nt, Artificial Sequence
  Description of Artificial Sequence: Synthetic oligonucleotide
uggucacuauggucccuaa

SEQ ID NO: 2732703 - RNA, 19 nt, Artificial Sequence
  Description of Artificial Sequence: Synthetic oligonucleotide
agaaaccaagaaacugauu

SEQ ID NO: 2732704 - RNA, 19 nt, Artificial Sequence
  Description of Artificial Sequence: Synthetic oligonucleotide
uguggucacuauggucccu

SEQ ID NO: 2732705 - RNA, 19 nt, Artificial Sequence
  Description of Artificial Sequence: Synthetic oligonucleotide
gucugaggagaaacuacaa

SEQ ID NO: 2732706 - RNA, 19 nt, Artificial Sequence
  Description of Artificial Sequence: Synthetic oligonucleotide
ggaaaccaggagguaggug

SEQ ID NO: 2732707 - RNA, 19 nt, Artificial Sequence
  Description of Artificial Sequence: Synthetic oligonucleotide
gugcuagcgcuacgcaaca

SEQ ID NO: 2732708 - RNA, 19 nt, Artificial Sequence
  Description of Artificial Sequence: Synthetic oligonucleotide
agggcacguaggugaggug

SEQ ID NO: 2732709 - RNA, 19 nt, Artificial Sequence
  Description of Artificial Sequence: Synthetic oligonucleotide
caaccccaaaagcuucaga

SEQ ID NO: 2732710 - RNA, 19 nt, Artificial Sequence
  Description of Artificial Sequence: Synthetic oligonucleotide
gccuaagugcaauuaacau

SEQ ID NO: 2732711 - RNA, 19 nt, Artificial Sequence
  Description of Artificial Sequence: Synthetic oligonucleotide
ccuaagugcaauuaacauu

SEQ ID NO: 2732712 - RNA, 19 nt, Artificial Sequence
  Description of Artificial Sequence: Synthetic oligonucleotide
ugaugccggcuagcguaag

SEQ ID NO: 2732713 - RNA, 19 nt, Artificial Sequence
  Description of Artificial Sequence: Synthetic oligonucleotide
ggccugucugaggagaaac

SEQ ID NO: 2732714 - RNA, 19 nt, Artificial Sequence
  Description of Artificial Sequence: Synthetic oligonucleotide
gugccucugggcacaauga

SEQ ID NO: 2732715 - RNA, 19 nt, Artificial Sequence
  Description of Artificial Sequence: Synthetic oligonucleotide
caaggccuaagugcaauua

SEQ ID NO: 2732716 - RNA, 19 nt, Artificial Sequence
  Description of Artificial Sequence: Synthetic oligonucleotide
uggucccuaaugggccuug

SEQ ID NO: 2732717 - RNA, 19 nt, Artificial Sequence
  Description of Artificial Sequence: Synthetic oligonucleotide
ugggagaauagggcacgua

SEQ ID NO: 2732718 - RNA, 19 nt, Artificial Sequence
  Description of Artificial Sequence: Synthetic oligonucleotide
uagccagaggcuggccaga

SEQ ID NO: 2732719 - RNA, 19 nt, Artificial Sequence
  Description of Artificial Sequence: Synthetic oligonucleotide
ccacuguaguaggaggacc

SEQ ID NO: 2732720 - RNA, 19 nt, Artificial Sequence
  Description of Artificial Sequence: Synthetic oligonucleotide
cgcaacaucugaugccggc

SEQ ID NO: 2732721 - RNA, 19 nt, Artificial Sequence
  Description of Artificial Sequence: Synthetic oligonucleotide
cguaagcaaacucucuaca

SEQ ID NO: 2732722 - RNA, 19 nt, Artificial Sequence
  Description of Artificial Sequence: Synthetic oligonucleotide
auacccuccucaagaccca

SEQ ID NO: 2732723 - RNA, 19 nt, Artificial Sequence
  Description of Artificial Sequence: Synthetic oligonucleotide
ccuaaugggccuuguggga

SEQ ID NO: 2732724 - RNA, 19 nt, Artificial Sequence
  Description of Artificial Sequence: Synthetic oligonucleotide
agcccagguguucccuuaa

SEQ ID NO: 2732725 - RNA, 19 nt, Artificial Sequence
  Description of Artificial Sequence: Synthetic oligonucleotide
ggaggaccaagaaguuggc

SEQ ID NO: 2732726 - RNA, 19 nt, Artificial Sequence
  Description of Artificial Sequence: Synthetic oligonucleotide
acccuuggcugggcccugc

SEQ ID NO: 2732727 - RNA, 19 nt, Artificial Sequence
  Description of Artificial Sequence: Synthetic oligonucleotide
gcuaaaacucaggguggac

SEQ ID NO: 2732728 - RNA, 19 nt, Artificial Sequence
  Description of Artificial Sequence: Synthetic oligonucleotide
cgcuacgcaacaucugaug

SEQ ID NO: 2732729 - RNA, 19 nt, Artificial Sequence
  Description of Artificial Sequence: Synthetic oligonucleotide
cugaugccggcuagcguaa

SEQ ID NO: 2732730 - RNA, 19 nt, Artificial Sequence
  Description of Artificial Sequence: Synthetic oligonucleotide
ccucaagacccaaguacca

SEQ ID NO: 2732731 - RNA, 19 nt, Artificial Sequence
  Description of Artificial Sequence: Synthetic oligonucleotide
ccaagaaguuggcccuggc

SEQ ID NO: 2732732 - RNA, 19 nt, Artificial Sequence
  Description of Artificial Sequence: Synthetic oligonucleotide
gggccuugugggagaauag

SEQ ID NO: 2732733 - RNA, 19 nt, Artificial Sequence
  Description of Artificial Sequence: Synthetic oligonucleotide
ccaguagccagaggcuggc

SEQ ID NO: 2732734 - RNA, 19 nt, Artificial Sequence
  Description of Artificial Sequence: Synthetic oligonucleotide
ccaagaaacugauucuaau

SEQ ID NO: 2732735 - RNA, 19 nt, Artificial Sequence
  Description of Artificial Sequence: Synthetic oligonucleotide
cucugggcacaaugacaga

SEQ ID NO: 2732736 - RNA, 19 nt, Artificial Sequence
  Description of Artificial Sequence: Synthetic oligonucleotide
ugcuagcgcuacgcaacau

SEQ ID NO: 2732737 - RNA, 19 nt, Artificial Sequence
  Description of Artificial Sequence: Synthetic oligonucleotide
gaaguuggcccuggcuccu

SEQ ID NO: 2732738 - RNA, 19 nt, Artificial Sequence
  Description of Artificial Sequence: Synthetic oligonucleotide
caguagccagaggcuggcc

SEQ ID NO: 2732739 - RNA, 19 nt, Artificial Sequence
  Description of Artificial Sequence: Synthetic oligonucleotide
gccucugggcacaaugaca

SEQ ID NO: 2732740 - RNA, 19 nt, Artificial Sequence
  Description of Artificial Sequence: Synthetic oligonucleotide
ggcccugcacuuaacuaga

SEQ ID NO: 2732741 - RNA, 19 nt, Artificial Sequence
  Description of Artificial Sequence: Synthetic oligonucleotide
gcccagguguucccuuaag

SEQ ID NO: 2732742 - RNA, 19 nt, Artificial Sequence
  Description of Artificial Sequence: Synthetic oligonucleotide
gcuggcauucaaggcagga

SEQ ID NO: 2732743 - RNA, 19 nt, Artificial Sequence
  Description of Artificial Sequence: Synthetic oligonucleotide
ggaaacucgcuggcauuca

SEQ ID NO: 2732744 - RNA, 19 nt, Artificial Sequence
  Description of Artificial Sequence: Synthetic oligonucleotide
aggcaggacuuugggugga

SEQ ID NO: 2732745 - RNA, 19 nt, Artificial Sequence
  Description of Artificial Sequence: Synthetic oligonucleotide
cccagguguucccuuaaga

SEQ ID NO: 2732746 - RNA, 19 nt, Artificial Sequence
  Description of Artificial Sequence: Synthetic oligonucleotide
gguggugccucugggcaca

SEQ ID NO: 2732747 - RNA, 19 nt, Artificial Sequence
  Description of Artificial Sequence: Synthetic oligonucleotide
cugggcccugcacuuaacu

SEQ ID NO: 2732748 - RNA, 19 nt, Artificial Sequence
  Description of Artificial Sequence: Synthetic oligonucleotide
cccacacggaguccccagc

SEQ ID NO: 2732749 - RNA, 19 nt, Artificial Sequence
  Description of Artificial Sequence: Synthetic oligonucleotide
cccaaguaccacuguagua

SEQ ID NO: 2732750 - RNA, 19 nt, Artificial Sequence
  Description of Artificial Sequence: Synthetic oligonucleotide
ggugacccacacggagucc

SEQ ID NO: 2732751 - RNA, 19 nt, Artificial Sequence
  Description of Artificial Sequence: Synthetic oligonucleotide
ccgggcacccuccaaacaa

SEQ ID NO: 2732752 - RNA, 19 nt, Artificial Sequence
  Description of Artificial Sequence: Synthetic oligonucleotide
gcacaaugacagaaaccaa

SEQ ID NO: 2732753 - RNA, 19 nt, Artificial Sequence
  Description of Artificial Sequence: Synthetic oligonucleotide
gcaacaucugaugccggcu

SEQ ID NO: 2732754 - RNA, 19 nt, Artificial Sequence
  Description of Artificial Sequence: Synthetic oligonucleotide
ggcuggccagacuuguggu

SEQ ID NO: 2732755 - RNA, 19 nt, Artificial Sequence
  Description of Artificial Sequence: Synthetic oligonucleotide
gccggcuagcguaagcaaa

SEQ ID NO: 2732756 - RNA, 19 nt, Artificial Sequence
  Description of Artificial Sequence: Synthetic oligonucleotide
uccccagcucagggacccc

SEQ ID NO: 2732757 - RNA, 19 nt, Artificial Sequence
  Description of Artificial Sequence: Synthetic oligonucleotide
cccugcuaaaacucagggu

SEQ ID NO: 2732758 - RNA, 19 nt, Artificial Sequence
  Description of Artificial Sequence: Synthetic oligonucleotide
ggcauucaaggcaggacuu

SEQ ID NO: 2732759 - RNA, 19 nt, Artificial Sequence
  Description of Artificial Sequence: Synthetic oligonucleotide
ccacuucccgggcacccuc

SEQ ID NO: 2732760 - RNA, 19 nt, Artificial Sequence
  Description of Artificial Sequence: Synthetic oligonucleotide
uggcugggcccugcacuua

SEQ ID NO: 2732761 - RNA, 19 nt, Artificial Sequence
  Description of Artificial Sequence: Synthetic oligonucleotide
ccuccucaagacccaagua

SEQ ID NO: 2732762 - RNA, 19 nt, Artificial Sequence
  Description of Artificial Sequence: Synthetic oligonucleotide
gcaggacuuuggguggaaa

SEQ ID NO: 2732763 - RNA, 19 nt, Artificial Sequence
  Description of Artificial Sequence: Synthetic oligonucleotide
cacccuuggcugggcccug

SEQ ID NO: 2732764 - RNA, 19 nt, Artificial Sequence
  Description of Artificial Sequence: Synthetic oligonucleotide
augggccuugugggagaau

SEQ ID NO: 2732765 - RNA, 19 nt, Artificial Sequence
  Description of Artificial Sequence: Synthetic oligonucleotide
gcaugggaggggccugucu

SEQ ID NO: 2732766 - RNA, 19 nt, Artificial Sequence
  Description of Artificial Sequence: Synthetic oligonucleotide
uggugccucugggcacaau

SEQ ID NO: 2732767 - RNA, 19 nt, Artificial Sequence
  Description of Artificial Sequence: Synthetic oligonucleotide
gguguucccuuaagacagu

SEQ ID NO: 2732768 - RNA, 19 nt, Artificial Sequence
  Description of Artificial Sequence: Synthetic oligonucleotide
ggggccugucugaggagaa

SEQ ID NO: 2732769 - RNA, 19 nt, Artificial Sequence
  Description of Artificial Sequence: Synthetic oligonucleotide
ccagacuuguggucacuau

SEQ ID NO: 2732770 - RNA, 19 nt, Artificial Sequence
  Description of Artificial Sequence: Synthetic oligonucleotide
ccacacggaguccccagcu

SEQ ID NO: 2732771 - RNA, 19 nt, Artificial Sequence
  Description of Artificial Sequence: Synthetic oligonucleotide
ggguggaaaccaggaggua

SEQ ID NO: 2732772 - RNA, 19 nt, Artificial Sequence
  Description of Artificial Sequence: Synthetic oligonucleotide
ggcaggacuuuggguggaa

SEQ ID NO: 2732773 - RNA, 19 nt, Artificial Sequence
  Description of Artificial Sequence: Synthetic oligonucleotide
gggccugucugaggagaaa

SEQ ID NO: 2732774 - RNA, 19 nt, Artificial Sequence
  Description of Artificial Sequence: Synthetic oligonucleotide
cccuuaagacagugggcau

SEQ ID NO: 2732775 - RNA, 19 nt, Artificial Sequence
  Description of Artificial Sequence: Synthetic oligonucleotide
cccgggcacccuccaaaca

SEQ ID NO: 2732776 - RNA, 19 nt, Artificial Sequence
  Description of Artificial Sequence: Synthetic oligonucleotide
cccugcacuuaacuagaau

SEQ ID NO: 2732777 - RNA, 19 nt, Artificial Sequence
  Description of Artificial Sequence: Synthetic oligonucleotide
cgggcacccuccaaacaaa

SEQ ID NO: 2732778 - RNA, 19 nt, Artificial Sequence
  Description of Artificial Sequence: Synthetic oligonucleotide
gcccugcacuuaacuagaa

SEQ ID NO: 2732779 - RNA, 19 nt, Artificial Sequence
  Description of Artificial Sequence: Synthetic oligonucleotide
guggugccucugggcacaa

SEQ ID NO: 2732780 - RNA, 19 nt, Artificial Sequence
  Description of Artificial Sequence: Synthetic oligonucleotide
ggucccuaaugggccuugu

SEQ ID NO: 2732781 - RNA, 19 nt, Artificial Sequence
  Description of Artificial Sequence: Synthetic oligonucleotide
gcgcuacgcaacaucugau

SEQ ID NO: 2732782 - RNA, 19 nt, Artificial Sequence
  Description of Artificial Sequence: Synthetic oligonucleotide
cggcuagcguaagcaaacu

SEQ ID NO: 2732783 - RNA, 19 nt, Artificial Sequence
  Description of Artificial Sequence: Synthetic oligonucleotide
aaaauaucuccuuaaaagg

SEQ ID NO: 2732784 - RNA, 19 nt, Artificial Sequence
  Description of Artificial Sequence: Synthetic oligonucleotide
uauaaaaggaaauaaagug

SEQ ID NO: 2732785 - RNA, 19 nt, Artificial Sequence
  Description of Artificial Sequence: Synthetic oligonucleotide
aaaaguacaacauuacugu

SEQ ID NO: 2732786 - RNA, 19 nt, Artificial Sequence
  Description of Artificial Sequence: Synthetic oligonucleotide
uaaaaguacaacauuacug

SEQ ID NO: 2732787 - RNA, 19 nt, Artificial Sequence
  Description of Artificial Sequence: Synthetic oligonucleotide
aauaaagugacagagaaau

SEQ ID NO: 2732788 - RNA, 19 nt, Artificial Sequence
  Description of Artificial Sequence: Synthetic oligonucleotide
ucuucagcuauauaaaagg

SEQ ID NO: 2732789 - RNA, 19 nt, Artificial Sequence
  Description of Artificial Sequence: Synthetic oligonucleotide
aacauuacuguuuacauau

SEQ ID NO: 2732790 - RNA, 19 nt, Artificial Sequence
  Description of Artificial Sequence: Synthetic oligonucleotide
aaauaucuccuuaaaaggc

SEQ ID NO: 2732791 - RNA, 19 nt, Artificial Sequence
  Description of Artificial Sequence: Synthetic oligonucleotide
aaaggaaauaaagugacag

SEQ ID NO: 2732792 - RNA, 19 nt, Artificial Sequence
  Description of Artificial Sequence: Synthetic oligonucleotide
uauagaaugaguuccagga

SEQ ID NO: 2732793 - RNA, 19 nt, Artificial Sequence
  Description of Artificial Sequence: Synthetic oligonucleotide
ugagccaugacaaagauua

SEQ ID NO: 2732794 - RNA, 19 nt, Artificial Sequence
  Description of Artificial Sequence: Synthetic oligonucleotide
aagaauauauuugaaguag

SEQ ID NO: 2732795 - RNA, 19 nt, Artificial Sequence
  Description of Artificial Sequence: Synthetic oligonucleotide
uuuacuucaaugaugucug

SEQ ID NO: 2732796 - RNA, 19 nt, Artificial Sequence
  Description of Artificial Sequence: Synthetic oligonucleotide
uuuuaugacaaauaagccu

SEQ ID NO: 2732797 - RNA, 19 nt, Artificial Sequence
  Description of Artificial Sequence: Synthetic oligonucleotide
aacaccauauuauaguucu

SEQ ID NO: 2732798 - RNA, 19 nt, Artificial Sequence
  Description of Artificial Sequence: Synthetic oligonucleotide
uaaaaggaaauaaagugac

SEQ ID NO: 2732799 - RNA, 19 nt, Artificial Sequence
  Description of Artificial Sequence: Synthetic oligonucleotide
aguucuguaacacaaaaca

SEQ ID NO: 2732800 - RNA, 19 nt, Artificial Sequence
  Description of Artificial Sequence: Synthetic oligonucleotide
auauauuugaaguagguaa

SEQ ID NO: 2732801 - RNA, 19 nt, Artificial Sequence
  Description of Artificial Sequence: Synthetic oligonucleotide
uuuaugacaaauaagccua

SEQ ID NO: 2732802 - RNA, 19 nt, Artificial Sequence
  Description of Artificial Sequence: Synthetic oligonucleotide
gaaaacaugagauaggaaa

SEQ ID NO: 2732803 - RNA, 19 nt, Artificial Sequence
  Description of Artificial Sequence: Synthetic oligonucleotide
uuauaaaaguacaacauua

SEQ ID NO: 2732804 - RNA, 19 nt, Artificial Sequence
  Description of Artificial Sequence: Synthetic oligonucleotide
gacaaauaagccuacaaac

SEQ ID NO: 2732805 - RNA, 19 nt, Artificial Sequence
  Description of Artificial Sequence: Synthetic oligonucleotide
auauucuucagcuauauaa

SEQ ID NO: 2732806 - RNA, 19 nt, Artificial Sequence
  Description of Artificial Sequence: Synthetic oligonucleotide
cauauuauaguucuguaac

SEQ ID NO: 2732807 - RNA, 19 nt, Artificial Sequence
  Description of Artificial Sequence: Synthetic oligonucleotide
ugaguaagaauauauuuga

SEQ ID NO: 2732808 - RNA, 19 nt, Artificial Sequence
  Description of Artificial Sequence: Synthetic oligonucleotide
caugagauaggaaaugagg

SEQ ID NO: 2732809 - RNA, 19 nt, Artificial Sequence
  Description of Artificial Sequence: Synthetic oligonucleotide
aauacucagaauaucugac

SEQ ID NO: 2732810 - RNA, 19 nt, Artificial Sequence
  Description of Artificial Sequence: Synthetic oligonucleotide
uuaaaaggcacgaaaacau

SEQ ID NO: 2732811 - RNA, 19 nt, Artificial Sequence
  Description of Artificial Sequence: Synthetic oligonucleotide
uuugaacaccauauuauag

SEQ ID NO: 2732812 - RNA, 19 nt, Artificial Sequence
  Description of Artificial Sequence: Synthetic oligonucleotide
agugacagagaaaugaccc

SEQ ID NO: 2732813 - RNA, 19 nt, Artificial Sequence
  Description of Artificial Sequence: Synthetic oligonucleotide
uguaacacaaaacaauaaa

SEQ ID NO: 2732814 - RNA, 19 nt, Artificial Sequence
  Description of Artificial Sequence: Synthetic oligonucleotide
ucagcuauauaaaaggaaa

SEQ ID NO: 2732815 - RNA, 19 nt, Artificial Sequence
  Description of Artificial Sequence: Synthetic oligonucleotide
uacaauacucagaauaucu

SEQ ID NO: 2732816 - RNA, 19 nt, Artificial Sequence
  Description of Artificial Sequence: Synthetic oligonucleotide
uuugaaguagguaacuaga

SEQ ID NO: 2732817 - RNA, 19 nt, Artificial Sequence
  Description of Artificial Sequence: Synthetic oligonucleotide
aggaucguaucuuacaggg

SEQ ID NO: 2732818 - RNA, 19 nt, Artificial Sequence
  Description of Artificial Sequence: Synthetic oligonucleotide
uauaaaaguacaacauuac

SEQ ID NO: 2732819 - RNA, 19 nt, Artificial Sequence
  Description of Artificial Sequence: Synthetic oligonucleotide
gaaauaaagugacagagaa

SEQ ID NO: 2732820 - RNA, 19 nt, Artificial Sequence
  Description of Artificial Sequence: Synthetic oligonucleotide
caaaccuuuauaaaaguac

SEQ ID NO: 2732821 - RNA, 19 nt, Artificial Sequence
  Description of Artificial Sequence: Synthetic oligonucleotide
uuauaguucuguaacacaa

SEQ ID NO: 2732822 - RNA, 19 nt, Artificial Sequence
  Description of Artificial Sequence: Synthetic oligonucleotide
gaucguaucuuacaggggc

SEQ ID NO: 2732823 - RNA, 19 nt, Artificial Sequence
  Description of Artificial Sequence: Synthetic oligonucleotide
uaagccuacaaacacuuug

SEQ ID NO: 2732824 - RNA, 19 nt, Artificial Sequence
  Description of Artificial Sequence: Synthetic oligonucleotide
aaaacaaaacaaaacaaaa

SEQ ID NO: 2732825 - RNA, 19 nt, Artificial Sequence
  Description of Artificial Sequence: Synthetic oligonucleotide
uuuacaauacucagaauau

SEQ ID NO: 2732826 - RNA, 19 nt, Artificial Sequence
  Description of Artificial Sequence: Synthetic oligonucleotide
aaagauuaccacuguaccu

SEQ ID NO: 2732827 - RNA, 19 nt, Artificial Sequence
  Description of Artificial Sequence: Synthetic oligonucleotide
uauauuugaaguagguaac

SEQ ID NO: 2732828 - RNA, 19 nt, Artificial Sequence
  Description of Artificial Sequence: Synthetic oligonucleotide
uuuauaaaaguacaacauu

SEQ ID NO: 2732829 - RNA, 19 nt, Artificial Sequence
  Description of Artificial Sequence: Synthetic oligonucleotide
uagacaaaccuuuauaaaa

SEQ ID NO: 2732830 - RNA, 19 nt, Artificial Sequence
  Description of Artificial Sequence: Synthetic oligonucleotide
cugaguaagaauauauuug

SEQ ID NO: 2732831 - RNA, 19 nt, Artificial Sequence
  Description of Artificial Sequence: Synthetic oligonucleotide
uucuucagcuauauaaaag

SEQ ID NO: 2732832 - RNA, 19 nt, Artificial Sequence
  Description of Artificial Sequence: Synthetic oligonucleotide
auuugaaguagguaacuag

SEQ ID NO: 2732833 - RNA, 19 nt, Artificial Sequence
  Description of Artificial Sequence: Synthetic oligonucleotide
uucaauggaaugcaguugu

SEQ ID NO: 2732834 - RNA, 19 nt, Artificial Sequence
  Description of Artificial Sequence: Synthetic oligonucleotide
ugaugucugaguaagaaua

SEQ ID NO: 2732835 - RNA, 19 nt, Artificial Sequence
  Description of Artificial Sequence: Synthetic oligonucleotide
ucaaugaugucugaguaag

SEQ ID NO: 2732836 - RNA, 19 nt, Artificial Sequence
  Description of Artificial Sequence: Synthetic oligonucleotide
aggaaauaaagugacagag

SEQ ID NO: 2732837 - RNA, 19 nt, Artificial Sequence
  Description of Artificial Sequence: Synthetic oligonucleotide
aaggcuacuguuuacaaua

SEQ ID NO: 2732838 - RNA, 19 nt, Artificial Sequence
  Description of Artificial Sequence: Synthetic oligonucleotide
uuacauauucuucagcuau

SEQ ID NO: 2732839 - RNA, 19 nt, Artificial Sequence
  Description of Artificial Sequence: Synthetic oligonucleotide
ugaggaucguaucuuacag

SEQ ID NO: 2732840 - RNA, 19 nt, Artificial Sequence
  Description of Artificial Sequence: Synthetic oligonucleotide
guuuacaauacucagaaua

SEQ ID NO: 2732841 - RNA, 19 nt, Artificial Sequence
  Description of Artificial Sequence: Synthetic oligonucleotide
gacaaguuuacuucaauga

SEQ ID NO: 2732842 - RNA, 19 nt, Artificial Sequence
  Description of Artificial Sequence: Synthetic oligonucleotide
gaaguagguaacuagacaa

SEQ ID NO: 2732843 - RNA, 19 nt, Artificial Sequence
  Description of Artificial Sequence: Synthetic oligonucleotide
aaguuuacuucaaugaugu

SEQ ID NO: 2732844 - RNA, 19 nt, Artificial Sequence
  Description of Artificial Sequence: Synthetic oligonucleotide
acaaagauuaccacuguac

SEQ ID NO: 2732845 - RNA, 19 nt, Artificial Sequence
  Description of Artificial Sequence: Synthetic oligonucleotide
uucuguaacacaaaacaau

SEQ ID NO: 2732846 - RNA, 19 nt, Artificial Sequence
  Description of Artificial Sequence: Synthetic oligonucleotide
ucuguaacacaaaacaaua

SEQ ID NO: 2732847 - RNA, 19 nt, Artificial Sequence
  Description of Artificial Sequence: Synthetic oligonucleotide
uugaacaccauauuauagu

SEQ ID NO: 2732848 - RNA, 19 nt, Artificial Sequence
  Description of Artificial Sequence: Synthetic oligonucleotide
auaaaaguacaacauuacu

SEQ ID NO: 2732849 - RNA, 19 nt, Artificial Sequence
  Description of Artificial Sequence: Synthetic oligonucleotide
caaauaagccuacaaacac

SEQ ID NO: 2732850 - RNA, 19 nt, Artificial Sequence
  Description of Artificial Sequence: Synthetic oligonucleotide
ucugaguaagaauauauuu

SEQ ID NO: 2732851 - RNA, 19 nt, Artificial Sequence
  Description of Artificial Sequence: Synthetic oligonucleotide
guaagaauauauuugaagu

SEQ ID NO: 2732852 - RNA, 19 nt, Artificial Sequence
  Description of Artificial Sequence: Synthetic oligonucleotide
aauggaaugcaguugucaa

SEQ ID NO: 2732853 - RNA, 19 nt, Artificial Sequence
  Description of Artificial Sequence: Synthetic oligonucleotide
ugacaaauaagccuacaaa

SEQ ID NO: 2732854 - RNA, 19 nt, Artificial Sequence
  Description of Artificial Sequence: Synthetic oligonucleotide
auaaaaggaaauaaaguga

SEQ ID NO: 2732855 - RNA, 19 nt, Artificial Sequence
  Description of Artificial Sequence: Synthetic oligonucleotide
uauucuucagcuauauaaa

SEQ ID NO: 2732856 - RNA, 19 nt, Artificial Sequence
  Description of Artificial Sequence: Synthetic oligonucleotide
caaagauuaccacuguacc

SEQ ID NO: 2732857 - RNA, 19 nt, Artificial Sequence
  Description of Artificial Sequence: Synthetic oligonucleotide
aacacuuugaacaccauau

SEQ ID NO: 2732858 - RNA, 19 nt, Artificial Sequence
  Description of Artificial Sequence: Synthetic oligonucleotide
accuuuauaaaaguacaac

SEQ ID NO: 2732859 - RNA, 19 nt, Artificial Sequence
  Description of Artificial Sequence: Synthetic oligonucleotide
aaugcaguugucaacugag

SEQ ID NO: 2732860 - RNA, 19 nt, Artificial Sequence
  Description of Artificial Sequence: Synthetic oligonucleotide
auauaaaaggaaauaaagu

SEQ ID NO: 2732861 - RNA, 19 nt, Artificial Sequence
  Description of Artificial Sequence: Synthetic oligonucleotide
ugaaguagguaacuagaca

SEQ ID NO: 2732862 - RNA, 19 nt, Artificial Sequence
  Description of Artificial Sequence: Synthetic oligonucleotide
acuagacaaaccuuuauaa

SEQ ID NO: 2732863 - RNA, 19 nt, Artificial Sequence
  Description of Artificial Sequence: Synthetic oligonucleotide
uacuguuuacaauacucag

SEQ ID NO: 2732864 - RNA, 19 nt, Artificial Sequence
  Description of Artificial Sequence: Synthetic oligonucleotide
aaggaaauaaagugacaga

SEQ ID NO: 2732865 - RNA, 19 nt, Artificial Sequence
  Description of Artificial Sequence: Synthetic oligonucleotide
gaguugacacccaaaaccg

SEQ ID NO: 2732866 - RNA, 19 nt, Artificial Sequence
  Description of Artificial Sequence: Synthetic oligonucleotide
auagaaugaguuccaggac

SEQ ID NO: 2732867 - RNA, 19 nt, Artificial Sequence
  Description of Artificial Sequence: Synthetic oligonucleotide
aagugacagagaaaugacc

SEQ ID NO: 2732868 - RNA, 19 nt, Artificial Sequence
  Description of Artificial Sequence: Synthetic oligonucleotide
ugcaguugucaacugagcc

SEQ ID NO: 2732869 - RNA, 19 nt, Artificial Sequence
  Description of Artificial Sequence: Synthetic oligonucleotide
aaaccuuuauaaaaguaca

SEQ ID NO: 2732870 - RNA, 19 nt, Artificial Sequence
  Description of Artificial Sequence: Synthetic oligonucleotide
uaagaauauauuugaagua

SEQ ID NO: 2732871 - RNA, 19 nt, Artificial Sequence
  Description of Artificial Sequence: Synthetic oligonucleotide
ugacaaguuuacuucaaug

SEQ ID NO: 2732872 - RNA, 19 nt, Artificial Sequence
  Description of Artificial Sequence: Synthetic oligonucleotide
uauuauaguucuguaacac

SEQ ID NO: 2732873 - RNA, 19 nt, Artificial Sequence
  Description of Artificial Sequence: Synthetic oligonucleotide
uaggaaaugaggaucguau

SEQ ID NO: 2732874 - RNA, 19 nt, Artificial Sequence
  Description of Artificial Sequence: Synthetic oligonucleotide
uacaacauuacuguuuaca

SEQ ID NO: 2732875 - RNA, 19 nt, Artificial Sequence
  Description of Artificial Sequence: Synthetic oligonucleotide
aauaucuccuuaaaaggca

SEQ ID NO: 2732876 - RNA, 19 nt, Artificial Sequence
  Description of Artificial Sequence: Synthetic oligonucleotide
auauggcacgaguugacac

SEQ ID NO: 2732877 - RNA, 19 nt, Artificial Sequence
  Description of Artificial Sequence: Synthetic oligonucleotide
aguagguaacuagacaaac

SEQ ID NO: 2732878 - RNA, 19 nt, Artificial Sequence
  Description of Artificial Sequence: Synthetic oligonucleotide
caaguuuacuucaaugaug

SEQ ID NO: 2732879 - RNA, 19 nt, Artificial Sequence
  Description of Artificial Sequence: Synthetic oligonucleotide
uaucugacaaguuuacuuc

SEQ ID NO: 2732880 - RNA, 19 nt, Artificial Sequence
  Description of Artificial Sequence: Synthetic oligonucleotide
ugucugaguaagaauauau

SEQ ID NO: 2732881 - RNA, 19 nt, Artificial Sequence
  Description of Artificial Sequence: Synthetic oligonucleotide
uucagcuauauaaaaggaa

SEQ ID NO: 2732882 - RNA, 19 nt, Artificial Sequence
  Description of Artificial Sequence: Synthetic oligonucleotide
uuuucaauggaaugcaguu

SEQ ID NO: 2732883 - RNA, 19 nt, Artificial Sequence
  Description of Artificial Sequence: Synthetic oligonucleotide
uguuuacauauucuucagc

SEQ ID NO: 2732884 - RNA, 19 nt, Artificial Sequence
  Description of Artificial Sequence: Synthetic oligonucleotide
cuauagaaugaguuccagg

SEQ ID NO: 2732885 - RNA, 19 nt, Artificial Sequence
  Description of Artificial Sequence: Synthetic oligonucleotide
aaccguagugaauuccauc

SEQ ID NO: 2732886 - RNA, 19 nt, Artificial Sequence
  Description of Artificial Sequence: Synthetic oligonucleotide
auaucugacaaguuuacuu

SEQ ID NO: 2732887 - RNA, 19 nt, Artificial Sequence
  Description of Artificial Sequence: Synthetic oligonucleotide
uaaaaggcacgaaaacaug

SEQ ID NO: 2732888 - RNA, 19 nt, Artificial Sequence
  Description of Artificial Sequence: Synthetic oligonucleotide
aaugaugucugaguaagaa

SEQ ID NO: 2732889 - RNA, 19 nt, Artificial Sequence
  Description of Artificial Sequence: Synthetic oligonucleotide
caaaacaaaacaaaacaaa

SEQ ID NO: 2732890 - RNA, 19 nt, Artificial Sequence
  Description of Artificial Sequence: Synthetic oligonucleotide
aacuagacaaaccuuuaua

SEQ ID NO: 2732891 - RNA, 19 nt, Artificial Sequence
  Description of Artificial Sequence: Synthetic oligonucleotide
ugucaacugagccaugaca

SEQ ID NO: 2732892 - RNA, 19 nt, Artificial Sequence
  Description of Artificial Sequence: Synthetic oligonucleotide
uccuuaaaaggcacgaaaa

SEQ ID NO: 2732893 - RNA, 19 nt, Artificial Sequence
  Description of Artificial Sequence: Synthetic oligonucleotide
uacucagaauaucugacaa

SEQ ID NO: 2732894 - RNA, 19 nt, Artificial Sequence
  Description of Artificial Sequence: Synthetic oligonucleotide
gaacugugaauauggcacg

SEQ ID NO: 2732895 - RNA, 19 nt, Artificial Sequence
  Description of Artificial Sequence: Synthetic oligonucleotide
uugaaguagguaacuagac

SEQ ID NO: 2732896 - RNA, 19 nt, Artificial Sequence
  Description of Artificial Sequence: Synthetic oligonucleotide
accguagugaauuccauca

SEQ ID NO: 2732897 - RNA, 19 nt, Artificial Sequence
  Description of Artificial Sequence: Synthetic oligonucleotide
aaaacaugagauaggaaau

SEQ ID NO: 2732898 - RNA, 19 nt, Artificial Sequence
  Description of Artificial Sequence: Synthetic oligonucleotide
aauauauuugaaguaggua

SEQ ID NO: 2732899 - RNA, 19 nt, Artificial Sequence
  Description of Artificial Sequence: Synthetic oligonucleotide
agauaggaaaugaggaucg

SEQ ID NO: 2732900 - RNA, 19 nt, Artificial Sequence
  Description of Artificial Sequence: Synthetic oligonucleotide
agaauauauuugaaguagg

SEQ ID NO: 2732901 - RNA, 19 nt, Artificial Sequence
  Description of Artificial Sequence: Synthetic oligonucleotide
auuauaguucuguaacaca

SEQ ID NO: 2732902 - RNA, 19 nt, Artificial Sequence
  Description of Artificial Sequence: Synthetic oligonucleotide
auauuauaguucuguaaca

SEQ ID NO: 2732903 - RNA, 19 nt, Artificial Sequence
  Description of Artificial Sequence: Synthetic oligonucleotide
acuucaaugaugucugagu

SEQ ID NO: 2732904 - RNA, 19 nt, Artificial Sequence
  Description of Artificial Sequence: Synthetic oligonucleotide
aaugaggaucguaucuuac

SEQ ID NO: 2732905 - RNA, 19 nt, Artificial Sequence
  Description of Artificial Sequence: Synthetic oligonucleotide
acaacauuacuguuuacau

SEQ ID NO: 2732906 - RNA, 19 nt, Artificial Sequence
  Description of Artificial Sequence: Synthetic oligonucleotide
aaaaggcacgaaaacauga

SEQ ID NO: 2732907 - RNA, 19 nt, Artificial Sequence
  Description of Artificial Sequence: Synthetic oligonucleotide
agacaaaccuuuauaaaag

SEQ ID NO: 2732908 - RNA, 19 nt, Artificial Sequence
  Description of Artificial Sequence: Synthetic oligonucleotide
agccaugacaaagauuacc

SEQ ID NO: 2732909 - RNA, 19 nt, Artificial Sequence
  Description of Artificial Sequence: Synthetic oligonucleotide
accacuguaccuuucuaag

SEQ ID NO: 2732910 - RNA, 19 nt, Artificial Sequence
  Description of Artificial Sequence: Synthetic oligonucleotide
aguacaacauuacuguuua

SEQ ID NO: 2732911 - RNA, 19 nt, Artificial Sequence
  Description of Artificial Sequence: Synthetic oligonucleotide
aacaugagauaggaaauga

SEQ ID NO: 2732912 - RNA, 19 nt, Artificial Sequence
  Description of Artificial Sequence: Synthetic oligonucleotide
augacaaagauuaccacug

SEQ ID NO: 2732913 - RNA, 19 nt, Artificial Sequence
  Description of Artificial Sequence: Synthetic oligonucleotide
acaaguuuacuucaaugau

SEQ ID NO: 2732914 - RNA, 19 nt, Artificial Sequence
  Description of Artificial Sequence: Synthetic oligonucleotide
aagauuaccacuguaccuu

SEQ ID NO: 2732915 - RNA, 19 nt, Artificial Sequence
  Description of Artificial Sequence: Synthetic oligonucleotide
auggaaugcaguugucaac

SEQ ID NO: 2732916 - RNA, 19 nt, Artificial Sequence
  Description of Artificial Sequence: Synthetic oligonucleotide
gugaauauggcacgaguug

SEQ ID NO: 2732917 - RNA, 19 nt, Artificial Sequence
  Description of Artificial Sequence: Synthetic oligonucleotide
guuuacauauucuucagcu

SEQ ID NO: 2732918 - RNA, 19 nt, Artificial Sequence
  Description of Artificial Sequence: Synthetic oligonucleotide
uaucuccuuaaaaggcacg

SEQ ID NO: 2732919 - RNA, 19 nt, Artificial Sequence
  Description of Artificial Sequence: Synthetic oligonucleotide
uauggcacgaguugacacc

SEQ ID NO: 2732920 - RNA, 19 nt, Artificial Sequence
  Description of Artificial Sequence: Synthetic oligonucleotide
uacuguuuacauauucuuc

SEQ ID NO: 2732921 - RNA, 19 nt, Artificial Sequence
  Description of Artificial Sequence: Synthetic oligonucleotide
ugugaauauggcacgaguu

SEQ ID NO: 2732922 - RNA, 19 nt, Artificial Sequence
  Description of Artificial Sequence: Synthetic oligonucleotide
aaaggcacgaaaacaugag

SEQ ID NO: 2732923 - RNA, 19 nt, Artificial Sequence
  Description of Artificial Sequence: Synthetic oligonucleotide
uugacacccaaaaccguag

SEQ ID NO: 2732924 - RNA, 19 nt, Artificial Sequence
  Description of Artificial Sequence: Synthetic oligonucleotide
aaaaccguagugaauucca

SEQ ID NO: 2732925 - RNA, 19 nt, Artificial Sequence
  Description of Artificial Sequence: Synthetic oligonucleotide
aauaagccuacaaacacuu

SEQ ID NO: 2732926 - RNA, 19 nt, Artificial Sequence
  Description of Artificial Sequence: Synthetic oligonucleotide
ugagauaggaaaugaggau

SEQ ID NO: 2732927 - RNA, 19 nt, Artificial Sequence
  Description of Artificial Sequence: Synthetic oligonucleotide
ugaauauggcacgaguuga

SEQ ID NO: 2732928 - RNA, 19 nt, Artificial Sequence
  Description of Artificial Sequence: Synthetic oligonucleotide
gaggaucguaucuuacagg

SEQ ID NO: 2732929 - RNA, 19 nt, Artificial Sequence
  Description of Artificial Sequence: Synthetic oligonucleotide
acaaauaagccuacaaaca

SEQ ID NO: 2732930 - RNA, 19 nt, Artificial Sequence
  Description of Artificial Sequence: Synthetic oligonucleotide
aggaaaugaggaucguauc

SEQ ID NO: 2732931 - RNA, 19 nt, Artificial Sequence
  Description of Artificial Sequence: Synthetic oligonucleotide
auaguucuguaacacaaaa

SEQ ID NO: 2732932 - RNA, 19 nt, Artificial Sequence
  Description of Artificial Sequence: Synthetic oligonucleotide
augagauaggaaaugagga

SEQ ID NO: 2732933 - RNA, 19 nt, Artificial Sequence
  Description of Artificial Sequence: Synthetic oligonucleotide
ugaacaccauauuauaguu

SEQ ID NO: 2732934 - RNA, 19 nt, Artificial Sequence
  Description of Artificial Sequence: Synthetic oligonucleotide
ucuuacaggggccagcuuu

SEQ ID NO: 2732935 - RNA, 19 nt, Artificial Sequence
  Description of Artificial Sequence: Synthetic oligonucleotide
ggaacugugaauauggcac

SEQ ID NO: 2732936 - RNA, 19 nt, Artificial Sequence
  Description of Artificial Sequence: Synthetic oligonucleotide
aaggcacgaaaacaugaga

SEQ ID NO: 2732937 - RNA, 19 nt, Artificial Sequence
  Description of Artificial Sequence: Synthetic oligonucleotide
uggaaugcaguugucaacu

SEQ ID NO: 2732938 - RNA, 19 nt, Artificial Sequence
  Description of Artificial Sequence: Synthetic oligonucleotide
cuacaaacacuuugaacac

SEQ ID NO: 2732939 - RNA, 19 nt, Artificial Sequence
  Description of Artificial Sequence: Synthetic oligonucleotide
gagauaggaaaugaggauc

SEQ ID NO: 2732940 - RNA, 19 nt, Artificial Sequence
  Description of Artificial Sequence: Synthetic oligonucleotide
cacgaaaacaugagauagg

SEQ ID NO: 2732941 - RNA, 19 nt, Artificial Sequence
  Description of Artificial Sequence: Synthetic oligonucleotide
aaacacuuugaacaccaua

SEQ ID NO: 2732942 - RNA, 19 nt, Artificial Sequence
  Description of Artificial Sequence: Synthetic oligonucleotide
aaggaacugugaauauggc

SEQ ID NO: 2732943 - RNA, 19 nt, Artificial Sequence
  Description of Artificial Sequence: Synthetic oligonucleotide
cauuacuguuuacauauuc

SEQ ID NO: 2732944 - RNA, 19 nt, Artificial Sequence
  Description of Artificial Sequence: Synthetic oligonucleotide
uaguucuguaacacaaaac

SEQ ID NO: 2732945 - RNA, 19 nt, Artificial Sequence
  Description of Artificial Sequence: Synthetic oligonucleotide
acgaguugacacccaaaac

SEQ ID NO: 2732946 - RNA, 19 nt, Artificial Sequence
  Description of Artificial Sequence: Synthetic oligonucleotide
uuucaauggaaugcaguug

SEQ ID NO: 2732947 - RNA, 19 nt, Artificial Sequence
  Description of Artificial Sequence: Synthetic oligonucleotide
uauaguucuguaacacaaa

SEQ ID NO: 2732948 - RNA, 19 nt, Artificial Sequence
  Description of Artificial Sequence: Synthetic oligonucleotide
auuacuguuuacauauucu

SEQ ID NO: 2732949 - RNA, 19 nt, Artificial Sequence
  Description of Artificial Sequence: Synthetic oligonucleotide
acucagaauaucugacaag

SEQ ID NO: 2732950 - RNA, 19 nt, Artificial Sequence
  Description of Artificial Sequence: Synthetic oligonucleotide
auacucagaauaucugaca

SEQ ID NO: 2732951 - RNA, 19 nt, Artificial Sequence
  Description of Artificial Sequence: Synthetic oligonucleotide
guaacacaaaacaauaaaa

SEQ ID NO: 2732952 - RNA, 19 nt, Artificial Sequence
  Description of Artificial Sequence: Synthetic oligonucleotide
auuaccacuguaccuuucu

SEQ ID NO: 2732953 - RNA, 19 nt, Artificial Sequence
  Description of Artificial Sequence: Synthetic oligonucleotide
augacaaauaagccuacaa

SEQ ID NO: 2732954 - RNA, 19 nt, Artificial Sequence
  Description of Artificial Sequence: Synthetic oligonucleotide
ucuauagaaugaguuccag

SEQ ID NO: 2732955 - RNA, 19 nt, Artificial Sequence
  Description of Artificial Sequence: Synthetic oligonucleotide
uuuacauauucuucagcua

SEQ ID NO: 2732956 - RNA, 19 nt, Artificial Sequence
  Description of Artificial Sequence: Synthetic oligonucleotide
aauaucugacaaguuuacu

SEQ ID NO: 2732957 - RNA, 19 nt, Artificial Sequence
  Description of Artificial Sequence: Synthetic oligonucleotide
caauacucagaauaucuga

SEQ ID NO: 2732958 - RNA, 19 nt, Artificial Sequence
  Description of Artificial Sequence: Synthetic oligonucleotide
auaucuccuuaaaaggcac

SEQ ID NO: 2732959 - RNA, 19 nt, Artificial Sequence
  Description of Artificial Sequence: Synthetic oligonucleotide
aaaugaggaucguaucuua

SEQ ID NO: 2732960 - RNA, 19 nt, Artificial Sequence
  Description of Artificial Sequence: Synthetic oligonucleotide
aggaacugugaauauggca

SEQ ID NO: 2732961 - RNA, 19 nt, Artificial Sequence
  Description of Artificial Sequence: Synthetic oligonucleotide
acgaaaacaugagauagga

SEQ ID NO: 2732962 - RNA, 19 nt, Artificial Sequence
  Description of Artificial Sequence: Synthetic oligonucleotide
cacuguaccuuucuaaguc

SEQ ID NO: 2732963 - RNA, 19 nt, Artificial Sequence
  Description of Artificial Sequence: Synthetic oligonucleotide
uucaaugaugucugaguaa

SEQ ID NO: 2732964 - RNA, 19 nt, Artificial Sequence
  Description of Artificial Sequence: Synthetic oligonucleotide
cuacuguuuacaauacuca

SEQ ID NO: 2732965 - RNA, 19 nt, Artificial Sequence
  Description of Artificial Sequence: Synthetic oligonucleotide
cagcuuuucaauggaaugc

SEQ ID NO: 2732966 - RNA, 19 nt, Artificial Sequence
  Description of Artificial Sequence: Synthetic oligonucleotide
uuaugacaaauaagccuac

SEQ ID NO: 2732967 - RNA, 19 nt, Artificial Sequence
  Description of Artificial Sequence: Synthetic oligonucleotide
aaaaggaaauaaagugaca

SEQ ID NO: 2732968 - RNA, 19 nt, Artificial Sequence
  Description of Artificial Sequence: Synthetic oligonucleotide
auggcacgaguugacaccc

SEQ ID NO: 2732969 - RNA, 19 nt, Artificial Sequence
  Description of Artificial Sequence: Synthetic oligonucleotide
auucuucagcuauauaaaa

SEQ ID NO: 2732970 - RNA, 19 nt, Artificial Sequence
  Description of Artificial Sequence: Synthetic oligonucleotide
acuuugaacaccauauuau

SEQ ID NO: 2732971 - RNA, 19 nt, Artificial Sequence
  Description of Artificial Sequence: Synthetic oligonucleotide
gaauaucugacaaguuuac

SEQ ID NO: 2732972 - RNA, 19 nt, Artificial Sequence
  Description of Artificial Sequence: Synthetic oligonucleotide
uaacuagacaaaccuuuau

SEQ ID NO: 2732973 - RNA, 19 nt, Artificial Sequence
  Description of Artificial Sequence: Synthetic oligonucleotide
aauauggcacgaguugaca

SEQ ID NO: 2732974 - RNA, 19 nt, Artificial Sequence
  Description of Artificial Sequence: Synthetic oligonucleotide
uacuucaaugaugucugag

SEQ ID NO: 2732975 - RNA, 19 nt, Artificial Sequence
  Description of Artificial Sequence: Synthetic oligonucleotide
cgaguugacacccaaaacc

SEQ ID NO: 2732976 - RNA, 19 nt, Artificial Sequence
  Description of Artificial Sequence: Synthetic oligonucleotide
augaggaucguaucuuaca

SEQ ID NO: 2732977 - RNA, 19 nt, Artificial Sequence
  Description of Artificial Sequence: Synthetic oligonucleotide
acaaacacuuugaacacca

SEQ ID NO: 2732978 - RNA, 19 nt, Artificial Sequence
  Description of Artificial Sequence: Synthetic oligonucleotide
aagccuacaaacacuuuga

SEQ ID NO: 2732979 - RNA, 19 nt, Artificial Sequence
  Description of Artificial Sequence: Synthetic oligonucleotide
ccuuuauaaaaguacaaca

SEQ ID NO: 2732980 - RNA, 19 nt, Artificial Sequence
  Description of Artificial Sequence: Synthetic oligonucleotide
ucugacaaguuuacuucaa

SEQ ID NO: 2732981 - RNA, 19 nt, Artificial Sequence
  Description of Artificial Sequence: Synthetic oligonucleotide
acaauacucagaauaucug

SEQ ID NO: 2732982 - RNA, 19 nt, Artificial Sequence
  Description of Artificial Sequence: Synthetic oligonucleotide
gacacccaaaaccguagug

SEQ ID NO: 2732983 - RNA, 19 nt, Artificial Sequence
  Description of Artificial Sequence: Synthetic oligonucleotide
auauuugaaguagguaacu

SEQ ID NO: 2732984 - RNA, 19 nt, Artificial Sequence
  Description of Artificial Sequence: Synthetic oligonucleotide
gcacgaaaacaugagauag

SEQ ID NO: 2732985 - RNA, 19 nt, Artificial Sequence
  Description of Artificial Sequence: Synthetic oligonucleotide
cuucagcuauauaaaagga

SEQ ID NO: 2732986 - RNA, 19 nt, Artificial Sequence
  Description of Artificial Sequence: Synthetic oligonucleotide
aaauaaagugacagagaaa

SEQ ID NO: 2732987 - RNA, 19 nt, Artificial Sequence
  Description of Artificial Sequence: Synthetic oligonucleotide
agcuauauaaaaggaaaua

SEQ ID NO: 2732988 - RNA, 19 nt, Artificial Sequence
  Description of Artificial Sequence: Synthetic oligonucleotide
gaaugcaguugucaacuga

SEQ ID NO: 2732989 - RNA, 19 nt, Artificial Sequence
  Description of Artificial Sequence: Synthetic oligonucleotide
uuacaauacucagaauauc

SEQ ID NO: 2732990 - RNA, 19 nt, Artificial Sequence
  Description of Artificial Sequence: Synthetic oligonucleotide
caaaaccguagugaauucc

SEQ ID NO: 2732991 - RNA, 19 nt, Artificial Sequence
  Description of Artificial Sequence: Synthetic oligonucleotide
ugacaaagauuaccacugu

SEQ ID NO: 2732992 - RNA, 19 nt, Artificial Sequence
  Description of Artificial Sequence: Synthetic oligonucleotide
aucguaucuuacaggggcc

SEQ ID NO: 2732993 - RNA, 19 nt, Artificial Sequence
  Description of Artificial Sequence: Synthetic oligonucleotide
acuguuuacaauacucaga

SEQ ID NO: 2732994 - RNA, 19 nt, Artificial Sequence
  Description of Artificial Sequence: Synthetic oligonucleotide
caugacaaagauuaccacu

SEQ ID NO: 2732995 - RNA, 19 nt, Artificial Sequence
  Description of Artificial Sequence: Synthetic oligonucleotide
uauuugaaguagguaacua

SEQ ID NO: 2732996 - RNA, 19 nt, Artificial Sequence
  Description of Artificial Sequence: Synthetic oligonucleotide
caacugagccaugacaaag

SEQ ID NO: 2732997 - RNA, 19 nt, Artificial Sequence
  Description of Artificial Sequence: Synthetic oligonucleotide
aacugagccaugacaaaga

SEQ ID NO: 2732998 - RNA, 19 nt, Artificial Sequence
  Description of Artificial Sequence: Synthetic oligonucleotide
uaccacuguaccuuucuaa

SEQ ID NO: 2732999 - RNA, 19 nt, Artificial Sequence
  Description of Artificial Sequence: Synthetic oligonucleotide
acacccaaaaccguaguga

SEQ ID NO: 2733000 - RNA, 19 nt, Artificial Sequence
  Description of Artificial Sequence: Synthetic oligonucleotide
augaugucugaguaagaau

SEQ ID NO: 2733001 - RNA, 19 nt, Artificial Sequence
  Description of Artificial Sequence: Synthetic oligonucleotide
uacauauucuucagcuaua

SEQ ID NO: 2733002 - RNA, 19 nt, Artificial Sequence
  Description of Artificial Sequence: Synthetic oligonucleotide
uaucuuacaggggccagcu

SEQ ID NO: 2733003 - RNA, 19 nt, Artificial Sequence
  Description of Artificial Sequence: Synthetic oligonucleotide
uaugacaaauaagccuaca

SEQ ID NO: 2733004 - RNA, 19 nt, Artificial Sequence
  Description of Artificial Sequence: Synthetic oligonucleotide
aguuuacuucaaugauguc

SEQ ID NO: 2733005 - RNA, 19 nt, Artificial Sequence
  Description of Artificial Sequence: Synthetic oligonucleotide
gaauauauuugaaguaggu

SEQ ID NO: 2733006 - RNA, 19 nt, Artificial Sequence
  Description of Artificial Sequence: Synthetic oligonucleotide
agcuuuucaauggaaugca

SEQ ID NO: 2733007 - RNA, 19 nt, Artificial Sequence
  Description of Artificial Sequence: Synthetic oligonucleotide
cuuugaacaccauauuaua

SEQ ID NO: 2733008 - RNA, 19 nt, Artificial Sequence
  Description of Artificial Sequence: Synthetic oligonucleotide
acacaacaaaacaaaacaa

SEQ ID NO: 2733009 - RNA, 19 nt, Artificial Sequence
  Description of Artificial Sequence: Synthetic oligonucleotide
ucagaauaucugacaaguu

SEQ ID NO: 2733010 - RNA, 19 nt, Artificial Sequence
  Description of Artificial Sequence: Synthetic oligonucleotide
gacaaaccuuuauaaaagu

SEQ ID NO: 2733011 - RNA, 19 nt, Artificial Sequence
  Description of Artificial Sequence: Synthetic oligonucleotide
gucaacugagccaugacaa

SEQ ID NO: 2733012 - RNA, 19 nt, Artificial Sequence
  Description of Artificial Sequence: Synthetic oligonucleotide
gaauauggcacgaguugac

SEQ ID NO: 2733013 - RNA, 19 nt, Artificial Sequence
  Description of Artificial Sequence: Synthetic oligonucleotide
accauauuauaguucugua

SEQ ID NO: 2733014 - RNA, 19 nt, Artificial Sequence
  Description of Artificial Sequence: Synthetic oligonucleotide
ucaacugagccaugacaaa

SEQ ID NO: 2733015 - RNA, 19 nt, Artificial Sequence
  Description of Artificial Sequence: Synthetic oligonucleotide
aacugugaauauggcacga

SEQ ID NO: 2733016 - RNA, 19 nt, Artificial Sequence
  Description of Artificial Sequence: Synthetic oligonucleotide
gcuacuguuuacaauacuc

SEQ ID NO: 2733017 - RNA, 19 nt, Artificial Sequence
  Description of Artificial Sequence: Synthetic oligonucleotide
cuucaaugaugucugagua

SEQ ID NO: 2733018 - RNA, 19 nt, Artificial Sequence
  Description of Artificial Sequence: Synthetic oligonucleotide
aaguagguaacuagacaaa

SEQ ID NO: 2733019 - RNA, 19 nt, Artificial Sequence
  Description of Artificial Sequence: Synthetic oligonucleotide
gaacaccauauuauaguuc

SEQ ID NO: 2733020 - RNA, 19 nt, Artificial Sequence
  Description of Artificial Sequence: Synthetic oligonucleotide
guagugaauuccaucaaaa

SEQ ID NO: 2733021 - RNA, 19 nt, Artificial Sequence
  Description of Artificial Sequence: Synthetic oligonucleotide
uugucaacugagccaugac

SEQ ID NO: 2733022 - RNA, 19 nt, Artificial Sequence
  Description of Artificial Sequence: Synthetic oligonucleotide
aucuccuuaaaaggcacga

SEQ ID NO: 2733023 - RNA, 19 nt, Artificial Sequence
  Description of Artificial Sequence: Synthetic oligonucleotide
ggggccagcuuuucaaugg

SEQ ID NO: 2733024 - RNA, 19 nt, Artificial Sequence
  Description of Artificial Sequence: Synthetic oligonucleotide
gacaaagauuaccacugua

SEQ ID NO: 2733025 - RNA, 19 nt, Artificial Sequence
  Description of Artificial Sequence: Synthetic oligonucleotide
acugagccaugacaaagau

SEQ ID NO: 2733026 - RNA, 19 nt, Artificial Sequence
  Description of Artificial Sequence: Synthetic oligonucleotide
ccuuaaaaggcacgaaaac

SEQ ID NO: 2733027 - RNA, 19 nt, Artificial Sequence
  Description of Artificial Sequence: Synthetic oligonucleotide
augcaguugucaacugagc

SEQ ID NO: 2733028 - RNA, 19 nt, Artificial Sequence
  Description of Artificial Sequence: Synthetic oligonucleotide
ugacagagaaaugacccuu

SEQ ID NO: 2733029 - RNA, 19 nt, Artificial Sequence
  Description of Artificial Sequence: Synthetic oligonucleotide
aggcacgaaaacaugagau

SEQ ID NO: 2733030 - RNA, 19 nt, Artificial Sequence
  Description of Artificial Sequence: Synthetic oligonucleotide
ugacacccaaaaccguagu

SEQ ID NO: 2733031 - RNA, 19 nt, Artificial Sequence
  Description of Artificial Sequence: Synthetic oligonucleotide
cucagaauaucugacaagu

SEQ ID NO: 2733032 - RNA, 19 nt, Artificial Sequence
  Description of Artificial Sequence: Synthetic oligonucleotide
cuuuucaauggaaugcagu

SEQ ID NO: 2733033 - RNA, 19 nt, Artificial Sequence
  Description of Artificial Sequence: Synthetic oligonucleotide
ucaauggaaugcaguuguc

SEQ ID NO: 2733034 - RNA, 19 nt, Artificial Sequence
  Description of Artificial Sequence: Synthetic oligonucleotide
cacuuugaacaccauauua

SEQ ID NO: 2733035 - RNA, 19 nt, Artificial Sequence
  Description of Artificial Sequence: Synthetic oligonucleotide
auaaagugacagagaaaug

SEQ ID NO: 2733036 - RNA, 19 nt, Artificial Sequence
  Description of Artificial Sequence: Synthetic oligonucleotide
acauauucuucagcuauau

SEQ ID NO: 2733037 - RNA, 19 nt, Artificial Sequence
  Description of Artificial Sequence: Synthetic oligonucleotide
acaaaccuuuauaaaagua

SEQ ID NO: 2733038 - RNA, 19 nt, Artificial Sequence
  Description of Artificial Sequence: Synthetic oligonucleotide
uguuuacaauacucagaau

SEQ ID NO: 2733039 - RNA, 19 nt, Artificial Sequence
  Description of Artificial Sequence: Synthetic oligonucleotide
cuccuuaaaaggcacgaaa

SEQ ID NO: 2733040 - RNA, 19 nt, Artificial Sequence
  Description of Artificial Sequence: Synthetic oligonucleotide
guucuguaacacaaaacaa

SEQ ID NO: 2733041 - RNA, 19 nt, Artificial Sequence
  Description of Artificial Sequence: Synthetic oligonucleotide
acugugaauauggcacgag

SEQ ID NO: 2733042 - RNA, 19 nt, Artificial Sequence
  Description of Artificial Sequence: Synthetic oligonucleotide
uuacuucaaugaugucuga

SEQ ID NO: 2733043 - RNA, 19 nt, Artificial Sequence
  Description of Artificial Sequence: Synthetic oligonucleotide
ggaaaugaggaucguaucu

SEQ ID NO: 2733044 - RNA, 19 nt, Artificial Sequence
  Description of Artificial Sequence: Synthetic oligonucleotide
cacgaguugacacccaaaa

SEQ ID NO: 2733045 - RNA, 19 nt, Artificial Sequence
  Description of Artificial Sequence: Synthetic oligonucleotide
ucguaucuuacaggggcca

SEQ ID NO: 2733046 - RNA, 19 nt, Artificial Sequence
  Description of Artificial Sequence: Synthetic oligonucleotide
uuaccacuguaccuuucua

SEQ ID NO: 2733047 - RNA, 19 nt, Artificial Sequence
  Description of Artificial Sequence: Synthetic oligonucleotide
gaguaagaauauauuugaa

SEQ ID NO: 2733048 - RNA, 19 nt, Artificial Sequence
  Description of Artificial Sequence: Synthetic oligonucleotide
aggcuacuguuuacaauac

SEQ ID NO: 2733049 - RNA, 19 nt, Artificial Sequence
  Description of Artificial Sequence: Synthetic oligonucleotide
gaggugguggcccucaccu

SEQ ID NO: 2733050 - RNA, 19 nt, Artificial Sequence
  Description of Artificial Sequence: Synthetic oligonucleotide
acacuuugaacaccauauu

SEQ ID NO: 2733051 - RNA, 19 nt, Artificial Sequence
  Description of Artificial Sequence: Synthetic oligonucleotide
guugucaacugagccauga

SEQ ID NO: 2733052 - RNA, 19 nt, Artificial Sequence
  Description of Artificial Sequence: Synthetic oligonucleotide
aggggccagcuuuucaaug

SEQ ID NO: 2733053 - RNA, 19 nt, Artificial Sequence
  Description of Artificial Sequence: Synthetic oligonucleotide
ggaaauaaagugacagaga

SEQ ID NO: 2733054 - RNA, 19 nt, Artificial Sequence
  Description of Artificial Sequence: Synthetic oligonucleotide
caauggaaugcaguuguca

SEQ ID NO: 2733055 - RNA, 19 nt, Artificial Sequence
  Description of Artificial Sequence: Synthetic oligonucleotide
guaucuuacaggggccagc

SEQ ID NO: 2733056 - RNA, 19 nt, Artificial Sequence
  Description of Artificial Sequence: Synthetic oligonucleotide
gccaugacaaagauuacca

SEQ ID NO: 2733057 - RNA, 19 nt, Artificial Sequence
  Description of Artificial Sequence: Synthetic oligonucleotide
caacauuacuguuuacaua

SEQ ID NO: 2733058 - RNA, 19 nt, Artificial Sequence
  Description of Artificial Sequence: Synthetic oligonucleotide
auaggaaaugaggaucgua

SEQ ID NO: 2733059 - RNA, 19 nt, Artificial Sequence
  Description of Artificial Sequence: Synthetic oligonucleotide
ucuccuuaaaaggcacgaa

SEQ ID NO: 2733060 - RNA, 19 nt, Artificial Sequence
  Description of Artificial Sequence: Synthetic oligonucleotide
aaaccguagugaauuccau

SEQ ID NO: 2733061 - RNA, 19 nt, Artificial Sequence
  Description of Artificial Sequence: Synthetic oligonucleotide
agccuacaaacacuuugaa

SEQ ID NO: 2733062 - RNA, 19 nt, Artificial Sequence
  Description of Artificial Sequence: Synthetic oligonucleotide
agauuaccacuguaccuuu

SEQ ID NO: 2733063 - RNA, 19 nt, Artificial Sequence
  Description of Artificial Sequence: Synthetic oligonucleotide
gaaaugaggaucguaucuu

SEQ ID NO: 2733064 - RNA, 19 nt, Artificial Sequence
  Description of Artificial Sequence: Synthetic oligonucleotide
cacccaaaaccguagugaa

SEQ ID NO: 2733065 - RNA, 19 nt, Artificial Sequence
  Description of Artificial Sequence: Synthetic oligonucleotide
guugacacccaaaaccgua

SEQ ID NO: 2733066 - RNA, 19 nt, Artificial Sequence
  Description of Artificial Sequence: Synthetic oligonucleotide
ccauauuauaguucuguaa

SEQ ID NO: 2733067 - RNA, 19 nt, Artificial Sequence
  Description of Artificial Sequence: Synthetic oligonucleotide
guaacuagacaaaccuuua

SEQ ID NO: 2733068 - RNA, 19 nt, Artificial Sequence
  Description of Artificial Sequence: Synthetic oligonucleotide
agccgggaggugguggccc

SEQ ID NO: 2733069 - RNA, 19 nt, Artificial Sequence
  Description of Artificial Sequence: Synthetic oligonucleotide
gaugucugaguaagaauau

SEQ ID NO: 2733070 - RNA, 19 nt, Artificial Sequence
  Description of Artificial Sequence: Synthetic oligonucleotide
ggaucguaucuuacagggg

SEQ ID NO: 2733071 - RNA, 19 nt, Artificial Sequence
  Description of Artificial Sequence: Synthetic oligonucleotide
aguugacacccaaaaccgu

SEQ ID NO: 2733072 - RNA, 19 nt, Artificial Sequence
  Description of Artificial Sequence: Synthetic oligonucleotide
ccaugacaaagauuaccac

SEQ ID NO: 2733073 - RNA, 19 nt, Artificial Sequence
  Description of Artificial Sequence: Synthetic oligonucleotide
gguaacuagacaaaccuuu

SEQ ID NO: 2733074 - RNA, 19 nt, Artificial Sequence
  Description of Artificial Sequence: Synthetic oligonucleotide
gugacagagaaaugacccu

SEQ ID NO: 2733075 - RNA, 19 nt, Artificial Sequence
  Description of Artificial Sequence: Synthetic oligonucleotide
guacaacauuacuguuuac

SEQ ID NO: 2733076 - RNA, 19 nt, Artificial Sequence
  Description of Artificial Sequence: Synthetic oligonucleotide
caccauauuauaguucugu

SEQ ID NO: 2733077 - RNA, 19 nt, Artificial Sequence
  Description of Artificial Sequence: Synthetic oligonucleotide
gauuaccacuguaccuuuc

SEQ ID NO: 2733078 - RNA, 19 nt, Artificial Sequence
  Description of Artificial Sequence: Synthetic oligonucleotide
caaugaugucugaguaaga

SEQ ID NO: 2733079 - RNA, 19 nt, Artificial Sequence
  Description of Artificial Sequence: Synthetic oligonucleotide
ggaaugcaguugucaacug

SEQ ID NO: 2733080 - RNA, 19 nt, Artificial Sequence
  Description of Artificial Sequence: Synthetic oligonucleotide
ggcacgaaaacaugagaua

SEQ ID NO: 2733081 - RNA, 19 nt, Artificial Sequence
  Description of Artificial Sequence: Synthetic oligonucleotide
augucugaguaagaauaua

SEQ ID NO: 2733082 - RNA, 19 nt, Artificial Sequence
  Description of Artificial Sequence: Synthetic oligonucleotide
cagcuauauaaaaggaaau

SEQ ID NO: 2733083 - RNA, 19 nt, Artificial Sequence
  Description of Artificial Sequence: Synthetic oligonucleotide
gcuuuucaauggaaugcag

SEQ ID NO: 2733084 - RNA, 19 nt, Artificial Sequence
  Description of Artificial Sequence: Synthetic oligonucleotide
agguaacuagacaaaccuu

SEQ ID NO: 2733085 - RNA, 19 nt, Artificial Sequence
  Description of Artificial Sequence: Synthetic oligonucleotide
cugugaauauggcacgagu

SEQ ID NO: 2733086 - RNA, 19 nt, Artificial Sequence
  Description of Artificial Sequence: Synthetic oligonucleotide
acaccauauuauaguucug

SEQ ID NO: 2733087 - RNA, 19 nt, Artificial Sequence
  Description of Artificial Sequence: Synthetic oligonucleotide
cauauucuucagcuauaua

SEQ ID NO: 2733088 - RNA, 19 nt, Artificial Sequence
  Description of Artificial Sequence: Synthetic oligonucleotide
gagccaugacaaagauuac

SEQ ID NO: 2733089 - RNA, 19 nt, Artificial Sequence
  Description of Artificial Sequence: Synthetic oligonucleotide
uggcacgaguugacaccca

SEQ ID NO: 2733090 - RNA, 19 nt, Artificial Sequence
  Description of Artificial Sequence: Synthetic oligonucleotide
ccaaaaccguagugaauuc

SEQ ID NO: 2733091 - RNA, 19 nt, Artificial Sequence
  Description of Artificial Sequence: Synthetic oligonucleotide
gauaggaaaugaggaucgu

SEQ ID NO: 2733092 - RNA, 19 nt, Artificial Sequence
  Description of Artificial Sequence: Synthetic oligonucleotide
gucugaguaagaauauauu

SEQ ID NO: 2733093 - RNA, 19 nt, Artificial Sequence
  Description of Artificial Sequence: Synthetic oligonucleotide
ggaggugguggcccucacc

SEQ ID NO: 2733094 - RNA, 19 nt, Artificial Sequence
  Description of Artificial Sequence: Synthetic oligonucleotide
cugacaaguuuacuucaau

SEQ ID NO: 2733095 - RNA, 19 nt, Artificial Sequence
  Description of Artificial Sequence: Synthetic oligonucleotide
auaagccuacaaacacuuu

SEQ ID NO: 2733096 - RNA, 19 nt, Artificial Sequence
  Description of Artificial Sequence: Synthetic oligonucleotide
acauuacuguuuacauauu

SEQ ID NO: 2733097 - RNA, 19 nt, Artificial Sequence
  Description of Artificial Sequence: Synthetic oligonucleotide
gacagagaaaugacccuuu

SEQ ID NO: 2733098 - RNA, 19 nt, Artificial Sequence
  Description of Artificial Sequence: Synthetic oligonucleotide
acccaaaaccguagugaau

SEQ ID NO: 2733099 - RNA, 19 nt, Artificial Sequence
  Description of Artificial Sequence: Synthetic oligonucleotide
cuuacaggggccagcuuuu

SEQ ID NO: 2733100 - RNA, 19 nt, Artificial Sequence
  Description of Artificial Sequence: Synthetic oligonucleotide
ugguggcccucaccuuuaa

SEQ ID NO: 2733101 - RNA, 19 nt, Artificial Sequence
  Description of Artificial Sequence: Synthetic oligonucleotide
aucuuacaggggccagcuu

SEQ ID NO: 2733102 - RNA, 19 nt, Artificial Sequence
  Description of Artificial Sequence: Synthetic oligonucleotide
aguugucaacugagccaug

SEQ ID NO: 2733103 - RNA, 19 nt, Artificial Sequence
  Description of Artificial Sequence: Synthetic oligonucleotide
ggcacgaguugacacccaa

SEQ ID NO: 2733104 - RNA, 19 nt, Artificial Sequence
  Description of Artificial Sequence: Synthetic oligonucleotide
gggccagcuuuucaaugga

SEQ ID NO: 2733105 - RNA, 19 nt, Artificial Sequence
  Description of Artificial Sequence: Synthetic oligonucleotide
cguagugaauuccaucaaa

SEQ ID NO: 2733106 - RNA, 19 nt, Artificial Sequence
  Description of Artificial Sequence: Synthetic oligonucleotide
ggcuacuguuuacaauacu

SEQ ID NO: 2733107 - RNA, 19 nt, Artificial Sequence
  Description of Artificial Sequence: Synthetic oligonucleotide
gcccucaccuuuaauccca

SEQ ID NO: 2733108 - RNA, 19 nt, Artificial Sequence
  Description of Artificial Sequence: Synthetic oligonucleotide
cccaaaaccguagugaauu

SEQ ID NO: 2733109 - RNA, 19 nt, Artificial Sequence
  Description of Artificial Sequence: Synthetic oligonucleotide
aggugguggcccucaccuu

SEQ ID NO: 2733110 - RNA, 19 nt, Artificial Sequence
  Description of Artificial Sequence: Synthetic oligonucleotide
ccucaccuuuaaucccagc

SEQ ID NO: 2733111 - RNA, 19 nt, Artificial Sequence
  Description of Artificial Sequence: Synthetic oligonucleotide
cugagccaugacaaagauu

SEQ ID NO: 2733112 - RNA, 19 nt, Artificial Sequence
  Description of Artificial Sequence: Synthetic oligonucleotide
cccucaccuuuaaucccag

SEQ ID NO: 2733113 - RNA, 19 nt, Artificial Sequence
  Description of Artificial Sequence: Synthetic oligonucleotide
cguaucuuacaggggccag

SEQ ID NO: 2733114 - RNA, 19 nt, Artificial Sequence
  Description of Artificial Sequence: Synthetic oligonucleotide
cgaaaacaugagauaggaa

SEQ ID NO: 2733115 - RNA, 19 nt, Artificial Sequence
  Description of Artificial Sequence: Synthetic oligonucleotide
gccagcuuuucaauggaau

SEQ ID NO: 2733116 - RNA, 19 nt, Artificial Sequence
  Description of Artificial Sequence: Synthetic oligonucleotide
ccacuguaccuuucuaagu

SEQ ID NO: 2733117 - RNA, 19 nt, Artificial Sequence
  Description of Artificial Sequence: Synthetic oligonucleotide
ccguagugaauuccaucaa

SEQ ID NO: 2733118 - RNA, 19 nt, Artificial Sequence
  Description of Artificial Sequence: Synthetic oligonucleotide
caggggccagcuuuucaau

SEQ ID NO: 2733119 - RNA, 19 nt, Artificial Sequence
  Description of Artificial Sequence: Synthetic oligonucleotide
gugguggcccucaccuuua

SEQ ID NO: 2733120 - RNA, 19 nt, Artificial Sequence
  Description of Artificial Sequence: Synthetic oligonucleotide
ggccagcuuuucaauggaa

SEQ ID NO: 2733121 - RNA, 19 nt, Artificial Sequence
  Description of Artificial Sequence: Synthetic oligonucleotide
gcacgaguugacacccaaa

SEQ ID NO: 2733122 - RNA, 19 nt, Artificial Sequence
  Description of Artificial Sequence: Synthetic oligonucleotide
gggaggugguggcccucac

SEQ ID NO: 2733123 - RNA, 19 nt, Artificial Sequence
  Description of Artificial Sequence: Synthetic oligonucleotide
gguggcccucaccuuuaau

SEQ ID NO: 2733124 - RNA, 19 nt, Artificial Sequence
  Description of Artificial Sequence: Synthetic oligonucleotide
gccgggaggugguggcccu

SEQ ID NO: 2733125 - RNA, 19 nt, Artificial Sequence
  Description of Artificial Sequence: Synthetic oligonucleotide
ccgggaggugguggcccuc

SEQ ID NO: 2733126 - RNA, 19 nt, Artificial Sequence
  Description of Artificial Sequence: Synthetic oligonucleotide
gacaguggacuggaggagg

SEQ ID NO: 2733127 - RNA, 19 nt, Artificial Sequence
  Description of Artificial Sequence: Synthetic oligonucleotide
aaugagacccagagcagca

SEQ ID NO: 2733128 - RNA, 19 nt, Artificial Sequence
  Description of Artificial Sequence: Synthetic oligonucleotide
caaugagacccagagcagc

SEQ ID NO: 2733129 - RNA, 19 nt, Artificial Sequence
  Description of Artificial Sequence: Synthetic oligonucleotide
acaguggacuggaggaggc

SEQ ID NO: 2733130 - RNA, 19 nt, Artificial Sequence
  Description of Artificial Sequence: Synthetic oligonucleotide
ugagacccagagcagcaau

SEQ ID NO: 2733131 - RNA, 19 nt, Artificial Sequence
  Description of Artificial Sequence: Synthetic oligonucleotide
gggacaguggacuggagga

SEQ ID NO: 2733132 - RNA, 19 nt, Artificial Sequence
  Description of Artificial Sequence: Synthetic oligonucleotide
acccagagcagcaaugacu

SEQ ID NO: 2733133 - RNA, 19 nt, Artificial Sequence
  Description of Artificial Sequence: Synthetic oligonucleotide
gagacccagagcagcaaug

SEQ ID NO: 2733134 - RNA, 19 nt, Artificial Sequence
  Description of Artificial Sequence: Synthetic oligonucleotide
agacccagagcagcaauga

SEQ ID NO: 2733135 - RNA, 19 nt, Artificial Sequence
  Description of Artificial Sequence: Synthetic oligonucleotide
gacccagagcagcaaugac

SEQ ID NO: 2733136 - RNA, 19 nt, Artificial Sequence
  Description of Artificial Sequence: Synthetic oligonucleotide
guggacuggaggaggcucc

SEQ ID NO: 2733137 - RNA, 19 nt, Artificial Sequence
  Description of Artificial Sequence: Synthetic oligonucleotide
uggacuggaggaggcuccc

SEQ ID NO: 2733138 - RNA, 19 nt, Artificial Sequence
  Description of Artificial Sequence: Synthetic oligonucleotide
uggggacaguggacuggag

SEQ ID NO: 2733139 - RNA, 19 nt, Artificial Sequence
  Description of Artificial Sequence: Synthetic oligonucleotide
ggacaguggacuggaggag

SEQ ID NO: 2733140 - RNA, 19 nt, Artificial Sequence
  Description of Artificial Sequence: Synthetic oligonucleotide
cuggaggaggcucccaucu

SEQ ID NO: 2733141 - RNA, 19 nt, Artificial Sequence
  Description of Artificial Sequence: Synthetic oligonucleotide
gacuggaggaggcucccau

SEQ ID NO: 2733142 - RNA, 19 nt, Artificial Sequence
  Description of Artificial Sequence: Synthetic oligonucleotide
ggacuggaggaggcuccca

SEQ ID NO: 2733143 - RNA, 19 nt, Artificial Sequence
  Description of Artificial Sequence: Synthetic oligonucleotide
aaggucauaggccacaagg

SEQ ID NO: 2733144 - RNA, 19 nt, Artificial Sequence
  Description of Artificial Sequence: Synthetic oligonucleotide
agugauaguagccaccacc

SEQ ID NO: 2733145 - RNA, 19 nt, Artificial Sequence
  Description of Artificial Sequence: Synthetic oligonucleotide
gauggguuuauucacauug

SEQ ID NO: 2733146 - RNA, 19 nt, Artificial Sequence
  Description of Artificial Sequence: Synthetic oligonucleotide
auggaaaccacauagcgag

SEQ ID NO: 2733147 - RNA, 19 nt, Artificial Sequence
  Description of Artificial Sequence: Synthetic oligonucleotide
uguaagaugccauagagua

SEQ ID NO: 2733148 - RNA, 19 nt, Artificial Sequence
  Description of Artificial Sequence: Synthetic oligonucleotide
aagcgugccagcuacaauc

SEQ ID NO: 2733149 - RNA, 19 nt, Artificial Sequence
  Description of Artificial Sequence: Synthetic oligonucleotide
gaugccauagaguagcgcc

SEQ ID NO: 2733150 - RNA, 19 nt, Artificial Sequence
  Description of Artificial Sequence: Synthetic oligonucleotide
agcuacaaucaucacaucg

SEQ ID NO: 2733151 - RNA, 19 nt, Artificial Sequence
  Description of Artificial Sequence: Synthetic oligonucleotide
acaaucaucacaucggccu

SEQ ID NO: 2733152 - RNA, 19 nt, Artificial Sequence
  Description of Artificial Sequence: Synthetic oligonucleotide
uaagaugccauagaguagc

SEQ ID NO: 2733153 - RNA, 19 nt, Artificial Sequence
  Description of Artificial Sequence: Synthetic oligonucleotide
accaaagcgguccaugucg

SEQ ID NO: 2733154 - RNA, 19 nt, Artificial Sequence
  Description of Artificial Sequence: Synthetic oligonucleotide
aucuccacagcacagcacg

SEQ ID NO: 2733155 - RNA, 19 nt, Artificial Sequence
  Description of Artificial Sequence: Synthetic oligonucleotide
uagaguagcgccucggccg

SEQ ID NO: 2733156 - RNA, 19 nt, Artificial Sequence
  Description of Artificial Sequence: Synthetic oligonucleotide
auagaguagcgccucggcc

SEQ ID NO: 2733157 - RNA, 19 nt, Artificial Sequence
  Description of Artificial Sequence: Synthetic oligonucleotide
ugaguaggaguagugauag

SEQ ID NO: 2733158 - RNA, 19 nt, Artificial Sequence
  Description of Artificial Sequence: Synthetic oligonucleotide
ucauaggccacaaggagcu

SEQ ID NO: 2733159 - RNA, 19 nt, Artificial Sequence
  Description of Artificial Sequence: Synthetic oligonucleotide
uggguuuauucacauuggg

SEQ ID NO: 2733160 - RNA, 19 nt, Artificial Sequence
  Description of Artificial Sequence: Synthetic oligonucleotide
uggucauacaccuugcgga

SEQ ID NO: 2733161 - RNA, 19 nt, Artificial Sequence
  Description of Artificial Sequence: Synthetic oligonucleotide
uacauagauguccacuggc

SEQ ID NO: 2733162 - RNA, 19 nt, Artificial Sequence
  Description of Artificial Sequence: Synthetic oligonucleotide
cacauugggauucuggggc

SEQ ID NO: 2733163 - RNA, 19 nt, Artificial Sequence
  Description of Artificial Sequence: Synthetic oligonucleotide
cacauagcgagguucaggc

SEQ ID NO: 2733164 - RNA, 19 nt, Artificial Sequence
  Description of Artificial Sequence: Synthetic oligonucleotide
aaaccacauagcgagguuc

SEQ ID NO: 2733165 - RNA, 19 nt, Artificial Sequence
  Description of Artificial Sequence: Synthetic oligonucleotide
uuuauucacauugggauuc

SEQ ID NO: 2733166 - RNA, 19 nt, Artificial Sequence
  Description of Artificial Sequence: Synthetic oligonucleotide
uggacagccugguacauag

SEQ ID NO: 2733167 - RNA, 19 nt, Artificial Sequence
  Description of Artificial Sequence: Synthetic oligonucleotide
uguccacuggcacaaugcg

SEQ ID NO: 2733168 - RNA, 19 nt, Artificial Sequence
  Description of Artificial Sequence: Synthetic oligonucleotide
aagcgguccaugucguagc

SEQ ID NO: 2733169 - RNA, 19 nt, Artificial Sequence
  Description of Artificial Sequence: Synthetic oligonucleotide
ucacauugggauucugggg

SEQ ID NO: 2733170 - RNA, 19 nt, Artificial Sequence
  Description of Artificial Sequence: Synthetic oligonucleotide
aagccgaaggucauaggcc

SEQ ID NO: 2733171 - RNA, 19 nt, Artificial Sequence
  Description of Artificial Sequence: Synthetic oligonucleotide
uccacuggcacaaugcggu

SEQ ID NO: 2733172 - RNA, 19 nt, Artificial Sequence
  Description of Artificial Sequence: Synthetic oligonucleotide
caagccgaaggucauaggc

SEQ ID NO: 2733173 - RNA, 19 nt, Artificial Sequence
  Description of Artificial Sequence: Synthetic oligonucleotide
caucuuguugguaagcgug

SEQ ID NO: 2733174 - RNA, 19 nt, Artificial Sequence
  Description of Artificial Sequence: Synthetic oligonucleotide
uucugcucacgcuugaucu

SEQ ID NO: 2733175 - RNA, 19 nt, Artificial Sequence
  Description of Artificial Sequence: Synthetic oligonucleotide
acuggcacaaugcggucgc

SEQ ID NO: 2733176 - RNA, 19 nt, Artificial Sequence
  Description of Artificial Sequence: Synthetic oligonucleotide
uaggaguagugauaguagc

SEQ ID NO: 2733177 - RNA, 19 nt, Artificial Sequence
  Description of Artificial Sequence: Synthetic oligonucleotide
ucauacaccuugcggagug

SEQ ID NO: 2733178 - RNA, 19 nt, Artificial Sequence
  Description of Artificial Sequence: Synthetic oligonucleotide
gugauaguagccaccaccg

SEQ ID NO: 2733179 - RNA, 19 nt, Artificial Sequence
  Description of Artificial Sequence: Synthetic oligonucleotide
aggaguagugauaguagcc

SEQ ID NO: 2733180 - RNA, 19 nt, Artificial Sequence
  Description of Artificial Sequence: Synthetic oligonucleotide
aguagugauaguagccacc

SEQ ID NO: 2733181 - RNA, 19 nt, Artificial Sequence
  Description of Artificial Sequence: Synthetic oligonucleotide
gaacaccacaccaaagcgg

SEQ ID NO: 2733182 - RNA, 19 nt, Artificial Sequence
  Description of Artificial Sequence: Synthetic oligonucleotide
ucuggucauacaccuugcg

SEQ ID NO: 2733183 - RNA, 19 nt, Artificial Sequence
  Description of Artificial Sequence: Synthetic oligonucleotide
aaugcggucgcagccucgc

SEQ ID NO: 2733184 - RNA, 19 nt, Artificial Sequence
  Description of Artificial Sequence: Synthetic oligonucleotide
cuacaaucaucacaucggc

SEQ ID NO: 2733185 - RNA, 19 nt, Artificial Sequence
  Description of Artificial Sequence: Synthetic oligonucleotide
aacaccacaccaaagcggu

SEQ ID NO: 2733186 - RNA, 19 nt, Artificial Sequence
  Description of Artificial Sequence: Synthetic oligonucleotide
auaggccacaaggagcucc

SEQ ID NO: 2733187 - RNA, 19 nt, Artificial Sequence
  Description of Artificial Sequence: Synthetic oligonucleotide
uggguggacagccugguac

SEQ ID NO: 2733188 - RNA, 19 nt, Artificial Sequence
  Description of Artificial Sequence: Synthetic oligonucleotide
agcacagcacgccaagccg

SEQ ID NO: 2733189 - RNA, 19 nt, Artificial Sequence
  Description of Artificial Sequence: Synthetic oligonucleotide
gguacauagauguccacug

SEQ ID NO: 2733190 - RNA, 19 nt, Artificial Sequence
  Description of Artificial Sequence: Synthetic oligonucleotide
uuguugguaagcgugccag

SEQ ID NO: 2733191 - RNA, 19 nt, Artificial Sequence
  Description of Artificial Sequence: Synthetic oligonucleotide
auagauguccacuggcaca

SEQ ID NO: 2733192 - RNA, 19 nt, Artificial Sequence
  Description of Artificial Sequence: Synthetic oligonucleotide
gaugggagggcuuggguac

SEQ ID NO: 2733193 - RNA, 19 nt, Artificial Sequence
  Description of Artificial Sequence: Synthetic oligonucleotide
acauacucggcccgguuuc

SEQ ID NO: 2733194 - RNA, 19 nt, Artificial Sequence
  Description of Artificial Sequence: Synthetic oligonucleotide
ggaacaccacaccaaagcg

SEQ ID NO: 2733195 - RNA, 19 nt, Artificial Sequence
  Description of Artificial Sequence: Synthetic oligonucleotide
gcuguaagaugccauagag

SEQ ID NO: 2733196 - RNA, 19 nt, Artificial Sequence
  Description of Artificial Sequence: Synthetic oligonucleotide
ucaucuccacagcacagca

SEQ ID NO: 2733197 - RNA, 19 nt, Artificial Sequence
  Description of Artificial Sequence: Synthetic oligonucleotide
ugugcaucaucuccacagc

SEQ ID NO: 2733198 - RNA, 19 nt, Artificial Sequence
  Description of Artificial Sequence: Synthetic oligonucleotide
acugaguaggaguagugau

SEQ ID NO: 2733199 - RNA, 19 nt, Artificial Sequence
  Description of Artificial Sequence: Synthetic oligonucleotide
ugcaucaucuccacagcac

SEQ ID NO: 2733200 - RNA, 19 nt, Artificial Sequence
  Description of Artificial Sequence: Synthetic oligonucleotide
aggucauccagcuuggcaa

SEQ ID NO: 2733201 - RNA, 19 nt, Artificial Sequence
  Description of Artificial Sequence: Synthetic oligonucleotide
auguccacuggcacaaugc

SEQ ID NO: 2733202 - RNA, 19 nt, Artificial Sequence
  Description of Artificial Sequence: Synthetic oligonucleotide
ugguaagcgugccagcuac

SEQ ID NO: 2733203 - RNA, 19 nt, Artificial Sequence
  Description of Artificial Sequence: Synthetic oligonucleotide
uuggcacaacuccccaugg

SEQ ID NO: 2733204 - RNA, 19 nt, Artificial Sequence
  Description of Artificial Sequence: Synthetic oligonucleotide
ucuucaacuucugcucacg

SEQ ID NO: 2733205 - RNA, 19 nt, Artificial Sequence
  Description of Artificial Sequence: Synthetic oligonucleotide
ucuaccugcgguaccagau

SEQ ID NO: 2733206 - RNA, 19 nt, Artificial Sequence
  Description of Artificial Sequence: Synthetic oligonucleotide
guaggaguagugauaguag

SEQ ID NO: 2733207 - RNA, 19 nt, Artificial Sequence
  Description of Artificial Sequence: Synthetic oligonucleotide
cauagauguccacuggcac

SEQ ID NO: 2733208 - RNA, 19 nt, Artificial Sequence
  Description of Artificial Sequence: Synthetic oligonucleotide
uaggccacaaggagcuccg

SEQ ID NO: 2733209 - RNA, 19 nt, Artificial Sequence
  Description of Artificial Sequence: Synthetic oligonucleotide
aguaggaguagugauagua

SEQ ID NO: 2733210 - RNA, 19 nt, Artificial Sequence
  Description of Artificial Sequence: Synthetic oligonucleotide
uuccguugcagcuguaaga

SEQ ID NO: 2733211 - RNA, 19 nt, Artificial Sequence
  Description of Artificial Sequence: Synthetic oligonucleotide
cacaacuccccauggaaac

SEQ ID NO: 2733212 - RNA, 19 nt, Artificial Sequence
  Description of Artificial Sequence: Synthetic oligonucleotide
aucuuguugguaagcgugc

SEQ ID NO: 2733213 - RNA, 19 nt, Artificial Sequence
  Description of Artificial Sequence: Synthetic oligonucleotide
caggcaucuggucauacac

SEQ ID NO: 2733214 - RNA, 19 nt, Artificial Sequence
  Description of Artificial Sequence: Synthetic oligonucleotide
ugguguuuggcccggcagc

SEQ ID NO: 2733215 - RNA, 19 nt, Artificial Sequence
  Description of Artificial Sequence: Synthetic oligonucleotide
guuggcacaacuccccaug

SEQ ID NO: 2733216 - RNA, 19 nt, Artificial Sequence
  Description of Artificial Sequence: Synthetic oligonucleotide
ccauggaaaccacauagcg

SEQ ID NO: 2733217 - RNA, 19 nt, Artificial Sequence
  Description of Artificial Sequence: Synthetic oligonucleotide
acaacuccccauggaaacc

SEQ ID NO: 2733218 - RNA, 19 nt, Artificial Sequence
  Description of Artificial Sequence: Synthetic oligonucleotide
uguuuggcccggcagcucu

SEQ ID NO: 2733219 - RNA, 19 nt, Artificial Sequence
  Description of Artificial Sequence: Synthetic oligonucleotide
gguuuauucacauugggau

SEQ ID NO: 2733220 - RNA, 19 nt, Artificial Sequence
  Description of Artificial Sequence: Synthetic oligonucleotide
gaguagugauaguagccac

SEQ ID NO: 2733221 - RNA, 19 nt, Artificial Sequence
  Description of Artificial Sequence: Synthetic oligonucleotide
ugguacauagauguccacu

SEQ ID NO: 2733222 - RNA, 19 nt, Artificial Sequence
  Description of Artificial Sequence: Synthetic oligonucleotide
uggaaaccacauagcgagg

SEQ ID NO: 2733223 - RNA, 19 nt, Artificial Sequence
  Description of Artificial Sequence: Synthetic oligonucleotide
gaucuucaacuucugcuca

SEQ ID NO: 2733224 - RNA, 19 nt, Artificial Sequence
  Description of Artificial Sequence: Synthetic oligonucleotide
ggucauaggccacaaggag

SEQ ID NO: 2733225 - RNA, 19 nt, Artificial Sequence
  Description of Artificial Sequence: Synthetic oligonucleotide
acgcuugaucuuccguugc

SEQ ID NO: 2733226 - RNA, 19 nt, Artificial Sequence
  Description of Artificial Sequence: Synthetic oligonucleotide
cauggaaaccacauagcga

SEQ ID NO: 2733227 - RNA, 19 nt, Artificial Sequence
  Description of Artificial Sequence: Synthetic oligonucleotide
gagugcaggggccaucuug

SEQ ID NO: 2733228 - RNA, 19 nt, Artificial Sequence
  Description of Artificial Sequence: Synthetic oligonucleotide
ugucguagcgcggagcagc

SEQ ID NO: 2733229 - RNA, 19 nt, Artificial Sequence
  Description of Artificial Sequence: Synthetic oligonucleotide
cauagaguagcgccucggc

SEQ ID NO: 2733230 - RNA, 19 nt, Artificial Sequence
  Description of Artificial Sequence: Synthetic oligonucleotide
agccgaaggucauaggcca

SEQ ID NO: 2733231 - RNA, 19 nt, Artificial Sequence
  Description of Artificial Sequence: Synthetic oligonucleotide
ugaucuuccguugcagcug

SEQ ID NO: 2733232 - RNA, 19 nt, Artificial Sequence
  Description of Artificial Sequence: Synthetic oligonucleotide
ugcgguaccagaucuucaa

SEQ ID NO: 2733233 - RNA, 19 nt, Artificial Sequence
  Description of Artificial Sequence: Synthetic oligonucleotide
auggguuuauucacauugg

SEQ ID NO: 2733234 - RNA, 19 nt, Artificial Sequence
  Description of Artificial Sequence: Synthetic oligonucleotide
ucacgcuugaucuuccguu

SEQ ID NO: 2733235 - RNA, 19 nt, Artificial Sequence
  Description of Artificial Sequence: Synthetic oligonucleotide
uaccugcgguaccagaucu

SEQ ID NO: 2733236 - RNA, 19 nt, Artificial Sequence
  Description of Artificial Sequence: Synthetic oligonucleotide
agaugccauagaguagcgc

SEQ ID NO: 2733237 - RNA, 19 nt, Artificial Sequence
  Description of Artificial Sequence: Synthetic oligonucleotide
acuacugaguaggaguagu

SEQ ID NO: 2733238 - RNA, 19 nt, Artificial Sequence
  Description of Artificial Sequence: Synthetic oligonucleotide
ucacaucggccugacgugg

SEQ ID NO: 2733239 - RNA, 19 nt, Artificial Sequence
  Description of Artificial Sequence: Synthetic oligonucleotide
uacucggcccgguuucugg

SEQ ID NO: 2733240 - RNA, 19 nt, Artificial Sequence
  Description of Artificial Sequence: Synthetic oligonucleotide
cuacugaguaggaguagug

SEQ ID NO: 2733241 - RNA, 19 nt, Artificial Sequence
  Description of Artificial Sequence: Synthetic oligonucleotide
uagauguccacuggcacaa

SEQ ID NO: 2733242 - RNA, 19 nt, Artificial Sequence
  Description of Artificial Sequence: Synthetic oligonucleotide
uccguugcagcuguaagau

SEQ ID NO: 2733243 - RNA, 19 nt, Artificial Sequence
  Description of Artificial Sequence: Synthetic oligonucleotide
guaagaugccauagaguag

SEQ ID NO: 2733244 - RNA, 19 nt, Artificial Sequence
  Description of Artificial Sequence: Synthetic oligonucleotide
cuuccguugcagcuguaag

SEQ ID NO: 2733245 - RNA, 19 nt, Artificial Sequence
  Description of Artificial Sequence: Synthetic oligonucleotide
agcuguaagaugccauaga

SEQ ID NO: 2733246 - RNA, 19 nt, Artificial Sequence
  Description of Artificial Sequence: Synthetic oligonucleotide
aaccacauagcgagguuca

SEQ ID NO: 2733247 - RNA, 19 nt, Artificial Sequence
  Description of Artificial Sequence: Synthetic oligonucleotide
acaccaaagcgguccaugu

SEQ ID NO: 2733248 - RNA, 19 nt, Artificial Sequence
  Description of Artificial Sequence: Synthetic oligonucleotide
accguuggcacaacucccc

SEQ ID NO: 2733249 - RNA, 19 nt, Artificial Sequence
  Description of Artificial Sequence: Synthetic oligonucleotide
uacaccuugcggagugcag

SEQ ID NO: 2733250 - RNA, 19 nt, Artificial Sequence
  Description of Artificial Sequence: Synthetic oligonucleotide
gcgagguucaggcaucugg

SEQ ID NO: 2733251 - RNA, 19 nt, Artificial Sequence
  Description of Artificial Sequence: Synthetic oligonucleotide
ggcacagcagacuguaugc

SEQ ID NO: 2733252 - RNA, 19 nt, Artificial Sequence
  Description of Artificial Sequence: Synthetic oligonucleotide
cagcacgccaagccgaagg

SEQ ID NO: 2733253 - RNA, 19 nt, Artificial Sequence
  Description of Artificial Sequence: Synthetic oligonucleotide
guagugauaguagccacca

SEQ ID NO: 2733254 - RNA, 19 nt, Artificial Sequence
  Description of Artificial Sequence: Synthetic oligonucleotide
acaucggccugacgugggc

SEQ ID NO: 2733255 - RNA, 19 nt, Artificial Sequence
  Description of Artificial Sequence: Synthetic oligonucleotide
aggcaucuggucauacacc

SEQ ID NO: 2733256 - RNA, 19 nt, Artificial Sequence
  Description of Artificial Sequence: Synthetic oligonucleotide
guaccacagcuccagcucc

SEQ ID NO: 2733257 - RNA, 19 nt, Artificial Sequence
  Description of Artificial Sequence: Synthetic oligonucleotide
ucuuguugguaagcgugcc

SEQ ID NO: 2733258 - RNA, 19 nt, Artificial Sequence
  Description of Artificial Sequence: Synthetic oligonucleotide
uguugguaagcgugccagc

SEQ ID NO: 2733259 - RNA, 19 nt, Artificial Sequence
  Description of Artificial Sequence: Synthetic oligonucleotide
caucacaucggccugacgu

SEQ ID NO: 2733260 - RNA, 19 nt, Artificial Sequence
  Description of Artificial Sequence: Synthetic oligonucleotide
acaaugcggucgcagccuc

SEQ ID NO: 2733261 - RNA, 19 nt, Artificial Sequence
  Description of Artificial Sequence: Synthetic oligonucleotide
ucaggcaucuggucauaca

SEQ ID NO: 2733262 - RNA, 19 nt, Artificial Sequence
  Description of Artificial Sequence: Synthetic oligonucleotide
aaucaucacaucggccuga

SEQ ID NO: 2733263 - RNA, 19 nt, Artificial Sequence
  Description of Artificial Sequence: Synthetic oligonucleotide
caccacaccaaagcggucc

SEQ ID NO: 2733264 - RNA, 19 nt, Artificial Sequence
  Description of Artificial Sequence: Synthetic oligonucleotide
cuugcggagugcaggggcc

SEQ ID NO: 2733265 - RNA, 19 nt, Artificial Sequence
  Description of Artificial Sequence: Synthetic oligonucleotide
gaggucauccagcuuggca

SEQ ID NO: 2733266 - RNA, 19 nt, Artificial Sequence
  Description of Artificial Sequence: Synthetic oligonucleotide
cagcacagcacgccaagcc

SEQ ID NO: 2733267 - RNA, 19 nt, Artificial Sequence
  Description of Artificial Sequence: Synthetic oligonucleotide
aagaugccauagaguagcg

SEQ ID NO: 2733268 - RNA, 19 nt, Artificial Sequence
  Description of Artificial Sequence: Synthetic oligonucleotide
aaggagcuccggcgugccc

SEQ ID NO: 2733269 - RNA, 19 nt, Artificial Sequence
  Description of Artificial Sequence: Synthetic oligonucleotide
gcaaccacauacucggccc

SEQ ID NO: 2733270 - RNA, 19 nt, Artificial Sequence
  Description of Artificial Sequence: Synthetic oligonucleotide
ccccauggaaaccacauag

SEQ ID NO: 2733271 - RNA, 19 nt, Artificial Sequence
  Description of Artificial Sequence: Synthetic oligonucleotide
agaugggagggcuugggua

SEQ ID NO: 2733272 - RNA, 19 nt, Artificial Sequence
  Description of Artificial Sequence: Synthetic oligonucleotide
gcuuggguaccacagcucc

SEQ ID NO: 2733273 - RNA, 19 nt, Artificial Sequence
  Description of Artificial Sequence: Synthetic oligonucleotide
cacgcuugaucuuccguug

SEQ ID NO: 2733274 - RNA, 19 nt, Artificial Sequence
  Description of Artificial Sequence: Synthetic oligonucleotide
caaucaucacaucggccug

SEQ ID NO: 2733275 - RNA, 19 nt, Artificial Sequence
  Description of Artificial Sequence: Synthetic oligonucleotide
caaccacauacucggcccg

SEQ ID NO: 2733276 - RNA, 19 nt, Artificial Sequence
  Description of Artificial Sequence: Synthetic oligonucleotide
gaaggucauaggccacaag

SEQ ID NO: 2733277 - RNA, 19 nt, Artificial Sequence
  Description of Artificial Sequence: Synthetic oligonucleotide
cagccugguacauagaugu

SEQ ID NO: 2733278 - RNA, 19 nt, Artificial Sequence
  Description of Artificial Sequence: Synthetic oligonucleotide
caccuugcggagugcaggg

SEQ ID NO: 2733279 - RNA, 19 nt, Artificial Sequence
  Description of Artificial Sequence: Synthetic oligonucleotide
ugggcuggcacggaacacc

SEQ ID NO: 2733280 - RNA, 19 nt, Artificial Sequence
  Description of Artificial Sequence: Synthetic oligonucleotide
ugugguguuuggcccggca

SEQ ID NO: 2733281 - RNA, 19 nt, Artificial Sequence
  Description of Artificial Sequence: Synthetic oligonucleotide
aucuggucauacaccuugc

SEQ ID NO: 2733282 - RNA, 19 nt, Artificial Sequence
  Description of Artificial Sequence: Synthetic oligonucleotide
aggauggguuuauucacau

SEQ ID NO: 2733283 - RNA, 19 nt, Artificial Sequence
  Description of Artificial Sequence: Synthetic oligonucleotide
cacgccaagccgaagguca

SEQ ID NO: 2733284 - RNA, 19 nt, Artificial Sequence
  Description of Artificial Sequence: Synthetic oligonucleotide
caccguuggcacaacuccc

SEQ ID NO: 2733285 - RNA, 19 nt, Artificial Sequence
  Description of Artificial Sequence: Synthetic oligonucleotide
ucaucacaucggccugacg

SEQ ID NO: 2733286 - RNA, 19 nt, Artificial Sequence
  Description of Artificial Sequence: Synthetic oligonucleotide
gugccagcuacaaucauca

SEQ ID NO: 2733287 - RNA, 19 nt, Artificial Sequence
  Description of Artificial Sequence: Synthetic oligonucleotide
guaccagaucuucaacuuc

SEQ ID NO: 2733288 - RNA, 19 nt, Artificial Sequence
  Description of Artificial Sequence: Synthetic oligonucleotide
acauugggauucuggggcu

SEQ ID NO: 2733289 - RNA, 19 nt, Artificial Sequence
  Description of Artificial Sequence: Synthetic oligonucleotide
caugucguagcgcggagca

SEQ ID NO: 2733290 - RNA, 19 nt, Artificial Sequence
  Description of Artificial Sequence: Synthetic oligonucleotide
ugggauucuggggcugugg

SEQ ID NO: 2733291 - RNA, 19 nt, Artificial Sequence
  Description of Artificial Sequence: Synthetic oligonucleotide
uccaugucguagcgcggag

SEQ ID NO: 2733292 - RNA, 19 nt, Artificial Sequence
  Description of Artificial Sequence: Synthetic oligonucleotide
aucaucacaucggccugac

SEQ ID NO: 2733293 - RNA, 19 nt, Artificial Sequence
  Description of Artificial Sequence: Synthetic oligonucleotide
auagcgagguucaggcauc

SEQ ID NO: 2733294 - RNA, 19 nt, Artificial Sequence
  Description of Artificial Sequence: Synthetic oligonucleotide
accaccguuggcacaacuc

SEQ ID NO: 2733295 - RNA, 19 nt, Artificial Sequence
  Description of Artificial Sequence: Synthetic oligonucleotide
ggcaaccacauacucggcc

SEQ ID NO: 2733296 - RNA, 19 nt, Artificial Sequence
  Description of Artificial Sequence: Synthetic oligonucleotide
uggcacggaacaccacacc

SEQ ID NO: 2733297 - RNA, 19 nt, Artificial Sequence
  Description of Artificial Sequence: Synthetic oligonucleotide
uuauucacauugggauucu

SEQ ID NO: 2733298 - RNA, 19 nt, Artificial Sequence
  Description of Artificial Sequence: Synthetic oligonucleotide
ggggcugugguguuuggcc

SEQ ID NO: 2733299 - RNA, 19 nt, Artificial Sequence
  Description of Artificial Sequence: Synthetic oligonucleotide
aacuccccauggaaaccac

SEQ ID NO: 2733300 - RNA, 19 nt, Artificial Sequence
  Description of Artificial Sequence: Synthetic oligonucleotide
gccaucuuguugguaagcg

SEQ ID NO: 2733301 - RNA, 19 nt, Artificial Sequence
  Description of Artificial Sequence: Synthetic oligonucleotide
agugcaggggccaucuugu

SEQ ID NO: 2733302 - RNA, 19 nt, Artificial Sequence
  Description of Artificial Sequence: Synthetic oligonucleotide
ugcggucgcagccucgcac

SEQ ID NO: 2733303 - RNA, 19 nt, Artificial Sequence
  Description of Artificial Sequence: Synthetic oligonucleotide
ggaguagugauaguagcca

SEQ ID NO: 2733304 - RNA, 19 nt, Artificial Sequence
  Description of Artificial Sequence: Synthetic oligonucleotide
ucuggggcugugguguuug

SEQ ID NO: 2733305 - RNA, 19 nt, Artificial Sequence
  Description of Artificial Sequence: Synthetic oligonucleotide
uggcacaacuccccaugga

SEQ ID NO: 2733306 - RNA, 19 nt, Artificial Sequence
  Description of Artificial Sequence: Synthetic oligonucleotide
uaagcgugccagcuacaau

SEQ ID NO: 2733307 - RNA, 19 nt, Artificial Sequence
  Description of Artificial Sequence: Synthetic oligonucleotide
cugacgugggcuggcacgg

SEQ ID NO: 2733308 - RNA, 19 nt, Artificial Sequence
  Description of Artificial Sequence: Synthetic oligonucleotide
ccucgcacuacugaguagg

SEQ ID NO: 2733309 - RNA, 19 nt, Artificial Sequence
  Description of Artificial Sequence: Synthetic oligonucleotide
uugguaagcgugccagcua

SEQ ID NO: 2733310 - RNA, 19 nt, Artificial Sequence
  Description of Artificial Sequence: Synthetic oligonucleotide
gccagcuacaaucaucaca

SEQ ID NO: 2733311 - RNA, 19 nt, Artificial Sequence
  Description of Artificial Sequence: Synthetic oligonucleotide
cagcuguaagaugccauag

SEQ ID NO: 2733312 - RNA, 19 nt, Artificial Sequence
  Description of Artificial Sequence: Synthetic oligonucleotide
agcacgccaagccgaaggu

SEQ ID NO: 2733313 - RNA, 19 nt, Artificial Sequence
  Description of Artificial Sequence: Synthetic oligonucleotide
cggaacaccacaccaaagc

SEQ ID NO: 2733314 - RNA, 19 nt, Artificial Sequence
  Description of Artificial Sequence: Synthetic oligonucleotide
uauucacauugggauucug

SEQ ID NO: 2733315 - RNA, 19 nt, Artificial Sequence
  Description of Artificial Sequence: Synthetic oligonucleotide
gagguucaggcaucugguc

SEQ ID NO: 2733316 - RNA, 19 nt, Artificial Sequence
  Description of Artificial Sequence: Synthetic oligonucleotide
ggcacaaugcggucgcagc

SEQ ID NO: 2733317 - RNA, 19 nt, Artificial Sequence
  Description of Artificial Sequence: Synthetic oligonucleotide
ucuuccguugcagcuguaa

SEQ ID NO: 2733318 - RNA, 19 nt, Artificial Sequence
  Description of Artificial Sequence: Synthetic oligonucleotide
ucgcacuacugaguaggag

SEQ ID NO: 2733319 - RNA, 19 nt, Artificial Sequence
  Description of Artificial Sequence: Synthetic oligonucleotide
cacaucggccugacguggg

SEQ ID NO: 2733320 - RNA, 19 nt, Artificial Sequence
  Description of Artificial Sequence: Synthetic oligonucleotide
cugaguaggaguagugaua

SEQ ID NO: 2733321 - RNA, 19 nt, Artificial Sequence
  Description of Artificial Sequence: Synthetic oligonucleotide
uagugauaguagccaccac

SEQ ID NO: 2733322 - RNA, 19 nt, Artificial Sequence
  Description of Artificial Sequence: Synthetic oligonucleotide
guugcagcuguaagaugcc

SEQ ID NO: 2733323 - RNA, 19 nt, Artificial Sequence
  Description of Artificial Sequence: Synthetic oligonucleotide
uggcacaaugcggucgcag

SEQ ID NO: 2733324 - RNA, 19 nt, Artificial Sequence
  Description of Artificial Sequence: Synthetic oligonucleotide
acagccugguacauagaug

SEQ ID NO: 2733325 - RNA, 19 nt, Artificial Sequence
  Description of Artificial Sequence: Synthetic oligonucleotide
acauagcgagguucaggca

SEQ ID NO: 2733326 - RNA, 19 nt, Artificial Sequence
  Description of Artificial Sequence: Synthetic oligonucleotide
ccaccguuggcacaacucc

SEQ ID NO: 2733327 - RNA, 19 nt, Artificial Sequence
  Description of Artificial Sequence: Synthetic oligonucleotide
caucuccacagcacagcac

SEQ ID NO: 2733328 - RNA, 19 nt, Artificial Sequence
  Description of Artificial Sequence: Synthetic oligonucleotide
aucggccugacgugggcug

SEQ ID NO: 2733329 - RNA, 19 nt, Artificial Sequence
  Description of Artificial Sequence: Synthetic oligonucleotide
cacaccaaagcgguccaug

SEQ ID NO: 2733330 - RNA, 19 nt, Artificial Sequence
  Description of Artificial Sequence: Synthetic oligonucleotide
gccugguacauagaugucc

SEQ ID NO: 2733331 - RNA, 19 nt, Artificial Sequence
  Description of Artificial Sequence: Synthetic oligonucleotide
gugcaucaucuccacagca

SEQ ID NO: 2733332 - RNA, 19 nt, Artificial Sequence
  Description of Artificial Sequence: Synthetic oligonucleotide
ggcacggaacaccacacca

SEQ ID NO: 2733333 - RNA, 19 nt, Artificial Sequence
  Description of Artificial Sequence: Synthetic oligonucleotide
ccugacgugggcuggcacg

SEQ ID NO: 2733334 - RNA, 19 nt, Artificial Sequence
  Description of Artificial Sequence: Synthetic oligonucleotide
cuaccugcgguaccagauc

SEQ ID NO: 2733335 - RNA, 19 nt, Artificial Sequence
  Description of Artificial Sequence: Synthetic oligonucleotide
cauagcgagguucaggcau

SEQ ID NO: 2733336 - RNA, 19 nt, Artificial Sequence
  Description of Artificial Sequence: Synthetic oligonucleotide
agcucuaccugcgguacca

SEQ ID NO: 2733337 - RNA, 19 nt, Artificial Sequence
  Description of Artificial Sequence: Synthetic oligonucleotide
agcgccucggccgugggug

SEQ ID NO: 2733338 - RNA, 19 nt, Artificial Sequence
  Description of Artificial Sequence: Synthetic oligonucleotide
agccucgcacuacugagua

SEQ ID NO: 2733339 - RNA, 19 nt, Artificial Sequence
  Description of Artificial Sequence: Synthetic oligonucleotide
ucugcucacgcuugaucuu

SEQ ID NO: 2733340 - RNA, 19 nt, Artificial Sequence
  Description of Artificial Sequence: Synthetic oligonucleotide
cuuguugguaagcgugcca

SEQ ID NO: 2733341 - RNA, 19 nt, Artificial Sequence
  Description of Artificial Sequence: Synthetic oligonucleotide
uggguaccacagcuccagc

SEQ ID NO: 2733342 - RNA, 19 nt, Artificial Sequence
  Description of Artificial Sequence: Synthetic oligonucleotide
ccagcuacaaucaucacau

SEQ ID NO: 2733343 - RNA, 19 nt, Artificial Sequence
  Description of Artificial Sequence: Synthetic oligonucleotide
auacaccuugcggagugca

SEQ ID NO: 2733344 - RNA, 19 nt, Artificial Sequence
  Description of Artificial Sequence: Synthetic oligonucleotide
cuguaagaugccauagagu

SEQ ID NO: 2733345 - RNA, 19 nt, Artificial Sequence
  Description of Artificial Sequence: Synthetic oligonucleotide
gcacaaugcggucgcagcc

SEQ ID NO: 2733346 - RNA, 19 nt, Artificial Sequence
  Description of Artificial Sequence: Synthetic oligonucleotide
ggcugugguguuuggcccg

SEQ ID NO: 2733347 - RNA, 19 nt, Artificial Sequence
  Description of Artificial Sequence: Synthetic oligonucleotide
ucggcccgguuucugggga

SEQ ID NO: 2733348 - RNA, 19 nt, Artificial Sequence
  Description of Artificial Sequence: Synthetic oligonucleotide
ggguuuauucacauuggga

SEQ ID NO: 2733349 - RNA, 19 nt, Artificial Sequence
  Description of Artificial Sequence: Synthetic oligonucleotide
cugguacauagauguccac

SEQ ID NO: 2733350 - RNA, 19 nt, Artificial Sequence
  Description of Artificial Sequence: Synthetic oligonucleotide
caaugcggucgcagccucg

SEQ ID NO: 2733351 - RNA, 19 nt, Artificial Sequence
  Description of Artificial Sequence: Synthetic oligonucleotide
cucggcccgguuucugggg

SEQ ID NO: 2733352 - RNA, 19 nt, Artificial Sequence
  Description of Artificial Sequence: Synthetic oligonucleotide
gaucuuccguugcagcugu

SEQ ID NO: 2733353 - RNA, 19 nt, Artificial Sequence
  Description of Artificial Sequence: Synthetic oligonucleotide
ggcacaacuccccauggaa

SEQ ID NO: 2733354 - RNA, 19 nt, Artificial Sequence
  Description of Artificial Sequence: Synthetic oligonucleotide
uggcaaccacauacucggc

SEQ ID NO: 2733355 - RNA, 19 nt, Artificial Sequence
  Description of Artificial Sequence: Synthetic oligonucleotide
agcagacuguaugcugcuc

SEQ ID NO: 2733356 - RNA, 19 nt, Artificial Sequence
  Description of Artificial Sequence: Synthetic oligonucleotide
cacaaggagcuccggcgug

SEQ ID NO: 2733357 - RNA, 19 nt, Artificial Sequence
  Description of Artificial Sequence: Synthetic oligonucleotide
auugggauucuggggcugu

SEQ ID NO: 2733358 - RNA, 19 nt, Artificial Sequence
  Description of Artificial Sequence: Synthetic oligonucleotide
agcuuggcaaccacauacu

SEQ ID NO: 2733359 - RNA, 19 nt, Artificial Sequence
  Description of Artificial Sequence: Synthetic oligonucleotide
caccaaagcgguccauguc

SEQ ID NO: 2733360 - RNA, 19 nt, Artificial Sequence
  Description of Artificial Sequence: Synthetic oligonucleotide
augccauagaguagcgccu

SEQ ID NO: 2733361 - RNA, 19 nt, Artificial Sequence
  Description of Artificial Sequence: Synthetic oligonucleotide
aggagcuccggcgugccca

SEQ ID NO: 2733362 - RNA, 19 nt, Artificial Sequence
  Description of Artificial Sequence: Synthetic oligonucleotide
gcgcggagcagccaugugc

SEQ ID NO: 2733363 - RNA, 19 nt, Artificial Sequence
  Description of Artificial Sequence: Synthetic oligonucleotide
cacggaacaccacaccaaa

SEQ ID NO: 2733364 - RNA, 19 nt, Artificial Sequence
  Description of Artificial Sequence: Synthetic oligonucleotide
ggauucuggggcuguggug

SEQ ID NO: 2733365 - RNA, 19 nt, Artificial Sequence
  Description of Artificial Sequence: Synthetic oligonucleotide
acggaacaccacaccaaag

SEQ ID NO: 2733366 - RNA, 19 nt, Artificial Sequence
  Description of Artificial Sequence: Synthetic oligonucleotide
guugguaagcgugccagcu

SEQ ID NO: 2733367 - RNA, 19 nt, Artificial Sequence
  Description of Artificial Sequence: Synthetic oligonucleotide
ucggccugacgugggcugg

SEQ ID NO: 2733368 - RNA, 19 nt, Artificial Sequence
  Description of Artificial Sequence: Synthetic oligonucleotide
cugcucacgcuugaucuuc

SEQ ID NO: 2733369 - RNA, 19 nt, Artificial Sequence
  Description of Artificial Sequence: Synthetic oligonucleotide
gggcugugguguuuggccc

SEQ ID NO: 2733370 - RNA, 19 nt, Artificial Sequence
  Description of Artificial Sequence: Synthetic oligonucleotide
gccaagccgaaggucauag

SEQ ID NO: 2733371 - RNA, 19 nt, Artificial Sequence
  Description of Artificial Sequence: Synthetic oligonucleotide
cauacaccuugcggagugc

SEQ ID NO: 2733372 - RNA, 19 nt, Artificial Sequence
  Description of Artificial Sequence: Synthetic oligonucleotide
ccuugcggagugcaggggc

SEQ ID NO: 2733373 - RNA, 19 nt, Artificial Sequence
  Description of Artificial Sequence: Synthetic oligonucleotide
guaagcgugccagcuacaa

SEQ ID NO: 2733374 - RNA, 19 nt, Artificial Sequence
  Description of Artificial Sequence: Synthetic oligonucleotide
agcgugccagcuacaauca

SEQ ID NO: 2733375 - RNA, 19 nt, Artificial Sequence
  Description of Artificial Sequence: Synthetic oligonucleotide
caacuccccauggaaacca

SEQ ID NO: 2733376 - RNA, 19 nt, Artificial Sequence
  Description of Artificial Sequence: Synthetic oligonucleotide
acgugggcuggcacggaac

SEQ ID NO: 2733377 - RNA, 19 nt, Artificial Sequence
  Description of Artificial Sequence: Synthetic oligonucleotide
cauugggauucuggggcug

SEQ ID NO: 2733378 - RNA, 19 nt, Artificial Sequence
  Description of Artificial Sequence: Synthetic oligonucleotide
uuggcccggcagcucuacc

SEQ ID NO: 2733379 - RNA, 19 nt, Artificial Sequence
  Description of Artificial Sequence: Synthetic oligonucleotide
gcuuggcaaccacauacuc

SEQ ID NO: 2733380 - RNA, 19 nt, Artificial Sequence
  Description of Artificial Sequence: Synthetic oligonucleotide
gccauagaguagcgccucg

SEQ ID NO: 2733381 - RNA, 19 nt, Artificial Sequence
  Description of Artificial Sequence: Synthetic oligonucleotide
uugggauucuggggcugug

SEQ ID NO: 2733382 - RNA, 19 nt, Artificial Sequence
  Description of Artificial Sequence: Synthetic oligonucleotide
gcagccaugugcaucaucu

SEQ ID NO: 2733383 - RNA, 19 nt, Artificial Sequence
  Description of Artificial Sequence: Synthetic oligonucleotide
gagaugggagggcuugggu

SEQ ID NO: 2733384 - RNA, 19 nt, Artificial Sequence
  Description of Artificial Sequence: Synthetic oligonucleotide
gguaccagaucuucaacuu

SEQ ID NO: 2733385 - RNA, 19 nt, Artificial Sequence
  Description of Artificial Sequence: Synthetic oligonucleotide
gguuucuggggagauggga

SEQ ID NO: 2733386 - RNA, 19 nt, Artificial Sequence
  Description of Artificial Sequence: Synthetic oligonucleotide
ucgcagccucgcacuacug

SEQ ID NO: 2733387 - RNA, 19 nt, Artificial Sequence
  Description of Artificial Sequence: Synthetic oligonucleotide
uuuggcccggcagcucuac

SEQ ID NO: 2733388 - RNA, 19 nt, Artificial Sequence
  Description of Artificial Sequence: Synthetic oligonucleotide
accuugcggagugcagggg

SEQ ID NO: 2733389 - RNA, 19 nt, Artificial Sequence
  Description of Artificial Sequence: Synthetic oligonucleotide
guccaugucguagcgcgga

SEQ ID NO: 2733390 - RNA, 19 nt, Artificial Sequence
  Description of Artificial Sequence: Synthetic oligonucleotide
agccugguacauagauguc

SEQ ID NO: 2733391 - RNA, 19 nt, Artificial Sequence
  Description of Artificial Sequence: Synthetic oligonucleotide
gaaaccacauagcgagguu

SEQ ID NO: 2733392 - RNA, 19 nt, Artificial Sequence
  Description of Artificial Sequence: Synthetic oligonucleotide
gucguagcgcggagcagcc

SEQ ID NO: 2733393 - RNA, 19 nt, Artificial Sequence
  Description of Artificial Sequence: Synthetic oligonucleotide
ggguggacagccugguaca

SEQ ID NO: 2733394 - RNA, 19 nt, Artificial Sequence
  Description of Artificial Sequence: Synthetic oligonucleotide
caaggagcuccggcgugcc

SEQ ID NO: 2733395 - RNA, 19 nt, Artificial Sequence
  Description of Artificial Sequence: Synthetic oligonucleotide
uagcgcggagcagccaugu

SEQ ID NO: 2733396 - RNA, 19 nt, Artificial Sequence
  Description of Artificial Sequence: Synthetic oligonucleotide
uccggcgugcccaguugau

SEQ ID NO: 2733397 - RNA, 19 nt, Artificial Sequence
  Description of Artificial Sequence: Synthetic oligonucleotide
cucgcacuacugaguagga

SEQ ID NO: 2733398 - RNA, 19 nt, Artificial Sequence
  Description of Artificial Sequence: Synthetic oligonucleotide
uugcggagugcaggggcca

SEQ ID NO: 2733399 - RNA, 19 nt, Artificial Sequence
  Description of Artificial Sequence: Synthetic oligonucleotide
gacgugggcuggcacggaa

SEQ ID NO: 2733400 - RNA, 19 nt, Artificial Sequence
  Description of Artificial Sequence: Synthetic oligonucleotide
cucuaccugcgguaccaga

SEQ ID NO: 2733401 - RNA, 19 nt, Artificial Sequence
  Description of Artificial Sequence: Synthetic oligonucleotide
gcagcuguaagaugccaua

SEQ ID NO: 2733402 - RNA, 19 nt, Artificial Sequence
  Description of Artificial Sequence: Synthetic oligonucleotide
ccauagaguagcgccucgg

SEQ ID NO: 2733403 - RNA, 19 nt, Artificial Sequence
  Description of Artificial Sequence: Synthetic oligonucleotide
ggaaaccacauagcgaggu

SEQ ID NO: 2733404 - RNA, 19 nt, Artificial Sequence
  Description of Artificial Sequence: Synthetic oligonucleotide
ucggccguggguggacagc

SEQ ID NO: 2733405 - RNA, 19 nt, Artificial Sequence
  Description of Artificial Sequence: Synthetic oligonucleotide
uagcgagguucaggcaucu

SEQ ID NO: 2733406 - RNA, 19 nt, Artificial Sequence
  Description of Artificial Sequence: Synthetic oligonucleotide
augucguagcgcggagcag

SEQ ID NO: 2733407 - RNA, 19 nt, Artificial Sequence
  Description of Artificial Sequence: Synthetic oligonucleotide
cgugccagcuacaaucauc

SEQ ID NO: 2733408 - RNA, 19 nt, Artificial Sequence
  Description of Artificial Sequence: Synthetic oligonucleotide
ggggagaugggagggcuug

SEQ ID NO: 2733409 - RNA, 19 nt, Artificial Sequence
  Description of Artificial Sequence: Synthetic oligonucleotide
uggggagaugggagggcuu

SEQ ID NO: 2733410 - RNA, 19 nt, Artificial Sequence
  Description of Artificial Sequence: Synthetic oligonucleotide
cucggccguggguggacag

SEQ ID NO: 2733411 - RNA, 19 nt, Artificial Sequence
  Description of Artificial Sequence: Synthetic oligonucleotide
ugggcacagcagacuguau

SEQ ID NO: 2733412 - RNA, 19 nt, Artificial Sequence
  Description of Artificial Sequence: Synthetic oligonucleotide
cugcgguaccagaucuuca

SEQ ID NO: 2733413 - RNA, 19 nt, Artificial Sequence
  Description of Artificial Sequence: Synthetic oligonucleotide
ggcgugcccaguugaugag

SEQ ID NO: 2733414 - RNA, 19 nt, Artificial Sequence
  Description of Artificial Sequence: Synthetic oligonucleotide
auacucggcccgguuucug

SEQ ID NO: 2733415 - RNA, 19 nt, Artificial Sequence
  Description of Artificial Sequence: Synthetic oligonucleotide
acaccacaccaaagcgguc

SEQ ID NO: 2733416 - RNA, 19 nt, Artificial Sequence
  Description of Artificial Sequence: Synthetic oligonucleotide
cagcuacaaucaucacauc

SEQ ID NO: 2733417 - RNA, 19 nt, Artificial Sequence
  Description of Artificial Sequence: Synthetic oligonucleotide
gguucaggcaucuggucau

SEQ ID NO: 2733418 - RNA, 19 nt, Artificial Sequence
  Description of Artificial Sequence: Synthetic oligonucleotide
acuccccauggaaaccaca

SEQ ID NO: 2733419 - RNA, 19 nt, Artificial Sequence
  Description of Artificial Sequence: Synthetic oligonucleotide
agcgcggagcagccaugug

SEQ ID NO: 2733420 - RNA, 19 nt, Artificial Sequence
  Description of Artificial Sequence: Synthetic oligonucleotide
cuccagcuccagccuuggg

SEQ ID NO: 2733421 - RNA, 19 nt, Artificial Sequence
  Description of Artificial Sequence: Synthetic oligonucleotide
gucgcagccucgcacuacu

SEQ ID NO: 2733422 - RNA, 19 nt, Artificial Sequence
  Description of Artificial Sequence: Synthetic oligonucleotide
agcuccggcgugcccaguu

SEQ ID NO: 2733423 - RNA, 19 nt, Artificial Sequence
  Description of Artificial Sequence: Synthetic oligonucleotide
agccaccaccguuggcaca

SEQ ID NO: 2733424 - RNA, 19 nt, Artificial Sequence
  Description of Artificial Sequence: Synthetic oligonucleotide
gcgguaccagaucuucaac

SEQ ID NO: 2733425 - RNA, 19 nt, Artificial Sequence
  Description of Artificial Sequence: Synthetic oligonucleotide
ggccaucuuguugguaagc

SEQ ID NO: 2733426 - RNA, 19 nt, Artificial Sequence
  Description of Artificial Sequence: Synthetic oligonucleotide
cagcuccagccuugggcac

SEQ ID NO: 2733427 - RNA, 19 nt, Artificial Sequence
  Description of Artificial Sequence: Synthetic oligonucleotide
gccguggguggacagccug

SEQ ID NO: 2733428 - RNA, 19 nt, Artificial Sequence
  Description of Artificial Sequence: Synthetic oligonucleotide
cccggcagcucuaccugcg

SEQ ID NO: 2733429 - RNA, 19 nt, Artificial Sequence
  Description of Artificial Sequence: Synthetic oligonucleotide
gcagcucuaccugcgguac

SEQ ID NO: 2733430 - RNA, 19 nt, Artificial Sequence
  Description of Artificial Sequence: Synthetic oligonucleotide
ccguggguggacagccugg

SEQ ID NO: 2733431 - RNA, 19 nt, Artificial Sequence
  Description of Artificial Sequence: Synthetic oligonucleotide
guagcgcggagcagccaug

SEQ ID NO: 2733432 - RNA, 19 nt, Artificial Sequence
  Description of Artificial Sequence: Synthetic oligonucleotide
cacagcacgccaagccgaa

SEQ ID NO: 2733433 - RNA, 19 nt, Artificial Sequence
  Description of Artificial Sequence: Synthetic oligonucleotide
gaguaggaguagugauagu

SEQ ID NO: 2733434 - RNA, 19 nt, Artificial Sequence
  Description of Artificial Sequence: Synthetic oligonucleotide
ggagcuccggcgugcccag

SEQ ID NO: 2733435 - RNA, 19 nt, Artificial Sequence
  Description of Artificial Sequence: Synthetic oligonucleotide
gggagaugggagggcuugg

SEQ ID NO: 2733436 - RNA, 19 nt, Artificial Sequence
  Description of Artificial Sequence: Synthetic oligonucleotide
ccugcgguaccagaucuuc

SEQ ID NO: 2733437 - RNA, 19 nt, Artificial Sequence
  Description of Artificial Sequence: Synthetic oligonucleotide
gcgugcccaguugaugagg

SEQ ID NO: 2733438 - RNA, 19 nt, Artificial Sequence
  Description of Artificial Sequence: Synthetic oligonucleotide
gcacuacugaguaggagua

SEQ ID NO: 2733439 - RNA, 19 nt, Artificial Sequence
  Description of Artificial Sequence: Synthetic oligonucleotide
cucacgcuugaucuuccgu

SEQ ID NO: 2733440 - RNA, 19 nt, Artificial Sequence
  Description of Artificial Sequence: Synthetic oligonucleotide
cuugggcacagcagacugu

SEQ ID NO: 2733441 - RNA, 19 nt, Artificial Sequence
  Description of Artificial Sequence: Synthetic oligonucleotide
ggcagcucuaccugcggua

SEQ ID NO: 2733442 - RNA, 19 nt, Artificial Sequence
  Description of Artificial Sequence: Synthetic oligonucleotide
ggguaccacagcuccagcu

SEQ ID NO: 2733443 - RNA, 19 nt, Artificial Sequence
  Description of Artificial Sequence: Synthetic oligonucleotide
cgcacuacugaguaggagu

SEQ ID NO: 2733444 - RNA, 19 nt, Artificial Sequence
  Description of Artificial Sequence: Synthetic oligonucleotide
aggccacaaggagcuccgg

SEQ ID NO: 2733445 - RNA, 19 nt, Artificial Sequence
  Description of Artificial Sequence: Synthetic oligonucleotide
gggauucuggggcuguggu

SEQ ID NO: 2733446 - RNA, 19 nt, Artificial Sequence
  Description of Artificial Sequence: Synthetic oligonucleotide
cuccggcgugcccaguuga

SEQ ID NO: 2733447 - RNA, 19 nt, Artificial Sequence
  Description of Artificial Sequence: Synthetic oligonucleotide
gccucgcacuacugaguag

SEQ ID NO: 2733448 - RNA, 19 nt, Artificial Sequence
  Description of Artificial Sequence: Synthetic oligonucleotide
agcgagguucaggcaucug

SEQ ID NO: 2733449 - RNA, 19 nt, Artificial Sequence
  Description of Artificial Sequence: Synthetic oligonucleotide
augcggucgcagccucgca

SEQ ID NO: 2733450 - RNA, 19 nt, Artificial Sequence
  Description of Artificial Sequence: Synthetic oligonucleotide
cacauacucggcccgguuu

SEQ ID NO: 2733451 - RNA, 19 nt, Artificial Sequence
  Description of Artificial Sequence: Synthetic oligonucleotide
cacaaugcggucgcagccu

SEQ ID NO: 2733452 - RNA, 19 nt, Artificial Sequence
  Description of Artificial Sequence: Synthetic oligonucleotide
ugacgugggcuggcacgga

SEQ ID NO: 2733453 - RNA, 19 nt, Artificial Sequence
  Description of Artificial Sequence: Synthetic oligonucleotide
ucguagcgcggagcagcca

SEQ ID NO: 2733454 - RNA, 19 nt, Artificial Sequence
  Description of Artificial Sequence: Synthetic oligonucleotide
gugggcuggcacggaacac

SEQ ID NO: 2733455 - RNA, 19 nt, Artificial Sequence
  Description of Artificial Sequence: Synthetic oligonucleotide
gcacagcacgccaagccga

SEQ ID NO: 2733456 - RNA, 19 nt, Artificial Sequence
  Description of Artificial Sequence: Synthetic oligonucleotide
ccaugucguagcgcggagc

SEQ ID NO: 2733457 - RNA, 19 nt, Artificial Sequence
  Description of Artificial Sequence: Synthetic oligonucleotide
caaagcgguccaugucgua

SEQ ID NO: 2733458 - RNA, 19 nt, Artificial Sequence
  Description of Artificial Sequence: Synthetic oligonucleotide
ugcggagugcaggggccau

SEQ ID NO: 2733459 - RNA, 19 nt, Artificial Sequence
  Description of Artificial Sequence: Synthetic oligonucleotide
gucauacaccuugcggagu

SEQ ID NO: 2733460 - RNA, 19 nt, Artificial Sequence
  Description of Artificial Sequence: Synthetic oligonucleotide
gcuccggcgugcccaguug

SEQ ID NO: 2733461 - RNA, 19 nt, Artificial Sequence
  Description of Artificial Sequence: Synthetic oligonucleotide
gcacggaacaccacaccaa

SEQ ID NO: 2733462 - RNA, 19 nt, Artificial Sequence
  Description of Artificial Sequence: Synthetic oligonucleotide
ccguugcagcuguaagaug

SEQ ID NO: 2733463 - RNA, 19 nt, Artificial Sequence
  Description of Artificial Sequence: Synthetic oligonucleotide
cgcggagcagccaugugca

SEQ ID NO: 2733464 - RNA, 19 nt, Artificial Sequence
  Description of Artificial Sequence: Synthetic oligonucleotide
gccaccaccguuggcacaa

SEQ ID NO: 2733465 - RNA, 19 nt, Artificial Sequence
  Description of Artificial Sequence: Synthetic oligonucleotide
cagccucgcacuacugagu

SEQ ID NO: 2733466 - RNA, 19 nt, Artificial Sequence
  Description of Artificial Sequence: Synthetic oligonucleotide
gguguuuggcccggcagcu

SEQ ID NO: 2733467 - RNA, 19 nt, Artificial Sequence
  Description of Artificial Sequence: Synthetic oligonucleotide
gcccggcagcucuaccugc

SEQ ID NO: 2733468 - RNA, 19 nt, Artificial Sequence
  Description of Artificial Sequence: Synthetic oligonucleotide
ccggcagcucuaccugcgg

SEQ ID NO: 2733469 - RNA, 19 nt, Artificial Sequence
  Description of Artificial Sequence: Synthetic oligonucleotide
cugugguguuuggcccggc

SEQ ID NO: 2733470 - RNA, 19 nt, Artificial Sequence
  Description of Artificial Sequence: Synthetic oligonucleotide
guguuuggcccggcagcuc

SEQ ID NO: 2733471 - RNA, 19 nt, Artificial Sequence
  Description of Artificial Sequence: Synthetic oligonucleotide
guggacagccugguacaua

SEQ ID NO: 2733472 - RNA, 19 nt, Artificial Sequence
  Description of Artificial Sequence: Synthetic oligonucleotide
acgccaagccgaaggucau

SEQ ID NO: 2733473 - RNA, 19 nt, Artificial Sequence
  Description of Artificial Sequence: Synthetic oligonucleotide
gguaagcgugccagcuaca

SEQ ID NO: 2733474 - RNA, 19 nt, Artificial Sequence
  Description of Artificial Sequence: Synthetic oligonucleotide
agauguccacuggcacaau

SEQ ID NO: 2733475 - RNA, 19 nt, Artificial Sequence
  Description of Artificial Sequence: Synthetic oligonucleotide
gggcuggcacggaacacca

SEQ ID NO: 2733476 - RNA, 19 nt, Artificial Sequence
  Description of Artificial Sequence: Synthetic oligonucleotide
cggcgugcccaguugauga

SEQ ID NO: 2733477 - RNA, 19 nt, Artificial Sequence
  Description of Artificial Sequence: Synthetic oligonucleotide
guucaggcaucuggucaua

SEQ ID NO: 2733478 - RNA, 19 nt, Artificial Sequence
  Description of Artificial Sequence: Synthetic oligonucleotide
cgguaccagaucuucaacu

SEQ ID NO: 2733479 - RNA, 19 nt, Artificial Sequence
  Description of Artificial Sequence: Synthetic oligonucleotide
ggucgcagccucgcacuac

SEQ ID NO: 2733480 - RNA, 19 nt, Artificial Sequence
  Description of Artificial Sequence: Synthetic oligonucleotide
guggguggacagccuggua

SEQ ID NO: 2733481 - RNA, 19 nt, Artificial Sequence
  Description of Artificial Sequence: Synthetic oligonucleotide
ccacuggcacaaugcgguc

SEQ ID NO: 2733482 - RNA, 19 nt, Artificial Sequence
  Description of Artificial Sequence: Synthetic oligonucleotide
accugcgguaccagaucuu

SEQ ID NO: 2733483 - RNA, 19 nt, Artificial Sequence
  Description of Artificial Sequence: Synthetic oligonucleotide
gccugacgugggcuggcac

SEQ ID NO: 2733484 - RNA, 19 nt, Artificial Sequence
  Description of Artificial Sequence: Synthetic oligonucleotide
ccgaaggucauaggccaca

SEQ ID NO: 2733485 - RNA, 19 nt, Artificial Sequence
  Description of Artificial Sequence: Synthetic oligonucleotide
ggauggguuuauucacauu

SEQ ID NO: 2733486 - RNA, 19 nt, Artificial Sequence
  Description of Artificial Sequence: Synthetic oligonucleotide
gccgaaggucauaggccac

SEQ ID NO: 2733487 - RNA, 19 nt, Artificial Sequence
  Description of Artificial Sequence: Synthetic oligonucleotide
gcacgccaagccgaagguc

SEQ ID NO: 2733488 - RNA, 19 nt, Artificial Sequence
  Description of Artificial Sequence: Synthetic oligonucleotide
ccaaagcgguccaugucgu

SEQ ID NO: 2733489 - RNA, 19 nt, Artificial Sequence
  Description of Artificial Sequence: Synthetic oligonucleotide
cgugggcuggcacggaaca

SEQ ID NO: 2733490 - RNA, 19 nt, Artificial Sequence
  Description of Artificial Sequence: Synthetic oligonucleotide
cauacucggcccgguuucu

SEQ ID NO: 2733491 - RNA, 19 nt, Artificial Sequence
  Description of Artificial Sequence: Synthetic oligonucleotide
aggggccaucuuguuggua

SEQ ID NO: 2733492 - RNA, 19 nt, Artificial Sequence
  Description of Artificial Sequence: Synthetic oligonucleotide
gcggucgcagccucgcacu

SEQ ID NO: 2733493 - RNA, 19 nt, Artificial Sequence
  Description of Artificial Sequence: Synthetic oligonucleotide
cggagcagccaugugcauc

SEQ ID NO: 2733494 - RNA, 19 nt, Artificial Sequence
  Description of Artificial Sequence: Synthetic oligonucleotide
caucggccugacgugggcu

SEQ ID NO: 2733495 - RNA, 19 nt, Artificial Sequence
  Description of Artificial Sequence: Synthetic oligonucleotide
cggccguggguggacagcc

SEQ ID NO: 2733496 - RNA, 19 nt, Artificial Sequence
  Description of Artificial Sequence: Synthetic oligonucleotide
cgcuugaucuuccguugca

SEQ ID NO: 2733497 - RNA, 19 nt, Artificial Sequence
  Description of Artificial Sequence: Synthetic oligonucleotide
ccggcgugcccaguugaug

SEQ ID NO: 2733498 - RNA, 19 nt, Artificial Sequence
  Description of Artificial Sequence: Synthetic oligonucleotide
guuuggcccggcagcucua

SEQ ID NO: 2733499 - RNA, 19 nt, Artificial Sequence
  Description of Artificial Sequence: Synthetic oligonucleotide
ccguuggcacaacucccca

SEQ ID NO: 2733500 - RNA, 19 nt, Artificial Sequence
  Description of Artificial Sequence: Synthetic oligonucleotide
caccaccguuggcacaacu

SEQ ID NO: 2733501 - RNA, 19 nt, Artificial Sequence
  Description of Artificial Sequence: Synthetic oligonucleotide
cgcagccucgcacuacuga

SEQ ID NO: 2733502 - RNA, 19 nt, Artificial Sequence
  Description of Artificial Sequence: Synthetic oligonucleotide
cuggcacaaugcggucgca

SEQ ID NO: 2733503 - RNA, 19 nt, Artificial Sequence
  Description of Artificial Sequence: Synthetic oligonucleotide
cccgguuucuggggagaug

SEQ ID NO: 2733504 - RNA, 19 nt, Artificial Sequence
  Description of Artificial Sequence: Synthetic oligonucleotide
ggcccgguuucuggggaga

SEQ ID NO: 2733505 - RNA, 19 nt, Artificial Sequence
  Description of Artificial Sequence: Synthetic oligonucleotide
cgugcccaguugaugaggu

SEQ ID NO: 2733506 - RNA, 19 nt, Artificial Sequence
  Description of Artificial Sequence: Synthetic oligonucleotide
caggggccaucuuguuggu

SEQ ID NO: 2733507 - RNA, 19 nt, Artificial Sequence
  Description of Artificial Sequence: Synthetic oligonucleotide
gugcaggggccaucuuguu

SEQ ID NO: 2733508 - RNA, 19 nt, Artificial Sequence
  Description of Artificial Sequence: Synthetic oligonucleotide
gguggacagccugguacau

SEQ ID NO: 2733509 - RNA, 19 nt, Artificial Sequence
  Description of Artificial Sequence: Synthetic oligonucleotide
aucuuccguugcagcugua

SEQ ID NO: 2733510 - RNA, 19 nt, Artificial Sequence
  Description of Artificial Sequence: Synthetic oligonucleotide
ggccugacgugggcuggca

SEQ ID NO: 2733511 - RNA, 19 nt, Artificial Sequence
  Description of Artificial Sequence: Synthetic oligonucleotide
cguagcgcggagcagccau

SEQ ID NO: 2733512 - RNA, 19 nt, Artificial Sequence
  Description of Artificial Sequence: Synthetic oligonucleotide
gcggagugcaggggccauc

SEQ ID NO: 2733513 - RNA, 19 nt, Artificial Sequence
  Description of Artificial Sequence: Synthetic oligonucleotide
gccucggccguggguggac

SEQ ID NO: 2733514 - RNA, 19 nt, Artificial Sequence
  Description of Artificial Sequence: Synthetic oligonucleotide
gcgugccagcuacaaucau

SEQ ID NO: 2733515 - RNA, 19 nt, Artificial Sequence
  Description of Artificial Sequence: Synthetic oligonucleotide
cguuggcacaacuccccau

SEQ ID NO: 2733516 - RNA, 19 nt, Artificial Sequence
  Description of Artificial Sequence: Synthetic oligonucleotide
ccaccaccguuggcacaac

SEQ ID NO: 2733517 - RNA, 19 nt, Artificial Sequence
  Description of Artificial Sequence: Synthetic oligonucleotide
cggccugacgugggcuggc

SEQ ID NO: 2733518 - RNA, 19 nt, Artificial Sequence
  Description of Artificial Sequence: Synthetic oligonucleotide
gcggagcagccaugugcau

SEQ ID NO: 2733519 - RNA, 19 nt, Artificial Sequence
  Description of Artificial Sequence: Synthetic oligonucleotide
ccucggccguggguggaca

SEQ ID NO: 2733520 - RNA, 19 nt, Artificial Sequence
  Description of Artificial Sequence: Synthetic oligonucleotide
gagcuccggcgugcccagu

SEQ ID NO: 2733521 - RNA, 19 nt, Artificial Sequence
  Description of Artificial Sequence: Synthetic oligonucleotide
cguggguggacagccuggu

SEQ ID NO: 2733522 - RNA, 19 nt, Artificial Sequence
  Description of Artificial Sequence: Synthetic oligonucleotide
gcccgguuucuggggagau

SEQ ID NO: 2733523 - RNA, 19 nt, Artificial Sequence
  Description of Artificial Sequence: Synthetic oligonucleotide
ggccguggguggacagccu

SEQ ID NO: 2733524 - RNA, 19 nt, Artificial Sequence
  Description of Artificial Sequence: Synthetic oligonucleotide
cggcagcucuaccugcggu

SEQ ID NO: 2733525 - RNA, 19 nt, Artificial Sequence
  Description of Artificial Sequence: Synthetic oligonucleotide
cggucgcagccucgcacua

SEQ ID NO: 2733526 - RNA, 19 nt, Artificial Sequence
  Description of Artificial Sequence: Synthetic oligonucleotide
ccacaccaaagcgguccau

SEQ ID NO: 2733527 - RNA, 19 nt, Artificial Sequence
  Description of Artificial Sequence: Synthetic oligonucleotide
cgccaagccgaaggucaua

SEQ ID NO: 2733528 - RNA, 19 nt, Artificial Sequence
  Description of Artificial Sequence: Synthetic oligonucleotide
cgccucggccgugggugga

SEQ ID NO: 2733529 - RNA, 19 nt, Artificial Sequence
  Description of Artificial Sequence: Synthetic oligonucleotide
augagaacacauuuaaugc

SEQ ID NO: 2733530 - RNA, 19 nt, Artificial Sequence
  Description of Artificial Sequence: Synthetic oligonucleotide
acuaggaccaauguaaacc

SEQ ID NO: 2733531 - RNA, 19 nt, Artificial Sequence
  Description of Artificial Sequence: Synthetic oligonucleotide
uguuccaggacccugcugg

SEQ ID NO: 2733532 - RNA, 19 nt, Artificial Sequence
  Description of Artificial Sequence: Synthetic oligonucleotide
caugagaacacauuuaaug

SEQ ID NO: 2733533 - RNA, 19 nt, Artificial Sequence
  Description of Artificial Sequence: Synthetic oligonucleotide
uuuccauagacucaguuac

SEQ ID NO: 2733534 - RNA, 19 nt, Artificial Sequence
  Description of Artificial Sequence: Synthetic oligonucleotide
uugaguuuagaauugggcc

SEQ ID NO: 2733535 - RNA, 19 nt, Artificial Sequence
  Description of Artificial Sequence: Synthetic oligonucleotide
auuuaaugcaacaugcagc

SEQ ID NO: 2733536 - RNA, 19 nt, Artificial Sequence
  Description of Artificial Sequence: Synthetic oligonucleotide
auguaaaccccaaugaucc

SEQ ID NO: 2733537 - RNA, 19 nt, Artificial Sequence
  Description of Artificial Sequence: Synthetic oligonucleotide
aaaugcuauuuggagaacc

SEQ ID NO: 2733538 - RNA, 19 nt, Artificial Sequence
  Description of Artificial Sequence: Synthetic oligonucleotide
aauguaaaccccaaugauc

SEQ ID NO: 2733539 - RNA, 19 nt, Artificial Sequence
  Description of Artificial Sequence: Synthetic oligonucleotide
uuucucaucuguuagggcc

SEQ ID NO: 2733540 - RNA, 19 nt, Artificial Sequence
  Description of Artificial Sequence: Synthetic oligonucleotide
agguuuaacgacuagguug

SEQ ID NO: 2733541 - RNA, 19 nt, Artificial Sequence
  Description of Artificial Sequence: Synthetic oligonucleotide
cacauuuaaugcaacaugc

SEQ ID NO: 2733542 - RNA, 19 nt, Artificial Sequence
  Description of Artificial Sequence: Synthetic oligonucleotide
gagaucagcugccagaggg

SEQ ID NO: 2733543 - RNA, 19 nt, Artificial Sequence
  Description of Artificial Sequence: Synthetic oligonucleotide
ugaguuuagaauugggccc

SEQ ID NO: 2733544 - RNA, 19 nt, Artificial Sequence
  Description of Artificial Sequence: Synthetic oligonucleotide
caauguuguaaucugacag

SEQ ID NO: 2733545 - RNA, 19 nt, Artificial Sequence
  Description of Artificial Sequence: Synthetic oligonucleotide
agagaucugucauaauccc

SEQ ID NO: 2733546 - RNA, 19 nt, Artificial Sequence
  Description of Artificial Sequence: Synthetic oligonucleotide
aaugcuauuuggagaaccc

SEQ ID NO: 2733547 - RNA, 19 nt, Artificial Sequence
  Description of Artificial Sequence: Synthetic oligonucleotide
uccacuaggaccaauguaa

SEQ ID NO: 2733548 - RNA, 19 nt, Artificial Sequence
  Description of Artificial Sequence: Synthetic oligonucleotide
uacuucaggguguagaaag

SEQ ID NO: 2733549 - RNA, 19 nt, Artificial Sequence
  Description of Artificial Sequence: Synthetic oligonucleotide
uaaugcaacaugcagcugu

SEQ ID NO: 2733550 - RNA, 19 nt, Artificial Sequence
  Description of Artificial Sequence: Synthetic oligonucleotide
ucagagaucugucauaauc

SEQ ID NO: 2733551 - RNA, 19 nt, Artificial Sequence
  Description of Artificial Sequence: Synthetic oligonucleotide
uuagaauugggcccaaugu

SEQ ID NO: 2733552 - RNA, 19 nt, Artificial Sequence
  Description of Artificial Sequence: Synthetic oligonucleotide
uuuagaauugggcccaaug

SEQ ID NO: 2733553 - RNA, 19 nt, Artificial Sequence
  Description of Artificial Sequence: Synthetic oligonucleotide
uuaacgacuagguugaguu

SEQ ID NO: 2733554 - RNA, 19 nt, Artificial Sequence
  Description of Artificial Sequence: Synthetic oligonucleotide
gagucgaccagucuguggg

SEQ ID NO: 2733555 - RNA, 19 nt, Artificial Sequence
  Description of Artificial Sequence: Synthetic oligonucleotide
cauuuaaugcaacaugcag

SEQ ID NO: 2733556 - RNA, 19 nt, Artificial Sequence
  Description of Artificial Sequence: Synthetic oligonucleotide
agaaaugcuauuuggagaa

SEQ ID NO: 2733557 - RNA, 19 nt, Artificial Sequence
  Description of Artificial Sequence: Synthetic oligonucleotide
uguuaggcggcucagagau

SEQ ID NO: 2733558 - RNA, 19 nt, Artificial Sequence
  Description of Artificial Sequence: Synthetic oligonucleotide
accaauguaaaccccaaug

SEQ ID NO: 2733559 - RNA, 19 nt, Artificial Sequence
  Description of Artificial Sequence: Synthetic oligonucleotide
uucuccaaagguuuaacga

SEQ ID NO: 2733560 - RNA, 19 nt, Artificial Sequence
  Description of Artificial Sequence: Synthetic oligonucleotide
aucuguuagggccuugccc

SEQ ID NO: 2733561 - RNA, 19 nt, Artificial Sequence
  Description of Artificial Sequence: Synthetic oligonucleotide
agacccuucuuccagcagc

SEQ ID NO: 2733562 - RNA, 19 nt, Artificial Sequence
  Description of Artificial Sequence: Synthetic oligonucleotide
cagagaucugucauaaucc

SEQ ID NO: 2733563 - RNA, 19 nt, Artificial Sequence
  Description of Artificial Sequence: Synthetic oligonucleotide
uguaguuguuccaggaccc

SEQ ID NO: 2733564 - RNA, 19 nt, Artificial Sequence
  Description of Artificial Sequence: Synthetic oligonucleotide
aaagguuuaacgacuaggu

SEQ ID NO: 2733565 - RNA, 19 nt, Artificial Sequence
  Description of Artificial Sequence: Synthetic oligonucleotide
ucuguuagggccuugcccu

SEQ ID NO: 2733566 - RNA, 19 nt, Artificial Sequence
  Description of Artificial Sequence: Synthetic oligonucleotide
uguuguaaucugacagucg

SEQ ID NO: 2733567 - RNA, 19 nt, Artificial Sequence
  Description of Artificial Sequence: Synthetic oligonucleotide
gacuuuggagaucagcugc

SEQ ID NO: 2733568 - RNA, 19 nt, Artificial Sequence
  Description of Artificial Sequence: Synthetic oligonucleotide
caguguagacacuagcucg

SEQ ID NO: 2733569 - RNA, 19 nt, Artificial Sequence
  Description of Artificial Sequence: Synthetic oligonucleotide
ucugucauaaucccucugu

SEQ ID NO: 2733570 - RNA, 19 nt, Artificial Sequence
  Description of Artificial Sequence: Synthetic oligonucleotide
cuaggaccaauguaaaccc

SEQ ID NO: 2733571 - RNA, 19 nt, Artificial Sequence
  Description of Artificial Sequence: Synthetic oligonucleotide
ugcuacacugaagugacgg

SEQ ID NO: 2733572 - RNA, 19 nt, Artificial Sequence
  Description of Artificial Sequence: Synthetic oligonucleotide
ucuccaaagguuuaacgac

SEQ ID NO: 2733573 - RNA, 19 nt, Artificial Sequence
  Description of Artificial Sequence: Synthetic oligonucleotide
agacucaguuacuucaggg

SEQ ID NO: 2733574 - RNA, 19 nt, Artificial Sequence
  Description of Artificial Sequence: Synthetic oligonucleotide
aaagcggcuggccaaacgu

SEQ ID NO: 2733575 - RNA, 19 nt, Artificial Sequence
  Description of Artificial Sequence: Synthetic oligonucleotide
uucagcuuauccgagacca

SEQ ID NO: 2733576 - RNA, 19 nt, Artificial Sequence
  Description of Artificial Sequence: Synthetic oligonucleotide
acuagguugaguuuagaau

SEQ ID NO: 2733577 - RNA, 19 nt, Artificial Sequence
  Description of Artificial Sequence: Synthetic oligonucleotide
uucaggguguagaaagcgg

SEQ ID NO: 2733578 - RNA, 19 nt, Artificial Sequence
  Description of Artificial Sequence: Synthetic oligonucleotide
aacagcagacguugcuggc

SEQ ID NO: 2733579 - RNA, 19 nt, Artificial Sequence
  Description of Artificial Sequence: Synthetic oligonucleotide
ugucauaaucccucuguag

SEQ ID NO: 2733580 - RNA, 19 nt, Artificial Sequence
  Description of Artificial Sequence: Synthetic oligonucleotide
uucacggucagcugcauga

SEQ ID NO: 2733581 - RNA, 19 nt, Artificial Sequence
  Description of Artificial Sequence: Synthetic oligonucleotide
ucaggguguagaaagcggc

SEQ ID NO: 2733582 - RNA, 19 nt, Artificial Sequence
  Description of Artificial Sequence: Synthetic oligonucleotide
gaacagcagacguugcugg

SEQ ID NO: 2733583 - RNA, 19 nt, Artificial Sequence
  Description of Artificial Sequence: Synthetic oligonucleotide
caaagguuuaacgacuagg

SEQ ID NO: 2733584 - RNA, 19 nt, Artificial Sequence
  Description of Artificial Sequence: Synthetic oligonucleotide
acucaguuacuucagggug

SEQ ID NO: 2733585 - RNA, 19 nt, Artificial Sequence
  Description of Artificial Sequence: Synthetic oligonucleotide
uaaucugacagucguuucu

SEQ ID NO: 2733586 - RNA, 19 nt, Artificial Sequence
  Description of Artificial Sequence: Synthetic oligonucleotide
aguguuaggcggcucagag

SEQ ID NO: 2733587 - RNA, 19 nt, Artificial Sequence
  Description of Artificial Sequence: Synthetic oligonucleotide
aaucugacagucguuucuc

SEQ ID NO: 2733588 - RNA, 19 nt, Artificial Sequence
  Description of Artificial Sequence: Synthetic oligonucleotide
ugacagucguuucucaucu

SEQ ID NO: 2733589 - RNA, 19 nt, Artificial Sequence
  Description of Artificial Sequence: Synthetic oligonucleotide
uuuuccauagacucaguua

SEQ ID NO: 2733590 - RNA, 19 nt, Artificial Sequence
  Description of Artificial Sequence: Synthetic oligonucleotide
cuucuccaaagguuuaacg

SEQ ID NO: 2733591 - RNA, 19 nt, Artificial Sequence
  Description of Artificial Sequence: Synthetic oligonucleotide
ucaguguagacacuagcuc

SEQ ID NO: 2733592 - RNA, 19 nt, Artificial Sequence
  Description of Artificial Sequence: Synthetic oligonucleotide
guugaguuuagaauugggc

SEQ ID NO: 2733593 - RNA, 19 nt, Artificial Sequence
  Description of Artificial Sequence: Synthetic oligonucleotide
gacaugagaacacauuuaa

SEQ ID NO: 2733594 - RNA, 19 nt, Artificial Sequence
  Description of Artificial Sequence: Synthetic oligonucleotide
uacacugaagugacgggcc

SEQ ID NO: 2733595 - RNA, 19 nt, Artificial Sequence
  Description of Artificial Sequence: Synthetic oligonucleotide
aaacguucaaugucaucca

SEQ ID NO: 2733596 - RNA, 19 nt, Artificial Sequence
  Description of Artificial Sequence: Synthetic oligonucleotide
aacguucaaugucauccag

SEQ ID NO: 2733597 - RNA, 19 nt, Artificial Sequence
  Description of Artificial Sequence: Synthetic oligonucleotide
agccgcguccacuaggacc

SEQ ID NO: 2733598 - RNA, 19 nt, Artificial Sequence
  Description of Artificial Sequence: Synthetic oligonucleotide
ugucauccaguguuaggcg

SEQ ID NO: 2733599 - RNA, 19 nt, Artificial Sequence
  Description of Artificial Sequence: Synthetic oligonucleotide
uggggagucgaccagucug

SEQ ID NO: 2733600 - RNA, 19 nt, Artificial Sequence
  Description of Artificial Sequence: Synthetic oligonucleotide
acggucagcugcaugaugc

SEQ ID NO: 2733601 - RNA, 19 nt, Artificial Sequence
  Description of Artificial Sequence: Synthetic oligonucleotide
gcugguaucugcuacacug

SEQ ID NO: 2733602 - RNA, 19 nt, Artificial Sequence
  Description of Artificial Sequence: Synthetic oligonucleotide
auguuguaaucugacaguc

SEQ ID NO: 2733603 - RNA, 19 nt, Artificial Sequence
  Description of Artificial Sequence: Synthetic oligonucleotide
ucguuucucaucuguuagg

SEQ ID NO: 2733604 - RNA, 19 nt, Artificial Sequence
  Description of Artificial Sequence: Synthetic oligonucleotide
gggacguucagcuuauccg

SEQ ID NO: 2733605 - RNA, 19 nt, Artificial Sequence
  Description of Artificial Sequence: Synthetic oligonucleotide
gacacuagcucguccuccg

SEQ ID NO: 2733606 - RNA, 19 nt, Artificial Sequence
  Description of Artificial Sequence: Synthetic oligonucleotide
gucguuucucaucuguuag

SEQ ID NO: 2733607 - RNA, 19 nt, Artificial Sequence
  Description of Artificial Sequence: Synthetic oligonucleotide
uguagacacuagcucgucc

SEQ ID NO: 2733608 - RNA, 19 nt, Artificial Sequence
  Description of Artificial Sequence: Synthetic oligonucleotide
uuggagaucagcugccaga

SEQ ID NO: 2733609 - RNA, 19 nt, Artificial Sequence
  Description of Artificial Sequence: Synthetic oligonucleotide
uuauccgagaccagaugcu

SEQ ID NO: 2733610 - RNA, 19 nt, Artificial Sequence
  Description of Artificial Sequence: Synthetic oligonucleotide
uguaaucugacagucguuu

SEQ ID NO: 2733611 - RNA, 19 nt, Artificial Sequence
  Description of Artificial Sequence: Synthetic oligonucleotide
ugaacagcagacguugcug

SEQ ID NO: 2733612 - RNA, 19 nt, Artificial Sequence
  Description of Artificial Sequence: Synthetic oligonucleotide
uugcccuugaacagcagac

SEQ ID NO: 2733613 - RNA, 19 nt, Artificial Sequence
  Description of Artificial Sequence: Synthetic oligonucleotide
aguuguuccaggacccugc

SEQ ID NO: 2733614 - RNA, 19 nt, Artificial Sequence
  Description of Artificial Sequence: Synthetic oligonucleotide
uuaggcggcucagagaucu

SEQ ID NO: 2733615 - RNA, 19 nt, Artificial Sequence
  Description of Artificial Sequence: Synthetic oligonucleotide
uugaacagcagacguugcu

SEQ ID NO: 2733616 - RNA, 19 nt, Artificial Sequence
  Description of Artificial Sequence: Synthetic oligonucleotide
agaauugggcccaauguug

SEQ ID NO: 2733617 - RNA, 19 nt, Artificial Sequence
  Description of Artificial Sequence: Synthetic oligonucleotide
aagguuuaacgacuagguu

SEQ ID NO: 2733618 - RNA, 19 nt, Artificial Sequence
  Description of Artificial Sequence: Synthetic oligonucleotide
uggccaaacguucaauguc

SEQ ID NO: 2733619 - RNA, 19 nt, Artificial Sequence
  Description of Artificial Sequence: Synthetic oligonucleotide
aguuacuucaggguguaga

SEQ ID NO: 2733620 - RNA, 19 nt, Artificial Sequence
  Description of Artificial Sequence: Synthetic oligonucleotide
uggagaucagcugccagag

SEQ ID NO: 2733621 - RNA, 19 nt, Artificial Sequence
  Description of Artificial Sequence: Synthetic oligonucleotide
aacgacuagguugaguuua

SEQ ID NO: 2733622 - RNA, 19 nt, Artificial Sequence
  Description of Artificial Sequence: Synthetic oligonucleotide
cuucaggguguagaaagcg

SEQ ID NO: 2733623 - RNA, 19 nt, Artificial Sequence
  Description of Artificial Sequence: Synthetic oligonucleotide
aggacuuuggagaucagcu

SEQ ID NO: 2733624 - RNA, 19 nt, Artificial Sequence
  Description of Artificial Sequence: Synthetic oligonucleotide
ugcuauuuggagaacccuu

SEQ ID NO: 2733625 - RNA, 19 nt, Artificial Sequence
  Description of Artificial Sequence: Synthetic oligonucleotide
acuuuggagaucagcugcc

SEQ ID NO: 2733626 - RNA, 19 nt, Artificial Sequence
  Description of Artificial Sequence: Synthetic oligonucleotide
gaaagcggcuggccaaacg

SEQ ID NO: 2733627 - RNA, 19 nt, Artificial Sequence
  Description of Artificial Sequence: Synthetic oligonucleotide
ugaccugggauuucucccc

SEQ ID NO: 2733628 - RNA, 19 nt, Artificial Sequence
  Description of Artificial Sequence: Synthetic oligonucleotide
cagaaaugcuauuuggaga

SEQ ID NO: 2733629 - RNA, 19 nt, Artificial Sequence
  Description of Artificial Sequence: Synthetic oligonucleotide
acagucguuucucaucugu

SEQ ID NO: 2733630 - RNA, 19 nt, Artificial Sequence
  Description of Artificial Sequence: Synthetic oligonucleotide
guuguaaucugacagucgu

SEQ ID NO: 2733631 - RNA, 19 nt, Artificial Sequence
  Description of Artificial Sequence: Synthetic oligonucleotide
uccaguguuaggcggcuca

SEQ ID NO: 2733632 - RNA, 19 nt, Artificial Sequence
  Description of Artificial Sequence: Synthetic oligonucleotide
aucugcuacacugaaguga

SEQ ID NO: 2733633 - RNA, 19 nt, Artificial Sequence
  Description of Artificial Sequence: Synthetic oligonucleotide
cuacacugaagugacgggc

SEQ ID NO: 2733634 - RNA, 19 nt, Artificial Sequence
  Description of Artificial Sequence: Synthetic oligonucleotide
gaagugacgggccaggacu

SEQ ID NO: 2733635 - RNA, 19 nt, Artificial Sequence
  Description of Artificial Sequence: Synthetic oligonucleotide
ccagaaaugcuauuuggag

SEQ ID NO: 2733636 - RNA, 19 nt, Artificial Sequence
  Description of Artificial Sequence: Synthetic oligonucleotide
acguugcuggcgcacaggg

SEQ ID NO: 2733637 - RNA, 19 nt, Artificial Sequence
  Description of Artificial Sequence: Synthetic oligonucleotide
agaacacauuuaaugcaac

SEQ ID NO: 2733638 - RNA, 19 nt, Artificial Sequence
  Description of Artificial Sequence: Synthetic oligonucleotide
aaugcaacaugcagcugug

SEQ ID NO: 2733639 - RNA, 19 nt, Artificial Sequence
  Description of Artificial Sequence: Synthetic oligonucleotide
ucauaaucccucuguaguu

SEQ ID NO: 2733640 - RNA, 19 nt, Artificial Sequence
  Description of Artificial Sequence: Synthetic oligonucleotide
gacuagguugaguuuagaa

SEQ ID NO: 2733641 - RNA, 19 nt, Artificial Sequence
  Description of Artificial Sequence: Synthetic oligonucleotide
agacacuagcucguccucc

SEQ ID NO: 2733642 - RNA, 19 nt, Artificial Sequence
  Description of Artificial Sequence: Synthetic oligonucleotide
uccuccggcaccuguaggc

SEQ ID NO: 2733643 - RNA, 19 nt, Artificial Sequence
  Description of Artificial Sequence: Synthetic oligonucleotide
caugaugcccacagccgcg

SEQ ID NO: 2733644 - RNA, 19 nt, Artificial Sequence
  Description of Artificial Sequence: Synthetic oligonucleotide
auaaucccucuguaguugu

SEQ ID NO: 2733645 - RNA, 19 nt, Artificial Sequence
  Description of Artificial Sequence: Synthetic oligonucleotide
gucauaaucccucuguagu

SEQ ID NO: 2733646 - RNA, 19 nt, Artificial Sequence
  Description of Artificial Sequence: Synthetic oligonucleotide
uuuaacgacuagguugagu

SEQ ID NO: 2733647 - RNA, 19 nt, Artificial Sequence
  Description of Artificial Sequence: Synthetic oligonucleotide
uguaaaccccaaugauccc

SEQ ID NO: 2733648 - RNA, 19 nt, Artificial Sequence
  Description of Artificial Sequence: Synthetic oligonucleotide
guuacuucaggguguagaa

SEQ ID NO: 2733649 - RNA, 19 nt, Artificial Sequence
  Description of Artificial Sequence: Synthetic oligonucleotide
ucaaugucauccaguguua

SEQ ID NO: 2733650 - RNA, 19 nt, Artificial Sequence
  Description of Artificial Sequence: Synthetic oligonucleotide
cuagguugaguuuagaauu

SEQ ID NO: 2733651 - RNA, 19 nt, Artificial Sequence
  Description of Artificial Sequence: Synthetic oligonucleotide
ugaagugacgggccaggac

SEQ ID NO: 2733652 - RNA, 19 nt, Artificial Sequence
  Description of Artificial Sequence: Synthetic oligonucleotide
uccaaagguuuaacgacua

SEQ ID NO: 2733653 - RNA, 19 nt, Artificial Sequence
  Description of Artificial Sequence: Synthetic oligonucleotide
ugacgggccaggacuuugg

SEQ ID NO: 2733654 - RNA, 19 nt, Artificial Sequence
  Description of Artificial Sequence: Synthetic oligonucleotide
uaucugcuacacugaagug

SEQ ID NO: 2733655 - RNA, 19 nt, Artificial Sequence
  Description of Artificial Sequence: Synthetic oligonucleotide
agucgaccagucugugggc

SEQ ID NO: 2733656 - RNA, 19 nt, Artificial Sequence
  Description of Artificial Sequence: Synthetic oligonucleotide
ugcccuugaacagcagacg

SEQ ID NO: 2733657 - RNA, 19 nt, Artificial Sequence
  Description of Artificial Sequence: Synthetic oligonucleotide
ugcgacaugagaacacauu

SEQ ID NO: 2733658 - RNA, 19 nt, Artificial Sequence
  Description of Artificial Sequence: Synthetic oligonucleotide
guaggcugcacucccggcc

SEQ ID NO: 2733659 - RNA, 19 nt, Artificial Sequence
  Description of Artificial Sequence: Synthetic oligonucleotide
ucagcuuauccgagaccag

SEQ ID NO: 2733660 - RNA, 19 nt, Artificial Sequence
  Description of Artificial Sequence: Synthetic oligonucleotide
ucaucuguuagggccuugc

SEQ ID NO: 2733661 - RNA, 19 nt, Artificial Sequence
  Description of Artificial Sequence: Synthetic oligonucleotide
uccaggacccugcugguau

SEQ ID NO: 2733662 - RNA, 19 nt, Artificial Sequence
  Description of Artificial Sequence: Synthetic oligonucleotide
acugaagugacgggccagg

SEQ ID NO: 2733663 - RNA, 19 nt, Artificial Sequence
  Description of Artificial Sequence: Synthetic oligonucleotide
ucugacagucguuucucau

SEQ ID NO: 2733664 - RNA, 19 nt, Artificial Sequence
  Description of Artificial Sequence: Synthetic oligonucleotide
acagcagacguugcuggcg

SEQ ID NO: 2733665 - RNA, 19 nt, Artificial Sequence
  Description of Artificial Sequence: Synthetic oligonucleotide
agguugaguuuagaauugg

SEQ ID NO: 2733666 - RNA, 19 nt, Artificial Sequence
  Description of Artificial Sequence: Synthetic oligonucleotide
gaguuuagaauugggccca

SEQ ID NO: 2733667 - RNA, 19 nt, Artificial Sequence
  Description of Artificial Sequence: Synthetic oligonucleotide
gaugcccacagccgcgucc

SEQ ID NO: 2733668 - RNA, 19 nt, Artificial Sequence
  Description of Artificial Sequence: Synthetic oligonucleotide
acauuuaaugcaacaugca

SEQ ID NO: 2733669 - RNA, 19 nt, Artificial Sequence
  Description of Artificial Sequence: Synthetic oligonucleotide
uggagcgccuucacgguca

SEQ ID NO: 2733670 - RNA, 19 nt, Artificial Sequence
  Description of Artificial Sequence: Synthetic oligonucleotide
gguuuaacgacuagguuga

SEQ ID NO: 2733671 - RNA, 19 nt, Artificial Sequence
  Description of Artificial Sequence: Synthetic oligonucleotide
ugguaucugcuacacugaa

SEQ ID NO: 2733672 - RNA, 19 nt, Artificial Sequence
  Description of Artificial Sequence: Synthetic oligonucleotide
gaccagaugcuucagugua

SEQ ID NO: 2733673 - RNA, 19 nt, Artificial Sequence
  Description of Artificial Sequence: Synthetic oligonucleotide
agcgccuucacggucagcu

SEQ ID NO: 2733674 - RNA, 19 nt, Artificial Sequence
  Description of Artificial Sequence: Synthetic oligonucleotide
acuagcucguccuccggca

SEQ ID NO: 2733675 - RNA, 19 nt, Artificial Sequence
  Description of Artificial Sequence: Synthetic oligonucleotide
agucguuucucaucuguua

SEQ ID NO: 2733676 - RNA, 19 nt, Artificial Sequence
  Description of Artificial Sequence: Synthetic oligonucleotide
gacucaguuacuucagggu

SEQ ID NO: 2733677 - RNA, 19 nt, Artificial Sequence
  Description of Artificial Sequence: Synthetic oligonucleotide
uccggcaccuguaggcugc

SEQ ID NO: 2733678 - RNA, 19 nt, Artificial Sequence
  Description of Artificial Sequence: Synthetic oligonucleotide
ggguguagaaagcggcugg

SEQ ID NO: 2733679 - RNA, 19 nt, Artificial Sequence
  Description of Artificial Sequence: Synthetic oligonucleotide
ugcacucccggcccuggag

SEQ ID NO: 2733680 - RNA, 19 nt, Artificial Sequence
  Description of Artificial Sequence: Synthetic oligonucleotide
gguugaguuuagaauuggg

SEQ ID NO: 2733681 - RNA, 19 nt, Artificial Sequence
  Description of Artificial Sequence: Synthetic oligonucleotide
cacuaggaccaauguaaac

SEQ ID NO: 2733682 - RNA, 19 nt, Artificial Sequence
  Description of Artificial Sequence: Synthetic oligonucleotide
guaaucugacagucguuuc

SEQ ID NO: 2733683 - RNA, 19 nt, Artificial Sequence
  Description of Artificial Sequence: Synthetic oligonucleotide
guagacacuagcucguccu

SEQ ID NO: 2733684 - RNA, 19 nt, Artificial Sequence
  Description of Artificial Sequence: Synthetic oligonucleotide
aggaccaauguaaacccca

SEQ ID NO: 2733685 - RNA, 19 nt, Artificial Sequence
  Description of Artificial Sequence: Synthetic oligonucleotide
agaucagcugccagagggg

SEQ ID NO: 2733686 - RNA, 19 nt, Artificial Sequence
  Description of Artificial Sequence: Synthetic oligonucleotide
guagaaagcggcuggccaa

SEQ ID NO: 2733687 - RNA, 19 nt, Artificial Sequence
  Description of Artificial Sequence: Synthetic oligonucleotide
aucugucauaaucccucug

SEQ ID NO: 2733688 - RNA, 19 nt, Artificial Sequence
  Description of Artificial Sequence: Synthetic oligonucleotide
guucagcuuauccgagacc

SEQ ID NO: 2733689 - RNA, 19 nt, Artificial Sequence
  Description of Artificial Sequence: Synthetic oligonucleotide
uguaggcugcacucccggc

SEQ ID NO: 2733690 - RNA, 19 nt, Artificial Sequence
  Description of Artificial Sequence: Synthetic oligonucleotide
caucuguuagggccuugcc

SEQ ID NO: 2733691 - RNA, 19 nt, Artificial Sequence
  Description of Artificial Sequence: Synthetic oligonucleotide
ggacguucagcuuauccga

SEQ ID NO: 2733692 - RNA, 19 nt, Artificial Sequence
  Description of Artificial Sequence: Synthetic oligonucleotide
cguucaaugucauccagug

SEQ ID NO: 2733693 - RNA, 19 nt, Artificial Sequence
  Description of Artificial Sequence: Synthetic oligonucleotide
aauugggcccaauguugua

SEQ ID NO: 2733694 - RNA, 19 nt, Artificial Sequence
  Description of Artificial Sequence: Synthetic oligonucleotide
ccaauguaaaccccaauga

SEQ ID NO: 2733695 - RNA, 19 nt, Artificial Sequence
  Description of Artificial Sequence: Synthetic oligonucleotide
uagacacuagcucguccuc

SEQ ID NO: 2733696 - RNA, 19 nt, Artificial Sequence
  Description of Artificial Sequence: Synthetic oligonucleotide
uuguaaucugacagucguu

SEQ ID NO: 2733697 - RNA, 19 nt, Artificial Sequence
  Description of Artificial Sequence: Synthetic oligonucleotide
uguggccugaccugggauu

SEQ ID NO: 2733698 - RNA, 19 nt, Artificial Sequence
  Description of Artificial Sequence: Synthetic oligonucleotide
cccaauguuguaaucugac

SEQ ID NO: 2733699 - RNA, 19 nt, Artificial Sequence
  Description of Artificial Sequence: Synthetic oligonucleotide
cccuggagcgccuucacgg

SEQ ID NO: 2733700 - RNA, 19 nt, Artificial Sequence
  Description of Artificial Sequence: Synthetic oligonucleotide
uuaaugcaacaugcagcug

SEQ ID NO: 2733701 - RNA, 19 nt, Artificial Sequence
  Description of Artificial Sequence: Synthetic oligonucleotide
cagcagacguugcuggcgc

SEQ ID NO: 2733702 - RNA, 19 nt, Artificial Sequence
  Description of Artificial Sequence: Synthetic oligonucleotide
ugggcagacccuucuucca

SEQ ID NO: 2733703 - RNA, 19 nt, Artificial Sequence
  Description of Artificial Sequence: Synthetic oligonucleotide
cacuagcucguccuccggc

SEQ ID NO: 2733704 - RNA, 19 nt, Artificial Sequence
  Description of Artificial Sequence: Synthetic oligonucleotide
acacugaagugacgggcca

SEQ ID NO: 2733705 - RNA, 19 nt, Artificial Sequence
  Description of Artificial Sequence: Synthetic oligonucleotide
agacguugcuggcgcacag

SEQ ID NO: 2733706 - RNA, 19 nt, Artificial Sequence
  Description of Artificial Sequence: Synthetic oligonucleotide
uugggcccaauguuguaau

SEQ ID NO: 2733707 - RNA, 19 nt, Artificial Sequence
  Description of Artificial Sequence: Synthetic oligonucleotide
gcaugaugcccacagccgc

SEQ ID NO: 2733708 - RNA, 19 nt, Artificial Sequence
  Description of Artificial Sequence: Synthetic oligonucleotide
uagcucguccuccggcacc

SEQ ID NO: 2733709 - RNA, 19 nt, Artificial Sequence
  Description of Artificial Sequence: Synthetic oligonucleotide
acgggccaggacuuuggag

SEQ ID NO: 2733710 - RNA, 19 nt, Artificial Sequence
  Description of Artificial Sequence: Synthetic oligonucleotide
acacuagcucguccuccgg

SEQ ID NO: 2733711 - RNA, 19 nt, Artificial Sequence
  Description of Artificial Sequence: Synthetic oligonucleotide
augcuauuuggagaacccu

SEQ ID NO: 2733712 - RNA, 19 nt, Artificial Sequence
  Description of Artificial Sequence: Synthetic oligonucleotide
ggcccaauguuguaaucug

SEQ ID NO: 2733713 - RNA, 19 nt, Artificial Sequence
  Description of Artificial Sequence: Synthetic oligonucleotide
cacagccgcguccacuagg

SEQ ID NO: 2733714 - RNA, 19 nt, Artificial Sequence
  Description of Artificial Sequence: Synthetic oligonucleotide
auugggcccaauguuguaa

SEQ ID NO: 2733715 - RNA, 19 nt, Artificial Sequence
  Description of Artificial Sequence: Synthetic oligonucleotide
gaaaugcuauuuggagaac

SEQ ID NO: 2733716 - RNA, 19 nt, Artificial Sequence
  Description of Artificial Sequence: Synthetic oligonucleotide
ccagucugugggcagaccc

SEQ ID NO: 2733717 - RNA, 19 nt, Artificial Sequence
  Description of Artificial Sequence: Synthetic oligonucleotide
uggcgcacagggacguuca

SEQ ID NO: 2733718 - RNA, 19 nt, Artificial Sequence
  Description of Artificial Sequence: Synthetic oligonucleotide
ucaguuacuucagggugua

SEQ ID NO: 2733719 - RNA, 19 nt, Artificial Sequence
  Description of Artificial Sequence: Synthetic oligonucleotide
gacguugcuggcgcacagg

SEQ ID NO: 2733720 - RNA, 19 nt, Artificial Sequence
  Description of Artificial Sequence: Synthetic oligonucleotide
acguucagcuuauccgaga

SEQ ID NO: 2733721 - RNA, 19 nt, Artificial Sequence
  Description of Artificial Sequence: Synthetic oligonucleotide
ggagucgaccagucugugg

SEQ ID NO: 2733722 - RNA, 19 nt, Artificial Sequence
  Description of Artificial Sequence: Synthetic oligonucleotide
cugguaucugcuacacuga

SEQ ID NO: 2733723 - RNA, 19 nt, Artificial Sequence
  Description of Artificial Sequence: Synthetic oligonucleotide
caauguaaaccccaaugau

SEQ ID NO: 2733724 - RNA, 19 nt, Artificial Sequence
  Description of Artificial Sequence: Synthetic oligonucleotide
auccgagaccagaugcuuc

SEQ ID NO: 2733725 - RNA, 19 nt, Artificial Sequence
  Description of Artificial Sequence: Synthetic oligonucleotide
uaacgacuagguugaguuu

SEQ ID NO: 2733726 - RNA, 19 nt, Artificial Sequence
  Description of Artificial Sequence: Synthetic oligonucleotide
ugcugguaucugcuacacu

SEQ ID NO: 2733727 - RNA, 19 nt, Artificial Sequence
  Description of Artificial Sequence: Synthetic oligonucleotide
cacucccggcccuggagcg

SEQ ID NO: 2733728 - RNA, 19 nt, Artificial Sequence
  Description of Artificial Sequence: Synthetic oligonucleotide
cacagggacguucagcuua

SEQ ID NO: 2733729 - RNA, 19 nt, Artificial Sequence
  Description of Artificial Sequence: Synthetic oligonucleotide
uauccgagaccagaugcuu

SEQ ID NO: 2733730 - RNA, 19 nt, Artificial Sequence
  Description of Artificial Sequence: Synthetic oligonucleotide
gguaucugcuacacugaag

SEQ ID NO: 2733731 - RNA, 19 nt, Artificial Sequence
  Description of Artificial Sequence: Synthetic oligonucleotide
gacagucguuucucaucug

SEQ ID NO: 2733732 - RNA, 19 nt, Artificial Sequence
  Description of Artificial Sequence: Synthetic oligonucleotide
acguucaaugucauccagu

SEQ ID NO: 2733733 - RNA, 19 nt, Artificial Sequence
  Description of Artificial Sequence: Synthetic oligonucleotide
uguuagggccuugcccuug

SEQ ID NO: 2733734 - RNA, 19 nt, Artificial Sequence
  Description of Artificial Sequence: Synthetic oligonucleotide
gaauugggcccaauguugu

SEQ ID NO: 2733735 - RNA, 19 nt, Artificial Sequence
  Description of Artificial Sequence: Synthetic oligonucleotide
cucaguuacuucagggugu

SEQ ID NO: 2733736 - RNA, 19 nt, Artificial Sequence
  Description of Artificial Sequence: Synthetic oligonucleotide
agaaagcggcuggccaaac

SEQ ID NO: 2733737 - RNA, 19 nt, Artificial Sequence
  Description of Artificial Sequence: Synthetic oligonucleotide
acgacuagguugaguuuag

SEQ ID NO: 2733738 - RNA, 19 nt, Artificial Sequence
  Description of Artificial Sequence: Synthetic oligonucleotide
uagaaagcggcuggccaaa

SEQ ID NO: 2733739 - RNA, 19 nt, Artificial Sequence
  Description of Artificial Sequence: Synthetic oligonucleotide
gaucugucauaaucccucu

SEQ ID NO: 2733740 - RNA, 19 nt, Artificial Sequence
  Description of Artificial Sequence: Synthetic oligonucleotide
gcuuauccgagaccagaug

SEQ ID NO: 2733741 - RNA, 19 nt, Artificial Sequence
  Description of Artificial Sequence: Synthetic oligonucleotide
gcagcaccuucuccaaagg

SEQ ID NO: 2733742 - RNA, 19 nt, Artificial Sequence
  Description of Artificial Sequence: Synthetic oligonucleotide
accagucugugggcagacc

SEQ ID NO: 2733743 - RNA, 19 nt, Artificial Sequence
  Description of Artificial Sequence: Synthetic oligonucleotide
ggccaaacguucaauguca

SEQ ID NO: 2733744 - RNA, 19 nt, Artificial Sequence
  Description of Artificial Sequence: Synthetic oligonucleotide
cuagcucguccuccggcac

SEQ ID NO: 2733745 - RNA, 19 nt, Artificial Sequence
  Description of Artificial Sequence: Synthetic oligonucleotide
augcaacaugcagcugugg

SEQ ID NO: 2733746 - RNA, 19 nt, Artificial Sequence
  Description of Artificial Sequence: Synthetic oligonucleotide
uaaucccucuguaguuguu

SEQ ID NO: 2733747 - RNA, 19 nt, Artificial Sequence
  Description of Artificial Sequence: Synthetic oligonucleotide
gacccuucuuccagcagca

SEQ ID NO: 2733748 - RNA, 19 nt, Artificial Sequence
  Description of Artificial Sequence: Synthetic oligonucleotide
guguuaggcggcucagaga

SEQ ID NO: 2733749 - RNA, 19 nt, Artificial Sequence
  Description of Artificial Sequence: Synthetic oligonucleotide
agcuuauccgagaccagau

SEQ ID NO: 2733750 - RNA, 19 nt, Artificial Sequence
  Description of Artificial Sequence: Synthetic oligonucleotide
cuggccaaacguucaaugu

SEQ ID NO: 2733751 - RNA, 19 nt, Artificial Sequence
  Description of Artificial Sequence: Synthetic oligonucleotide
gggccuugcccuugaacag

SEQ ID NO: 2733752 - RNA, 19 nt, Artificial Sequence
  Description of Artificial Sequence: Synthetic oligonucleotide
guccacuaggaccaaugua

SEQ ID NO: 2733753 - RNA, 19 nt, Artificial Sequence
  Description of Artificial Sequence: Synthetic oligonucleotide
gguguagaaagcggcuggc

SEQ ID NO: 2733754 - RNA, 19 nt, Artificial Sequence
  Description of Artificial Sequence: Synthetic oligonucleotide
ggacccugcugguaucugc

SEQ ID NO: 2733755 - RNA, 19 nt, Artificial Sequence
  Description of Artificial Sequence: Synthetic oligonucleotide
ggagaucagcugccagagg

SEQ ID NO: 2733756 - RNA, 19 nt, Artificial Sequence
  Description of Artificial Sequence: Synthetic oligonucleotide
acagccgcguccacuagga

SEQ ID NO: 2733757 - RNA, 19 nt, Artificial Sequence
  Description of Artificial Sequence: Synthetic oligonucleotide
cacugaagugacgggccag

SEQ ID NO: 2733758 - RNA, 19 nt, Artificial Sequence
  Description of Artificial Sequence: Synthetic oligonucleotide
guccuccggcaccuguagg

SEQ ID NO: 2733759 - RNA, 19 nt, Artificial Sequence
  Description of Artificial Sequence: Synthetic oligonucleotide
cugucauaaucccucugua

SEQ ID NO: 2733760 - RNA, 19 nt, Artificial Sequence
  Description of Artificial Sequence: Synthetic oligonucleotide
gagaucugucauaaucccu

SEQ ID NO: 2733761 - RNA, 19 nt, Artificial Sequence
  Description of Artificial Sequence: Synthetic oligonucleotide
gcaccuguaggcugcacuc

SEQ ID NO: 2733762 - RNA, 19 nt, Artificial Sequence
  Description of Artificial Sequence: Synthetic oligonucleotide
caccuguaggcugcacucc

SEQ ID NO: 2733763 - RNA, 19 nt, Artificial Sequence
  Description of Artificial Sequence: Synthetic oligonucleotide
ccauagacucaguuacuuc

SEQ ID NO: 2733764 - RNA, 19 nt, Artificial Sequence
  Description of Artificial Sequence: Synthetic oligonucleotide
caacaugcagcuguggccu

SEQ ID NO: 2733765 - RNA, 19 nt, Artificial Sequence
  Description of Artificial Sequence: Synthetic oligonucleotide
ucguccuccggcaccugua

SEQ ID NO: 2733766 - RNA, 19 nt, Artificial Sequence
  Description of Artificial Sequence: Synthetic oligonucleotide
ccaauguuguaaucugaca

SEQ ID NO: 2733767 - RNA, 19 nt, Artificial Sequence
  Description of Artificial Sequence: Synthetic oligonucleotide
cagcuuauccgagaccaga

SEQ ID NO: 2733768 - RNA, 19 nt, Artificial Sequence
  Description of Artificial Sequence: Synthetic oligonucleotide
ccaaagguuuaacgacuag

SEQ ID NO: 2733769 - RNA, 19 nt, Artificial Sequence
  Description of Artificial Sequence: Synthetic oligonucleotide
cagacccuucuuccagcag

SEQ ID NO: 2733770 - RNA, 19 nt, Artificial Sequence
  Description of Artificial Sequence: Synthetic oligonucleotide
aagugacgggccaggacuu

SEQ ID NO: 2733771 - RNA, 19 nt, Artificial Sequence
  Description of Artificial Sequence: Synthetic oligonucleotide
guuuaacgacuagguugag

SEQ ID NO: 2733772 - RNA, 19 nt, Artificial Sequence
  Description of Artificial Sequence: Synthetic oligonucleotide
gcuucaguguagacacuag

SEQ ID NO: 2733773 - RNA, 19 nt, Artificial Sequence
  Description of Artificial Sequence: Synthetic oligonucleotide
guucaaugucauccagugu

SEQ ID NO: 2733774 - RNA, 19 nt, Artificial Sequence
  Description of Artificial Sequence: Synthetic oligonucleotide
ugcuggcgcacagggacgu

SEQ ID NO: 2733775 - RNA, 19 nt, Artificial Sequence
  Description of Artificial Sequence: Synthetic oligonucleotide
cguucagcuuauccgagac

SEQ ID NO: 2733776 - RNA, 19 nt, Artificial Sequence
  Description of Artificial Sequence: Synthetic oligonucleotide
gacgggccaggacuuugga

SEQ ID NO: 2733777 - RNA, 19 nt, Artificial Sequence
  Description of Artificial Sequence: Synthetic oligonucleotide
cuggagcgccuucacgguc

SEQ ID NO: 2733778 - RNA, 19 nt, Artificial Sequence
  Description of Artificial Sequence: Synthetic oligonucleotide
cuuuggagaucagcugcca

SEQ ID NO: 2733779 - RNA, 19 nt, Artificial Sequence
  Description of Artificial Sequence: Synthetic oligonucleotide
gcucagagaucugucauaa

SEQ ID NO: 2733780 - RNA, 19 nt, Artificial Sequence
  Description of Artificial Sequence: Synthetic oligonucleotide
gcgacaugagaacacauuu

SEQ ID NO: 2733781 - RNA, 19 nt, Artificial Sequence
  Description of Artificial Sequence: Synthetic oligonucleotide
uaggcggcucagagaucug

SEQ ID NO: 2733782 - RNA, 19 nt, Artificial Sequence
  Description of Artificial Sequence: Synthetic oligonucleotide
gcugcaugaugcccacagc

SEQ ID NO: 2733783 - RNA, 19 nt, Artificial Sequence
  Description of Artificial Sequence: Synthetic oligonucleotide
gugacgggccaggacuuug

SEQ ID NO: 2733784 - RNA, 19 nt, Artificial Sequence
  Description of Artificial Sequence: Synthetic oligonucleotide
uuagggccuugcccuugaa

SEQ ID NO: 2733785 - RNA, 19 nt, Artificial Sequence
  Description of Artificial Sequence: Synthetic oligonucleotide
agcagacguugcuggcgca

SEQ ID NO: 2733786 - RNA, 19 nt, Artificial Sequence
  Description of Artificial Sequence: Synthetic oligonucleotide
gccgcguccacuaggacca

SEQ ID NO: 2733787 - RNA, 19 nt, Artificial Sequence
  Description of Artificial Sequence: Synthetic oligonucleotide
aggcggcucagagaucugu

SEQ ID NO: 2733788 - RNA, 19 nt, Artificial Sequence
  Description of Artificial Sequence: Synthetic oligonucleotide
gcacucccggcccuggagc

SEQ ID NO: 2733789 - RNA, 19 nt, Artificial Sequence
  Description of Artificial Sequence: Synthetic oligonucleotide
cuggcgcacagggacguuc

SEQ ID NO: 2733790 - RNA, 19 nt, Artificial Sequence
  Description of Artificial Sequence: Synthetic oligonucleotide
ccaaacguucaaugucauc

SEQ ID NO: 2733791 - RNA, 19 nt, Artificial Sequence
  Description of Artificial Sequence: Synthetic oligonucleotide
gcguccacuaggaccaaug

SEQ ID NO: 2733792 - RNA, 19 nt, Artificial Sequence
  Description of Artificial Sequence: Synthetic oligonucleotide
acagggacguucagcuuau

SEQ ID NO: 2733793 - RNA, 19 nt, Artificial Sequence
  Description of Artificial Sequence: Synthetic oligonucleotide
caggguguagaaagcggcu

SEQ ID NO: 2733794 - RNA, 19 nt, Artificial Sequence
  Description of Artificial Sequence: Synthetic oligonucleotide
ucucaucuguuagggccuu

SEQ ID NO: 2733795 - RNA, 19 nt, Artificial Sequence
  Description of Artificial Sequence: Synthetic oligonucleotide
guuguuccaggacccugcu

SEQ ID NO: 2733796 - RNA, 19 nt, Artificial Sequence
  Description of Artificial Sequence: Synthetic oligonucleotide
guguagacacuagcucguc

SEQ ID NO: 2733797 - RNA, 19 nt, Artificial Sequence
  Description of Artificial Sequence: Synthetic oligonucleotide
cucccggcccuggagcgcc

SEQ ID NO: 2733798 - RNA, 19 nt, Artificial Sequence
  Description of Artificial Sequence: Synthetic oligonucleotide
gacccugcugguaucugcu

SEQ ID NO: 2733799 - RNA, 19 nt, Artificial Sequence
  Description of Artificial Sequence: Synthetic oligonucleotide
aguuuagaauugggcccaa

SEQ ID NO: 2733800 - RNA, 19 nt, Artificial Sequence
  Description of Artificial Sequence: Synthetic oligonucleotide
gcggcucagagaucuguca

SEQ ID NO: 2733801 - RNA, 19 nt, Artificial Sequence
  Description of Artificial Sequence: Synthetic oligonucleotide
gcccuggagcgccuucacg

SEQ ID NO: 2733802 - RNA, 19 nt, Artificial Sequence
  Description of Artificial Sequence: Synthetic oligonucleotide
caguuacuucaggguguag

SEQ ID NO: 2733803 - RNA, 19 nt, Artificial Sequence
  Description of Artificial Sequence: Synthetic oligonucleotide
gcccuugaacagcagacgu

SEQ ID NO: 2733804 - RNA, 19 nt, Artificial Sequence
  Description of Artificial Sequence: Synthetic oligonucleotide
cucaucuguuagggccuug

SEQ ID NO: 2733805 - RNA, 19 nt, Artificial Sequence
  Description of Artificial Sequence: Synthetic oligonucleotide
cagucugugggcagacccu

SEQ ID NO: 2733806 - RNA, 19 nt, Artificial Sequence
  Description of Artificial Sequence: Synthetic oligonucleotide
ggaccaauguaaaccccaa

SEQ ID NO: 2733807 - RNA, 19 nt, Artificial Sequence
  Description of Artificial Sequence: Synthetic oligonucleotide
gggcccaauguuguaaucu

SEQ ID NO: 2733808 - RNA, 19 nt, Artificial Sequence
  Description of Artificial Sequence: Synthetic oligonucleotide
acccugcugguaucugcua

SEQ ID NO: 2733809 - RNA, 19 nt, Artificial Sequence
  Description of Artificial Sequence: Synthetic oligonucleotide
caccuucuccaaagguuua

SEQ ID NO: 2733810 - RNA, 19 nt, Artificial Sequence
  Description of Artificial Sequence: Synthetic oligonucleotide
cagacguugcuggcgcaca

SEQ ID NO: 2733811 - RNA, 19 nt, Artificial Sequence
  Description of Artificial Sequence: Synthetic oligonucleotide
ggagcgccuucacggucag

SEQ ID NO: 2733812 - RNA, 19 nt, Artificial Sequence
  Description of Artificial Sequence: Synthetic oligonucleotide
cagcaccuucuccaaaggu

SEQ ID NO: 2733813 - RNA, 19 nt, Artificial Sequence
  Description of Artificial Sequence: Synthetic oligonucleotide
guaguuguuccaggacccu

SEQ ID NO: 2733814 - RNA, 19 nt, Artificial Sequence
  Description of Artificial Sequence: Synthetic oligonucleotide
guuccaggacccugcuggu

SEQ ID NO: 2733815 - RNA, 19 nt, Artificial Sequence
  Description of Artificial Sequence: Synthetic oligonucleotide
ccacuaggaccaauguaaa

SEQ ID NO: 2733816 - RNA, 19 nt, Artificial Sequence
  Description of Artificial Sequence: Synthetic oligonucleotide
guuaggcggcucagagauc

SEQ ID NO: 2733817 - RNA, 19 nt, Artificial Sequence
  Description of Artificial Sequence: Synthetic oligonucleotide
caguguuaggcggcucaga

SEQ ID NO: 2733818 - RNA, 19 nt, Artificial Sequence
  Description of Artificial Sequence: Synthetic oligonucleotide
gguggggagucgaccaguc

SEQ ID NO: 2733819 - RNA, 19 nt, Artificial Sequence
  Description of Artificial Sequence: Synthetic oligonucleotide
gcagacguugcuggcgcac

SEQ ID NO: 2733820 - RNA, 19 nt, Artificial Sequence
  Description of Artificial Sequence: Synthetic oligonucleotide
gcgcacagggacguucagc

SEQ ID NO: 2733821 - RNA, 19 nt, Artificial Sequence
  Description of Artificial Sequence: Synthetic oligonucleotide
gcuauuuggagaacccuuu

SEQ ID NO: 2733822 - RNA, 19 nt, Artificial Sequence
  Description of Artificial Sequence: Synthetic oligonucleotide
ggcgcacagggacguucag

SEQ ID NO: 2733823 - RNA, 19 nt, Artificial Sequence
  Description of Artificial Sequence: Synthetic oligonucleotide
agugacgggccaggacuuu

SEQ ID NO: 2733824 - RNA, 19 nt, Artificial Sequence
  Description of Artificial Sequence: Synthetic oligonucleotide
cgacaugagaacacauuua

SEQ ID NO: 2733825 - RNA, 19 nt, Artificial Sequence
  Description of Artificial Sequence: Synthetic oligonucleotide
cggucagcugcaugaugcc

SEQ ID NO: 2733826 - RNA, 19 nt, Artificial Sequence
  Description of Artificial Sequence: Synthetic oligonucleotide
gcugcacucccggcccugg

SEQ ID NO: 2733827 - RNA, 19 nt, Artificial Sequence
  Description of Artificial Sequence: Synthetic oligonucleotide
cagccgcguccacuaggac

SEQ ID NO: 2733828 - RNA, 19 nt, Artificial Sequence
  Description of Artificial Sequence: Synthetic oligonucleotide
gggagucgaccagucugug

SEQ ID NO: 2733829 - RNA, 19 nt, Artificial Sequence
  Description of Artificial Sequence: Synthetic oligonucleotide
uggccugaccugggauuuc

SEQ ID NO: 2733830 - RNA, 19 nt, Artificial Sequence
  Description of Artificial Sequence: Synthetic oligonucleotide
gcgccuucacggucagcug

SEQ ID NO: 2733831 - RNA, 19 nt, Artificial Sequence
  Description of Artificial Sequence: Synthetic oligonucleotide
guggggagucgaccagucu

SEQ ID NO: 2733832 - RNA, 19 nt, Artificial Sequence
  Description of Artificial Sequence: Synthetic oligonucleotide
cagcugccagagggguggg

SEQ ID NO: 2733833 - RNA, 19 nt, Artificial Sequence
  Description of Artificial Sequence: Synthetic oligonucleotide
gccuucacggucagcugca

SEQ ID NO: 2733834 - RNA, 19 nt, Artificial Sequence
  Description of Artificial Sequence: Synthetic oligonucleotide
cucagagaucugucauaau

SEQ ID NO: 2733835 - RNA, 19 nt, Artificial Sequence
  Description of Artificial Sequence: Synthetic oligonucleotide
cguccuccggcaccuguag

SEQ ID NO: 2733836 - RNA, 19 nt, Artificial Sequence
  Description of Artificial Sequence: Synthetic oligonucleotide
ccaggacccugcugguauc

SEQ ID NO: 2733837 - RNA, 19 nt, Artificial Sequence
  Description of Artificial Sequence: Synthetic oligonucleotide
cauccaguguuaggcggcu

SEQ ID NO: 2733838 - RNA, 19 nt, Artificial Sequence
  Description of Artificial Sequence: Synthetic oligonucleotide
ggggagucgaccagucugu

SEQ ID NO: 2733839 - RNA, 19 nt, Artificial Sequence
  Description of Artificial Sequence: Synthetic oligonucleotide
ggcccuggagcgccuucac

SEQ ID NO: 2733840 - RNA, 19 nt, Artificial Sequence
  Description of Artificial Sequence: Synthetic oligonucleotide
cccacagccgcguccacua

SEQ ID NO: 2733841 - RNA, 19 nt, Artificial Sequence
  Description of Artificial Sequence: Synthetic oligonucleotide
guggccugaccugggauuu

SEQ ID NO: 2733842 - RNA, 19 nt, Artificial Sequence
  Description of Artificial Sequence: Synthetic oligonucleotide
ccgagaccagaugcuucag

SEQ ID NO: 2733843 - RNA, 19 nt, Artificial Sequence
  Description of Artificial Sequence: Synthetic oligonucleotide
ucccggcccuggagcgccu

SEQ ID NO: 2733844 - RNA, 19 nt, Artificial Sequence
  Description of Artificial Sequence: Synthetic oligonucleotide
ccacagccgcguccacuag

SEQ ID NO: 2733845 - RNA, 19 nt, Artificial Sequence
  Description of Artificial Sequence: Synthetic oligonucleotide
cuguuagggccuugcccuu

SEQ ID NO: 2733846 - RNA, 19 nt, Artificial Sequence
  Description of Artificial Sequence: Synthetic oligonucleotide
ggcugcacucccggcccug

SEQ ID NO: 2733847 - RNA, 19 nt, Artificial Sequence
  Description of Artificial Sequence: Synthetic oligonucleotide
ggccugaccugggauuucu

SEQ ID NO: 2733848 - RNA, 19 nt, Artificial Sequence
  Description of Artificial Sequence: Synthetic oligonucleotide
ccacucccagaaaugcuau

SEQ ID NO: 2733849 - RNA, 19 nt, Artificial Sequence
  Description of Artificial Sequence: Synthetic oligonucleotide
ccuggagcgccuucacggu

SEQ ID NO: 2733850 - RNA, 19 nt, Artificial Sequence
  Description of Artificial Sequence: Synthetic oligonucleotide
gccaaacguucaaugucau

SEQ ID NO: 2733851 - RNA, 19 nt, Artificial Sequence
  Description of Artificial Sequence: Synthetic oligonucleotide
cccuugaacagcagacguu

SEQ ID NO: 2733852 - RNA, 19 nt, Artificial Sequence
  Description of Artificial Sequence: Synthetic oligonucleotide
cguugcuggcgcacaggga

SEQ ID NO: 2733853 - RNA, 19 nt, Artificial Sequence
  Description of Artificial Sequence: Synthetic oligonucleotide
cguccacuaggaccaaugu

SEQ ID NO: 2733854 - RNA, 19 nt, Artificial Sequence
  Description of Artificial Sequence: Synthetic oligonucleotide
ggguggggagucgaccagu

SEQ ID NO: 2733855 - RNA, 19 nt, Artificial Sequence
  Description of Artificial Sequence: Synthetic oligonucleotide
cgagaccagaugcuucagu

SEQ ID NO: 2733856 - RNA, 19 nt, Artificial Sequence
  Description of Artificial Sequence: Synthetic oligonucleotide
cgaccagucugugggcaga

SEQ ID NO: 2733857 - RNA, 19 nt, Artificial Sequence
  Description of Artificial Sequence: Synthetic oligonucleotide
cgacuagguugaguuuaga

SEQ ID NO: 2733858 - RNA, 19 nt, Artificial Sequence
  Description of Artificial Sequence: Synthetic oligonucleotide
ccggcccuggagcgccuuc

SEQ ID NO: 2733859 - RNA, 19 nt, Artificial Sequence
  Description of Artificial Sequence: Synthetic oligonucleotide
gcccacagccgcguccacu

SEQ ID NO: 2733860 - RNA, 19 nt, Artificial Sequence
  Description of Artificial Sequence: Synthetic oligonucleotide
cggcuggccaaacguucaa

SEQ ID NO: 2733861 - RNA, 19 nt, Artificial Sequence
  Description of Artificial Sequence: Synthetic oligonucleotide
ccggcaccuguaggcugca

SEQ ID NO: 2733862 - RNA, 19 nt, Artificial Sequence
  Description of Artificial Sequence: Synthetic oligonucleotide
cggcaccuguaggcugcac

SEQ ID NO: 2733863 - RNA, 19 nt, Artificial Sequence
  Description of Artificial Sequence: Synthetic oligonucleotide
gcuggcgcacagggacguu

SEQ ID NO: 2733864 - RNA, 19 nt, Artificial Sequence
  Description of Artificial Sequence: Synthetic oligonucleotide
ccgcguccacuaggaccaa

SEQ ID NO: 2733865 - RNA, 19 nt, Artificial Sequence
  Description of Artificial Sequence: Synthetic oligonucleotide
cgcguccacuaggaccaau

SEQ ID NO: 2733866 - RNA, 19 nt, Artificial Sequence
  Description of Artificial Sequence: Synthetic oligonucleotide
cccggcccuggagcgccuu

SEQ ID NO: 2733867 - RNA, 19 nt, Artificial Sequence
  Description of Artificial Sequence: Synthetic oligonucleotide
aagaucaagagcaagaccc

SEQ ID NO: 2733868 - RNA, 19 nt, Artificial Sequence
  Description of Artificial Sequence: Synthetic oligonucleotide
aaagcaaugaccaagauca

SEQ ID NO: 2733869 - RNA, 19 nt, Artificial Sequence
  Description of Artificial Sequence: Synthetic oligonucleotide
aauacugacaggcccuucc

SEQ ID NO: 2733870 - RNA, 19 nt, Artificial Sequence
  Description of Artificial Sequence: Synthetic oligonucleotide
aaugaccaagaucaagagc

SEQ ID NO: 2733871 - RNA, 19 nt, Artificial Sequence
  Description of Artificial Sequence: Synthetic oligonucleotide
agcaagacccuccagaagc

SEQ ID NO: 2733872 - RNA, 19 nt, Artificial Sequence
  Description of Artificial Sequence: Synthetic oligonucleotide
aaauaucaauuuugagucc

SEQ ID NO: 2733873 - RNA, 19 nt, Artificial Sequence
  Description of Artificial Sequence: Synthetic oligonucleotide
ugccuuaucgccaugagcc

SEQ ID NO: 2733874 - RNA, 19 nt, Artificial Sequence
  Description of Artificial Sequence: Synthetic oligonucleotide
agucuaagaaccgaaaagc

SEQ ID NO: 2733875 - RNA, 19 nt, Artificial Sequence
  Description of Artificial Sequence: Synthetic oligonucleotide
aauccaaaacgaaagcagc

SEQ ID NO: 2733876 - RNA, 19 nt, Artificial Sequence
  Description of Artificial Sequence: Synthetic oligonucleotide
aagagacagucuaagaacc

SEQ ID NO: 2733877 - RNA, 19 nt, Artificial Sequence
  Description of Artificial Sequence: Synthetic oligonucleotide
ucuguuaaagccuuucacc

SEQ ID NO: 2733878 - RNA, 19 nt, Artificial Sequence
  Description of Artificial Sequence: Synthetic oligonucleotide
uauaaccaaccacaggacg

SEQ ID NO: 2733879 - RNA, 19 nt, Artificial Sequence
  Description of Artificial Sequence: Synthetic oligonucleotide
uugaugguugcaaauauca

SEQ ID NO: 2733880 - RNA, 19 nt, Artificial Sequence
  Description of Artificial Sequence: Synthetic oligonucleotide
aaauccaaaacgaaagcag

SEQ ID NO: 2733881 - RNA, 19 nt, Artificial Sequence
  Description of Artificial Sequence: Synthetic oligonucleotide
uaagagacagucuaagaac

SEQ ID NO: 2733882 - RNA, 19 nt, Artificial Sequence
  Description of Artificial Sequence: Synthetic oligonucleotide
aaaauccaaaacgaaagca

SEQ ID NO: 2733883 - RNA, 19 nt, Artificial Sequence
  Description of Artificial Sequence: Synthetic oligonucleotide
uccacgaagggcaacaccc

SEQ ID NO: 2733884 - RNA, 19 nt, Artificial Sequence
  Description of Artificial Sequence: Synthetic oligonucleotide
agaggcagcauccggacgc

SEQ ID NO: 2733885 - RNA, 19 nt, Artificial Sequence
  Description of Artificial Sequence: Synthetic oligonucleotide
gauagcaaagcaaugacca

SEQ ID NO: 2733886 - RNA, 19 nt, Artificial Sequence
  Description of Artificial Sequence: Synthetic oligonucleotide
ucggaugacaucuuuauuc

SEQ ID NO: 2733887 - RNA, 19 nt, Artificial Sequence
  Description of Artificial Sequence: Synthetic oligonucleotide
gaaccgaaaagcaauacug

SEQ ID NO: 2733888 - RNA, 19 nt, Artificial Sequence
  Description of Artificial Sequence: Synthetic oligonucleotide
uucucaaagggucacggca

SEQ ID NO: 2733889 - RNA, 19 nt, Artificial Sequence
  Description of Artificial Sequence: Synthetic oligonucleotide
accgaaaagcaauacugac

SEQ ID NO: 2733890 - RNA, 19 nt, Artificial Sequence
  Description of Artificial Sequence: Synthetic oligonucleotide
guugcaaauaucaauuuug

SEQ ID NO: 2733891 - RNA, 19 nt, Artificial Sequence
  Description of Artificial Sequence: Synthetic oligonucleotide
uggagguugggauugagca

SEQ ID NO: 2733892 - RNA, 19 nt, Artificial Sequence
  Description of Artificial Sequence: Synthetic oligonucleotide
ucaaaggaacacaucauuc

SEQ ID NO: 2733893 - RNA, 19 nt, Artificial Sequence
  Description of Artificial Sequence: Synthetic oligonucleotide
ucuaagaaccgaaaagcaa

SEQ ID NO: 2733894 - RNA, 19 nt, Artificial Sequence
  Description of Artificial Sequence: Synthetic oligonucleotide
cacaggacgaaguucaaag

SEQ ID NO: 2733895 - RNA, 19 nt, Artificial Sequence
  Description of Artificial Sequence: Synthetic oligonucleotide
aaucggaugacaucuuuau

SEQ ID NO: 2733896 - RNA, 19 nt, Artificial Sequence
  Description of Artificial Sequence: Synthetic oligonucleotide
uuuauucacgccccggcgc

SEQ ID NO: 2733897 - RNA, 19 nt, Artificial Sequence
  Description of Artificial Sequence: Synthetic oligonucleotide
ucuuuauucacgccccggc

SEQ ID NO: 2733898 - RNA, 19 nt, Artificial Sequence
  Description of Artificial Sequence: Synthetic oligonucleotide
auccggacgcaguauaacc

SEQ ID NO: 2733899 - RNA, 19 nt, Artificial Sequence
  Description of Artificial Sequence: Synthetic oligonucleotide
agauagcaaagcaaugacc

SEQ ID NO: 2733900 - RNA, 19 nt, Artificial Sequence
  Description of Artificial Sequence: Synthetic oligonucleotide
aaagacuccagcaaucgga

SEQ ID NO: 2733901 - RNA, 19 nt, Artificial Sequence
  Description of Artificial Sequence: Synthetic oligonucleotide
guugggauugagcagggag

SEQ ID NO: 2733902 - RNA, 19 nt, Artificial Sequence
  Description of Artificial Sequence: Synthetic oligonucleotide
ugcgcuaagagacagucua

SEQ ID NO: 2733903 - RNA, 19 nt, Artificial Sequence
  Description of Artificial Sequence: Synthetic oligonucleotide
aagaaccgaaaagcaauac

SEQ ID NO: 2733904 - RNA, 19 nt, Artificial Sequence
  Description of Artificial Sequence: Synthetic oligonucleotide
aagggcaacaccccgcuca

SEQ ID NO: 2733905 - RNA, 19 nt, Artificial Sequence
  Description of Artificial Sequence: Synthetic oligonucleotide
cagucuaagaaccgaaaag

SEQ ID NO: 2733906 - RNA, 19 nt, Artificial Sequence
  Description of Artificial Sequence: Synthetic oligonucleotide
ugcaucagaggcagcaucc

SEQ ID NO: 2733907 - RNA, 19 nt, Artificial Sequence
  Description of Artificial Sequence: Synthetic oligonucleotide
acaucuuuauucacgcccc

SEQ ID NO: 2733908 - RNA, 19 nt, Artificial Sequence
  Description of Artificial Sequence: Synthetic oligonucleotide
aacacaucauucuucucaa

SEQ ID NO: 2733909 - RNA, 19 nt, Artificial Sequence
  Description of Artificial Sequence: Synthetic oligonucleotide
ucuucucaaagggucacgg

SEQ ID NO: 2733910 - RNA, 19 nt, Artificial Sequence
  Description of Artificial Sequence: Synthetic oligonucleotide
gagauagcaaagcaaugac

SEQ ID NO: 2733911 - RNA, 19 nt, Artificial Sequence
  Description of Artificial Sequence: Synthetic oligonucleotide
uucaaaggaacacaucauu

SEQ ID NO: 2733912 - RNA, 19 nt, Artificial Sequence
  Description of Artificial Sequence: Synthetic oligonucleotide
auccaaaacgaaagcagcc

SEQ ID NO: 2733913 - RNA, 19 nt, Artificial Sequence
  Description of Artificial Sequence: Synthetic oligonucleotide
agagauagcaaagcaauga

SEQ ID NO: 2733914 - RNA, 19 nt, Artificial Sequence
  Description of Artificial Sequence: Synthetic oligonucleotide
agaaccgaaaagcaauacu

SEQ ID NO: 2733915 - RNA, 19 nt, Artificial Sequence
  Description of Artificial Sequence: Synthetic oligonucleotide
cuaagagacagucuaagaa

SEQ ID NO: 2733916 - RNA, 19 nt, Artificial Sequence
  Description of Artificial Sequence: Synthetic oligonucleotide
gcaaauaucaauuuugagu

SEQ ID NO: 2733917 - RNA, 19 nt, Artificial Sequence
  Description of Artificial Sequence: Synthetic oligonucleotide
aggaacacaucauucuucu

SEQ ID NO: 2733918 - RNA, 19 nt, Artificial Sequence
  Description of Artificial Sequence: Synthetic oligonucleotide
uugggauugagcagggagu

SEQ ID NO: 2733919 - RNA, 19 nt, Artificial Sequence
  Description of Artificial Sequence: Synthetic oligonucleotide
uccaaaacgaaagcagccc

SEQ ID NO: 2733920 - RNA, 19 nt, Artificial Sequence
  Description of Artificial Sequence: Synthetic oligonucleotide
acgcaguauaaccaaccac

SEQ ID NO: 2733921 - RNA, 19 nt, Artificial Sequence
  Description of Artificial Sequence: Synthetic oligonucleotide
aaccacaggacgaaguuca

SEQ ID NO: 2733922 - RNA, 19 nt, Artificial Sequence
  Description of Artificial Sequence: Synthetic oligonucleotide
cugcucugcgcuaagagac

SEQ ID NO: 2733923 - RNA, 19 nt, Artificial Sequence
  Description of Artificial Sequence: Synthetic oligonucleotide
ugcauggucuccagcuucg

SEQ ID NO: 2733924 - RNA, 19 nt, Artificial Sequence
  Description of Artificial Sequence: Synthetic oligonucleotide
cuuuauucacgccccggcg

SEQ ID NO: 2733925 - RNA, 19 nt, Artificial Sequence
  Description of Artificial Sequence: Synthetic oligonucleotide
caaugaccaagaucaagag

SEQ ID NO: 2733926 - RNA, 19 nt, Artificial Sequence
  Description of Artificial Sequence: Synthetic oligonucleotide
accccgcucacauaguagg

SEQ ID NO: 2733927 - RNA, 19 nt, Artificial Sequence
  Description of Artificial Sequence: Synthetic oligonucleotide
cgaaaagcaauacugacag

SEQ ID NO: 2733928 - RNA, 19 nt, Artificial Sequence
  Description of Artificial Sequence: Synthetic oligonucleotide
cucuguuaaagccuuucac

SEQ ID NO: 2733929 - RNA, 19 nt, Artificial Sequence
  Description of Artificial Sequence: Synthetic oligonucleotide
ucgccaugagcccucaaug

SEQ ID NO: 2733930 - RNA, 19 nt, Artificial Sequence
  Description of Artificial Sequence: Synthetic oligonucleotide
ucucaaagggucacggcaa

SEQ ID NO: 2733931 - RNA, 19 nt, Artificial Sequence
  Description of Artificial Sequence: Synthetic oligonucleotide
ugguccggaagcuggacag

SEQ ID NO: 2733932 - RNA, 19 nt, Artificial Sequence
  Description of Artificial Sequence: Synthetic oligonucleotide
uaagaaccgaaaagcaaua

SEQ ID NO: 2733933 - RNA, 19 nt, Artificial Sequence
  Description of Artificial Sequence: Synthetic oligonucleotide
cacauaguaggcgaugccc

SEQ ID NO: 2733934 - RNA, 19 nt, Artificial Sequence
  Description of Artificial Sequence: Synthetic oligonucleotide
uccggacgcaguauaacca

SEQ ID NO: 2733935 - RNA, 19 nt, Artificial Sequence
  Description of Artificial Sequence: Synthetic oligonucleotide
acagucuaagaaccgaaaa

SEQ ID NO: 2733936 - RNA, 19 nt, Artificial Sequence
  Description of Artificial Sequence: Synthetic oligonucleotide
uugccuuaucgccaugagc

SEQ ID NO: 2733937 - RNA, 19 nt, Artificial Sequence
  Description of Artificial Sequence: Synthetic oligonucleotide
caacaccccgcucacauag

SEQ ID NO: 2733938 - RNA, 19 nt, Artificial Sequence
  Description of Artificial Sequence: Synthetic oligonucleotide
gaugguugcaaauaucaau

SEQ ID NO: 2733939 - RNA, 19 nt, Artificial Sequence
  Description of Artificial Sequence: Synthetic oligonucleotide
aaagggucacggcaaguaa

SEQ ID NO: 2733940 - RNA, 19 nt, Artificial Sequence
  Description of Artificial Sequence: Synthetic oligonucleotide
aaccgaaaagcaauacuga

SEQ ID NO: 2733941 - RNA, 19 nt, Artificial Sequence
  Description of Artificial Sequence: Synthetic oligonucleotide
uccaaagacuccagcaauc

SEQ ID NO: 2733942 - RNA, 19 nt, Artificial Sequence
  Description of Artificial Sequence: Synthetic oligonucleotide
uuauucacgccccggcgcu

SEQ ID NO: 2733943 - RNA, 19 nt, Artificial Sequence
  Description of Artificial Sequence: Synthetic oligonucleotide
ugaugguugcaaauaucaa

SEQ ID NO: 2733944 - RNA, 19 nt, Artificial Sequence
  Description of Artificial Sequence: Synthetic oligonucleotide
ucuccuugcuggagguugg

SEQ ID NO: 2733945 - RNA, 19 nt, Artificial Sequence
  Description of Artificial Sequence: Synthetic oligonucleotide
auaaccaaccacaggacga

SEQ ID NO: 2733946 - RNA, 19 nt, Artificial Sequence
  Description of Artificial Sequence: Synthetic oligonucleotide
cuugaugguugcaaauauc

SEQ ID NO: 2733947 - RNA, 19 nt, Artificial Sequence
  Description of Artificial Sequence: Synthetic oligonucleotide
uccgccgucugcauggucu

SEQ ID NO: 2733948 - RNA, 19 nt, Artificial Sequence
  Description of Artificial Sequence: Synthetic oligonucleotide
uccagcaaucggaugacau

SEQ ID NO: 2733949 - RNA, 19 nt, Artificial Sequence
  Description of Artificial Sequence: Synthetic oligonucleotide
agagcaagacccuccagaa

SEQ ID NO: 2733950 - RNA, 19 nt, Artificial Sequence
  Description of Artificial Sequence: Synthetic oligonucleotide
cucuccgccgucugcaugg

SEQ ID NO: 2733951 - RNA, 19 nt, Artificial Sequence
  Description of Artificial Sequence: Synthetic oligonucleotide
ucugcgcuaagagacaguc

SEQ ID NO: 2733952 - RNA, 19 nt, Artificial Sequence
  Description of Artificial Sequence: Synthetic oligonucleotide
cacgugguccggaagcugg

SEQ ID NO: 2733953 - RNA, 19 nt, Artificial Sequence
  Description of Artificial Sequence: Synthetic oligonucleotide
uucuccuugcuggagguug

SEQ ID NO: 2733954 - RNA, 19 nt, Artificial Sequence
  Description of Artificial Sequence: Synthetic oligonucleotide
agcaaugaccaagaucaag

SEQ ID NO: 2733955 - RNA, 19 nt, Artificial Sequence
  Description of Artificial Sequence: Synthetic oligonucleotide
cuaagaaccgaaaagcaau

SEQ ID NO: 2733956 - RNA, 19 nt, Artificial Sequence
  Description of Artificial Sequence: Synthetic oligonucleotide
cucacauaguaggcgaugc

SEQ ID NO: 2733957 - RNA, 19 nt, Artificial Sequence
  Description of Artificial Sequence: Synthetic oligonucleotide
ugggauugagcagggagug

SEQ ID NO: 2733958 - RNA, 19 nt, Artificial Sequence
  Description of Artificial Sequence: Synthetic oligonucleotide
cucuccauggcgcuuucgc

SEQ ID NO: 2733959 - RNA, 19 nt, Artificial Sequence
  Description of Artificial Sequence: Synthetic oligonucleotide
accaagaucaagagcaaga

SEQ ID NO: 2733960 - RNA, 19 nt, Artificial Sequence
  Description of Artificial Sequence: Synthetic oligonucleotide
gacgcaguauaaccaacca

SEQ ID NO: 2733961 - RNA, 19 nt, Artificial Sequence
  Description of Artificial Sequence: Synthetic oligonucleotide
uccagcuucgagugcgugc

SEQ ID NO: 2733962 - RNA, 19 nt, Artificial Sequence
  Description of Artificial Sequence: Synthetic oligonucleotide
cagagauagcaaagcaaug

SEQ ID NO: 2733963 - RNA, 19 nt, Artificial Sequence
  Description of Artificial Sequence: Synthetic oligonucleotide
ugacaucuuuauucacgcc

SEQ ID NO: 2733964 - RNA, 19 nt, Artificial Sequence
  Description of Artificial Sequence: Synthetic oligonucleotide
gagcccucaaugcaccagc

SEQ ID NO: 2733965 - RNA, 19 nt, Artificial Sequence
  Description of Artificial Sequence: Synthetic oligonucleotide
cugguuguccacgaagggc

SEQ ID NO: 2733966 - RNA, 19 nt, Artificial Sequence
  Description of Artificial Sequence: Synthetic oligonucleotide
cuucucaaagggucacggc

SEQ ID NO: 2733967 - RNA, 19 nt, Artificial Sequence
  Description of Artificial Sequence: Synthetic oligonucleotide
uucuucucaaagggucacg

SEQ ID NO: 2733968 - RNA, 19 nt, Artificial Sequence
  Description of Artificial Sequence: Synthetic oligonucleotide
cuguuaaagccuuucaccu

SEQ ID NO: 2733969 - RNA, 19 nt, Artificial Sequence
  Description of Artificial Sequence: Synthetic oligonucleotide
aucuuuauucacgccccgg

SEQ ID NO: 2733970 - RNA, 19 nt, Artificial Sequence
  Description of Artificial Sequence: Synthetic oligonucleotide
auugagcagggaguggcuc

SEQ ID NO: 2733971 - RNA, 19 nt, Artificial Sequence
  Description of Artificial Sequence: Synthetic oligonucleotide
cuggagguugggauugagc

SEQ ID NO: 2733972 - RNA, 19 nt, Artificial Sequence
  Description of Artificial Sequence: Synthetic oligonucleotide
aggcgaugcccagagauag

SEQ ID NO: 2733973 - RNA, 19 nt, Artificial Sequence
  Description of Artificial Sequence: Synthetic oligonucleotide
ccuuccuugccuuaucgcc

SEQ ID NO: 2733974 - RNA, 19 nt, Artificial Sequence
  Description of Artificial Sequence: Synthetic oligonucleotide
agcaaagcaaugaccaaga

SEQ ID NO: 2733975 - RNA, 19 nt, Artificial Sequence
  Description of Artificial Sequence: Synthetic oligonucleotide
auagcaaagcaaugaccaa

SEQ ID NO: 2733976 - RNA, 19 nt, Artificial Sequence
  Description of Artificial Sequence: Synthetic oligonucleotide
cauucuucucaaaggguca

SEQ ID NO: 2733977 - RNA, 19 nt, Artificial Sequence
  Description of Artificial Sequence: Synthetic oligonucleotide
uugagcagggaguggcucu

SEQ ID NO: 2733978 - RNA, 19 nt, Artificial Sequence
  Description of Artificial Sequence: Synthetic oligonucleotide
gacgaaguucaaaggaaca

SEQ ID NO: 2733979 - RNA, 19 nt, Artificial Sequence
  Description of Artificial Sequence: Synthetic oligonucleotide
gucuaagaaccgaaaagca

SEQ ID NO: 2733980 - RNA, 19 nt, Artificial Sequence
  Description of Artificial Sequence: Synthetic oligonucleotide
cacgaagggcaacaccccg

SEQ ID NO: 2733981 - RNA, 19 nt, Artificial Sequence
  Description of Artificial Sequence: Synthetic oligonucleotide
caucuuuauucacgccccg

SEQ ID NO: 2733982 - RNA, 19 nt, Artificial Sequence
  Description of Artificial Sequence: Synthetic oligonucleotide
uuguccacgaagggcaaca

SEQ ID NO: 2733983 - RNA, 19 nt, Artificial Sequence
  Description of Artificial Sequence: Synthetic oligonucleotide
ucuccauggcgcuuucgcu

SEQ ID NO: 2733984 - RNA, 19 nt, Artificial Sequence
  Description of Artificial Sequence: Synthetic oligonucleotide
ggcgcuuucgcucuccgcc

SEQ ID NO: 2733985 - RNA, 19 nt, Artificial Sequence
  Description of Artificial Sequence: Synthetic oligonucleotide
agccuuucaccuccugcuc

SEQ ID NO: 2733986 - RNA, 19 nt, Artificial Sequence
  Description of Artificial Sequence: Synthetic oligonucleotide
agggcaacaccccgcucac

SEQ ID NO: 2733987 - RNA, 19 nt, Artificial Sequence
  Description of Artificial Sequence: Synthetic oligonucleotide
aagacuccagcaaucggau

SEQ ID NO: 2733988 - RNA, 19 nt, Artificial Sequence
  Description of Artificial Sequence: Synthetic oligonucleotide
cuugccuuaucgccaugag

SEQ ID NO: 2733989 - RNA, 19 nt, Artificial Sequence
  Description of Artificial Sequence: Synthetic oligonucleotide
aucgccaugagcccucaau

SEQ ID NO: 2733990 - RNA, 19 nt, Artificial Sequence
  Description of Artificial Sequence: Synthetic oligonucleotide
guauaaccaaccacaggac

SEQ ID NO: 2733991 - RNA, 19 nt, Artificial Sequence
  Description of Artificial Sequence: Synthetic oligonucleotide
gagacagucuaagaaccga

SEQ ID NO: 2733992 - RNA, 19 nt, Artificial Sequence
  Description of Artificial Sequence: Synthetic oligonucleotide
auacugacaggcccuuccu

SEQ ID NO: 2733993 - RNA, 19 nt, Artificial Sequence
  Description of Artificial Sequence: Synthetic oligonucleotide
cuuaucgccaugagcccuc

SEQ ID NO: 2733994 - RNA, 19 nt, Artificial Sequence
  Description of Artificial Sequence: Synthetic oligonucleotide
cuuccuugccuuaucgcca

SEQ ID NO: 2733995 - RNA, 19 nt, Artificial Sequence
  Description of Artificial Sequence: Synthetic oligonucleotide
ggaguggcucuccauggcg

SEQ ID NO: 2733996 - RNA, 19 nt, Artificial Sequence
  Description of Artificial Sequence: Synthetic oligonucleotide
uaaccaaccacaggacgaa

SEQ ID NO: 2733997 - RNA, 19 nt, Artificial Sequence
  Description of Artificial Sequence: Synthetic oligonucleotide
ggauugagcagggaguggc

SEQ ID NO: 2733998 - RNA, 19 nt, Artificial Sequence
  Description of Artificial Sequence: Synthetic oligonucleotide
ugacaggcccuuccuugcc

SEQ ID NO: 2733999 - RNA, 19 nt, Artificial Sequence
  Description of Artificial Sequence: Synthetic oligonucleotide
cucaaagggucacggcaag

SEQ ID NO: 2734000 - RNA, 19 nt, Artificial Sequence
  Description of Artificial Sequence: Synthetic oligonucleotide
cagggaguggcucuccaug

SEQ ID NO: 2734001 - RNA, 19 nt, Artificial Sequence
  Description of Artificial Sequence: Synthetic oligonucleotide
ugagcccucaaugcaccag

SEQ ID NO: 2734002 - RNA, 19 nt, Artificial Sequence
  Description of Artificial Sequence: Synthetic oligonucleotide
aagggucacggcaaguaaa

SEQ ID NO: 2734003 - RNA, 19 nt, Artificial Sequence
  Description of Artificial Sequence: Synthetic oligonucleotide
ugcucugcgcuaagagaca

SEQ ID NO: 2734004 - RNA, 19 nt, Artificial Sequence
  Description of Artificial Sequence: Synthetic oligonucleotide
gagugcgugccucuguuaa

SEQ ID NO: 2734005 - RNA, 19 nt, Artificial Sequence
  Description of Artificial Sequence: Synthetic oligonucleotide
ucaggcugguuguccacga

SEQ ID NO: 2734006 - RNA, 19 nt, Artificial Sequence
  Description of Artificial Sequence: Synthetic oligonucleotide
cgcaguauaaccaaccaca

SEQ ID NO: 2734007 - RNA, 19 nt, Artificial Sequence
  Description of Artificial Sequence: Synthetic oligonucleotide
gugcgugccucuguuaaag

SEQ ID NO: 2734008 - RNA, 19 nt, Artificial Sequence
  Description of Artificial Sequence: Synthetic oligonucleotide
guaggcgaugcccagagau

SEQ ID NO: 2734009 - RNA, 19 nt, Artificial Sequence
  Description of Artificial Sequence: Synthetic oligonucleotide
ugcgugccucuguuaaagc

SEQ ID NO: 2734010 - RNA, 19 nt, Artificial Sequence
  Description of Artificial Sequence: Synthetic oligonucleotide
gaguggcucuccauggcgc

SEQ ID NO: 2734011 - RNA, 19 nt, Artificial Sequence
  Description of Artificial Sequence: Synthetic oligonucleotide
aaccaaccacaggacgaag

SEQ ID NO: 2734012 - RNA, 19 nt, Artificial Sequence
  Description of Artificial Sequence: Synthetic oligonucleotide
uucgagugcgugccucugu

SEQ ID NO: 2734013 - RNA, 19 nt, Artificial Sequence
  Description of Artificial Sequence: Synthetic oligonucleotide
gcaguauaaccaaccacag

SEQ ID NO: 2734014 - RNA, 19 nt, Artificial Sequence
  Description of Artificial Sequence: Synthetic oligonucleotide
uucgcucuccgccgucugc

SEQ ID NO: 2734015 - RNA, 19 nt, Artificial Sequence
  Description of Artificial Sequence: Synthetic oligonucleotide
cucaggcugguuguccacg

SEQ ID NO: 2734016 - RNA, 19 nt, Artificial Sequence
  Description of Artificial Sequence: Synthetic oligonucleotide
agaucaagagcaagacccu

SEQ ID NO: 2734017 - RNA, 19 nt, Artificial Sequence
  Description of Artificial Sequence: Synthetic oligonucleotide
cugcaucagaggcagcauc

SEQ ID NO: 2734018 - RNA, 19 nt, Artificial Sequence
  Description of Artificial Sequence: Synthetic oligonucleotide
uuucgcucuccgccgucug

SEQ ID NO: 2734019 - RNA, 19 nt, Artificial Sequence
  Description of Artificial Sequence: Synthetic oligonucleotide
gcugguuguccacgaaggg

SEQ ID NO: 2734020 - RNA, 19 nt, Artificial Sequence
  Description of Artificial Sequence: Synthetic oligonucleotide
gguggcaccuugaugguug

SEQ ID NO: 2734021 - RNA, 19 nt, Artificial Sequence
  Description of Artificial Sequence: Synthetic oligonucleotide
guccacgaagggcaacacc

SEQ ID NO: 2734022 - RNA, 19 nt, Artificial Sequence
  Description of Artificial Sequence: Synthetic oligonucleotide
uuccuugccuuaucgccau

SEQ ID NO: 2734023 - RNA, 19 nt, Artificial Sequence
  Description of Artificial Sequence: Synthetic oligonucleotide
gcuaagagacagucuaaga

SEQ ID NO: 2734024 - RNA, 19 nt, Artificial Sequence
  Description of Artificial Sequence: Synthetic oligonucleotide
auggcgcuuucgcucuccg

SEQ ID NO: 2734025 - RNA, 19 nt, Artificial Sequence
  Description of Artificial Sequence: Synthetic oligonucleotide
aucggaugacaucuuuauu

SEQ ID NO: 2734026 - RNA, 19 nt, Artificial Sequence
  Description of Artificial Sequence: Synthetic oligonucleotide
ucgagugcgugccucuguu

SEQ ID NO: 2734027 - RNA, 19 nt, Artificial Sequence
  Description of Artificial Sequence: Synthetic oligonucleotide
ccaagaucaagagcaagac

SEQ ID NO: 2734028 - RNA, 19 nt, Artificial Sequence
  Description of Artificial Sequence: Synthetic oligonucleotide
accuugaugguugcaaaua

SEQ ID NO: 2734029 - RNA, 19 nt, Artificial Sequence
  Description of Artificial Sequence: Synthetic oligonucleotide
gaaagcagcccuugcugcu

SEQ ID NO: 2734030 - RNA, 19 nt, Artificial Sequence
  Description of Artificial Sequence: Synthetic oligonucleotide
agcuucgagugcgugccuc

SEQ ID NO: 2734031 - RNA, 19 nt, Artificial Sequence
  Description of Artificial Sequence: Synthetic oligonucleotide
ggacgaaguucaaaggaac

SEQ ID NO: 2734032 - RNA, 19 nt, Artificial Sequence
  Description of Artificial Sequence: Synthetic oligonucleotide
ucaaagggucacggcaagu

SEQ ID NO: 2734033 - RNA, 19 nt, Artificial Sequence
  Description of Artificial Sequence: Synthetic oligonucleotide
caccccgcucacauaguag

SEQ ID NO: 2734034 - RNA, 19 nt, Artificial Sequence
  Description of Artificial Sequence: Synthetic oligonucleotide
ggacgcaguauaaccaacc

SEQ ID NO: 2734035 - RNA, 19 nt, Artificial Sequence
  Description of Artificial Sequence: Synthetic oligonucleotide
uccggaagcuggacaggac

SEQ ID NO: 2734036 - RNA, 19 nt, Artificial Sequence
  Description of Artificial Sequence: Synthetic oligonucleotide
agcauccggacgcaguaua

SEQ ID NO: 2734037 - RNA, 19 nt, Artificial Sequence
  Description of Artificial Sequence: Synthetic oligonucleotide
gcgugccucuguuaaagcc

SEQ ID NO: 2734038 - RNA, 19 nt, Artificial Sequence
  Description of Artificial Sequence: Synthetic oligonucleotide
cagaggcagcauccggacg

SEQ ID NO: 2734039 - RNA, 19 nt, Artificial Sequence
  Description of Artificial Sequence: Synthetic oligonucleotide
agacagucuaagaaccgaa

SEQ ID NO: 2734040 - RNA, 19 nt, Artificial Sequence
  Description of Artificial Sequence: Synthetic oligonucleotide
caaucggaugacaucuuua

SEQ ID NO: 2734041 - RNA, 19 nt, Artificial Sequence
  Description of Artificial Sequence: Synthetic oligonucleotide
cagcccuugcugcucugcg

SEQ ID NO: 2734042 - RNA, 19 nt, Artificial Sequence
  Description of Artificial Sequence: Synthetic oligonucleotide
uacugacaggcccuuccuu

SEQ ID NO: 2734043 - RNA, 19 nt, Artificial Sequence
  Description of Artificial Sequence: Synthetic oligonucleotide
cauccggacgcaguauaac

SEQ ID NO: 2734044 - RNA, 19 nt, Artificial Sequence
  Description of Artificial Sequence: Synthetic oligonucleotide
cuugcugcucugcgcuaag

SEQ ID NO: 2734045 - RNA, 19 nt, Artificial Sequence
  Description of Artificial Sequence: Synthetic oligonucleotide
ccucaaugcaccagcucag

SEQ ID NO: 2734046 - RNA, 19 nt, Artificial Sequence
  Description of Artificial Sequence: Synthetic oligonucleotide
ccagcuucgagugcgugcc

SEQ ID NO: 2734047 - RNA, 19 nt, Artificial Sequence
  Description of Artificial Sequence: Synthetic oligonucleotide
gcccuuccuugccuuaucg

SEQ ID NO: 2734048 - RNA, 19 nt, Artificial Sequence
  Description of Artificial Sequence: Synthetic oligonucleotide
cagcaaucggaugacaucu

SEQ ID NO: 2734049 - RNA, 19 nt, Artificial Sequence
  Description of Artificial Sequence: Synthetic oligonucleotide
agugcgugccucuguuaaa

SEQ ID NO: 2734050 - RNA, 19 nt, Artificial Sequence
  Description of Artificial Sequence: Synthetic oligonucleotide
gccuuucaccuccugcucc

SEQ ID NO: 2734051 - RNA, 19 nt, Artificial Sequence
  Description of Artificial Sequence: Synthetic oligonucleotide
agggucacggcaaguaaaa

SEQ ID NO: 2734052 - RNA, 19 nt, Artificial Sequence
  Description of Artificial Sequence: Synthetic oligonucleotide
cgaaagcagcccuugcugc

SEQ ID NO: 2734053 - RNA, 19 nt, Artificial Sequence
  Description of Artificial Sequence: Synthetic oligonucleotide
ccagcaaucggaugacauc

SEQ ID NO: 2734054 - RNA, 19 nt, Artificial Sequence
  Description of Artificial Sequence: Synthetic oligonucleotide
augagcccucaaugcacca

SEQ ID NO: 2734055 - RNA, 19 nt, Artificial Sequence
  Description of Artificial Sequence: Synthetic oligonucleotide
acacaucauucuucucaaa

SEQ ID NO: 2734056 - RNA, 19 nt, Artificial Sequence
  Description of Artificial Sequence: Synthetic oligonucleotide
ucgcucuccgccgucugca

SEQ ID NO: 2734057 - RNA, 19 nt, Artificial Sequence
  Description of Artificial Sequence: Synthetic oligonucleotide
ggaagcuggacaggacucc

SEQ ID NO: 2734058 - RNA, 19 nt, Artificial Sequence
  Description of Artificial Sequence: Synthetic oligonucleotide
caaagggucacggcaagua

SEQ ID NO: 2734059 - RNA, 19 nt, Artificial Sequence
  Description of Artificial Sequence: Synthetic oligonucleotide
uguccacgaagggcaacac

SEQ ID NO: 2734060 - RNA, 19 nt, Artificial Sequence
  Description of Artificial Sequence: Synthetic oligonucleotide
acaccccgcucacauagua

SEQ ID NO: 2734061 - RNA, 19 nt, Artificial Sequence
  Description of Artificial Sequence: Synthetic oligonucleotide
gugguccggaagcuggaca

SEQ ID NO: 2734062 - RNA, 19 nt, Artificial Sequence
  Description of Artificial Sequence: Synthetic oligonucleotide
ccagagauagcaaagcaau

SEQ ID NO: 2734063 - RNA, 19 nt, Artificial Sequence
  Description of Artificial Sequence: Synthetic oligonucleotide
uccuugcuggagguuggga

SEQ ID NO: 2734064 - RNA, 19 nt, Artificial Sequence
  Description of Artificial Sequence: Synthetic oligonucleotide
agguugggauugagcaggg

SEQ ID NO: 2734065 - RNA, 19 nt, Artificial Sequence
  Description of Artificial Sequence: Synthetic oligonucleotide
cacaaacuccugccacgug

SEQ ID NO: 2734066 - RNA, 19 nt, Artificial Sequence
  Description of Artificial Sequence: Synthetic oligonucleotide
guggcaccuugaugguugc

SEQ ID NO: 2734067 - RNA, 19 nt, Artificial Sequence
  Description of Artificial Sequence: Synthetic oligonucleotide
aguaggcgaugcccagaga

SEQ ID NO: 2734068 - RNA, 19 nt, Artificial Sequence
  Description of Artificial Sequence: Synthetic oligonucleotide
gcaucagaggcagcauccg

SEQ ID NO: 2734069 - RNA, 19 nt, Artificial Sequence
  Description of Artificial Sequence: Synthetic oligonucleotide
uggcgcuuucgcucuccgc

SEQ ID NO: 2734070 - RNA, 19 nt, Artificial Sequence
  Description of Artificial Sequence: Synthetic oligonucleotide
guucaaaggaacacaucau

SEQ ID NO: 2734071 - RNA, 19 nt, Artificial Sequence
  Description of Artificial Sequence: Synthetic oligonucleotide
uuaucgccaugagcccuca

SEQ ID NO: 2734072 - RNA, 19 nt, Artificial Sequence
  Description of Artificial Sequence: Synthetic oligonucleotide
cauggcgcuuucgcucucc

SEQ ID NO: 2734073 - RNA, 19 nt, Artificial Sequence
  Description of Artificial Sequence: Synthetic oligonucleotide
aagcaaugaccaagaucaa

SEQ ID NO: 2734074 - RNA, 19 nt, Artificial Sequence
  Description of Artificial Sequence: Synthetic oligonucleotide
gccuuaucgccaugagccc

SEQ ID NO: 2734075 - RNA, 19 nt, Artificial Sequence
  Description of Artificial Sequence: Synthetic oligonucleotide
caaacuccugccacguggu

SEQ ID NO: 2734076 - RNA, 19 nt, Artificial Sequence
  Description of Artificial Sequence: Synthetic oligonucleotide
gcgcuuucgcucuccgccg

SEQ ID NO: 2734077 - RNA, 19 nt, Artificial Sequence
  Description of Artificial Sequence: Synthetic oligonucleotide
ugcaccagcucaggcuggu

SEQ ID NO: 2734078 - RNA, 19 nt, Artificial Sequence
  Description of Artificial Sequence: Synthetic oligonucleotide
cccgcucacauaguaggcg

SEQ ID NO: 2734079 - RNA, 19 nt, Artificial Sequence
  Description of Artificial Sequence: Synthetic oligonucleotide
gggaguggcucuccauggc

SEQ ID NO: 2734080 - RNA, 19 nt, Artificial Sequence
  Description of Artificial Sequence: Synthetic oligonucleotide
ccacgaagggcaacacccc

SEQ ID NO: 2734081 - RNA, 19 nt, Artificial Sequence
  Description of Artificial Sequence: Synthetic oligonucleotide
aacaccccgcucacauagu

SEQ ID NO: 2734082 - RNA, 19 nt, Artificial Sequence
  Description of Artificial Sequence: Synthetic oligonucleotide
gaagggcaacaccccgcuc

SEQ ID NO: 2734083 - RNA, 19 nt, Artificial Sequence
  Description of Artificial Sequence: Synthetic oligonucleotide
uccuugccuuaucgccaug

SEQ ID NO: 2734084 - RNA, 19 nt, Artificial Sequence
  Description of Artificial Sequence: Synthetic oligonucleotide
gcaagacccuccagaagcc

SEQ ID NO: 2734085 - RNA, 19 nt, Artificial Sequence
  Description of Artificial Sequence: Synthetic oligonucleotide
uucacgccccggcgcuuug

SEQ ID NO: 2734086 - RNA, 19 nt, Artificial Sequence
  Description of Artificial Sequence: Synthetic oligonucleotide
gcucacauaguaggcgaug

SEQ ID NO: 2734087 - RNA, 19 nt, Artificial Sequence
  Description of Artificial Sequence: Synthetic oligonucleotide
guccggaagcuggacagga

SEQ ID NO: 2734088 - RNA, 19 nt, Artificial Sequence
  Description of Artificial Sequence: Synthetic oligonucleotide
cacgccccggcgcuuugcc

SEQ ID NO: 2734089 - RNA, 19 nt, Artificial Sequence
  Description of Artificial Sequence: Synthetic oligonucleotide
gggauugagcagggagugg

SEQ ID NO: 2734090 - RNA, 19 nt, Artificial Sequence
  Description of Artificial Sequence: Synthetic oligonucleotide
gcucugcgcuaagagacag

SEQ ID NO: 2734091 - RNA, 19 nt, Artificial Sequence
  Description of Artificial Sequence: Synthetic oligonucleotide
cuccuugcuggagguuggg

SEQ ID NO: 2734092 - RNA, 19 nt, Artificial Sequence
  Description of Artificial Sequence: Synthetic oligonucleotide
cggaugacaucuuuauuca

SEQ ID NO: 2734093 - RNA, 19 nt, Artificial Sequence
  Description of Artificial Sequence: Synthetic oligonucleotide
cgccaugagcccucaaugc

SEQ ID NO: 2734094 - RNA, 19 nt, Artificial Sequence
  Description of Artificial Sequence: Synthetic oligonucleotide
uccagaagcccagguccuc

SEQ ID NO: 2734095 - RNA, 19 nt, Artificial Sequence
  Description of Artificial Sequence: Synthetic oligonucleotide
cuucgagugcgugccucug

SEQ ID NO: 2734096 - RNA, 19 nt, Artificial Sequence
  Description of Artificial Sequence: Synthetic oligonucleotide
guuguccacgaagggcaac

SEQ ID NO: 2734097 - RNA, 19 nt, Artificial Sequence
  Description of Artificial Sequence: Synthetic oligonucleotide
cccuuccuugccuuaucgc

SEQ ID NO: 2734098 - RNA, 19 nt, Artificial Sequence
  Description of Artificial Sequence: Synthetic oligonucleotide
caaaacgaaagcagcccuu

SEQ ID NO: 2734099 - RNA, 19 nt, Artificial Sequence
  Description of Artificial Sequence: Synthetic oligonucleotide
gcgaugcccagagauagca

SEQ ID NO: 2734100 - RNA, 19 nt, Artificial Sequence
  Description of Artificial Sequence: Synthetic oligonucleotide
ggcaccuugaugguugcaa

SEQ ID NO: 2734101 - RNA, 19 nt, Artificial Sequence
  Description of Artificial Sequence: Synthetic oligonucleotide
cgcuaagagacagucuaag

SEQ ID NO: 2734102 - RNA, 19 nt, Artificial Sequence
  Description of Artificial Sequence: Synthetic oligonucleotide
gauugagcagggaguggcu

SEQ ID NO: 2734103 - RNA, 19 nt, Artificial Sequence
  Description of Artificial Sequence: Synthetic oligonucleotide
cugccacgugguccggaag

SEQ ID NO: 2734104 - RNA, 19 nt, Artificial Sequence
  Description of Artificial Sequence: Synthetic oligonucleotide
ggacuccuucuccuugcug

SEQ ID NO: 2734105 - RNA, 19 nt, Artificial Sequence
  Description of Artificial Sequence: Synthetic oligonucleotide
ggcgcuuugccagaacuaa

SEQ ID NO: 2734106 - RNA, 19 nt, Artificial Sequence
  Description of Artificial Sequence: Synthetic oligonucleotide
caauacugacaggcccuuc

SEQ ID NO: 2734107 - RNA, 19 nt, Artificial Sequence
  Description of Artificial Sequence: Synthetic oligonucleotide
cgaaguucaaaggaacaca

SEQ ID NO: 2734108 - RNA, 19 nt, Artificial Sequence
  Description of Artificial Sequence: Synthetic oligonucleotide
gguccggaagcuggacagg

SEQ ID NO: 2734109 - RNA, 19 nt, Artificial Sequence
  Description of Artificial Sequence: Synthetic oligonucleotide
uaucgccaugagcccucaa

SEQ ID NO: 2734110 - RNA, 19 nt, Artificial Sequence
  Description of Artificial Sequence: Synthetic oligonucleotide
gagcagggaguggcucucc

SEQ ID NO: 2734111 - RNA, 19 nt, Artificial Sequence
  Description of Artificial Sequence: Synthetic oligonucleotide
ggcaacaccccgcucacau

SEQ ID NO: 2734112 - RNA, 19 nt, Artificial Sequence
  Description of Artificial Sequence: Synthetic oligonucleotide
gcaccuugaugguugcaaa

SEQ ID NO: 2734113 - RNA, 19 nt, Artificial Sequence
  Description of Artificial Sequence: Synthetic oligonucleotide
agcccucaaugcaccagcu

SEQ ID NO: 2734114 - RNA, 19 nt, Artificial Sequence
  Description of Artificial Sequence: Synthetic oligonucleotide
gcagcauccggacgcagua

SEQ ID NO: 2734115 - RNA, 19 nt, Artificial Sequence
  Description of Artificial Sequence: Synthetic oligonucleotide
ugccucuguuaaagccuuu

SEQ ID NO: 2734116 - RNA, 19 nt, Artificial Sequence
  Description of Artificial Sequence: Synthetic oligonucleotide
gccucuguuaaagccuuuc

SEQ ID NO: 2734117 - RNA, 19 nt, Artificial Sequence
  Description of Artificial Sequence: Synthetic oligonucleotide
gcgcuuugccagaacuaag

SEQ ID NO: 2734118 - RNA, 19 nt, Artificial Sequence
  Description of Artificial Sequence: Synthetic oligonucleotide
ccccgcucacauaguaggc

SEQ ID NO: 2734119 - RNA, 19 nt, Artificial Sequence
  Description of Artificial Sequence: Synthetic oligonucleotide
caccuugaugguugcaaau

SEQ ID NO: 2734120 - RNA, 19 nt, Artificial Sequence
  Description of Artificial Sequence: Synthetic oligonucleotide
ucacgccccggcgcuuugc

SEQ ID NO: 2734121 - RNA, 19 nt, Artificial Sequence
  Description of Artificial Sequence: Synthetic oligonucleotide
agcaaucggaugacaucuu

SEQ ID NO: 2734122 - RNA, 19 nt, Artificial Sequence
  Description of Artificial Sequence: Synthetic oligonucleotide
cuccagcuucgagugcgug

SEQ ID NO: 2734123 - RNA, 19 nt, Artificial Sequence
  Description of Artificial Sequence: Synthetic oligonucleotide
ccgcucacauaguaggcga

SEQ ID NO: 2734124 - RNA, 19 nt, Artificial Sequence
  Description of Artificial Sequence: Synthetic oligonucleotide
auucacgccccggcgcuuu

SEQ ID NO: 2734125 - RNA, 19 nt, Artificial Sequence
  Description of Artificial Sequence: Synthetic oligonucleotide
uauucacgccccggcgcuu

SEQ ID NO: 2734126 - RNA, 19 nt, Artificial Sequence
  Description of Artificial Sequence: Synthetic oligonucleotide
ucuccgccgucugcauggu

SEQ ID NO: 2734127 - RNA, 19 nt, Artificial Sequence
  Description of Artificial Sequence: Synthetic oligonucleotide
acgccccggcgcuuugcca

SEQ ID NO: 2734128 - RNA, 19 nt, Artificial Sequence
  Description of Artificial Sequence: Synthetic oligonucleotide
aggcccuuccuugccuuau

SEQ ID NO: 2734129 - RNA, 19 nt, Artificial Sequence
  Description of Artificial Sequence: Synthetic oligonucleotide
gcucuccgccgucugcaug

SEQ ID NO: 2734130 - RNA, 19 nt, Artificial Sequence
  Description of Artificial Sequence: Synthetic oligonucleotide
ccuugaugguugcaaauau

SEQ ID NO: 2734131 - RNA, 19 nt, Artificial Sequence
  Description of Artificial Sequence: Synthetic oligonucleotide
acgugguccggaagcugga

SEQ ID NO: 2734132 - RNA, 19 nt, Artificial Sequence
  Description of Artificial Sequence: Synthetic oligonucleotide
ggcgaugcccagagauagc

SEQ ID NO: 2734133 - RNA, 19 nt, Artificial Sequence
  Description of Artificial Sequence: Synthetic oligonucleotide
cugcgcuaagagacagucu

SEQ ID NO: 2734134 - RNA, 19 nt, Artificial Sequence
  Description of Artificial Sequence: Synthetic oligonucleotide
ccggacgcaguauaaccaa

SEQ ID NO: 2734135 - RNA, 19 nt, Artificial Sequence
  Description of Artificial Sequence: Synthetic oligonucleotide
cggacgcaguauaaccaac

SEQ ID NO: 2734136 - RNA, 19 nt, Artificial Sequence
  Description of Artificial Sequence: Synthetic oligonucleotide
gcaaucggaugacaucuuu

SEQ ID NO: 2734137 - RNA, 19 nt, Artificial Sequence
  Description of Artificial Sequence: Synthetic oligonucleotide
ccgucugcauggucuccag

SEQ ID NO: 2734138 - RNA, 19 nt, Artificial Sequence
  Description of Artificial Sequence: Synthetic oligonucleotide
cuccagcaaucggaugaca

SEQ ID NO: 2734139 - RNA, 19 nt, Artificial Sequence
  Description of Artificial Sequence: Synthetic oligonucleotide
gcccuugcugcucugcgcu

SEQ ID NO: 2734140 - RNA, 19 nt, Artificial Sequence
  Description of Artificial Sequence: Synthetic oligonucleotide
ccuugccuuaucgccauga

SEQ ID NO: 2734141 - RNA, 19 nt, Artificial Sequence
  Description of Artificial Sequence: Synthetic oligonucleotide
gcagcccuugcugcucugc

SEQ ID NO: 2734142 - RNA, 19 nt, Artificial Sequence
  Description of Artificial Sequence: Synthetic oligonucleotide
cgugccucuguuaaagccu

SEQ ID NO: 2734143 - RNA, 19 nt, Artificial Sequence
  Description of Artificial Sequence: Synthetic oligonucleotide
ccuugcuggagguugggau

SEQ ID NO: 2734144 - RNA, 19 nt, Artificial Sequence
  Description of Artificial Sequence: Synthetic oligonucleotide
gcucuccauggcgcuuucg

SEQ ID NO: 2734145 - RNA, 19 nt, Artificial Sequence
  Description of Artificial Sequence: Synthetic oligonucleotide
gcaaagcaaugaccaagau

SEQ ID NO: 2734146 - RNA, 19 nt, Artificial Sequence
  Description of Artificial Sequence: Synthetic oligonucleotide
cucugcgcuaagagacagu

SEQ ID NO: 2734147 - RNA, 19 nt, Artificial Sequence
  Description of Artificial Sequence: Synthetic oligonucleotide
caggcugguuguccacgaa

SEQ ID NO: 2734148 - RNA, 19 nt, Artificial Sequence
  Description of Artificial Sequence: Synthetic oligonucleotide
ggcccuuccuugccuuauc

SEQ ID NO: 2734149 - RNA, 19 nt, Artificial Sequence
  Description of Artificial Sequence: Synthetic oligonucleotide
gccgucugcauggucucca

SEQ ID NO: 2734150 - RNA, 19 nt, Artificial Sequence
  Description of Artificial Sequence: Synthetic oligonucleotide
ccggaagcuggacaggacu

SEQ ID NO: 2734151 - RNA, 19 nt, Artificial Sequence
  Description of Artificial Sequence: Synthetic oligonucleotide
caccuccugcuccuccaaa

SEQ ID NO: 2734152 - RNA, 19 nt, Artificial Sequence
  Description of Artificial Sequence: Synthetic oligonucleotide
gcauccggacgcaguauaa

SEQ ID NO: 2734153 - RNA, 19 nt, Artificial Sequence
  Description of Artificial Sequence: Synthetic oligonucleotide
cgucugcauggucuccagc

SEQ ID NO: 2734154 - RNA, 19 nt, Artificial Sequence
  Description of Artificial Sequence: Synthetic oligonucleotide
cuccgccgucugcaugguc

SEQ ID NO: 2734155 - RNA, 19 nt, Artificial Sequence
  Description of Artificial Sequence: Synthetic oligonucleotide
gcuuucgcucuccgccguc

SEQ ID NO: 2734156 - RNA, 19 nt, Artificial Sequence
  Description of Artificial Sequence: Synthetic oligonucleotide
gguuguccacgaagggcaa

SEQ ID NO: 2734157 - RNA, 19 nt, Artificial Sequence
  Description of Artificial Sequence: Synthetic oligonucleotide
gguugggauugagcaggga

SEQ ID NO: 2734158 - RNA, 19 nt, Artificial Sequence
  Description of Artificial Sequence: Synthetic oligonucleotide
cuccugccacgugguccgg

SEQ ID NO: 2734159 - RNA, 19 nt, Artificial Sequence
  Description of Artificial Sequence: Synthetic oligonucleotide
gcaacaccccgcucacaua

SEQ ID NO: 2734160 - RNA, 19 nt, Artificial Sequence
  Description of Artificial Sequence: Synthetic oligonucleotide
gcgcuaagagacagucuaa

SEQ ID NO: 2734161 - RNA, 19 nt, Artificial Sequence
  Description of Artificial Sequence: Synthetic oligonucleotide
caggcccuuccuugccuua

SEQ ID NO: 2734162 - RNA, 19 nt, Artificial Sequence
  Description of Artificial Sequence: Synthetic oligonucleotide
ccgccgucugcauggucuc

SEQ ID NO: 2734163 - RNA, 19 nt, Artificial Sequence
  Description of Artificial Sequence: Synthetic oligonucleotide
ccuuaucgccaugagcccu

SEQ ID NO: 2734164 - RNA, 19 nt, Artificial Sequence
  Description of Artificial Sequence: Synthetic oligonucleotide
ggcucuccauggcgcuuuc

SEQ ID NO: 2734165 - RNA, 19 nt, Artificial Sequence
  Description of Artificial Sequence: Synthetic oligonucleotide
gggguggcaccuugauggu

SEQ ID NO: 2734166 - RNA, 19 nt, Artificial Sequence
  Description of Artificial Sequence: Synthetic oligonucleotide
ccggcgcuuugccagaacu

SEQ ID NO: 2734167 - RNA, 19 nt, Artificial Sequence
  Description of Artificial Sequence: Synthetic oligonucleotide
gcauggucuccagcuucga

SEQ ID NO: 2734168 - RNA, 19 nt, Artificial Sequence
  Description of Artificial Sequence: Synthetic oligonucleotide
ccuugcugcucugcgcuaa

SEQ ID NO: 2734169 - RNA, 19 nt, Artificial Sequence
  Description of Artificial Sequence: Synthetic oligonucleotide
cgugguccggaagcuggac

SEQ ID NO: 2734170 - RNA, 19 nt, Artificial Sequence
  Description of Artificial Sequence: Synthetic oligonucleotide
gcugcaucagaggcagcau

SEQ ID NO: 2734171 - RNA, 19 nt, Artificial Sequence
  Description of Artificial Sequence: Synthetic oligonucleotide
cgaagggcaacaccccgcu

SEQ ID NO: 2734172 - RNA, 19 nt, Artificial Sequence
  Description of Artificial Sequence: Synthetic oligonucleotide
gccacgugguccggaagcu

SEQ ID NO: 2734173 - RNA, 19 nt, Artificial Sequence
  Description of Artificial Sequence: Synthetic oligonucleotide
cccggcgcuuugccagaac

SEQ ID NO: 2734174 - RNA, 19 nt, Artificial Sequence
  Description of Artificial Sequence: Synthetic oligonucleotide
gccccggcgcuuugccaga

SEQ ID NO: 2734175 - RNA, 19 nt, Artificial Sequence
  Description of Artificial Sequence: Synthetic oligonucleotide
cuucuccuugcuggagguu

SEQ ID NO: 2734176 - RNA, 19 nt, Artificial Sequence
  Description of Artificial Sequence: Synthetic oligonucleotide
cagcauccggacgcaguau

SEQ ID NO: 2734177 - RNA, 19 nt, Artificial Sequence
  Description of Artificial Sequence: Synthetic oligonucleotide
ccauggcgcuuucgcucuc

SEQ ID NO: 2734178 - RNA, 19 nt, Artificial Sequence
  Description of Artificial Sequence: Synthetic oligonucleotide
cagcuucgagugcgugccu

SEQ ID NO: 2734179 - RNA, 19 nt, Artificial Sequence
  Description of Artificial Sequence: Synthetic oligonucleotide
gggcaacaccccgcucaca

SEQ ID NO: 2734180 - RNA, 19 nt, Artificial Sequence
  Description of Artificial Sequence: Synthetic oligonucleotide
cggcgcuuugccagaacua

SEQ ID NO: 2734181 - RNA, 19 nt, Artificial Sequence
  Description of Artificial Sequence: Synthetic oligonucleotide
cgagugcgugccucuguua

SEQ ID NO: 2734182 - RNA, 19 nt, Artificial Sequence
  Description of Artificial Sequence: Synthetic oligonucleotide
cgccgucugcauggucucc

SEQ ID NO: 2734183 - RNA, 19 nt, Artificial Sequence
  Description of Artificial Sequence: Synthetic oligonucleotide
cccuugcugcucugcgcua

SEQ ID NO: 2734184 - RNA, 19 nt, Artificial Sequence
  Description of Artificial Sequence: Synthetic oligonucleotide
ggguggcaccuugaugguu

SEQ ID NO: 2734185 - RNA, 19 nt, Artificial Sequence
  Description of Artificial Sequence: Synthetic oligonucleotide
cgcucacauaguaggcgau

SEQ ID NO: 2734186 - RNA, 19 nt, Artificial Sequence
  Description of Artificial Sequence: Synthetic oligonucleotide
ccccggcgcuuugccagaa

SEQ ID NO: 2734187 - RNA, 19 nt, Artificial Sequence
  Description of Artificial Sequence: Synthetic oligonucleotide
cgcucuccgccgucugcau

SEQ ID NO: 2734188 - RNA, 19 nt, Artificial Sequence
  Description of Artificial Sequence: Synthetic oligonucleotide
auucuuauuauucugauac

SEQ ID NO: 2734189 - RNA, 19 nt, Artificial Sequence
  Description of Artificial Sequence: Synthetic oligonucleotide
aauuuuacagucuucuagg

SEQ ID NO: 2734190 - RNA, 19 nt, Artificial Sequence
  Description of Artificial Sequence: Synthetic oligonucleotide
aaauuuuacagucuucuag

SEQ ID NO: 2734191 - RNA, 19 nt, Artificial Sequence
  Description of Artificial Sequence: Synthetic oligonucleotide
aaugcuuuaaaaccacugg

SEQ ID NO: 2734192 - RNA, 19 nt, Artificial Sequence
  Description of Artificial Sequence: Synthetic oligonucleotide
uuuacagucuucuagguag

SEQ ID NO: 2734193 - RNA, 19 nt, Artificial Sequence
  Description of Artificial Sequence: Synthetic oligonucleotide
aaauauuucuauccgaucu

SEQ ID NO: 2734194 - RNA, 19 nt, Artificial Sequence
  Description of Artificial Sequence: Synthetic oligonucleotide
aaguuuucccaccaagucc

SEQ ID NO: 2734195 - RNA, 19 nt, Artificial Sequence
  Description of Artificial Sequence: Synthetic oligonucleotide
agaucugucaacucggugc

SEQ ID NO: 2734196 - RNA, 19 nt, Artificial Sequence
  Description of Artificial Sequence: Synthetic oligonucleotide
uacaaaauauuucuauccg

SEQ ID NO: 2734197 - RNA, 19 nt, Artificial Sequence
  Description of Artificial Sequence: Synthetic oligonucleotide
uuaucugauauuccaagcg

SEQ ID NO: 2734198 - RNA, 19 nt, Artificial Sequence
  Description of Artificial Sequence: Synthetic oligonucleotide
uuaaggucaccaaauaucc

SEQ ID NO: 2734199 - RNA, 19 nt, Artificial Sequence
  Description of Artificial Sequence: Synthetic oligonucleotide
agacacaucaguuauauga

SEQ ID NO: 2734200 - RNA, 19 nt, Artificial Sequence
  Description of Artificial Sequence: Synthetic oligonucleotide
ucuuggucaaauuuuacag

SEQ ID NO: 2734201 - RNA, 19 nt, Artificial Sequence
  Description of Artificial Sequence: Synthetic oligonucleotide
aaguugauuagucuuuauc

SEQ ID NO: 2734202 - RNA, 19 nt, Artificial Sequence
  Description of Artificial Sequence: Synthetic oligonucleotide
ucaccaaauauccagguug

SEQ ID NO: 2734203 - RNA, 19 nt, Artificial Sequence
  Description of Artificial Sequence: Synthetic oligonucleotide
aaaauauuucuauccgauc

SEQ ID NO: 2734204 - RNA, 19 nt, Artificial Sequence
  Description of Artificial Sequence: Synthetic oligonucleotide
uuuaaggucaccaaauauc

SEQ ID NO: 2734205 - RNA, 19 nt, Artificial Sequence
  Description of Artificial Sequence: Synthetic oligonucleotide
uucucuacauuuaagguca

SEQ ID NO: 2734206 - RNA, 19 nt, Artificial Sequence
  Description of Artificial Sequence: Synthetic oligonucleotide
aguugauuagucuuuaucu

SEQ ID NO: 2734207 - RNA, 19 nt, Artificial Sequence
  Description of Artificial Sequence: Synthetic oligonucleotide
uauucugauacucuguaca

SEQ ID NO: 2734208 - RNA, 19 nt, Artificial Sequence
  Description of Artificial Sequence: Synthetic oligonucleotide
caaguuacaacugaguugc

SEQ ID NO: 2734209 - RNA, 19 nt, Artificial Sequence
  Description of Artificial Sequence: Synthetic oligonucleotide
uucaagagaauucuuauua

SEQ ID NO: 2734210 - RNA, 19 nt, Artificial Sequence
  Description of Artificial Sequence: Synthetic oligonucleotide
cuuuaaaaccacugggucg

SEQ ID NO: 2734211 - RNA, 19 nt, Artificial Sequence
  Description of Artificial Sequence: Synthetic oligonucleotide
uuauaugagggagagaucu

SEQ ID NO: 2734212 - RNA, 19 nt, Artificial Sequence
  Description of Artificial Sequence: Synthetic oligonucleotide
uuuugaggcauccuuaagu

SEQ ID NO: 2734213 - RNA, 19 nt, Artificial Sequence
  Description of Artificial Sequence: Synthetic oligonucleotide
guugguacaucuuaugaag

SEQ ID NO: 2734214 - RNA, 19 nt, Artificial Sequence
  Description of Artificial Sequence: Synthetic oligonucleotide
uuuagaguagaucugucaa

SEQ ID NO: 2734215 - RNA, 19 nt, Artificial Sequence
  Description of Artificial Sequence: Synthetic oligonucleotide
auuccaagcgccaagacac

SEQ ID NO: 2734216 - RNA, 19 nt, Artificial Sequence
  Description of Artificial Sequence: Synthetic oligonucleotide
caugacaaugcuuuaaaac

SEQ ID NO: 2734217 - RNA, 19 nt, Artificial Sequence
  Description of Artificial Sequence: Synthetic oligonucleotide
gaguagaucugucaacucg

SEQ ID NO: 2734218 - RNA, 19 nt, Artificial Sequence
  Description of Artificial Sequence: Synthetic oligonucleotide
uuauuauucugauacucug

SEQ ID NO: 2734219 - RNA, 19 nt, Artificial Sequence
  Description of Artificial Sequence: Synthetic oligonucleotide
cacaucaguuauaugaggg

SEQ ID NO: 2734220 - RNA, 19 nt, Artificial Sequence
  Description of Artificial Sequence: Synthetic oligonucleotide
ucaaauuuuacagucuucu

SEQ ID NO: 2734221 - RNA, 19 nt, Artificial Sequence
  Description of Artificial Sequence: Synthetic oligonucleotide
uaucugauauuccaagcgc

SEQ ID NO: 2734222 - RNA, 19 nt, Artificial Sequence
  Description of Artificial Sequence: Synthetic oligonucleotide
ucuacauuuaaggucacca

SEQ ID NO: 2734223 - RNA, 19 nt, Artificial Sequence
  Description of Artificial Sequence: Synthetic oligonucleotide
aaaaccacugggucgauau

SEQ ID NO: 2734224 - RNA, 19 nt, Artificial Sequence
  Description of Artificial Sequence: Synthetic oligonucleotide
uuuaaaaccacugggucga

SEQ ID NO: 2734225 - RNA, 19 nt, Artificial Sequence
  Description of Artificial Sequence: Synthetic oligonucleotide
uuaaguuuucccaccaagu

SEQ ID NO: 2734226 - RNA, 19 nt, Artificial Sequence
  Description of Artificial Sequence: Synthetic oligonucleotide
aaggcguuggagucaaagg

SEQ ID NO: 2734227 - RNA, 19 nt, Artificial Sequence
  Description of Artificial Sequence: Synthetic oligonucleotide
uguacaaaauauuucuauc

SEQ ID NO: 2734228 - RNA, 19 nt, Artificial Sequence
  Description of Artificial Sequence: Synthetic oligonucleotide
uucuauccgaucuugguca

SEQ ID NO: 2734229 - RNA, 19 nt, Artificial Sequence
  Description of Artificial Sequence: Synthetic oligonucleotide
uaaaacuaaucucugggua

SEQ ID NO: 2734230 - RNA, 19 nt, Artificial Sequence
  Description of Artificial Sequence: Synthetic oligonucleotide
gagaauucuuauuauucug

SEQ ID NO: 2734231 - RNA, 19 nt, Artificial Sequence
  Description of Artificial Sequence: Synthetic oligonucleotide
cuagguaggugcuuuagag

SEQ ID NO: 2734232 - RNA, 19 nt, Artificial Sequence
  Description of Artificial Sequence: Synthetic oligonucleotide
uugauuagucuuuaucuga

SEQ ID NO: 2734233 - RNA, 19 nt, Artificial Sequence
  Description of Artificial Sequence: Synthetic oligonucleotide
agagaauucuuauuauucu

SEQ ID NO: 2734234 - RNA, 19 nt, Artificial Sequence
  Description of Artificial Sequence: Synthetic oligonucleotide
uauuucuauccgaucuugg

SEQ ID NO: 2734235 - RNA, 19 nt, Artificial Sequence
  Description of Artificial Sequence: Synthetic oligonucleotide
uaugaaguugauuagucuu

SEQ ID NO: 2734236 - RNA, 19 nt, Artificial Sequence
  Description of Artificial Sequence: Synthetic oligonucleotide
caucuuaugaaguugauua

SEQ ID NO: 2734237 - RNA, 19 nt, Artificial Sequence
  Description of Artificial Sequence: Synthetic oligonucleotide
ucugauacucuguacaaaa

SEQ ID NO: 2734238 - RNA, 19 nt, Artificial Sequence
  Description of Artificial Sequence: Synthetic oligonucleotide
aaacuaaucucuggguagg

SEQ ID NO: 2734239 - RNA, 19 nt, Artificial Sequence
  Description of Artificial Sequence: Synthetic oligonucleotide
uaggauuucaagagaauuc

SEQ ID NO: 2734240 - RNA, 19 nt, Artificial Sequence
  Description of Artificial Sequence: Synthetic oligonucleotide
uuggucaaauuuuacaguc

SEQ ID NO: 2734241 - RNA, 19 nt, Artificial Sequence
  Description of Artificial Sequence: Synthetic oligonucleotide
auuagucuuuaucugauau

SEQ ID NO: 2734242 - RNA, 19 nt, Artificial Sequence
  Description of Artificial Sequence: Synthetic oligonucleotide
ucaguuauaugagggagag

SEQ ID NO: 2734243 - RNA, 19 nt, Artificial Sequence
  Description of Artificial Sequence: Synthetic oligonucleotide
cuuaugaaguugauuaguc

SEQ ID NO: 2734244 - RNA, 19 nt, Artificial Sequence
  Description of Artificial Sequence: Synthetic oligonucleotide
cagucuucuagguaggugc

SEQ ID NO: 2734245 - RNA, 19 nt, Artificial Sequence
  Description of Artificial Sequence: Synthetic oligonucleotide
uguucucuacauuuaaggu

SEQ ID NO: 2734246 - RNA, 19 nt, Artificial Sequence
  Description of Artificial Sequence: Synthetic oligonucleotide
guugauuagucuuuaucug

SEQ ID NO: 2734247 - RNA, 19 nt, Artificial Sequence
  Description of Artificial Sequence: Synthetic oligonucleotide
aacucggugcuuuccugcc

SEQ ID NO: 2734248 - RNA, 19 nt, Artificial Sequence
  Description of Artificial Sequence: Synthetic oligonucleotide
uauuauucugauacucugu

SEQ ID NO: 2734249 - RNA, 19 nt, Artificial Sequence
  Description of Artificial Sequence: Synthetic oligonucleotide
uaaucucuggguaggacug

SEQ ID NO: 2734250 - RNA, 19 nt, Artificial Sequence
  Description of Artificial Sequence: Synthetic oligonucleotide
cuuaaguuuucccaccaag

SEQ ID NO: 2734251 - RNA, 19 nt, Artificial Sequence
  Description of Artificial Sequence: Synthetic oligonucleotide
ucgauauguuucaagccag

SEQ ID NO: 2734252 - RNA, 19 nt, Artificial Sequence
  Description of Artificial Sequence: Synthetic oligonucleotide
acaaaauauuucuauccga

SEQ ID NO: 2734253 - RNA, 19 nt, Artificial Sequence
  Description of Artificial Sequence: Synthetic oligonucleotide
agcuaaaacuaaucucugg

SEQ ID NO: 2734254 - RNA, 19 nt, Artificial Sequence
  Description of Artificial Sequence: Synthetic oligonucleotide
ucuuauuauucugauacuc

SEQ ID NO: 2734255 - RNA, 19 nt, Artificial Sequence
  Description of Artificial Sequence: Synthetic oligonucleotide
ugauacucuguacaaaaua

SEQ ID NO: 2734256 - RNA, 19 nt, Artificial Sequence
  Description of Artificial Sequence: Synthetic oligonucleotide
uauacuucccaguaggauu

SEQ ID NO: 2734257 - RNA, 19 nt, Artificial Sequence
  Description of Artificial Sequence: Synthetic oligonucleotide
uguuccauguugcagcuaa

SEQ ID NO: 2734258 - RNA, 19 nt, Artificial Sequence
  Description of Artificial Sequence: Synthetic oligonucleotide
uagucuuuaucugauauuc

SEQ ID NO: 2734259 - RNA, 19 nt, Artificial Sequence
  Description of Artificial Sequence: Synthetic oligonucleotide
gauauguuucaagccaggg

SEQ ID NO: 2734260 - RNA, 19 nt, Artificial Sequence
  Description of Artificial Sequence: Synthetic oligonucleotide
agucaaaggagccgggauc

SEQ ID NO: 2734261 - RNA, 19 nt, Artificial Sequence
  Description of Artificial Sequence: Synthetic oligonucleotide
uuucuauccgaucuugguc

SEQ ID NO: 2734262 - RNA, 19 nt, Artificial Sequence
  Description of Artificial Sequence: Synthetic oligonucleotide
ugaggcauccuuaaguuuu

SEQ ID NO: 2734263 - RNA, 19 nt, Artificial Sequence
  Description of Artificial Sequence: Synthetic oligonucleotide
uugcagcuaaaacuaaucu

SEQ ID NO: 2734264 - RNA, 19 nt, Artificial Sequence
  Description of Artificial Sequence: Synthetic oligonucleotide
auuuaaggucaccaaauau

SEQ ID NO: 2734265 - RNA, 19 nt, Artificial Sequence
  Description of Artificial Sequence: Synthetic oligonucleotide
ucugauauuccaagcgcca

SEQ ID NO: 2734266 - RNA, 19 nt, Artificial Sequence
  Description of Artificial Sequence: Synthetic oligonucleotide
guucucuacauuuaagguc

SEQ ID NO: 2734267 - RNA, 19 nt, Artificial Sequence
  Description of Artificial Sequence: Synthetic oligonucleotide
gacacaucaguuauaugag

SEQ ID NO: 2734268 - RNA, 19 nt, Artificial Sequence
  Description of Artificial Sequence: Synthetic oligonucleotide
aacugaguugcucuuucca

SEQ ID NO: 2734269 - RNA, 19 nt, Artificial Sequence
  Description of Artificial Sequence: Synthetic oligonucleotide
aucugauauuccaagcgcc

SEQ ID NO: 2734270 - RNA, 19 nt, Artificial Sequence
  Description of Artificial Sequence: Synthetic oligonucleotide
aucacuguucucuacauuu

SEQ ID NO: 2734271 - RNA, 19 nt, Artificial Sequence
  Description of Artificial Sequence: Synthetic oligonucleotide
aucuuggucaaauuuuaca

SEQ ID NO: 2734272 - RNA, 19 nt, Artificial Sequence
  Description of Artificial Sequence: Synthetic oligonucleotide
ucuuuaucugauauuccaa

SEQ ID NO: 2734273 - RNA, 19 nt, Artificial Sequence
  Description of Artificial Sequence: Synthetic oligonucleotide
aucuuaugaaguugauuag

SEQ ID NO: 2734274 - RNA, 19 nt, Artificial Sequence
  Description of Artificial Sequence: Synthetic oligonucleotide
ugcagcuaaaacuaaucuc

SEQ ID NO: 2734275 - RNA, 19 nt, Artificial Sequence
  Description of Artificial Sequence: Synthetic oligonucleotide
uuggagucaaaggagccgg

SEQ ID NO: 2734276 - RNA, 19 nt, Artificial Sequence
  Description of Artificial Sequence: Synthetic oligonucleotide
acugaguugcucuuuccag

SEQ ID NO: 2734277 - RNA, 19 nt, Artificial Sequence
  Description of Artificial Sequence: Synthetic oligonucleotide
uuuccugccuccaggaugu

SEQ ID NO: 2734278 - RNA, 19 nt, Artificial Sequence
  Description of Artificial Sequence: Synthetic oligonucleotide
aguagaucugucaacucgg

SEQ ID NO: 2734279 - RNA, 19 nt, Artificial Sequence
  Description of Artificial Sequence: Synthetic oligonucleotide
acacaucaguuauaugagg

SEQ ID NO: 2734280 - RNA, 19 nt, Artificial Sequence
  Description of Artificial Sequence: Synthetic oligonucleotide
acaacugaguugcucuuuc

SEQ ID NO: 2734281 - RNA, 19 nt, Artificial Sequence
  Description of Artificial Sequence: Synthetic oligonucleotide
ucuagcgcggccucguccg

SEQ ID NO: 2734282 - RNA, 19 nt, Artificial Sequence
  Description of Artificial Sequence: Synthetic oligonucleotide
ucuuaugaaguugauuagu

SEQ ID NO: 2734283 - RNA, 19 nt, Artificial Sequence
  Description of Artificial Sequence: Synthetic oligonucleotide
aaaggagccgggauccgcc

SEQ ID NO: 2734284 - RNA, 19 nt, Artificial Sequence
  Description of Artificial Sequence: Synthetic oligonucleotide
auuucuauccgaucuuggu

SEQ ID NO: 2734285 - RNA, 19 nt, Artificial Sequence
  Description of Artificial Sequence: Synthetic oligonucleotide
uuagaguagaucugucaac

SEQ ID NO: 2734286 - RNA, 19 nt, Artificial Sequence
  Description of Artificial Sequence: Synthetic oligonucleotide
ugauuagucuuuaucugau

SEQ ID NO: 2734287 - RNA, 19 nt, Artificial Sequence
  Description of Artificial Sequence: Synthetic oligonucleotide
caccaaauauccagguugg

SEQ ID NO: 2734288 - RNA, 19 nt, Artificial Sequence
  Description of Artificial Sequence: Synthetic oligonucleotide
auuauucugauacucugua

SEQ ID NO: 2734289 - RNA, 19 nt, Artificial Sequence
  Description of Artificial Sequence: Synthetic oligonucleotide
cugaguugcucuuuccagg

SEQ ID NO: 2734290 - RNA, 19 nt, Artificial Sequence
  Description of Artificial Sequence: Synthetic oligonucleotide
ugaguugcucuuuccaggc

SEQ ID NO: 2734291 - RNA, 19 nt, Artificial Sequence
  Description of Artificial Sequence: Synthetic oligonucleotide
gucgauauguuucaagcca

SEQ ID NO: 2734292 - RNA, 19 nt, Artificial Sequence
  Description of Artificial Sequence: Synthetic oligonucleotide
uggaaagccgcccggagga

SEQ ID NO: 2734293 - RNA, 19 nt, Artificial Sequence
  Description of Artificial Sequence: Synthetic oligonucleotide
uuugaggcauccuuaaguu

SEQ ID NO: 2734294 - RNA, 19 nt, Artificial Sequence
  Description of Artificial Sequence: Synthetic oligonucleotide
uagaguagaucugucaacu

SEQ ID NO: 2734295 - RNA, 19 nt, Artificial Sequence
  Description of Artificial Sequence: Synthetic oligonucleotide
ucccaguaggauuucaaga

SEQ ID NO: 2734296 - RNA, 19 nt, Artificial Sequence
  Description of Artificial Sequence: Synthetic oligonucleotide
cauccuuaaguuuucccac

SEQ ID NO: 2734297 - RNA, 19 nt, Artificial Sequence
  Description of Artificial Sequence: Synthetic oligonucleotide
ucaagagaauucuuauuau

SEQ ID NO: 2734298 - RNA, 19 nt, Artificial Sequence
  Description of Artificial Sequence: Synthetic oligonucleotide
ugcacauacucggagagcu

SEQ ID NO: 2734299 - RNA, 19 nt, Artificial Sequence
  Description of Artificial Sequence: Synthetic oligonucleotide
ucuguacaaaauauuucua

SEQ ID NO: 2734300 - RNA, 19 nt, Artificial Sequence
  Description of Artificial Sequence: Synthetic oligonucleotide
ggugcuuuagaguagaucu

SEQ ID NO: 2734301 - RNA, 19 nt, Artificial Sequence
  Description of Artificial Sequence: Synthetic oligonucleotide
uuuuacagucuucuaggua

SEQ ID NO: 2734302 - RNA, 19 nt, Artificial Sequence
  Description of Artificial Sequence: Synthetic oligonucleotide
auauuccaagcgccaagac

SEQ ID NO: 2734303 - RNA, 19 nt, Artificial Sequence
  Description of Artificial Sequence: Synthetic oligonucleotide
auuuuacagucuucuaggu

SEQ ID NO: 2734304 - RNA, 19 nt, Artificial Sequence
  Description of Artificial Sequence: Synthetic oligonucleotide
gaagccucucugcacauac

SEQ ID NO: 2734305 - RNA, 19 nt, Artificial Sequence
  Description of Artificial Sequence: Synthetic oligonucleotide
agguugguacaucuuauga

SEQ ID NO: 2734306 - RNA, 19 nt, Artificial Sequence
  Description of Artificial Sequence: Synthetic oligonucleotide
gccagggugaucuagcgcg

SEQ ID NO: 2734307 - RNA, 19 nt, Artificial Sequence
  Description of Artificial Sequence: Synthetic oligonucleotide
agguaggugcuuuagagua

SEQ ID NO: 2734308 - RNA, 19 nt, Artificial Sequence
  Description of Artificial Sequence: Synthetic oligonucleotide
agcgccaagacacaucagu

SEQ ID NO: 2734309 - RNA, 19 nt, Artificial Sequence
  Description of Artificial Sequence: Synthetic oligonucleotide
acaucaguuauaugaggga

SEQ ID NO: 2734310 - RNA, 19 nt, Artificial Sequence
  Description of Artificial Sequence: Synthetic oligonucleotide
uuauucugauacucuguac

SEQ ID NO: 2734311 - RNA, 19 nt, Artificial Sequence
  Description of Artificial Sequence: Synthetic oligonucleotide
aguuacaacugaguugcuc

SEQ ID NO: 2734312 - RNA, 19 nt, Artificial Sequence
  Description of Artificial Sequence: Synthetic oligonucleotide
agaguagaucugucaacuc

SEQ ID NO: 2734313 - RNA, 19 nt, Artificial Sequence
  Description of Artificial Sequence: Synthetic oligonucleotide
uauccagguugguacaucu

SEQ ID NO: 2734314 - RNA, 19 nt, Artificial Sequence
  Description of Artificial Sequence: Synthetic oligonucleotide
aguuuucccaccaaguccu

SEQ ID NO: 2734315 - RNA, 19 nt, Artificial Sequence
  Description of Artificial Sequence: Synthetic oligonucleotide
aaccacugggucgauaugu

SEQ ID NO: 2734316 - RNA, 19 nt, Artificial Sequence
  Description of Artificial Sequence: Synthetic oligonucleotide
gaaggcguuggagucaaag

SEQ ID NO: 2734317 - RNA, 19 nt, Artificial Sequence
  Description of Artificial Sequence: Synthetic oligonucleotide
uggucaaauuuuacagucu

SEQ ID NO: 2734318 - RNA, 19 nt, Artificial Sequence
  Description of Artificial Sequence: Synthetic oligonucleotide
ggauguaaguugcagcugc

SEQ ID NO: 2734319 - RNA, 19 nt, Artificial Sequence
  Description of Artificial Sequence: Synthetic oligonucleotide
uguugcagcuaaaacuaau

SEQ ID NO: 2734320 - RNA, 19 nt, Artificial Sequence
  Description of Artificial Sequence: Synthetic oligonucleotide
gauuucaagagaauucuua

SEQ ID NO: 2734321 - RNA, 19 nt, Artificial Sequence
  Description of Artificial Sequence: Synthetic oligonucleotide
ucugccuauacuucccagu

SEQ ID NO: 2734322 - RNA, 19 nt, Artificial Sequence
  Description of Artificial Sequence: Synthetic oligonucleotide
uuucaagagaauucuuauu

SEQ ID NO: 2734323 - RNA, 19 nt, Artificial Sequence
  Description of Artificial Sequence: Synthetic oligonucleotide
uccagguugguacaucuua

SEQ ID NO: 2734324 - RNA, 19 nt, Artificial Sequence
  Description of Artificial Sequence: Synthetic oligonucleotide
gccuauacuucccaguagg

SEQ ID NO: 2734325 - RNA, 19 nt, Artificial Sequence
  Description of Artificial Sequence: Synthetic oligonucleotide
cuuuagaguagaucuguca

SEQ ID NO: 2734326 - RNA, 19 nt, Artificial Sequence
  Description of Artificial Sequence: Synthetic oligonucleotide
aucuagcgcggccucgucc

SEQ ID NO: 2734327 - RNA, 19 nt, Artificial Sequence
  Description of Artificial Sequence: Synthetic oligonucleotide
gggucgauauguuucaagc

SEQ ID NO: 2734328 - RNA, 19 nt, Artificial Sequence
  Description of Artificial Sequence: Synthetic oligonucleotide
guuggagucaaaggagccg

SEQ ID NO: 2734329 - RNA, 19 nt, Artificial Sequence
  Description of Artificial Sequence: Synthetic oligonucleotide
uccaggauguaaguugcag

SEQ ID NO: 2734330 - RNA, 19 nt, Artificial Sequence
  Description of Artificial Sequence: Synthetic oligonucleotide
ugggucgauauguuucaag

SEQ ID NO: 2734331 - RNA, 19 nt, Artificial Sequence
  Description of Artificial Sequence: Synthetic oligonucleotide
agaucugccuauacuuccc

SEQ ID NO: 2734332 - RNA, 19 nt, Artificial Sequence
  Description of Artificial Sequence: Synthetic oligonucleotide
ugagggagagaucugccua

SEQ ID NO: 2734333 - RNA, 19 nt, Artificial Sequence
  Description of Artificial Sequence: Synthetic oligonucleotide
uagaucugucaacucggug

SEQ ID NO: 2734334 - RNA, 19 nt, Artificial Sequence
  Description of Artificial Sequence: Synthetic oligonucleotide
uuagucuuuaucugauauu

SEQ ID NO: 2734335 - RNA, 19 nt, Artificial Sequence
  Description of Artificial Sequence: Synthetic oligonucleotide
uagguaggugcuuuagagu

SEQ ID NO: 2734336 - RNA, 19 nt, Artificial Sequence
  Description of Artificial Sequence: Synthetic oligonucleotide
ugccuauacuucccaguag

SEQ ID NO: 2734337 - RNA, 19 nt, Artificial Sequence
  Description of Artificial Sequence: Synthetic oligonucleotide
cacugggucgauauguuuc

SEQ ID NO: 2734338 - RNA, 19 nt, Artificial Sequence
  Description of Artificial Sequence: Synthetic oligonucleotide
gauacucuguacaaaauau

SEQ ID NO: 2734339 - RNA, 19 nt, Artificial Sequence
  Description of Artificial Sequence: Synthetic oligonucleotide
cacauacucggagagcucc

SEQ ID NO: 2734340 - RNA, 19 nt, Artificial Sequence
  Description of Artificial Sequence: Synthetic oligonucleotide
cuuauuauucugauacucu

SEQ ID NO: 2734341 - RNA, 19 nt, Artificial Sequence
  Description of Artificial Sequence: Synthetic oligonucleotide
agggugaucuagcgcggcc

SEQ ID NO: 2734342 - RNA, 19 nt, Artificial Sequence
  Description of Artificial Sequence: Synthetic oligonucleotide
gucaaaggagccgggaucc

SEQ ID NO: 2734343 - RNA, 19 nt, Artificial Sequence
  Description of Artificial Sequence: Synthetic oligonucleotide
acugggucgauauguuuca

SEQ ID NO: 2734344 - RNA, 19 nt, Artificial Sequence
  Description of Artificial Sequence: Synthetic oligonucleotide
guaaguugcagcugcugca

SEQ ID NO: 2734345 - RNA, 19 nt, Artificial Sequence
  Description of Artificial Sequence: Synthetic oligonucleotide
cuguaacuguuccauguug

SEQ ID NO: 2734346 - RNA, 19 nt, Artificial Sequence
  Description of Artificial Sequence: Synthetic oligonucleotide
aggacugggaaucacuguu

SEQ ID NO: 2734347 - RNA, 19 nt, Artificial Sequence
  Description of Artificial Sequence: Synthetic oligonucleotide
uccgccagccucuggaagc

SEQ ID NO: 2734348 - RNA, 19 nt, Artificial Sequence
  Description of Artificial Sequence: Synthetic oligonucleotide
caaaauauuucuauccgau

SEQ ID NO: 2734349 - RNA, 19 nt, Artificial Sequence
  Description of Artificial Sequence: Synthetic oligonucleotide
ucaacucggugcuuuccug

SEQ ID NO: 2734350 - RNA, 19 nt, Artificial Sequence
  Description of Artificial Sequence: Synthetic oligonucleotide
aaucucuggguaggacugg

SEQ ID NO: 2734351 - RNA, 19 nt, Artificial Sequence
  Description of Artificial Sequence: Synthetic oligonucleotide
ugguacaucuuaugaaguu

SEQ ID NO: 2734352 - RNA, 19 nt, Artificial Sequence
  Description of Artificial Sequence: Synthetic oligonucleotide
ucuggaagccucucugcac

SEQ ID NO: 2734353 - RNA, 19 nt, Artificial Sequence
  Description of Artificial Sequence: Synthetic oligonucleotide
ggucgauauguuucaagcc

SEQ ID NO: 2734354 - RNA, 19 nt, Artificial Sequence
  Description of Artificial Sequence: Synthetic oligonucleotide
aaucacuguucucuacauu

SEQ ID NO: 2734355 - RNA, 19 nt, Artificial Sequence
  Description of Artificial Sequence: Synthetic oligonucleotide
ccaaguuacaacugaguug

SEQ ID NO: 2734356 - RNA, 19 nt, Artificial Sequence
  Description of Artificial Sequence: Synthetic oligonucleotide
uucuagguaggugcuuuag

SEQ ID NO: 2734357 - RNA, 19 nt, Artificial Sequence
  Description of Artificial Sequence: Synthetic oligonucleotide
ucaagccagggugaucuag

SEQ ID NO: 2734358 - RNA, 19 nt, Artificial Sequence
  Description of Artificial Sequence: Synthetic oligonucleotide
agaagcgcgaaggcguugg

SEQ ID NO: 2734359 - RNA, 19 nt, Artificial Sequence
  Description of Artificial Sequence: Synthetic oligonucleotide
guugcagcuaaaacuaauc

SEQ ID NO: 2734360 - RNA, 19 nt, Artificial Sequence
  Description of Artificial Sequence: Synthetic oligonucleotide
caacucggugcuuuccugc

SEQ ID NO: 2734361 - RNA, 19 nt, Artificial Sequence
  Description of Artificial Sequence: Synthetic oligonucleotide
uggagucaaaggagccggg

SEQ ID NO: 2734362 - RNA, 19 nt, Artificial Sequence
  Description of Artificial Sequence: Synthetic oligonucleotide
gcuuuaaaaccacuggguc

SEQ ID NO: 2734363 - RNA, 19 nt, Artificial Sequence
  Description of Artificial Sequence: Synthetic oligonucleotide
guacaucuuaugaaguuga

SEQ ID NO: 2734364 - RNA, 19 nt, Artificial Sequence
  Description of Artificial Sequence: Synthetic oligonucleotide
caagcgccaagacacauca

SEQ ID NO: 2734365 - RNA, 19 nt, Artificial Sequence
  Description of Artificial Sequence: Synthetic oligonucleotide
gguacaucuuaugaaguug

SEQ ID NO: 2734366 - RNA, 19 nt, Artificial Sequence
  Description of Artificial Sequence: Synthetic oligonucleotide
cuggaaagccgcccggagg

SEQ ID NO: 2734367 - RNA, 19 nt, Artificial Sequence
  Description of Artificial Sequence: Synthetic oligonucleotide
guaggacugggaaucacug

SEQ ID NO: 2734368 - RNA, 19 nt, Artificial Sequence
  Description of Artificial Sequence: Synthetic oligonucleotide
acuguucucuacauuuaag

SEQ ID NO: 2734369 - RNA, 19 nt, Artificial Sequence
  Description of Artificial Sequence: Synthetic oligonucleotide
augagggagagaucugccu

SEQ ID NO: 2734370 - RNA, 19 nt, Artificial Sequence
  Description of Artificial Sequence: Synthetic oligonucleotide
uauccgaucuuggucaaau

SEQ ID NO: 2734371 - RNA, 19 nt, Artificial Sequence
  Description of Artificial Sequence: Synthetic oligonucleotide
cagcuaaaacuaaucucug

SEQ ID NO: 2734372 - RNA, 19 nt, Artificial Sequence
  Description of Artificial Sequence: Synthetic oligonucleotide
aauauccagguugguacau

SEQ ID NO: 2734373 - RNA, 19 nt, Artificial Sequence
  Description of Artificial Sequence: Synthetic oligonucleotide
ucuggguaggacugggaau

SEQ ID NO: 2734374 - RNA, 19 nt, Artificial Sequence
  Description of Artificial Sequence: Synthetic oligonucleotide
guaacuguuccauguugca

SEQ ID NO: 2734375 - RNA, 19 nt, Artificial Sequence
  Description of Artificial Sequence: Synthetic oligonucleotide
cuggguaggacugggaauc

SEQ ID NO: 2734376 - RNA, 19 nt, Artificial Sequence
  Description of Artificial Sequence: Synthetic oligonucleotide
aggucaccaaauauccagg

SEQ ID NO: 2734377 - RNA, 19 nt, Artificial Sequence
  Description of Artificial Sequence: Synthetic oligonucleotide
gcauccuuaaguuuuccca

SEQ ID NO: 2734378 - RNA, 19 nt, Artificial Sequence
  Description of Artificial Sequence: Synthetic oligonucleotide
cuaaaacuaaucucugggu

SEQ ID NO: 2734379 - RNA, 19 nt, Artificial Sequence
  Description of Artificial Sequence: Synthetic oligonucleotide
uacaucuuaugaaguugau

SEQ ID NO: 2734380 - RNA, 19 nt, Artificial Sequence
  Description of Artificial Sequence: Synthetic oligonucleotide
caguaggauuucaagagaa

SEQ ID NO: 2734381 - RNA, 19 nt, Artificial Sequence
  Description of Artificial Sequence: Synthetic oligonucleotide
ugaaguugauuagucuuua

SEQ ID NO: 2734382 - RNA, 19 nt, Artificial Sequence
  Description of Artificial Sequence: Synthetic oligonucleotide
ccucucugcacauacucgg

SEQ ID NO: 2734383 - RNA, 19 nt, Artificial Sequence
  Description of Artificial Sequence: Synthetic oligonucleotide
aggagaagcgcgaaggcgu

SEQ ID NO: 2734384 - RNA, 19 nt, Artificial Sequence
  Description of Artificial Sequence: Synthetic oligonucleotide
aucugccuauacuucccag

SEQ ID NO: 2734385 - RNA, 19 nt, Artificial Sequence
  Description of Artificial Sequence: Synthetic oligonucleotide
gaucuuggucaaauuuuac

SEQ ID NO: 2734386 - RNA, 19 nt, Artificial Sequence
  Description of Artificial Sequence: Synthetic oligonucleotide
cuaaucucuggguaggacu

SEQ ID NO: 2734387 - RNA, 19 nt, Artificial Sequence
  Description of Artificial Sequence: Synthetic oligonucleotide
aucaguuauaugagggaga

SEQ ID NO: 2734388 - RNA, 19 nt, Artificial Sequence
  Description of Artificial Sequence: Synthetic oligonucleotide
cagguugguacaucuuaug

SEQ ID NO: 2734389 - RNA, 19 nt, Artificial Sequence
  Description of Artificial Sequence: Synthetic oligonucleotide
auauccagguugguacauc

SEQ ID NO: 2734390 - RNA, 19 nt, Artificial Sequence
  Description of Artificial Sequence: Synthetic oligonucleotide
caacugaguugcucuuucc

SEQ ID NO: 2734391 - RNA, 19 nt, Artificial Sequence
  Description of Artificial Sequence: Synthetic oligonucleotide
uaggacugggaaucacugu

SEQ ID NO: 2734392 - RNA, 19 nt, Artificial Sequence
  Description of Artificial Sequence: Synthetic oligonucleotide
cuguacaaaauauuucuau

SEQ ID NO: 2734393 - RNA, 19 nt, Artificial Sequence
  Description of Artificial Sequence: Synthetic oligonucleotide
caggauguaaguugcagcu

SEQ ID NO: 2734394 - RNA, 19 nt, Artificial Sequence
  Description of Artificial Sequence: Synthetic oligonucleotide
ucuucuagguaggugcuuu

SEQ ID NO: 2734395 - RNA, 19 nt, Artificial Sequence
  Description of Artificial Sequence: Synthetic oligonucleotide
gcagcuaaaacuaaucucu

SEQ ID NO: 2734396 - RNA, 19 nt, Artificial Sequence
  Description of Artificial Sequence: Synthetic oligonucleotide
gccuccaggauguaaguug

SEQ ID NO: 2734397 - RNA, 19 nt, Artificial Sequence
  Description of Artificial Sequence: Synthetic oligonucleotide
uucugauacucuguacaaa

SEQ ID NO: 2734398 - RNA, 19 nt, Artificial Sequence
  Description of Artificial Sequence: Synthetic oligonucleotide
ccaggauguaaguugcagc

SEQ ID NO: 2734399 - RNA, 19 nt, Artificial Sequence
  Description of Artificial Sequence: Synthetic oligonucleotide
acagucuucuagguaggug

SEQ ID NO: 2734400 - RNA, 19 nt, Artificial Sequence
  Description of Artificial Sequence: Synthetic oligonucleotide
ugucaacucggugcuuucc

SEQ ID NO: 2734401 - RNA, 19 nt, Artificial Sequence
  Description of Artificial Sequence: Synthetic oligonucleotide
ucugucaacucggugcuuu

SEQ ID NO: 2734402 - RNA, 19 nt, Artificial Sequence
  Description of Artificial Sequence: Synthetic oligonucleotide
gauuagucuuuaucugaua

SEQ ID NO: 2734403 - RNA, 19 nt, Artificial Sequence
  Description of Artificial Sequence: Synthetic oligonucleotide
cuuggucaaauuuuacagu

SEQ ID NO: 2734404 - RNA, 19 nt, Artificial Sequence
  Description of Artificial Sequence: Synthetic oligonucleotide
aagcgcgaaggcguuggag

SEQ ID NO: 2734405 - RNA, 19 nt, Artificial Sequence
  Description of Artificial Sequence: Synthetic oligonucleotide
aucucuggguaggacuggg

SEQ ID NO: 2734406 - RNA, 19 nt, Artificial Sequence
  Description of Artificial Sequence: Synthetic oligonucleotide
ccugccuccaggauguaag

SEQ ID NO: 2734407 - RNA, 19 nt, Artificial Sequence
  Description of Artificial Sequence: Synthetic oligonucleotide
gaucugccuauacuuccca

SEQ ID NO: 2734408 - RNA, 19 nt, Artificial Sequence
  Description of Artificial Sequence: Synthetic oligonucleotide
ucaaaggagccgggauccg

SEQ ID NO: 2734409 - RNA, 19 nt, Artificial Sequence
  Description of Artificial Sequence: Synthetic oligonucleotide
uugaggcauccuuaaguuu

SEQ ID NO: 2734410 - RNA, 19 nt, Artificial Sequence
  Description of Artificial Sequence: Synthetic oligonucleotide
acaucuuaugaaguugauu

SEQ ID NO: 2734411 - RNA, 19 nt, Artificial Sequence
  Description of Artificial Sequence: Synthetic oligonucleotide
uucccaccaaguccuguaa

SEQ ID NO: 2734412 - RNA, 19 nt, Artificial Sequence
  Description of Artificial Sequence: Synthetic oligonucleotide
ucuauccgaucuuggucaa

SEQ ID NO: 2734413 - RNA, 19 nt, Artificial Sequence
  Description of Artificial Sequence: Synthetic oligonucleotide
ccuccaggauguaaguugc

SEQ ID NO: 2734414 - RNA, 19 nt, Artificial Sequence
  Description of Artificial Sequence: Synthetic oligonucleotide
auacuucccaguaggauuu

SEQ ID NO: 2734415 - RNA, 19 nt, Artificial Sequence
  Description of Artificial Sequence: Synthetic oligonucleotide
aggcauccuuaaguuuucc

SEQ ID NO: 2734416 - RNA, 19 nt, Artificial Sequence
  Description of Artificial Sequence: Synthetic oligonucleotide
auguaaguugcagcugcug

SEQ ID NO: 2734417 - RNA, 19 nt, Artificial Sequence
  Description of Artificial Sequence: Synthetic oligonucleotide
ggcauccuuaaguuuuccc

SEQ ID NO: 2734418 - RNA, 19 nt, Artificial Sequence
  Description of Artificial Sequence: Synthetic oligonucleotide
caaauuuuacagucuucua

SEQ ID NO: 2734419 - RNA, 19 nt, Artificial Sequence
  Description of Artificial Sequence: Synthetic oligonucleotide
ucucuggguaggacuggga

SEQ ID NO: 2734420 - RNA, 19 nt, Artificial Sequence
  Description of Artificial Sequence: Synthetic oligonucleotide
gucaaauuuuacagucuuc

SEQ ID NO: 2734421 - RNA, 19 nt, Artificial Sequence
  Description of Artificial Sequence: Synthetic oligonucleotide
aggauguaaguugcagcug

SEQ ID NO: 2734422 - RNA, 19 nt, Artificial Sequence
  Description of Artificial Sequence: Synthetic oligonucleotide
aaggagccgggauccgcca

SEQ ID NO: 2734423 - RNA, 19 nt, Artificial Sequence
  Description of Artificial Sequence: Synthetic oligonucleotide
aggcucuggaaagccgccc

SEQ ID NO: 2734424 - RNA, 19 nt, Artificial Sequence
  Description of Artificial Sequence: Synthetic oligonucleotide
ucucuacauuuaaggucac

SEQ ID NO: 2734425 - RNA, 19 nt, Artificial Sequence
  Description of Artificial Sequence: Synthetic oligonucleotide
guaggugcuuuagaguaga

SEQ ID NO: 2734426 - RNA, 19 nt, Artificial Sequence
  Description of Artificial Sequence: Synthetic oligonucleotide
uguuucaagccagggugau

SEQ ID NO: 2734427 - RNA, 19 nt, Artificial Sequence
  Description of Artificial Sequence: Synthetic oligonucleotide
cucugcacauacucggaga

SEQ ID NO: 2734428 - RNA, 19 nt, Artificial Sequence
  Description of Artificial Sequence: Synthetic oligonucleotide
ggcucuggaaagccgcccg

SEQ ID NO: 2734429 - RNA, 19 nt, Artificial Sequence
  Description of Artificial Sequence: Synthetic oligonucleotide
agccgcccggaggagaagc

SEQ ID NO: 2734430 - RNA, 19 nt, Artificial Sequence
  Description of Artificial Sequence: Synthetic oligonucleotide
gaaucacuguucucuacau

SEQ ID NO: 2734431 - RNA, 19 nt, Artificial Sequence
  Description of Artificial Sequence: Synthetic oligonucleotide
gugcuuuagaguagaucug

SEQ ID NO: 2734432 - RNA, 19 nt, Artificial Sequence
  Description of Artificial Sequence: Synthetic oligonucleotide
auccgccagccucuggaag

SEQ ID NO: 2734433 - RNA, 19 nt, Artificial Sequence
  Description of Artificial Sequence: Synthetic oligonucleotide
guuauaugagggagagauc

SEQ ID NO: 2734434 - RNA, 19 nt, Artificial Sequence
  Description of Artificial Sequence: Synthetic oligonucleotide
aguaggauuucaagagaau

SEQ ID NO: 2734435 - RNA, 19 nt, Artificial Sequence
  Description of Artificial Sequence: Synthetic oligonucleotide
ugaucuagcgcggccucgu

SEQ ID NO: 2734436 - RNA, 19 nt, Artificial Sequence
  Description of Artificial Sequence: Synthetic oligonucleotide
ggaggagaagcgcgaaggc

SEQ ID NO: 2734437 - RNA, 19 nt, Artificial Sequence
  Description of Artificial Sequence: Synthetic oligonucleotide
uuuucccaccaaguccugu

SEQ ID NO: 2734438 - RNA, 19 nt, Artificial Sequence
  Description of Artificial Sequence: Synthetic oligonucleotide
guaggauuucaagagaauu

SEQ ID NO: 2734439 - RNA, 19 nt, Artificial Sequence
  Description of Artificial Sequence: Synthetic oligonucleotide
ggugcuuuccugccuccag

SEQ ID NO: 2734440 - RNA, 19 nt, Artificial Sequence
  Description of Artificial Sequence: Synthetic oligonucleotide
caagagaauucuuauuauu

SEQ ID NO: 2734441 - RNA, 19 nt, Artificial Sequence
  Description of Artificial Sequence: Synthetic oligonucleotide
auguuucaagccaggguga

SEQ ID NO: 2734442 - RNA, 19 nt, Artificial Sequence
  Description of Artificial Sequence: Synthetic oligonucleotide
aaagccgcccggaggagaa

SEQ ID NO: 2734443 - RNA, 19 nt, Artificial Sequence
  Description of Artificial Sequence: Synthetic oligonucleotide
uacaacugaguugcucuuu

SEQ ID NO: 2734444 - RNA, 19 nt, Artificial Sequence
  Description of Artificial Sequence: Synthetic oligonucleotide
gguaggugcuuuagaguag

SEQ ID NO: 2734445 - RNA, 19 nt, Artificial Sequence
  Description of Artificial Sequence: Synthetic oligonucleotide
cacuguucucuacauuuaa

SEQ ID NO: 2734446 - RNA, 19 nt, Artificial Sequence
  Description of Artificial Sequence: Synthetic oligonucleotide
gugaucuagcgcggccucg

SEQ ID NO: 2734447 - RNA, 19 nt, Artificial Sequence
  Description of Artificial Sequence: Synthetic oligonucleotide
ggauccgccagccucugga

SEQ ID NO: 2734448 - RNA, 19 nt, Artificial Sequence
  Description of Artificial Sequence: Synthetic oligonucleotide
gaggcauccuuaaguuuuc

SEQ ID NO: 2734449 - RNA, 19 nt, Artificial Sequence
  Description of Artificial Sequence: Synthetic oligonucleotide
uccaagcgccaagacacau

SEQ ID NO: 2734450 - RNA, 19 nt, Artificial Sequence
  Description of Artificial Sequence: Synthetic oligonucleotide
ucggugcuuuccugccucc

SEQ ID NO: 2734451 - RNA, 19 nt, Artificial Sequence
  Description of Artificial Sequence: Synthetic oligonucleotide
cgauauguuucaagccagg

SEQ ID NO: 2734452 - RNA, 19 nt, Artificial Sequence
  Description of Artificial Sequence: Synthetic oligonucleotide
ggucaaauuuuacagucuu

SEQ ID NO: 2734453 - RNA, 19 nt, Artificial Sequence
  Description of Artificial Sequence: Synthetic oligonucleotide
uaaaaccacugggucgaua

SEQ ID NO: 2734454 - RNA, 19 nt, Artificial Sequence
  Description of Artificial Sequence: Synthetic oligonucleotide
uaggugcuuuagaguagau

SEQ ID NO: 2734455 - RNA, 19 nt, Artificial Sequence
  Description of Artificial Sequence: Synthetic oligonucleotide
aggagccgggauccgccag

SEQ ID NO: 2734456 - RNA, 19 nt, Artificial Sequence
  Description of Artificial Sequence: Synthetic oligonucleotide
cugucaacucggugcuuuc

SEQ ID NO: 2734457 - RNA, 19 nt, Artificial Sequence
  Description of Artificial Sequence: Synthetic oligonucleotide
gcguuggagucaaaggagc

SEQ ID NO: 2734458 - RNA, 19 nt, Artificial Sequence
  Description of Artificial Sequence: Synthetic oligonucleotide
cguuggagucaaaggagcc

SEQ ID NO: 2734459 - RNA, 19 nt, Artificial Sequence
  Description of Artificial Sequence: Synthetic oligonucleotide
gucaacucggugcuuuccu

SEQ ID NO: 2734460 - RNA, 19 nt, Artificial Sequence
  Description of Artificial Sequence: Synthetic oligonucleotide
auacucggagagcuccauu

SEQ ID NO: 2734461 - RNA, 19 nt, Artificial Sequence
  Description of Artificial Sequence: Synthetic oligonucleotide
uggaagccucucugcacau

SEQ ID NO: 2734462 - RNA, 19 nt, Artificial Sequence
  Description of Artificial Sequence: Synthetic oligonucleotide
gaaagccgcccggaggaga

SEQ ID NO: 2734463 - RNA, 19 nt, Artificial Sequence
  Description of Artificial Sequence: Synthetic oligonucleotide
gagggagagaucugccuau

SEQ ID NO: 2734464 - RNA, 19 nt, Artificial Sequence
  Description of Artificial Sequence: Synthetic oligonucleotide
acuucccaguaggauuuca

SEQ ID NO: 2734465 - RNA, 19 nt, Artificial Sequence
  Description of Artificial Sequence: Synthetic oligonucleotide
gccaagacacaucaguuau

SEQ ID NO: 2734466 - RNA, 19 nt, Artificial Sequence
  Description of Artificial Sequence: Synthetic oligonucleotide
gauccgccagccucuggaa

SEQ ID NO: 2734467 - RNA, 19 nt, Artificial Sequence
  Description of Artificial Sequence: Synthetic oligonucleotide
auccgaucuuggucaaauu

SEQ ID NO: 2734468 - RNA, 19 nt, Artificial Sequence
  Description of Artificial Sequence: Synthetic oligonucleotide
aagcgccaagacacaucag

SEQ ID NO: 2734469 - RNA, 19 nt, Artificial Sequence
  Description of Artificial Sequence: Synthetic oligonucleotide
gggagagaucugccuauac

SEQ ID NO: 2734470 - RNA, 19 nt, Artificial Sequence
  Description of Artificial Sequence: Synthetic oligonucleotide
aaguuacaacugaguugcu

SEQ ID NO: 2734471 - RNA, 19 nt, Artificial Sequence
  Description of Artificial Sequence: Synthetic oligonucleotide
acauacucggagagcucca

SEQ ID NO: 2734472 - RNA, 19 nt, Artificial Sequence
  Description of Artificial Sequence: Synthetic oligonucleotide
cggaggagaagcgcgaagg

SEQ ID NO: 2734473 - RNA, 19 nt, Artificial Sequence
  Description of Artificial Sequence: Synthetic oligonucleotide
gaucuagcgcggccucguc

SEQ ID NO: 2734474 - RNA, 19 nt, Artificial Sequence
  Description of Artificial Sequence: Synthetic oligonucleotide
uccgcccgggcguccagca

SEQ ID NO: 2734475 - RNA, 19 nt, Artificial Sequence
  Description of Artificial Sequence: Synthetic oligonucleotide
gagaagcgcgaaggcguug

SEQ ID NO: 2734476 - RNA, 19 nt, Artificial Sequence
  Description of Artificial Sequence: Synthetic oligonucleotide
cugcaugacaaugcuuuaa

SEQ ID NO: 2734477 - RNA, 19 nt, Artificial Sequence
  Description of Artificial Sequence: Synthetic oligonucleotide
caccaaguccuguaacugu

SEQ ID NO: 2734478 - RNA, 19 nt, Artificial Sequence
  Description of Artificial Sequence: Synthetic oligonucleotide
guuucaagccagggugauc

SEQ ID NO: 2734479 - RNA, 19 nt, Artificial Sequence
  Description of Artificial Sequence: Synthetic oligonucleotide
cuauacuucccaguaggau

SEQ ID NO: 2734480 - RNA, 19 nt, Artificial Sequence
  Description of Artificial Sequence: Synthetic oligonucleotide
ccaguaggauuucaagaga

SEQ ID NO: 2734481 - RNA, 19 nt, Artificial Sequence
  Description of Artificial Sequence: Synthetic oligonucleotide
ggugaucuagcgcggccuc

SEQ ID NO: 2734482 - RNA, 19 nt, Artificial Sequence
  Description of Artificial Sequence: Synthetic oligonucleotide
uucaagccagggugaucua

SEQ ID NO: 2734483 - RNA, 19 nt, Artificial Sequence
  Description of Artificial Sequence: Synthetic oligonucleotide
cagggugaucuagcgcggc

SEQ ID NO: 2734484 - RNA, 19 nt, Artificial Sequence
  Description of Artificial Sequence: Synthetic oligonucleotide
gagccgggauccgccagcc

SEQ ID NO: 2734485 - RNA, 19 nt, Artificial Sequence
  Description of Artificial Sequence: Synthetic oligonucleotide
ggucaccaaauauccaggu

SEQ ID NO: 2734486 - RNA, 19 nt, Artificial Sequence
  Description of Artificial Sequence: Synthetic oligonucleotide
ccaccaaguccuguaacug

SEQ ID NO: 2734487 - RNA, 19 nt, Artificial Sequence
  Description of Artificial Sequence: Synthetic oligonucleotide
gaagcgcgaaggcguugga

SEQ ID NO: 2734488 - RNA, 19 nt, Artificial Sequence
  Description of Artificial Sequence: Synthetic oligonucleotide
ggccucguccgcccgggcg

SEQ ID NO: 2734489 - RNA, 19 nt, Artificial Sequence
  Description of Artificial Sequence: Synthetic oligonucleotide
ccuauacuucccaguagga

SEQ ID NO: 2734490 - RNA, 19 nt, Artificial Sequence
  Description of Artificial Sequence: Synthetic oligonucleotide
auguugcagcuaaaacuaa

SEQ ID NO: 2734491 - RNA, 19 nt, Artificial Sequence
  Description of Artificial Sequence: Synthetic oligonucleotide
uccugccuccaggauguaa

SEQ ID NO: 2734492 - RNA, 19 nt, Artificial Sequence
  Description of Artificial Sequence: Synthetic oligonucleotide
gucaccaaauauccagguu

SEQ ID NO: 2734493 - RNA, 19 nt, Artificial Sequence
  Description of Artificial Sequence: Synthetic oligonucleotide
gccgggauccgccagccuc

SEQ ID NO: 2734494 - RNA, 19 nt, Artificial Sequence
  Description of Artificial Sequence: Synthetic oligonucleotide
cuucuagguaggugcuuua

SEQ ID NO: 2734495 - RNA, 19 nt, Artificial Sequence
  Description of Artificial Sequence: Synthetic oligonucleotide
gcuuuagaguagaucuguc

SEQ ID NO: 2734496 - RNA, 19 nt, Artificial Sequence
  Description of Artificial Sequence: Synthetic oligonucleotide
gaguugcucuuuccaggcu

SEQ ID NO: 2734497 - RNA, 19 nt, Artificial Sequence
  Description of Artificial Sequence: Synthetic oligonucleotide
ggacugggaaucacuguuc

SEQ ID NO: 2734498 - RNA, 19 nt, Artificial Sequence
  Description of Artificial Sequence: Synthetic oligonucleotide
ccaaauauccagguuggua

SEQ ID NO: 2734499 - RNA, 19 nt, Artificial Sequence
  Description of Artificial Sequence: Synthetic oligonucleotide
ggagucaaaggagccggga

SEQ ID NO: 2734500 - RNA, 19 nt, Artificial Sequence
  Description of Artificial Sequence: Synthetic oligonucleotide
gguaggacugggaaucacu

SEQ ID NO: 2734501 - RNA, 19 nt, Artificial Sequence
  Description of Artificial Sequence: Synthetic oligonucleotide
guagaucugucaacucggu

SEQ ID NO: 2734502 - RNA, 19 nt, Artificial Sequence
  Description of Artificial Sequence: Synthetic oligonucleotide
cuagcgcggccucguccgc

SEQ ID NO: 2734503 - RNA, 19 nt, Artificial Sequence
  Description of Artificial Sequence: Synthetic oligonucleotide
accacugggucgauauguu

SEQ ID NO: 2734504 - RNA, 19 nt, Artificial Sequence
  Description of Artificial Sequence: Synthetic oligonucleotide
uagcgcggccucguccgcc

SEQ ID NO: 2734505 - RNA, 19 nt, Artificial Sequence
  Description of Artificial Sequence: Synthetic oligonucleotide
cgaucuuggucaaauuuua

SEQ ID NO: 2734506 - RNA, 19 nt, Artificial Sequence
  Description of Artificial Sequence: Synthetic oligonucleotide
cgcccggaggagaagcgcg

SEQ ID NO: 2734507 - RNA, 19 nt, Artificial Sequence
  Description of Artificial Sequence: Synthetic oligonucleotide
cccaaguuacaacugaguu

SEQ ID NO: 2734508 - RNA, 19 nt, Artificial Sequence
  Description of Artificial Sequence: Synthetic oligonucleotide
caguuauaugagggagaga

SEQ ID NO: 2734509 - RNA, 19 nt, Artificial Sequence
  Description of Artificial Sequence: Synthetic oligonucleotide
ggaaagccgcccggaggag

SEQ ID NO: 2734510 - RNA, 19 nt, Artificial Sequence
  Description of Artificial Sequence: Synthetic oligonucleotide
ccgaucuuggucaaauuuu

SEQ ID NO: 2734511 - RNA, 19 nt, Artificial Sequence
  Description of Artificial Sequence: Synthetic oligonucleotide
auccagguugguacaucuu

SEQ ID NO: 2734512 - RNA, 19 nt, Artificial Sequence
  Description of Artificial Sequence: Synthetic oligonucleotide
ccggaggagaagcgcgaag

SEQ ID NO: 2734513 - RNA, 19 nt, Artificial Sequence
  Description of Artificial Sequence: Synthetic oligonucleotide
cccaccaaguccuguaacu

SEQ ID NO: 2734514 - RNA, 19 nt, Artificial Sequence
  Description of Artificial Sequence: Synthetic oligonucleotide
guuccauguugcagcuaaa

SEQ ID NO: 2734515 - RNA, 19 nt, Artificial Sequence
  Description of Artificial Sequence: Synthetic oligonucleotide
cugccuccaggauguaagu

SEQ ID NO: 2734516 - RNA, 19 nt, Artificial Sequence
  Description of Artificial Sequence: Synthetic oligonucleotide
ggguaggacugggaaucac

SEQ ID NO: 2734517 - RNA, 19 nt, Artificial Sequence
  Description of Artificial Sequence: Synthetic oligonucleotide
ccuuaaguuuucccaccaa

SEQ ID NO: 2734518 - RNA, 19 nt, Artificial Sequence
  Description of Artificial Sequence: Synthetic oligonucleotide
cgcccgggcguccagcagg

SEQ ID NO: 2734519 - RNA, 19 nt, Artificial Sequence
  Description of Artificial Sequence: Synthetic oligonucleotide
ccgggcguccagcaggcuc

SEQ ID NO: 2734520 - RNA, 19 nt, Artificial Sequence
  Description of Artificial Sequence: Synthetic oligonucleotide
cuauccgaucuuggucaaa

SEQ ID NO: 2734521 - RNA, 19 nt, Artificial Sequence
  Description of Artificial Sequence: Synthetic oligonucleotide
gccgcccggaggagaagcg

SEQ ID NO: 2734522 - RNA, 19 nt, Artificial Sequence
  Description of Artificial Sequence: Synthetic oligonucleotide
ggauuucaagagaauucuu

SEQ ID NO: 2734523 - RNA, 19 nt, Artificial Sequence
  Description of Artificial Sequence: Synthetic oligonucleotide
aucugucaacucggugcuu

SEQ ID NO: 2734524 - RNA, 19 nt, Artificial Sequence
  Description of Artificial Sequence: Synthetic oligonucleotide
ccagguugguacaucuuau

SEQ ID NO: 2734525 - RNA, 19 nt, Artificial Sequence
  Description of Artificial Sequence: Synthetic oligonucleotide
cugggucgauauguuucaa

SEQ ID NO: 2734526 - RNA, 19 nt, Artificial Sequence
  Description of Artificial Sequence: Synthetic oligonucleotide
gcacauacucggagagcuc

SEQ ID NO: 2734527 - RNA, 19 nt, Artificial Sequence
  Description of Artificial Sequence: Synthetic oligonucleotide
cauacucggagagcuccau

SEQ ID NO: 2734528 - RNA, 19 nt, Artificial Sequence
  Description of Artificial Sequence: Synthetic oligonucleotide
gggugaucuagcgcggccu

SEQ ID NO: 2734529 - RNA, 19 nt, Artificial Sequence
  Description of Artificial Sequence: Synthetic oligonucleotide
gcgaaggcguuggagucaa

SEQ ID NO: 2734530 - RNA, 19 nt, Artificial Sequence
  Description of Artificial Sequence: Synthetic oligonucleotide
cgccaagacacaucaguua

SEQ ID NO: 2734531 - RNA, 19 nt, Artificial Sequence
  Description of Artificial Sequence: Synthetic oligonucleotide
guccgcccgggcguccagc

SEQ ID NO: 2734532 - RNA, 19 nt, Artificial Sequence
  Description of Artificial Sequence: Synthetic oligonucleotide
cucguccgcccgggcgucc

SEQ ID NO: 2734533 - RNA, 19 nt, Artificial Sequence
  Description of Artificial Sequence: Synthetic oligonucleotide
ccuguaacuguuccauguu

SEQ ID NO: 2734534 - RNA, 19 nt, Artificial Sequence
  Description of Artificial Sequence: Synthetic oligonucleotide
gucuucuagguaggugcuu

SEQ ID NO: 2734535 - RNA, 19 nt, Artificial Sequence
  Description of Artificial Sequence: Synthetic oligonucleotide
ccgcccggaggagaagcgc

SEQ ID NO: 2734536 - RNA, 19 nt, Artificial Sequence
  Description of Artificial Sequence: Synthetic oligonucleotide
gcccgggcguccagcaggc

SEQ ID NO: 2734537 - RNA, 19 nt, Artificial Sequence
  Description of Artificial Sequence: Synthetic oligonucleotide
ggaagccucucugcacaua

SEQ ID NO: 2734538 - RNA, 19 nt, Artificial Sequence
  Description of Artificial Sequence: Synthetic oligonucleotide
gcgccaagacacaucaguu

SEQ ID NO: 2734539 - RNA, 19 nt, Artificial Sequence
  Description of Artificial Sequence: Synthetic oligonucleotide
gccucguccgcccgggcgu

SEQ ID NO: 2734540 - RNA, 19 nt, Artificial Sequence
  Description of Artificial Sequence: Synthetic oligonucleotide
cuguuccauguugcagcua

SEQ ID NO: 2734541 - RNA, 19 nt, Artificial Sequence
  Description of Artificial Sequence: Synthetic oligonucleotide
gcccggaggagaagcgcga

SEQ ID NO: 2734542 - RNA, 19 nt, Artificial Sequence
  Description of Artificial Sequence: Synthetic oligonucleotide
ggagaagcgcgaaggcguu

SEQ ID NO: 2734543 - RNA, 19 nt, Artificial Sequence
  Description of Artificial Sequence: Synthetic oligonucleotide
gcgcggccucguccgcccg

SEQ ID NO: 2734544 - RNA, 19 nt, Artificial Sequence
  Description of Artificial Sequence: Synthetic oligonucleotide
ccgggauccgccagccucu

SEQ ID NO: 2734545 - RNA, 19 nt, Artificial Sequence
  Description of Artificial Sequence: Synthetic oligonucleotide
gggcguccagcaggcucug

SEQ ID NO: 2734546 - RNA, 19 nt, Artificial Sequence
  Description of Artificial Sequence: Synthetic oligonucleotide
cgggcguccagcaggcucu

SEQ ID NO: 2734547 - RNA, 19 nt, Artificial Sequence
  Description of Artificial Sequence: Synthetic oligonucleotide
ccacugggucgauauguuu

SEQ ID NO: 2734548 - RNA, 19 nt, Artificial Sequence
  Description of Artificial Sequence: Synthetic oligonucleotide
ccgcccgggcguccagcag

SEQ ID NO: 2734549 - RNA, 19 nt, Artificial Sequence
  Description of Artificial Sequence: Synthetic oligonucleotide
cccggaggagaagcgcgaa

SEQ ID NO: 2734550 - RNA, 19 nt, Artificial Sequence
  Description of Artificial Sequence: Synthetic oligonucleotide
cguccgcccgggcguccag

SEQ ID NO: 2734551 - RNA, 19 nt, Artificial Sequence
  Description of Artificial Sequence: Synthetic oligonucleotide
cgaaggcguuggagucaaa

SEQ ID NO: 2734552 - RNA, 19 nt, Artificial Sequence
  Description of Artificial Sequence: Synthetic oligonucleotide
cccgggcguccagcaggcu

SEQ ID NO: 2734553 - RNA, 19 nt, Artificial Sequence
  Description of Artificial Sequence: Synthetic oligonucleotide
aauaauauuauacagggau

SEQ ID NO: 2734554 - RNA, 19 nt, Artificial Sequence
  Description of Artificial Sequence: Synthetic oligonucleotide
uaaauaauaguuuaguugc

SEQ ID NO: 2734555 - RNA, 19 nt, Artificial Sequence
  Description of Artificial Sequence: Synthetic oligonucleotide
auaacaaagacauuaaauc

SEQ ID NO: 2734556 - RNA, 19 nt, Artificial Sequence
  Description of Artificial Sequence: Synthetic oligonucleotide
aaguauucagaauauagac

SEQ ID NO: 2734557 - RNA, 19 nt, Artificial Sequence
  Description of Artificial Sequence: Synthetic oligonucleotide
ucauaaauuacucuaagcc

SEQ ID NO: 2734558 - RNA, 19 nt, Artificial Sequence
  Description of Artificial Sequence: Synthetic oligonucleotide
uaucaauauacaaagauga

SEQ ID NO: 2734559 - RNA, 19 nt, Artificial Sequence
  Description of Artificial Sequence: Synthetic oligonucleotide
uaaaauagcauuaaaagua

SEQ ID NO: 2734560 - RNA, 19 nt, Artificial Sequence
  Description of Artificial Sequence: Synthetic oligonucleotide
ugugacauuaaucacauga

SEQ ID NO: 2734561 - RNA, 19 nt, Artificial Sequence
  Description of Artificial Sequence: Synthetic oligonucleotide
uuuagaaacuuaaaacugg

SEQ ID NO: 2734562 - RNA, 19 nt, Artificial Sequence
  Description of Artificial Sequence: Synthetic oligonucleotide
auaaauaauaguuuaguug

SEQ ID NO: 2734563 - RNA, 19 nt, Artificial Sequence
  Description of Artificial Sequence: Synthetic oligonucleotide
gauuuugugacauuaauca

SEQ ID NO: 2734564 - RNA, 19 nt, Artificial Sequence
  Description of Artificial Sequence: Synthetic oligonucleotide
aauaacaauucaaauuacc

SEQ ID NO: 2734565 - RNA, 19 nt, Artificial Sequence
  Description of Artificial Sequence: Synthetic oligonucleotide
cacagaaugagaaacaugc

SEQ ID NO: 2734566 - RNA, 19 nt, Artificial Sequence
  Description of Artificial Sequence: Synthetic oligonucleotide
uucaauauacuaaaguaug

SEQ ID NO: 2734567 - RNA, 19 nt, Artificial Sequence
  Description of Artificial Sequence: Synthetic oligonucleotide
uuuaucaauauacaaagau

SEQ ID NO: 2734568 - RNA, 19 nt, Artificial Sequence
  Description of Artificial Sequence: Synthetic oligonucleotide
uuaaaauagcauuaaaagu

SEQ ID NO: 2734569 - RNA, 19 nt, Artificial Sequence
  Description of Artificial Sequence: Synthetic oligonucleotide
aaagaugaaacuucccuag

SEQ ID NO: 2734570 - RNA, 19 nt, Artificial Sequence
  Description of Artificial Sequence: Synthetic oligonucleotide
uuaucaauauacaaagaug

SEQ ID NO: 2734571 - RNA, 19 nt, Artificial Sequence
  Description of Artificial Sequence: Synthetic oligonucleotide
auaacaauucaaauuaccc

SEQ ID NO: 2734572 - RNA, 19 nt, Artificial Sequence
  Description of Artificial Sequence: Synthetic oligonucleotide
ugaaguauugaucauuuca

SEQ ID NO: 2734573 - RNA, 19 nt, Artificial Sequence
  Description of Artificial Sequence: Synthetic oligonucleotide
uaaaguaugagaaaguauu

SEQ ID NO: 2734574 - RNA, 19 nt, Artificial Sequence
  Description of Artificial Sequence: Synthetic oligonucleotide
ugaaguuuacaacaguaag

SEQ ID NO: 2734575 - RNA, 19 nt, Artificial Sequence
  Description of Artificial Sequence: Synthetic oligonucleotide
uuaguuuagaaacuuaaaa

SEQ ID NO: 2734576 - RNA, 19 nt, Artificial Sequence
  Description of Artificial Sequence: Synthetic oligonucleotide
aaaagcaacacugaaauaa

SEQ ID NO: 2734577 - RNA, 19 nt, Artificial Sequence
  Description of Artificial Sequence: Synthetic oligonucleotide
aucauuucauaauacacuc

SEQ ID NO: 2734578 - RNA, 19 nt, Artificial Sequence
  Description of Artificial Sequence: Synthetic oligonucleotide
auuuccaucuaacuuauag

SEQ ID NO: 2734579 - RNA, 19 nt, Artificial Sequence
  Description of Artificial Sequence: Synthetic oligonucleotide
accuaaacauuuuaguuac

SEQ ID NO: 2734580 - RNA, 19 nt, Artificial Sequence
  Description of Artificial Sequence: Synthetic oligonucleotide
ugaauuagcaucacucuag

SEQ ID NO: 2734581 - RNA, 19 nt, Artificial Sequence
  Description of Artificial Sequence: Synthetic oligonucleotide
uagcauuaaaaguaaagag

SEQ ID NO: 2734582 - RNA, 19 nt, Artificial Sequence
  Description of Artificial Sequence: Synthetic oligonucleotide
aaucauaaauuacucuaag

SEQ ID NO: 2734583 - RNA, 19 nt, Artificial Sequence
  Description of Artificial Sequence: Synthetic oligonucleotide
uaaaucauaaauuacucua

SEQ ID NO: 2734584 - RNA, 19 nt, Artificial Sequence
  Description of Artificial Sequence: Synthetic oligonucleotide
uacucuaagccacagaaug

SEQ ID NO: 2734585 - RNA, 19 nt, Artificial Sequence
  Description of Artificial Sequence: Synthetic oligonucleotide
uaguuuagaaacuuaaaac

SEQ ID NO: 2734586 - RNA, 19 nt, Artificial Sequence
  Description of Artificial Sequence: Synthetic oligonucleotide
auaaauuacucuaagccac

SEQ ID NO: 2734587 - RNA, 19 nt, Artificial Sequence
  Description of Artificial Sequence: Synthetic oligonucleotide
auuagcaucacucuagacu

SEQ ID NO: 2734588 - RNA, 19 nt, Artificial Sequence
  Description of Artificial Sequence: Synthetic oligonucleotide
ugaaauaacaauucaaauu

SEQ ID NO: 2734589 - RNA, 19 nt, Artificial Sequence
  Description of Artificial Sequence: Synthetic oligonucleotide
uaacaauucaaauuacccc

SEQ ID NO: 2734590 - RNA, 19 nt, Artificial Sequence
  Description of Artificial Sequence: Synthetic oligonucleotide
aauaauaguuuaguugcgg

SEQ ID NO: 2734591 - RNA, 19 nt, Artificial Sequence
  Description of Artificial Sequence: Synthetic oligonucleotide
aaugaauuagcaucacucu

SEQ ID NO: 2734592 - RNA, 19 nt, Artificial Sequence
  Description of Artificial Sequence: Synthetic oligonucleotide
ucaaauuaccccaugauuu

SEQ ID NO: 2734593 - RNA, 19 nt, Artificial Sequence
  Description of Artificial Sequence: Synthetic oligonucleotide
ucauaauacacucaacagu

SEQ ID NO: 2734594 - RNA, 19 nt, Artificial Sequence
  Description of Artificial Sequence: Synthetic oligonucleotide
uucauaauacacucaacag

SEQ ID NO: 2734595 - RNA, 19 nt, Artificial Sequence
  Description of Artificial Sequence: Synthetic oligonucleotide
acaugaaauagaugcauac

SEQ ID NO: 2734596 - RNA, 19 nt, Artificial Sequence
  Description of Artificial Sequence: Synthetic oligonucleotide
agcauuaaaaguaaagagg

SEQ ID NO: 2734597 - RNA, 19 nt, Artificial Sequence
  Description of Artificial Sequence: Synthetic oligonucleotide
aacacugaaauaacaauuc

SEQ ID NO: 2734598 - RNA, 19 nt, Artificial Sequence
  Description of Artificial Sequence: Synthetic oligonucleotide
aaaaccuuuacaaaauaug

SEQ ID NO: 2734599 - RNA, 19 nt, Artificial Sequence
  Description of Artificial Sequence: Synthetic oligonucleotide
ugaucauuucauaauacac

SEQ ID NO: 2734600 - RNA, 19 nt, Artificial Sequence
  Description of Artificial Sequence: Synthetic oligonucleotide
ucagaauauagacacuacc

SEQ ID NO: 2734601 - RNA, 19 nt, Artificial Sequence
  Description of Artificial Sequence: Synthetic oligonucleotide
gaugaaacuucccuagagg

SEQ ID NO: 2734602 - RNA, 19 nt, Artificial Sequence
  Description of Artificial Sequence: Synthetic oligonucleotide
auagacacuaccuaaacau

SEQ ID NO: 2734603 - RNA, 19 nt, Artificial Sequence
  Description of Artificial Sequence: Synthetic oligonucleotide
gaaauagaugcauacuuug

SEQ ID NO: 2734604 - RNA, 19 nt, Artificial Sequence
  Description of Artificial Sequence: Synthetic oligonucleotide
uuaaucacaugaaauagau

SEQ ID NO: 2734605 - RNA, 19 nt, Artificial Sequence
  Description of Artificial Sequence: Synthetic oligonucleotide
aguaugagaaaguauucag

SEQ ID NO: 2734606 - RNA, 19 nt, Artificial Sequence
  Description of Artificial Sequence: Synthetic oligonucleotide
caccauuuuaucaauauac

SEQ ID NO: 2734607 - RNA, 19 nt, Artificial Sequence
  Description of Artificial Sequence: Synthetic oligonucleotide
auuuacaaaagcaacacug

SEQ ID NO: 2734608 - RNA, 19 nt, Artificial Sequence
  Description of Artificial Sequence: Synthetic oligonucleotide
uuaguuacgacauuuuaaa

SEQ ID NO: 2734609 - RNA, 19 nt, Artificial Sequence
  Description of Artificial Sequence: Synthetic oligonucleotide
uaugagaaaguauucagaa

SEQ ID NO: 2734610 - RNA, 19 nt, Artificial Sequence
  Description of Artificial Sequence: Synthetic oligonucleotide
uucacuuaggcacauagaa

SEQ ID NO: 2734611 - RNA, 19 nt, Artificial Sequence
  Description of Artificial Sequence: Synthetic oligonucleotide
uuuaguuacgacauuuuaa

SEQ ID NO: 2734612 - RNA, 19 nt, Artificial Sequence
  Description of Artificial Sequence: Synthetic oligonucleotide
auuaaaucauaaauuacuc

SEQ ID NO: 2734613 - RNA, 19 nt, Artificial Sequence
  Description of Artificial Sequence: Synthetic oligonucleotide
uuagcaucacucuagacuc

SEQ ID NO: 2734614 - RNA, 19 nt, Artificial Sequence
  Description of Artificial Sequence: Synthetic oligonucleotide
auuacucuaagccacagaa

SEQ ID NO: 2734615 - RNA, 19 nt, Artificial Sequence
  Description of Artificial Sequence: Synthetic oligonucleotide
caaugaauuagcaucacuc

SEQ ID NO: 2734616 - RNA, 19 nt, Artificial Sequence
  Description of Artificial Sequence: Synthetic oligonucleotide
uuaaaucauaaauuacucu

SEQ ID NO: 2734617 - RNA, 19 nt, Artificial Sequence
  Description of Artificial Sequence: Synthetic oligonucleotide
ucuaacuuauagaucuucc

SEQ ID NO: 2734618 - RNA, 19 nt, Artificial Sequence
  Description of Artificial Sequence: Synthetic oligonucleotide
aauaguuuaguugcgguga

SEQ ID NO: 2734619 - RNA, 19 nt, Artificial Sequence
  Description of Artificial Sequence: Synthetic oligonucleotide
cuaacugaaguuuacaaca

SEQ ID NO: 2734620 - RNA, 19 nt, Artificial Sequence
  Description of Artificial Sequence: Synthetic oligonucleotide
aaaccuuuacaaaauauga

SEQ ID NO: 2734621 - RNA, 19 nt, Artificial Sequence
  Description of Artificial Sequence: Synthetic oligonucleotide
uauagaucuuccuuuauaa

SEQ ID NO: 2734622 - RNA, 19 nt, Artificial Sequence
  Description of Artificial Sequence: Synthetic oligonucleotide
acaaagaugaaacuucccu

SEQ ID NO: 2734623 - RNA, 19 nt, Artificial Sequence
  Description of Artificial Sequence: Synthetic oligonucleotide
uaagugucaaugaauuagc

SEQ ID NO: 2734624 - RNA, 19 nt, Artificial Sequence
  Description of Artificial Sequence: Synthetic oligonucleotide
guaagugucaaugaauuag

SEQ ID NO: 2734625 - RNA, 19 nt, Artificial Sequence
  Description of Artificial Sequence: Synthetic oligonucleotide
auacuaaaguaugagaaag

SEQ ID NO: 2734626 - RNA, 19 nt, Artificial Sequence
  Description of Artificial Sequence: Synthetic oligonucleotide
auauagacacuaccuaaac

SEQ ID NO: 2734627 - RNA, 19 nt, Artificial Sequence
  Description of Artificial Sequence: Synthetic oligonucleotide
agaauuuccaucuaacuua

SEQ ID NO: 2734628 - RNA, 19 nt, Artificial Sequence
  Description of Artificial Sequence: Synthetic oligonucleotide
ucaauauacuaaaguauga

SEQ ID NO: 2734629 - RNA, 19 nt, Artificial Sequence
  Description of Artificial Sequence: Synthetic oligonucleotide
ugucaaugaauuagcauca

SEQ ID NO: 2734630 - RNA, 19 nt, Artificial Sequence
  Description of Artificial Sequence: Synthetic oligonucleotide
uuccuuuauaacaaagaca

SEQ ID NO: 2734631 - RNA, 19 nt, Artificial Sequence
  Description of Artificial Sequence: Synthetic oligonucleotide
aagccacagaaugagaaac

SEQ ID NO: 2734632 - RNA, 19 nt, Artificial Sequence
  Description of Artificial Sequence: Synthetic oligonucleotide
aaguuuacaacaguaagaa

SEQ ID NO: 2734633 - RNA, 19 nt, Artificial Sequence
  Description of Artificial Sequence: Synthetic oligonucleotide
acacucaacaguuucuuuc

SEQ ID NO: 2734634 - RNA, 19 nt, Artificial Sequence
  Description of Artificial Sequence: Synthetic oligonucleotide
aaaguauucagaauauaga

SEQ ID NO: 2734635 - RNA, 19 nt, Artificial Sequence
  Description of Artificial Sequence: Synthetic oligonucleotide
aguuacgacauuuuaaaau

SEQ ID NO: 2734636 - RNA, 19 nt, Artificial Sequence
  Description of Artificial Sequence: Synthetic oligonucleotide
aauuagcaucacucuagac

SEQ ID NO: 2734637 - RNA, 19 nt, Artificial Sequence
  Description of Artificial Sequence: Synthetic oligonucleotide
gugucaaugaauuagcauc

SEQ ID NO: 2734638 - RNA, 19 nt, Artificial Sequence
  Description of Artificial Sequence: Synthetic oligonucleotide
uuagaaacuuaaaacuggu

SEQ ID NO: 2734639 - RNA, 19 nt, Artificial Sequence
  Description of Artificial Sequence: Synthetic oligonucleotide
aaaguaugagaaaguauuc

SEQ ID NO: 2734640 - RNA, 19 nt, Artificial Sequence
  Description of Artificial Sequence: Synthetic oligonucleotide
ucuaacugaaguuuacaac

SEQ ID NO: 2734641 - RNA, 19 nt, Artificial Sequence
  Description of Artificial Sequence: Synthetic oligonucleotide
guuuacaacaguaagaaaa

SEQ ID NO: 2734642 - RNA, 19 nt, Artificial Sequence
  Description of Artificial Sequence: Synthetic oligonucleotide
uauugaucauuucauaaua

SEQ ID NO: 2734643 - RNA, 19 nt, Artificial Sequence
  Description of Artificial Sequence: Synthetic oligonucleotide
uaaaaguaaagaggaaaag

SEQ ID NO: 2734644 - RNA, 19 nt, Artificial Sequence
  Description of Artificial Sequence: Synthetic oligonucleotide
cuuccuuuauaacaaagac

SEQ ID NO: 2734645 - RNA, 19 nt, Artificial Sequence
  Description of Artificial Sequence: Synthetic oligonucleotide
auuauacagggauaaauaa

SEQ ID NO: 2734646 - RNA, 19 nt, Artificial Sequence
  Description of Artificial Sequence: Synthetic oligonucleotide
ugauuuugugacauuaauc

SEQ ID NO: 2734647 - RNA, 19 nt, Artificial Sequence
  Description of Artificial Sequence: Synthetic oligonucleotide
aacuuauagaucuuccuuu

SEQ ID NO: 2734648 - RNA, 19 nt, Artificial Sequence
  Description of Artificial Sequence: Synthetic oligonucleotide
aguauugaucauuucauaa

SEQ ID NO: 2734649 - RNA, 19 nt, Artificial Sequence
  Description of Artificial Sequence: Synthetic oligonucleotide
uccaauugaaguauugauc

SEQ ID NO: 2734650 - RNA, 19 nt, Artificial Sequence
  Description of Artificial Sequence: Synthetic oligonucleotide
uugaucauuucauaauaca

SEQ ID NO: 2734651 - RNA, 19 nt, Artificial Sequence
  Description of Artificial Sequence: Synthetic oligonucleotide
acuaccuaaacauuuuagu

SEQ ID NO: 2734652 - RNA, 19 nt, Artificial Sequence
  Description of Artificial Sequence: Synthetic oligonucleotide
uuccaucuaacuuauagau

SEQ ID NO: 2734653 - RNA, 19 nt, Artificial Sequence
  Description of Artificial Sequence: Synthetic oligonucleotide
auagaucuuccuuuauaac

SEQ ID NO: 2734654 - RNA, 19 nt, Artificial Sequence
  Description of Artificial Sequence: Synthetic oligonucleotide
uuacgacauuuuaaaauag

SEQ ID NO: 2734655 - RNA, 19 nt, Artificial Sequence
  Description of Artificial Sequence: Synthetic oligonucleotide
uauagacacuaccuaaaca

SEQ ID NO: 2734656 - RNA, 19 nt, Artificial Sequence
  Description of Artificial Sequence: Synthetic oligonucleotide
guuuagaaacuuaaaacug

SEQ ID NO: 2734657 - RNA, 19 nt, Artificial Sequence
  Description of Artificial Sequence: Synthetic oligonucleotide
uuuaguuuagaaacuuaaa

SEQ ID NO: 2734658 - RNA, 19 nt, Artificial Sequence
  Description of Artificial Sequence: Synthetic oligonucleotide
uaauauuauacagggauaa

SEQ ID NO: 2734659 - RNA, 19 nt, Artificial Sequence
  Description of Artificial Sequence: Synthetic oligonucleotide
uacgacauuuuaaaauagc

SEQ ID NO: 2734660 - RNA, 19 nt, Artificial Sequence
  Description of Artificial Sequence: Synthetic oligonucleotide
cauaaauuacucuaagcca

SEQ ID NO: 2734661 - RNA, 19 nt, Artificial Sequence
  Description of Artificial Sequence: Synthetic oligonucleotide
cauacuuugagaauuucca

SEQ ID NO: 2734662 - RNA, 19 nt, Artificial Sequence
  Description of Artificial Sequence: Synthetic oligonucleotide
auauacuaaaguaugagaa

SEQ ID NO: 2734663 - RNA, 19 nt, Artificial Sequence
  Description of Artificial Sequence: Synthetic oligonucleotide
uaauaguuuaguugcggug

SEQ ID NO: 2734664 - RNA, 19 nt, Artificial Sequence
  Description of Artificial Sequence: Synthetic oligonucleotide
aaauaauaguuuaguugcg

SEQ ID NO: 2734665 - RNA, 19 nt, Artificial Sequence
  Description of Artificial Sequence: Synthetic oligonucleotide
uuuccaucuaacuuauaga

SEQ ID NO: 2734666 - RNA, 19 nt, Artificial Sequence
  Description of Artificial Sequence: Synthetic oligonucleotide
uaccccaugauuuugugac

SEQ ID NO: 2734667 - RNA, 19 nt, Artificial Sequence
  Description of Artificial Sequence: Synthetic oligonucleotide
augaaacuucccuagaggu

SEQ ID NO: 2734668 - RNA, 19 nt, Artificial Sequence
  Description of Artificial Sequence: Synthetic oligonucleotide
agaugaaacuucccuagag

SEQ ID NO: 2734669 - RNA, 19 nt, Artificial Sequence
  Description of Artificial Sequence: Synthetic oligonucleotide
aacaugcucacaguaagug

SEQ ID NO: 2734670 - RNA, 19 nt, Artificial Sequence
  Description of Artificial Sequence: Synthetic oligonucleotide
aacaaagacauuaaaucau

SEQ ID NO: 2734671 - RNA, 19 nt, Artificial Sequence
  Description of Artificial Sequence: Synthetic oligonucleotide
uuauaacaaagacauuaaa

SEQ ID NO: 2734672 - RNA, 19 nt, Artificial Sequence
  Description of Artificial Sequence: Synthetic oligonucleotide
cuuuauaacaaagacauua

SEQ ID NO: 2734673 - RNA, 19 nt, Artificial Sequence
  Description of Artificial Sequence: Synthetic oligonucleotide
uaccuaaacauuuuaguua

SEQ ID NO: 2734674 - RNA, 19 nt, Artificial Sequence
  Description of Artificial Sequence: Synthetic oligonucleotide
uagaugcauacuuugagaa

SEQ ID NO: 2734675 - RNA, 19 nt, Artificial Sequence
  Description of Artificial Sequence: Synthetic oligonucleotide
uucaaauuaccccaugauu

SEQ ID NO: 2734676 - RNA, 19 nt, Artificial Sequence
  Description of Artificial Sequence: Synthetic oligonucleotide
gaauauagacacuaccuaa

SEQ ID NO: 2734677 - RNA, 19 nt, Artificial Sequence
  Description of Artificial Sequence: Synthetic oligonucleotide
auugaucauuucauaauac

SEQ ID NO: 2734678 - RNA, 19 nt, Artificial Sequence
  Description of Artificial Sequence: Synthetic oligonucleotide
aacuggucaccauuuuauc

SEQ ID NO: 2734679 - RNA, 19 nt, Artificial Sequence
  Description of Artificial Sequence: Synthetic oligonucleotide
uaaacauuuuaguuacgac

SEQ ID NO: 2734680 - RNA, 19 nt, Artificial Sequence
  Description of Artificial Sequence: Synthetic oligonucleotide
caauauacuaaaguaugag

SEQ ID NO: 2734681 - RNA, 19 nt, Artificial Sequence
  Description of Artificial Sequence: Synthetic oligonucleotide
aaguaugagaaaguauuca

SEQ ID NO: 2734682 - RNA, 19 nt, Artificial Sequence
  Description of Artificial Sequence: Synthetic oligonucleotide
cacuuaggcacauagaaca

SEQ ID NO: 2734683 - RNA, 19 nt, Artificial Sequence
  Description of Artificial Sequence: Synthetic oligonucleotide
auaauaguuuaguugcggu

SEQ ID NO: 2734684 - RNA, 19 nt, Artificial Sequence
  Description of Artificial Sequence: Synthetic oligonucleotide
uuuuaguuacgacauuuua

SEQ ID NO: 2734685 - RNA, 19 nt, Artificial Sequence
  Description of Artificial Sequence: Synthetic oligonucleotide
ugaaacuucccuagaggug

SEQ ID NO: 2734686 - RNA, 19 nt, Artificial Sequence
  Description of Artificial Sequence: Synthetic oligonucleotide
ugaaauagaugcauacuuu

SEQ ID NO: 2734687 - RNA, 19 nt, Artificial Sequence
  Description of Artificial Sequence: Synthetic oligonucleotide
uaacuuauagaucuuccuu

SEQ ID NO: 2734688 - RNA, 19 nt, Artificial Sequence
  Description of Artificial Sequence: Synthetic oligonucleotide
auagaugcauacuuugaga

SEQ ID NO: 2734689 - RNA, 19 nt, Artificial Sequence
  Description of Artificial Sequence: Synthetic oligonucleotide
uuauagaucuuccuuuaua

SEQ ID NO: 2734690 - RNA, 19 nt, Artificial Sequence
  Description of Artificial Sequence: Synthetic oligonucleotide
ucaacaguuucuuucacuu

SEQ ID NO: 2734691 - RNA, 19 nt, Artificial Sequence
  Description of Artificial Sequence: Synthetic oligonucleotide
uuacaaaagcaacacugaa

SEQ ID NO: 2734692 - RNA, 19 nt, Artificial Sequence
  Description of Artificial Sequence: Synthetic oligonucleotide
ugacauuaaucacaugaaa

SEQ ID NO: 2734693 - RNA, 19 nt, Artificial Sequence
  Description of Artificial Sequence: Synthetic oligonucleotide
guuacgacauuuuaaaaua

SEQ ID NO: 2734694 - RNA, 19 nt, Artificial Sequence
  Description of Artificial Sequence: Synthetic oligonucleotide
uuaaaacuggucaccauuu

SEQ ID NO: 2734695 - RNA, 19 nt, Artificial Sequence
  Description of Artificial Sequence: Synthetic oligonucleotide
uacuuugagaauuuccauc

SEQ ID NO: 2734696 - RNA, 19 nt, Artificial Sequence
  Description of Artificial Sequence: Synthetic oligonucleotide
gaaguuuacaacaguaaga

SEQ ID NO: 2734697 - RNA, 19 nt, Artificial Sequence
  Description of Artificial Sequence: Synthetic oligonucleotide
gccucuuuaguuuagaaac

SEQ ID NO: 2734698 - RNA, 19 nt, Artificial Sequence
  Description of Artificial Sequence: Synthetic oligonucleotide
aauauagacacuaccuaaa

SEQ ID NO: 2734699 - RNA, 19 nt, Artificial Sequence
  Description of Artificial Sequence: Synthetic oligonucleotide
gacucauugaguaagccuc

SEQ ID NO: 2734700 - RNA, 19 nt, Artificial Sequence
  Description of Artificial Sequence: Synthetic oligonucleotide
agaauauagacacuaccua

SEQ ID NO: 2734701 - RNA, 19 nt, Artificial Sequence
  Description of Artificial Sequence: Synthetic oligonucleotide
uacuaaaguaugagaaagu

SEQ ID NO: 2734702 - RNA, 19 nt, Artificial Sequence
  Description of Artificial Sequence: Synthetic oligonucleotide
ucaaugaauuagcaucacu

SEQ ID NO: 2734703 - RNA, 19 nt, Artificial Sequence
  Description of Artificial Sequence: Synthetic oligonucleotide
caugcucacaguaaguguc

SEQ ID NO: 2734704 - RNA, 19 nt, Artificial Sequence
  Description of Artificial Sequence: Synthetic oligonucleotide
aaaacuggucaccauuuua

SEQ ID NO: 2734705 - RNA, 19 nt, Artificial Sequence
  Description of Artificial Sequence: Synthetic oligonucleotide
guugcggugaucuaacuga

SEQ ID NO: 2734706 - RNA, 19 nt, Artificial Sequence
  Description of Artificial Sequence: Synthetic oligonucleotide
uaaucacaugaaauagaug

SEQ ID NO: 2734707 - RNA, 19 nt, Artificial Sequence
  Description of Artificial Sequence: Synthetic oligonucleotide
uuccaauugaaguauugau

SEQ ID NO: 2734708 - RNA, 19 nt, Artificial Sequence
  Description of Artificial Sequence: Synthetic oligonucleotide
caucacucuagacucauug

SEQ ID NO: 2734709 - RNA, 19 nt, Artificial Sequence
  Description of Artificial Sequence: Synthetic oligonucleotide
aauugaaguauugaucauu

SEQ ID NO: 2734710 - RNA, 19 nt, Artificial Sequence
  Description of Artificial Sequence: Synthetic oligonucleotide
aauuacucuaagccacaga

SEQ ID NO: 2734711 - RNA, 19 nt, Artificial Sequence
  Description of Artificial Sequence: Synthetic oligonucleotide
uacagggauaaauaauagu

SEQ ID NO: 2734712 - RNA, 19 nt, Artificial Sequence
  Description of Artificial Sequence: Synthetic oligonucleotide
auauuauacagggauaaau

SEQ ID NO: 2734713 - RNA, 19 nt, Artificial Sequence
  Description of Artificial Sequence: Synthetic oligonucleotide
acagggauaaauaauaguu

SEQ ID NO: 2734714 - RNA, 19 nt, Artificial Sequence
  Description of Artificial Sequence: Synthetic oligonucleotide
ugaguaagccucuuuaguu

SEQ ID NO: 2734715 - RNA, 19 nt, Artificial Sequence
  Description of Artificial Sequence: Synthetic oligonucleotide
aauacacucaacaguuucu

SEQ ID NO: 2734716 - RNA, 19 nt, Artificial Sequence
  Description of Artificial Sequence: Synthetic oligonucleotide
uacaaagaugaaacuuccc

SEQ ID NO: 2734717 - RNA, 19 nt, Artificial Sequence
  Description of Artificial Sequence: Synthetic oligonucleotide
aguuuaguugcggugaucu

SEQ ID NO: 2734718 - RNA, 19 nt, Artificial Sequence
  Description of Artificial Sequence: Synthetic oligonucleotide
uuuccaauugaaguauuga

SEQ ID NO: 2734719 - RNA, 19 nt, Artificial Sequence
  Description of Artificial Sequence: Synthetic oligonucleotide
cuuuaguuuagaaacuuaa

SEQ ID NO: 2734720 - RNA, 19 nt, Artificial Sequence
  Description of Artificial Sequence: Synthetic oligonucleotide
aacugaaguuuacaacagu

SEQ ID NO: 2734721 - RNA, 19 nt, Artificial Sequence
  Description of Artificial Sequence: Synthetic oligonucleotide
aaauagaugcauacuuuga

SEQ ID NO: 2734722 - RNA, 19 nt, Artificial Sequence
  Description of Artificial Sequence: Synthetic oligonucleotide
uuaguugcggugaucuaac

SEQ ID NO: 2734723 - RNA, 19 nt, Artificial Sequence
  Description of Artificial Sequence: Synthetic oligonucleotide
acuggucaccauuuuauca

SEQ ID NO: 2734724 - RNA, 19 nt, Artificial Sequence
  Description of Artificial Sequence: Synthetic oligonucleotide
uuuaguugcggugaucuaa

SEQ ID NO: 2734725 - RNA, 19 nt, Artificial Sequence
  Description of Artificial Sequence: Synthetic oligonucleotide
uucagaauauagacacuac

SEQ ID NO: 2734726 - RNA, 19 nt, Artificial Sequence
  Description of Artificial Sequence: Synthetic oligonucleotide
ugaucuaacugaaguuuac

SEQ ID NO: 2734727 - RNA, 19 nt, Artificial Sequence
  Description of Artificial Sequence: Synthetic oligonucleotide
ucacuuaggcacauagaac

SEQ ID NO: 2734728 - RNA, 19 nt, Artificial Sequence
  Description of Artificial Sequence: Synthetic oligonucleotide
aaauuacucuaagccacag

SEQ ID NO: 2734729 - RNA, 19 nt, Artificial Sequence
  Description of Artificial Sequence: Synthetic oligonucleotide
aucuaacugaaguuuacaa

SEQ ID NO: 2734730 - RNA, 19 nt, Artificial Sequence
  Description of Artificial Sequence: Synthetic oligonucleotide
cauuucauaauacacucaa

SEQ ID NO: 2734731 - RNA, 19 nt, Artificial Sequence
  Description of Artificial Sequence: Synthetic oligonucleotide
uuucacuuaggcacauaga

SEQ ID NO: 2734732 - RNA, 19 nt, Artificial Sequence
  Description of Artificial Sequence: Synthetic oligonucleotide
agacucauugaguaagccu

SEQ ID NO: 2734733 - RNA, 19 nt, Artificial Sequence
  Description of Artificial Sequence: Synthetic oligonucleotide
aaguauugaucauuucaua

SEQ ID NO: 2734734 - RNA, 19 nt, Artificial Sequence
  Description of Artificial Sequence: Synthetic oligonucleotide
augauuuugugacauuaau

SEQ ID NO: 2734735 - RNA, 19 nt, Artificial Sequence
  Description of Artificial Sequence: Synthetic oligonucleotide
uucccuagaggugaaaaga

SEQ ID NO: 2734736 - RNA, 19 nt, Artificial Sequence
  Description of Artificial Sequence: Synthetic oligonucleotide
aaacuggucaccauuuuau

SEQ ID NO: 2734737 - RNA, 19 nt, Artificial Sequence
  Description of Artificial Sequence: Synthetic oligonucleotide
aaauaauauuauacaggga

SEQ ID NO: 2734738 - RNA, 19 nt, Artificial Sequence
  Description of Artificial Sequence: Synthetic oligonucleotide
aucuaacuuauagaucuuc

SEQ ID NO: 2734739 - RNA, 19 nt, Artificial Sequence
  Description of Artificial Sequence: Synthetic oligonucleotide
aaauuaccccaugauuuug

SEQ ID NO: 2734740 - RNA, 19 nt, Artificial Sequence
  Description of Artificial Sequence: Synthetic oligonucleotide
ucacaguaagugucaauga

SEQ ID NO: 2734741 - RNA, 19 nt, Artificial Sequence
  Description of Artificial Sequence: Synthetic oligonucleotide
gcauuaaaaguaaagagga

SEQ ID NO: 2734742 - RNA, 19 nt, Artificial Sequence
  Description of Artificial Sequence: Synthetic oligonucleotide
ccaauugaaguauugauca

SEQ ID NO: 2734743 - RNA, 19 nt, Artificial Sequence
  Description of Artificial Sequence: Synthetic oligonucleotide
acucuagacucauugagua

SEQ ID NO: 2734744 - RNA, 19 nt, Artificial Sequence
  Description of Artificial Sequence: Synthetic oligonucleotide
uccaucuaacuuauagauc

SEQ ID NO: 2734745 - RNA, 19 nt, Artificial Sequence
  Description of Artificial Sequence: Synthetic oligonucleotide
aguugcggugaucuaacug

SEQ ID NO: 2734746 - RNA, 19 nt, Artificial Sequence
  Description of Artificial Sequence: Synthetic oligonucleotide
acgacauuuuaaaauagca

SEQ ID NO: 2734747 - RNA, 19 nt, Artificial Sequence
  Description of Artificial Sequence: Synthetic oligonucleotide
uagaaacuuaaaacugguc

SEQ ID NO: 2734748 - RNA, 19 nt, Artificial Sequence
  Description of Artificial Sequence: Synthetic oligonucleotide
acuaaaguaugagaaagua

SEQ ID NO: 2734749 - RNA, 19 nt, Artificial Sequence
  Description of Artificial Sequence: Synthetic oligonucleotide
gaucauuucauaauacacu

SEQ ID NO: 2734750 - RNA, 19 nt, Artificial Sequence
  Description of Artificial Sequence: Synthetic oligonucleotide
cauaauacacucaacaguu

SEQ ID NO: 2734751 - RNA, 19 nt, Artificial Sequence
  Description of Artificial Sequence: Synthetic oligonucleotide
ugagaaacaugcucacagu

SEQ ID NO: 2734752 - RNA, 19 nt, Artificial Sequence
  Description of Artificial Sequence: Synthetic oligonucleotide
aguacaaauucaauauacu

SEQ ID NO: 2734753 - RNA, 19 nt, Artificial Sequence
  Description of Artificial Sequence: Synthetic oligonucleotide
cucuaagccacagaaugag

SEQ ID NO: 2734754 - RNA, 19 nt, Artificial Sequence
  Description of Artificial Sequence: Synthetic oligonucleotide
auucagaauauagacacua

SEQ ID NO: 2734755 - RNA, 19 nt, Artificial Sequence
  Description of Artificial Sequence: Synthetic oligonucleotide
aauauuauacagggauaaa

SEQ ID NO: 2734756 - RNA, 19 nt, Artificial Sequence
  Description of Artificial Sequence: Synthetic oligonucleotide
ucacaugaaauagaugcau

SEQ ID NO: 2734757 - RNA, 19 nt, Artificial Sequence
  Description of Artificial Sequence: Synthetic oligonucleotide
cuucccuagaggugaaaag

SEQ ID NO: 2734758 - RNA, 19 nt, Artificial Sequence
  Description of Artificial Sequence: Synthetic oligonucleotide
ucuaagccacagaaugaga

SEQ ID NO: 2734759 - RNA, 19 nt, Artificial Sequence
  Description of Artificial Sequence: Synthetic oligonucleotide
cuaagccacagaaugagaa

SEQ ID NO: 2734760 - RNA, 19 nt, Artificial Sequence
  Description of Artificial Sequence: Synthetic oligonucleotide
augaauuagcaucacucua

SEQ ID NO: 2734761 - RNA, 19 nt, Artificial Sequence
  Description of Artificial Sequence: Synthetic oligonucleotide
acucaacaguuucuuucac

SEQ ID NO: 2734762 - RNA, 19 nt, Artificial Sequence
  Description of Artificial Sequence: Synthetic oligonucleotide
ucaccauuuuaucaauaua

SEQ ID NO: 2734763 - RNA, 19 nt, Artificial Sequence
  Description of Artificial Sequence: Synthetic oligonucleotide
gaauuagcaucacucuaga

SEQ ID NO: 2734764 - RNA, 19 nt, Artificial Sequence
  Description of Artificial Sequence: Synthetic oligonucleotide
auacuuugagaauuuccau

SEQ ID NO: 2734765 - RNA, 19 nt, Artificial Sequence
  Description of Artificial Sequence: Synthetic oligonucleotide
cagaauauagacacuaccu

SEQ ID NO: 2734766 - RNA, 19 nt, Artificial Sequence
  Description of Artificial Sequence: Synthetic oligonucleotide
auacagggauaaauaauag

SEQ ID NO: 2734767 - RNA, 19 nt, Artificial Sequence
  Description of Artificial Sequence: Synthetic oligonucleotide
acuuauagaucuuccuuua

SEQ ID NO: 2734768 - RNA, 19 nt, Artificial Sequence
  Description of Artificial Sequence: Synthetic oligonucleotide
gagaauuuccaucuaacuu

SEQ ID NO: 2734769 - RNA, 19 nt, Artificial Sequence
  Description of Artificial Sequence: Synthetic oligonucleotide
gacauuaaucacaugaaau

SEQ ID NO: 2734770 - RNA, 19 nt, Artificial Sequence
  Description of Artificial Sequence: Synthetic oligonucleotide
gagaaacaugcucacagua

SEQ ID NO: 2734771 - RNA, 19 nt, Artificial Sequence
  Description of Artificial Sequence: Synthetic oligonucleotide
auuaccccaugauuuugug

SEQ ID NO: 2734772 - RNA, 19 nt, Artificial Sequence
  Description of Artificial Sequence: Synthetic oligonucleotide
ucccuagaggugaaaagau

SEQ ID NO: 2734773 - RNA, 19 nt, Artificial Sequence
  Description of Artificial Sequence: Synthetic oligonucleotide
acaugcucacaguaagugu

SEQ ID NO: 2734774 - RNA, 19 nt, Artificial Sequence
  Description of Artificial Sequence: Synthetic oligonucleotide
acaguacaaauucaauaua

SEQ ID NO: 2734775 - RNA, 19 nt, Artificial Sequence
  Description of Artificial Sequence: Synthetic oligonucleotide
augagaaaguauucagaau

SEQ ID NO: 2734776 - RNA, 19 nt, Artificial Sequence
  Description of Artificial Sequence: Synthetic oligonucleotide
auugaaguauugaucauuu

SEQ ID NO: 2734777 - RNA, 19 nt, Artificial Sequence
  Description of Artificial Sequence: Synthetic oligonucleotide
uuaccccaugauuuuguga

SEQ ID NO: 2734778 - RNA, 19 nt, Artificial Sequence
  Description of Artificial Sequence: Synthetic oligonucleotide
cacaguacaaauucaauau

SEQ ID NO: 2734779 - RNA, 19 nt, Artificial Sequence
  Description of Artificial Sequence: Synthetic oligonucleotide
cacugaaauaacaauucaa

SEQ ID NO: 2734780 - RNA, 19 nt, Artificial Sequence
  Description of Artificial Sequence: Synthetic oligonucleotide
uuacucuaagccacagaau

SEQ ID NO: 2734781 - RNA, 19 nt, Artificial Sequence
  Description of Artificial Sequence: Synthetic oligonucleotide
uaguuacgacauuuuaaaa

SEQ ID NO: 2734782 - RNA, 19 nt, Artificial Sequence
  Description of Artificial Sequence: Synthetic oligonucleotide
acugaaguuuacaacagua

SEQ ID NO: 2734783 - RNA, 19 nt, Artificial Sequence
  Description of Artificial Sequence: Synthetic oligonucleotide
gaaguauugaucauuucau

SEQ ID NO: 2734784 - RNA, 19 nt, Artificial Sequence
  Description of Artificial Sequence: Synthetic oligonucleotide
aguaagccucuuuaguuua

SEQ ID NO: 2734785 - RNA, 19 nt, Artificial Sequence
  Description of Artificial Sequence: Synthetic oligonucleotide
agccucuuuaguuuagaaa

SEQ ID NO: 2734786 - RNA, 19 nt, Artificial Sequence
  Description of Artificial Sequence: Synthetic oligonucleotide
guaugagaaaguauucaga

SEQ ID NO: 2734787 - RNA, 19 nt, Artificial Sequence
  Description of Artificial Sequence: Synthetic oligonucleotide
uagacucauugaguaagcc

SEQ ID NO: 2734788 - RNA, 19 nt, Artificial Sequence
  Description of Artificial Sequence: Synthetic oligonucleotide
aagccucuuuaguuuagaa

SEQ ID NO: 2734789 - RNA, 19 nt, Artificial Sequence
  Description of Artificial Sequence: Synthetic oligonucleotide
caaagaugaaacuucccua

SEQ ID NO: 2734790 - RNA, 19 nt, Artificial Sequence
  Description of Artificial Sequence: Synthetic oligonucleotide
uagacacuaccuaaacauu

SEQ ID NO: 2734791 - RNA, 19 nt, Artificial Sequence
  Description of Artificial Sequence: Synthetic oligonucleotide
cugaaguuuacaacaguaa

SEQ ID NO: 2734792 - RNA, 19 nt, Artificial Sequence
  Description of Artificial Sequence: Synthetic oligonucleotide
aguaagugucaaugaauua

SEQ ID NO: 2734793 - RNA, 19 nt, Artificial Sequence
  Description of Artificial Sequence: Synthetic oligonucleotide
gaucuaacugaaguuuaca

SEQ ID NO: 2734794 - RNA, 19 nt, Artificial Sequence
  Description of Artificial Sequence: Synthetic oligonucleotide
aaacaugcucacaguaagu

SEQ ID NO: 2734795 - RNA, 19 nt, Artificial Sequence
  Description of Artificial Sequence: Synthetic oligonucleotide
auaauauuauacagggaua

SEQ ID NO: 2734796 - RNA, 19 nt, Artificial Sequence
  Description of Artificial Sequence: Synthetic oligonucleotide
agaugcauacuuugagaau

SEQ ID NO: 2734797 - RNA, 19 nt, Artificial Sequence
  Description of Artificial Sequence: Synthetic oligonucleotide
ccaucuaacuuauagaucu

SEQ ID NO: 2734798 - RNA, 19 nt, Artificial Sequence
  Description of Artificial Sequence: Synthetic oligonucleotide
guauugaucauuucauaau

SEQ ID NO: 2734799 - RNA, 19 nt, Artificial Sequence
  Description of Artificial Sequence: Synthetic oligonucleotide
acaguaagugucaaugaau

SEQ ID NO: 2734800 - RNA, 19 nt, Artificial Sequence
  Description of Artificial Sequence: Synthetic oligonucleotide
uugaaguauugaucauuuc

SEQ ID NO: 2734801 - RNA, 19 nt, Artificial Sequence
  Description of Artificial Sequence: Synthetic oligonucleotide
ugcggugaucuaacugaag

SEQ ID NO: 2734802 - RNA, 19 nt, Artificial Sequence
  Description of Artificial Sequence: Synthetic oligonucleotide
cauugaguaagccucuuua

SEQ ID NO: 2734803 - RNA, 19 nt, Artificial Sequence
  Description of Artificial Sequence: Synthetic oligonucleotide
agaaacaugcucacaguaa

SEQ ID NO: 2734804 - RNA, 19 nt, Artificial Sequence
  Description of Artificial Sequence: Synthetic oligonucleotide
aucacaugaaauagaugca

SEQ ID NO: 2734805 - RNA, 19 nt, Artificial Sequence
  Description of Artificial Sequence: Synthetic oligonucleotide
cuaacuuauagaucuuccu

SEQ ID NO: 2734806 - RNA, 19 nt, Artificial Sequence
  Description of Artificial Sequence: Synthetic oligonucleotide
auaguuuaguugcggugau

SEQ ID NO: 2734807 - RNA, 19 nt, Artificial Sequence
  Description of Artificial Sequence: Synthetic oligonucleotide
ucauugaguaagccucuuu

SEQ ID NO: 2734808 - RNA, 19 nt, Artificial Sequence
  Description of Artificial Sequence: Synthetic oligonucleotide
cacaguaagugucaaugaa

SEQ ID NO: 2734809 - RNA, 19 nt, Artificial Sequence
  Description of Artificial Sequence: Synthetic oligonucleotide
aucaauauacaaagaugaa

SEQ ID NO: 2734810 - RNA, 19 nt, Artificial Sequence
  Description of Artificial Sequence: Synthetic oligonucleotide
gcauacuuugagaauuucc

SEQ ID NO: 2734811 - RNA, 19 nt, Artificial Sequence
  Description of Artificial Sequence: Synthetic oligonucleotide
cuaccuaaacauuuuaguu

SEQ ID NO: 2734812 - RNA, 19 nt, Artificial Sequence
  Description of Artificial Sequence: Synthetic oligonucleotide
cuaaaguaugagaaaguau

SEQ ID NO: 2734813 - RNA, 19 nt, Artificial Sequence
  Description of Artificial Sequence: Synthetic oligonucleotide
uaagccucuuuaguuuaga

SEQ ID NO: 2734814 - RNA, 19 nt, Artificial Sequence
  Description of Artificial Sequence: Synthetic oligonucleotide
agacacuaccuaaacauuu

SEQ ID NO: 2734815 - RNA, 19 nt, Artificial Sequence
  Description of Artificial Sequence: Synthetic oligonucleotide
gugacauuaaucacaugaa

SEQ ID NO: 2734816 - RNA, 19 nt, Artificial Sequence
  Description of Artificial Sequence: Synthetic oligonucleotide
uugcggugaucuaacugaa

SEQ ID NO: 2734817 - RNA, 19 nt, Artificial Sequence
  Description of Artificial Sequence: Synthetic oligonucleotide
acacuaccuaaacauuuua

SEQ ID NO: 2734818 - RNA, 19 nt, Artificial Sequence
  Description of Artificial Sequence: Synthetic oligonucleotide
ggauaaauaauaguuuagu

SEQ ID NO: 2734819 - RNA, 19 nt, Artificial Sequence
  Description of Artificial Sequence: Synthetic oligonucleotide
cuuaaaacuggucaccauu

SEQ ID NO: 2734820 - RNA, 19 nt, Artificial Sequence
  Description of Artificial Sequence: Synthetic oligonucleotide
agaaaguauucagaauaua

SEQ ID NO: 2734821 - RNA, 19 nt, Artificial Sequence
  Description of Artificial Sequence: Synthetic oligonucleotide
acucuaagccacagaauga

SEQ ID NO: 2734822 - RNA, 19 nt, Artificial Sequence
  Description of Artificial Sequence: Synthetic oligonucleotide
uagcaucacucuagacuca

SEQ ID NO: 2734823 - RNA, 19 nt, Artificial Sequence
  Description of Artificial Sequence: Synthetic oligonucleotide
acagaaugagaaacaugcu

SEQ ID NO: 2734824 - RNA, 19 nt, Artificial Sequence
  Description of Artificial Sequence: Synthetic oligonucleotide
auacacucaacaguuucuu

SEQ ID NO: 2734825 - RNA, 19 nt, Artificial Sequence
  Description of Artificial Sequence: Synthetic oligonucleotide
uacacucaacaguuucuuu

SEQ ID NO: 2734826 - RNA, 19 nt, Artificial Sequence
  Description of Artificial Sequence: Synthetic oligonucleotide
acuucccuagaggugaaaa

SEQ ID NO: 2734827 - RNA, 19 nt, Artificial Sequence
  Description of Artificial Sequence: Synthetic oligonucleotide
gaguaagccucuuuaguuu

SEQ ID NO: 2734828 - RNA, 19 nt, Artificial Sequence
  Description of Artificial Sequence: Synthetic oligonucleotide
caguaagugucaaugaauu

SEQ ID NO: 2734829 - RNA, 19 nt, Artificial Sequence
  Description of Artificial Sequence: Synthetic oligonucleotide
guaagccucuuuaguuuag

SEQ ID NO: 2734830 - RNA, 19 nt, Artificial Sequence
  Description of Artificial Sequence: Synthetic oligonucleotide
acauuuuaguuacgacauu

SEQ ID NO: 2734831 - RNA, 19 nt, Artificial Sequence
  Description of Artificial Sequence: Synthetic oligonucleotide
uugugacauuaaucacaug

SEQ ID NO: 2734832 - RNA, 19 nt, Artificial Sequence
  Description of Artificial Sequence: Synthetic oligonucleotide
gaauuuccaucuaacuuau

SEQ ID NO: 2734833 - RNA, 19 nt, Artificial Sequence
  Description of Artificial Sequence: Synthetic oligonucleotide
caugaaauagaugcauacu

SEQ ID NO: 2734834 - RNA, 19 nt, Artificial Sequence
  Description of Artificial Sequence: Synthetic oligonucleotide
acucauugaguaagccucu

SEQ ID NO: 2734835 - RNA, 19 nt, Artificial Sequence
  Description of Artificial Sequence: Synthetic oligonucleotide
uaguugcggugaucuaacu

SEQ ID NO: 2734836 - RNA, 19 nt, Artificial Sequence
  Description of Artificial Sequence: Synthetic oligonucleotide
gucaaugaauuagcaucac

SEQ ID NO: 2734837 - RNA, 19 nt, Artificial Sequence
  Description of Artificial Sequence: Synthetic oligonucleotide
cauuuuaguuacgacauuu

SEQ ID NO: 2734838 - RNA, 19 nt, Artificial Sequence
  Description of Artificial Sequence: Synthetic oligonucleotide
cucaacaguuucuuucacu

SEQ ID NO: 2734839 - RNA, 19 nt, Artificial Sequence
  Description of Artificial Sequence: Synthetic oligonucleotide
gugaucuaacugaaguuua

SEQ ID NO: 2734840 - RNA, 19 nt, Artificial Sequence
  Description of Artificial Sequence: Synthetic oligonucleotide
accccaugauuuugugaca

SEQ ID NO: 2734841 - RNA, 19 nt, Artificial Sequence
  Description of Artificial Sequence: Synthetic oligonucleotide
cacucuagacucauugagu

SEQ ID NO: 2734842 - RNA, 19 nt, Artificial Sequence
  Description of Artificial Sequence: Synthetic oligonucleotide
ccacagaaugagaaacaug

SEQ ID NO: 2734843 - RNA, 19 nt, Artificial Sequence
  Description of Artificial Sequence: Synthetic oligonucleotide
cuuaggcacauagaacaaa

SEQ ID NO: 2734844 - RNA, 19 nt, Artificial Sequence
  Description of Artificial Sequence: Synthetic oligonucleotide
acuuaggcacauagaacaa

SEQ ID NO: 2734845 - RNA, 19 nt, Artificial Sequence
  Description of Artificial Sequence: Synthetic oligonucleotide
auaauacacucaacaguuu

SEQ ID NO: 2734846 - RNA, 19 nt, Artificial Sequence
  Description of Artificial Sequence: Synthetic oligonucleotide
agcaucacucuagacucau

SEQ ID NO: 2734847 - RNA, 19 nt, Artificial Sequence
  Description of Artificial Sequence: Synthetic oligonucleotide
cucuagacucauugaguaa

SEQ ID NO: 2734848 - RNA, 19 nt, Artificial Sequence
  Description of Artificial Sequence: Synthetic oligonucleotide
caaauuaccccaugauuuu

SEQ ID NO: 2734849 - RNA, 19 nt, Artificial Sequence
  Description of Artificial Sequence: Synthetic oligonucleotide
gcaacacugaaauaacaau

SEQ ID NO: 2734850 - RNA, 19 nt, Artificial Sequence
  Description of Artificial Sequence: Synthetic oligonucleotide
augcucacaguaaguguca

SEQ ID NO: 2734851 - RNA, 19 nt, Artificial Sequence
  Description of Artificial Sequence: Synthetic oligonucleotide
gcggugaucuaacugaagu

SEQ ID NO: 2734852 - RNA, 19 nt, Artificial Sequence
  Description of Artificial Sequence: Synthetic oligonucleotide
uaguuuaguugcggugauc

SEQ ID NO: 2734853 - RNA, 19 nt, Artificial Sequence
  Description of Artificial Sequence: Synthetic oligonucleotide
cuagaggugaaaagauuuu

SEQ ID NO: 2734854 - RNA, 19 nt, Artificial Sequence
  Description of Artificial Sequence: Synthetic oligonucleotide
ugcucacaguaagugucaa

SEQ ID NO: 2734855 - RNA, 19 nt, Artificial Sequence
  Description of Artificial Sequence: Synthetic oligonucleotide
ggugaucuaacugaaguuu

SEQ ID NO: 2734856 - RNA, 19 nt, Artificial Sequence
  Description of Artificial Sequence: Synthetic oligonucleotide
gacacuaccuaaacauuuu

SEQ ID NO: 2734857 - RNA, 19 nt, Artificial Sequence
  Description of Artificial Sequence: Synthetic oligonucleotide
cuuugagaauuuccaucua

SEQ ID NO: 2734858 - RNA, 19 nt, Artificial Sequence
  Description of Artificial Sequence: Synthetic oligonucleotide
guuuaguugcggugaucua

SEQ ID NO: 2734859 - RNA, 19 nt, Artificial Sequence
  Description of Artificial Sequence: Synthetic oligonucleotide
cuuauagaucuuccuuuau

SEQ ID NO: 2734860 - RNA, 19 nt, Artificial Sequence
  Description of Artificial Sequence: Synthetic oligonucleotide
ucuuucacuuaggcacaua

SEQ ID NO: 2734861 - RNA, 19 nt, Artificial Sequence
  Description of Artificial Sequence: Synthetic oligonucleotide
aauuuccaucuaacuuaua

SEQ ID NO: 2734862 - RNA, 19 nt, Artificial Sequence
  Description of Artificial Sequence: Synthetic oligonucleotide
aacuucccuagaggugaaa

SEQ ID NO: 2734863 - RNA, 19 nt, Artificial Sequence
  Description of Artificial Sequence: Synthetic oligonucleotide
caauugaaguauugaucau

SEQ ID NO: 2734864 - RNA, 19 nt, Artificial Sequence
  Description of Artificial Sequence: Synthetic oligonucleotide
ccaugauuuugugacauua

SEQ ID NO: 2734865 - RNA, 19 nt, Artificial Sequence
  Description of Artificial Sequence: Synthetic oligonucleotide
ccucuuuaguuuagaaacu

SEQ ID NO: 2734866 - RNA, 19 nt, Artificial Sequence
  Description of Artificial Sequence: Synthetic oligonucleotide
caucuaacuuauagaucuu

SEQ ID NO: 2734867 - RNA, 19 nt, Artificial Sequence
  Description of Artificial Sequence: Synthetic oligonucleotide
ggucaccauuuuaucaaua

SEQ ID NO: 2734868 - RNA, 19 nt, Artificial Sequence
  Description of Artificial Sequence: Synthetic oligonucleotide
gccacagaaugagaaacau

SEQ ID NO: 2734869 - RNA, 19 nt, Artificial Sequence
  Description of Artificial Sequence: Synthetic oligonucleotide
gcucacaguaagugucaau

SEQ ID NO: 2734870 - RNA, 19 nt, Artificial Sequence
  Description of Artificial Sequence: Synthetic oligonucleotide
cucauugaguaagccucuu

SEQ ID NO: 2734871 - RNA, 19 nt, Artificial Sequence
  Description of Artificial Sequence: Synthetic oligonucleotide
cccuagaggugaaaagauu

SEQ ID NO: 2734872 - RNA, 19 nt, Artificial Sequence
  Description of Artificial Sequence: Synthetic oligonucleotide
cggugaucuaacugaaguu

SEQ ID NO: 2734873 - RNA, 19 nt, Artificial Sequence
  Description of Artificial Sequence: Synthetic oligonucleotide
cccaugauuuugugacauu

SEQ ID NO: 2734874 - RNA, 19 nt, Artificial Sequence
  Description of Artificial Sequence: Synthetic oligonucleotide
gcaucacucuagacucauu

SEQ ID NO: 2734875 - RNA, 19 nt, Artificial Sequence
  Description of Artificial Sequence: Synthetic oligonucleotide
agucauuuaaacuugaucc

SEQ ID NO: 2734876 - RNA, 19 nt, Artificial Sequence
  Description of Artificial Sequence: Synthetic oligonucleotide
uuuucuuucaccaacaugc

SEQ ID NO: 2734877 - RNA, 19 nt, Artificial Sequence
  Description of Artificial Sequence: Synthetic oligonucleotide
aagaaguaaaauaagaagg

SEQ ID NO: 2734878 - RNA, 19 nt, Artificial Sequence
  Description of Artificial Sequence: Synthetic oligonucleotide
aaguuaaacagcuaaaaga

SEQ ID NO: 2734879 - RNA, 19 nt, Artificial Sequence
  Description of Artificial Sequence: Synthetic oligonucleotide
aaucguuucuuuugaaggc

SEQ ID NO: 2734880 - RNA, 19 nt, Artificial Sequence
  Description of Artificial Sequence: Synthetic oligonucleotide
aaaacuuuuauuugcauau

SEQ ID NO: 2734881 - RNA, 19 nt, Artificial Sequence
  Description of Artificial Sequence: Synthetic oligonucleotide
aaaguuaaacagcuaaaag

SEQ ID NO: 2734882 - RNA, 19 nt, Artificial Sequence
  Description of Artificial Sequence: Synthetic oligonucleotide
uuaaacagcuaaaagaagu

SEQ ID NO: 2734883 - RNA, 19 nt, Artificial Sequence
  Description of Artificial Sequence: Synthetic oligonucleotide
auuaaaaucauuugaacaa

SEQ ID NO: 2734884 - RNA, 19 nt, Artificial Sequence
  Description of Artificial Sequence: Synthetic oligonucleotide
aaaauaagaaggcaaugcu

SEQ ID NO: 2734885 - RNA, 19 nt, Artificial Sequence
  Description of Artificial Sequence: Synthetic oligonucleotide
auuuaaacuugauccaacc

SEQ ID NO: 2734886 - RNA, 19 nt, Artificial Sequence
  Description of Artificial Sequence: Synthetic oligonucleotide
ucuuucaccaacaugcaag

SEQ ID NO: 2734887 - RNA, 19 nt, Artificial Sequence
  Description of Artificial Sequence: Synthetic oligonucleotide
caaacugcauuuuacaucc

SEQ ID NO: 2734888 - RNA, 19 nt, Artificial Sequence
  Description of Artificial Sequence: Synthetic oligonucleotide
uuuuauuugcauauuaaaa

SEQ ID NO: 2734889 - RNA, 19 nt, Artificial Sequence
  Description of Artificial Sequence: Synthetic oligonucleotide
uguacagugcauauuggcg

SEQ ID NO: 2734890 - RNA, 19 nt, Artificial Sequence
  Description of Artificial Sequence: Synthetic oligonucleotide
agaaguaaaauaagaaggc

SEQ ID NO: 2734891 - RNA, 19 nt, Artificial Sequence
  Description of Artificial Sequence: Synthetic oligonucleotide
gaauguacagugcauauug

SEQ ID NO: 2734892 - RNA, 19 nt, Artificial Sequence
  Description of Artificial Sequence: Synthetic oligonucleotide
aauaagaaggcaaugcuug

SEQ ID NO: 2734893 - RNA, 19 nt, Artificial Sequence
  Description of Artificial Sequence: Synthetic oligonucleotide
auuccaauaauuaaaauca

SEQ ID NO: 2734894 - RNA, 19 nt, Artificial Sequence
  Description of Artificial Sequence: Synthetic oligonucleotide
ucuuacaaaguuaaacagc

SEQ ID NO: 2734895 - RNA, 19 nt, Artificial Sequence
  Description of Artificial Sequence: Synthetic oligonucleotide
uaaaauaagaaggcaaugc

SEQ ID NO: 2734896 - RNA, 19 nt, Artificial Sequence
  Description of Artificial Sequence: Synthetic oligonucleotide
aagaaggcaaugcuugugg

SEQ ID NO: 2734897 - RNA, 19 nt, Artificial Sequence
  Description of Artificial Sequence: Synthetic oligonucleotide
ucuuugaugugaaaggggc

SEQ ID NO: 2734898 - RNA, 19 nt, Artificial Sequence
  Description of Artificial Sequence: Synthetic oligonucleotide
uuaaacuugauccaaccuc

SEQ ID NO: 2734899 - RNA, 19 nt, Artificial Sequence
  Description of Artificial Sequence: Synthetic oligonucleotide
cauuccaauaauuaaaauc

SEQ ID NO: 2734900 - RNA, 19 nt, Artificial Sequence
  Description of Artificial Sequence: Synthetic oligonucleotide
ucaauuucgacuuaucgaa

SEQ ID NO: 2734901 - RNA, 19 nt, Artificial Sequence
  Description of Artificial Sequence: Synthetic oligonucleotide
uucuuuugaaggcagagga

SEQ ID NO: 2734902 - RNA, 19 nt, Artificial Sequence
  Description of Artificial Sequence: Synthetic oligonucleotide
uacaaaguuaaacagcuaa

SEQ ID NO: 2734903 - RNA, 19 nt, Artificial Sequence
  Description of Artificial Sequence: Synthetic oligonucleotide
uuuucuguauuucaccacc

SEQ ID NO: 2734904 - RNA, 19 nt, Artificial Sequence
  Description of Artificial Sequence: Synthetic oligonucleotide
uuuuacauccugcaggaca

SEQ ID NO: 2734905 - RNA, 19 nt, Artificial Sequence
  Description of Artificial Sequence: Synthetic oligonucleotide
caaucguuucuuuugaagg

SEQ ID NO: 2734906 - RNA, 19 nt, Artificial Sequence
  Description of Artificial Sequence: Synthetic oligonucleotide
gaauuucucgaucucagcc

SEQ ID NO: 2734907 - RNA, 19 nt, Artificial Sequence
  Description of Artificial Sequence: Synthetic oligonucleotide
uucaauuucgacuuaucga

SEQ ID NO: 2734908 - RNA, 19 nt, Artificial Sequence
  Description of Artificial Sequence: Synthetic oligonucleotide
uaauuaaaaucauuugaac

SEQ ID NO: 2734909 - RNA, 19 nt, Artificial Sequence
  Description of Artificial Sequence: Synthetic oligonucleotide
aacaugcaaguucuuuccc

SEQ ID NO: 2734910 - RNA, 19 nt, Artificial Sequence
  Description of Artificial Sequence: Synthetic oligonucleotide
aguucugauucuuugaugu

SEQ ID NO: 2734911 - RNA, 19 nt, Artificial Sequence
  Description of Artificial Sequence: Synthetic oligonucleotide
uaaacuugauccaaccucu

SEQ ID NO: 2734912 - RNA, 19 nt, Artificial Sequence
  Description of Artificial Sequence: Synthetic oligonucleotide
uguucaaucguuucuuuug

SEQ ID NO: 2734913 - RNA, 19 nt, Artificial Sequence
  Description of Artificial Sequence: Synthetic oligonucleotide
aaauugugcauuccaauaa

SEQ ID NO: 2734914 - RNA, 19 nt, Artificial Sequence
  Description of Artificial Sequence: Synthetic oligonucleotide
aaaauugugcauuccaaua

SEQ ID NO: 2734915 - RNA, 19 nt, Artificial Sequence
  Description of Artificial Sequence: Synthetic oligonucleotide
auuacgauucgccagcuug

SEQ ID NO: 2734916 - RNA, 19 nt, Artificial Sequence
  Description of Artificial Sequence: Synthetic oligonucleotide
cuucaauuucgacuuaucg

SEQ ID NO: 2734917 - RNA, 19 nt, Artificial Sequence
  Description of Artificial Sequence: Synthetic oligonucleotide
aauuucucgaucucagcca

SEQ ID NO: 2734918 - RNA, 19 nt, Artificial Sequence
  Description of Artificial Sequence: Synthetic oligonucleotide
ucuguauuucaccaccucc

SEQ ID NO: 2734919 - RNA, 19 nt, Artificial Sequence
  Description of Artificial Sequence: Synthetic oligonucleotide
ucaaucguuucuuuugaag

SEQ ID NO: 2734920 - RNA, 19 nt, Artificial Sequence
  Description of Artificial Sequence: Synthetic oligonucleotide
agcacagucauuuaaacuu

SEQ ID NO: 2734921 - RNA, 19 nt, Artificial Sequence
  Description of Artificial Sequence: Synthetic oligonucleotide
uggucaguaguucugauuc

SEQ ID NO: 2734922 - RNA, 19 nt, Artificial Sequence
  Description of Artificial Sequence: Synthetic oligonucleotide
uuaucgaauuucucgaucu

SEQ ID NO: 2734923 - RNA, 19 nt, Artificial Sequence
  Description of Artificial Sequence: Synthetic oligonucleotide
aguucuuucccucccugcc

SEQ ID NO: 2734924 - RNA, 19 nt, Artificial Sequence
  Description of Artificial Sequence: Synthetic oligonucleotide
guacagugcauauuggcgg

SEQ ID NO: 2734925 - RNA, 19 nt, Artificial Sequence
  Description of Artificial Sequence: Synthetic oligonucleotide
uauuucaccaccucccacc

SEQ ID NO: 2734926 - RNA, 19 nt, Artificial Sequence
  Description of Artificial Sequence: Synthetic oligonucleotide
aaguucuuucccucccugc

SEQ ID NO: 2734927 - RNA, 19 nt, Artificial Sequence
  Description of Artificial Sequence: Synthetic oligonucleotide
uuuaaacuugauccaaccu

SEQ ID NO: 2734928 - RNA, 19 nt, Artificial Sequence
  Description of Artificial Sequence: Synthetic oligonucleotide
ugugaaaggggcagcacag

SEQ ID NO: 2734929 - RNA, 19 nt, Artificial Sequence
  Description of Artificial Sequence: Synthetic oligonucleotide
uuugaugugaaaggggcag

SEQ ID NO: 2734930 - RNA, 19 nt, Artificial Sequence
  Description of Artificial Sequence: Synthetic oligonucleotide
agcuaaaagaaguaaaaua

SEQ ID NO: 2734931 - RNA, 19 nt, Artificial Sequence
  Description of Artificial Sequence: Synthetic oligonucleotide
ugaucaaacugcauuuuac

SEQ ID NO: 2734932 - RNA, 19 nt, Artificial Sequence
  Description of Artificial Sequence: Synthetic oligonucleotide
auaauuaaaaucauuugaa

SEQ ID NO: 2734933 - RNA, 19 nt, Artificial Sequence
  Description of Artificial Sequence: Synthetic oligonucleotide
ucgaauuucucgaucucag

SEQ ID NO: 2734934 - RNA, 19 nt, Artificial Sequence
  Description of Artificial Sequence: Synthetic oligonucleotide
ucgaucucagccauaucgg

SEQ ID NO: 2734935 - RNA, 19 nt, Artificial Sequence
  Description of Artificial Sequence: Synthetic oligonucleotide
ucggguuugucagacaugg

SEQ ID NO: 2734936 - RNA, 19 nt, Artificial Sequence
  Description of Artificial Sequence: Synthetic oligonucleotide
ucaaacugcauuuuacauc

SEQ ID NO: 2734937 - RNA, 19 nt, Artificial Sequence
  Description of Artificial Sequence: Synthetic oligonucleotide
caucuuacaaaguuaaaca

SEQ ID NO: 2734938 - RNA, 19 nt, Artificial Sequence
  Description of Artificial Sequence: Synthetic oligonucleotide
acuugauccaaccucuuug

SEQ ID NO: 2734939 - RNA, 19 nt, Artificial Sequence
  Description of Artificial Sequence: Synthetic oligonucleotide
ucaccaacaugcaaguucu

SEQ ID NO: 2734940 - RNA, 19 nt, Artificial Sequence
  Description of Artificial Sequence: Synthetic oligonucleotide
uaaaacuuuuauuugcaua

SEQ ID NO: 2734941 - RNA, 19 nt, Artificial Sequence
  Description of Artificial Sequence: Synthetic oligonucleotide
cucccugccagccagaccg

SEQ ID NO: 2734942 - RNA, 19 nt, Artificial Sequence
  Description of Artificial Sequence: Synthetic oligonucleotide
ugcauuccaauaauuaaaa

SEQ ID NO: 2734943 - RNA, 19 nt, Artificial Sequence
  Description of Artificial Sequence: Synthetic oligonucleotide
ugugcauuccaauaauuaa

SEQ ID NO: 2734944 - RNA, 19 nt, Artificial Sequence
  Description of Artificial Sequence: Synthetic oligonucleotide
augguugccggaaagagcg

SEQ ID NO: 2734945 - RNA, 19 nt, Artificial Sequence
  Description of Artificial Sequence: Synthetic oligonucleotide
aaguaaaauaagaaggcaa

SEQ ID NO: 2734946 - RNA, 19 nt, Artificial Sequence
  Description of Artificial Sequence: Synthetic oligonucleotide
aauggcacucugaucaaac

SEQ ID NO: 2734947 - RNA, 19 nt, Artificial Sequence
  Description of Artificial Sequence: Synthetic oligonucleotide
gcauuuuacauccugcagg

SEQ ID NO: 2734948 - RNA, 19 nt, Artificial Sequence
  Description of Artificial Sequence: Synthetic oligonucleotide
cuguauuucaccaccuccc

SEQ ID NO: 2734949 - RNA, 19 nt, Artificial Sequence
  Description of Artificial Sequence: Synthetic oligonucleotide
ugcauuuuacauccugcag

SEQ ID NO: 2734950 - RNA, 19 nt, Artificial Sequence
  Description of Artificial Sequence: Synthetic oligonucleotide
gaaagagcgagcgaggcgc

SEQ ID NO: 2734951 - RNA, 19 nt, Artificial Sequence
  Description of Artificial Sequence: Synthetic oligonucleotide
aacuuuuauuugcauauua

SEQ ID NO: 2734952 - RNA, 19 nt, Artificial Sequence
  Description of Artificial Sequence: Synthetic oligonucleotide
gacaccuuggaccaucuug

SEQ ID NO: 2734953 - RNA, 19 nt, Artificial Sequence
  Description of Artificial Sequence: Synthetic oligonucleotide
uaaaaucauuugaacaaaa

SEQ ID NO: 2734954 - RNA, 19 nt, Artificial Sequence
  Description of Artificial Sequence: Synthetic oligonucleotide
aacugcauuuuacauccug

SEQ ID NO: 2734955 - RNA, 19 nt, Artificial Sequence
  Description of Artificial Sequence: Synthetic oligonucleotide
aauugugcauuccaauaau

SEQ ID NO: 2734956 - RNA, 19 nt, Artificial Sequence
  Description of Artificial Sequence: Synthetic oligonucleotide
uucaccaccucccacccag

SEQ ID NO: 2734957 - RNA, 19 nt, Artificial Sequence
  Description of Artificial Sequence: Synthetic oligonucleotide
aauuucgacuuaucgaauu

SEQ ID NO: 2734958 - RNA, 19 nt, Artificial Sequence
  Description of Artificial Sequence: Synthetic oligonucleotide
auuucaccaccucccaccc

SEQ ID NO: 2734959 - RNA, 19 nt, Artificial Sequence
  Description of Artificial Sequence: Synthetic oligonucleotide
uaaacagcuaaaagaagua

SEQ ID NO: 2734960 - RNA, 19 nt, Artificial Sequence
  Description of Artificial Sequence: Synthetic oligonucleotide
uuguggaauguacagugca

SEQ ID NO: 2734961 - RNA, 19 nt, Artificial Sequence
  Description of Artificial Sequence: Synthetic oligonucleotide
uugcaucuuacaaaguuaa

SEQ ID NO: 2734962 - RNA, 19 nt, Artificial Sequence
  Description of Artificial Sequence: Synthetic oligonucleotide
acugcauuuuacauccugc

SEQ ID NO: 2734963 - RNA, 19 nt, Artificial Sequence
  Description of Artificial Sequence: Synthetic oligonucleotide
gaucaaacugcauuuuaca

SEQ ID NO: 2734964 - RNA, 19 nt, Artificial Sequence
  Description of Artificial Sequence: Synthetic oligonucleotide
acagaugggugggagaggc

SEQ ID NO: 2734965 - RNA, 19 nt, Artificial Sequence
  Description of Artificial Sequence: Synthetic oligonucleotide
ugucagacaugguugccgg

SEQ ID NO: 2734966 - RNA, 19 nt, Artificial Sequence
  Description of Artificial Sequence: Synthetic oligonucleotide
cuuacaaaguuaaacagcu

SEQ ID NO: 2734967 - RNA, 19 nt, Artificial Sequence
  Description of Artificial Sequence: Synthetic oligonucleotide
caacaugcaaguucuuucc

SEQ ID NO: 2734968 - RNA, 19 nt, Artificial Sequence
  Description of Artificial Sequence: Synthetic oligonucleotide
gauccaaccucuuugcauc

SEQ ID NO: 2734969 - RNA, 19 nt, Artificial Sequence
  Description of Artificial Sequence: Synthetic oligonucleotide
cuugauccaaccucuuugc

SEQ ID NO: 2734970 - RNA, 19 nt, Artificial Sequence
  Description of Artificial Sequence: Synthetic oligonucleotide
gacuuaucgaauuucucga

SEQ ID NO: 2734971 - RNA, 19 nt, Artificial Sequence
  Description of Artificial Sequence: Synthetic oligonucleotide
uucgacuuaucgaauuucu

SEQ ID NO: 2734972 - RNA, 19 nt, Artificial Sequence
  Description of Artificial Sequence: Synthetic oligonucleotide
gagaguaggaucugcucag

SEQ ID NO: 2734973 - RNA, 19 nt, Artificial Sequence
  Description of Artificial Sequence: Synthetic oligonucleotide
uuaaaaucauuugaacaaa

SEQ ID NO: 2734974 - RNA, 19 nt, Artificial Sequence
  Description of Artificial Sequence: Synthetic oligonucleotide
aauguacagugcauauugg

SEQ ID NO: 2734975 - RNA, 19 nt, Artificial Sequence
  Description of Artificial Sequence: Synthetic oligonucleotide
aaaggggcagcacagucau

SEQ ID NO: 2734976 - RNA, 19 nt, Artificial Sequence
  Description of Artificial Sequence: Synthetic oligonucleotide
cucauuacgauucgccagc

SEQ ID NO: 2734977 - RNA, 19 nt, Artificial Sequence
  Description of Artificial Sequence: Synthetic oligonucleotide
cugcaggacaccuuggacc

SEQ ID NO: 2734978 - RNA, 19 nt, Artificial Sequence
  Description of Artificial Sequence: Synthetic oligonucleotide
uuacgauucgccagcuugc

SEQ ID NO: 2734979 - RNA, 19 nt, Artificial Sequence
  Description of Artificial Sequence: Synthetic oligonucleotide
uugugcauuccaauaauua

SEQ ID NO: 2734980 - RNA, 19 nt, Artificial Sequence
  Description of Artificial Sequence: Synthetic oligonucleotide
uguauuucaccaccuccca

SEQ ID NO: 2734981 - RNA, 19 nt, Artificial Sequence
  Description of Artificial Sequence: Synthetic oligonucleotide
aacgaggagaguaggaucu

SEQ ID NO: 2734982 - RNA, 19 nt, Artificial Sequence
  Description of Artificial Sequence: Synthetic oligonucleotide
aguaguucugauucuuuga

SEQ ID NO: 2734983 - RNA, 19 nt, Artificial Sequence
  Description of Artificial Sequence: Synthetic oligonucleotide
gaaguaaaauaagaaggca

SEQ ID NO: 2734984 - RNA, 19 nt, Artificial Sequence
  Description of Artificial Sequence: Synthetic oligonucleotide
aguaaaauaagaaggcaau

SEQ ID NO: 2734985 - RNA, 19 nt, Artificial Sequence
  Description of Artificial Sequence: Synthetic oligonucleotide
ucugauucuuugaugugaa

SEQ ID NO: 2734986 - RNA, 19 nt, Artificial Sequence
  Description of Artificial Sequence: Synthetic oligonucleotide
ugcguuucugucuucuuca

SEQ ID NO: 2734987 - RNA, 19 nt, Artificial Sequence
  Description of Artificial Sequence: Synthetic oligonucleotide
uugucagacaugguugccg

SEQ ID NO: 2734988 - RNA, 19 nt, Artificial Sequence
  Description of Artificial Sequence: Synthetic oligonucleotide
aacagcuaaaagaaguaaa

SEQ ID NO: 2734989 - RNA, 19 nt, Artificial Sequence
  Description of Artificial Sequence: Synthetic oligonucleotide
uucugauucuuugauguga

SEQ ID NO: 2734990 - RNA, 19 nt, Artificial Sequence
  Description of Artificial Sequence: Synthetic oligonucleotide
gguuuuaaaacuuuuauuu

SEQ ID NO: 2734991 - RNA, 19 nt, Artificial Sequence
  Description of Artificial Sequence: Synthetic oligonucleotide
agccauaucggguuuguca

SEQ ID NO: 2734992 - RNA, 19 nt, Artificial Sequence
  Description of Artificial Sequence: Synthetic oligonucleotide
aaauaagaaggcaaugcuu

SEQ ID NO: 2734993 - RNA, 19 nt, Artificial Sequence
  Description of Artificial Sequence: Synthetic oligonucleotide
aucaaacugcauuuuacau

SEQ ID NO: 2734994 - RNA, 19 nt, Artificial Sequence
  Description of Artificial Sequence: Synthetic oligonucleotide
uaucggguuugucagacau

SEQ ID NO: 2734995 - RNA, 19 nt, Artificial Sequence
  Description of Artificial Sequence: Synthetic oligonucleotide
augcaaguucuuucccucc

SEQ ID NO: 2734996 - RNA, 19 nt, Artificial Sequence
  Description of Artificial Sequence: Synthetic oligonucleotide
guaaaauaagaaggcaaug

SEQ ID NO: 2734997 - RNA, 19 nt, Artificial Sequence
  Description of Artificial Sequence: Synthetic oligonucleotide
cagaccgacagaugggugg

SEQ ID NO: 2734998 - RNA, 19 nt, Artificial Sequence
  Description of Artificial Sequence: Synthetic oligonucleotide
ugcauauuggcggcgcucg

SEQ ID NO: 2734999 - RNA, 19 nt, Artificial Sequence
  Description of Artificial Sequence: Synthetic oligonucleotide
ugcaggacaccuuggacca

SEQ ID NO: 2735000 - RNA, 19 nt, Artificial Sequence
  Description of Artificial Sequence: Synthetic oligonucleotide
acucugaucaaacugcauu

SEQ ID NO: 2735001 - RNA, 19 nt, Artificial Sequence
  Description of Artificial Sequence: Synthetic oligonucleotide
augcuuguggaauguacag

SEQ ID NO: 2735002 - RNA, 19 nt, Artificial Sequence
  Description of Artificial Sequence: Synthetic oligonucleotide
uuuucucuugcguuucugu

SEQ ID NO: 2735003 - RNA, 19 nt, Artificial Sequence
  Description of Artificial Sequence: Synthetic oligonucleotide
agguuuuaaaacuuuuauu

SEQ ID NO: 2735004 - RNA, 19 nt, Artificial Sequence
  Description of Artificial Sequence: Synthetic oligonucleotide
gucauuuaaacuugaucca

SEQ ID NO: 2735005 - RNA, 19 nt, Artificial Sequence
  Description of Artificial Sequence: Synthetic oligonucleotide
uuucuuucaccaacaugca

SEQ ID NO: 2735006 - RNA, 19 nt, Artificial Sequence
  Description of Artificial Sequence: Synthetic oligonucleotide
cagccagaccgacagaugg

SEQ ID NO: 2735007 - RNA, 19 nt, Artificial Sequence
  Description of Artificial Sequence: Synthetic oligonucleotide
guuaaacagcuaaaagaag

SEQ ID NO: 2735008 - RNA, 19 nt, Artificial Sequence
  Description of Artificial Sequence: Synthetic oligonucleotide
aaggcaaugcuuguggaau

SEQ ID NO: 2735009 - RNA, 19 nt, Artificial Sequence
  Description of Artificial Sequence: Synthetic oligonucleotide
aaacagcuaaaagaaguaa

SEQ ID NO: 2735010 - RNA, 19 nt, Artificial Sequence
  Description of Artificial Sequence: Synthetic oligonucleotide
uucuuucccucccugccag

SEQ ID NO: 2735011 - RNA, 19 nt, Artificial Sequence
  Description of Artificial Sequence: Synthetic oligonucleotide
ugcaaguucuuucccuccc

SEQ ID NO: 2735012 - RNA, 19 nt, Artificial Sequence
  Description of Artificial Sequence: Synthetic oligonucleotide
ugaaaggggcagcacaguc

SEQ ID NO: 2735013 - RNA, 19 nt, Artificial Sequence
  Description of Artificial Sequence: Synthetic oligonucleotide
uuuugaaggcagaggauuu

SEQ ID NO: 2735014 - RNA, 19 nt, Artificial Sequence
  Description of Artificial Sequence: Synthetic oligonucleotide
accucuuugcaucuuacaa

SEQ ID NO: 2735015 - RNA, 19 nt, Artificial Sequence
  Description of Artificial Sequence: Synthetic oligonucleotide
aggagaguaggaucugcuc

SEQ ID NO: 2735016 - RNA, 19 nt, Artificial Sequence
  Description of Artificial Sequence: Synthetic oligonucleotide
cagucauuuaaacuugauc

SEQ ID NO: 2735017 - RNA, 19 nt, Artificial Sequence
  Description of Artificial Sequence: Synthetic oligonucleotide
uuucuguauuucaccaccu

SEQ ID NO: 2735018 - RNA, 19 nt, Artificial Sequence
  Description of Artificial Sequence: Synthetic oligonucleotide
caaugcuuguggaauguac

SEQ ID NO: 2735019 - RNA, 19 nt, Artificial Sequence
  Description of Artificial Sequence: Synthetic oligonucleotide
uacagugcauauuggcggc

SEQ ID NO: 2735020 - RNA, 19 nt, Artificial Sequence
  Description of Artificial Sequence: Synthetic oligonucleotide
gcuuguggaauguacagug

SEQ ID NO: 2735021 - RNA, 19 nt, Artificial Sequence
  Description of Artificial Sequence: Synthetic oligonucleotide
augugaaaggggcagcaca

SEQ ID NO: 2735022 - RNA, 19 nt, Artificial Sequence
  Description of Artificial Sequence: Synthetic oligonucleotide
ugauccaaccucuuugcau

SEQ ID NO: 2735023 - RNA, 19 nt, Artificial Sequence
  Description of Artificial Sequence: Synthetic oligonucleotide
cuuaucgaauuucucgauc

SEQ ID NO: 2735024 - RNA, 19 nt, Artificial Sequence
  Description of Artificial Sequence: Synthetic oligonucleotide
uaguucugauucuuugaug

SEQ ID NO: 2735025 - RNA, 19 nt, Artificial Sequence
  Description of Artificial Sequence: Synthetic oligonucleotide
uuccaauaauuaaaaucau

SEQ ID NO: 2735026 - RNA, 19 nt, Artificial Sequence
  Description of Artificial Sequence: Synthetic oligonucleotide
cuuguggaauguacagugc

SEQ ID NO: 2735027 - RNA, 19 nt, Artificial Sequence
  Description of Artificial Sequence: Synthetic oligonucleotide
caugguugccggaaagagc

SEQ ID NO: 2735028 - RNA, 19 nt, Artificial Sequence
  Description of Artificial Sequence: Synthetic oligonucleotide
auaagaaggcaaugcuugu

SEQ ID NO: 2735029 - RNA, 19 nt, Artificial Sequence
  Description of Artificial Sequence: Synthetic oligonucleotide
uugccggaaagagcgagcg

SEQ ID NO: 2735030 - RNA, 19 nt, Artificial Sequence
  Description of Artificial Sequence: Synthetic oligonucleotide
acaugcaaguucuuucccu

SEQ ID NO: 2735031 - RNA, 19 nt, Artificial Sequence
  Description of Artificial Sequence: Synthetic oligonucleotide
uguggaauguacagugcau

SEQ ID NO: 2735032 - RNA, 19 nt, Artificial Sequence
  Description of Artificial Sequence: Synthetic oligonucleotide
uuucucuugcguuucuguc

SEQ ID NO: 2735033 - RNA, 19 nt, Artificial Sequence
  Description of Artificial Sequence: Synthetic oligonucleotide
ucuucaauuucgacuuauc

SEQ ID NO: 2735034 - RNA, 19 nt, Artificial Sequence
  Description of Artificial Sequence: Synthetic oligonucleotide
gaacgaggagaguaggauc

SEQ ID NO: 2735035 - RNA, 19 nt, Artificial Sequence
  Description of Artificial Sequence: Synthetic oligonucleotide
uggaauguacagugcauau

SEQ ID NO: 2735036 - RNA, 19 nt, Artificial Sequence
  Description of Artificial Sequence: Synthetic oligonucleotide
caguaguucugauucuuug

SEQ ID NO: 2735037 - RNA, 19 nt, Artificial Sequence
  Description of Artificial Sequence: Synthetic oligonucleotide
ucuuuugaaggcagaggau

SEQ ID NO: 2735038 - RNA, 19 nt, Artificial Sequence
  Description of Artificial Sequence: Synthetic oligonucleotide
acagcuaaaagaaguaaaa

SEQ ID NO: 2735039 - RNA, 19 nt, Artificial Sequence
  Description of Artificial Sequence: Synthetic oligonucleotide
cgacuuaucgaauuucucg

SEQ ID NO: 2735040 - RNA, 19 nt, Artificial Sequence
  Description of Artificial Sequence: Synthetic oligonucleotide
aaaauggcacucugaucaa

SEQ ID NO: 2735041 - RNA, 19 nt, Artificial Sequence
  Description of Artificial Sequence: Synthetic oligonucleotide
uucgccagcuugcuucucc

SEQ ID NO: 2735042 - RNA, 19 nt, Artificial Sequence
  Description of Artificial Sequence: Synthetic oligonucleotide
agaugggugggagaggcag

SEQ ID NO: 2735043 - RNA, 19 nt, Artificial Sequence
  Description of Artificial Sequence: Synthetic oligonucleotide
gcaucuuacaaaguuaaac

SEQ ID NO: 2735044 - RNA, 19 nt, Artificial Sequence
  Description of Artificial Sequence: Synthetic oligonucleotide
uugcguuucugucuucuuc

SEQ ID NO: 2735045 - RNA, 19 nt, Artificial Sequence
  Description of Artificial Sequence: Synthetic oligonucleotide
agacaugguugccggaaag

SEQ ID NO: 2735046 - RNA, 19 nt, Artificial Sequence
  Description of Artificial Sequence: Synthetic oligonucleotide
acuuuuauuugcauauuaa

SEQ ID NO: 2735047 - RNA, 19 nt, Artificial Sequence
  Description of Artificial Sequence: Synthetic oligonucleotide
gccauaucggguuugucag

SEQ ID NO: 2735048 - RNA, 19 nt, Artificial Sequence
  Description of Artificial Sequence: Synthetic oligonucleotide
guucaaucguuucuuuuga

SEQ ID NO: 2735049 - RNA, 19 nt, Artificial Sequence
  Description of Artificial Sequence: Synthetic oligonucleotide
auuucgacuuaucgaauuu

SEQ ID NO: 2735050 - RNA, 19 nt, Artificial Sequence
  Description of Artificial Sequence: Synthetic oligonucleotide
uucuuucaccaacaugcaa

SEQ ID NO: 2735051 - RNA, 19 nt, Artificial Sequence
  Description of Artificial Sequence: Synthetic oligonucleotide
ucgacuuaucgaauuucuc

SEQ ID NO: 2735052 - RNA, 19 nt, Artificial Sequence
  Description of Artificial Sequence: Synthetic oligonucleotide
uugauccaaccucuuugca

SEQ ID NO: 2735053 - RNA, 19 nt, Artificial Sequence
  Description of Artificial Sequence: Synthetic oligonucleotide
uucugucuucuucaauuuc

SEQ ID NO: 2735054 - RNA, 19 nt, Artificial Sequence
  Description of Artificial Sequence: Synthetic oligonucleotide
gguuugucagacaugguug

SEQ ID NO: 2735055 - RNA, 19 nt, Artificial Sequence
  Description of Artificial Sequence: Synthetic oligonucleotide
uuucugucuucuucaauuu

SEQ ID NO: 2735056 - RNA, 19 nt, Artificial Sequence
  Description of Artificial Sequence: Synthetic oligonucleotide
uuccuggucaguaguucug

SEQ ID NO: 2735057 - RNA, 19 nt, Artificial Sequence
  Description of Artificial Sequence: Synthetic oligonucleotide
cauccugcaggacaccuug

SEQ ID NO: 2735058 - RNA, 19 nt, Artificial Sequence
  Description of Artificial Sequence: Synthetic oligonucleotide
uucuguauuucaccaccuc

SEQ ID NO: 2735059 - RNA, 19 nt, Artificial Sequence
  Description of Artificial Sequence: Synthetic oligonucleotide
ugaugugaaaggggcagca

SEQ ID NO: 2735060 - RNA, 19 nt, Artificial Sequence
  Description of Artificial Sequence: Synthetic oligonucleotide
cauaucggguuugucagac

SEQ ID NO: 2735061 - RNA, 19 nt, Artificial Sequence
  Description of Artificial Sequence: Synthetic oligonucleotide
uaucgaauuucucgaucuc

SEQ ID NO: 2735062 - RNA, 19 nt, Artificial Sequence
  Description of Artificial Sequence: Synthetic oligonucleotide
uuucgacuuaucgaauuuc

SEQ ID NO: 2735063 - RNA, 19 nt, Artificial Sequence
  Description of Artificial Sequence: Synthetic oligonucleotide
aucucagccauaucggguu

SEQ ID NO: 2735064 - RNA, 19 nt, Artificial Sequence
  Description of Artificial Sequence: Synthetic oligonucleotide
aucgaauuucucgaucuca

SEQ ID NO: 2735065 - RNA, 19 nt, Artificial Sequence
  Description of Artificial Sequence: Synthetic oligonucleotide
cugccagccagaccgacag

SEQ ID NO: 2735066 - RNA, 19 nt, Artificial Sequence
  Description of Artificial Sequence: Synthetic oligonucleotide
ugucuucuucaauuucgac

SEQ ID NO: 2735067 - RNA, 19 nt, Artificial Sequence
  Description of Artificial Sequence: Synthetic oligonucleotide
agaaggcaaugcuugugga

SEQ ID NO: 2735068 - RNA, 19 nt, Artificial Sequence
  Description of Artificial Sequence: Synthetic oligonucleotide
acuuaucgaauuucucgau

SEQ ID NO: 2735069 - RNA, 19 nt, Artificial Sequence
  Description of Artificial Sequence: Synthetic oligonucleotide
uuacaaaguuaaacagcua

SEQ ID NO: 2735070 - RNA, 19 nt, Artificial Sequence
  Description of Artificial Sequence: Synthetic oligonucleotide
auauuggcggcgcucgccu

SEQ ID NO: 2735071 - RNA, 19 nt, Artificial Sequence
  Description of Artificial Sequence: Synthetic oligonucleotide
guuucugucuucuucaauu

SEQ ID NO: 2735072 - RNA, 19 nt, Artificial Sequence
  Description of Artificial Sequence: Synthetic oligonucleotide
ggagaguaggaucugcuca

SEQ ID NO: 2735073 - RNA, 19 nt, Artificial Sequence
  Description of Artificial Sequence: Synthetic oligonucleotide
uucccucccugccagccag

SEQ ID NO: 2735074 - RNA, 19 nt, Artificial Sequence
  Description of Artificial Sequence: Synthetic oligonucleotide
ucaguaguucugauucuuu

SEQ ID NO: 2735075 - RNA, 19 nt, Artificial Sequence
  Description of Artificial Sequence: Synthetic oligonucleotide
aucguuucuuuugaaggca

SEQ ID NO: 2735076 - RNA, 19 nt, Artificial Sequence
  Description of Artificial Sequence: Synthetic oligonucleotide
guucugauucuuugaugug

SEQ ID NO: 2735077 - RNA, 19 nt, Artificial Sequence
  Description of Artificial Sequence: Synthetic oligonucleotide
uucaaucguuucuuuugaa

SEQ ID NO: 2735078 - RNA, 19 nt, Artificial Sequence
  Description of Artificial Sequence: Synthetic oligonucleotide
acaaaguuaaacagcuaaa

SEQ ID NO: 2735079 - RNA, 19 nt, Artificial Sequence
  Description of Artificial Sequence: Synthetic oligonucleotide
ugcaucuuacaaaguuaaa

SEQ ID NO: 2735080 - RNA, 19 nt, Artificial Sequence
  Description of Artificial Sequence: Synthetic oligonucleotide
acaccuuggaccaucuuga

SEQ ID NO: 2735081 - RNA, 19 nt, Artificial Sequence
  Description of Artificial Sequence: Synthetic oligonucleotide
gaaggcaaugcuuguggaa

SEQ ID NO: 2735082 - RNA, 19 nt, Artificial Sequence
  Description of Artificial Sequence: Synthetic oligonucleotide
cugcauuuuacauccugca

SEQ ID NO: 2735083 - RNA, 19 nt, Artificial Sequence
  Description of Artificial Sequence: Synthetic oligonucleotide
ggaaagagcgagcgaggcg

SEQ ID NO: 2735084 - RNA, 19 nt, Artificial Sequence
  Description of Artificial Sequence: Synthetic oligonucleotide
aaacuuuuauuugcauauu

SEQ ID NO: 2735085 - RNA, 19 nt, Artificial Sequence
  Description of Artificial Sequence: Synthetic oligonucleotide
ucuugcguuucugucuucu

SEQ ID NO: 2735086 - RNA, 19 nt, Artificial Sequence
  Description of Artificial Sequence: Synthetic oligonucleotide
uucuucaauuucgacuuau

SEQ ID NO: 2735087 - RNA, 19 nt, Artificial Sequence
  Description of Artificial Sequence: Synthetic oligonucleotide
gaaaggggcagcacaguca

SEQ ID NO: 2735088 - RNA, 19 nt, Artificial Sequence
  Description of Artificial Sequence: Synthetic oligonucleotide
uugaugugaaaggggcagc

SEQ ID NO: 2735089 - RNA, 19 nt, Artificial Sequence
  Description of Artificial Sequence: Synthetic oligonucleotide
gugcauuccaauaauuaaa

SEQ ID NO: 2735090 - RNA, 19 nt, Artificial Sequence
  Description of Artificial Sequence: Synthetic oligonucleotide
cuuugaugugaaaggggca

SEQ ID NO: 2735091 - RNA, 19 nt, Artificial Sequence
  Description of Artificial Sequence: Synthetic oligonucleotide
auuuuacauccugcaggac

SEQ ID NO: 2735092 - RNA, 19 nt, Artificial Sequence
  Description of Artificial Sequence: Synthetic oligonucleotide
auggcacucugaucaaacu

SEQ ID NO: 2735093 - RNA, 19 nt, Artificial Sequence
  Description of Artificial Sequence: Synthetic oligonucleotide
aggcaaugcuuguggaaug

SEQ ID NO: 2735094 - RNA, 19 nt, Artificial Sequence
  Description of Artificial Sequence: Synthetic oligonucleotide
ugcuuguggaauguacagu

SEQ ID NO: 2735095 - RNA, 19 nt, Artificial Sequence
  Description of Artificial Sequence: Synthetic oligonucleotide
agaccgacagauggguggg

SEQ ID NO: 2735096 - RNA, 19 nt, Artificial Sequence
  Description of Artificial Sequence: Synthetic oligonucleotide
ccaacaugcaaguucuuuc

SEQ ID NO: 2735097 - RNA, 19 nt, Artificial Sequence
  Description of Artificial Sequence: Synthetic oligonucleotide
caaguucuuucccucccug

SEQ ID NO: 2735098 - RNA, 19 nt, Artificial Sequence
  Description of Artificial Sequence: Synthetic oligonucleotide
caaccucuuugcaucuuac

SEQ ID NO: 2735099 - RNA, 19 nt, Artificial Sequence
  Description of Artificial Sequence: Synthetic oligonucleotide
gaugggugggagaggcagg

SEQ ID NO: 2735100 - RNA, 19 nt, Artificial Sequence
  Description of Artificial Sequence: Synthetic oligonucleotide
cuuugcaucuuacaaaguu

SEQ ID NO: 2735101 - RNA, 19 nt, Artificial Sequence
  Description of Artificial Sequence: Synthetic oligonucleotide
uucuccuguucaaucguuu

SEQ ID NO: 2735102 - RNA, 19 nt, Artificial Sequence
  Description of Artificial Sequence: Synthetic oligonucleotide
ccucauuacgauucgccag

SEQ ID NO: 2735103 - RNA, 19 nt, Artificial Sequence
  Description of Artificial Sequence: Synthetic oligonucleotide
guauuucaccaccucccac

SEQ ID NO: 2735104 - RNA, 19 nt, Artificial Sequence
  Description of Artificial Sequence: Synthetic oligonucleotide
cauauuggcggcgcucgcc

SEQ ID NO: 2735105 - RNA, 19 nt, Artificial Sequence
  Description of Artificial Sequence: Synthetic oligonucleotide
ucugaucaaacugcauuuu

SEQ ID NO: 2735106 - RNA, 19 nt, Artificial Sequence
  Description of Artificial Sequence: Synthetic oligonucleotide
gcaggggaggccuuccugg

SEQ ID NO: 2735107 - RNA, 19 nt, Artificial Sequence
  Description of Artificial Sequence: Synthetic oligonucleotide
aggcgcacgaacgaggaga

SEQ ID NO: 2735108 - RNA, 19 nt, Artificial Sequence
  Description of Artificial Sequence: Synthetic oligonucleotide
cucgccucauuacgauucg

SEQ ID NO: 2735109 - RNA, 19 nt, Artificial Sequence
  Description of Artificial Sequence: Synthetic oligonucleotide
guaguucugauucuuugau

SEQ ID NO: 2735110 - RNA, 19 nt, Artificial Sequence
  Description of Artificial Sequence: Synthetic oligonucleotide
cacgaacgaggagaguagg

SEQ ID NO: 2735111 - RNA, 19 nt, Artificial Sequence
  Description of Artificial Sequence: Synthetic oligonucleotide
cagguuuuaaaacuuuuau

SEQ ID NO: 2735112 - RNA, 19 nt, Artificial Sequence
  Description of Artificial Sequence: Synthetic oligonucleotide
gaugugaaaggggcagcac

SEQ ID NO: 2735113 - RNA, 19 nt, Artificial Sequence
  Description of Artificial Sequence: Synthetic oligonucleotide
aaauggcacucugaucaaa

SEQ ID NO: 2735114 - RNA, 19 nt, Artificial Sequence
  Description of Artificial Sequence: Synthetic oligonucleotide
gccggaaagagcgagcgag

SEQ ID NO: 2735115 - RNA, 19 nt, Artificial Sequence
  Description of Artificial Sequence: Synthetic oligonucleotide
agagcgagcgaggcgcacg

SEQ ID NO: 2735116 - RNA, 19 nt, Artificial Sequence
  Description of Artificial Sequence: Synthetic oligonucleotide
cugucuucuucaauuucga

SEQ ID NO: 2735117 - RNA, 19 nt, Artificial Sequence
  Description of Artificial Sequence: Synthetic oligonucleotide
uuugaaggcagaggauuuu

SEQ ID NO: 2735118 - RNA, 19 nt, Artificial Sequence
  Description of Artificial Sequence: Synthetic oligonucleotide
uccuggucaguaguucuga

SEQ ID NO: 2735119 - RNA, 19 nt, Artificial Sequence
  Description of Artificial Sequence: Synthetic oligonucleotide
aggggcagcacagucauuu

SEQ ID NO: 2735120 - RNA, 19 nt, Artificial Sequence
  Description of Artificial Sequence: Synthetic oligonucleotide
uuucccucccugccagcca

SEQ ID NO: 2735121 - RNA, 19 nt, Artificial Sequence
  Description of Artificial Sequence: Synthetic oligonucleotide
agugcauauuggcggcgcu

SEQ ID NO: 2735122 - RNA, 19 nt, Artificial Sequence
  Description of Artificial Sequence: Synthetic oligonucleotide
gcagcacagucauuuaaac

SEQ ID NO: 2735123 - RNA, 19 nt, Artificial Sequence
  Description of Artificial Sequence: Synthetic oligonucleotide
aagagcgagcgaggcgcac

SEQ ID NO: 2735124 - RNA, 19 nt, Artificial Sequence
  Description of Artificial Sequence: Synthetic oligonucleotide
aggccuuccuggucaguag

SEQ ID NO: 2735125 - RNA, 19 nt, Artificial Sequence
  Description of Artificial Sequence: Synthetic oligonucleotide
acagugcauauuggcggcg

SEQ ID NO: 2735126 - RNA, 19 nt, Artificial Sequence
  Description of Artificial Sequence: Synthetic oligonucleotide
cacagucauuuaaacuuga

SEQ ID NO: 2735127 - RNA, 19 nt, Artificial Sequence
  Description of Artificial Sequence: Synthetic oligonucleotide
auuggcggcgcucgccuca

SEQ ID NO: 2735128 - RNA, 19 nt, Artificial Sequence
  Description of Artificial Sequence: Synthetic oligonucleotide
gaguaggaucugcucagaa

SEQ ID NO: 2735129 - RNA, 19 nt, Artificial Sequence
  Description of Artificial Sequence: Synthetic oligonucleotide
auugugcauuccaauaauu

SEQ ID NO: 2735130 - RNA, 19 nt, Artificial Sequence
  Description of Artificial Sequence: Synthetic oligonucleotide
ucagccauaucggguuugu

SEQ ID NO: 2735131 - RNA, 19 nt, Artificial Sequence
  Description of Artificial Sequence: Synthetic oligonucleotide
accgacagaugggugggag

SEQ ID NO: 2735132 - RNA, 19 nt, Artificial Sequence
  Description of Artificial Sequence: Synthetic oligonucleotide
ucauuacgauucgccagcu

SEQ ID NO: 2735133 - RNA, 19 nt, Artificial Sequence
  Description of Artificial Sequence: Synthetic oligonucleotide
uacgauucgccagcuugcu

SEQ ID NO: 2735134 - RNA, 19 nt, Artificial Sequence
  Description of Artificial Sequence: Synthetic oligonucleotide
auaucggguuugucagaca

SEQ ID NO: 2735135 - RNA, 19 nt, Artificial Sequence
  Description of Artificial Sequence: Synthetic oligonucleotide
uuucaccaccucccaccca

SEQ ID NO: 2735136 - RNA, 19 nt, Artificial Sequence
  Description of Artificial Sequence: Synthetic oligonucleotide
cugaucaaacugcauuuua

SEQ ID NO: 2735137 - RNA, 19 nt, Artificial Sequence
  Description of Artificial Sequence: Synthetic oligonucleotide
ugggagaggcaggggaggc

SEQ ID NO: 2735138 - RNA, 19 nt, Artificial Sequence
  Description of Artificial Sequence: Synthetic oligonucleotide
agccagaccgacagauggg

SEQ ID NO: 2735139 - RNA, 19 nt, Artificial Sequence
  Description of Artificial Sequence: Synthetic oligonucleotide
guugccggaaagagcgagc

SEQ ID NO: 2735140 - RNA, 19 nt, Artificial Sequence
  Description of Artificial Sequence: Synthetic oligonucleotide
cucugaucaaacugcauuu

SEQ ID NO: 2735141 - RNA, 19 nt, Artificial Sequence
  Description of Artificial Sequence: Synthetic oligonucleotide
cgauucgccagcuugcuuc

SEQ ID NO: 2735142 - RNA, 19 nt, Artificial Sequence
  Description of Artificial Sequence: Synthetic oligonucleotide
cagugcauauuggcggcgc

SEQ ID NO: 2735143 - RNA, 19 nt, Artificial Sequence
  Description of Artificial Sequence: Synthetic oligonucleotide
gaucucagccauaucgggu

SEQ ID NO: 2735144 - RNA, 19 nt, Artificial Sequence
  Description of Artificial Sequence: Synthetic oligonucleotide
agcgaggcgcacgaacgag

SEQ ID NO: 2735145 - RNA, 19 nt, Artificial Sequence
  Description of Artificial Sequence: Synthetic oligonucleotide
ucgccagcuugcuucuccu

SEQ ID NO: 2735146 - RNA, 19 nt, Artificial Sequence
  Description of Artificial Sequence: Synthetic oligonucleotide
ugccggaaagagcgagcga

SEQ ID NO: 2735147 - RNA, 19 nt, Artificial Sequence
  Description of Artificial Sequence: Synthetic oligonucleotide
gaggcgcacgaacgaggag

SEQ ID NO: 2735148 - RNA, 19 nt, Artificial Sequence
  Description of Artificial Sequence: Synthetic oligonucleotide
gguugccggaaagagcgag

SEQ ID NO: 2735149 - RNA, 19 nt, Artificial Sequence
  Description of Artificial Sequence: Synthetic oligonucleotide
guggaauguacagugcaua

SEQ ID NO: 2735150 - RNA, 19 nt, Artificial Sequence
  Description of Artificial Sequence: Synthetic oligonucleotide
acagucauuuaaacuugau

SEQ ID NO: 2735151 - RNA, 19 nt, Artificial Sequence
  Description of Artificial Sequence: Synthetic oligonucleotide
aaagagcgagcgaggcgca

SEQ ID NO: 2735152 - RNA, 19 nt, Artificial Sequence
  Description of Artificial Sequence: Synthetic oligonucleotide
gccucauuacgauucgcca

SEQ ID NO: 2735153 - RNA, 19 nt, Artificial Sequence
  Description of Artificial Sequence: Synthetic oligonucleotide
ucucagccauaucggguuu

SEQ ID NO: 2735154 - RNA, 19 nt, Artificial Sequence
  Description of Artificial Sequence: Synthetic oligonucleotide
cgagcgaggcgcacgaacg

SEQ ID NO: 2735155 - RNA, 19 nt, Artificial Sequence
  Description of Artificial Sequence: Synthetic oligonucleotide
ccuuggaccaucuugaauu

SEQ ID NO: 2735156 - RNA, 19 nt, Artificial Sequence
  Description of Artificial Sequence: Synthetic oligonucleotide
aaacuugauccaaccucuu

SEQ ID NO: 2735157 - RNA, 19 nt, Artificial Sequence
  Description of Artificial Sequence: Synthetic oligonucleotide
cuuccuggucaguaguucu

SEQ ID NO: 2735158 - RNA, 19 nt, Artificial Sequence
  Description of Artificial Sequence: Synthetic oligonucleotide
ucaccaccucccacccagc

SEQ ID NO: 2735159 - RNA, 19 nt, Artificial Sequence
  Description of Artificial Sequence: Synthetic oligonucleotide
uuucucgaucucagccaua

SEQ ID NO: 2735160 - RNA, 19 nt, Artificial Sequence
  Description of Artificial Sequence: Synthetic oligonucleotide
acgaacgaggagaguagga

SEQ ID NO: 2735161 - RNA, 19 nt, Artificial Sequence
  Description of Artificial Sequence: Synthetic oligonucleotide
ugguugccggaaagagcga

SEQ ID NO: 2735162 - RNA, 19 nt, Artificial Sequence
  Description of Artificial Sequence: Synthetic oligonucleotide
cagcacagucauuuaaacu

SEQ ID NO: 2735163 - RNA, 19 nt, Artificial Sequence
  Description of Artificial Sequence: Synthetic oligonucleotide
gauucgccagcuugcuucu

SEQ ID NO: 2735164 - RNA, 19 nt, Artificial Sequence
  Description of Artificial Sequence: Synthetic oligonucleotide
agaguaggaucugcucaga

SEQ ID NO: 2735165 - RNA, 19 nt, Artificial Sequence
  Description of Artificial Sequence: Synthetic oligonucleotide
gagcgaggcgcacgaacga

SEQ ID NO: 2735166 - RNA, 19 nt, Artificial Sequence
  Description of Artificial Sequence: Synthetic oligonucleotide
aaacugcauuuuacauccu

SEQ ID NO: 2735167 - RNA, 19 nt, Artificial Sequence
  Description of Artificial Sequence: Synthetic oligonucleotide
gagcgagcgaggcgcacga

SEQ ID NO: 2735168 - RNA, 19 nt, Artificial Sequence
  Description of Artificial Sequence: Synthetic oligonucleotide
ccucuuugcaucuuacaaa

SEQ ID NO: 2735169 - RNA, 19 nt, Artificial Sequence
  Description of Artificial Sequence: Synthetic oligonucleotide
gaggagaguaggaucugcu

SEQ ID NO: 2735170 - RNA, 19 nt, Artificial Sequence
  Description of Artificial Sequence: Synthetic oligonucleotide
uuucaccaacaugcaaguu

SEQ ID NO: 2735171 - RNA, 19 nt, Artificial Sequence
  Description of Artificial Sequence: Synthetic oligonucleotide
ggggaggccuuccugguca

SEQ ID NO: 2735172 - RNA, 19 nt, Artificial Sequence
  Description of Artificial Sequence: Synthetic oligonucleotide
aucggguuugucagacaug

SEQ ID NO: 2735173 - RNA, 19 nt, Artificial Sequence
  Description of Artificial Sequence: Synthetic oligonucleotide
cgaauuucucgaucucagc

SEQ ID NO: 2735174 - RNA, 19 nt, Artificial Sequence
  Description of Artificial Sequence: Synthetic oligonucleotide
cgccucauuacgauucgcc

SEQ ID NO: 2735175 - RNA, 19 nt, Artificial Sequence
  Description of Artificial Sequence: Synthetic oligonucleotide
ucgccucauuacgauucgc

SEQ ID NO: 2735176 - RNA, 19 nt, Artificial Sequence
  Description of Artificial Sequence: Synthetic oligonucleotide
ggguuugucagacaugguu

SEQ ID NO: 2735177 - RNA, 19 nt, Artificial Sequence
  Description of Artificial Sequence: Synthetic oligonucleotide
cucagccauaucggguuug

SEQ ID NO: 2735178 - RNA, 19 nt, Artificial Sequence
  Description of Artificial Sequence: Synthetic oligonucleotide
cagcuugcuucuccuguuc

SEQ ID NO: 2735179 - RNA, 19 nt, Artificial Sequence
  Description of Artificial Sequence: Synthetic oligonucleotide
caggacaccuuggaccauc

SEQ ID NO: 2735180 - RNA, 19 nt, Artificial Sequence
  Description of Artificial Sequence: Synthetic oligonucleotide
gcacgaacgaggagaguag

SEQ ID NO: 2735181 - RNA, 19 nt, Artificial Sequence
  Description of Artificial Sequence: Synthetic oligonucleotide
ccggaaagagcgagcgagg

SEQ ID NO: 2735182 - RNA, 19 nt, Artificial Sequence
  Description of Artificial Sequence: Synthetic oligonucleotide
gggugggagaggcagggga

SEQ ID NO: 2735183 - RNA, 19 nt, Artificial Sequence
  Description of Artificial Sequence: Synthetic oligonucleotide
gcucgccucauuacgauuc

SEQ ID NO: 2735184 - RNA, 19 nt, Artificial Sequence
  Description of Artificial Sequence: Synthetic oligonucleotide
gaggccuuccuggucagua

SEQ ID NO: 2735185 - RNA, 19 nt, Artificial Sequence
  Description of Artificial Sequence: Synthetic oligonucleotide
uauuggcggcgcucgccuc

SEQ ID NO: 2735186 - RNA, 19 nt, Artificial Sequence
  Description of Artificial Sequence: Synthetic oligonucleotide
acgaggagaguaggaucug

SEQ ID NO: 2735187 - RNA, 19 nt, Artificial Sequence
  Description of Artificial Sequence: Synthetic oligonucleotide
cagcuaaaagaaguaaaau

SEQ ID NO: 2735188 - RNA, 19 nt, Artificial Sequence
  Description of Artificial Sequence: Synthetic oligonucleotide
ggcgcacgaacgaggagag

SEQ ID NO: 2735189 - RNA, 19 nt, Artificial Sequence
  Description of Artificial Sequence: Synthetic oligonucleotide
accaccucccacccagcuu

SEQ ID NO: 2735190 - RNA, 19 nt, Artificial Sequence
  Description of Artificial Sequence: Synthetic oligonucleotide
cgacagaugggugggagag

SEQ ID NO: 2735191 - RNA, 19 nt, Artificial Sequence
  Description of Artificial Sequence: Synthetic oligonucleotide
ggcagcacagucauuuaaa

SEQ ID NO: 2735192 - RNA, 19 nt, Artificial Sequence
  Description of Artificial Sequence: Synthetic oligonucleotide
gugcauauuggcggcgcuc

SEQ ID NO: 2735193 - RNA, 19 nt, Artificial Sequence
  Description of Artificial Sequence: Synthetic oligonucleotide
caauuucgacuuaucgaau

SEQ ID NO: 2735194 - RNA, 19 nt, Artificial Sequence
  Description of Artificial Sequence: Synthetic oligonucleotide
gucagacaugguugccgga

SEQ ID NO: 2735195 - RNA, 19 nt, Artificial Sequence
  Description of Artificial Sequence: Synthetic oligonucleotide
ggcaggggaggccuuccug

SEQ ID NO: 2735196 - RNA, 19 nt, Artificial Sequence
  Description of Artificial Sequence: Synthetic oligonucleotide
ugccagccagaccgacaga

SEQ ID NO: 2735197 - RNA, 19 nt, Artificial Sequence
  Description of Artificial Sequence: Synthetic oligonucleotide
acgauucgccagcuugcuu

SEQ ID NO: 2735198 - RNA, 19 nt, Artificial Sequence
  Description of Artificial Sequence: Synthetic oligonucleotide
gcgaggcgcacgaacgagg

SEQ ID NO: 2735199 - RNA, 19 nt, Artificial Sequence
  Description of Artificial Sequence: Synthetic oligonucleotide
gcgagcgaggcgcacgaac

SEQ ID NO: 2735200 - RNA, 19 nt, Artificial Sequence
  Description of Artificial Sequence: Synthetic oligonucleotide
cuuggaccaucuugaauuu

SEQ ID NO: 2735201 - RNA, 19 nt, Artificial Sequence
  Description of Artificial Sequence: Synthetic oligonucleotide
ucccugccagccagaccga

SEQ ID NO: 2735202 - RNA, 19 nt, Artificial Sequence
  Description of Artificial Sequence: Synthetic oligonucleotide
auucgccagcuugcuucuc

SEQ ID NO: 2735203 - RNA, 19 nt, Artificial Sequence
  Description of Artificial Sequence: Synthetic oligonucleotide
gggcagcacagucauuuaa

SEQ ID NO: 2735204 - RNA, 19 nt, Artificial Sequence
  Description of Artificial Sequence: Synthetic oligonucleotide
gucaguaguucugauucuu

SEQ ID NO: 2735205 - RNA, 19 nt, Artificial Sequence
  Description of Artificial Sequence: Synthetic oligonucleotide
gcauuccaauaauuaaaau

SEQ ID NO: 2735206 - RNA, 19 nt, Artificial Sequence
  Description of Artificial Sequence: Synthetic oligonucleotide
cuggucaguaguucugauu

SEQ ID NO: 2735207 - RNA, 19 nt, Artificial Sequence
  Description of Artificial Sequence: Synthetic oligonucleotide
cuugcuucuccuguucaau

SEQ ID NO: 2735208 - RNA, 19 nt, Artificial Sequence
  Description of Artificial Sequence: Synthetic oligonucleotide
gcauauuggcggcgcucgc

SEQ ID NO: 2735209 - RNA, 19 nt, Artificial Sequence
  Description of Artificial Sequence: Synthetic oligonucleotide
uccaaccucuuugcaucuu

SEQ ID NO: 2735210 - RNA, 19 nt, Artificial Sequence
  Description of Artificial Sequence: Synthetic oligonucleotide
gcacucugaucaaacugca

SEQ ID NO: 2735211 - RNA, 19 nt, Artificial Sequence
  Description of Artificial Sequence: Synthetic oligonucleotide
cuucuucaauuucgacuua

SEQ ID NO: 2735212 - RNA, 19 nt, Artificial Sequence
  Description of Artificial Sequence: Synthetic oligonucleotide
cucuugcguuucugucuuc

SEQ ID NO: 2735213 - RNA, 19 nt, Artificial Sequence
  Description of Artificial Sequence: Synthetic oligonucleotide
ccagaccgacagaugggug

SEQ ID NO: 2735214 - RNA, 19 nt, Artificial Sequence
  Description of Artificial Sequence: Synthetic oligonucleotide
acauccugcaggacaccuu

SEQ ID NO: 2735215 - RNA, 19 nt, Artificial Sequence
  Description of Artificial Sequence: Synthetic oligonucleotide
ccagccagaccgacagaug

SEQ ID NO: 2735216 - RNA, 19 nt, Artificial Sequence
  Description of Artificial Sequence: Synthetic oligonucleotide
cggaaagagcgagcgaggc

SEQ ID NO: 2735217 - RNA, 19 nt, Artificial Sequence
  Description of Artificial Sequence: Synthetic oligonucleotide
ggucaguaguucugauucu

SEQ ID NO: 2735218 - RNA, 19 nt, Artificial Sequence
  Description of Artificial Sequence: Synthetic oligonucleotide
ccuuccuggucaguaguuc

SEQ ID NO: 2735219 - RNA, 19 nt, Artificial Sequence
  Description of Artificial Sequence: Synthetic oligonucleotide
cagaugggugggagaggca

SEQ ID NO: 2735220 - RNA, 19 nt, Artificial Sequence
  Description of Artificial Sequence: Synthetic oligonucleotide
cuucuccuguucaaucguu

SEQ ID NO: 2735221 - RNA, 19 nt, Artificial Sequence
  Description of Artificial Sequence: Synthetic oligonucleotide
gggaggccuuccuggucag

SEQ ID NO: 2735222 - RNA, 19 nt, Artificial Sequence
  Description of Artificial Sequence: Synthetic oligonucleotide
gccagcuugcuucuccugu

SEQ ID NO: 2735223 - RNA, 19 nt, Artificial Sequence
  Description of Artificial Sequence: Synthetic oligonucleotide
cgaggagaguaggaucugc

SEQ ID NO: 2735224 - RNA, 19 nt, Artificial Sequence
  Description of Artificial Sequence: Synthetic oligonucleotide
ggcgcucgccucauuacga

SEQ ID NO: 2735225 - RNA, 19 nt, Artificial Sequence
  Description of Artificial Sequence: Synthetic oligonucleotide
cagccauaucggguuuguc

SEQ ID NO: 2735226 - RNA, 19 nt, Artificial Sequence
  Description of Artificial Sequence: Synthetic oligonucleotide
gcaaguucuuucccucccu

SEQ ID NO: 2735227 - RNA, 19 nt, Artificial Sequence
  Description of Artificial Sequence: Synthetic oligonucleotide
gugaaaggggcagcacagu

SEQ ID NO: 2735228 - RNA, 19 nt, Artificial Sequence
  Description of Artificial Sequence: Synthetic oligonucleotide
ggcaaugcuuguggaaugu

SEQ ID NO: 2735229 - RNA, 19 nt, Artificial Sequence
  Description of Artificial Sequence: Synthetic oligonucleotide
gcggcgcucgccucauuac

SEQ ID NO: 2735230 - RNA, 19 nt, Artificial Sequence
  Description of Artificial Sequence: Synthetic oligonucleotide
ggagaggcaggggaggccu

SEQ ID NO: 2735231 - RNA, 19 nt, Artificial Sequence
  Description of Artificial Sequence: Synthetic oligonucleotide
ggaauguacagugcauauu

SEQ ID NO: 2735232 - RNA, 19 nt, Artificial Sequence
  Description of Artificial Sequence: Synthetic oligonucleotide
cacucugaucaaacugcau

SEQ ID NO: 2735233 - RNA, 19 nt, Artificial Sequence
  Description of Artificial Sequence: Synthetic oligonucleotide
cggcgcucgccucauuacg

SEQ ID NO: 2735234 - RNA, 19 nt, Artificial Sequence
  Description of Artificial Sequence: Synthetic oligonucleotide
gaccgacagauggguggga

SEQ ID NO: 2735235 - RNA, 19 nt, Artificial Sequence
  Description of Artificial Sequence: Synthetic oligonucleotide
gcguuucugucuucuucaa

SEQ ID NO: 2735236 - RNA, 19 nt, Artificial Sequence
  Description of Artificial Sequence: Synthetic oligonucleotide
ccauaucggguuugucaga

SEQ ID NO: 2735237 - RNA, 19 nt, Artificial Sequence
  Description of Artificial Sequence: Synthetic oligonucleotide
ccaaccucuuugcaucuua

SEQ ID NO: 2735238 - RNA, 19 nt, Artificial Sequence
  Description of Artificial Sequence: Synthetic oligonucleotide
uuggcggcgcucgccucau

SEQ ID NO: 2735239 - RNA, 19 nt, Artificial Sequence
  Description of Artificial Sequence: Synthetic oligonucleotide
cgcacgaacgaggagagua

SEQ ID NO: 2735240 - RNA, 19 nt, Artificial Sequence
  Description of Artificial Sequence: Synthetic oligonucleotide
ggccuuccuggucaguagu

SEQ ID NO: 2735241 - RNA, 19 nt, Artificial Sequence
  Description of Artificial Sequence: Synthetic oligonucleotide
ggcggcgcucgccucauua

SEQ ID NO: 2735242 - RNA, 19 nt, Artificial Sequence
  Description of Artificial Sequence: Synthetic oligonucleotide
ccgacagaugggugggaga

SEQ ID NO: 2735243 - RNA, 19 nt, Artificial Sequence
  Description of Artificial Sequence: Synthetic oligonucleotide
caggggaggccuuccuggu

SEQ ID NO: 2735244 - RNA, 19 nt, Artificial Sequence
  Description of Artificial Sequence: Synthetic oligonucleotide
gccagaccgacagaugggu

SEQ ID NO: 2735245 - RNA, 19 nt, Artificial Sequence
  Description of Artificial Sequence: Synthetic oligonucleotide
ccucccugccagccagacc

SEQ ID NO: 2735246 - RNA, 19 nt, Artificial Sequence
  Description of Artificial Sequence: Synthetic oligonucleotide
ccugccagccagaccgaca

SEQ ID NO: 2735247 - RNA, 19 nt, Artificial Sequence
  Description of Artificial Sequence: Synthetic oligonucleotide
cgaggcgcacgaacgagga

SEQ ID NO: 2735248 - RNA, 19 nt, Artificial Sequence
  Description of Artificial Sequence: Synthetic oligonucleotide
gccagccagaccgacagau

SEQ ID NO: 2735249 - RNA, 19 nt, Artificial Sequence
  Description of Artificial Sequence: Synthetic oligonucleotide
caccaccucccacccagcu

SEQ ID NO: 2735250 - RNA, 19 nt, Artificial Sequence
  Description of Artificial Sequence: Synthetic oligonucleotide
cauuacgauucgccagcuu

SEQ ID NO: 2735251 - RNA, 19 nt, Artificial Sequence
  Description of Artificial Sequence: Synthetic oligonucleotide
ggggcagcacagucauuua

SEQ ID NO: 2735252 - RNA, 19 nt, Artificial Sequence
  Description of Artificial Sequence: Synthetic oligonucleotide
ccaccucccacccagcuuu

SEQ ID NO: 2735253 - RNA, 19 nt, Artificial Sequence
  Description of Artificial Sequence: Synthetic oligonucleotide
agcgagcgaggcgcacgaa

SEQ ID NO: 2735254 - RNA, 19 nt, Artificial Sequence
  Description of Artificial Sequence: Synthetic oligonucleotide
cgaacgaggagaguaggau

SEQ ID NO: 2735255 - RNA, 19 nt, Artificial Sequence
  Description of Artificial Sequence: Synthetic oligonucleotide
caccaacaugcaaguucuu

SEQ ID NO: 2735256 - RNA, 19 nt, Artificial Sequence
  Description of Artificial Sequence: Synthetic oligonucleotide
ccagcuugcuucuccuguu

SEQ ID NO: 2735257 - RNA, 19 nt, Artificial Sequence
  Description of Artificial Sequence: Synthetic oligonucleotide
gcgcucgccucauuacgau

SEQ ID NO: 2735258 - RNA, 19 nt, Artificial Sequence
  Description of Artificial Sequence: Synthetic oligonucleotide
uggcggcgcucgccucauu

SEQ ID NO: 2735259 - RNA, 19 nt, Artificial Sequence
  Description of Artificial Sequence: Synthetic oligonucleotide
ccuggucaguaguucugau

SEQ ID NO: 2735260 - RNA, 19 nt, Artificial Sequence
  Description of Artificial Sequence: Synthetic oligonucleotide
cccugccagccagaccgac

SEQ ID NO: 2735261 - RNA, 19 nt, Artificial Sequence
  Description of Artificial Sequence: Synthetic oligonucleotide
cguuucugucuucuucaau

SEQ ID NO: 2735262 - RNA, 19 nt, Artificial Sequence
  Description of Artificial Sequence: Synthetic oligonucleotide
ggacaccuuggaccaucuu

SEQ ID NO: 2735263 - RNA, 19 nt, Artificial Sequence
  Description of Artificial Sequence: Synthetic oligonucleotide
gccuuccuggucaguaguu

SEQ ID NO: 2735264 - RNA, 19 nt, Artificial Sequence
  Description of Artificial Sequence: Synthetic oligonucleotide
caccucccacccagcuuuu

SEQ ID NO: 2735265 - RNA, 19 nt, Artificial Sequence
  Description of Artificial Sequence: Synthetic oligonucleotide
ggaggccuuccuggucagu

SEQ ID NO: 2735266 - RNA, 19 nt, Artificial Sequence
  Description of Artificial Sequence: Synthetic oligonucleotide
cggguuugucagacauggu

SEQ ID NO: 2735267 - RNA, 19 nt, Artificial Sequence
  Description of Artificial Sequence: Synthetic oligonucleotide
gcaggacaccuuggaccau

SEQ ID NO: 2735268 - RNA, 19 nt, Artificial Sequence
  Description of Artificial Sequence: Synthetic oligonucleotide
gcgcacgaacgaggagagu

SEQ ID NO: 2735269 - RNA, 19 nt, Artificial Sequence
  Description of Artificial Sequence: Synthetic oligonucleotide
cgcucgccucauuacgauu

SEQ ID NO: 2735270 - RNA, 19 nt, Artificial Sequence
  Description of Artificial Sequence: Synthetic oligonucleotide
uguaauauaaacaaaauca

SEQ ID NO: 2735271 - RNA, 19 nt, Artificial Sequence
  Description of Artificial Sequence: Synthetic oligonucleotide
aacuuuaaaacugauaagg

SEQ ID NO: 2735272 - RNA, 19 nt, Artificial Sequence
  Description of Artificial Sequence: Synthetic oligonucleotide
aauacucucugguacaacg

SEQ ID NO: 2735273 - RNA, 19 nt, Artificial Sequence
  Description of Artificial Sequence: Synthetic oligonucleotide
uuuaaucugaagaucauca

SEQ ID NO: 2735274 - RNA, 19 nt, Artificial Sequence
  Description of Artificial Sequence: Synthetic oligonucleotide
aaaggguuuaaucugaaga

SEQ ID NO: 2735275 - RNA, 19 nt, Artificial Sequence
  Description of Artificial Sequence: Synthetic oligonucleotide
ucauuaaugaaggagaaag

SEQ ID NO: 2735276 - RNA, 19 nt, Artificial Sequence
  Description of Artificial Sequence: Synthetic oligonucleotide
aaggcuuugauccuugcac

SEQ ID NO: 2735277 - RNA, 19 nt, Artificial Sequence
  Description of Artificial Sequence: Synthetic oligonucleotide
gugauaaauaucaagaagg

SEQ ID NO: 2735278 - RNA, 19 nt, Artificial Sequence
  Description of Artificial Sequence: Synthetic oligonucleotide
uuuguuuugacauuccuug

SEQ ID NO: 2735279 - RNA, 19 nt, Artificial Sequence
  Description of Artificial Sequence: Synthetic oligonucleotide
ugauaaauaucaagaaggg

SEQ ID NO: 2735280 - RNA, 19 nt, Artificial Sequence
  Description of Artificial Sequence: Synthetic oligonucleotide
ucagaggugauaaauauca

SEQ ID NO: 2735281 - RNA, 19 nt, Artificial Sequence
  Description of Artificial Sequence: Synthetic oligonucleotide
aacaugacaauacaagucu

SEQ ID NO: 2735282 - RNA, 19 nt, Artificial Sequence
  Description of Artificial Sequence: Synthetic oligonucleotide
aagaucaucauuaaugaag

SEQ ID NO: 2735283 - RNA, 19 nt, Artificial Sequence
  Description of Artificial Sequence: Synthetic oligonucleotide
aaaguuuuaacaucugaga

SEQ ID NO: 2735284 - RNA, 19 nt, Artificial Sequence
  Description of Artificial Sequence: Synthetic oligonucleotide
uauaacugaaaguaaaacu

SEQ ID NO: 2735285 - RNA, 19 nt, Artificial Sequence
  Description of Artificial Sequence: Synthetic oligonucleotide
agcuaauucaccuauaacu

SEQ ID NO: 2735286 - RNA, 19 nt, Artificial Sequence
  Description of Artificial Sequence: Synthetic oligonucleotide
ucaucauuaaugaaggaga

SEQ ID NO: 2735287 - RNA, 19 nt, Artificial Sequence
  Description of Artificial Sequence: Synthetic oligonucleotide
acuacuguaauauaaacaa

SEQ ID NO: 2735288 - RNA, 19 nt, Artificial Sequence
  Description of Artificial Sequence: Synthetic oligonucleotide
uuuggaaaaugucagcucc

SEQ ID NO: 2735289 - RNA, 19 nt, Artificial Sequence
  Description of Artificial Sequence: Synthetic oligonucleotide
auuccuugcacauugguuc

SEQ ID NO: 2735290 - RNA, 19 nt, Artificial Sequence
  Description of Artificial Sequence: Synthetic oligonucleotide
ugguguauagauuuuggcg

SEQ ID NO: 2735291 - RNA, 19 nt, Artificial Sequence
  Description of Artificial Sequence: Synthetic oligonucleotide
cugaagaucaucauuaaug

SEQ ID NO: 2735292 - RNA, 19 nt, Artificial Sequence
  Description of Artificial Sequence: Synthetic oligonucleotide
auugguucaaaagaaaccg

SEQ ID NO: 2735293 - RNA, 19 nt, Artificial Sequence
  Description of Artificial Sequence: Synthetic oligonucleotide
gacaauacaagucuuacca

SEQ ID NO: 2735294 - RNA, 19 nt, Artificial Sequence
  Description of Artificial Sequence: Synthetic oligonucleotide
ugcacauugguucaaaaga

SEQ ID NO: 2735295 - RNA, 19 nt, Artificial Sequence
  Description of Artificial Sequence: Synthetic oligonucleotide
uaaaaggacauucaaaguu

SEQ ID NO: 2735296 - RNA, 19 nt, Artificial Sequence
  Description of Artificial Sequence: Synthetic oligonucleotide
ugaaggagaaagaugaggu

SEQ ID NO: 2735297 - RNA, 19 nt, Artificial Sequence
  Description of Artificial Sequence: Synthetic oligonucleotide
aaagaaaccgcagucaaug

SEQ ID NO: 2735298 - RNA, 19 nt, Artificial Sequence
  Description of Artificial Sequence: Synthetic oligonucleotide
ugaagaucaucauuaauga

SEQ ID NO: 2735299 - RNA, 19 nt, Artificial Sequence
  Description of Artificial Sequence: Synthetic oligonucleotide
caaaguuuuaacaucugag

SEQ ID NO: 2735300 - RNA, 19 nt, Artificial Sequence
  Description of Artificial Sequence: Synthetic oligonucleotide
auaaauaucaagaagggaa

SEQ ID NO: 2735301 - RNA, 19 nt, Artificial Sequence
  Description of Artificial Sequence: Synthetic oligonucleotide
auaaauacuacuguaauau

SEQ ID NO: 2735302 - RNA, 19 nt, Artificial Sequence
  Description of Artificial Sequence: Synthetic oligonucleotide
aaguaaaacuuuaaaacug

SEQ ID NO: 2735303 - RNA, 19 nt, Artificial Sequence
  Description of Artificial Sequence: Synthetic oligonucleotide
cauucuucagccaucagag

SEQ ID NO: 2735304 - RNA, 19 nt, Artificial Sequence
  Description of Artificial Sequence: Synthetic oligonucleotide
ugauccuugcacuucauag

SEQ ID NO: 2735305 - RNA, 19 nt, Artificial Sequence
  Description of Artificial Sequence: Synthetic oligonucleotide
aaagaaaagcuagaggugu

SEQ ID NO: 2735306 - RNA, 19 nt, Artificial Sequence
  Description of Artificial Sequence: Synthetic oligonucleotide
auacuacuguaauauaaac

SEQ ID NO: 2735307 - RNA, 19 nt, Artificial Sequence
  Description of Artificial Sequence: Synthetic oligonucleotide
aaaaucauuaaaaggacau

SEQ ID NO: 2735308 - RNA, 19 nt, Artificial Sequence
  Description of Artificial Sequence: Synthetic oligonucleotide
uacuacuguaauauaaaca

SEQ ID NO: 2735309 - RNA, 19 nt, Artificial Sequence
  Description of Artificial Sequence: Synthetic oligonucleotide
gagguuugcauacaugucc

SEQ ID NO: 2735310 - RNA, 19 nt, Artificial Sequence
  Description of Artificial Sequence: Synthetic oligonucleotide
acuuuaaaacugauaaggc

SEQ ID NO: 2735311 - RNA, 19 nt, Artificial Sequence
  Description of Artificial Sequence: Synthetic oligonucleotide
aagcuaauucaccuauaac

SEQ ID NO: 2735312 - RNA, 19 nt, Artificial Sequence
  Description of Artificial Sequence: Synthetic oligonucleotide
aagguugccaagcccaggg

SEQ ID NO: 2735313 - RNA, 19 nt, Artificial Sequence
  Description of Artificial Sequence: Synthetic oligonucleotide
aauguuugggauugggaga

SEQ ID NO: 2735314 - RNA, 19 nt, Artificial Sequence
  Description of Artificial Sequence: Synthetic oligonucleotide
agaggugauaaauaucaag

SEQ ID NO: 2735315 - RNA, 19 nt, Artificial Sequence
  Description of Artificial Sequence: Synthetic oligonucleotide
uaaauaucaagaagggaaa

SEQ ID NO: 2735316 - RNA, 19 nt, Artificial Sequence
  Description of Artificial Sequence: Synthetic oligonucleotide
aaggguuuaaucugaagau

SEQ ID NO: 2735317 - RNA, 19 nt, Artificial Sequence
  Description of Artificial Sequence: Synthetic oligonucleotide
ucaaaguuuuaacaucuga

SEQ ID NO: 2735318 - RNA, 19 nt, Artificial Sequence
  Description of Artificial Sequence: Synthetic oligonucleotide
cauugguucaaaagaaacc

SEQ ID NO: 2735319 - RNA, 19 nt, Artificial Sequence
  Description of Artificial Sequence: Synthetic oligonucleotide
uaacaugacaauacaaguc

SEQ ID NO: 2735320 - RNA, 19 nt, Artificial Sequence
  Description of Artificial Sequence: Synthetic oligonucleotide
ucaccuauaacugaaagua

SEQ ID NO: 2735321 - RNA, 19 nt, Artificial Sequence
  Description of Artificial Sequence: Synthetic oligonucleotide
aaaugucagcuccuagcac

SEQ ID NO: 2735322 - RNA, 19 nt, Artificial Sequence
  Description of Artificial Sequence: Synthetic oligonucleotide
ucaauguccugugaguugg

SEQ ID NO: 2735323 - RNA, 19 nt, Artificial Sequence
  Description of Artificial Sequence: Synthetic oligonucleotide
acugauaaggcaaacaccu

SEQ ID NO: 2735324 - RNA, 19 nt, Artificial Sequence
  Description of Artificial Sequence: Synthetic oligonucleotide
acauucaaaguuuuaacau

SEQ ID NO: 2735325 - RNA, 19 nt, Artificial Sequence
  Description of Artificial Sequence: Synthetic oligonucleotide
ucauuaaaaggacauucaa

SEQ ID NO: 2735326 - RNA, 19 nt, Artificial Sequence
  Description of Artificial Sequence: Synthetic oligonucleotide
agauuuuggcgacagcagg

SEQ ID NO: 2735327 - RNA, 19 nt, Artificial Sequence
  Description of Artificial Sequence: Synthetic oligonucleotide
uguuuugacauuccuugca

SEQ ID NO: 2735328 - RNA, 19 nt, Artificial Sequence
  Description of Artificial Sequence: Synthetic oligonucleotide
acaauacaagucuuaccac

SEQ ID NO: 2735329 - RNA, 19 nt, Artificial Sequence
  Description of Artificial Sequence: Synthetic oligonucleotide
agaaagaugagguuugcau

SEQ ID NO: 2735330 - RNA, 19 nt, Artificial Sequence
  Description of Artificial Sequence: Synthetic oligonucleotide
uuaaaaggacauucaaagu

SEQ ID NO: 2735331 - RNA, 19 nt, Artificial Sequence
  Description of Artificial Sequence: Synthetic oligonucleotide
ggugauaaauaucaagaag

SEQ ID NO: 2735332 - RNA, 19 nt, Artificial Sequence
  Description of Artificial Sequence: Synthetic oligonucleotide
aaucugaagaucaucauua

SEQ ID NO: 2735333 - RNA, 19 nt, Artificial Sequence
  Description of Artificial Sequence: Synthetic oligonucleotide
uacauguccccucucagug

SEQ ID NO: 2735334 - RNA, 19 nt, Artificial Sequence
  Description of Artificial Sequence: Synthetic oligonucleotide
acauugguucaaaagaaac

SEQ ID NO: 2735335 - RNA, 19 nt, Artificial Sequence
  Description of Artificial Sequence: Synthetic oligonucleotide
gaggugauaaauaucaaga

SEQ ID NO: 2735336 - RNA, 19 nt, Artificial Sequence
  Description of Artificial Sequence: Synthetic oligonucleotide
auagauuuuggcgacagca

SEQ ID NO: 2735337 - RNA, 19 nt, Artificial Sequence
  Description of Artificial Sequence: Synthetic oligonucleotide
cuugguguauagauuuugg

SEQ ID NO: 2735338 - RNA, 19 nt, Artificial Sequence
  Description of Artificial Sequence: Synthetic oligonucleotide
gaaaccgcagucaaugucc

SEQ ID NO: 2735339 - RNA, 19 nt, Artificial Sequence
  Description of Artificial Sequence: Synthetic oligonucleotide
gacagcaggaucauuauac

SEQ ID NO: 2735340 - RNA, 19 nt, Artificial Sequence
  Description of Artificial Sequence: Synthetic oligonucleotide
uagauuuuggcgacagcag

SEQ ID NO: 2735341 - RNA, 19 nt, Artificial Sequence
  Description of Artificial Sequence: Synthetic oligonucleotide
aaaacugauaaggcaaaca

SEQ ID NO: 2735342 - RNA, 19 nt, Artificial Sequence
  Description of Artificial Sequence: Synthetic oligonucleotide
auaacugaaaguaaaacuu

SEQ ID NO: 2735343 - RNA, 19 nt, Artificial Sequence
  Description of Artificial Sequence: Synthetic oligonucleotide
auucaccuauaacugaaag

SEQ ID NO: 2735344 - RNA, 19 nt, Artificial Sequence
  Description of Artificial Sequence: Synthetic oligonucleotide
aauacuacuguaauauaaa

SEQ ID NO: 2735345 - RNA, 19 nt, Artificial Sequence
  Description of Artificial Sequence: Synthetic oligonucleotide
auuaaugaaggagaaagau

SEQ ID NO: 2735346 - RNA, 19 nt, Artificial Sequence
  Description of Artificial Sequence: Synthetic oligonucleotide
cauucaaaguuuuaacauc

SEQ ID NO: 2735347 - RNA, 19 nt, Artificial Sequence
  Description of Artificial Sequence: Synthetic oligonucleotide
ucucagugagaaauguuug

SEQ ID NO: 2735348 - RNA, 19 nt, Artificial Sequence
  Description of Artificial Sequence: Synthetic oligonucleotide
acauucuucagccaucaga

SEQ ID NO: 2735349 - RNA, 19 nt, Artificial Sequence
  Description of Artificial Sequence: Synthetic oligonucleotide
uugcacauugguucaaaag

SEQ ID NO: 2735350 - RNA, 19 nt, Artificial Sequence
  Description of Artificial Sequence: Synthetic oligonucleotide
gagacaugaguauguacag

SEQ ID NO: 2735351 - RNA, 19 nt, Artificial Sequence
  Description of Artificial Sequence: Synthetic oligonucleotide
aaagcuagagguguuuugu

SEQ ID NO: 2735352 - RNA, 19 nt, Artificial Sequence
  Description of Artificial Sequence: Synthetic oligonucleotide
agcuccuagcaccaaaggg

SEQ ID NO: 2735353 - RNA, 19 nt, Artificial Sequence
  Description of Artificial Sequence: Synthetic oligonucleotide
agaaaccgcagucaauguc

SEQ ID NO: 2735354 - RNA, 19 nt, Artificial Sequence
  Description of Artificial Sequence: Synthetic oligonucleotide
ucauagucugcuuuggaaa

SEQ ID NO: 2735355 - RNA, 19 nt, Artificial Sequence
  Description of Artificial Sequence: Synthetic oligonucleotide
agugagaaauguuugggau

SEQ ID NO: 2735356 - RNA, 19 nt, Artificial Sequence
  Description of Artificial Sequence: Synthetic oligonucleotide
ucaaaagaaaccgcaguca

SEQ ID NO: 2735357 - RNA, 19 nt, Artificial Sequence
  Description of Artificial Sequence: Synthetic oligonucleotide
uucaccuauaacugaaagu

SEQ ID NO: 2735358 - RNA, 19 nt, Artificial Sequence
  Description of Artificial Sequence: Synthetic oligonucleotide
cuauaacugaaaguaaaac

SEQ ID NO: 2735359 - RNA, 19 nt, Artificial Sequence
  Description of Artificial Sequence: Synthetic oligonucleotide
uugguguauagauuuuggc

SEQ ID NO: 2735360 - RNA, 19 nt, Artificial Sequence
  Description of Artificial Sequence: Synthetic oligonucleotide
agagguguuuuguuuugac

SEQ ID NO: 2735361 - RNA, 19 nt, Artificial Sequence
  Description of Artificial Sequence: Synthetic oligonucleotide
auaaggcaaacaccuguuc

SEQ ID NO: 2735362 - RNA, 19 nt, Artificial Sequence
  Description of Artificial Sequence: Synthetic oligonucleotide
ucagcuccuagcaccaaag

SEQ ID NO: 2735363 - RNA, 19 nt, Artificial Sequence
  Description of Artificial Sequence: Synthetic oligonucleotide
gguguauagauuuuggcga

SEQ ID NO: 2735364 - RNA, 19 nt, Artificial Sequence
  Description of Artificial Sequence: Synthetic oligonucleotide
uugggauugggagacauga

SEQ ID NO: 2735365 - RNA, 19 nt, Artificial Sequence
  Description of Artificial Sequence: Synthetic oligonucleotide
uaacugaaaguaaaacuuu

SEQ ID NO: 2735366 - RNA, 19 nt, Artificial Sequence
  Description of Artificial Sequence: Synthetic oligonucleotide
aucauuauacugucuacau

SEQ ID NO: 2735367 - RNA, 19 nt, Artificial Sequence
  Description of Artificial Sequence: Synthetic oligonucleotide
uccaugaccacuccuugga

SEQ ID NO: 2735368 - RNA, 19 nt, Artificial Sequence
  Description of Artificial Sequence: Synthetic oligonucleotide
aaaaggacauucaaaguuu

SEQ ID NO: 2735369 - RNA, 19 nt, Artificial Sequence
  Description of Artificial Sequence: Synthetic oligonucleotide
aaaggcuuugauccuugca

SEQ ID NO: 2735370 - RNA, 19 nt, Artificial Sequence
  Description of Artificial Sequence: Synthetic oligonucleotide
gcuaacaugacaauacaag

SEQ ID NO: 2735371 - RNA, 19 nt, Artificial Sequence
  Description of Artificial Sequence: Synthetic oligonucleotide
ugcguuugcuaacaugaca

SEQ ID NO: 2735372 - RNA, 19 nt, Artificial Sequence
  Description of Artificial Sequence: Synthetic oligonucleotide
agaaauguuugggauuggg

SEQ ID NO: 2735373 - RNA, 19 nt, Artificial Sequence
  Description of Artificial Sequence: Synthetic oligonucleotide
uucaaaguuuuaacaucug

SEQ ID NO: 2735374 - RNA, 19 nt, Artificial Sequence
  Description of Artificial Sequence: Synthetic oligonucleotide
uugcuaacaugacaauaca

SEQ ID NO: 2735375 - RNA, 19 nt, Artificial Sequence
  Description of Artificial Sequence: Synthetic oligonucleotide
aggaucauuauacugucua

SEQ ID NO: 2735376 - RNA, 19 nt, Artificial Sequence
  Description of Artificial Sequence: Synthetic oligonucleotide
agguuugcauacauguccc

SEQ ID NO: 2735377 - RNA, 19 nt, Artificial Sequence
  Description of Artificial Sequence: Synthetic oligonucleotide
ugcuaacaugacaauacaa

SEQ ID NO: 2735378 - RNA, 19 nt, Artificial Sequence
  Description of Artificial Sequence: Synthetic oligonucleotide
aaauacucucugguacaac

SEQ ID NO: 2735379 - RNA, 19 nt, Artificial Sequence
  Description of Artificial Sequence: Synthetic oligonucleotide
uuuugacauuccuugcaca

SEQ ID NO: 2735380 - RNA, 19 nt, Artificial Sequence
  Description of Artificial Sequence: Synthetic oligonucleotide
gaucauuauacugucuaca

SEQ ID NO: 2735381 - RNA, 19 nt, Artificial Sequence
  Description of Artificial Sequence: Synthetic oligonucleotide
caaaaucauuaaaaggaca

SEQ ID NO: 2735382 - RNA, 19 nt, Artificial Sequence
  Description of Artificial Sequence: Synthetic oligonucleotide
aggugauaaauaucaagaa

SEQ ID NO: 2735383 - RNA, 19 nt, Artificial Sequence
  Description of Artificial Sequence: Synthetic oligonucleotide
caugaguauguacagaaaa

SEQ ID NO: 2735384 - RNA, 19 nt, Artificial Sequence
  Description of Artificial Sequence: Synthetic oligonucleotide
augaccacuccuuggagca

SEQ ID NO: 2735385 - RNA, 19 nt, Artificial Sequence
  Description of Artificial Sequence: Synthetic oligonucleotide
agcaggaucauuauacugu

SEQ ID NO: 2735386 - RNA, 19 nt, Artificial Sequence
  Description of Artificial Sequence: Synthetic oligonucleotide
aaugaaggagaaagaugag

SEQ ID NO: 2735387 - RNA, 19 nt, Artificial Sequence
  Description of Artificial Sequence: Synthetic oligonucleotide
uuguuuugacauuccuugc

SEQ ID NO: 2735388 - RNA, 19 nt, Artificial Sequence
  Description of Artificial Sequence: Synthetic oligonucleotide
cugcuuguugcaagaaagg

SEQ ID NO: 2735389 - RNA, 19 nt, Artificial Sequence
  Description of Artificial Sequence: Synthetic oligonucleotide
ucuacauucuucagccauc

SEQ ID NO: 2735390 - RNA, 19 nt, Artificial Sequence
  Description of Artificial Sequence: Synthetic oligonucleotide
aaauaucaagaagggaaaa

SEQ ID NO: 2735391 - RNA, 19 nt, Artificial Sequence
  Description of Artificial Sequence: Synthetic oligonucleotide
uuugcauacauguccccuc

SEQ ID NO: 2735392 - RNA, 19 nt, Artificial Sequence
  Description of Artificial Sequence: Synthetic oligonucleotide
aagaaaccgcagucaaugu

SEQ ID NO: 2735393 - RNA, 19 nt, Artificial Sequence
  Description of Artificial Sequence: Synthetic oligonucleotide
gcuaauucaccuauaacug

SEQ ID NO: 2735394 - RNA, 19 nt, Artificial Sequence
  Description of Artificial Sequence: Synthetic oligonucleotide
uauagauuuuggcgacagc

SEQ ID NO: 2735395 - RNA, 19 nt, Artificial Sequence
  Description of Artificial Sequence: Synthetic oligonucleotide
caccaaaggguuuaaucug

SEQ ID NO: 2735396 - RNA, 19 nt, Artificial Sequence
  Description of Artificial Sequence: Synthetic oligonucleotide
uacaagucuuaccacuaaa

SEQ ID NO: 2735397 - RNA, 19 nt, Artificial Sequence
  Description of Artificial Sequence: Synthetic oligonucleotide
aauacaagucuuaccacua

SEQ ID NO: 2735398 - RNA, 19 nt, Artificial Sequence
  Description of Artificial Sequence: Synthetic oligonucleotide
ugcuuuggaaaaugucagc

SEQ ID NO: 2735399 - RNA, 19 nt, Artificial Sequence
  Description of Artificial Sequence: Synthetic oligonucleotide
ugugaguuggagcugcguu

SEQ ID NO: 2735400 - RNA, 19 nt, Artificial Sequence
  Description of Artificial Sequence: Synthetic oligonucleotide
uaaauacuacuguaauaua

SEQ ID NO: 2735401 - RNA, 19 nt, Artificial Sequence
  Description of Artificial Sequence: Synthetic oligonucleotide
guauagauuuuggcgacag

SEQ ID NO: 2735402 - RNA, 19 nt, Artificial Sequence
  Description of Artificial Sequence: Synthetic oligonucleotide
uuggaaaaugucagcuccu

SEQ ID NO: 2735403 - RNA, 19 nt, Artificial Sequence
  Description of Artificial Sequence: Synthetic oligonucleotide
ucauuauacugucuacauu

SEQ ID NO: 2735404 - RNA, 19 nt, Artificial Sequence
  Description of Artificial Sequence: Synthetic oligonucleotide
cuaacaugacaauacaagu

SEQ ID NO: 2735405 - RNA, 19 nt, Artificial Sequence
  Description of Artificial Sequence: Synthetic oligonucleotide
aucauuaaaaggacauuca

SEQ ID NO: 2735406 - RNA, 19 nt, Artificial Sequence
  Description of Artificial Sequence: Synthetic oligonucleotide
ugagguuugcauacauguc

SEQ ID NO: 2735407 - RNA, 19 nt, Artificial Sequence
  Description of Artificial Sequence: Synthetic oligonucleotide
cauuaaugaaggagaaaga

SEQ ID NO: 2735408 - RNA, 19 nt, Artificial Sequence
  Description of Artificial Sequence: Synthetic oligonucleotide
cuaauucaccuauaacuga

SEQ ID NO: 2735409 - RNA, 19 nt, Artificial Sequence
  Description of Artificial Sequence: Synthetic oligonucleotide
cauacauguccccucucag

SEQ ID NO: 2735410 - RNA, 19 nt, Artificial Sequence
  Description of Artificial Sequence: Synthetic oligonucleotide
cugaaaguaaaacuuuaaa

SEQ ID NO: 2735411 - RNA, 19 nt, Artificial Sequence
  Description of Artificial Sequence: Synthetic oligonucleotide
aauguccugugaguuggag

SEQ ID NO: 2735412 - RNA, 19 nt, Artificial Sequence
  Description of Artificial Sequence: Synthetic oligonucleotide
aggacauucaaaguuuuaa

SEQ ID NO: 2735413 - RNA, 19 nt, Artificial Sequence
  Description of Artificial Sequence: Synthetic oligonucleotide
ggagacaugaguauguaca

SEQ ID NO: 2735414 - RNA, 19 nt, Artificial Sequence
  Description of Artificial Sequence: Synthetic oligonucleotide
auugggagacaugaguaug

SEQ ID NO: 2735415 - RNA, 19 nt, Artificial Sequence
  Description of Artificial Sequence: Synthetic oligonucleotide
uuugggauugggagacaug

SEQ ID NO: 2735416 - RNA, 19 nt, Artificial Sequence
  Description of Artificial Sequence: Synthetic oligonucleotide
uguugcaagaaaggcuuug

SEQ ID NO: 2735417 - RNA, 19 nt, Artificial Sequence
  Description of Artificial Sequence: Synthetic oligonucleotide
aaaagguugccaagcccag

SEQ ID NO: 2735418 - RNA, 19 nt, Artificial Sequence
  Description of Artificial Sequence: Synthetic oligonucleotide
acuucauagucugcuuugg

SEQ ID NO: 2735419 - RNA, 19 nt, Artificial Sequence
  Description of Artificial Sequence: Synthetic oligonucleotide
caaacaccuguucaccuug

SEQ ID NO: 2735420 - RNA, 19 nt, Artificial Sequence
  Description of Artificial Sequence: Synthetic oligonucleotide
aaagguugccaagcccagg

SEQ ID NO: 2735421 - RNA, 19 nt, Artificial Sequence
  Description of Artificial Sequence: Synthetic oligonucleotide
aucagaggugauaaauauc

SEQ ID NO: 2735422 - RNA, 19 nt, Artificial Sequence
  Description of Artificial Sequence: Synthetic oligonucleotide
cacuucauagucugcuuug

SEQ ID NO: 2735423 - RNA, 19 nt, Artificial Sequence
  Description of Artificial Sequence: Synthetic oligonucleotide
ugaguuggagcugcguuug

SEQ ID NO: 2735424 - RNA, 19 nt, Artificial Sequence
  Description of Artificial Sequence: Synthetic oligonucleotide
guaauauaaacaaaaucau

SEQ ID NO: 2735425 - RNA, 19 nt, Artificial Sequence
  Description of Artificial Sequence: Synthetic oligonucleotide
cuagagguguuuuguuuug

SEQ ID NO: 2735426 - RNA, 19 nt, Artificial Sequence
  Description of Artificial Sequence: Synthetic oligonucleotide
uaaaacugauaaggcaaac

SEQ ID NO: 2735427 - RNA, 19 nt, Artificial Sequence
  Description of Artificial Sequence: Synthetic oligonucleotide
gaugagguuugcauacaug

SEQ ID NO: 2735428 - RNA, 19 nt, Artificial Sequence
  Description of Artificial Sequence: Synthetic oligonucleotide
gaagaucaucauuaaugaa

SEQ ID NO: 2735429 - RNA, 19 nt, Artificial Sequence
  Description of Artificial Sequence: Synthetic oligonucleotide
acagcaggaucauuauacu

SEQ ID NO: 2735430 - RNA, 19 nt, Artificial Sequence
  Description of Artificial Sequence: Synthetic oligonucleotide
ggacauucaaaguuuuaac

SEQ ID NO: 2735431 - RNA, 19 nt, Artificial Sequence
  Description of Artificial Sequence: Synthetic oligonucleotide
guguauagauuuuggcgac

SEQ ID NO: 2735432 - RNA, 19 nt, Artificial Sequence
  Description of Artificial Sequence: Synthetic oligonucleotide
auacauguccccucucagu

SEQ ID NO: 2735433 - RNA, 19 nt, Artificial Sequence
  Description of Artificial Sequence: Synthetic oligonucleotide
ugggauugggagacaugag

SEQ ID NO: 2735434 - RNA, 19 nt, Artificial Sequence
  Description of Artificial Sequence: Synthetic oligonucleotide
gucaauguccugugaguug

SEQ ID NO: 2735435 - RNA, 19 nt, Artificial Sequence
  Description of Artificial Sequence: Synthetic oligonucleotide
uugcacuucauagucugcu

SEQ ID NO: 2735436 - RNA, 19 nt, Artificial Sequence
  Description of Artificial Sequence: Synthetic oligonucleotide
gauuuuggcgacagcagga

SEQ ID NO: 2735437 - RNA, 19 nt, Artificial Sequence
  Description of Artificial Sequence: Synthetic oligonucleotide
uagucugcuuuggaaaaug

SEQ ID NO: 2735438 - RNA, 19 nt, Artificial Sequence
  Description of Artificial Sequence: Synthetic oligonucleotide
cagcaggaucauuauacug

SEQ ID NO: 2735439 - RNA, 19 nt, Artificial Sequence
  Description of Artificial Sequence: Synthetic oligonucleotide
aggcuuugauccuugcacu

SEQ ID NO: 2735440 - RNA, 19 nt, Artificial Sequence
  Description of Artificial Sequence: Synthetic oligonucleotide
guuuaaucugaagaucauc

SEQ ID NO: 2735441 - RNA, 19 nt, Artificial Sequence
  Description of Artificial Sequence: Synthetic oligonucleotide
uacucucugguacaacgua

SEQ ID NO: 2735442 - RNA, 19 nt, Artificial Sequence
  Description of Artificial Sequence: Synthetic oligonucleotide
uugcaagaaaggcuuugau

SEQ ID NO: 2735443 - RNA, 19 nt, Artificial Sequence
  Description of Artificial Sequence: Synthetic oligonucleotide
accuauaacugaaaguaaa

SEQ ID NO: 2735444 - RNA, 19 nt, Artificial Sequence
  Description of Artificial Sequence: Synthetic oligonucleotide
aggagaaagaugagguuug

SEQ ID NO: 2735445 - RNA, 19 nt, Artificial Sequence
  Description of Artificial Sequence: Synthetic oligonucleotide
acauuccuugcacauuggu

SEQ ID NO: 2735446 - RNA, 19 nt, Artificial Sequence
  Description of Artificial Sequence: Synthetic oligonucleotide
aaaagaaaccgcagucaau

SEQ ID NO: 2735447 - RNA, 19 nt, Artificial Sequence
  Description of Artificial Sequence: Synthetic oligonucleotide
gaaaggcuuugauccuugc

SEQ ID NO: 2735448 - RNA, 19 nt, Artificial Sequence
  Description of Artificial Sequence: Synthetic oligonucleotide
guucaaaagaaaccgcagu

SEQ ID NO: 2735449 - RNA, 19 nt, Artificial Sequence
  Description of Artificial Sequence: Synthetic oligonucleotide
caauacaagucuuaccacu

SEQ ID NO: 2735450 - RNA, 19 nt, Artificial Sequence
  Description of Artificial Sequence: Synthetic oligonucleotide
gguucaaaagaaaccgcag

SEQ ID NO: 2735451 - RNA, 19 nt, Artificial Sequence
  Description of Artificial Sequence: Synthetic oligonucleotide
gauccuugcacuucauagu

SEQ ID NO: 2735452 - RNA, 19 nt, Artificial Sequence
  Description of Artificial Sequence: Synthetic oligonucleotide
cauagucugcuuuggaaaa

SEQ ID NO: 2735453 - RNA, 19 nt, Artificial Sequence
  Description of Artificial Sequence: Synthetic oligonucleotide
uccugcuuguugcaagaaa

SEQ ID NO: 2735454 - RNA, 19 nt, Artificial Sequence
  Description of Artificial Sequence: Synthetic oligonucleotide
cuuugauccuugcacuuca

SEQ ID NO: 2735455 - RNA, 19 nt, Artificial Sequence
  Description of Artificial Sequence: Synthetic oligonucleotide
aaaggacauucaaaguuuu

SEQ ID NO: 2735456 - RNA, 19 nt, Artificial Sequence
  Description of Artificial Sequence: Synthetic oligonucleotide
cugauaaggcaaacaccug

SEQ ID NO: 2735457 - RNA, 19 nt, Artificial Sequence
  Description of Artificial Sequence: Synthetic oligonucleotide
accgcagucaauguccugu

SEQ ID NO: 2735458 - RNA, 19 nt, Artificial Sequence
  Description of Artificial Sequence: Synthetic oligonucleotide
acugaaaguaaaacuuuaa

SEQ ID NO: 2735459 - RNA, 19 nt, Artificial Sequence
  Description of Artificial Sequence: Synthetic oligonucleotide
aagcuagagguguuuuguu

SEQ ID NO: 2735460 - RNA, 19 nt, Artificial Sequence
  Description of Artificial Sequence: Synthetic oligonucleotide
agcugcguuugcuaacaug

SEQ ID NO: 2735461 - RNA, 19 nt, Artificial Sequence
  Description of Artificial Sequence: Synthetic oligonucleotide
uccuugcacuucauagucu

SEQ ID NO: 2735462 - RNA, 19 nt, Artificial Sequence
  Description of Artificial Sequence: Synthetic oligonucleotide
ggaaaaugucagcuccuag

SEQ ID NO: 2735463 - RNA, 19 nt, Artificial Sequence
  Description of Artificial Sequence: Synthetic oligonucleotide
ggguuuaaucugaagauca

SEQ ID NO: 2735464 - RNA, 19 nt, Artificial Sequence
  Description of Artificial Sequence: Synthetic oligonucleotide
aagaaaggcuuugauccuu

SEQ ID NO: 2735465 - RNA, 19 nt, Artificial Sequence
  Description of Artificial Sequence: Synthetic oligonucleotide
agcuagagguguuuuguuu

SEQ ID NO: 2735466 - RNA, 19 nt, Artificial Sequence
  Description of Artificial Sequence: Synthetic oligonucleotide
aauucaccuauaacugaaa

SEQ ID NO: 2735467 - RNA, 19 nt, Artificial Sequence
  Description of Artificial Sequence: Synthetic oligonucleotide
auacaagucuuaccacuaa

SEQ ID NO: 2735468 - RNA, 19 nt, Artificial Sequence
  Description of Artificial Sequence: Synthetic oligonucleotide
aagaugagguuugcauaca

SEQ ID NO: 2735469 - RNA, 19 nt, Artificial Sequence
  Description of Artificial Sequence: Synthetic oligonucleotide
gcugcguuugcuaacauga

SEQ ID NO: 2735470 - RNA, 19 nt, Artificial Sequence
  Description of Artificial Sequence: Synthetic oligonucleotide
ggaucauuauacugucuac

SEQ ID NO: 2735471 - RNA, 19 nt, Artificial Sequence
  Description of Artificial Sequence: Synthetic oligonucleotide
caccuguucaccuuggugu

SEQ ID NO: 2735472 - RNA, 19 nt, Artificial Sequence
  Description of Artificial Sequence: Synthetic oligonucleotide
uuuuggcgacagcaggauc

SEQ ID NO: 2735473 - RNA, 19 nt, Artificial Sequence
  Description of Artificial Sequence: Synthetic oligonucleotide
accaaaggguuuaaucuga

SEQ ID NO: 2735474 - RNA, 19 nt, Artificial Sequence
  Description of Artificial Sequence: Synthetic oligonucleotide
uugauccuugcacuucaua

SEQ ID NO: 2735475 - RNA, 19 nt, Artificial Sequence
  Description of Artificial Sequence: Synthetic oligonucleotide
cuuggagcagaugcccucc

SEQ ID NO: 2735476 - RNA, 19 nt, Artificial Sequence
  Description of Artificial Sequence: Synthetic oligonucleotide
ggagcagaugcccuccugc

SEQ ID NO: 2735477 - RNA, 19 nt, Artificial Sequence
  Description of Artificial Sequence: Synthetic oligonucleotide
gcagaugcccuccugcuug

SEQ ID NO: 2735478 - RNA, 19 nt, Artificial Sequence
  Description of Artificial Sequence: Synthetic oligonucleotide
agguugccaagcccagggg

SEQ ID NO: 2735479 - RNA, 19 nt, Artificial Sequence
  Description of Artificial Sequence: Synthetic oligonucleotide
gagaaauguuugggauugg

SEQ ID NO: 2735480 - RNA, 19 nt, Artificial Sequence
  Description of Artificial Sequence: Synthetic oligonucleotide
agucaauguccugugaguu

SEQ ID NO: 2735481 - RNA, 19 nt, Artificial Sequence
  Description of Artificial Sequence: Synthetic oligonucleotide
cuccuuggagcagaugccc

SEQ ID NO: 2735482 - RNA, 19 nt, Artificial Sequence
  Description of Artificial Sequence: Synthetic oligonucleotide
cacauugguucaaaagaaa

SEQ ID NO: 2735483 - RNA, 19 nt, Artificial Sequence
  Description of Artificial Sequence: Synthetic oligonucleotide
ccuugcacuucauagucug

SEQ ID NO: 2735484 - RNA, 19 nt, Artificial Sequence
  Description of Artificial Sequence: Synthetic oligonucleotide
uguccccucucagugagaa

SEQ ID NO: 2735485 - RNA, 19 nt, Artificial Sequence
  Description of Artificial Sequence: Synthetic oligonucleotide
guuugcuaacaugacaaua

SEQ ID NO: 2735486 - RNA, 19 nt, Artificial Sequence
  Description of Artificial Sequence: Synthetic oligonucleotide
agacaugaguauguacaga

SEQ ID NO: 2735487 - RNA, 19 nt, Artificial Sequence
  Description of Artificial Sequence: Synthetic oligonucleotide
uagagguguuuuguuuuga

SEQ ID NO: 2735488 - RNA, 19 nt, Artificial Sequence
  Description of Artificial Sequence: Synthetic oligonucleotide
gauugggagacaugaguau

SEQ ID NO: 2735489 - RNA, 19 nt, Artificial Sequence
  Description of Artificial Sequence: Synthetic oligonucleotide
caucagaggugauaaauau

SEQ ID NO: 2735490 - RNA, 19 nt, Artificial Sequence
  Description of Artificial Sequence: Synthetic oligonucleotide
guugcaagaaaggcuuuga

SEQ ID NO: 2735491 - RNA, 19 nt, Artificial Sequence
  Description of Artificial Sequence: Synthetic oligonucleotide
uuugauccuugcacuucau

SEQ ID NO: 2735492 - RNA, 19 nt, Artificial Sequence
  Description of Artificial Sequence: Synthetic oligonucleotide
agaaaggcuuugauccuug

SEQ ID NO: 2735493 - RNA, 19 nt, Artificial Sequence
  Description of Artificial Sequence: Synthetic oligonucleotide
cagcuccuagcaccaaagg

SEQ ID NO: 2735494 - RNA, 19 nt, Artificial Sequence
  Description of Artificial Sequence: Synthetic oligonucleotide
uggagcagaugcccuccug

SEQ ID NO: 2735495 - RNA, 19 nt, Artificial Sequence
  Description of Artificial Sequence: Synthetic oligonucleotide
cucucagugagaaauguuu

SEQ ID NO: 2735496 - RNA, 19 nt, Artificial Sequence
  Description of Artificial Sequence: Synthetic oligonucleotide
uggaaaaugucagcuccua

SEQ ID NO: 2735497 - RNA, 19 nt, Artificial Sequence
  Description of Artificial Sequence: Synthetic oligonucleotide
acauguccccucucaguga

SEQ ID NO: 2735498 - RNA, 19 nt, Artificial Sequence
  Description of Artificial Sequence: Synthetic oligonucleotide
auuuuggcgacagcaggau

SEQ ID NO: 2735499 - RNA, 19 nt, Artificial Sequence
  Description of Artificial Sequence: Synthetic oligonucleotide
auacucucugguacaacgu

SEQ ID NO: 2735500 - RNA, 19 nt, Artificial Sequence
  Description of Artificial Sequence: Synthetic oligonucleotide
aaccgcagucaauguccug

SEQ ID NO: 2735501 - RNA, 19 nt, Artificial Sequence
  Description of Artificial Sequence: Synthetic oligonucleotide
cugcguuugcuaacaugac

SEQ ID NO: 2735502 - RNA, 19 nt, Artificial Sequence
  Description of Artificial Sequence: Synthetic oligonucleotide
gucuacauucuucagccau

SEQ ID NO: 2735503 - RNA, 19 nt, Artificial Sequence
  Description of Artificial Sequence: Synthetic oligonucleotide
cuacauucuucagccauca

SEQ ID NO: 2735504 - RNA, 19 nt, Artificial Sequence
  Description of Artificial Sequence: Synthetic oligonucleotide
gucugcuuuggaaaauguc

SEQ ID NO: 2735505 - RNA, 19 nt, Artificial Sequence
  Description of Artificial Sequence: Synthetic oligonucleotide
gaaggagaaagaugagguu

SEQ ID NO: 2735506 - RNA, 19 nt, Artificial Sequence
  Description of Artificial Sequence: Synthetic oligonucleotide
ccuauaacugaaaguaaaa

SEQ ID NO: 2735507 - RNA, 19 nt, Artificial Sequence
  Description of Artificial Sequence: Synthetic oligonucleotide
caccuauaacugaaaguaa

SEQ ID NO: 2735508 - RNA, 19 nt, Artificial Sequence
  Description of Artificial Sequence: Synthetic oligonucleotide
uugacauuccuugcacauu

SEQ ID NO: 2735509 - RNA, 19 nt, Artificial Sequence
  Description of Artificial Sequence: Synthetic oligonucleotide
cuugcacauugguucaaaa

SEQ ID NO: 2735510 - RNA, 19 nt, Artificial Sequence
  Description of Artificial Sequence: Synthetic oligonucleotide
accuguucaccuuggugua

SEQ ID NO: 2735511 - RNA, 19 nt, Artificial Sequence
  Description of Artificial Sequence: Synthetic oligonucleotide
uuggagcagaugcccuccu

SEQ ID NO: 2735512 - RNA, 19 nt, Artificial Sequence
  Description of Artificial Sequence: Synthetic oligonucleotide
agucugcuuuggaaaaugu

SEQ ID NO: 2735513 - RNA, 19 nt, Artificial Sequence
  Description of Artificial Sequence: Synthetic oligonucleotide
auagucugcuuuggaaaau

SEQ ID NO: 2735514 - RNA, 19 nt, Artificial Sequence
  Description of Artificial Sequence: Synthetic oligonucleotide
uuguugcaagaaaggcuuu

SEQ ID NO: 2735515 - RNA, 19 nt, Artificial Sequence
  Description of Artificial Sequence: Synthetic oligonucleotide
gcguuugcuaacaugacaa

SEQ ID NO: 2735516 - RNA, 19 nt, Artificial Sequence
  Description of Artificial Sequence: Synthetic oligonucleotide
guuggagcugcguuugcua

SEQ ID NO: 2735517 - RNA, 19 nt, Artificial Sequence
  Description of Artificial Sequence: Synthetic oligonucleotide
gguuugcauacaugucccc

SEQ ID NO: 2735518 - RNA, 19 nt, Artificial Sequence
  Description of Artificial Sequence: Synthetic oligonucleotide
gggagacaugaguauguac

SEQ ID NO: 2735519 - RNA, 19 nt, Artificial Sequence
  Description of Artificial Sequence: Synthetic oligonucleotide
gauaaggcaaacaccuguu

SEQ ID NO: 2735520 - RNA, 19 nt, Artificial Sequence
  Description of Artificial Sequence: Synthetic oligonucleotide
gaguuggagcugcguuugc

SEQ ID NO: 2735521 - RNA, 19 nt, Artificial Sequence
  Description of Artificial Sequence: Synthetic oligonucleotide
acaugaguauguacagaaa

SEQ ID NO: 2735522 - RNA, 19 nt, Artificial Sequence
  Description of Artificial Sequence: Synthetic oligonucleotide
gugagaaauguuugggauu

SEQ ID NO: 2735523 - RNA, 19 nt, Artificial Sequence
  Description of Artificial Sequence: Synthetic oligonucleotide
ggauugggagacaugagua

SEQ ID NO: 2735524 - RNA, 19 nt, Artificial Sequence
  Description of Artificial Sequence: Synthetic oligonucleotide
gggauugggagacaugagu

SEQ ID NO: 2735525 - RNA, 19 nt, Artificial Sequence
  Description of Artificial Sequence: Synthetic oligonucleotide
guuugcauacauguccccu

SEQ ID NO: 2735526 - RNA, 19 nt, Artificial Sequence
  Description of Artificial Sequence: Synthetic oligonucleotide
ugggagacaugaguaugua

SEQ ID NO: 2735527 - RNA, 19 nt, Artificial Sequence
  Description of Artificial Sequence: Synthetic oligonucleotide
gcuuuggaaaaugucagcu

SEQ ID NO: 2735528 - RNA, 19 nt, Artificial Sequence
  Description of Artificial Sequence: Synthetic oligonucleotide
gcacauugguucaaaagaa

SEQ ID NO: 2735529 - RNA, 19 nt, Artificial Sequence
  Description of Artificial Sequence: Synthetic oligonucleotide
ugaccacuccuuggagcag

SEQ ID NO: 2735530 - RNA, 19 nt, Artificial Sequence
  Description of Artificial Sequence: Synthetic oligonucleotide
guaaaacuuuaaaacugau

SEQ ID NO: 2735531 - RNA, 19 nt, Artificial Sequence
  Description of Artificial Sequence: Synthetic oligonucleotide
guugccaagcccaggggaa

SEQ ID NO: 2735532 - RNA, 19 nt, Artificial Sequence
  Description of Artificial Sequence: Synthetic oligonucleotide
augucagcuccuagcacca

SEQ ID NO: 2735533 - RNA, 19 nt, Artificial Sequence
  Description of Artificial Sequence: Synthetic oligonucleotide
ggagaaagaugagguuugc

SEQ ID NO: 2735534 - RNA, 19 nt, Artificial Sequence
  Description of Artificial Sequence: Synthetic oligonucleotide
cuucagccaucagagguga

SEQ ID NO: 2735535 - RNA, 19 nt, Artificial Sequence
  Description of Artificial Sequence: Synthetic oligonucleotide
caagaaaggcuuugauccu

SEQ ID NO: 2735536 - RNA, 19 nt, Artificial Sequence
  Description of Artificial Sequence: Synthetic oligonucleotide
cauuccuugcacauugguu

SEQ ID NO: 2735537 - RNA, 19 nt, Artificial Sequence
  Description of Artificial Sequence: Synthetic oligonucleotide
cagccaucagaggugauaa

SEQ ID NO: 2735538 - RNA, 19 nt, Artificial Sequence
  Description of Artificial Sequence: Synthetic oligonucleotide
uccuagcaccaaaggguuu

SEQ ID NO: 2735539 - RNA, 19 nt, Artificial Sequence
  Description of Artificial Sequence: Synthetic oligonucleotide
ccuugguguauagauuuug

SEQ ID NO: 2735540 - RNA, 19 nt, Artificial Sequence
  Description of Artificial Sequence: Synthetic oligonucleotide
gagcagaugcccuccugcu

SEQ ID NO: 2735541 - RNA, 19 nt, Artificial Sequence
  Description of Artificial Sequence: Synthetic oligonucleotide
ugcccuccugcuuguugca

SEQ ID NO: 2735542 - RNA, 19 nt, Artificial Sequence
  Description of Artificial Sequence: Synthetic oligonucleotide
uguuugggauugggagaca

SEQ ID NO: 2735543 - RNA, 19 nt, Artificial Sequence
  Description of Artificial Sequence: Synthetic oligonucleotide
uuggcgacagcaggaucau

SEQ ID NO: 2735544 - RNA, 19 nt, Artificial Sequence
  Description of Artificial Sequence: Synthetic oligonucleotide
ggagcugcguuugcuaaca

SEQ ID NO: 2735545 - RNA, 19 nt, Artificial Sequence
  Description of Artificial Sequence: Synthetic oligonucleotide
gugaguuggagcugcguuu

SEQ ID NO: 2735546 - RNA, 19 nt, Artificial Sequence
  Description of Artificial Sequence: Synthetic oligonucleotide
ccaucagaggugauaaaua

SEQ ID NO: 2735547 - RNA, 19 nt, Artificial Sequence
  Description of Artificial Sequence: Synthetic oligonucleotide
gcuagagguguuuuguuuu

SEQ ID NO: 2735548 - RNA, 19 nt, Artificial Sequence
  Description of Artificial Sequence: Synthetic oligonucleotide
uucagccaucagaggugau

SEQ ID NO: 2735549 - RNA, 19 nt, Artificial Sequence
  Description of Artificial Sequence: Synthetic oligonucleotide
gcuuugauccuugcacuuc

SEQ ID NO: 2735550 - RNA, 19 nt, Artificial Sequence
  Description of Artificial Sequence: Synthetic oligonucleotide
ccaugaccacuccuuggag

SEQ ID NO: 2735551 - RNA, 19 nt, Artificial Sequence
  Description of Artificial Sequence: Synthetic oligonucleotide
ggcaaacaccuguucaccu

SEQ ID NO: 2735552 - RNA, 19 nt, Artificial Sequence
  Description of Artificial Sequence: Synthetic oligonucleotide
guuugggauugggagacau

SEQ ID NO: 2735553 - RNA, 19 nt, Artificial Sequence
  Description of Artificial Sequence: Synthetic oligonucleotide
gguguuuuguuuugacauu

SEQ ID NO: 2735554 - RNA, 19 nt, Artificial Sequence
  Description of Artificial Sequence: Synthetic oligonucleotide
caggaucauuauacugucu

SEQ ID NO: 2735555 - RNA, 19 nt, Artificial Sequence
  Description of Artificial Sequence: Synthetic oligonucleotide
ugucagcuccuagcaccaa

SEQ ID NO: 2735556 - RNA, 19 nt, Artificial Sequence
  Description of Artificial Sequence: Synthetic oligonucleotide
accuugguguauagauuuu

SEQ ID NO: 2735557 - RNA, 19 nt, Artificial Sequence
  Description of Artificial Sequence: Synthetic oligonucleotide
cuagcaccaaaggguuuaa

SEQ ID NO: 2735558 - RNA, 19 nt, Artificial Sequence
  Description of Artificial Sequence: Synthetic oligonucleotide
gguuuaaucugaagaucau

SEQ ID NO: 2735559 - RNA, 19 nt, Artificial Sequence
  Description of Artificial Sequence: Synthetic oligonucleotide
ccaaaggguuuaaucugaa

SEQ ID NO: 2735560 - RNA, 19 nt, Artificial Sequence
  Description of Artificial Sequence: Synthetic oligonucleotide
ccgcagucaauguccugug

SEQ ID NO: 2735561 - RNA, 19 nt, Artificial Sequence
  Description of Artificial Sequence: Synthetic oligonucleotide
ccuagcaccaaaggguuua

SEQ ID NO: 2735562 - RNA, 19 nt, Artificial Sequence
  Description of Artificial Sequence: Synthetic oligonucleotide
accacuccuuggagcagau

SEQ ID NO: 2735563 - RNA, 19 nt, Artificial Sequence
  Description of Artificial Sequence: Synthetic oligonucleotide
ggcuuugauccuugcacuu

SEQ ID NO: 2735564 - RNA, 19 nt, Artificial Sequence
  Description of Artificial Sequence: Synthetic oligonucleotide
cuccugcuuguugcaagaa

SEQ ID NO: 2735565 - RNA, 19 nt, Artificial Sequence
  Description of Artificial Sequence: Synthetic oligonucleotide
gcgacagcaggaucauuau

SEQ ID NO: 2735566 - RNA, 19 nt, Artificial Sequence
  Description of Artificial Sequence: Synthetic oligonucleotide
auguccccucucagugaga

SEQ ID NO: 2735567 - RNA, 19 nt, Artificial Sequence
  Description of Artificial Sequence: Synthetic oligonucleotide
cagaugcccuccugcuugu

SEQ ID NO: 2735568 - RNA, 19 nt, Artificial Sequence
  Description of Artificial Sequence: Synthetic oligonucleotide
gagcugcguuugcuaacau

SEQ ID NO: 2735569 - RNA, 19 nt, Artificial Sequence
  Description of Artificial Sequence: Synthetic oligonucleotide
uggcgacagcaggaucauu

SEQ ID NO: 2735570 - RNA, 19 nt, Artificial Sequence
  Description of Artificial Sequence: Synthetic oligonucleotide
cugugaguuggagcugcgu

SEQ ID NO: 2735571 - RNA, 19 nt, Artificial Sequence
  Description of Artificial Sequence: Synthetic oligonucleotide
ccuugcacauugguucaaa

SEQ ID NO: 2735572 - RNA, 19 nt, Artificial Sequence
  Description of Artificial Sequence: Synthetic oligonucleotide
cgcagucaauguccuguga

SEQ ID NO: 2735573 - RNA, 19 nt, Artificial Sequence
  Description of Artificial Sequence: Synthetic oligonucleotide
ccacuccuuggagcagaug

SEQ ID NO: 2735574 - RNA, 19 nt, Artificial Sequence
  Description of Artificial Sequence: Synthetic oligonucleotide
cgacagcaggaucauuaua

SEQ ID NO: 2735575 - RNA, 19 nt, Artificial Sequence
  Description of Artificial Sequence: Synthetic oligonucleotide
cguuugcuaacaugacaau

SEQ ID NO: 2735576 - RNA, 19 nt, Artificial Sequence
  Description of Artificial Sequence: Synthetic oligonucleotide
aaugucaucuccuuauggc

SEQ ID NO: 2735577 - RNA, 19 nt, Artificial Sequence
  Description of Artificial Sequence: Synthetic oligonucleotide
aaugaaauggucauacucc

SEQ ID NO: 2735578 - RNA, 19 nt, Artificial Sequence
  Description of Artificial Sequence: Synthetic oligonucleotide
uuucugguagucuugaccg

SEQ ID NO: 2735579 - RNA, 19 nt, Artificial Sequence
  Description of Artificial Sequence: Synthetic oligonucleotide
auggucauacuccacagcc

SEQ ID NO: 2735580 - RNA, 19 nt, Artificial Sequence
  Description of Artificial Sequence: Synthetic oligonucleotide
aaaguggacaggucgcacc

SEQ ID NO: 2735581 - RNA, 19 nt, Artificial Sequence
  Description of Artificial Sequence: Synthetic oligonucleotide
aauggucauacuccacagc

SEQ ID NO: 2735582 - RNA, 19 nt, Artificial Sequence
  Description of Artificial Sequence: Synthetic oligonucleotide
auguaaaacgucuugggug

SEQ ID NO: 2735583 - RNA, 19 nt, Artificial Sequence
  Description of Artificial Sequence: Synthetic oligonucleotide
aguagacugaaguauucgg

SEQ ID NO: 2735584 - RNA, 19 nt, Artificial Sequence
  Description of Artificial Sequence: Synthetic oligonucleotide
gaagaugaaugucaucucc

SEQ ID NO: 2735585 - RNA, 19 nt, Artificial Sequence
  Description of Artificial Sequence: Synthetic oligonucleotide
uguaaaacgucuugggugu

SEQ ID NO: 2735586 - RNA, 19 nt, Artificial Sequence
  Description of Artificial Sequence: Synthetic oligonucleotide
aaauggucauacuccacag

SEQ ID NO: 2735587 - RNA, 19 nt, Artificial Sequence
  Description of Artificial Sequence: Synthetic oligonucleotide
uagacugaaguauucggag

SEQ ID NO: 2735588 - RNA, 19 nt, Artificial Sequence
  Description of Artificial Sequence: Synthetic oligonucleotide
gugaguaccacauugccug

SEQ ID NO: 2735589 - RNA, 19 nt, Artificial Sequence
  Description of Artificial Sequence: Synthetic oligonucleotide
uugaccgcgaugaagacgu

SEQ ID NO: 2735590 - RNA, 19 nt, Artificial Sequence
  Description of Artificial Sequence: Synthetic oligonucleotide
acguaaguugucaucaucc

SEQ ID NO: 2735591 - RNA, 19 nt, Artificial Sequence
  Description of Artificial Sequence: Synthetic oligonucleotide
gacugaaguauucggagag

SEQ ID NO: 2735592 - RNA, 19 nt, Artificial Sequence
  Description of Artificial Sequence: Synthetic oligonucleotide
gaaugucaucuccuuaugg

SEQ ID NO: 2735593 - RNA, 19 nt, Artificial Sequence
  Description of Artificial Sequence: Synthetic oligonucleotide
aacaggucgagacgcgcgc

SEQ ID NO: 2735594 - RNA, 19 nt, Artificial Sequence
  Description of Artificial Sequence: Synthetic oligonucleotide
augucaucuccuuauggcg

SEQ ID NO: 2735595 - RNA, 19 nt, Artificial Sequence
  Description of Artificial Sequence: Synthetic oligonucleotide
auucggagaggcuaugcac

SEQ ID NO: 2735596 - RNA, 19 nt, Artificial Sequence
  Description of Artificial Sequence: Synthetic oligonucleotide
augaagacgucacugggag

SEQ ID NO: 2735597 - RNA, 19 nt, Artificial Sequence
  Description of Artificial Sequence: Synthetic oligonucleotide
accuugugcucgcugaucc

SEQ ID NO: 2735598 - RNA, 19 nt, Artificial Sequence
  Description of Artificial Sequence: Synthetic oligonucleotide
guuugcccgauguaaaacg

SEQ ID NO: 2735599 - RNA, 19 nt, Artificial Sequence
  Description of Artificial Sequence: Synthetic oligonucleotide
ucgaacaacaggucgagac

SEQ ID NO: 2735600 - RNA, 19 nt, Artificial Sequence
  Description of Artificial Sequence: Synthetic oligonucleotide
gaaauggucauacuccaca

SEQ ID NO: 2735601 - RNA, 19 nt, Artificial Sequence
  Description of Artificial Sequence: Synthetic oligonucleotide
gaggcuaugcaccucgcgg

SEQ ID NO: 2735602 - RNA, 19 nt, Artificial Sequence
  Description of Artificial Sequence: Synthetic oligonucleotide
ugugagcuuggccagagcu

SEQ ID NO: 2735603 - RNA, 19 nt, Artificial Sequence
  Description of Artificial Sequence: Synthetic oligonucleotide
caaugaaauggucauacuc

SEQ ID NO: 2735604 - RNA, 19 nt, Artificial Sequence
  Description of Artificial Sequence: Synthetic oligonucleotide
uccccaucagugaagauga

SEQ ID NO: 2735605 - RNA, 19 nt, Artificial Sequence
  Description of Artificial Sequence: Synthetic oligonucleotide
cugagguugacguaaguug

SEQ ID NO: 2735606 - RNA, 19 nt, Artificial Sequence
  Description of Artificial Sequence: Synthetic oligonucleotide
ugagguugacguaaguugu

SEQ ID NO: 2735607 - RNA, 19 nt, Artificial Sequence
  Description of Artificial Sequence: Synthetic oligonucleotide
cuuucugguagucuugacc

SEQ ID NO: 2735608 - RNA, 19 nt, Artificial Sequence
  Description of Artificial Sequence: Synthetic oligonucleotide
uucggagaggcuaugcacc

SEQ ID NO: 2735609 - RNA, 19 nt, Artificial Sequence
  Description of Artificial Sequence: Synthetic oligonucleotide
gucacugggagacaggacc

SEQ ID NO: 2735610 - RNA, 19 nt, Artificial Sequence
  Description of Artificial Sequence: Synthetic oligonucleotide
ugggccgcagaacaguugg

SEQ ID NO: 2735611 - RNA, 19 nt, Artificial Sequence
  Description of Artificial Sequence: Synthetic oligonucleotide
ucaucauccacauggcaga

SEQ ID NO: 2735612 - RNA, 19 nt, Artificial Sequence
  Description of Artificial Sequence: Synthetic oligonucleotide
uugacguaaguugucauca

SEQ ID NO: 2735613 - RNA, 19 nt, Artificial Sequence
  Description of Artificial Sequence: Synthetic oligonucleotide
cugcaaaguggacaggucg

SEQ ID NO: 2735614 - RNA, 19 nt, Artificial Sequence
  Description of Artificial Sequence: Synthetic oligonucleotide
ugcaaaguggacaggucgc

SEQ ID NO: 2735615 - RNA, 19 nt, Artificial Sequence
  Description of Artificial Sequence: Synthetic oligonucleotide
uuuugcugcaaaguggaca

SEQ ID NO: 2735616 - RNA, 19 nt, Artificial Sequence
  Description of Artificial Sequence: Synthetic oligonucleotide
augaaugucaucuccuuau

SEQ ID NO: 2735617 - RNA, 19 nt, Artificial Sequence
  Description of Artificial Sequence: Synthetic oligonucleotide
gaagacgucacugggagac

SEQ ID NO: 2735618 - RNA, 19 nt, Artificial Sequence
  Description of Artificial Sequence: Synthetic oligonucleotide
uuagcuggcuagcagccgc

SEQ ID NO: 2735619 - RNA, 19 nt, Artificial Sequence
  Description of Artificial Sequence: Synthetic oligonucleotide
aaaacgucuuggguguggg

SEQ ID NO: 2735620 - RNA, 19 nt, Artificial Sequence
  Description of Artificial Sequence: Synthetic oligonucleotide
uuggguguggggauuagcu

SEQ ID NO: 2735621 - RNA, 19 nt, Artificial Sequence
  Description of Artificial Sequence: Synthetic oligonucleotide
augaaauggucauacucca

SEQ ID NO: 2735622 - RNA, 19 nt, Artificial Sequence
  Description of Artificial Sequence: Synthetic oligonucleotide
acagccaucuugcaggaca

SEQ ID NO: 2735623 - RNA, 19 nt, Artificial Sequence
  Description of Artificial Sequence: Synthetic oligonucleotide
ucugguagucuugaccgcg

SEQ ID NO: 2735624 - RNA, 19 nt, Artificial Sequence
  Description of Artificial Sequence: Synthetic oligonucleotide
aucagugaagaugaauguc

SEQ ID NO: 2735625 - RNA, 19 nt, Artificial Sequence
  Description of Artificial Sequence: Synthetic oligonucleotide
uccuuauggcgcgagaucc

SEQ ID NO: 2735626 - RNA, 19 nt, Artificial Sequence
  Description of Artificial Sequence: Synthetic oligonucleotide
gaacaacaggucgagacgc

SEQ ID NO: 2735627 - RNA, 19 nt, Artificial Sequence
  Description of Artificial Sequence: Synthetic oligonucleotide
gaguagacugaaguauucg

SEQ ID NO: 2735628 - RNA, 19 nt, Artificial Sequence
  Description of Artificial Sequence: Synthetic oligonucleotide
uggugaguaccacauugcc

SEQ ID NO: 2735629 - RNA, 19 nt, Artificial Sequence
  Description of Artificial Sequence: Synthetic oligonucleotide
ggagacaggaccucggccg

SEQ ID NO: 2735630 - RNA, 19 nt, Artificial Sequence
  Description of Artificial Sequence: Synthetic oligonucleotide
gaugggccgguccagacug

SEQ ID NO: 2735631 - RNA, 19 nt, Artificial Sequence
  Description of Artificial Sequence: Synthetic oligonucleotide
ugaaugucaucuccuuaug

SEQ ID NO: 2735632 - RNA, 19 nt, Artificial Sequence
  Description of Artificial Sequence: Synthetic oligonucleotide
agauucaaugaaaugguca

SEQ ID NO: 2735633 - RNA, 19 nt, Artificial Sequence
  Description of Artificial Sequence: Synthetic oligonucleotide
aacaguuggugaguaccac

SEQ ID NO: 2735634 - RNA, 19 nt, Artificial Sequence
  Description of Artificial Sequence: Synthetic oligonucleotide
agugaagaugaaugucauc

SEQ ID NO: 2735635 - RNA, 19 nt, Artificial Sequence
  Description of Artificial Sequence: Synthetic oligonucleotide
agugaguagacugaaguau

SEQ ID NO: 2735636 - RNA, 19 nt, Artificial Sequence
  Description of Artificial Sequence: Synthetic oligonucleotide
ugcccgauguaaaacgucu

SEQ ID NO: 2735637 - RNA, 19 nt, Artificial Sequence
  Description of Artificial Sequence: Synthetic oligonucleotide
ugagcuuggccagagcucc

SEQ ID NO: 2735638 - RNA, 19 nt, Artificial Sequence
  Description of Artificial Sequence: Synthetic oligonucleotide
uuugcccgauguaaaacgu

SEQ ID NO: 2735639 - RNA, 19 nt, Artificial Sequence
  Description of Artificial Sequence: Synthetic oligonucleotide
uauggcgcgagauccaggu

SEQ ID NO: 2735640 - RNA, 19 nt, Artificial Sequence
  Description of Artificial Sequence: Synthetic oligonucleotide
ccaucagugaagaugaaug

SEQ ID NO: 2735641 - RNA, 19 nt, Artificial Sequence
  Description of Artificial Sequence: Synthetic oligonucleotide
aagaugaaugucaucuccu

SEQ ID NO: 2735642 - RNA, 19 nt, Artificial Sequence
  Description of Artificial Sequence: Synthetic oligonucleotide
aaguggacaggucgcaccu

SEQ ID NO: 2735643 - RNA, 19 nt, Artificial Sequence
  Description of Artificial Sequence: Synthetic oligonucleotide
ucuucccagauucaaugaa

SEQ ID NO: 2735644 - RNA, 19 nt, Artificial Sequence
  Description of Artificial Sequence: Synthetic oligonucleotide
aacgucuugggugugggga

SEQ ID NO: 2735645 - RNA, 19 nt, Artificial Sequence
  Description of Artificial Sequence: Synthetic oligonucleotide
ugaguagacugaaguauuc

SEQ ID NO: 2735646 - RNA, 19 nt, Artificial Sequence
  Description of Artificial Sequence: Synthetic oligonucleotide
cugaaguauucggagaggc

SEQ ID NO: 2735647 - RNA, 19 nt, Artificial Sequence
  Description of Artificial Sequence: Synthetic oligonucleotide
guagucuugaccgcgauga

SEQ ID NO: 2735648 - RNA, 19 nt, Artificial Sequence
  Description of Artificial Sequence: Synthetic oligonucleotide
gugaagaugaaugucaucu

SEQ ID NO: 2735649 - RNA, 19 nt, Artificial Sequence
  Description of Artificial Sequence: Synthetic oligonucleotide
uucccagauucaaugaaau

SEQ ID NO: 2735650 - RNA, 19 nt, Artificial Sequence
  Description of Artificial Sequence: Synthetic oligonucleotide
ugaaguauucggagaggcu

SEQ ID NO: 2735651 - RNA, 19 nt, Artificial Sequence
  Description of Artificial Sequence: Synthetic oligonucleotide
uaaaacgucuugggugugg

SEQ ID NO: 2735652 - RNA, 19 nt, Artificial Sequence
  Description of Artificial Sequence: Synthetic oligonucleotide
uggcgcgagauccaggucu

SEQ ID NO: 2735653 - RNA, 19 nt, Artificial Sequence
  Description of Artificial Sequence: Synthetic oligonucleotide
ucgcugauccguucugugg

SEQ ID NO: 2735654 - RNA, 19 nt, Artificial Sequence
  Description of Artificial Sequence: Synthetic oligonucleotide
acaggucgcaccuugugcu

SEQ ID NO: 2735655 - RNA, 19 nt, Artificial Sequence
  Description of Artificial Sequence: Synthetic oligonucleotide
guaaguugucaucauccac

SEQ ID NO: 2735656 - RNA, 19 nt, Artificial Sequence
  Description of Artificial Sequence: Synthetic oligonucleotide
gacaggucgcaccuugugc

SEQ ID NO: 2735657 - RNA, 19 nt, Artificial Sequence
  Description of Artificial Sequence: Synthetic oligonucleotide
guggggauuagcuggcuag

SEQ ID NO: 2735658 - RNA, 19 nt, Artificial Sequence
  Description of Artificial Sequence: Synthetic oligonucleotide
gauguaaaacgucuugggu

SEQ ID NO: 2735659 - RNA, 19 nt, Artificial Sequence
  Description of Artificial Sequence: Synthetic oligonucleotide
aaacgucuugggugugggg

SEQ ID NO: 2735660 - RNA, 19 nt, Artificial Sequence
  Description of Artificial Sequence: Synthetic oligonucleotide
ggucucgaacaacaggucg

SEQ ID NO: 2735661 - RNA, 19 nt, Artificial Sequence
  Description of Artificial Sequence: Synthetic oligonucleotide
ugaagaugaaugucaucuc

SEQ ID NO: 2735662 - RNA, 19 nt, Artificial Sequence
  Description of Artificial Sequence: Synthetic oligonucleotide
gucaucuccuuauggcgcg

SEQ ID NO: 2735663 - RNA, 19 nt, Artificial Sequence
  Description of Artificial Sequence: Synthetic oligonucleotide
ggguguggggauuagcugg

SEQ ID NO: 2735664 - RNA, 19 nt, Artificial Sequence
  Description of Artificial Sequence: Synthetic oligonucleotide
ugcaccucgcggacaaggg

SEQ ID NO: 2735665 - RNA, 19 nt, Artificial Sequence
  Description of Artificial Sequence: Synthetic oligonucleotide
ugaaauggucauacuccac

SEQ ID NO: 2735666 - RNA, 19 nt, Artificial Sequence
  Description of Artificial Sequence: Synthetic oligonucleotide
uaccacauugccugugagc

SEQ ID NO: 2735667 - RNA, 19 nt, Artificial Sequence
  Description of Artificial Sequence: Synthetic oligonucleotide
ucaaugaaauggucauacu

SEQ ID NO: 2735668 - RNA, 19 nt, Artificial Sequence
  Description of Artificial Sequence: Synthetic oligonucleotide
gaaguauucggagaggcua

SEQ ID NO: 2735669 - RNA, 19 nt, Artificial Sequence
  Description of Artificial Sequence: Synthetic oligonucleotide
ggauuagcuggcuagcagc

SEQ ID NO: 2735670 - RNA, 19 nt, Artificial Sequence
  Description of Artificial Sequence: Synthetic oligonucleotide
agacugaaguauucggaga

SEQ ID NO: 2735671 - RNA, 19 nt, Artificial Sequence
  Description of Artificial Sequence: Synthetic oligonucleotide
ugaaacuuucugguagucu

SEQ ID NO: 2735672 - RNA, 19 nt, Artificial Sequence
  Description of Artificial Sequence: Synthetic oligonucleotide
acaacaggucgagacgcgc

SEQ ID NO: 2735673 - RNA, 19 nt, Artificial Sequence
  Description of Artificial Sequence: Synthetic oligonucleotide
ucccagauucaaugaaaug

SEQ ID NO: 2735674 - RNA, 19 nt, Artificial Sequence
  Description of Artificial Sequence: Synthetic oligonucleotide
ggagaggcuaugcaccucg

SEQ ID NO: 2735675 - RNA, 19 nt, Artificial Sequence
  Description of Artificial Sequence: Synthetic oligonucleotide
guugacguaaguugucauc

SEQ ID NO: 2735676 - RNA, 19 nt, Artificial Sequence
  Description of Artificial Sequence: Synthetic oligonucleotide
uccguccuccccaucagug

SEQ ID NO: 2735677 - RNA, 19 nt, Artificial Sequence
  Description of Artificial Sequence: Synthetic oligonucleotide
uuauggcgcgagauccagg

SEQ ID NO: 2735678 - RNA, 19 nt, Artificial Sequence
  Description of Artificial Sequence: Synthetic oligonucleotide
aacuuucugguagucuuga

SEQ ID NO: 2735679 - RNA, 19 nt, Artificial Sequence
  Description of Artificial Sequence: Synthetic oligonucleotide
gagccuggcggcuaugggc

SEQ ID NO: 2735680 - RNA, 19 nt, Artificial Sequence
  Description of Artificial Sequence: Synthetic oligonucleotide
agaggcuaugcaccucgcg

SEQ ID NO: 2735681 - RNA, 19 nt, Artificial Sequence
  Description of Artificial Sequence: Synthetic oligonucleotide
aaacuuucugguagucuug

SEQ ID NO: 2735682 - RNA, 19 nt, Artificial Sequence
  Description of Artificial Sequence: Synthetic oligonucleotide
ucucgaacaacaggucgag

SEQ ID NO: 2735683 - RNA, 19 nt, Artificial Sequence
  Description of Artificial Sequence: Synthetic oligonucleotide
caacaggucgagacgcgcg

SEQ ID NO: 2735684 - RNA, 19 nt, Artificial Sequence
  Description of Artificial Sequence: Synthetic oligonucleotide
aguaccacauugccuguga

SEQ ID NO: 2735685 - RNA, 19 nt, Artificial Sequence
  Description of Artificial Sequence: Synthetic oligonucleotide
uggucauacuccacagcca

SEQ ID NO: 2735686 - RNA, 19 nt, Artificial Sequence
  Description of Artificial Sequence: Synthetic oligonucleotide
acugaaguauucggagagg

SEQ ID NO: 2735687 - RNA, 19 nt, Artificial Sequence
  Description of Artificial Sequence: Synthetic oligonucleotide
gacguaaguugucaucauc

SEQ ID NO: 2735688 - RNA, 19 nt, Artificial Sequence
  Description of Artificial Sequence: Synthetic oligonucleotide
aacaacaggucgagacgcg

SEQ ID NO: 2735689 - RNA, 19 nt, Artificial Sequence
  Description of Artificial Sequence: Synthetic oligonucleotide
uccacauggcagaaccacu

SEQ ID NO: 2735690 - RNA, 19 nt, Artificial Sequence
  Description of Artificial Sequence: Synthetic oligonucleotide
gagacaggaccucggccgg

SEQ ID NO: 2735691 - RNA, 19 nt, Artificial Sequence
  Description of Artificial Sequence: Synthetic oligonucleotide
agcgcccugagguugacgu

SEQ ID NO: 2735692 - RNA, 19 nt, Artificial Sequence
  Description of Artificial Sequence: Synthetic oligonucleotide
ugcugcaaaguggacaggu

SEQ ID NO: 2735693 - RNA, 19 nt, Artificial Sequence
  Description of Artificial Sequence: Synthetic oligonucleotide
uccagacugggguuugccc

SEQ ID NO: 2735694 - RNA, 19 nt, Artificial Sequence
  Description of Artificial Sequence: Synthetic oligonucleotide
cacauugccugugagcuug

SEQ ID NO: 2735695 - RNA, 19 nt, Artificial Sequence
  Description of Artificial Sequence: Synthetic oligonucleotide
cuugaccgcgaugaagacg

SEQ ID NO: 2735696 - RNA, 19 nt, Artificial Sequence
  Description of Artificial Sequence: Synthetic oligonucleotide
acugggguuugcccgaugu

SEQ ID NO: 2735697 - RNA, 19 nt, Artificial Sequence
  Description of Artificial Sequence: Synthetic oligonucleotide
accgcgaugaagacgucac

SEQ ID NO: 2735698 - RNA, 19 nt, Artificial Sequence
  Description of Artificial Sequence: Synthetic oligonucleotide
cagauucaaugaaaugguc

SEQ ID NO: 2735699 - RNA, 19 nt, Artificial Sequence
  Description of Artificial Sequence: Synthetic oligonucleotide
gaugaagacgucacuggga

SEQ ID NO: 2735700 - RNA, 19 nt, Artificial Sequence
  Description of Artificial Sequence: Synthetic oligonucleotide
gucuugaccgcgaugaaga

SEQ ID NO: 2735701 - RNA, 19 nt, Artificial Sequence
  Description of Artificial Sequence: Synthetic oligonucleotide
uggguguggggauuagcug

SEQ ID NO: 2735702 - RNA, 19 nt, Artificial Sequence
  Description of Artificial Sequence: Synthetic oligonucleotide
agucuugaccgcgaugaag

SEQ ID NO: 2735703 - RNA, 19 nt, Artificial Sequence
  Description of Artificial Sequence: Synthetic oligonucleotide
guagacugaaguauucgga

SEQ ID NO: 2735704 - RNA, 19 nt, Artificial Sequence
  Description of Artificial Sequence: Synthetic oligonucleotide
gaugaaugucaucuccuua

SEQ ID NO: 2735705 - RNA, 19 nt, Artificial Sequence
  Description of Artificial Sequence: Synthetic oligonucleotide
agaugaaugucaucuccuu

SEQ ID NO: 2735706 - RNA, 19 nt, Artificial Sequence
  Description of Artificial Sequence: Synthetic oligonucleotide
gcgaugaagacgucacugg

SEQ ID NO: 2735707 - RNA, 19 nt, Artificial Sequence
  Description of Artificial Sequence: Synthetic oligonucleotide
ggauccgcgucucugcgcg

SEQ ID NO: 2735708 - RNA, 19 nt, Artificial Sequence
  Description of Artificial Sequence: Synthetic oligonucleotide
ugggguuugcccgauguaa

SEQ ID NO: 2735709 - RNA, 19 nt, Artificial Sequence
  Description of Artificial Sequence: Synthetic oligonucleotide
gagugaguagacugaagua

SEQ ID NO: 2735710 - RNA, 19 nt, Artificial Sequence
  Description of Artificial Sequence: Synthetic oligonucleotide
aggcuaugcaccucgcgga

SEQ ID NO: 2735711 - RNA, 19 nt, Artificial Sequence
  Description of Artificial Sequence: Synthetic oligonucleotide
gcaggacagagccuggcgg

SEQ ID NO: 2735712 - RNA, 19 nt, Artificial Sequence
  Description of Artificial Sequence: Synthetic oligonucleotide
cuuauggcgcgagauccag

SEQ ID NO: 2735713 - RNA, 19 nt, Artificial Sequence
  Description of Artificial Sequence: Synthetic oligonucleotide
ucuccuuauggcgcgagau

SEQ ID NO: 2735714 - RNA, 19 nt, Artificial Sequence
  Description of Artificial Sequence: Synthetic oligonucleotide
aaguauucggagaggcuau

SEQ ID NO: 2735715 - RNA, 19 nt, Artificial Sequence
  Description of Artificial Sequence: Synthetic oligonucleotide
cgauguaaaacgucuuggg

SEQ ID NO: 2735716 - RNA, 19 nt, Artificial Sequence
  Description of Artificial Sequence: Synthetic oligonucleotide
ucggagaggcuaugcaccu

SEQ ID NO: 2735717 - RNA, 19 nt, Artificial Sequence
  Description of Artificial Sequence: Synthetic oligonucleotide
agcuccguccuccccauca

SEQ ID NO: 2735718 - RNA, 19 nt, Artificial Sequence
  Description of Artificial Sequence: Synthetic oligonucleotide
ugccugugagcuuggccag

SEQ ID NO: 2735719 - RNA, 19 nt, Artificial Sequence
  Description of Artificial Sequence: Synthetic oligonucleotide
gaacaguuggugaguacca

SEQ ID NO: 2735720 - RNA, 19 nt, Artificial Sequence
  Description of Artificial Sequence: Synthetic oligonucleotide
augcaccucgcggacaagg

SEQ ID NO: 2735721 - RNA, 19 nt, Artificial Sequence
  Description of Artificial Sequence: Synthetic oligonucleotide
gauccguucuguggccugg

SEQ ID NO: 2735722 - RNA, 19 nt, Artificial Sequence
  Description of Artificial Sequence: Synthetic oligonucleotide
uugcccgauguaaaacguc

SEQ ID NO: 2735723 - RNA, 19 nt, Artificial Sequence
  Description of Artificial Sequence: Synthetic oligonucleotide
cuucccagauucaaugaaa

SEQ ID NO: 2735724 - RNA, 19 nt, Artificial Sequence
  Description of Artificial Sequence: Synthetic oligonucleotide
guggauccgcgucucugcg

SEQ ID NO: 2735725 - RNA, 19 nt, Artificial Sequence
  Description of Artificial Sequence: Synthetic oligonucleotide
guggacaggucgcaccuug

SEQ ID NO: 2735726 - RNA, 19 nt, Artificial Sequence
  Description of Artificial Sequence: Synthetic oligonucleotide
ucuugaccgcgaugaagac

SEQ ID NO: 2735727 - RNA, 19 nt, Artificial Sequence
  Description of Artificial Sequence: Synthetic oligonucleotide
cagccaucuugcaggacag

SEQ ID NO: 2735728 - RNA, 19 nt, Artificial Sequence
  Description of Artificial Sequence: Synthetic oligonucleotide
gggauuagcuggcuagcag

SEQ ID NO: 2735729 - RNA, 19 nt, Artificial Sequence
  Description of Artificial Sequence: Synthetic oligonucleotide
guaccacauugccugugag

SEQ ID NO: 2735730 - RNA, 19 nt, Artificial Sequence
  Description of Artificial Sequence: Synthetic oligonucleotide
ugauccguucuguggccug

SEQ ID NO: 2735731 - RNA, 19 nt, Artificial Sequence
  Description of Artificial Sequence: Synthetic oligonucleotide
ugaagacgucacugggaga

SEQ ID NO: 2735732 - RNA, 19 nt, Artificial Sequence
  Description of Artificial Sequence: Synthetic oligonucleotide
agacgucacugggagacag

SEQ ID NO: 2735733 - RNA, 19 nt, Artificial Sequence
  Description of Artificial Sequence: Synthetic oligonucleotide
auccaggucucgaacaaca

SEQ ID NO: 2735734 - RNA, 19 nt, Artificial Sequence
  Description of Artificial Sequence: Synthetic oligonucleotide
aucauccacauggcagaac

SEQ ID NO: 2735735 - RNA, 19 nt, Artificial Sequence
  Description of Artificial Sequence: Synthetic oligonucleotide
uguggggauuagcuggcua

SEQ ID NO: 2735736 - RNA, 19 nt, Artificial Sequence
  Description of Artificial Sequence: Synthetic oligonucleotide
uaugggccgcagaacaguu

SEQ ID NO: 2735737 - RNA, 19 nt, Artificial Sequence
  Description of Artificial Sequence: Synthetic oligonucleotide
guauucggagaggcuaugc

SEQ ID NO: 2735738 - RNA, 19 nt, Artificial Sequence
  Description of Artificial Sequence: Synthetic oligonucleotide
uggggauuagcuggcuagc

SEQ ID NO: 2735739 - RNA, 19 nt, Artificial Sequence
  Description of Artificial Sequence: Synthetic oligonucleotide
ugaguaccacauugccugu

SEQ ID NO: 2735740 - RNA, 19 nt, Artificial Sequence
  Description of Artificial Sequence: Synthetic oligonucleotide
ccgauguaaaacgucuugg

SEQ ID NO: 2735741 - RNA, 19 nt, Artificial Sequence
  Description of Artificial Sequence: Synthetic oligonucleotide
cucgcugauccguucugug

SEQ ID NO: 2735742 - RNA, 19 nt, Artificial Sequence
  Description of Artificial Sequence: Synthetic oligonucleotide
ugacguaaguugucaucau

SEQ ID NO: 2735743 - RNA, 19 nt, Artificial Sequence
  Description of Artificial Sequence: Synthetic oligonucleotide
uccuccccaucagugaaga

SEQ ID NO: 2735744 - RNA, 19 nt, Artificial Sequence
  Description of Artificial Sequence: Synthetic oligonucleotide
gucucgaacaacaggucga

SEQ ID NO: 2735745 - RNA, 19 nt, Artificial Sequence
  Description of Artificial Sequence: Synthetic oligonucleotide
ccaggucucgaacaacagg

SEQ ID NO: 2735746 - RNA, 19 nt, Artificial Sequence
  Description of Artificial Sequence: Synthetic oligonucleotide
ggcuaugggccgcagaaca

SEQ ID NO: 2735747 - RNA, 19 nt, Artificial Sequence
  Description of Artificial Sequence: Synthetic oligonucleotide
caucagugaagaugaaugu

SEQ ID NO: 2735748 - RNA, 19 nt, Artificial Sequence
  Description of Artificial Sequence: Synthetic oligonucleotide
gcgcggugaaacuuucugg

SEQ ID NO: 2735749 - RNA, 19 nt, Artificial Sequence
  Description of Artificial Sequence: Synthetic oligonucleotide
gacaggaccucggccgggg

SEQ ID NO: 2735750 - RNA, 19 nt, Artificial Sequence
  Description of Artificial Sequence: Synthetic oligonucleotide
cgaacaacaggucgagacg

SEQ ID NO: 2735751 - RNA, 19 nt, Artificial Sequence
  Description of Artificial Sequence: Synthetic oligonucleotide
acgucacugggagacagga

SEQ ID NO: 2735752 - RNA, 19 nt, Artificial Sequence
  Description of Artificial Sequence: Synthetic oligonucleotide
gguggauccgcgucucugc

SEQ ID NO: 2735753 - RNA, 19 nt, Artificial Sequence
  Description of Artificial Sequence: Synthetic oligonucleotide
cuccuuauggcgcgagauc

SEQ ID NO: 2735754 - RNA, 19 nt, Artificial Sequence
  Description of Artificial Sequence: Synthetic oligonucleotide
gacgucacugggagacagg

SEQ ID NO: 2735755 - RNA, 19 nt, Artificial Sequence
  Description of Artificial Sequence: Synthetic oligonucleotide
ccaucuugcaggacagagc

SEQ ID NO: 2735756 - RNA, 19 nt, Artificial Sequence
  Description of Artificial Sequence: Synthetic oligonucleotide
uggauccgcgucucugcgc

SEQ ID NO: 2735757 - RNA, 19 nt, Artificial Sequence
  Description of Artificial Sequence: Synthetic oligonucleotide
aggucucgaacaacagguc

SEQ ID NO: 2735758 - RNA, 19 nt, Artificial Sequence
  Description of Artificial Sequence: Synthetic oligonucleotide
aguauucggagaggcuaug

SEQ ID NO: 2735759 - RNA, 19 nt, Artificial Sequence
  Description of Artificial Sequence: Synthetic oligonucleotide
gacaagggcuccgggcucc

SEQ ID NO: 2735760 - RNA, 19 nt, Artificial Sequence
  Description of Artificial Sequence: Synthetic oligonucleotide
cuuggguguggggauuagc

SEQ ID NO: 2735761 - RNA, 19 nt, Artificial Sequence
  Description of Artificial Sequence: Synthetic oligonucleotide
aggucgcaccuugugcucg

SEQ ID NO: 2735762 - RNA, 19 nt, Artificial Sequence
  Description of Artificial Sequence: Synthetic oligonucleotide
uggacaggucgcaccuugu

SEQ ID NO: 2735763 - RNA, 19 nt, Artificial Sequence
  Description of Artificial Sequence: Synthetic oligonucleotide
caaaguggacaggucgcac

SEQ ID NO: 2735764 - RNA, 19 nt, Artificial Sequence
  Description of Artificial Sequence: Synthetic oligonucleotide
cggugaaacuuucugguag

SEQ ID NO: 2735765 - RNA, 19 nt, Artificial Sequence
  Description of Artificial Sequence: Synthetic oligonucleotide
cacauggcagaaccacuuc

SEQ ID NO: 2735766 - RNA, 19 nt, Artificial Sequence
  Description of Artificial Sequence: Synthetic oligonucleotide
gagacgcgcgcggugaaac

SEQ ID NO: 2735767 - RNA, 19 nt, Artificial Sequence
  Description of Artificial Sequence: Synthetic oligonucleotide
aucagcggggcgggaagcg

SEQ ID NO: 2735768 - RNA, 19 nt, Artificial Sequence
  Description of Artificial Sequence: Synthetic oligonucleotide
uagcuggcuagcagccgca

SEQ ID NO: 2735769 - RNA, 19 nt, Artificial Sequence
  Description of Artificial Sequence: Synthetic oligonucleotide
caggucgagacgcgcgcgg

SEQ ID NO: 2735770 - RNA, 19 nt, Artificial Sequence
  Description of Artificial Sequence: Synthetic oligonucleotide
gagguugacguaaguuguc

SEQ ID NO: 2735771 - RNA, 19 nt, Artificial Sequence
  Description of Artificial Sequence: Synthetic oligonucleotide
acaggucgagacgcgcgcg

SEQ ID NO: 2735772 - RNA, 19 nt, Artificial Sequence
  Description of Artificial Sequence: Synthetic oligonucleotide
auggcgcgagauccagguc

SEQ ID NO: 2735773 - RNA, 19 nt, Artificial Sequence
  Description of Artificial Sequence: Synthetic oligonucleotide
gaguaccacauugccugug

SEQ ID NO: 2735774 - RNA, 19 nt, Artificial Sequence
  Description of Artificial Sequence: Synthetic oligonucleotide
gaccccgggcgguggaucc

SEQ ID NO: 2735775 - RNA, 19 nt, Artificial Sequence
  Description of Artificial Sequence: Synthetic oligonucleotide
gguagucuugaccgcgaug

SEQ ID NO: 2735776 - RNA, 19 nt, Artificial Sequence
  Description of Artificial Sequence: Synthetic oligonucleotide
acgucuuggguguggggau

SEQ ID NO: 2735777 - RNA, 19 nt, Artificial Sequence
  Description of Artificial Sequence: Synthetic oligonucleotide
ugguagucuugaccgcgau

SEQ ID NO: 2735778 - RNA, 19 nt, Artificial Sequence
  Description of Artificial Sequence: Synthetic oligonucleotide
cuaugcaccucgcggacaa

SEQ ID NO: 2735779 - RNA, 19 nt, Artificial Sequence
  Description of Artificial Sequence: Synthetic oligonucleotide
cagagccuggcggcuaugg

SEQ ID NO: 2735780 - RNA, 19 nt, Artificial Sequence
  Description of Artificial Sequence: Synthetic oligonucleotide
gucucugcgcgcgcgagug

SEQ ID NO: 2735781 - RNA, 19 nt, Artificial Sequence
  Description of Artificial Sequence: Synthetic oligonucleotide
uagucuugaccgcgaugaa

SEQ ID NO: 2735782 - RNA, 19 nt, Artificial Sequence
  Description of Artificial Sequence: Synthetic oligonucleotide
ucuuggguguggggauuag

SEQ ID NO: 2735783 - RNA, 19 nt, Artificial Sequence
  Description of Artificial Sequence: Synthetic oligonucleotide
uugcugcaaaguggacagg

SEQ ID NO: 2735784 - RNA, 19 nt, Artificial Sequence
  Description of Artificial Sequence: Synthetic oligonucleotide
aucuccuuauggcgcgaga

SEQ ID NO: 2735785 - RNA, 19 nt, Artificial Sequence
  Description of Artificial Sequence: Synthetic oligonucleotide
aagacgucacugggagaca

SEQ ID NO: 2735786 - RNA, 19 nt, Artificial Sequence
  Description of Artificial Sequence: Synthetic oligonucleotide
ucgcaccuugugcucgcug

SEQ ID NO: 2735787 - RNA, 19 nt, Artificial Sequence
  Description of Artificial Sequence: Synthetic oligonucleotide
gguuugcccgauguaaaac

SEQ ID NO: 2735788 - RNA, 19 nt, Artificial Sequence
  Description of Artificial Sequence: Synthetic oligonucleotide
ccgcagaacaguuggugag

SEQ ID NO: 2735789 - RNA, 19 nt, Artificial Sequence
  Description of Artificial Sequence: Synthetic oligonucleotide
cccgauguaaaacgucuug

SEQ ID NO: 2735790 - RNA, 19 nt, Artificial Sequence
  Description of Artificial Sequence: Synthetic oligonucleotide
uggcuagcagccgcagcag

SEQ ID NO: 2735791 - RNA, 19 nt, Artificial Sequence
  Description of Artificial Sequence: Synthetic oligonucleotide
auccgcgucucugcgcgcg

SEQ ID NO: 2735792 - RNA, 19 nt, Artificial Sequence
  Description of Artificial Sequence: Synthetic oligonucleotide
uggccaucagcggggcggg

SEQ ID NO: 2735793 - RNA, 19 nt, Artificial Sequence
  Description of Artificial Sequence: Synthetic oligonucleotide
cuguggccuggaugggccg

SEQ ID NO: 2735794 - RNA, 19 nt, Artificial Sequence
  Description of Artificial Sequence: Synthetic oligonucleotide
gugaaacuuucugguaguc

SEQ ID NO: 2735795 - RNA, 19 nt, Artificial Sequence
  Description of Artificial Sequence: Synthetic oligonucleotide
cagagcuccguccucccca

SEQ ID NO: 2735796 - RNA, 19 nt, Artificial Sequence
  Description of Artificial Sequence: Synthetic oligonucleotide
cucugcgcgcgcgagugag

SEQ ID NO: 2735797 - RNA, 19 nt, Artificial Sequence
  Description of Artificial Sequence: Synthetic oligonucleotide
ggacaggucgcaccuugug

SEQ ID NO: 2735798 - RNA, 19 nt, Artificial Sequence
  Description of Artificial Sequence: Synthetic oligonucleotide
guaaaacgucuugggugug

SEQ ID NO: 2735799 - RNA, 19 nt, Artificial Sequence
  Description of Artificial Sequence: Synthetic oligonucleotide
ucgcggacaagggcuccgg

SEQ ID NO: 2735800 - RNA, 19 nt, Artificial Sequence
  Description of Artificial Sequence: Synthetic oligonucleotide
gaccgcgaugaagacguca

SEQ ID NO: 2735801 - RNA, 19 nt, Artificial Sequence
  Description of Artificial Sequence: Synthetic oligonucleotide
ggugaaacuuucugguagu

SEQ ID NO: 2735802 - RNA, 19 nt, Artificial Sequence
  Description of Artificial Sequence: Synthetic oligonucleotide
cauccacauggcagaacca

SEQ ID NO: 2735803 - RNA, 19 nt, Artificial Sequence
  Description of Artificial Sequence: Synthetic oligonucleotide
gugagcuuggccagagcuc

SEQ ID NO: 2735804 - RNA, 19 nt, Artificial Sequence
  Description of Artificial Sequence: Synthetic oligonucleotide
gaagcgaccccgggcggug

SEQ ID NO: 2735805 - RNA, 19 nt, Artificial Sequence
  Description of Artificial Sequence: Synthetic oligonucleotide
gcugauccguucuguggcc

SEQ ID NO: 2735806 - RNA, 19 nt, Artificial Sequence
  Description of Artificial Sequence: Synthetic oligonucleotide
cgcugauccguucuguggc

SEQ ID NO: 2735807 - RNA, 19 nt, Artificial Sequence
  Description of Artificial Sequence: Synthetic oligonucleotide
caucuccuuauggcgcgag

SEQ ID NO: 2735808 - RNA, 19 nt, Artificial Sequence
  Description of Artificial Sequence: Synthetic oligonucleotide
cugguagucuugaccgcga

SEQ ID NO: 2735809 - RNA, 19 nt, Artificial Sequence
  Description of Artificial Sequence: Synthetic oligonucleotide
cgcgcgagugaguagacug

SEQ ID NO: 2735810 - RNA, 19 nt, Artificial Sequence
  Description of Artificial Sequence: Synthetic oligonucleotide
agagcuccguccuccccau

SEQ ID NO: 2735811 - RNA, 19 nt, Artificial Sequence
  Description of Artificial Sequence: Synthetic oligonucleotide
gguguggggauuagcuggc

SEQ ID NO: 2735812 - RNA, 19 nt, Artificial Sequence
  Description of Artificial Sequence: Synthetic oligonucleotide
agacgcgcgcggugaaacu

SEQ ID NO: 2735813 - RNA, 19 nt, Artificial Sequence
  Description of Artificial Sequence: Synthetic oligonucleotide
ugcgcgcgcgagugaguag

SEQ ID NO: 2735814 - RNA, 19 nt, Artificial Sequence
  Description of Artificial Sequence: Synthetic oligonucleotide
cucgcggacaagggcuccg

SEQ ID NO: 2735815 - RNA, 19 nt, Artificial Sequence
  Description of Artificial Sequence: Synthetic oligonucleotide
gagaggcuaugcaccucgc

SEQ ID NO: 2735816 - RNA, 19 nt, Artificial Sequence
  Description of Artificial Sequence: Synthetic oligonucleotide
ucugcgcgcgcgagugagu

SEQ ID NO: 2735817 - RNA, 19 nt, Artificial Sequence
  Description of Artificial Sequence: Synthetic oligonucleotide
ucaucuccuuauggcgcga

SEQ ID NO: 2735818 - RNA, 19 nt, Artificial Sequence
  Description of Artificial Sequence: Synthetic oligonucleotide
gccgcagaacaguugguga

SEQ ID NO: 2735819 - RNA, 19 nt, Artificial Sequence
  Description of Artificial Sequence: Synthetic oligonucleotide
caggucgcaccuugugcuc

SEQ ID NO: 2735820 - RNA, 19 nt, Artificial Sequence
  Description of Artificial Sequence: Synthetic oligonucleotide
caucagcggggcgggaagc

SEQ ID NO: 2735821 - RNA, 19 nt, Artificial Sequence
  Description of Artificial Sequence: Synthetic oligonucleotide
uaugcaccucgcggacaag

SEQ ID NO: 2735822 - RNA, 19 nt, Artificial Sequence
  Description of Artificial Sequence: Synthetic oligonucleotide
cgggaagcgaccccgggcg

SEQ ID NO: 2735823 - RNA, 19 nt, Artificial Sequence
  Description of Artificial Sequence: Synthetic oligonucleotide
cugugagcuuggccagagc

SEQ ID NO: 2735824 - RNA, 19 nt, Artificial Sequence
  Description of Artificial Sequence: Synthetic oligonucleotide
ucagcggggcgggaagcga

SEQ ID NO: 2735825 - RNA, 19 nt, Artificial Sequence
  Description of Artificial Sequence: Synthetic oligonucleotide
ucucugcgcgcgcgaguga

SEQ ID NO: 2735826 - RNA, 19 nt, Artificial Sequence
  Description of Artificial Sequence: Synthetic oligonucleotide
aagcgaccccgggcggugg

SEQ ID NO: 2735827 - RNA, 19 nt, Artificial Sequence
  Description of Artificial Sequence: Synthetic oligonucleotide
gagcuuggccagagcuccg

SEQ ID NO: 2735828 - RNA, 19 nt, Artificial Sequence
  Description of Artificial Sequence: Synthetic oligonucleotide
uccguucuguggccuggau

SEQ ID NO: 2735829 - RNA, 19 nt, Artificial Sequence
  Description of Artificial Sequence: Synthetic oligonucleotide
caccucgcggacaagggcu

SEQ ID NO: 2735830 - RNA, 19 nt, Artificial Sequence
  Description of Artificial Sequence: Synthetic oligonucleotide
accucgcggacaagggcuc

SEQ ID NO: 2735831 - RNA, 19 nt, Artificial Sequence
  Description of Artificial Sequence: Synthetic oligonucleotide
gcuaugggccgcagaacag

SEQ ID NO: 2735832 - RNA, 19 nt, Artificial Sequence
  Description of Artificial Sequence: Synthetic oligonucleotide
cacuucuucccagauucaa

SEQ ID NO: 2735833 - RNA, 19 nt, Artificial Sequence
  Description of Artificial Sequence: Synthetic oligonucleotide
ggggcgggaagcgaccccg

SEQ ID NO: 2735834 - RNA, 19 nt, Artificial Sequence
  Description of Artificial Sequence: Synthetic oligonucleotide
ggccgcagaacaguuggug

SEQ ID NO: 2735835 - RNA, 19 nt, Artificial Sequence
  Description of Artificial Sequence: Synthetic oligonucleotide
cagugaagaugaaugucau

SEQ ID NO: 2735836 - RNA, 19 nt, Artificial Sequence
  Description of Artificial Sequence: Synthetic oligonucleotide
acauugccugugagcuugg

SEQ ID NO: 2735837 - RNA, 19 nt, Artificial Sequence
  Description of Artificial Sequence: Synthetic oligonucleotide
ccuugugcucgcugauccg

SEQ ID NO: 2735838 - RNA, 19 nt, Artificial Sequence
  Description of Artificial Sequence: Synthetic oligonucleotide
gcaccucgcggacaagggc

SEQ ID NO: 2735839 - RNA, 19 nt, Artificial Sequence
  Description of Artificial Sequence: Synthetic oligonucleotide
uccgcgucucugcgcgcgc

SEQ ID NO: 2735840 - RNA, 19 nt, Artificial Sequence
  Description of Artificial Sequence: Synthetic oligonucleotide
ggcuaugcaccucgcggac

SEQ ID NO: 2735841 - RNA, 19 nt, Artificial Sequence
  Description of Artificial Sequence: Synthetic oligonucleotide
ucgagacgcgcgcggugaa

SEQ ID NO: 2735842 - RNA, 19 nt, Artificial Sequence
  Description of Artificial Sequence: Synthetic oligonucleotide
gcggcuaugggccgcagaa

SEQ ID NO: 2735843 - RNA, 19 nt, Artificial Sequence
  Description of Artificial Sequence: Synthetic oligonucleotide
gauccgcgucucugcgcgc

SEQ ID NO: 2735844 - RNA, 19 nt, Artificial Sequence
  Description of Artificial Sequence: Synthetic oligonucleotide
gucgagacgcgcgcgguga

SEQ ID NO: 2735845 - RNA, 19 nt, Artificial Sequence
  Description of Artificial Sequence: Synthetic oligonucleotide
cauugccugugagcuuggc

SEQ ID NO: 2735846 - RNA, 19 nt, Artificial Sequence
  Description of Artificial Sequence: Synthetic oligonucleotide
gugaguagacugaaguauu

SEQ ID NO: 2735847 - RNA, 19 nt, Artificial Sequence
  Description of Artificial Sequence: Synthetic oligonucleotide
gacugggguuugcccgaug

SEQ ID NO: 2735848 - RNA, 19 nt, Artificial Sequence
  Description of Artificial Sequence: Synthetic oligonucleotide
gacgcgggguggccaucag

SEQ ID NO: 2735849 - RNA, 19 nt, Artificial Sequence
  Description of Artificial Sequence: Synthetic oligonucleotide
agcuuggccagagcuccgu

SEQ ID NO: 2735850 - RNA, 19 nt, Artificial Sequence
  Description of Artificial Sequence: Synthetic oligonucleotide
cguaaguugucaucaucca

SEQ ID NO: 2735851 - RNA, 19 nt, Artificial Sequence
  Description of Artificial Sequence: Synthetic oligonucleotide
ggguuugcccgauguaaaa

SEQ ID NO: 2735852 - RNA, 19 nt, Artificial Sequence
  Description of Artificial Sequence: Synthetic oligonucleotide
ggugaguaccacauugccu

SEQ ID NO: 2735853 - RNA, 19 nt, Artificial Sequence
  Description of Artificial Sequence: Synthetic oligonucleotide
cgagauccaggucucgaac

SEQ ID NO: 2735854 - RNA, 19 nt, Artificial Sequence
  Description of Artificial Sequence: Synthetic oligonucleotide
gcgggaagcgaccccgggc

SEQ ID NO: 2735855 - RNA, 19 nt, Artificial Sequence
  Description of Artificial Sequence: Synthetic oligonucleotide
cuugugcucgcugauccgu

SEQ ID NO: 2735856 - RNA, 19 nt, Artificial Sequence
  Description of Artificial Sequence: Synthetic oligonucleotide
caccuugugcucgcugauc

SEQ ID NO: 2735857 - RNA, 19 nt, Artificial Sequence
  Description of Artificial Sequence: Synthetic oligonucleotide
ccguucuguggccuggaug

SEQ ID NO: 2735858 - RNA, 19 nt, Artificial Sequence
  Description of Artificial Sequence: Synthetic oligonucleotide
gcaaaguggacaggucgca

SEQ ID NO: 2735859 - RNA, 19 nt, Artificial Sequence
  Description of Artificial Sequence: Synthetic oligonucleotide
gggaagcgaccccgggcgg

SEQ ID NO: 2735860 - RNA, 19 nt, Artificial Sequence
  Description of Artificial Sequence: Synthetic oligonucleotide
ggucgcaccuugugcucgc

SEQ ID NO: 2735861 - RNA, 19 nt, Artificial Sequence
  Description of Artificial Sequence: Synthetic oligonucleotide
cgagugaguagacugaagu

SEQ ID NO: 2735862 - RNA, 19 nt, Artificial Sequence
  Description of Artificial Sequence: Synthetic oligonucleotide
ggccagagcuccguccucc

SEQ ID NO: 2735863 - RNA, 19 nt, Artificial Sequence
  Description of Artificial Sequence: Synthetic oligonucleotide
gcuccguccuccccaucag

SEQ ID NO: 2735864 - RNA, 19 nt, Artificial Sequence
  Description of Artificial Sequence: Synthetic oligonucleotide
cgcgcggugaaacuuucug

SEQ ID NO: 2735865 - RNA, 19 nt, Artificial Sequence
  Description of Artificial Sequence: Synthetic oligonucleotide
cuaugggccgcagaacagu

SEQ ID NO: 2735866 - RNA, 19 nt, Artificial Sequence
  Description of Artificial Sequence: Synthetic oligonucleotide
ggucgagacgcgcgcggug

SEQ ID NO: 2735867 - RNA, 19 nt, Artificial Sequence
  Description of Artificial Sequence: Synthetic oligonucleotide
gcgagugaguagacugaag

SEQ ID NO: 2735868 - RNA, 19 nt, Artificial Sequence
  Description of Artificial Sequence: Synthetic oligonucleotide
gguggccaucagcggggcg

SEQ ID NO: 2735869 - RNA, 19 nt, Artificial Sequence
  Description of Artificial Sequence: Synthetic oligonucleotide
ccugugagcuuggccagag

SEQ ID NO: 2735870 - RNA, 19 nt, Artificial Sequence
  Description of Artificial Sequence: Synthetic oligonucleotide
aggucgagacgcgcgcggu

SEQ ID NO: 2735871 - RNA, 19 nt, Artificial Sequence
  Description of Artificial Sequence: Synthetic oligonucleotide
ggggauuagcuggcuagca

SEQ ID NO: 2735872 - RNA, 19 nt, Artificial Sequence
  Description of Artificial Sequence: Synthetic oligonucleotide
gcugcaaaguggacagguc

SEQ ID NO: 2735873 - RNA, 19 nt, Artificial Sequence
  Description of Artificial Sequence: Synthetic oligonucleotide
gcgagauccaggucucgaa

SEQ ID NO: 2735874 - RNA, 19 nt, Artificial Sequence
  Description of Artificial Sequence: Synthetic oligonucleotide
gguugacguaaguugucau

SEQ ID NO: 2735875 - RNA, 19 nt, Artificial Sequence
  Description of Artificial Sequence: Synthetic oligonucleotide
gacagagccuggcggcuau

SEQ ID NO: 2735876 - RNA, 19 nt, Artificial Sequence
  Description of Artificial Sequence: Synthetic oligonucleotide
agcagcgcccugagguuga

SEQ ID NO: 2735877 - RNA, 19 nt, Artificial Sequence
  Description of Artificial Sequence: Synthetic oligonucleotide
caucauccacauggcagaa

SEQ ID NO: 2735878 - RNA, 19 nt, Artificial Sequence
  Description of Artificial Sequence: Synthetic oligonucleotide
ugaccgcgaugaagacguc

SEQ ID NO: 2735879 - RNA, 19 nt, Artificial Sequence
  Description of Artificial Sequence: Synthetic oligonucleotide
agcgaccccgggcggugga

SEQ ID NO: 2735880 - RNA, 19 nt, Artificial Sequence
  Description of Artificial Sequence: Synthetic oligonucleotide
auccguucuguggccugga

SEQ ID NO: 2735881 - RNA, 19 nt, Artificial Sequence
  Description of Artificial Sequence: Synthetic oligonucleotide
cucgaacaacaggucgaga

SEQ ID NO: 2735882 - RNA, 19 nt, Artificial Sequence
  Description of Artificial Sequence: Synthetic oligonucleotide
ggccgguccagacuggggu

SEQ ID NO: 2735883 - RNA, 19 nt, Artificial Sequence
  Description of Artificial Sequence: Synthetic oligonucleotide
gggguuugcccgauguaaa

SEQ ID NO: 2735884 - RNA, 19 nt, Artificial Sequence
  Description of Artificial Sequence: Synthetic oligonucleotide
ccuuauggcgcgagaucca

SEQ ID NO: 2735885 - RNA, 19 nt, Artificial Sequence
  Description of Artificial Sequence: Synthetic oligonucleotide
gcggugaaacuuucuggua

SEQ ID NO: 2735886 - RNA, 19 nt, Artificial Sequence
  Description of Artificial Sequence: Synthetic oligonucleotide
gcagaacaguuggugagua

SEQ ID NO: 2735887 - RNA, 19 nt, Artificial Sequence
  Description of Artificial Sequence: Synthetic oligonucleotide
cagcgcccugagguugacg

SEQ ID NO: 2735888 - RNA, 19 nt, Artificial Sequence
  Description of Artificial Sequence: Synthetic oligonucleotide
accccgggcgguggauccg

SEQ ID NO: 2735889 - RNA, 19 nt, Artificial Sequence
  Description of Artificial Sequence: Synthetic oligonucleotide
cugggguuugcccgaugua

SEQ ID NO: 2735890 - RNA, 19 nt, Artificial Sequence
  Description of Artificial Sequence: Synthetic oligonucleotide
aguggacaggucgcaccuu

SEQ ID NO: 2735891 - RNA, 19 nt, Artificial Sequence
  Description of Artificial Sequence: Synthetic oligonucleotide
ccagagcuccguccucccc

SEQ ID NO: 2735892 - RNA, 19 nt, Artificial Sequence
  Description of Artificial Sequence: Synthetic oligonucleotide
gucuuggguguggggauua

SEQ ID NO: 2735893 - RNA, 19 nt, Artificial Sequence
  Description of Artificial Sequence: Synthetic oligonucleotide
gguccagacugggguuugc

SEQ ID NO: 2735894 - RNA, 19 nt, Artificial Sequence
  Description of Artificial Sequence: Synthetic oligonucleotide
cgcaccuugugcucgcuga

SEQ ID NO: 2735895 - RNA, 19 nt, Artificial Sequence
  Description of Artificial Sequence: Synthetic oligonucleotide
gccuggcggcuaugggccg

SEQ ID NO: 2735896 - RNA, 19 nt, Artificial Sequence
  Description of Artificial Sequence: Synthetic oligonucleotide
cgcggugaaacuuucuggu

SEQ ID NO: 2735897 - RNA, 19 nt, Artificial Sequence
  Description of Artificial Sequence: Synthetic oligonucleotide
gacgcgcgcggugaaacuu

SEQ ID NO: 2735898 - RNA, 19 nt, Artificial Sequence
  Description of Artificial Sequence: Synthetic oligonucleotide
gcuaugcaccucgcggaca

SEQ ID NO: 2735899 - RNA, 19 nt, Artificial Sequence
  Description of Artificial Sequence: Synthetic oligonucleotide
agacugggguuugcccgau

SEQ ID NO: 2735900 - RNA, 19 nt, Artificial Sequence
  Description of Artificial Sequence: Synthetic oligonucleotide
ggcgcgagauccaggucuc

SEQ ID NO: 2735901 - RNA, 19 nt, Artificial Sequence
  Description of Artificial Sequence: Synthetic oligonucleotide
gggccgguccagacugggg

SEQ ID NO: 2735902 - RNA, 19 nt, Artificial Sequence
  Description of Artificial Sequence: Synthetic oligonucleotide
ccuggaugggccgguccag

SEQ ID NO: 2735903 - RNA, 19 nt, Artificial Sequence
  Description of Artificial Sequence: Synthetic oligonucleotide
gcgcgagugaguagacuga

SEQ ID NO: 2735904 - RNA, 19 nt, Artificial Sequence
  Description of Artificial Sequence: Synthetic oligonucleotide
gcgcgcgcgagugaguaga

SEQ ID NO: 2735905 - RNA, 19 nt, Artificial Sequence
  Description of Artificial Sequence: Synthetic oligonucleotide
gcccugagguugacguaag

SEQ ID NO: 2735906 - RNA, 19 nt, Artificial Sequence
  Description of Artificial Sequence: Synthetic oligonucleotide
acgcgcgcggugaaacuuu

SEQ ID NO: 2735907 - RNA, 19 nt, Artificial Sequence
  Description of Artificial Sequence: Synthetic oligonucleotide
cugauccguucuguggccu

SEQ ID NO: 2735908 - RNA, 19 nt, Artificial Sequence
  Description of Artificial Sequence: Synthetic oligonucleotide
cugcgcgcgcgagugagua

SEQ ID NO: 2735909 - RNA, 19 nt, Artificial Sequence
  Description of Artificial Sequence: Synthetic oligonucleotide
ccguccuccccaucaguga

SEQ ID NO: 2735910 - RNA, 19 nt, Artificial Sequence
  Description of Artificial Sequence: Synthetic oligonucleotide
ggcggcuaugggccgcaga

SEQ ID NO: 2735911 - RNA, 19 nt, Artificial Sequence
  Description of Artificial Sequence: Synthetic oligonucleotide
gagcuccguccuccccauc

SEQ ID NO: 2735912 - RNA, 19 nt, Artificial Sequence
  Description of Artificial Sequence: Synthetic oligonucleotide
ccacuucuucccagauuca

SEQ ID NO: 2735913 - RNA, 19 nt, Artificial Sequence
  Description of Artificial Sequence: Synthetic oligonucleotide
uggcggcuaugggccgcag

SEQ ID NO: 2735914 - RNA, 19 nt, Artificial Sequence
  Description of Artificial Sequence: Synthetic oligonucleotide
ccacauggcagaaccacuu

SEQ ID NO: 2735915 - RNA, 19 nt, Artificial Sequence
  Description of Artificial Sequence: Synthetic oligonucleotide
gcgucucugcgcgcgcgag

SEQ ID NO: 2735916 - RNA, 19 nt, Artificial Sequence
  Description of Artificial Sequence: Synthetic oligonucleotide
ccugagguugacguaaguu

SEQ ID NO: 2735917 - RNA, 19 nt, Artificial Sequence
  Description of Artificial Sequence: Synthetic oligonucleotide
ggcgguggauccgcgucuc

SEQ ID NO: 2735918 - RNA, 19 nt, Artificial Sequence
  Description of Artificial Sequence: Synthetic oligonucleotide
gcgcgagauccaggucucg

SEQ ID NO: 2735919 - RNA, 19 nt, Artificial Sequence
  Description of Artificial Sequence: Synthetic oligonucleotide
ggacgcgggguggccauca

SEQ ID NO: 2735920 - RNA, 19 nt, Artificial Sequence
  Description of Artificial Sequence: Synthetic oligonucleotide
cuccguccuccccaucagu

SEQ ID NO: 2735921 - RNA, 19 nt, Artificial Sequence
  Description of Artificial Sequence: Synthetic oligonucleotide
ccuggcggcuaugggccgc

SEQ ID NO: 2735922 - RNA, 19 nt, Artificial Sequence
  Description of Artificial Sequence: Synthetic oligonucleotide
cuggcggcuaugggccgca

SEQ ID NO: 2735923 - RNA, 19 nt, Artificial Sequence
  Description of Artificial Sequence: Synthetic oligonucleotide
cauacuccacagccaucuu

SEQ ID NO: 2735924 - RNA, 19 nt, Artificial Sequence
  Description of Artificial Sequence: Synthetic oligonucleotide
cgcggacaagggcuccggg

SEQ ID NO: 2735925 - RNA, 19 nt, Artificial Sequence
  Description of Artificial Sequence: Synthetic oligonucleotide
ggguggccaucagcggggc

SEQ ID NO: 2735926 - RNA, 19 nt, Artificial Sequence
  Description of Artificial Sequence: Synthetic oligonucleotide
cguccuccccaucagugaa

SEQ ID NO: 2735927 - RNA, 19 nt, Artificial Sequence
  Description of Artificial Sequence: Synthetic oligonucleotide
cgggcgguggauccgcguc

SEQ ID NO: 2735928 - RNA, 19 nt, Artificial Sequence
  Description of Artificial Sequence: Synthetic oligonucleotide
ccucgcggacaagggcucc

SEQ ID NO: 2735929 - RNA, 19 nt, Artificial Sequence
  Description of Artificial Sequence: Synthetic oligonucleotide
gggcgguggauccgcgucu

SEQ ID NO: 2735930 - RNA, 19 nt, Artificial Sequence
  Description of Artificial Sequence: Synthetic oligonucleotide
cccgggcgguggauccgcg

SEQ ID NO: 2735931 - RNA, 19 nt, Artificial Sequence
  Description of Artificial Sequence: Synthetic oligonucleotide
ggaagcgaccccgggcggu

SEQ ID NO: 2735932 - RNA, 19 nt, Artificial Sequence
  Description of Artificial Sequence: Synthetic oligonucleotide
gcagcagcgcccugagguu

SEQ ID NO: 2735933 - RNA, 19 nt, Artificial Sequence
  Description of Artificial Sequence: Synthetic oligonucleotide
gcucgcugauccguucugu

SEQ ID NO: 2735934 - RNA, 19 nt, Artificial Sequence
  Description of Artificial Sequence: Synthetic oligonucleotide
ccgcgucucugcgcgcgcg

SEQ ID NO: 2735935 - RNA, 19 nt, Artificial Sequence
  Description of Artificial Sequence: Synthetic oligonucleotide
cgcccugagguugacguaa

SEQ ID NO: 2735936 - RNA, 19 nt, Artificial Sequence
  Description of Artificial Sequence: Synthetic oligonucleotide
ccgcagcagcgcccugagg

SEQ ID NO: 2735937 - RNA, 19 nt, Artificial Sequence
  Description of Artificial Sequence: Synthetic oligonucleotide
cgcgcgcggugaaacuuuc

SEQ ID NO: 2735938 - RNA, 19 nt, Artificial Sequence
  Description of Artificial Sequence: Synthetic oligonucleotide
cgcgcgcgagugaguagac

SEQ ID NO: 2735939 - RNA, 19 nt, Artificial Sequence
  Description of Artificial Sequence: Synthetic oligonucleotide
ccccgggcgguggauccgc

SEQ ID NO: 2735940 - RNA, 19 nt, Artificial Sequence
  Description of Artificial Sequence: Synthetic oligonucleotide
cgcgagauccaggucucga

SEQ ID NO: 2735941 - RNA, 19 nt, Artificial Sequence
  Description of Artificial Sequence: Synthetic oligonucleotide
cgcgagugaguagacugaa

SEQ ID NO: 2735942 - RNA, 19 nt, Artificial Sequence
  Description of Artificial Sequence: Synthetic oligonucleotide
cggcuaugggccgcagaac

SEQ ID NO: 2735943 - RNA, 19 nt, Artificial Sequence
  Description of Artificial Sequence: Synthetic oligonucleotide
gcgcccugagguugacgua

SEQ ID NO: 2735944 - RNA, 19 nt, Artificial Sequence
  Description of Artificial Sequence: Synthetic oligonucleotide
gucgcaccuugugcucgcu

SEQ ID NO: 2735945 - RNA, 19 nt, Artificial Sequence
  Description of Artificial Sequence: Synthetic oligonucleotide
gccgguccagacugggguu

SEQ ID NO: 2735946 - RNA, 19 nt, Artificial Sequence
  Description of Artificial Sequence: Synthetic oligonucleotide
cggggcgggaagcgacccc

SEQ ID NO: 2735947 - RNA, 19 nt, Artificial Sequence
  Description of Artificial Sequence: Synthetic oligonucleotide
ggggacgcgggguggccau

SEQ ID NO: 2735948 - RNA, 19 nt, Artificial Sequence
  Description of Artificial Sequence: Synthetic oligonucleotide
cgguccagacugggguuug

SEQ ID NO: 2735949 - RNA, 19 nt, Artificial Sequence
  Description of Artificial Sequence: Synthetic oligonucleotide
gcagcgcccugagguugac

SEQ ID NO: 2735950 - RNA, 19 nt, Artificial Sequence
  Description of Artificial Sequence: Synthetic oligonucleotide
gcccgauguaaaacgucuu

SEQ ID NO: 2735951 - RNA, 19 nt, Artificial Sequence
  Description of Artificial Sequence: Synthetic oligonucleotide
cggagaggcuaugcaccuc

SEQ ID NO: 2735952 - RNA, 19 nt, Artificial Sequence
  Description of Artificial Sequence: Synthetic oligonucleotide
cccugagguugacguaagu

SEQ ID NO: 2735953 - RNA, 19 nt, Artificial Sequence
  Description of Artificial Sequence: Synthetic oligonucleotide
ccgcgaugaagacgucacu

SEQ ID NO: 2735954 - RNA, 19 nt, Artificial Sequence
  Description of Artificial Sequence: Synthetic oligonucleotide
gggacgcgggguggccauc

SEQ ID NO: 2735955 - RNA, 19 nt, Artificial Sequence
  Description of Artificial Sequence: Synthetic oligonucleotide
ccacauugccugugagcuu

SEQ ID NO: 2735956 - RNA, 19 nt, Artificial Sequence
  Description of Artificial Sequence: Synthetic oligonucleotide
gggccgcagaacaguuggu

SEQ ID NO: 2735957 - RNA, 19 nt, Artificial Sequence
  Description of Artificial Sequence: Synthetic oligonucleotide
gcgguggauccgcgucucu

SEQ ID NO: 2735958 - RNA, 19 nt, Artificial Sequence
  Description of Artificial Sequence: Synthetic oligonucleotide
gcgcgcgagugaguagacu

SEQ ID NO: 2735959 - RNA, 19 nt, Artificial Sequence
  Description of Artificial Sequence: Synthetic oligonucleotide
cgcgucucugcgcgcgcga

SEQ ID NO: 2735960 - RNA, 19 nt, Artificial Sequence
  Description of Artificial Sequence: Synthetic oligonucleotide
gcgcgcggugaaacuuucu

SEQ ID NO: 2735961 - RNA, 19 nt, Artificial Sequence
  Description of Artificial Sequence: Synthetic oligonucleotide
cgagacgcgcgcggugaaa

SEQ ID NO: 2735962 - RNA, 19 nt, Artificial Sequence
  Description of Artificial Sequence: Synthetic oligonucleotide
ccgguccagacugggguuu

SEQ ID NO: 2735963 - RNA, 19 nt, Artificial Sequence
  Description of Artificial Sequence: Synthetic oligonucleotide
ccgggcgguggauccgcgu

SEQ ID NO: 2735964 - RNA, 19 nt, Artificial Sequence
  Description of Artificial Sequence: Synthetic oligonucleotide
cgucucugcgcgcgcgagu

SEQ ID NO: 2735965 - RNA, 19 nt, Artificial Sequence
  Description of Artificial Sequence: Synthetic oligonucleotide
cgucuuggguguggggauu

SEQ ID NO: 2735966 - RNA, 19 nt, Artificial Sequence
  Description of Artificial Sequence: Synthetic oligonucleotide
aacacaaucaggucaauuc

SEQ ID NO: 2735967 - RNA, 19 nt, Artificial Sequence
  Description of Artificial Sequence: Synthetic oligonucleotide
aaucaggucaauucggggc

SEQ ID NO: 2735968 - RNA, 19 nt, Artificial Sequence
  Description of Artificial Sequence: Synthetic oligonucleotide
guuaauuacaaacacaauc

SEQ ID NO: 2735969 - RNA, 19 nt, Artificial Sequence
  Description of Artificial Sequence: Synthetic oligonucleotide
ugaagguuaauuacaaaca

SEQ ID NO: 2735970 - RNA, 19 nt, Artificial Sequence
  Description of Artificial Sequence: Synthetic oligonucleotide
cugguuuucaccaacagug

SEQ ID NO: 2735971 - RNA, 19 nt, Artificial Sequence
  Description of Artificial Sequence: Synthetic oligonucleotide
ucuaagucacagaagagca

SEQ ID NO: 2735972 - RNA, 19 nt, Artificial Sequence
  Description of Artificial Sequence: Synthetic oligonucleotide
uuuuauaacuguguucugg

SEQ ID NO: 2735973 - RNA, 19 nt, Artificial Sequence
  Description of Artificial Sequence: Synthetic oligonucleotide
uauaacuguguucugguga

SEQ ID NO: 2735974 - RNA, 19 nt, Artificial Sequence
  Description of Artificial Sequence: Synthetic oligonucleotide
uaauuacaaacacaaucag

SEQ ID NO: 2735975 - RNA, 19 nt, Artificial Sequence
  Description of Artificial Sequence: Synthetic oligonucleotide
agugacugcuucuggagcc

SEQ ID NO: 2735976 - RNA, 19 nt, Artificial Sequence
  Description of Artificial Sequence: Synthetic oligonucleotide
gaagguuaauuacaaacac

SEQ ID NO: 2735977 - RNA, 19 nt, Artificial Sequence
  Description of Artificial Sequence: Synthetic oligonucleotide
gagggaauuggccaagugg

SEQ ID NO: 2735978 - RNA, 19 nt, Artificial Sequence
  Description of Artificial Sequence: Synthetic oligonucleotide
aguccuguaguguggaggc

SEQ ID NO: 2735979 - RNA, 19 nt, Artificial Sequence
  Description of Artificial Sequence: Synthetic oligonucleotide
acacaaucaggucaauucg

SEQ ID NO: 2735980 - RNA, 19 nt, Artificial Sequence
  Description of Artificial Sequence: Synthetic oligonucleotide
agguucaccgcugagauac

SEQ ID NO: 2735981 - RNA, 19 nt, Artificial Sequence
  Description of Artificial Sequence: Synthetic oligonucleotide
uuuauaacuguguucuggu

SEQ ID NO: 2735982 - RNA, 19 nt, Artificial Sequence
  Description of Artificial Sequence: Synthetic oligonucleotide
uguucuuggagcaucgacu

SEQ ID NO: 2735983 - RNA, 19 nt, Artificial Sequence
  Description of Artificial Sequence: Synthetic oligonucleotide
accucuaagucacagaaga

SEQ ID NO: 2735984 - RNA, 19 nt, Artificial Sequence
  Description of Artificial Sequence: Synthetic oligonucleotide
acauacuuuccccaggaag

SEQ ID NO: 2735985 - RNA, 19 nt, Artificial Sequence
  Description of Artificial Sequence: Synthetic oligonucleotide
aaagggcuucgguagguac

SEQ ID NO: 2735986 - RNA, 19 nt, Artificial Sequence
  Description of Artificial Sequence: Synthetic oligonucleotide
ucagcucagacgcacagug

SEQ ID NO: 2735987 - RNA, 19 nt, Artificial Sequence
  Description of Artificial Sequence: Synthetic oligonucleotide
gaaacauacuuuccccagg

SEQ ID NO: 2735988 - RNA, 19 nt, Artificial Sequence
  Description of Artificial Sequence: Synthetic oligonucleotide
gaauuggccaaguggaccc

SEQ ID NO: 2735989 - RNA, 19 nt, Artificial Sequence
  Description of Artificial Sequence: Synthetic oligonucleotide
ucuuggagcaucgacuccg

SEQ ID NO: 2735990 - RNA, 19 nt, Artificial Sequence
  Description of Artificial Sequence: Synthetic oligonucleotide
gaggaaacauacuuucccc

SEQ ID NO: 2735991 - RNA, 19 nt, Artificial Sequence
  Description of Artificial Sequence: Synthetic oligonucleotide
cucuaagucacagaagagc

SEQ ID NO: 2735992 - RNA, 19 nt, Artificial Sequence
  Description of Artificial Sequence: Synthetic oligonucleotide
cucacagcuccuuggaugg

SEQ ID NO: 2735993 - RNA, 19 nt, Artificial Sequence
  Description of Artificial Sequence: Synthetic oligonucleotide
gagcaaagggcuucgguag

SEQ ID NO: 2735994 - RNA, 19 nt, Artificial Sequence
  Description of Artificial Sequence: Synthetic oligonucleotide
agaagcgcauccuccgugc

SEQ ID NO: 2735995 - RNA, 19 nt, Artificial Sequence
  Description of Artificial Sequence: Synthetic oligonucleotide
aacagugacugcuucugga

SEQ ID NO: 2735996 - RNA, 19 nt, Artificial Sequence
  Description of Artificial Sequence: Synthetic oligonucleotide
ucaccgcugagauaccugg

SEQ ID NO: 2735997 - RNA, 19 nt, Artificial Sequence
  Description of Artificial Sequence: Synthetic oligonucleotide
cacaaucaggucaauucgg

SEQ ID NO: 2735998 - RNA, 19 nt, Artificial Sequence
  Description of Artificial Sequence: Synthetic oligonucleotide
uggugaaugcugcaguggc

SEQ ID NO: 2735999 - RNA, 19 nt, Artificial Sequence
  Description of Artificial Sequence: Synthetic oligonucleotide
cauacuuuccccaggaaga

SEQ ID NO: 2736000 - RNA, 19 nt, Artificial Sequence
  Description of Artificial Sequence: Synthetic oligonucleotide
agguuaauuacaaacacaa

SEQ ID NO: 2736001 - RNA, 19 nt, Artificial Sequence
  Description of Artificial Sequence: Synthetic oligonucleotide
ugcugugaagguuaauuac

SEQ ID NO: 2736002 - RNA, 19 nt, Artificial Sequence
  Description of Artificial Sequence: Synthetic oligonucleotide
ugcagaagcgcauccuccg

SEQ ID NO: 2736003 - RNA, 19 nt, Artificial Sequence
  Description of Artificial Sequence: Synthetic oligonucleotide
ugcagcaugcguaccaggc

SEQ ID NO: 2736004 - RNA, 19 nt, Artificial Sequence
  Description of Artificial Sequence: Synthetic oligonucleotide
cuucccaccucuaagucac

SEQ ID NO: 2736005 - RNA, 19 nt, Artificial Sequence
  Description of Artificial Sequence: Synthetic oligonucleotide
aagcgcauccuccgugccc

SEQ ID NO: 2736006 - RNA, 19 nt, Artificial Sequence
  Description of Artificial Sequence: Synthetic oligonucleotide
aacuguguucuggugaaug

SEQ ID NO: 2736007 - RNA, 19 nt, Artificial Sequence
  Description of Artificial Sequence: Synthetic oligonucleotide
aagagcaaagggcuucggu

SEQ ID NO: 2736008 - RNA, 19 nt, Artificial Sequence
  Description of Artificial Sequence: Synthetic oligonucleotide
uuauaacuguguucuggug

SEQ ID NO: 2736009 - RNA, 19 nt, Artificial Sequence
  Description of Artificial Sequence: Synthetic oligonucleotide
agauaccuggcacgugacc

SEQ ID NO: 2736010 - RNA, 19 nt, Artificial Sequence
  Description of Artificial Sequence: Synthetic oligonucleotide
uggcacgugaccagcacag

SEQ ID NO: 2736011 - RNA, 19 nt, Artificial Sequence
  Description of Artificial Sequence: Synthetic oligonucleotide
auaacuguguucuggugaa

SEQ ID NO: 2736012 - RNA, 19 nt, Artificial Sequence
  Description of Artificial Sequence: Synthetic oligonucleotide
caaucaggucaauucgggg

SEQ ID NO: 2736013 - RNA, 19 nt, Artificial Sequence
  Description of Artificial Sequence: Synthetic oligonucleotide
uggacccucagcucagacg

SEQ ID NO: 2736014 - RNA, 19 nt, Artificial Sequence
  Description of Artificial Sequence: Synthetic oligonucleotide
aggaaacauacuuucccca

SEQ ID NO: 2736015 - RNA, 19 nt, Artificial Sequence
  Description of Artificial Sequence: Synthetic oligonucleotide
acgugaccagcacagaucu

SEQ ID NO: 2736016 - RNA, 19 nt, Artificial Sequence
  Description of Artificial Sequence: Synthetic oligonucleotide
uuacaaacacaaucagguc

SEQ ID NO: 2736017 - RNA, 19 nt, Artificial Sequence
  Description of Artificial Sequence: Synthetic oligonucleotide
agagcaaagggcuucggua

SEQ ID NO: 2736018 - RNA, 19 nt, Artificial Sequence
  Description of Artificial Sequence: Synthetic oligonucleotide
uguggggagggcagcgucg

SEQ ID NO: 2736019 - RNA, 19 nt, Artificial Sequence
  Description of Artificial Sequence: Synthetic oligonucleotide
gagccugagccaaaugugg

SEQ ID NO: 2736020 - RNA, 19 nt, Artificial Sequence
  Description of Artificial Sequence: Synthetic oligonucleotide
aagggcuucgguagguacg

SEQ ID NO: 2736021 - RNA, 19 nt, Artificial Sequence
  Description of Artificial Sequence: Synthetic oligonucleotide
uggagcaucgacuccgcca

SEQ ID NO: 2736022 - RNA, 19 nt, Artificial Sequence
  Description of Artificial Sequence: Synthetic oligonucleotide
caguuuuauaacuguguuc

SEQ ID NO: 2736023 - RNA, 19 nt, Artificial Sequence
  Description of Artificial Sequence: Synthetic oligonucleotide
gauaccuggcacgugacca

SEQ ID NO: 2736024 - RNA, 19 nt, Artificial Sequence
  Description of Artificial Sequence: Synthetic oligonucleotide
ugguuuucaccaacaguga

SEQ ID NO: 2736025 - RNA, 19 nt, Artificial Sequence
  Description of Artificial Sequence: Synthetic oligonucleotide
ggaaacauacuuuccccag

SEQ ID NO: 2736026 - RNA, 19 nt, Artificial Sequence
  Description of Artificial Sequence: Synthetic oligonucleotide
ugagccaaauguggggagg

SEQ ID NO: 2736027 - RNA, 19 nt, Artificial Sequence
  Description of Artificial Sequence: Synthetic oligonucleotide
acugucggagcaccucagc

SEQ ID NO: 2736028 - RNA, 19 nt, Artificial Sequence
  Description of Artificial Sequence: Synthetic oligonucleotide
agggaauuggccaagugga

SEQ ID NO: 2736029 - RNA, 19 nt, Artificial Sequence
  Description of Artificial Sequence: Synthetic oligonucleotide
guucuuggagcaucgacuc

SEQ ID NO: 2736030 - RNA, 19 nt, Artificial Sequence
  Description of Artificial Sequence: Synthetic oligonucleotide
ugacugguuuucaccaaca

SEQ ID NO: 2736031 - RNA, 19 nt, Artificial Sequence
  Description of Artificial Sequence: Synthetic oligonucleotide
uucacaguggagggcaaag

SEQ ID NO: 2736032 - RNA, 19 nt, Artificial Sequence
  Description of Artificial Sequence: Synthetic oligonucleotide
gaugggguacugucggagc

SEQ ID NO: 2736033 - RNA, 19 nt, Artificial Sequence
  Description of Artificial Sequence: Synthetic oligonucleotide
caaaggggagggaauuggc

SEQ ID NO: 2736034 - RNA, 19 nt, Artificial Sequence
  Description of Artificial Sequence: Synthetic oligonucleotide
agcgcauccuccgugcccc

SEQ ID NO: 2736035 - RNA, 19 nt, Artificial Sequence
  Description of Artificial Sequence: Synthetic oligonucleotide
uugcugugaagguuaauua

SEQ ID NO: 2736036 - RNA, 19 nt, Artificial Sequence
  Description of Artificial Sequence: Synthetic oligonucleotide
uguauuugcugugaagguu

SEQ ID NO: 2736037 - RNA, 19 nt, Artificial Sequence
  Description of Artificial Sequence: Synthetic oligonucleotide
guacgggccaguuuuauaa

SEQ ID NO: 2736038 - RNA, 19 nt, Artificial Sequence
  Description of Artificial Sequence: Synthetic oligonucleotide
ucaauucggggccgguuca

SEQ ID NO: 2736039 - RNA, 19 nt, Artificial Sequence
  Description of Artificial Sequence: Synthetic oligonucleotide
ugcaguggcucucccgucc

SEQ ID NO: 2736040 - RNA, 19 nt, Artificial Sequence
  Description of Artificial Sequence: Synthetic oligonucleotide
gucggagcaccucagcaag

SEQ ID NO: 2736041 - RNA, 19 nt, Artificial Sequence
  Description of Artificial Sequence: Synthetic oligonucleotide
uucaccgcugagauaccug

SEQ ID NO: 2736042 - RNA, 19 nt, Artificial Sequence
  Description of Artificial Sequence: Synthetic oligonucleotide
gucgcucacagcuccuugg

SEQ ID NO: 2736043 - RNA, 19 nt, Artificial Sequence
  Description of Artificial Sequence: Synthetic oligonucleotide
ggagcaucgacuccgccag

SEQ ID NO: 2736044 - RNA, 19 nt, Artificial Sequence
  Description of Artificial Sequence: Synthetic oligonucleotide
agcuccuuggaugggguac

SEQ ID NO: 2736045 - RNA, 19 nt, Artificial Sequence
  Description of Artificial Sequence: Synthetic oligonucleotide
uccuccgugccccaccagc

SEQ ID NO: 2736046 - RNA, 19 nt, Artificial Sequence
  Description of Artificial Sequence: Synthetic oligonucleotide
cacagaagagcaaagggcu

SEQ ID NO: 2736047 - RNA, 19 nt, Artificial Sequence
  Description of Artificial Sequence: Synthetic oligonucleotide
uccuguaguguggaggcug

SEQ ID NO: 2736048 - RNA, 19 nt, Artificial Sequence
  Description of Artificial Sequence: Synthetic oligonucleotide
acgcacaguguucuuggag

SEQ ID NO: 2736049 - RNA, 19 nt, Artificial Sequence
  Description of Artificial Sequence: Synthetic oligonucleotide
caguguucuuggagcaucg

SEQ ID NO: 2736050 - RNA, 19 nt, Artificial Sequence
  Description of Artificial Sequence: Synthetic oligonucleotide
aacauacuuuccccaggaa

SEQ ID NO: 2736051 - RNA, 19 nt, Artificial Sequence
  Description of Artificial Sequence: Synthetic oligonucleotide
guuuuauaacuguguucug

SEQ ID NO: 2736052 - RNA, 19 nt, Artificial Sequence
  Description of Artificial Sequence: Synthetic oligonucleotide
ugucggagcaccucagcaa

SEQ ID NO: 2736053 - RNA, 19 nt, Artificial Sequence
  Description of Artificial Sequence: Synthetic oligonucleotide
agcucagacgcacaguguu

SEQ ID NO: 2736054 - RNA, 19 nt, Artificial Sequence
  Description of Artificial Sequence: Synthetic oligonucleotide
ucggggccgguucacagug

SEQ ID NO: 2736055 - RNA, 19 nt, Artificial Sequence
  Description of Artificial Sequence: Synthetic oligonucleotide
acagaucugcagcaugcgu

SEQ ID NO: 2736056 - RNA, 19 nt, Artificial Sequence
  Description of Artificial Sequence: Synthetic oligonucleotide
uguggcgaggaaacauacu

SEQ ID NO: 2736057 - RNA, 19 nt, Artificial Sequence
  Description of Artificial Sequence: Synthetic oligonucleotide
caaguggacccucagcuca

SEQ ID NO: 2736058 - RNA, 19 nt, Artificial Sequence
  Description of Artificial Sequence: Synthetic oligonucleotide
cugacugguuuucaccaac

SEQ ID NO: 2736059 - RNA, 19 nt, Artificial Sequence
  Description of Artificial Sequence: Synthetic oligonucleotide
aaacacaaucaggucaauu

SEQ ID NO: 2736060 - RNA, 19 nt, Artificial Sequence
  Description of Artificial Sequence: Synthetic oligonucleotide
accgcugagauaccuggca

SEQ ID NO: 2736061 - RNA, 19 nt, Artificial Sequence
  Description of Artificial Sequence: Synthetic oligonucleotide
aggcguugugccauggugg

SEQ ID NO: 2736062 - RNA, 19 nt, Artificial Sequence
  Description of Artificial Sequence: Synthetic oligonucleotide
ugcugcaguggcucucccg

SEQ ID NO: 2736063 - RNA, 19 nt, Artificial Sequence
  Description of Artificial Sequence: Synthetic oligonucleotide
ucggagcaccucagcaagg

SEQ ID NO: 2736064 - RNA, 19 nt, Artificial Sequence
  Description of Artificial Sequence: Synthetic oligonucleotide
auucggggccgguucacag

SEQ ID NO: 2736065 - RNA, 19 nt, Artificial Sequence
  Description of Artificial Sequence: Synthetic oligonucleotide
cacgugaccagcacagauc

SEQ ID NO: 2736066 - RNA, 19 nt, Artificial Sequence
  Description of Artificial Sequence: Synthetic oligonucleotide
gucaauucggggccgguuc

SEQ ID NO: 2736067 - RNA, 19 nt, Artificial Sequence
  Description of Artificial Sequence: Synthetic oligonucleotide
cuguggcgaggaaacauac

SEQ ID NO: 2736068 - RNA, 19 nt, Artificial Sequence
  Description of Artificial Sequence: Synthetic oligonucleotide
caacagugacugcuucugg

SEQ ID NO: 2736069 - RNA, 19 nt, Artificial Sequence
  Description of Artificial Sequence: Synthetic oligonucleotide
uguaguguggaggcugccu

SEQ ID NO: 2736070 - RNA, 19 nt, Artificial Sequence
  Description of Artificial Sequence: Synthetic oligonucleotide
aguggcucucccguccagc

SEQ ID NO: 2736071 - RNA, 19 nt, Artificial Sequence
  Description of Artificial Sequence: Synthetic oligonucleotide
uggcucgaaagcuucccac

SEQ ID NO: 2736072 - RNA, 19 nt, Artificial Sequence
  Description of Artificial Sequence: Synthetic oligonucleotide
cuggugaaugcugcagugg

SEQ ID NO: 2736073 - RNA, 19 nt, Artificial Sequence
  Description of Artificial Sequence: Synthetic oligonucleotide
agggcuucgguagguacgg

SEQ ID NO: 2736074 - RNA, 19 nt, Artificial Sequence
  Description of Artificial Sequence: Synthetic oligonucleotide
acgggccaguuuuauaacu

SEQ ID NO: 2736075 - RNA, 19 nt, Artificial Sequence
  Description of Artificial Sequence: Synthetic oligonucleotide
guaguguggaggcugccuc

SEQ ID NO: 2736076 - RNA, 19 nt, Artificial Sequence
  Description of Artificial Sequence: Synthetic oligonucleotide
aagcugcuguccacguggc

SEQ ID NO: 2736077 - RNA, 19 nt, Artificial Sequence
  Description of Artificial Sequence: Synthetic oligonucleotide
cuguccacguggcucagac

SEQ ID NO: 2736078 - RNA, 19 nt, Artificial Sequence
  Description of Artificial Sequence: Synthetic oligonucleotide
gguuuucaccaacagugac

SEQ ID NO: 2736079 - RNA, 19 nt, Artificial Sequence
  Description of Artificial Sequence: Synthetic oligonucleotide
ggaauuggccaaguggacc

SEQ ID NO: 2736080 - RNA, 19 nt, Artificial Sequence
  Description of Artificial Sequence: Synthetic oligonucleotide
guauuugcugugaagguua

SEQ ID NO: 2736081 - RNA, 19 nt, Artificial Sequence
  Description of Artificial Sequence: Synthetic oligonucleotide
acacuccuccaccuuccgg

SEQ ID NO: 2736082 - RNA, 19 nt, Artificial Sequence
  Description of Artificial Sequence: Synthetic oligonucleotide
ucaggucaauucggggccg

SEQ ID NO: 2736083 - RNA, 19 nt, Artificial Sequence
  Description of Artificial Sequence: Synthetic oligonucleotide
caggcguugugccauggug

SEQ ID NO: 2736084 - RNA, 19 nt, Artificial Sequence
  Description of Artificial Sequence: Synthetic oligonucleotide
guagguacgggccaguuuu

SEQ ID NO: 2736085 - RNA, 19 nt, Artificial Sequence
  Description of Artificial Sequence: Synthetic oligonucleotide
caccucuaagucacagaag

SEQ ID NO: 2736086 - RNA, 19 nt, Artificial Sequence
  Description of Artificial Sequence: Synthetic oligonucleotide
ucgcucacagcuccuugga

SEQ ID NO: 2736087 - RNA, 19 nt, Artificial Sequence
  Description of Artificial Sequence: Synthetic oligonucleotide
gugaaugcugcaguggcuc

SEQ ID NO: 2736088 - RNA, 19 nt, Artificial Sequence
  Description of Artificial Sequence: Synthetic oligonucleotide
ucccguccagccccugugg

SEQ ID NO: 2736089 - RNA, 19 nt, Artificial Sequence
  Description of Artificial Sequence: Synthetic oligonucleotide
agcaaggacagcagguuca

SEQ ID NO: 2736090 - RNA, 19 nt, Artificial Sequence
  Description of Artificial Sequence: Synthetic oligonucleotide
uggcgaggaaacauacuuu

SEQ ID NO: 2736091 - RNA, 19 nt, Artificial Sequence
  Description of Artificial Sequence: Synthetic oligonucleotide
uuggccaaguggacccuca

SEQ ID NO: 2736092 - RNA, 19 nt, Artificial Sequence
  Description of Artificial Sequence: Synthetic oligonucleotide
uacgggccaguuuuauaac

SEQ ID NO: 2736093 - RNA, 19 nt, Artificial Sequence
  Description of Artificial Sequence: Synthetic oligonucleotide
cagaagagcaaagggcuuc

SEQ ID NO: 2736094 - RNA, 19 nt, Artificial Sequence
  Description of Artificial Sequence: Synthetic oligonucleotide
ucaccaacagugacugcuu

SEQ ID NO: 2736095 - RNA, 19 nt, Artificial Sequence
  Description of Artificial Sequence: Synthetic oligonucleotide
ccaaauguggggagggcag

SEQ ID NO: 2736096 - RNA, 19 nt, Artificial Sequence
  Description of Artificial Sequence: Synthetic oligonucleotide
cacagcuccuuggaugggg

SEQ ID NO: 2736097 - RNA, 19 nt, Artificial Sequence
  Description of Artificial Sequence: Synthetic oligonucleotide
agcagguucaccgcugaga

SEQ ID NO: 2736098 - RNA, 19 nt, Artificial Sequence
  Description of Artificial Sequence: Synthetic oligonucleotide
guugugccaugguggcucg

SEQ ID NO: 2736099 - RNA, 19 nt, Artificial Sequence
  Description of Artificial Sequence: Synthetic oligonucleotide
cacagaucugcagcaugcg

SEQ ID NO: 2736100 - RNA, 19 nt, Artificial Sequence
  Description of Artificial Sequence: Synthetic oligonucleotide
agccaaauguggggagggc

SEQ ID NO: 2736101 - RNA, 19 nt, Artificial Sequence
  Description of Artificial Sequence: Synthetic oligonucleotide
guacugucggagcaccuca

SEQ ID NO: 2736102 - RNA, 19 nt, Artificial Sequence
  Description of Artificial Sequence: Synthetic oligonucleotide
cagacacuccuccaccuuc

SEQ ID NO: 2736103 - RNA, 19 nt, Artificial Sequence
  Description of Artificial Sequence: Synthetic oligonucleotide
gaagcgcauccuccgugcc

SEQ ID NO: 2736104 - RNA, 19 nt, Artificial Sequence
  Description of Artificial Sequence: Synthetic oligonucleotide
cagaucugcagcaugcgua

SEQ ID NO: 2736105 - RNA, 19 nt, Artificial Sequence
  Description of Artificial Sequence: Synthetic oligonucleotide
guguucuggugaaugcugc

SEQ ID NO: 2736106 - RNA, 19 nt, Artificial Sequence
  Description of Artificial Sequence: Synthetic oligonucleotide
acguggcucagacacuccu

SEQ ID NO: 2736107 - RNA, 19 nt, Artificial Sequence
  Description of Artificial Sequence: Synthetic oligonucleotide
acccucagcucagacgcac

SEQ ID NO: 2736108 - RNA, 19 nt, Artificial Sequence
  Description of Artificial Sequence: Synthetic oligonucleotide
aauguggggagggcagcgu

SEQ ID NO: 2736109 - RNA, 19 nt, Artificial Sequence
  Description of Artificial Sequence: Synthetic oligonucleotide
uggccaaguggacccucag

SEQ ID NO: 2736110 - RNA, 19 nt, Artificial Sequence
  Description of Artificial Sequence: Synthetic oligonucleotide
ugcguaccaggcguugugc

SEQ ID NO: 2736111 - RNA, 19 nt, Artificial Sequence
  Description of Artificial Sequence: Synthetic oligonucleotide
gcugugaagguuaauuaca

SEQ ID NO: 2736112 - RNA, 19 nt, Artificial Sequence
  Description of Artificial Sequence: Synthetic oligonucleotide
ggcucgaaagcuucccacc

SEQ ID NO: 2736113 - RNA, 19 nt, Artificial Sequence
  Description of Artificial Sequence: Synthetic oligonucleotide
ugguggcucgaaagcuucc

SEQ ID NO: 2736114 - RNA, 19 nt, Artificial Sequence
  Description of Artificial Sequence: Synthetic oligonucleotide
ucagacacuccuccaccuu

SEQ ID NO: 2736115 - RNA, 19 nt, Artificial Sequence
  Description of Artificial Sequence: Synthetic oligonucleotide
aaguggacccucagcucag

SEQ ID NO: 2736116 - RNA, 19 nt, Artificial Sequence
  Description of Artificial Sequence: Synthetic oligonucleotide
gccugagccaaaugugggg

SEQ ID NO: 2736117 - RNA, 19 nt, Artificial Sequence
  Description of Artificial Sequence: Synthetic oligonucleotide
uuggagcaucgacuccgcc

SEQ ID NO: 2736118 - RNA, 19 nt, Artificial Sequence
  Description of Artificial Sequence: Synthetic oligonucleotide
cuaagucacagaagagcaa

SEQ ID NO: 2736119 - RNA, 19 nt, Artificial Sequence
  Description of Artificial Sequence: Synthetic oligonucleotide
aauucggggccgguucaca

SEQ ID NO: 2736120 - RNA, 19 nt, Artificial Sequence
  Description of Artificial Sequence: Synthetic oligonucleotide
guuuucaccaacagugacu

SEQ ID NO: 2736121 - RNA, 19 nt, Artificial Sequence
  Description of Artificial Sequence: Synthetic oligonucleotide
aauuggccaaguggacccu

SEQ ID NO: 2736122 - RNA, 19 nt, Artificial Sequence
  Description of Artificial Sequence: Synthetic oligonucleotide
cugcagcaugcguaccagg

SEQ ID NO: 2736123 - RNA, 19 nt, Artificial Sequence
  Description of Artificial Sequence: Synthetic oligonucleotide
guggcgaggaaacauacuu

SEQ ID NO: 2736124 - RNA, 19 nt, Artificial Sequence
  Description of Artificial Sequence: Synthetic oligonucleotide
gaggcuguauuugcuguga

SEQ ID NO: 2736125 - RNA, 19 nt, Artificial Sequence
  Description of Artificial Sequence: Synthetic oligonucleotide
auuggccaaguggacccuc

SEQ ID NO: 2736126 - RNA, 19 nt, Artificial Sequence
  Description of Artificial Sequence: Synthetic oligonucleotide
cagcaaggacagcagguuc

SEQ ID NO: 2736127 - RNA, 19 nt, Artificial Sequence
  Description of Artificial Sequence: Synthetic oligonucleotide
uccccaggaagaagcugcu

SEQ ID NO: 2736128 - RNA, 19 nt, Artificial Sequence
  Description of Artificial Sequence: Synthetic oligonucleotide
caccucagcaaggacagca

SEQ ID NO: 2736129 - RNA, 19 nt, Artificial Sequence
  Description of Artificial Sequence: Synthetic oligonucleotide
gccugucaggcccugacug

SEQ ID NO: 2736130 - RNA, 19 nt, Artificial Sequence
  Description of Artificial Sequence: Synthetic oligonucleotide
ugugccaugguggcucgaa

SEQ ID NO: 2736131 - RNA, 19 nt, Artificial Sequence
  Description of Artificial Sequence: Synthetic oligonucleotide
cagacgcacaguguucuug

SEQ ID NO: 2736132 - RNA, 19 nt, Artificial Sequence
  Description of Artificial Sequence: Synthetic oligonucleotide
cugucggagcaccucagca

SEQ ID NO: 2736133 - RNA, 19 nt, Artificial Sequence
  Description of Artificial Sequence: Synthetic oligonucleotide
ggcguugugccaugguggc

SEQ ID NO: 2736134 - RNA, 19 nt, Artificial Sequence
  Description of Artificial Sequence: Synthetic oligonucleotide
ggcuucgguagguacgggc

SEQ ID NO: 2736135 - RNA, 19 nt, Artificial Sequence
  Description of Artificial Sequence: Synthetic oligonucleotide
ccuuggaugggguacuguc

SEQ ID NO: 2736136 - RNA, 19 nt, Artificial Sequence
  Description of Artificial Sequence: Synthetic oligonucleotide
uucggggccgguucacagu

SEQ ID NO: 2736137 - RNA, 19 nt, Artificial Sequence
  Description of Artificial Sequence: Synthetic oligonucleotide
ggcucucccguccagcccc

SEQ ID NO: 2736138 - RNA, 19 nt, Artificial Sequence
  Description of Artificial Sequence: Synthetic oligonucleotide
ggcagcgucgcucacagcu

SEQ ID NO: 2736139 - RNA, 19 nt, Artificial Sequence
  Description of Artificial Sequence: Synthetic oligonucleotide
agcaucgacuccgccagcu

SEQ ID NO: 2736140 - RNA, 19 nt, Artificial Sequence
  Description of Artificial Sequence: Synthetic oligonucleotide
gcacagaucugcagcaugc

SEQ ID NO: 2736141 - RNA, 19 nt, Artificial Sequence
  Description of Artificial Sequence: Synthetic oligonucleotide
uggcucucccguccagccc

SEQ ID NO: 2736142 - RNA, 19 nt, Artificial Sequence
  Description of Artificial Sequence: Synthetic oligonucleotide
ccucuaagucacagaagag

SEQ ID NO: 2736143 - RNA, 19 nt, Artificial Sequence
  Description of Artificial Sequence: Synthetic oligonucleotide
gcuucgguagguacgggcc

SEQ ID NO: 2736144 - RNA, 19 nt, Artificial Sequence
  Description of Artificial Sequence: Synthetic oligonucleotide
gagauaccuggcacgugac

SEQ ID NO: 2736145 - RNA, 19 nt, Artificial Sequence
  Description of Artificial Sequence: Synthetic oligonucleotide
caccgcugagauaccuggc

SEQ ID NO: 2736146 - RNA, 19 nt, Artificial Sequence
  Description of Artificial Sequence: Synthetic oligonucleotide
uaccuggcacgugaccagc

SEQ ID NO: 2736147 - RNA, 19 nt, Artificial Sequence
  Description of Artificial Sequence: Synthetic oligonucleotide
gccaaguggacccucagcu

SEQ ID NO: 2736148 - RNA, 19 nt, Artificial Sequence
  Description of Artificial Sequence: Synthetic oligonucleotide
ggcucagacacuccuccac

SEQ ID NO: 2736149 - RNA, 19 nt, Artificial Sequence
  Description of Artificial Sequence: Synthetic oligonucleotide
ucucccguccagccccugu

SEQ ID NO: 2736150 - RNA, 19 nt, Artificial Sequence
  Description of Artificial Sequence: Synthetic oligonucleotide
gaaugcugcaguggcucuc

SEQ ID NO: 2736151 - RNA, 19 nt, Artificial Sequence
  Description of Artificial Sequence: Synthetic oligonucleotide
ggagggaauuggccaagug

SEQ ID NO: 2736152 - RNA, 19 nt, Artificial Sequence
  Description of Artificial Sequence: Synthetic oligonucleotide
aucgacuccgccagcuucu

SEQ ID NO: 2736153 - RNA, 19 nt, Artificial Sequence
  Description of Artificial Sequence: Synthetic oligonucleotide
gaucugcagcaugcguacc

SEQ ID NO: 2736154 - RNA, 19 nt, Artificial Sequence
  Description of Artificial Sequence: Synthetic oligonucleotide
ccuguaguguggaggcugc

SEQ ID NO: 2736155 - RNA, 19 nt, Artificial Sequence
  Description of Artificial Sequence: Synthetic oligonucleotide
cuucgguagguacgggcca

SEQ ID NO: 2736156 - RNA, 19 nt, Artificial Sequence
  Description of Artificial Sequence: Synthetic oligonucleotide
cugcuucuggagccugagc

SEQ ID NO: 2736157 - RNA, 19 nt, Artificial Sequence
  Description of Artificial Sequence: Synthetic oligonucleotide
ugacugcuucuggagccug

SEQ ID NO: 2736158 - RNA, 19 nt, Artificial Sequence
  Description of Artificial Sequence: Synthetic oligonucleotide
gacgcacaguguucuugga

SEQ ID NO: 2736159 - RNA, 19 nt, Artificial Sequence
  Description of Artificial Sequence: Synthetic oligonucleotide
guggcucgaaagcuuccca

SEQ ID NO: 2736160 - RNA, 19 nt, Artificial Sequence
  Description of Artificial Sequence: Synthetic oligonucleotide
ccaccucuaagucacagaa

SEQ ID NO: 2736161 - RNA, 19 nt, Artificial Sequence
  Description of Artificial Sequence: Synthetic oligonucleotide
uagguacgggccaguuuua

SEQ ID NO: 2736162 - RNA, 19 nt, Artificial Sequence
  Description of Artificial Sequence: Synthetic oligonucleotide
cucccguccagccccugug

SEQ ID NO: 2736163 - RNA, 19 nt, Artificial Sequence
  Description of Artificial Sequence: Synthetic oligonucleotide
aggcuguauuugcugugaa

SEQ ID NO: 2736164 - RNA, 19 nt, Artificial Sequence
  Description of Artificial Sequence: Synthetic oligonucleotide
aguguucuuggagcaucga

SEQ ID NO: 2736165 - RNA, 19 nt, Artificial Sequence
  Description of Artificial Sequence: Synthetic oligonucleotide
uucuggagccugagccaaa

SEQ ID NO: 2736166 - RNA, 19 nt, Artificial Sequence
  Description of Artificial Sequence: Synthetic oligonucleotide
gguggcucgaaagcuuccc

SEQ ID NO: 2736167 - RNA, 19 nt, Artificial Sequence
  Description of Artificial Sequence: Synthetic oligonucleotide
uccuuggaugggguacugu

SEQ ID NO: 2736168 - RNA, 19 nt, Artificial Sequence
  Description of Artificial Sequence: Synthetic oligonucleotide
ggccaaguggacccucagc

SEQ ID NO: 2736169 - RNA, 19 nt, Artificial Sequence
  Description of Artificial Sequence: Synthetic oligonucleotide
cuggcacgugaccagcaca

SEQ ID NO: 2736170 - RNA, 19 nt, Artificial Sequence
  Description of Artificial Sequence: Synthetic oligonucleotide
gcgaggaaacauacuuucc

SEQ ID NO: 2736171 - RNA, 19 nt, Artificial Sequence
  Description of Artificial Sequence: Synthetic oligonucleotide
gcuucuggagccugagcca

SEQ ID NO: 2736172 - RNA, 19 nt, Artificial Sequence
  Description of Artificial Sequence: Synthetic oligonucleotide
ucaggcccugacugguuuu

SEQ ID NO: 2736173 - RNA, 19 nt, Artificial Sequence
  Description of Artificial Sequence: Synthetic oligonucleotide
ugucaggcccugacugguu

SEQ ID NO: 2736174 - RNA, 19 nt, Artificial Sequence
  Description of Artificial Sequence: Synthetic oligonucleotide
caggucaauucggggccgg

SEQ ID NO: 2736175 - RNA, 19 nt, Artificial Sequence
  Description of Artificial Sequence: Synthetic oligonucleotide
uaccaggcguugugccaug

SEQ ID NO: 2736176 - RNA, 19 nt, Artificial Sequence
  Description of Artificial Sequence: Synthetic oligonucleotide
ucagacgcacaguguucuu

SEQ ID NO: 2736177 - RNA, 19 nt, Artificial Sequence
  Description of Artificial Sequence: Synthetic oligonucleotide
gcguaccaggcguugugcc

SEQ ID NO: 2736178 - RNA, 19 nt, Artificial Sequence
  Description of Artificial Sequence: Synthetic oligonucleotide
cccugacugguuuucacca

SEQ ID NO: 2736179 - RNA, 19 nt, Artificial Sequence
  Description of Artificial Sequence: Synthetic oligonucleotide
ccucagcucagacgcacag

SEQ ID NO: 2736180 - RNA, 19 nt, Artificial Sequence
  Description of Artificial Sequence: Synthetic oligonucleotide
guggggagggcagcgucgc

SEQ ID NO: 2736181 - RNA, 19 nt, Artificial Sequence
  Description of Artificial Sequence: Synthetic oligonucleotide
cagcaugcguaccaggcgu

SEQ ID NO: 2736182 - RNA, 19 nt, Artificial Sequence
  Description of Artificial Sequence: Synthetic oligonucleotide
cugagauaccuggcacgug

SEQ ID NO: 2736183 - RNA, 19 nt, Artificial Sequence
  Description of Artificial Sequence: Synthetic oligonucleotide
accuuccggaggcuguauu

SEQ ID NO: 2736184 - RNA, 19 nt, Artificial Sequence
  Description of Artificial Sequence: Synthetic oligonucleotide
cuuuccccaggaagaagcu

SEQ ID NO: 2736185 - RNA, 19 nt, Artificial Sequence
  Description of Artificial Sequence: Synthetic oligonucleotide
cuguaguguggaggcugcc

SEQ ID NO: 2736186 - RNA, 19 nt, Artificial Sequence
  Description of Artificial Sequence: Synthetic oligonucleotide
caauucggggccgguucac

SEQ ID NO: 2736187 - RNA, 19 nt, Artificial Sequence
  Description of Artificial Sequence: Synthetic oligonucleotide
gagcaucgacuccgccagc

SEQ ID NO: 2736188 - RNA, 19 nt, Artificial Sequence
  Description of Artificial Sequence: Synthetic oligonucleotide
cucagacgcacaguguucu

SEQ ID NO: 2736189 - RNA, 19 nt, Artificial Sequence
  Description of Artificial Sequence: Synthetic oligonucleotide
cgggccaguuuuauaacug

SEQ ID NO: 2736190 - RNA, 19 nt, Artificial Sequence
  Description of Artificial Sequence: Synthetic oligonucleotide
ucgacuccgccagcuucug

SEQ ID NO: 2736191 - RNA, 19 nt, Artificial Sequence
  Description of Artificial Sequence: Synthetic oligonucleotide
gcagguucaccgcugagau

SEQ ID NO: 2736192 - RNA, 19 nt, Artificial Sequence
  Description of Artificial Sequence: Synthetic oligonucleotide
gggaauuggccaaguggac

SEQ ID NO: 2736193 - RNA, 19 nt, Artificial Sequence
  Description of Artificial Sequence: Synthetic oligonucleotide
ccaaguggacccucagcuc

SEQ ID NO: 2736194 - RNA, 19 nt, Artificial Sequence
  Description of Artificial Sequence: Synthetic oligonucleotide
gccaguuuuauaacugugu

SEQ ID NO: 2736195 - RNA, 19 nt, Artificial Sequence
  Description of Artificial Sequence: Synthetic oligonucleotide
gcugcaguggcucucccgu

SEQ ID NO: 2736196 - RNA, 19 nt, Artificial Sequence
  Description of Artificial Sequence: Synthetic oligonucleotide
agcuucugcagaagcgcau

SEQ ID NO: 2736197 - RNA, 19 nt, Artificial Sequence
  Description of Artificial Sequence: Synthetic oligonucleotide
cauccuccgugccccacca

SEQ ID NO: 2736198 - RNA, 19 nt, Artificial Sequence
  Description of Artificial Sequence: Synthetic oligonucleotide
gacugcuucuggagccuga

SEQ ID NO: 2736199 - RNA, 19 nt, Artificial Sequence
  Description of Artificial Sequence: Synthetic oligonucleotide
gagggcagcgucgcucaca

SEQ ID NO: 2736200 - RNA, 19 nt, Artificial Sequence
  Description of Artificial Sequence: Synthetic oligonucleotide
agccccuguggcgaggaaa

SEQ ID NO: 2736201 - RNA, 19 nt, Artificial Sequence
  Description of Artificial Sequence: Synthetic oligonucleotide
gcauccuccgugccccacc

SEQ ID NO: 2736202 - RNA, 19 nt, Artificial Sequence
  Description of Artificial Sequence: Synthetic oligonucleotide
agguacgggccaguuuuau

SEQ ID NO: 2736203 - RNA, 19 nt, Artificial Sequence
  Description of Artificial Sequence: Synthetic oligonucleotide
cugcaguggcucucccguc

SEQ ID NO: 2736204 - RNA, 19 nt, Artificial Sequence
  Description of Artificial Sequence: Synthetic oligonucleotide
ccguccagccccuguggcg

SEQ ID NO: 2736205 - RNA, 19 nt, Artificial Sequence
  Description of Artificial Sequence: Synthetic oligonucleotide
caugguggcucgaaagcuu

SEQ ID NO: 2736206 - RNA, 19 nt, Artificial Sequence
  Description of Artificial Sequence: Synthetic oligonucleotide
auccuccgugccccaccag

SEQ ID NO: 2736207 - RNA, 19 nt, Artificial Sequence
  Description of Artificial Sequence: Synthetic oligonucleotide
ucgguagguacgggccagu

SEQ ID NO: 2736208 - RNA, 19 nt, Artificial Sequence
  Description of Artificial Sequence: Synthetic oligonucleotide
caggcccugacugguuuuc

SEQ ID NO: 2736209 - RNA, 19 nt, Artificial Sequence
  Description of Artificial Sequence: Synthetic oligonucleotide
ugcuguccacguggcucag

SEQ ID NO: 2736210 - RNA, 19 nt, Artificial Sequence
  Description of Artificial Sequence: Synthetic oligonucleotide
ccgcugagauaccuggcac

SEQ ID NO: 2736211 - RNA, 19 nt, Artificial Sequence
  Description of Artificial Sequence: Synthetic oligonucleotide
gguacgggccaguuuuaua

SEQ ID NO: 2736212 - RNA, 19 nt, Artificial Sequence
  Description of Artificial Sequence: Synthetic oligonucleotide
gcucgaaagcuucccaccu

SEQ ID NO: 2736213 - RNA, 19 nt, Artificial Sequence
  Description of Artificial Sequence: Synthetic oligonucleotide
cguugugccaugguggcuc

SEQ ID NO: 2736214 - RNA, 19 nt, Artificial Sequence
  Description of Artificial Sequence: Synthetic oligonucleotide
gggccaguuuuauaacugu

SEQ ID NO: 2736215 - RNA, 19 nt, Artificial Sequence
  Description of Artificial Sequence: Synthetic oligonucleotide
ccugagccaaaugugggga

SEQ ID NO: 2736216 - RNA, 19 nt, Artificial Sequence
  Description of Artificial Sequence: Synthetic oligonucleotide
gggccugucaggcccugac

SEQ ID NO: 2736217 - RNA, 19 nt, Artificial Sequence
  Description of Artificial Sequence: Synthetic oligonucleotide
aguggacccucagcucaga

SEQ ID NO: 2736218 - RNA, 19 nt, Artificial Sequence
  Description of Artificial Sequence: Synthetic oligonucleotide
gguuaauuacaaacacaau

SEQ ID NO: 2736219 - RNA, 19 nt, Artificial Sequence
  Description of Artificial Sequence: Synthetic oligonucleotide
cuccuuggaugggguacug

SEQ ID NO: 2736220 - RNA, 19 nt, Artificial Sequence
  Description of Artificial Sequence: Synthetic oligonucleotide
ggggccgguucacagugga

SEQ ID NO: 2736221 - RNA, 19 nt, Artificial Sequence
  Description of Artificial Sequence: Synthetic oligonucleotide
ggggagggaauuggccaag

SEQ ID NO: 2736222 - RNA, 19 nt, Artificial Sequence
  Description of Artificial Sequence: Synthetic oligonucleotide
aggucaauucggggccggu

SEQ ID NO: 2736223 - RNA, 19 nt, Artificial Sequence
  Description of Artificial Sequence: Synthetic oligonucleotide
ccaguuuuauaacuguguu

SEQ ID NO: 2736224 - RNA, 19 nt, Artificial Sequence
  Description of Artificial Sequence: Synthetic oligonucleotide
gcugagauaccuggcacgu

SEQ ID NO: 2736225 - RNA, 19 nt, Artificial Sequence
  Description of Artificial Sequence: Synthetic oligonucleotide
guucaccgcugagauaccu

SEQ ID NO: 2736226 - RNA, 19 nt, Artificial Sequence
  Description of Artificial Sequence: Synthetic oligonucleotide
guaccaggcguugugccau

SEQ ID NO: 2736227 - RNA, 19 nt, Artificial Sequence
  Description of Artificial Sequence: Synthetic oligonucleotide
ccuggcacgugaccagcac

SEQ ID NO: 2736228 - RNA, 19 nt, Artificial Sequence
  Description of Artificial Sequence: Synthetic oligonucleotide
aggcccugacugguuuuca

SEQ ID NO: 2736229 - RNA, 19 nt, Artificial Sequence
  Description of Artificial Sequence: Synthetic oligonucleotide
ccuguggcgaggaaacaua

SEQ ID NO: 2736230 - RNA, 19 nt, Artificial Sequence
  Description of Artificial Sequence: Synthetic oligonucleotide
accuggcacgugaccagca

SEQ ID NO: 2736231 - RNA, 19 nt, Artificial Sequence
  Description of Artificial Sequence: Synthetic oligonucleotide
gcucagacgcacaguguuc

SEQ ID NO: 2736232 - RNA, 19 nt, Artificial Sequence
  Description of Artificial Sequence: Synthetic oligonucleotide
gcaugcguaccaggcguug

SEQ ID NO: 2736233 - RNA, 19 nt, Artificial Sequence
  Description of Artificial Sequence: Synthetic oligonucleotide
agcaugcguaccaggcguu

SEQ ID NO: 2736234 - RNA, 19 nt, Artificial Sequence
  Description of Artificial Sequence: Synthetic oligonucleotide
uugugccaugguggcucga

SEQ ID NO: 2736235 - RNA, 19 nt, Artificial Sequence
  Description of Artificial Sequence: Synthetic oligonucleotide
caaagggcuucgguaggua

SEQ ID NO: 2736236 - RNA, 19 nt, Artificial Sequence
  Description of Artificial Sequence: Synthetic oligonucleotide
gcacgugaccagcacagau

SEQ ID NO: 2736237 - RNA, 19 nt, Artificial Sequence
  Description of Artificial Sequence: Synthetic oligonucleotide
ggggagggcagcgucgcuc

SEQ ID NO: 2736238 - RNA, 19 nt, Artificial Sequence
  Description of Artificial Sequence: Synthetic oligonucleotide
cccguccagccccuguggc

SEQ ID NO: 2736239 - RNA, 19 nt, Artificial Sequence
  Description of Artificial Sequence: Synthetic oligonucleotide
gcaguggcucucccgucca

SEQ ID NO: 2736240 - RNA, 19 nt, Artificial Sequence
  Description of Artificial Sequence: Synthetic oligonucleotide
cguggcucagacacuccuc

SEQ ID NO: 2736241 - RNA, 19 nt, Artificial Sequence
  Description of Artificial Sequence: Synthetic oligonucleotide
ggugaaugcugcaguggcu

SEQ ID NO: 2736242 - RNA, 19 nt, Artificial Sequence
  Description of Artificial Sequence: Synthetic oligonucleotide
cugucaggcccugacuggu

SEQ ID NO: 2736243 - RNA, 19 nt, Artificial Sequence
  Description of Artificial Sequence: Synthetic oligonucleotide
cagcucagacgcacagugu

SEQ ID NO: 2736244 - RNA, 19 nt, Artificial Sequence
  Description of Artificial Sequence: Synthetic oligonucleotide
ccgguucacaguggagggc

SEQ ID NO: 2736245 - RNA, 19 nt, Artificial Sequence
  Description of Artificial Sequence: Synthetic oligonucleotide
cagguucaccgcugagaua

SEQ ID NO: 2736246 - RNA, 19 nt, Artificial Sequence
  Description of Artificial Sequence: Synthetic oligonucleotide
caugcguaccaggcguugu

SEQ ID NO: 2736247 - RNA, 19 nt, Artificial Sequence
  Description of Artificial Sequence: Synthetic oligonucleotide
agcgucgcucacagcuccu

SEQ ID NO: 2736248 - RNA, 19 nt, Artificial Sequence
  Description of Artificial Sequence: Synthetic oligonucleotide
cguaccaggcguugugcca

SEQ ID NO: 2736249 - RNA, 19 nt, Artificial Sequence
  Description of Artificial Sequence: Synthetic oligonucleotide
gguagguacgggccaguuu

SEQ ID NO: 2736250 - RNA, 19 nt, Artificial Sequence
  Description of Artificial Sequence: Synthetic oligonucleotide
gcagcgucgcucacagcuc

SEQ ID NO: 2736251 - RNA, 19 nt, Artificial Sequence
  Description of Artificial Sequence: Synthetic oligonucleotide
gcagaagcgcauccuccgu

SEQ ID NO: 2736252 - RNA, 19 nt, Artificial Sequence
  Description of Artificial Sequence: Synthetic oligonucleotide
cgguucacaguggagggca

SEQ ID NO: 2736253 - RNA, 19 nt, Artificial Sequence
  Description of Artificial Sequence: Synthetic oligonucleotide
gggccgguucacaguggag

SEQ ID NO: 2736254 - RNA, 19 nt, Artificial Sequence
  Description of Artificial Sequence: Synthetic oligonucleotide
cagcuccuuggauggggua

SEQ ID NO: 2736255 - RNA, 19 nt, Artificial Sequence
  Description of Artificial Sequence: Synthetic oligonucleotide
gggcuucgguagguacggg

SEQ ID NO: 2736256 - RNA, 19 nt, Artificial Sequence
  Description of Artificial Sequence: Synthetic oligonucleotide
cgucgcucacagcuccuug

SEQ ID NO: 2736257 - RNA, 19 nt, Artificial Sequence
  Description of Artificial Sequence: Synthetic oligonucleotide
agggccugucaggcccuga

SEQ ID NO: 2736258 - RNA, 19 nt, Artificial Sequence
  Description of Artificial Sequence: Synthetic oligonucleotide
ggcacgugaccagcacaga

SEQ ID NO: 2736259 - RNA, 19 nt, Artificial Sequence
  Description of Artificial Sequence: Synthetic oligonucleotide
gguucacaguggagggcaa

SEQ ID NO: 2736260 - RNA, 19 nt, Artificial Sequence
  Description of Artificial Sequence: Synthetic oligonucleotide
ggagggcagcgucgcucac

SEQ ID NO: 2736261 - RNA, 19 nt, Artificial Sequence
  Description of Artificial Sequence: Synthetic oligonucleotide
cgugaccagcacagaucug

SEQ ID NO: 2736262 - RNA, 19 nt, Artificial Sequence
  Description of Artificial Sequence: Synthetic oligonucleotide
caaacacaaucaggucaau

SEQ ID NO: 2736263 - RNA, 19 nt, Artificial Sequence
  Description of Artificial Sequence: Synthetic oligonucleotide
ggccugucaggcccugacu

SEQ ID NO: 2736264 - RNA, 19 nt, Artificial Sequence
  Description of Artificial Sequence: Synthetic oligonucleotide
guccuguaguguggaggcu

SEQ ID NO: 2736265 - RNA, 19 nt, Artificial Sequence
  Description of Artificial Sequence: Synthetic oligonucleotide
cccucagcucagacgcaca

SEQ ID NO: 2736266 - RNA, 19 nt, Artificial Sequence
  Description of Artificial Sequence: Synthetic oligonucleotide
ccuuccggaggcuguauuu

SEQ ID NO: 2736267 - RNA, 19 nt, Artificial Sequence
  Description of Artificial Sequence: Synthetic oligonucleotide
ccccaggaagaagcugcug

SEQ ID NO: 2736268 - RNA, 19 nt, Artificial Sequence
  Description of Artificial Sequence: Synthetic oligonucleotide
gggcaaaggggagggaauu

SEQ ID NO: 2736269 - RNA, 19 nt, Artificial Sequence
  Description of Artificial Sequence: Synthetic oligonucleotide
cggagcaccucagcaagga

SEQ ID NO: 2736270 - RNA, 19 nt, Artificial Sequence
  Description of Artificial Sequence: Synthetic oligonucleotide
cucucccguccagccccug

SEQ ID NO: 2736271 - RNA, 19 nt, Artificial Sequence
  Description of Artificial Sequence: Synthetic oligonucleotide
ggucaauucggggccgguu

SEQ ID NO: 2736272 - RNA, 19 nt, Artificial Sequence
  Description of Artificial Sequence: Synthetic oligonucleotide
gggcagcgucgcucacagc

SEQ ID NO: 2736273 - RNA, 19 nt, Artificial Sequence
  Description of Artificial Sequence: Synthetic oligonucleotide
cggggccgguucacagugg

SEQ ID NO: 2736274 - RNA, 19 nt, Artificial Sequence
  Description of Artificial Sequence: Synthetic oligonucleotide
cgacuccgccagcuucugc

SEQ ID NO: 2736275 - RNA, 19 nt, Artificial Sequence
  Description of Artificial Sequence: Synthetic oligonucleotide
gggagggaauuggccaagu

SEQ ID NO: 2736276 - RNA, 19 nt, Artificial Sequence
  Description of Artificial Sequence: Synthetic oligonucleotide
gcuguccacguggcucaga

SEQ ID NO: 2736277 - RNA, 19 nt, Artificial Sequence
  Description of Artificial Sequence: Synthetic oligonucleotide
cccuguggcgaggaaacau

SEQ ID NO: 2736278 - RNA, 19 nt, Artificial Sequence
  Description of Artificial Sequence: Synthetic oligonucleotide
ggguacugucggagcaccu

SEQ ID NO: 2736279 - RNA, 19 nt, Artificial Sequence
  Description of Artificial Sequence: Synthetic oligonucleotide
cagccccuguggcgaggaa

SEQ ID NO: 2736280 - RNA, 19 nt, Artificial Sequence
  Description of Artificial Sequence: Synthetic oligonucleotide
ccaggcguugugccauggu

SEQ ID NO: 2736281 - RNA, 19 nt, Artificial Sequence
  Description of Artificial Sequence: Synthetic oligonucleotide
gcgcauccuccgugcccca

SEQ ID NO: 2736282 - RNA, 19 nt, Artificial Sequence
  Description of Artificial Sequence: Synthetic oligonucleotide
gcguugugccaugguggcu

SEQ ID NO: 2736283 - RNA, 19 nt, Artificial Sequence
  Description of Artificial Sequence: Synthetic oligonucleotide
caccuuccggaggcuguau

SEQ ID NO: 2736284 - RNA, 19 nt, Artificial Sequence
  Description of Artificial Sequence: Synthetic oligonucleotide
ccaccuuccggaggcugua

SEQ ID NO: 2736285 - RNA, 19 nt, Artificial Sequence
  Description of Artificial Sequence: Synthetic oligonucleotide
cgcauccuccgugccccac

SEQ ID NO: 2736286 - RNA, 19 nt, Artificial Sequence
  Description of Artificial Sequence: Synthetic oligonucleotide
gcgucgcucacagcuccuu

SEQ ID NO: 2736287 - RNA, 19 nt, Artificial Sequence
  Description of Artificial Sequence: Synthetic oligonucleotide
cgcucacagcuccuuggau

SEQ ID NO: 2736288 - RNA, 19 nt, Artificial Sequence
  Description of Artificial Sequence: Synthetic oligonucleotide
gcucucccguccagccccu

SEQ ID NO: 2736289 - RNA, 19 nt, Artificial Sequence
  Description of Artificial Sequence: Synthetic oligonucleotide
ggcugccuccagggccugu

SEQ ID NO: 2736290 - RNA, 19 nt, Artificial Sequence
  Description of Artificial Sequence: Synthetic oligonucleotide
cgguagguacgggccaguu

SEQ ID NO: 2736291 - RNA, 19 nt, Artificial Sequence
  Description of Artificial Sequence: Synthetic oligonucleotide
uaaagcuuguaguagaugg

SEQ ID NO: 2736292 - RNA, 19 nt, Artificial Sequence
  Description of Artificial Sequence: Synthetic oligonucleotide
uagacaagcaccaagaaac

SEQ ID NO: 2736293 - RNA, 19 nt, Artificial Sequence
  Description of Artificial Sequence: Synthetic oligonucleotide
aagaguucuuauuucaccg

SEQ ID NO: 2736294 - RNA, 19 nt, Artificial Sequence
  Description of Artificial Sequence: Synthetic oligonucleotide
caagauaucagagagaaag

SEQ ID NO: 2736295 - RNA, 19 nt, Artificial Sequence
  Description of Artificial Sequence: Synthetic oligonucleotide
aaagugaacagcaccagcc

SEQ ID NO: 2736296 - RNA, 19 nt, Artificial Sequence
  Description of Artificial Sequence: Synthetic oligonucleotide
agagaaagugaacagcacc

SEQ ID NO: 2736297 - RNA, 19 nt, Artificial Sequence
  Description of Artificial Sequence: Synthetic oligonucleotide
uauuuagucaguuuacacc

SEQ ID NO: 2736298 - RNA, 19 nt, Artificial Sequence
  Description of Artificial Sequence: Synthetic oligonucleotide
aacagcaccagccauaccu

SEQ ID NO: 2736299 - RNA, 19 nt, Artificial Sequence
  Description of Artificial Sequence: Synthetic oligonucleotide
ugucacaaaaugcugauga

SEQ ID NO: 2736300 - RNA, 19 nt, Artificial Sequence
  Description of Artificial Sequence: Synthetic oligonucleotide
aaacaugcacacuacgggg

SEQ ID NO: 2736301 - RNA, 19 nt, Artificial Sequence
  Description of Artificial Sequence: Synthetic oligonucleotide
cuuauuucaccguuaaggg

SEQ ID NO: 2736302 - RNA, 19 nt, Artificial Sequence
  Description of Artificial Sequence: Synthetic oligonucleotide
aaguucaaaugcuggaaac

SEQ ID NO: 2736303 - RNA, 19 nt, Artificial Sequence
  Description of Artificial Sequence: Synthetic oligonucleotide
uaaacagucacacaugcuc

SEQ ID NO: 2736304 - RNA, 19 nt, Artificial Sequence
  Description of Artificial Sequence: Synthetic oligonucleotide
aagaguucaagugaaagug

SEQ ID NO: 2736305 - RNA, 19 nt, Artificial Sequence
  Description of Artificial Sequence: Synthetic oligonucleotide
ucagcuaagaguucaagug

SEQ ID NO: 2736306 - RNA, 19 nt, Artificial Sequence
  Description of Artificial Sequence: Synthetic oligonucleotide
uuuagauacuauaucaaaa

SEQ ID NO: 2736307 - RNA, 19 nt, Artificial Sequence
  Description of Artificial Sequence: Synthetic oligonucleotide
uucaaagagggaauaaagc

SEQ ID NO: 2736308 - RNA, 19 nt, Artificial Sequence
  Description of Artificial Sequence: Synthetic oligonucleotide
ucuacuuuagauacuauau

SEQ ID NO: 2736309 - RNA, 19 nt, Artificial Sequence
  Description of Artificial Sequence: Synthetic oligonucleotide
ucagacauguaauacaacu

SEQ ID NO: 2736310 - RNA, 19 nt, Artificial Sequence
  Description of Artificial Sequence: Synthetic oligonucleotide
agcaccaagaaacaugcac

SEQ ID NO: 2736311 - RNA, 19 nt, Artificial Sequence
  Description of Artificial Sequence: Synthetic oligonucleotide
uauuucaccguuaagggaa

SEQ ID NO: 2736312 - RNA, 19 nt, Artificial Sequence
  Description of Artificial Sequence: Synthetic oligonucleotide
ugauguuucagacauguaa

SEQ ID NO: 2736313 - RNA, 19 nt, Artificial Sequence
  Description of Artificial Sequence: Synthetic oligonucleotide
aacaaaaggggcuugugga

SEQ ID NO: 2736314 - RNA, 19 nt, Artificial Sequence
  Description of Artificial Sequence: Synthetic oligonucleotide
aaugcuggaaaccgugacg

SEQ ID NO: 2736315 - RNA, 19 nt, Artificial Sequence
  Description of Artificial Sequence: Synthetic oligonucleotide
ucaggcacuaaucagucag

SEQ ID NO: 2736316 - RNA, 19 nt, Artificial Sequence
  Description of Artificial Sequence: Synthetic oligonucleotide
uuaguuguccuuuugcacc

SEQ ID NO: 2736317 - RNA, 19 nt, Artificial Sequence
  Description of Artificial Sequence: Synthetic oligonucleotide
aguaaguucugugucaggc

SEQ ID NO: 2736318 - RNA, 19 nt, Artificial Sequence
  Description of Artificial Sequence: Synthetic oligonucleotide
gacacucuacuuuagauac

SEQ ID NO: 2736319 - RNA, 19 nt, Artificial Sequence
  Description of Artificial Sequence: Synthetic oligonucleotide
aaaugcuggaaaccgugac

SEQ ID NO: 2736320 - RNA, 19 nt, Artificial Sequence
  Description of Artificial Sequence: Synthetic oligonucleotide
aaaauguggggcugucgcc

SEQ ID NO: 2736321 - RNA, 19 nt, Artificial Sequence
  Description of Artificial Sequence: Synthetic oligonucleotide
ucugguaccaagauaucag

SEQ ID NO: 2736322 - RNA, 19 nt, Artificial Sequence
  Description of Artificial Sequence: Synthetic oligonucleotide
uuucuauuuagucaguuua

SEQ ID NO: 2736323 - RNA, 19 nt, Artificial Sequence
  Description of Artificial Sequence: Synthetic oligonucleotide
uuuuaggauuuucaguaag

SEQ ID NO: 2736324 - RNA, 19 nt, Artificial Sequence
  Description of Artificial Sequence: Synthetic oligonucleotide
aagaaacaugcacacuacg

SEQ ID NO: 2736325 - RNA, 19 nt, Artificial Sequence
  Description of Artificial Sequence: Synthetic oligonucleotide
gagggaauaaagcuuguag

SEQ ID NO: 2736326 - RNA, 19 nt, Artificial Sequence
  Description of Artificial Sequence: Synthetic oligonucleotide
guaccaagauaucagagag

SEQ ID NO: 2736327 - RNA, 19 nt, Artificial Sequence
  Description of Artificial Sequence: Synthetic oligonucleotide
auagagaugacacucuacu

SEQ ID NO: 2736328 - RNA, 19 nt, Artificial Sequence
  Description of Artificial Sequence: Synthetic oligonucleotide
uuuucaguaaguucugugu

SEQ ID NO: 2736329 - RNA, 19 nt, Artificial Sequence
  Description of Artificial Sequence: Synthetic oligonucleotide
auguuaguuguccuuuugc

SEQ ID NO: 2736330 - RNA, 19 nt, Artificial Sequence
  Description of Artificial Sequence: Synthetic oligonucleotide
cuucaaagagggaauaaag

SEQ ID NO: 2736331 - RNA, 19 nt, Artificial Sequence
  Description of Artificial Sequence: Synthetic oligonucleotide
caagcaccaagaaacaugc

SEQ ID NO: 2736332 - RNA, 19 nt, Artificial Sequence
  Description of Artificial Sequence: Synthetic oligonucleotide
gaaaccgugacgucucugg

SEQ ID NO: 2736333 - RNA, 19 nt, Artificial Sequence
  Description of Artificial Sequence: Synthetic oligonucleotide
agucaguuuacaccuauag

SEQ ID NO: 2736334 - RNA, 19 nt, Artificial Sequence
  Description of Artificial Sequence: Synthetic oligonucleotide
aaacgcugucacaaaaugc

SEQ ID NO: 2736335 - RNA, 19 nt, Artificial Sequence
  Description of Artificial Sequence: Synthetic oligonucleotide
ucaaaugcuggaaaccgug

SEQ ID NO: 2736336 - RNA, 19 nt, Artificial Sequence
  Description of Artificial Sequence: Synthetic oligonucleotide
gaagaguucuuauuucacc

SEQ ID NO: 2736337 - RNA, 19 nt, Artificial Sequence
  Description of Artificial Sequence: Synthetic oligonucleotide
agacauguaauacaacugu

SEQ ID NO: 2736338 - RNA, 19 nt, Artificial Sequence
  Description of Artificial Sequence: Synthetic oligonucleotide
uuuacaccuauagacaagc

SEQ ID NO: 2736339 - RNA, 19 nt, Artificial Sequence
  Description of Artificial Sequence: Synthetic oligonucleotide
aguucaaaugcuggaaacc

SEQ ID NO: 2736340 - RNA, 19 nt, Artificial Sequence
  Description of Artificial Sequence: Synthetic oligonucleotide
uagauuugcuagcugaugu

SEQ ID NO: 2736341 - RNA, 19 nt, Artificial Sequence
  Description of Artificial Sequence: Synthetic oligonucleotide
uggcuuuugguccaauggg

SEQ ID NO: 2736342 - RNA, 19 nt, Artificial Sequence
  Description of Artificial Sequence: Synthetic oligonucleotide
aaagcuuguaguagauggc

SEQ ID NO: 2736343 - RNA, 19 nt, Artificial Sequence
  Description of Artificial Sequence: Synthetic oligonucleotide
uguaguuucuaucacucau

SEQ ID NO: 2736344 - RNA, 19 nt, Artificial Sequence
  Description of Artificial Sequence: Synthetic oligonucleotide
uaagaguucaagugaaagu

SEQ ID NO: 2736345 - RNA, 19 nt, Artificial Sequence
  Description of Artificial Sequence: Synthetic oligonucleotide
uaguuucuaucacucaugc

SEQ ID NO: 2736346 - RNA, 19 nt, Artificial Sequence
  Description of Artificial Sequence: Synthetic oligonucleotide
cuguugauagagaugacac

SEQ ID NO: 2736347 - RNA, 19 nt, Artificial Sequence
  Description of Artificial Sequence: Synthetic oligonucleotide
uuucuaucacucaugcucu

SEQ ID NO: 2736348 - RNA, 19 nt, Artificial Sequence
  Description of Artificial Sequence: Synthetic oligonucleotide
uguuaguuguccuuuugca

SEQ ID NO: 2736349 - RNA, 19 nt, Artificial Sequence
  Description of Artificial Sequence: Synthetic oligonucleotide
auggguauguuaguugucc

SEQ ID NO: 2736350 - RNA, 19 nt, Artificial Sequence
  Description of Artificial Sequence: Synthetic oligonucleotide
gaaacgcugucacaaaaug

SEQ ID NO: 2736351 - RNA, 19 nt, Artificial Sequence
  Description of Artificial Sequence: Synthetic oligonucleotide
aacgcugucacaaaaugcu

SEQ ID NO: 2736352 - RNA, 19 nt, Artificial Sequence
  Description of Artificial Sequence: Synthetic oligonucleotide
gaauaaagcuuguaguaga

SEQ ID NO: 2736353 - RNA, 19 nt, Artificial Sequence
  Description of Artificial Sequence: Synthetic oligonucleotide
auaugaagaguucuuauuu

SEQ ID NO: 2736354 - RNA, 19 nt, Artificial Sequence
  Description of Artificial Sequence: Synthetic oligonucleotide
acaacuguuucucuguuga

SEQ ID NO: 2736355 - RNA, 19 nt, Artificial Sequence
  Description of Artificial Sequence: Synthetic oligonucleotide
cauguaauacaacuguuuc

SEQ ID NO: 2736356 - RNA, 19 nt, Artificial Sequence
  Description of Artificial Sequence: Synthetic oligonucleotide
guucaaaugcuggaaaccg

SEQ ID NO: 2736357 - RNA, 19 nt, Artificial Sequence
  Description of Artificial Sequence: Synthetic oligonucleotide
agucagguggcuuuugguc

SEQ ID NO: 2736358 - RNA, 19 nt, Artificial Sequence
  Description of Artificial Sequence: Synthetic oligonucleotide
ucacucaugcucuaauuug

SEQ ID NO: 2736359 - RNA, 19 nt, Artificial Sequence
  Description of Artificial Sequence: Synthetic oligonucleotide
agggaauaaagcuuguagu

SEQ ID NO: 2736360 - RNA, 19 nt, Artificial Sequence
  Description of Artificial Sequence: Synthetic oligonucleotide
agaaacaugcacacuacgg

SEQ ID NO: 2736361 - RNA, 19 nt, Artificial Sequence
  Description of Artificial Sequence: Synthetic oligonucleotide
uacaccuauagacaagcac

SEQ ID NO: 2736362 - RNA, 19 nt, Artificial Sequence
  Description of Artificial Sequence: Synthetic oligonucleotide
uaaguucugugucaggcac

SEQ ID NO: 2736363 - RNA, 19 nt, Artificial Sequence
  Description of Artificial Sequence: Synthetic oligonucleotide
uccucuuuuaggauuuuca

SEQ ID NO: 2736364 - RNA, 19 nt, Artificial Sequence
  Description of Artificial Sequence: Synthetic oligonucleotide
aucuagauuugcuagcuga

SEQ ID NO: 2736365 - RNA, 19 nt, Artificial Sequence
  Description of Artificial Sequence: Synthetic oligonucleotide
ggucuuugcaacaaaaggg

SEQ ID NO: 2736366 - RNA, 19 nt, Artificial Sequence
  Description of Artificial Sequence: Synthetic oligonucleotide
accgugacgucucugguac

SEQ ID NO: 2736367 - RNA, 19 nt, Artificial Sequence
  Description of Artificial Sequence: Synthetic oligonucleotide
cuauuuagucaguuuacac

SEQ ID NO: 2736368 - RNA, 19 nt, Artificial Sequence
  Description of Artificial Sequence: Synthetic oligonucleotide
ugugucaggcacuaaucag

SEQ ID NO: 2736369 - RNA, 19 nt, Artificial Sequence
  Description of Artificial Sequence: Synthetic oligonucleotide
uucuauuuagucaguuuac

SEQ ID NO: 2736370 - RNA, 19 nt, Artificial Sequence
  Description of Artificial Sequence: Synthetic oligonucleotide
uuucaguaaguucuguguc

SEQ ID NO: 2736371 - RNA, 19 nt, Artificial Sequence
  Description of Artificial Sequence: Synthetic oligonucleotide
uagcugauguuucagacau

SEQ ID NO: 2736372 - RNA, 19 nt, Artificial Sequence
  Description of Artificial Sequence: Synthetic oligonucleotide
ggcuuuucuauuuagucag

SEQ ID NO: 2736373 - RNA, 19 nt, Artificial Sequence
  Description of Artificial Sequence: Synthetic oligonucleotide
cuaagaguucaagugaaag

SEQ ID NO: 2736374 - RNA, 19 nt, Artificial Sequence
  Description of Artificial Sequence: Synthetic oligonucleotide
guggcuuuugguccaaugg

SEQ ID NO: 2736375 - RNA, 19 nt, Artificial Sequence
  Description of Artificial Sequence: Synthetic oligonucleotide
ugguaccaagauaucagag

SEQ ID NO: 2736376 - RNA, 19 nt, Artificial Sequence
  Description of Artificial Sequence: Synthetic oligonucleotide
uuauuucaccguuaaggga

SEQ ID NO: 2736377 - RNA, 19 nt, Artificial Sequence
  Description of Artificial Sequence: Synthetic oligonucleotide
aacagucacacaugcucag

SEQ ID NO: 2736378 - RNA, 19 nt, Artificial Sequence
  Description of Artificial Sequence: Synthetic oligonucleotide
caacaaaaggggcuugugg

SEQ ID NO: 2736379 - RNA, 19 nt, Artificial Sequence
  Description of Artificial Sequence: Synthetic oligonucleotide
ugauguaguuucuaucacu

SEQ ID NO: 2736380 - RNA, 19 nt, Artificial Sequence
  Description of Artificial Sequence: Synthetic oligonucleotide
ucuguugauagagaugaca

SEQ ID NO: 2736381 - RNA, 19 nt, Artificial Sequence
  Description of Artificial Sequence: Synthetic oligonucleotide
agauaucagagagaaagug

SEQ ID NO: 2736382 - RNA, 19 nt, Artificial Sequence
  Description of Artificial Sequence: Synthetic oligonucleotide
uauguuaguuguccuuuug

SEQ ID NO: 2736383 - RNA, 19 nt, Artificial Sequence
  Description of Artificial Sequence: Synthetic oligonucleotide
gaaagugaacagcaccagc

SEQ ID NO: 2736384 - RNA, 19 nt, Artificial Sequence
  Description of Artificial Sequence: Synthetic oligonucleotide
agagaugacacucuacuuu

SEQ ID NO: 2736385 - RNA, 19 nt, Artificial Sequence
  Description of Artificial Sequence: Synthetic oligonucleotide
auguaauacaacuguuucu

SEQ ID NO: 2736386 - RNA, 19 nt, Artificial Sequence
  Description of Artificial Sequence: Synthetic oligonucleotide
aguuuacaccuauagacaa

SEQ ID NO: 2736387 - RNA, 19 nt, Artificial Sequence
  Description of Artificial Sequence: Synthetic oligonucleotide
gggucuuugcaacaaaagg

SEQ ID NO: 2736388 - RNA, 19 nt, Artificial Sequence
  Description of Artificial Sequence: Synthetic oligonucleotide
uguuucagacauguaauac

SEQ ID NO: 2736389 - RNA, 19 nt, Artificial Sequence
  Description of Artificial Sequence: Synthetic oligonucleotide
ucuauuuagucaguuuaca

SEQ ID NO: 2736390 - RNA, 19 nt, Artificial Sequence
  Description of Artificial Sequence: Synthetic oligonucleotide
guuucagacauguaauaca

SEQ ID NO: 2736391 - RNA, 19 nt, Artificial Sequence
  Description of Artificial Sequence: Synthetic oligonucleotide
gauguaguuucuaucacuc

SEQ ID NO: 2736392 - RNA, 19 nt, Artificial Sequence
  Description of Artificial Sequence: Synthetic oligonucleotide
gauaucagagagaaaguga

SEQ ID NO: 2736393 - RNA, 19 nt, Artificial Sequence
  Description of Artificial Sequence: Synthetic oligonucleotide
cuauagacaagcaccaaga

SEQ ID NO: 2736394 - RNA, 19 nt, Artificial Sequence
  Description of Artificial Sequence: Synthetic oligonucleotide
guucaagugaaaguguggc

SEQ ID NO: 2736395 - RNA, 19 nt, Artificial Sequence
  Description of Artificial Sequence: Synthetic oligonucleotide
ucaccguuaagggaaacgc

SEQ ID NO: 2736396 - RNA, 19 nt, Artificial Sequence
  Description of Artificial Sequence: Synthetic oligonucleotide
cagacauguaauacaacug

SEQ ID NO: 2736397 - RNA, 19 nt, Artificial Sequence
  Description of Artificial Sequence: Synthetic oligonucleotide
uuucucuguugauagagau

SEQ ID NO: 2736398 - RNA, 19 nt, Artificial Sequence
  Description of Artificial Sequence: Synthetic oligonucleotide
uaggauuuucaguaaguuc

SEQ ID NO: 2736399 - RNA, 19 nt, Artificial Sequence
  Description of Artificial Sequence: Synthetic oligonucleotide
accaagauaucagagagaa

SEQ ID NO: 2736400 - RNA, 19 nt, Artificial Sequence
  Description of Artificial Sequence: Synthetic oligonucleotide
ucaguaaguucugugucag

SEQ ID NO: 2736401 - RNA, 19 nt, Artificial Sequence
  Description of Artificial Sequence: Synthetic oligonucleotide
aagugaacagcaccagcca

SEQ ID NO: 2736402 - RNA, 19 nt, Artificial Sequence
  Description of Artificial Sequence: Synthetic oligonucleotide
auagacaagcaccaagaaa

SEQ ID NO: 2736403 - RNA, 19 nt, Artificial Sequence
  Description of Artificial Sequence: Synthetic oligonucleotide
agagagaaagugaacagca

SEQ ID NO: 2736404 - RNA, 19 nt, Artificial Sequence
  Description of Artificial Sequence: Synthetic oligonucleotide
uauagacaagcaccaagaa

SEQ ID NO: 2736405 - RNA, 19 nt, Artificial Sequence
  Description of Artificial Sequence: Synthetic oligonucleotide
cuacuuuagauacuauauc

SEQ ID NO: 2736406 - RNA, 19 nt, Artificial Sequence
  Description of Artificial Sequence: Synthetic oligonucleotide
uuugcuagcugauguuuca

SEQ ID NO: 2736407 - RNA, 19 nt, Artificial Sequence
  Description of Artificial Sequence: Synthetic oligonucleotide
aagggaaacgcugucacaa

SEQ ID NO: 2736408 - RNA, 19 nt, Artificial Sequence
  Description of Artificial Sequence: Synthetic oligonucleotide
guuaguuguccuuuugcac

SEQ ID NO: 2736409 - RNA, 19 nt, Artificial Sequence
  Description of Artificial Sequence: Synthetic oligonucleotide
uucaccguuaagggaaacg

SEQ ID NO: 2736410 - RNA, 19 nt, Artificial Sequence
  Description of Artificial Sequence: Synthetic oligonucleotide
uguggcuuuucuauuuagu

SEQ ID NO: 2736411 - RNA, 19 nt, Artificial Sequence
  Description of Artificial Sequence: Synthetic oligonucleotide
cuuguaguagauggcagcc

SEQ ID NO: 2736412 - RNA, 19 nt, Artificial Sequence
  Description of Artificial Sequence: Synthetic oligonucleotide
uuaaacagucacacaugcu

SEQ ID NO: 2736413 - RNA, 19 nt, Artificial Sequence
  Description of Artificial Sequence: Synthetic oligonucleotide
uguugauagagaugacacu

SEQ ID NO: 2736414 - RNA, 19 nt, Artificial Sequence
  Description of Artificial Sequence: Synthetic oligonucleotide
uucaaaugcuggaaaccgu

SEQ ID NO: 2736415 - RNA, 19 nt, Artificial Sequence
  Description of Artificial Sequence: Synthetic oligonucleotide
ucaagugaaaguguggcuu

SEQ ID NO: 2736416 - RNA, 19 nt, Artificial Sequence
  Description of Artificial Sequence: Synthetic oligonucleotide
cucaugcucuaauuugggg

SEQ ID NO: 2736417 - RNA, 19 nt, Artificial Sequence
  Description of Artificial Sequence: Synthetic oligonucleotide
ugacacucuacuuuagaua

SEQ ID NO: 2736418 - RNA, 19 nt, Artificial Sequence
  Description of Artificial Sequence: Synthetic oligonucleotide
ucuagauuugcuagcugau

SEQ ID NO: 2736419 - RNA, 19 nt, Artificial Sequence
  Description of Artificial Sequence: Synthetic oligonucleotide
cauaccuucaaagagggaa

SEQ ID NO: 2736420 - RNA, 19 nt, Artificial Sequence
  Description of Artificial Sequence: Synthetic oligonucleotide
gaguucaagugaaagugug

SEQ ID NO: 2736421 - RNA, 19 nt, Artificial Sequence
  Description of Artificial Sequence: Synthetic oligonucleotide
augacacucuacuuuagau

SEQ ID NO: 2736422 - RNA, 19 nt, Artificial Sequence
  Description of Artificial Sequence: Synthetic oligonucleotide
aauaaagcuuguaguagau

SEQ ID NO: 2736423 - RNA, 19 nt, Artificial Sequence
  Description of Artificial Sequence: Synthetic oligonucleotide
acaagcaccaagaaacaug

SEQ ID NO: 2736424 - RNA, 19 nt, Artificial Sequence
  Description of Artificial Sequence: Synthetic oligonucleotide
guggcuuuucuauuuaguc

SEQ ID NO: 2736425 - RNA, 19 nt, Artificial Sequence
  Description of Artificial Sequence: Synthetic oligonucleotide
aaaaggggcuuguggagau

SEQ ID NO: 2736426 - RNA, 19 nt, Artificial Sequence
  Description of Artificial Sequence: Synthetic oligonucleotide
augcacacuacggggagcc

SEQ ID NO: 2736427 - RNA, 19 nt, Artificial Sequence
  Description of Artificial Sequence: Synthetic oligonucleotide
ggaauaaagcuuguaguag

SEQ ID NO: 2736428 - RNA, 19 nt, Artificial Sequence
  Description of Artificial Sequence: Synthetic oligonucleotide
cacuaaucagucagguggc

SEQ ID NO: 2736429 - RNA, 19 nt, Artificial Sequence
  Description of Artificial Sequence: Synthetic oligonucleotide
aaauguggggcugucgccu

SEQ ID NO: 2736430 - RNA, 19 nt, Artificial Sequence
  Description of Artificial Sequence: Synthetic oligonucleotide
gguccaauggguauguuag

SEQ ID NO: 2736431 - RNA, 19 nt, Artificial Sequence
  Description of Artificial Sequence: Synthetic oligonucleotide
ugucgccuuaaacagucac

SEQ ID NO: 2736432 - RNA, 19 nt, Artificial Sequence
  Description of Artificial Sequence: Synthetic oligonucleotide
ggagccuagauaugaagag

SEQ ID NO: 2736433 - RNA, 19 nt, Artificial Sequence
  Description of Artificial Sequence: Synthetic oligonucleotide
ucgccuuaaacagucacac

SEQ ID NO: 2736434 - RNA, 19 nt, Artificial Sequence
  Description of Artificial Sequence: Synthetic oligonucleotide
ggguaucuagauuugcuag

SEQ ID NO: 2736435 - RNA, 19 nt, Artificial Sequence
  Description of Artificial Sequence: Synthetic oligonucleotide
aagauaucagagagaaagu

SEQ ID NO: 2736436 - RNA, 19 nt, Artificial Sequence
  Description of Artificial Sequence: Synthetic oligonucleotide
uucaagugaaaguguggcu

SEQ ID NO: 2736437 - RNA, 19 nt, Artificial Sequence
  Description of Artificial Sequence: Synthetic oligonucleotide
ugucaggcacuaaucaguc

SEQ ID NO: 2736438 - RNA, 19 nt, Artificial Sequence
  Description of Artificial Sequence: Synthetic oligonucleotide
uaucuagauuugcuagcug

SEQ ID NO: 2736439 - RNA, 19 nt, Artificial Sequence
  Description of Artificial Sequence: Synthetic oligonucleotide
aauggguauguuaguuguc

SEQ ID NO: 2736440 - RNA, 19 nt, Artificial Sequence
  Description of Artificial Sequence: Synthetic oligonucleotide
aguucaagugaaagugugg

SEQ ID NO: 2736441 - RNA, 19 nt, Artificial Sequence
  Description of Artificial Sequence: Synthetic oligonucleotide
acaggguaucuagauuugc

SEQ ID NO: 2736442 - RNA, 19 nt, Artificial Sequence
  Description of Artificial Sequence: Synthetic oligonucleotide
cagagagaaagugaacagc

SEQ ID NO: 2736443 - RNA, 19 nt, Artificial Sequence
  Description of Artificial Sequence: Synthetic oligonucleotide
gguaucuagauuugcuagc

SEQ ID NO: 2736444 - RNA, 19 nt, Artificial Sequence
  Description of Artificial Sequence: Synthetic oligonucleotide
uaaucagucagguggcuuu

SEQ ID NO: 2736445 - RNA, 19 nt, Artificial Sequence
  Description of Artificial Sequence: Synthetic oligonucleotide
caccaagaaacaugcacac

SEQ ID NO: 2736446 - RNA, 19 nt, Artificial Sequence
  Description of Artificial Sequence: Synthetic oligonucleotide
gaugacacucuacuuuaga

SEQ ID NO: 2736447 - RNA, 19 nt, Artificial Sequence
  Description of Artificial Sequence: Synthetic oligonucleotide
aucacucaugcucuaauuu

SEQ ID NO: 2736448 - RNA, 19 nt, Artificial Sequence
  Description of Artificial Sequence: Synthetic oligonucleotide
agaguucuuauuucaccgu

SEQ ID NO: 2736449 - RNA, 19 nt, Artificial Sequence
  Description of Artificial Sequence: Synthetic oligonucleotide
auuugcuagcugauguuuc

SEQ ID NO: 2736450 - RNA, 19 nt, Artificial Sequence
  Description of Artificial Sequence: Synthetic oligonucleotide
caguuuacaccuauagaca

SEQ ID NO: 2736451 - RNA, 19 nt, Artificial Sequence
  Description of Artificial Sequence: Synthetic oligonucleotide
uaccaagauaucagagaga

SEQ ID NO: 2736452 - RNA, 19 nt, Artificial Sequence
  Description of Artificial Sequence: Synthetic oligonucleotide
gagaugacacucuacuuua

SEQ ID NO: 2736453 - RNA, 19 nt, Artificial Sequence
  Description of Artificial Sequence: Synthetic oligonucleotide
aaaugcugaugauguaguu

SEQ ID NO: 2736454 - RNA, 19 nt, Artificial Sequence
  Description of Artificial Sequence: Synthetic oligonucleotide
aacaugcacacuacgggga

SEQ ID NO: 2736455 - RNA, 19 nt, Artificial Sequence
  Description of Artificial Sequence: Synthetic oligonucleotide
ugaaaguguggcuuuucua

SEQ ID NO: 2736456 - RNA, 19 nt, Artificial Sequence
  Description of Artificial Sequence: Synthetic oligonucleotide
uucagacauguaauacaac

SEQ ID NO: 2736457 - RNA, 19 nt, Artificial Sequence
  Description of Artificial Sequence: Synthetic oligonucleotide
gauagagaugacacucuac

SEQ ID NO: 2736458 - RNA, 19 nt, Artificial Sequence
  Description of Artificial Sequence: Synthetic oligonucleotide
guaguuucuaucacucaug

SEQ ID NO: 2736459 - RNA, 19 nt, Artificial Sequence
  Description of Artificial Sequence: Synthetic oligonucleotide
agaaagugaacagcaccag

SEQ ID NO: 2736460 - RNA, 19 nt, Artificial Sequence
  Description of Artificial Sequence: Synthetic oligonucleotide
aacuguuucucuguugaua

SEQ ID NO: 2736461 - RNA, 19 nt, Artificial Sequence
  Description of Artificial Sequence: Synthetic oligonucleotide
acaugcacacuacggggag

SEQ ID NO: 2736462 - RNA, 19 nt, Artificial Sequence
  Description of Artificial Sequence: Synthetic oligonucleotide
aaaccgugacgucucuggu

SEQ ID NO: 2736463 - RNA, 19 nt, Artificial Sequence
  Description of Artificial Sequence: Synthetic oligonucleotide
gguaccaagauaucagaga

SEQ ID NO: 2736464 - RNA, 19 nt, Artificial Sequence
  Description of Artificial Sequence: Synthetic oligonucleotide
accguuaagggaaacgcug

SEQ ID NO: 2736465 - RNA, 19 nt, Artificial Sequence
  Description of Artificial Sequence: Synthetic oligonucleotide
gucaguuuacaccuauaga

SEQ ID NO: 2736466 - RNA, 19 nt, Artificial Sequence
  Description of Artificial Sequence: Synthetic oligonucleotide
uagauaugaagaguucuua

SEQ ID NO: 2736467 - RNA, 19 nt, Artificial Sequence
  Description of Artificial Sequence: Synthetic oligonucleotide
gauaugaagaguucuuauu

SEQ ID NO: 2736468 - RNA, 19 nt, Artificial Sequence
  Description of Artificial Sequence: Synthetic oligonucleotide
acagucacacaugcucagc

SEQ ID NO: 2736469 - RNA, 19 nt, Artificial Sequence
  Description of Artificial Sequence: Synthetic oligonucleotide
ugcuagcugauguuucaga

SEQ ID NO: 2736470 - RNA, 19 nt, Artificial Sequence
  Description of Artificial Sequence: Synthetic oligonucleotide
ccuauagacaagcaccaag

SEQ ID NO: 2736471 - RNA, 19 nt, Artificial Sequence
  Description of Artificial Sequence: Synthetic oligonucleotide
auaaagcuuguaguagaug

SEQ ID NO: 2736472 - RNA, 19 nt, Artificial Sequence
  Description of Artificial Sequence: Synthetic oligonucleotide
guuuacaccuauagacaag

SEQ ID NO: 2736473 - RNA, 19 nt, Artificial Sequence
  Description of Artificial Sequence: Synthetic oligonucleotide
augcuggaaaccgugacgu

SEQ ID NO: 2736474 - RNA, 19 nt, Artificial Sequence
  Description of Artificial Sequence: Synthetic oligonucleotide
guucuuauuucaccguuaa

SEQ ID NO: 2736475 - RNA, 19 nt, Artificial Sequence
  Description of Artificial Sequence: Synthetic oligonucleotide
aggguaucuagauuugcua

SEQ ID NO: 2736476 - RNA, 19 nt, Artificial Sequence
  Description of Artificial Sequence: Synthetic oligonucleotide
gauguuucagacauguaau

SEQ ID NO: 2736477 - RNA, 19 nt, Artificial Sequence
  Description of Artificial Sequence: Synthetic oligonucleotide
ugacgucucugguaccaag

SEQ ID NO: 2736478 - RNA, 19 nt, Artificial Sequence
  Description of Artificial Sequence: Synthetic oligonucleotide
caggcacuaaucagucagg

SEQ ID NO: 2736479 - RNA, 19 nt, Artificial Sequence
  Description of Artificial Sequence: Synthetic oligonucleotide
ggggcugucgccuuaaaca

SEQ ID NO: 2736480 - RNA, 19 nt, Artificial Sequence
  Description of Artificial Sequence: Synthetic oligonucleotide
ugguccaauggguauguua

SEQ ID NO: 2736481 - RNA, 19 nt, Artificial Sequence
  Description of Artificial Sequence: Synthetic oligonucleotide
auguuucagacauguaaua

SEQ ID NO: 2736482 - RNA, 19 nt, Artificial Sequence
  Description of Artificial Sequence: Synthetic oligonucleotide
guaaguucugugucaggca

SEQ ID NO: 2736483 - RNA, 19 nt, Artificial Sequence
  Description of Artificial Sequence: Synthetic oligonucleotide
cacacuacggggagccuag

SEQ ID NO: 2736484 - RNA, 19 nt, Artificial Sequence
  Description of Artificial Sequence: Synthetic oligonucleotide
auguaguuucuaucacuca

SEQ ID NO: 2736485 - RNA, 19 nt, Artificial Sequence
  Description of Artificial Sequence: Synthetic oligonucleotide
agugaacagcaccagccau

SEQ ID NO: 2736486 - RNA, 19 nt, Artificial Sequence
  Description of Artificial Sequence: Synthetic oligonucleotide
ccucuuuuaggauuuucag

SEQ ID NO: 2736487 - RNA, 19 nt, Artificial Sequence
  Description of Artificial Sequence: Synthetic oligonucleotide
cucuacuuuagauacuaua

SEQ ID NO: 2736488 - RNA, 19 nt, Artificial Sequence
  Description of Artificial Sequence: Synthetic oligonucleotide
cuagauuugcuagcugaug

SEQ ID NO: 2736489 - RNA, 19 nt, Artificial Sequence
  Description of Artificial Sequence: Synthetic oligonucleotide
acucaugcucuaauuuggg

SEQ ID NO: 2736490 - RNA, 19 nt, Artificial Sequence
  Description of Artificial Sequence: Synthetic oligonucleotide
acuacggggagccuagaua

SEQ ID NO: 2736491 - RNA, 19 nt, Artificial Sequence
  Description of Artificial Sequence: Synthetic oligonucleotide
uuugguccaauggguaugu

SEQ ID NO: 2736492 - RNA, 19 nt, Artificial Sequence
  Description of Artificial Sequence: Synthetic oligonucleotide
cuagcugauguuucagaca

SEQ ID NO: 2736493 - RNA, 19 nt, Artificial Sequence
  Description of Artificial Sequence: Synthetic oligonucleotide
uggguauguuaguuguccu

SEQ ID NO: 2736494 - RNA, 19 nt, Artificial Sequence
  Description of Artificial Sequence: Synthetic oligonucleotide
cuuugcaacaaaaggggcu

SEQ ID NO: 2736495 - RNA, 19 nt, Artificial Sequence
  Description of Artificial Sequence: Synthetic oligonucleotide
uagagaugacacucuacuu

SEQ ID NO: 2736496 - RNA, 19 nt, Artificial Sequence
  Description of Artificial Sequence: Synthetic oligonucleotide
gggaauaaagcuuguagua

SEQ ID NO: 2736497 - RNA, 19 nt, Artificial Sequence
  Description of Artificial Sequence: Synthetic oligonucleotide
uuuagucaguuuacaccua

SEQ ID NO: 2736498 - RNA, 19 nt, Artificial Sequence
  Description of Artificial Sequence: Synthetic oligonucleotide
gcuagcugauguuucagac

SEQ ID NO: 2736499 - RNA, 19 nt, Artificial Sequence
  Description of Artificial Sequence: Synthetic oligonucleotide
uccaauggguauguuaguu

SEQ ID NO: 2736500 - RNA, 19 nt, Artificial Sequence
  Description of Artificial Sequence: Synthetic oligonucleotide
gcuuguaguagauggcagc

SEQ ID NO: 2736501 - RNA, 19 nt, Artificial Sequence
  Description of Artificial Sequence: Synthetic oligonucleotide
acauguaauacaacuguuu

SEQ ID NO: 2736502 - RNA, 19 nt, Artificial Sequence
  Description of Artificial Sequence: Synthetic oligonucleotide
cagcuaagaguucaaguga

SEQ ID NO: 2736503 - RNA, 19 nt, Artificial Sequence
  Description of Artificial Sequence: Synthetic oligonucleotide
caccuauagacaagcacca

SEQ ID NO: 2736504 - RNA, 19 nt, Artificial Sequence
  Description of Artificial Sequence: Synthetic oligonucleotide
cuggaaaccgugacgucuc

SEQ ID NO: 2736505 - RNA, 19 nt, Artificial Sequence
  Description of Artificial Sequence: Synthetic oligonucleotide
guguggcuuuucuauuuag

SEQ ID NO: 2736506 - RNA, 19 nt, Artificial Sequence
  Description of Artificial Sequence: Synthetic oligonucleotide
guuaagggaaacgcuguca

SEQ ID NO: 2736507 - RNA, 19 nt, Artificial Sequence
  Description of Artificial Sequence: Synthetic oligonucleotide
agaguucaagugaaagugu

SEQ ID NO: 2736508 - RNA, 19 nt, Artificial Sequence
  Description of Artificial Sequence: Synthetic oligonucleotide
agauuugcuagcugauguu

SEQ ID NO: 2736509 - RNA, 19 nt, Artificial Sequence
  Description of Artificial Sequence: Synthetic oligonucleotide
gagagaaagugaacagcac

SEQ ID NO: 2736510 - RNA, 19 nt, Artificial Sequence
  Description of Artificial Sequence: Synthetic oligonucleotide
gucucugguaccaagauau

SEQ ID NO: 2736511 - RNA, 19 nt, Artificial Sequence
  Description of Artificial Sequence: Synthetic oligonucleotide
uugcuagcugauguuucag

SEQ ID NO: 2736512 - RNA, 19 nt, Artificial Sequence
  Description of Artificial Sequence: Synthetic oligonucleotide
gggcugucgccuuaaacag

SEQ ID NO: 2736513 - RNA, 19 nt, Artificial Sequence
  Description of Artificial Sequence: Synthetic oligonucleotide
caaguucaaaugcuggaaa

SEQ ID NO: 2736514 - RNA, 19 nt, Artificial Sequence
  Description of Artificial Sequence: Synthetic oligonucleotide
aaccgugacgucucuggua

SEQ ID NO: 2736515 - RNA, 19 nt, Artificial Sequence
  Description of Artificial Sequence: Synthetic oligonucleotide
caauggguauguuaguugu

SEQ ID NO: 2736516 - RNA, 19 nt, Artificial Sequence
  Description of Artificial Sequence: Synthetic oligonucleotide
gucacacaugcucagcuaa

SEQ ID NO: 2736517 - RNA, 19 nt, Artificial Sequence
  Description of Artificial Sequence: Synthetic oligonucleotide
ugcaacaaaaggggcuugu

SEQ ID NO: 2736518 - RNA, 19 nt, Artificial Sequence
  Description of Artificial Sequence: Synthetic oligonucleotide
uuguaguagauggcagcca

SEQ ID NO: 2736519 - RNA, 19 nt, Artificial Sequence
  Description of Artificial Sequence: Synthetic oligonucleotide
ucuaucacucaugcucuaa

SEQ ID NO: 2736520 - RNA, 19 nt, Artificial Sequence
  Description of Artificial Sequence: Synthetic oligonucleotide
agcuuguaguagauggcag

SEQ ID NO: 2736521 - RNA, 19 nt, Artificial Sequence
  Description of Artificial Sequence: Synthetic oligonucleotide
uggggcugucgccuuaaac

SEQ ID NO: 2736522 - RNA, 19 nt, Artificial Sequence
  Description of Artificial Sequence: Synthetic oligonucleotide
ccuuaaacagucacacaug

SEQ ID NO: 2736523 - RNA, 19 nt, Artificial Sequence
  Description of Artificial Sequence: Synthetic oligonucleotide
agccuagauaugaagaguu

SEQ ID NO: 2736524 - RNA, 19 nt, Artificial Sequence
  Description of Artificial Sequence: Synthetic oligonucleotide
agcuaagaguucaagugaa

SEQ ID NO: 2736525 - RNA, 19 nt, Artificial Sequence
  Description of Artificial Sequence: Synthetic oligonucleotide
aguguggcuuuucuauuua

SEQ ID NO: 2736526 - RNA, 19 nt, Artificial Sequence
  Description of Artificial Sequence: Synthetic oligonucleotide
augcucagcuaagaguuca

SEQ ID NO: 2736527 - RNA, 19 nt, Artificial Sequence
  Description of Artificial Sequence: Synthetic oligonucleotide
ccaagaaacaugcacacua

SEQ ID NO: 2736528 - RNA, 19 nt, Artificial Sequence
  Description of Artificial Sequence: Synthetic oligonucleotide
auacaacuguuucucuguu

SEQ ID NO: 2736529 - RNA, 19 nt, Artificial Sequence
  Description of Artificial Sequence: Synthetic oligonucleotide
aaggggcuuguggagauuu

SEQ ID NO: 2736530 - RNA, 19 nt, Artificial Sequence
  Description of Artificial Sequence: Synthetic oligonucleotide
auaccuucaaagagggaau

SEQ ID NO: 2736531 - RNA, 19 nt, Artificial Sequence
  Description of Artificial Sequence: Synthetic oligonucleotide
ccaauggguauguuaguug

SEQ ID NO: 2736532 - RNA, 19 nt, Artificial Sequence
  Description of Artificial Sequence: Synthetic oligonucleotide
cucugguaccaagauauca

SEQ ID NO: 2736533 - RNA, 19 nt, Artificial Sequence
  Description of Artificial Sequence: Synthetic oligonucleotide
gccuuaaacagucacacau

SEQ ID NO: 2736534 - RNA, 19 nt, Artificial Sequence
  Description of Artificial Sequence: Synthetic oligonucleotide
uagucaguuuacaccuaua

SEQ ID NO: 2736535 - RNA, 19 nt, Artificial Sequence
  Description of Artificial Sequence: Synthetic oligonucleotide
cucagcuaagaguucaagu

SEQ ID NO: 2736536 - RNA, 19 nt, Artificial Sequence
  Description of Artificial Sequence: Synthetic oligonucleotide
ucucugguaccaagauauc

SEQ ID NO: 2736537 - RNA, 19 nt, Artificial Sequence
  Description of Artificial Sequence: Synthetic oligonucleotide
acggggagccuagauauga

SEQ ID NO: 2736538 - RNA, 19 nt, Artificial Sequence
  Description of Artificial Sequence: Synthetic oligonucleotide
aauguggggcugucgccuu

SEQ ID NO: 2736539 - RNA, 19 nt, Artificial Sequence
  Description of Artificial Sequence: Synthetic oligonucleotide
ggggagccuagauaugaag

SEQ ID NO: 2736540 - RNA, 19 nt, Artificial Sequence
  Description of Artificial Sequence: Synthetic oligonucleotide
aaguucugugucaggcacu

SEQ ID NO: 2736541 - RNA, 19 nt, Artificial Sequence
  Description of Artificial Sequence: Synthetic oligonucleotide
acgucucugguaccaagau

SEQ ID NO: 2736542 - RNA, 19 nt, Artificial Sequence
  Description of Artificial Sequence: Synthetic oligonucleotide
cuacggggagccuagauau

SEQ ID NO: 2736543 - RNA, 19 nt, Artificial Sequence
  Description of Artificial Sequence: Synthetic oligonucleotide
ugcucagcuaagaguucaa

SEQ ID NO: 2736544 - RNA, 19 nt, Artificial Sequence
  Description of Artificial Sequence: Synthetic oligonucleotide
cacaugcucagcuaagagu

SEQ ID NO: 2736545 - RNA, 19 nt, Artificial Sequence
  Description of Artificial Sequence: Synthetic oligonucleotide
aagagggaauaaagcuugu

SEQ ID NO: 2736546 - RNA, 19 nt, Artificial Sequence
  Description of Artificial Sequence: Synthetic oligonucleotide
gacgucucugguaccaaga

SEQ ID NO: 2736547 - RNA, 19 nt, Artificial Sequence
  Description of Artificial Sequence: Synthetic oligonucleotide
aggcacuaaucagucaggu

SEQ ID NO: 2736548 - RNA, 19 nt, Artificial Sequence
  Description of Artificial Sequence: Synthetic oligonucleotide
guaucuagauuugcuagcu

SEQ ID NO: 2736549 - RNA, 19 nt, Artificial Sequence
  Description of Artificial Sequence: Synthetic oligonucleotide
agacaagcaccaagaaaca

SEQ ID NO: 2736550 - RNA, 19 nt, Artificial Sequence
  Description of Artificial Sequence: Synthetic oligonucleotide
cuagauaugaagaguucuu

SEQ ID NO: 2736551 - RNA, 19 nt, Artificial Sequence
  Description of Artificial Sequence: Synthetic oligonucleotide
agaugacacucuacuuuag

SEQ ID NO: 2736552 - RNA, 19 nt, Artificial Sequence
  Description of Artificial Sequence: Synthetic oligonucleotide
ggcacuaaucagucaggug

SEQ ID NO: 2736553 - RNA, 19 nt, Artificial Sequence
  Description of Artificial Sequence: Synthetic oligonucleotide
caugcucagcuaagaguuc

SEQ ID NO: 2736554 - RNA, 19 nt, Artificial Sequence
  Description of Artificial Sequence: Synthetic oligonucleotide
uuguccuuuugcaccuuuu

SEQ ID NO: 2736555 - RNA, 19 nt, Artificial Sequence
  Description of Artificial Sequence: Synthetic oligonucleotide
ggggucuuugcaacaaaag

SEQ ID NO: 2736556 - RNA, 19 nt, Artificial Sequence
  Description of Artificial Sequence: Synthetic oligonucleotide
guaauacaacuguuucucu

SEQ ID NO: 2736557 - RNA, 19 nt, Artificial Sequence
  Description of Artificial Sequence: Synthetic oligonucleotide
guuucucuguugauagaga

SEQ ID NO: 2736558 - RNA, 19 nt, Artificial Sequence
  Description of Artificial Sequence: Synthetic oligonucleotide
aaucagucagguggcuuuu

SEQ ID NO: 2736559 - RNA, 19 nt, Artificial Sequence
  Description of Artificial Sequence: Synthetic oligonucleotide
accaagaaacaugcacacu

SEQ ID NO: 2736560 - RNA, 19 nt, Artificial Sequence
  Description of Artificial Sequence: Synthetic oligonucleotide
aguucugugucaggcacua

SEQ ID NO: 2736561 - RNA, 19 nt, Artificial Sequence
  Description of Artificial Sequence: Synthetic oligonucleotide
uaccuucaaagagggaaua

SEQ ID NO: 2736562 - RNA, 19 nt, Artificial Sequence
  Description of Artificial Sequence: Synthetic oligonucleotide
uggaaaccgugacgucucu

SEQ ID NO: 2736563 - RNA, 19 nt, Artificial Sequence
  Description of Artificial Sequence: Synthetic oligonucleotide
uugcaacaaaaggggcuug

SEQ ID NO: 2736564 - RNA, 19 nt, Artificial Sequence
  Description of Artificial Sequence: Synthetic oligonucleotide
gugaaaguguggcuuuucu

SEQ ID NO: 2736565 - RNA, 19 nt, Artificial Sequence
  Description of Artificial Sequence: Synthetic oligonucleotide
acuaaucagucagguggcu

SEQ ID NO: 2736566 - RNA, 19 nt, Artificial Sequence
  Description of Artificial Sequence: Synthetic oligonucleotide
cacucuacuuuagauacua

SEQ ID NO: 2736567 - RNA, 19 nt, Artificial Sequence
  Description of Artificial Sequence: Synthetic oligonucleotide
aguucuuauuucaccguua

SEQ ID NO: 2736568 - RNA, 19 nt, Artificial Sequence
  Description of Artificial Sequence: Synthetic oligonucleotide
gucgccuuaaacagucaca

SEQ ID NO: 2736569 - RNA, 19 nt, Artificial Sequence
  Description of Artificial Sequence: Synthetic oligonucleotide
cucuguugauagagaugac

SEQ ID NO: 2736570 - RNA, 19 nt, Artificial Sequence
  Description of Artificial Sequence: Synthetic oligonucleotide
cugucacaaaaugcugaug

SEQ ID NO: 2736571 - RNA, 19 nt, Artificial Sequence
  Description of Artificial Sequence: Synthetic oligonucleotide
aagugaaaguguggcuuuu

SEQ ID NO: 2736572 - RNA, 19 nt, Artificial Sequence
  Description of Artificial Sequence: Synthetic oligonucleotide
gggagccuagauaugaaga

SEQ ID NO: 2736573 - RNA, 19 nt, Artificial Sequence
  Description of Artificial Sequence: Synthetic oligonucleotide
agggaaacgcugucacaaa

SEQ ID NO: 2736574 - RNA, 19 nt, Artificial Sequence
  Description of Artificial Sequence: Synthetic oligonucleotide
uucuaucacucaugcucua

SEQ ID NO: 2736575 - RNA, 19 nt, Artificial Sequence
  Description of Artificial Sequence: Synthetic oligonucleotide
gauuugcuagcugauguuu

SEQ ID NO: 2736576 - RNA, 19 nt, Artificial Sequence
  Description of Artificial Sequence: Synthetic oligonucleotide
caugcacacuacggggagc

SEQ ID NO: 2736577 - RNA, 19 nt, Artificial Sequence
  Description of Artificial Sequence: Synthetic oligonucleotide
gugucaggcacuaaucagu

SEQ ID NO: 2736578 - RNA, 19 nt, Artificial Sequence
  Description of Artificial Sequence: Synthetic oligonucleotide
caggguaucuagauuugcu

SEQ ID NO: 2736579 - RNA, 19 nt, Artificial Sequence
  Description of Artificial Sequence: Synthetic oligonucleotide
gcugauguuucagacaugu

SEQ ID NO: 2736580 - RNA, 19 nt, Artificial Sequence
  Description of Artificial Sequence: Synthetic oligonucleotide
gcugucgccuuaaacaguc

SEQ ID NO: 2736581 - RNA, 19 nt, Artificial Sequence
  Description of Artificial Sequence: Synthetic oligonucleotide
agagggaauaaagcuugua

SEQ ID NO: 2736582 - RNA, 19 nt, Artificial Sequence
  Description of Artificial Sequence: Synthetic oligonucleotide
uuucaccguuaagggaaac

SEQ ID NO: 2736583 - RNA, 19 nt, Artificial Sequence
  Description of Artificial Sequence: Synthetic oligonucleotide
gagccuagauaugaagagu

SEQ ID NO: 2736584 - RNA, 19 nt, Artificial Sequence
  Description of Artificial Sequence: Synthetic oligonucleotide
acgcugucacaaaaugcug

SEQ ID NO: 2736585 - RNA, 19 nt, Artificial Sequence
  Description of Artificial Sequence: Synthetic oligonucleotide
cuuuugguccaauggguau

SEQ ID NO: 2736586 - RNA, 19 nt, Artificial Sequence
  Description of Artificial Sequence: Synthetic oligonucleotide
gucaggcacuaaucaguca

SEQ ID NO: 2736587 - RNA, 19 nt, Artificial Sequence
  Description of Artificial Sequence: Synthetic oligonucleotide
gggaaacgcugucacaaaa

SEQ ID NO: 2736588 - RNA, 19 nt, Artificial Sequence
  Description of Artificial Sequence: Synthetic oligonucleotide
cuguuucucuguugauaga

SEQ ID NO: 2736589 - RNA, 19 nt, Artificial Sequence
  Description of Artificial Sequence: Synthetic oligonucleotide
gcaacaaaaggggcuugug

SEQ ID NO: 2736590 - RNA, 19 nt, Artificial Sequence
  Description of Artificial Sequence: Synthetic oligonucleotide
gugaacagcaccagccaua

SEQ ID NO: 2736591 - RNA, 19 nt, Artificial Sequence
  Description of Artificial Sequence: Synthetic oligonucleotide
aucagucagguggcuuuug

SEQ ID NO: 2736592 - RNA, 19 nt, Artificial Sequence
  Description of Artificial Sequence: Synthetic oligonucleotide
auuucaccguuaagggaaa

SEQ ID NO: 2736593 - RNA, 19 nt, Artificial Sequence
  Description of Artificial Sequence: Synthetic oligonucleotide
cuaucacucaugcucuaau

SEQ ID NO: 2736594 - RNA, 19 nt, Artificial Sequence
  Description of Artificial Sequence: Synthetic oligonucleotide
acacucuacuuuagauacu

SEQ ID NO: 2736595 - RNA, 19 nt, Artificial Sequence
  Description of Artificial Sequence: Synthetic oligonucleotide
gacaagcaccaagaaacau

SEQ ID NO: 2736596 - RNA, 19 nt, Artificial Sequence
  Description of Artificial Sequence: Synthetic oligonucleotide
uguggggcugucgccuuaa

SEQ ID NO: 2736597 - RNA, 19 nt, Artificial Sequence
  Description of Artificial Sequence: Synthetic oligonucleotide
accuauagacaagcaccaa

SEQ ID NO: 2736598 - RNA, 19 nt, Artificial Sequence
  Description of Artificial Sequence: Synthetic oligonucleotide
caagugaaaguguggcuuu

SEQ ID NO: 2736599 - RNA, 19 nt, Artificial Sequence
  Description of Artificial Sequence: Synthetic oligonucleotide
caccguuaagggaaacgcu

SEQ ID NO: 2736600 - RNA, 19 nt, Artificial Sequence
  Description of Artificial Sequence: Synthetic oligonucleotide
cuuuucuauuuagucaguu

SEQ ID NO: 2736601 - RNA, 19 nt, Artificial Sequence
  Description of Artificial Sequence: Synthetic oligonucleotide
aaaggggcuuguggagauu

SEQ ID NO: 2736602 - RNA, 19 nt, Artificial Sequence
  Description of Artificial Sequence: Synthetic oligonucleotide
gguauguuaguuguccuuu

SEQ ID NO: 2736603 - RNA, 19 nt, Artificial Sequence
  Description of Artificial Sequence: Synthetic oligonucleotide
guauguuaguuguccuuuu

SEQ ID NO: 2736604 - RNA, 19 nt, Artificial Sequence
  Description of Artificial Sequence: Synthetic oligonucleotide
ccuagauaugaagaguucu

SEQ ID NO: 2736605 - RNA, 19 nt, Artificial Sequence
  Description of Artificial Sequence: Synthetic oligonucleotide
cugauguuucagacaugua

SEQ ID NO: 2736606 - RNA, 19 nt, Artificial Sequence
  Description of Artificial Sequence: Synthetic oligonucleotide
gcuggaaaccgugacgucu

SEQ ID NO: 2736607 - RNA, 19 nt, Artificial Sequence
  Description of Artificial Sequence: Synthetic oligonucleotide
ccaaguucaaaugcuggaa

SEQ ID NO: 2736608 - RNA, 19 nt, Artificial Sequence
  Description of Artificial Sequence: Synthetic oligonucleotide
ggaaaccgugacgucucug

SEQ ID NO: 2736609 - RNA, 19 nt, Artificial Sequence
  Description of Artificial Sequence: Synthetic oligonucleotide
gccuagauaugaagaguuc

SEQ ID NO: 2736610 - RNA, 19 nt, Artificial Sequence
  Description of Artificial Sequence: Synthetic oligonucleotide
cagucagguggcuuuuggu

SEQ ID NO: 2736611 - RNA, 19 nt, Artificial Sequence
  Description of Artificial Sequence: Synthetic oligonucleotide
guccaauggguauguuagu

SEQ ID NO: 2736612 - RNA, 19 nt, Artificial Sequence
  Description of Artificial Sequence: Synthetic oligonucleotide
ggcuuuugguccaaugggu

SEQ ID NO: 2736613 - RNA, 19 nt, Artificial Sequence
  Description of Artificial Sequence: Synthetic oligonucleotide
gcuuuugguccaaugggua

SEQ ID NO: 2736614 - RNA, 19 nt, Artificial Sequence
  Description of Artificial Sequence: Synthetic oligonucleotide
cgcugucacaaaaugcuga

SEQ ID NO: 2736615 - RNA, 19 nt, Artificial Sequence
  Description of Artificial Sequence: Synthetic oligonucleotide
ugcacacuacggggagccu

SEQ ID NO: 2736616 - RNA, 19 nt, Artificial Sequence
  Description of Artificial Sequence: Synthetic oligonucleotide
cugucgccuuaaacaguca

SEQ ID NO: 2736617 - RNA, 19 nt, Artificial Sequence
  Description of Artificial Sequence: Synthetic oligonucleotide
cguuaagggaaacgcuguc

SEQ ID NO: 2736618 - RNA, 19 nt, Artificial Sequence
  Description of Artificial Sequence: Synthetic oligonucleotide
gcuaagaguucaagugaaa

SEQ ID NO: 2736619 - RNA, 19 nt, Artificial Sequence
  Description of Artificial Sequence: Synthetic oligonucleotide
cuaaucagucagguggcuu

SEQ ID NO: 2736620 - RNA, 19 nt, Artificial Sequence
  Description of Artificial Sequence: Synthetic oligonucleotide
ggguauguuaguuguccuu

SEQ ID NO: 2736621 - RNA, 19 nt, Artificial Sequence
  Description of Artificial Sequence: Synthetic oligonucleotide
auguggggcugucgccuua

SEQ ID NO: 2736622 - RNA, 19 nt, Artificial Sequence
  Description of Artificial Sequence: Synthetic oligonucleotide
caacuguuucucuguugau

SEQ ID NO: 2736623 - RNA, 19 nt, Artificial Sequence
  Description of Artificial Sequence: Synthetic oligonucleotide
uugguccaauggguauguu

SEQ ID NO: 2736624 - RNA, 19 nt, Artificial Sequence
  Description of Artificial Sequence: Synthetic oligonucleotide
gugacgucucugguaccaa

SEQ ID NO: 2736625 - RNA, 19 nt, Artificial Sequence
  Description of Artificial Sequence: Synthetic oligonucleotide
acacuacggggagccuaga

SEQ ID NO: 2736626 - RNA, 19 nt, Artificial Sequence
  Description of Artificial Sequence: Synthetic oligonucleotide
ccguuaagggaaacgcugu

SEQ ID NO: 2736627 - RNA, 19 nt, Artificial Sequence
  Description of Artificial Sequence: Synthetic oligonucleotide
ccaagauaucagagagaaa

SEQ ID NO: 2736628 - RNA, 19 nt, Artificial Sequence
  Description of Artificial Sequence: Synthetic oligonucleotide
cacuacggggagccuagau

SEQ ID NO: 2736629 - RNA, 19 nt, Artificial Sequence
  Description of Artificial Sequence: Synthetic oligonucleotide
gcacacuacggggagccua

SEQ ID NO: 2736630 - RNA, 19 nt, Artificial Sequence
  Description of Artificial Sequence: Synthetic oligonucleotide
cgugacgucucugguacca

SEQ ID NO: 2736631 - RNA, 19 nt, Artificial Sequence
  Description of Artificial Sequence: Synthetic oligonucleotide
gcuuuucuauuuagucagu

SEQ ID NO: 2736632 - RNA, 19 nt, Artificial Sequence
  Description of Artificial Sequence: Synthetic oligonucleotide
aggggcuuguggagauuuu

SEQ ID NO: 2736633 - RNA, 19 nt, Artificial Sequence
  Description of Artificial Sequence: Synthetic oligonucleotide
ccgugacgucucugguacc

SEQ ID NO: 2736634 - RNA, 19 nt, Artificial Sequence
  Description of Artificial Sequence: Synthetic oligonucleotide
guggggcugucgccuuaaa

SEQ ID NO: 2736635 - RNA, 19 nt, Artificial Sequence
  Description of Artificial Sequence: Synthetic oligonucleotide
cgccuuaaacagucacaca

SEQ ID NO: 2736636 - RNA, 19 nt, Artificial Sequence
  Description of Artificial Sequence: Synthetic oligonucleotide
ggcugucgccuuaaacagu

SEQ ID NO: 2736637 - RNA, 19 nt, Artificial Sequence
  Description of Artificial Sequence: Synthetic oligonucleotide
cgucucugguaccaagaua

SEQ ID NO: 2736638 - RNA, 19 nt, Artificial Sequence
  Description of Artificial Sequence: Synthetic oligonucleotide
cuuccucuuuuaggauuuu

SEQ ID NO: 2736639 - RNA, 19 nt, Artificial Sequence
  Description of Artificial Sequence: Synthetic oligonucleotide
cggggagccuagauaugaa

SEQ ID NO: 2736640 - RNA, 19 nt, Artificial Sequence
  Description of Artificial Sequence: Synthetic oligonucleotide
aauaauaaacgucuuggcc

SEQ ID NO: 2736641 - RNA, 19 nt, Artificial Sequence
  Description of Artificial Sequence: Synthetic oligonucleotide
uucaacuaaauaauaaacg

SEQ ID NO: 2736642 - RNA, 19 nt, Artificial Sequence
  Description of Artificial Sequence: Synthetic oligonucleotide
aaggagauuacauucuacc

SEQ ID NO: 2736643 - RNA, 19 nt, Artificial Sequence
  Description of Artificial Sequence: Synthetic oligonucleotide
aaauaauaaacgucuuggc

SEQ ID NO: 2736644 - RNA, 19 nt, Artificial Sequence
  Description of Artificial Sequence: Synthetic oligonucleotide
uaaauaauaaacgucuugg

SEQ ID NO: 2736645 - RNA, 19 nt, Artificial Sequence
  Description of Artificial Sequence: Synthetic oligonucleotide
auaaaagucacugugaauc

SEQ ID NO: 2736646 - RNA, 19 nt, Artificial Sequence
  Description of Artificial Sequence: Synthetic oligonucleotide
uuuucuauguauuucaaug

SEQ ID NO: 2736647 - RNA, 19 nt, Artificial Sequence
  Description of Artificial Sequence: Synthetic oligonucleotide
uuucacaacaucuaggugc

SEQ ID NO: 2736648 - RNA, 19 nt, Artificial Sequence
  Description of Artificial Sequence: Synthetic oligonucleotide
ugaaucuucaacuaaauaa

SEQ ID NO: 2736649 - RNA, 19 nt, Artificial Sequence
  Description of Artificial Sequence: Synthetic oligonucleotide
cauccaaucaaucacaggg

SEQ ID NO: 2736650 - RNA, 19 nt, Artificial Sequence
  Description of Artificial Sequence: Synthetic oligonucleotide
ucaacuaaauaauaaacgu

SEQ ID NO: 2736651 - RNA, 19 nt, Artificial Sequence
  Description of Artificial Sequence: Synthetic oligonucleotide
uuacauaaaagucacugug

SEQ ID NO: 2736652 - RNA, 19 nt, Artificial Sequence
  Description of Artificial Sequence: Synthetic oligonucleotide
uucgauuucauucgguugg

SEQ ID NO: 2736653 - RNA, 19 nt, Artificial Sequence
  Description of Artificial Sequence: Synthetic oligonucleotide
auaauaaacgucuuggccu

SEQ ID NO: 2736654 - RNA, 19 nt, Artificial Sequence
  Description of Artificial Sequence: Synthetic oligonucleotide
aacuaaauaauaaacgucu

SEQ ID NO: 2736655 - RNA, 19 nt, Artificial Sequence
  Description of Artificial Sequence: Synthetic oligonucleotide
ucuauguauuucaaugugg

SEQ ID NO: 2736656 - RNA, 19 nt, Artificial Sequence
  Description of Artificial Sequence: Synthetic oligonucleotide
auuacauucuaccuucugg

SEQ ID NO: 2736657 - RNA, 19 nt, Artificial Sequence
  Description of Artificial Sequence: Synthetic oligonucleotide
aggguuuucgauuucauuc

SEQ ID NO: 2736658 - RNA, 19 nt, Artificial Sequence
  Description of Artificial Sequence: Synthetic oligonucleotide
uuuaucauccaaucaauca

SEQ ID NO: 2736659 - RNA, 19 nt, Artificial Sequence
  Description of Artificial Sequence: Synthetic oligonucleotide
uuuccuuucuucuaguaag

SEQ ID NO: 2736660 - RNA, 19 nt, Artificial Sequence
  Description of Artificial Sequence: Synthetic oligonucleotide
uaacaagcaagcaugagac

SEQ ID NO: 2736661 - RNA, 19 nt, Artificial Sequence
  Description of Artificial Sequence: Synthetic oligonucleotide
uacaacauccaccucacag

SEQ ID NO: 2736662 - RNA, 19 nt, Artificial Sequence
  Description of Artificial Sequence: Synthetic oligonucleotide
cuauguauuucaauguggg

SEQ ID NO: 2736663 - RNA, 19 nt, Artificial Sequence
  Description of Artificial Sequence: Synthetic oligonucleotide
uuaucauccaaucaaucac

SEQ ID NO: 2736664 - RNA, 19 nt, Artificial Sequence
  Description of Artificial Sequence: Synthetic oligonucleotide
acaacauccaccucacagc

SEQ ID NO: 2736665 - RNA, 19 nt, Artificial Sequence
  Description of Artificial Sequence: Synthetic oligonucleotide
uguauuucaaugugggaag

SEQ ID NO: 2736666 - RNA, 19 nt, Artificial Sequence
  Description of Artificial Sequence: Synthetic oligonucleotide
uauuucacaacaucuaggu

SEQ ID NO: 2736667 - RNA, 19 nt, Artificial Sequence
  Description of Artificial Sequence: Synthetic oligonucleotide
cuucaacuaaauaauaaac

SEQ ID NO: 2736668 - RNA, 19 nt, Artificial Sequence
  Description of Artificial Sequence: Synthetic oligonucleotide
acuuccguucuucagauuc

SEQ ID NO: 2736669 - RNA, 19 nt, Artificial Sequence
  Description of Artificial Sequence: Synthetic oligonucleotide
uuacauucuaccuucuggc

SEQ ID NO: 2736670 - RNA, 19 nt, Artificial Sequence
  Description of Artificial Sequence: Synthetic oligonucleotide
auaacaagcaagcaugaga

SEQ ID NO: 2736671 - RNA, 19 nt, Artificial Sequence
  Description of Artificial Sequence: Synthetic oligonucleotide
uccuuuaucauccaaucaa

SEQ ID NO: 2736672 - RNA, 19 nt, Artificial Sequence
  Description of Artificial Sequence: Synthetic oligonucleotide
ucuaguaaggagauuacau

SEQ ID NO: 2736673 - RNA, 19 nt, Artificial Sequence
  Description of Artificial Sequence: Synthetic oligonucleotide
accagugucuacaacaucc

SEQ ID NO: 2736674 - RNA, 19 nt, Artificial Sequence
  Description of Artificial Sequence: Synthetic oligonucleotide
uucuauguauuucaaugug

SEQ ID NO: 2736675 - RNA, 19 nt, Artificial Sequence
  Description of Artificial Sequence: Synthetic oligonucleotide
ucaaucacagggcaguggc

SEQ ID NO: 2736676 - RNA, 19 nt, Artificial Sequence
  Description of Artificial Sequence: Synthetic oligonucleotide
uugccuguuacauaaaagu

SEQ ID NO: 2736677 - RNA, 19 nt, Artificial Sequence
  Description of Artificial Sequence: Synthetic oligonucleotide
acgucuuggccucagagac

SEQ ID NO: 2736678 - RNA, 19 nt, Artificial Sequence
  Description of Artificial Sequence: Synthetic oligonucleotide
uagcaguagacucucauga

SEQ ID NO: 2736679 - RNA, 19 nt, Artificial Sequence
  Description of Artificial Sequence: Synthetic oligonucleotide
uuucuauguauuucaaugu

SEQ ID NO: 2736680 - RNA, 19 nt, Artificial Sequence
  Description of Artificial Sequence: Synthetic oligonucleotide
acagccauccuuuaucauc

SEQ ID NO: 2736681 - RNA, 19 nt, Artificial Sequence
  Description of Artificial Sequence: Synthetic oligonucleotide
cuuucuucuaguaaggaga

SEQ ID NO: 2736682 - RNA, 19 nt, Artificial Sequence
  Description of Artificial Sequence: Synthetic oligonucleotide
cuaaauaauaaacgucuug

SEQ ID NO: 2736683 - RNA, 19 nt, Artificial Sequence
  Description of Artificial Sequence: Synthetic oligonucleotide
agugucuacaacauccacc

SEQ ID NO: 2736684 - RNA, 19 nt, Artificial Sequence
  Description of Artificial Sequence: Synthetic oligonucleotide
uaucauccaaucaaucaca

SEQ ID NO: 2736685 - RNA, 19 nt, Artificial Sequence
  Description of Artificial Sequence: Synthetic oligonucleotide
gagauuacauucuaccuuc

SEQ ID NO: 2736686 - RNA, 19 nt, Artificial Sequence
  Description of Artificial Sequence: Synthetic oligonucleotide
aaacgucuuggccucagag

SEQ ID NO: 2736687 - RNA, 19 nt, Artificial Sequence
  Description of Artificial Sequence: Synthetic oligonucleotide
uucacaacaucuaggugcc

SEQ ID NO: 2736688 - RNA, 19 nt, Artificial Sequence
  Description of Artificial Sequence: Synthetic oligonucleotide
ugagcagccuccaaggucu

SEQ ID NO: 2736689 - RNA, 19 nt, Artificial Sequence
  Description of Artificial Sequence: Synthetic oligonucleotide
ucuucuaguaaggagauua

SEQ ID NO: 2736690 - RNA, 19 nt, Artificial Sequence
  Description of Artificial Sequence: Synthetic oligonucleotide
caacuaaauaauaaacguc

SEQ ID NO: 2736691 - RNA, 19 nt, Artificial Sequence
  Description of Artificial Sequence: Synthetic oligonucleotide
aaagucacugugaaucuuc

SEQ ID NO: 2736692 - RNA, 19 nt, Artificial Sequence
  Description of Artificial Sequence: Synthetic oligonucleotide
ucacugugaaucuucaacu

SEQ ID NO: 2736693 - RNA, 19 nt, Artificial Sequence
  Description of Artificial Sequence: Synthetic oligonucleotide
uggugcuucagucagugga

SEQ ID NO: 2736694 - RNA, 19 nt, Artificial Sequence
  Description of Artificial Sequence: Synthetic oligonucleotide
ucuagcaucccaagaagcu

SEQ ID NO: 2736695 - RNA, 19 nt, Artificial Sequence
  Description of Artificial Sequence: Synthetic oligonucleotide
uucaaugugggaagaguug

SEQ ID NO: 2736696 - RNA, 19 nt, Artificial Sequence
  Description of Artificial Sequence: Synthetic oligonucleotide
ucuggcuccugucauagca

SEQ ID NO: 2736697 - RNA, 19 nt, Artificial Sequence
  Description of Artificial Sequence: Synthetic oligonucleotide
agaguugccuguuacauaa

SEQ ID NO: 2736698 - RNA, 19 nt, Artificial Sequence
  Description of Artificial Sequence: Synthetic oligonucleotide
acauucuaccuucuggcuc

SEQ ID NO: 2736699 - RNA, 19 nt, Artificial Sequence
  Description of Artificial Sequence: Synthetic oligonucleotide
ucggagguauuucacaaca

SEQ ID NO: 2736700 - RNA, 19 nt, Artificial Sequence
  Description of Artificial Sequence: Synthetic oligonucleotide
cauucuaccuucuggcucc

SEQ ID NO: 2736701 - RNA, 19 nt, Artificial Sequence
  Description of Artificial Sequence: Synthetic oligonucleotide
ucucuagcaucccaagaag

SEQ ID NO: 2736702 - RNA, 19 nt, Artificial Sequence
  Description of Artificial Sequence: Synthetic oligonucleotide
ucaugagugguguccaucc

SEQ ID NO: 2736703 - RNA, 19 nt, Artificial Sequence
  Description of Artificial Sequence: Synthetic oligonucleotide
agugguguccauccggaac

SEQ ID NO: 2736704 - RNA, 19 nt, Artificial Sequence
  Description of Artificial Sequence: Synthetic oligonucleotide
uccaaucaaucacagggca

SEQ ID NO: 2736705 - RNA, 19 nt, Artificial Sequence
  Description of Artificial Sequence: Synthetic oligonucleotide
ucagagacaccgcauguca

SEQ ID NO: 2736706 - RNA, 19 nt, Artificial Sequence
  Description of Artificial Sequence: Synthetic oligonucleotide
uuucgauuucauucgguug

SEQ ID NO: 2736707 - RNA, 19 nt, Artificial Sequence
  Description of Artificial Sequence: Synthetic oligonucleotide
uuuuccuuucuucuaguaa

SEQ ID NO: 2736708 - RNA, 19 nt, Artificial Sequence
  Description of Artificial Sequence: Synthetic oligonucleotide
acaagcaagcaugagacug

SEQ ID NO: 2736709 - RNA, 19 nt, Artificial Sequence
  Description of Artificial Sequence: Synthetic oligonucleotide
ugucauagcaguagacucu

SEQ ID NO: 2736710 - RNA, 19 nt, Artificial Sequence
  Description of Artificial Sequence: Synthetic oligonucleotide
agcuccaugucuucggagg

SEQ ID NO: 2736711 - RNA, 19 nt, Artificial Sequence
  Description of Artificial Sequence: Synthetic oligonucleotide
ucaaugugggaagaguugc

SEQ ID NO: 2736712 - RNA, 19 nt, Artificial Sequence
  Description of Artificial Sequence: Synthetic oligonucleotide
gucacugugaaucuucaac

SEQ ID NO: 2736713 - RNA, 19 nt, Artificial Sequence
  Description of Artificial Sequence: Synthetic oligonucleotide
uuucaaugugggaagaguu

SEQ ID NO: 2736714 - RNA, 19 nt, Artificial Sequence
  Description of Artificial Sequence: Synthetic oligonucleotide
uagcaucccaagaagcucc

SEQ ID NO: 2736715 - RNA, 19 nt, Artificial Sequence
  Description of Artificial Sequence: Synthetic oligonucleotide
acauaaaagucacugugaa

SEQ ID NO: 2736716 - RNA, 19 nt, Artificial Sequence
  Description of Artificial Sequence: Synthetic oligonucleotide
uaaaagucacugugaaucu

SEQ ID NO: 2736717 - RNA, 19 nt, Artificial Sequence
  Description of Artificial Sequence: Synthetic oligonucleotide
acucucaugaguggugucc

SEQ ID NO: 2736718 - RNA, 19 nt, Artificial Sequence
  Description of Artificial Sequence: Synthetic oligonucleotide
uggucucucagacgggugg

SEQ ID NO: 2736719 - RNA, 19 nt, Artificial Sequence
  Description of Artificial Sequence: Synthetic oligonucleotide
ucuacaacauccaccucac

SEQ ID NO: 2736720 - RNA, 19 nt, Artificial Sequence
  Description of Artificial Sequence: Synthetic oligonucleotide
agaagcuccaugucuucgg

SEQ ID NO: 2736721 - RNA, 19 nt, Artificial Sequence
  Description of Artificial Sequence: Synthetic oligonucleotide
uucgguuggucucucagac

SEQ ID NO: 2736722 - RNA, 19 nt, Artificial Sequence
  Description of Artificial Sequence: Synthetic oligonucleotide
uaauaaacgucuuggccuc

SEQ ID NO: 2736723 - RNA, 19 nt, Artificial Sequence
  Description of Artificial Sequence: Synthetic oligonucleotide
aguagacucucaugagugg

SEQ ID NO: 2736724 - RNA, 19 nt, Artificial Sequence
  Description of Artificial Sequence: Synthetic oligonucleotide
gucuacaacauccaccuca

SEQ ID NO: 2736725 - RNA, 19 nt, Artificial Sequence
  Description of Artificial Sequence: Synthetic oligonucleotide
aacgucuuggccucagaga

SEQ ID NO: 2736726 - RNA, 19 nt, Artificial Sequence
  Description of Artificial Sequence: Synthetic oligonucleotide
caguagacucucaugagug

SEQ ID NO: 2736727 - RNA, 19 nt, Artificial Sequence
  Description of Artificial Sequence: Synthetic oligonucleotide
aagcaugagacuguccuug

SEQ ID NO: 2736728 - RNA, 19 nt, Artificial Sequence
  Description of Artificial Sequence: Synthetic oligonucleotide
cagccauccuuuaucaucc

SEQ ID NO: 2736729 - RNA, 19 nt, Artificial Sequence
  Description of Artificial Sequence: Synthetic oligonucleotide
ugccuguuacauaaaaguc

SEQ ID NO: 2736730 - RNA, 19 nt, Artificial Sequence
  Description of Artificial Sequence: Synthetic oligonucleotide
aggagauuacauucuaccu

SEQ ID NO: 2736731 - RNA, 19 nt, Artificial Sequence
  Description of Artificial Sequence: Synthetic oligonucleotide
uuuucgauuucauucgguu

SEQ ID NO: 2736732 - RNA, 19 nt, Artificial Sequence
  Description of Artificial Sequence: Synthetic oligonucleotide
aguggccuccaucugcagc

SEQ ID NO: 2736733 - RNA, 19 nt, Artificial Sequence
  Description of Artificial Sequence: Synthetic oligonucleotide
uaaggagauuacauucuac

SEQ ID NO: 2736734 - RNA, 19 nt, Artificial Sequence
  Description of Artificial Sequence: Synthetic oligonucleotide
uauguauuucaauguggga

SEQ ID NO: 2736735 - RNA, 19 nt, Artificial Sequence
  Description of Artificial Sequence: Synthetic oligonucleotide
auagcaguagacucucaug

SEQ ID NO: 2736736 - RNA, 19 nt, Artificial Sequence
  Description of Artificial Sequence: Synthetic oligonucleotide
augagugguguccauccgg

SEQ ID NO: 2736737 - RNA, 19 nt, Artificial Sequence
  Description of Artificial Sequence: Synthetic oligonucleotide
ucauccaaucaaucacagg

SEQ ID NO: 2736738 - RNA, 19 nt, Artificial Sequence
  Description of Artificial Sequence: Synthetic oligonucleotide
uuucuucuaguaaggagau

SEQ ID NO: 2736739 - RNA, 19 nt, Artificial Sequence
  Description of Artificial Sequence: Synthetic oligonucleotide
uguccauccggaaccagug

SEQ ID NO: 2736740 - RNA, 19 nt, Artificial Sequence
  Description of Artificial Sequence: Synthetic oligonucleotide
acaacaucuaggugccccg

SEQ ID NO: 2736741 - RNA, 19 nt, Artificial Sequence
  Description of Artificial Sequence: Synthetic oligonucleotide
aagaagcuccaugucuucg

SEQ ID NO: 2736742 - RNA, 19 nt, Artificial Sequence
  Description of Artificial Sequence: Synthetic oligonucleotide
ugugaaucuucaacuaaau

SEQ ID NO: 2736743 - RNA, 19 nt, Artificial Sequence
  Description of Artificial Sequence: Synthetic oligonucleotide
agcugagcagccuccaagg

SEQ ID NO: 2736744 - RNA, 19 nt, Artificial Sequence
  Description of Artificial Sequence: Synthetic oligonucleotide
aucccaagaagcuccaugu

SEQ ID NO: 2736745 - RNA, 19 nt, Artificial Sequence
  Description of Artificial Sequence: Synthetic oligonucleotide
cugucauagcaguagacuc

SEQ ID NO: 2736746 - RNA, 19 nt, Artificial Sequence
  Description of Artificial Sequence: Synthetic oligonucleotide
cuuggccucagagacaccg

SEQ ID NO: 2736747 - RNA, 19 nt, Artificial Sequence
  Description of Artificial Sequence: Synthetic oligonucleotide
auccaaucaaucacagggc

SEQ ID NO: 2736748 - RNA, 19 nt, Artificial Sequence
  Description of Artificial Sequence: Synthetic oligonucleotide
gauuacauucuaccuucug

SEQ ID NO: 2736749 - RNA, 19 nt, Artificial Sequence
  Description of Artificial Sequence: Synthetic oligonucleotide
ggguuuucgauuucauucg

SEQ ID NO: 2736750 - RNA, 19 nt, Artificial Sequence
  Description of Artificial Sequence: Synthetic oligonucleotide
ucuucggagguauuucaca

SEQ ID NO: 2736751 - RNA, 19 nt, Artificial Sequence
  Description of Artificial Sequence: Synthetic oligonucleotide
caacauccaccucacagcc

SEQ ID NO: 2736752 - RNA, 19 nt, Artificial Sequence
  Description of Artificial Sequence: Synthetic oligonucleotide
cucuagcaucccaagaagc

SEQ ID NO: 2736753 - RNA, 19 nt, Artificial Sequence
  Description of Artificial Sequence: Synthetic oligonucleotide
cauccuuuaucauccaauc

SEQ ID NO: 2736754 - RNA, 19 nt, Artificial Sequence
  Description of Artificial Sequence: Synthetic oligonucleotide
aaugugggaagaguugccu

SEQ ID NO: 2736755 - RNA, 19 nt, Artificial Sequence
  Description of Artificial Sequence: Synthetic oligonucleotide
ucuaccuucuggcuccugu

SEQ ID NO: 2736756 - RNA, 19 nt, Artificial Sequence
  Description of Artificial Sequence: Synthetic oligonucleotide
aaccagugucuacaacauc

SEQ ID NO: 2736757 - RNA, 19 nt, Artificial Sequence
  Description of Artificial Sequence: Synthetic oligonucleotide
uauuucaaugugggaagag

SEQ ID NO: 2736758 - RNA, 19 nt, Artificial Sequence
  Description of Artificial Sequence: Synthetic oligonucleotide
ugugggaagaguugccugu

SEQ ID NO: 2736759 - RNA, 19 nt, Artificial Sequence
  Description of Artificial Sequence: Synthetic oligonucleotide
auuucacaacaucuaggug

SEQ ID NO: 2736760 - RNA, 19 nt, Artificial Sequence
  Description of Artificial Sequence: Synthetic oligonucleotide
agcaugagacuguccuugc

SEQ ID NO: 2736761 - RNA, 19 nt, Artificial Sequence
  Description of Artificial Sequence: Synthetic oligonucleotide
gugguguccauccggaacc

SEQ ID NO: 2736762 - RNA, 19 nt, Artificial Sequence
  Description of Artificial Sequence: Synthetic oligonucleotide
ucacagccauccuuuauca

SEQ ID NO: 2736763 - RNA, 19 nt, Artificial Sequence
  Description of Artificial Sequence: Synthetic oligonucleotide
ggaaccagugucuacaaca

SEQ ID NO: 2736764 - RNA, 19 nt, Artificial Sequence
  Description of Artificial Sequence: Synthetic oligonucleotide
gauuucauucgguuggucu

SEQ ID NO: 2736765 - RNA, 19 nt, Artificial Sequence
  Description of Artificial Sequence: Synthetic oligonucleotide
uagacucucaugaguggug

SEQ ID NO: 2736766 - RNA, 19 nt, Artificial Sequence
  Description of Artificial Sequence: Synthetic oligonucleotide
ugucuucggagguauuuca

SEQ ID NO: 2736767 - RNA, 19 nt, Artificial Sequence
  Description of Artificial Sequence: Synthetic oligonucleotide
auuucaaugugggaagagu

SEQ ID NO: 2736768 - RNA, 19 nt, Artificial Sequence
  Description of Artificial Sequence: Synthetic oligonucleotide
aacaagcaagcaugagacu

SEQ ID NO: 2736769 - RNA, 19 nt, Artificial Sequence
  Description of Artificial Sequence: Synthetic oligonucleotide
gaaucuucaacuaaauaau

SEQ ID NO: 2736770 - RNA, 19 nt, Artificial Sequence
  Description of Artificial Sequence: Synthetic oligonucleotide
acugugaaucuucaacuaa

SEQ ID NO: 2736771 - RNA, 19 nt, Artificial Sequence
  Description of Artificial Sequence: Synthetic oligonucleotide
auccaccucacagccaucc

SEQ ID NO: 2736772 - RNA, 19 nt, Artificial Sequence
  Description of Artificial Sequence: Synthetic oligonucleotide
agcaguagacucucaugag

SEQ ID NO: 2736773 - RNA, 19 nt, Artificial Sequence
  Description of Artificial Sequence: Synthetic oligonucleotide
ccuguuacauaaaagucac

SEQ ID NO: 2736774 - RNA, 19 nt, Artificial Sequence
  Description of Artificial Sequence: Synthetic oligonucleotide
ucacauguccagcccacca

SEQ ID NO: 2736775 - RNA, 19 nt, Artificial Sequence
  Description of Artificial Sequence: Synthetic oligonucleotide
cucacagccauccuuuauc

SEQ ID NO: 2736776 - RNA, 19 nt, Artificial Sequence
  Description of Artificial Sequence: Synthetic oligonucleotide
guugccuguuacauaaaag

SEQ ID NO: 2736777 - RNA, 19 nt, Artificial Sequence
  Description of Artificial Sequence: Synthetic oligonucleotide
uucuaguaaggagauuaca

SEQ ID NO: 2736778 - RNA, 19 nt, Artificial Sequence
  Description of Artificial Sequence: Synthetic oligonucleotide
ggacagaggacuuccuugg

SEQ ID NO: 2736779 - RNA, 19 nt, Artificial Sequence
  Description of Artificial Sequence: Synthetic oligonucleotide
cuucuaguaaggagauuac

SEQ ID NO: 2736780 - RNA, 19 nt, Artificial Sequence
  Description of Artificial Sequence: Synthetic oligonucleotide
caccgcaugucacaugucc

SEQ ID NO: 2736781 - RNA, 19 nt, Artificial Sequence
  Description of Artificial Sequence: Synthetic oligonucleotide
cuucagucaguggacagag

SEQ ID NO: 2736782 - RNA, 19 nt, Artificial Sequence
  Description of Artificial Sequence: Synthetic oligonucleotide
acauccaccucacagccau

SEQ ID NO: 2736783 - RNA, 19 nt, Artificial Sequence
  Description of Artificial Sequence: Synthetic oligonucleotide
ucugcagcccagugcagag

SEQ ID NO: 2736784 - RNA, 19 nt, Artificial Sequence
  Description of Artificial Sequence: Synthetic oligonucleotide
agucaguggacagaggacu

SEQ ID NO: 2736785 - RNA, 19 nt, Artificial Sequence
  Description of Artificial Sequence: Synthetic oligonucleotide
gagcugagcagccuccaag

SEQ ID NO: 2736786 - RNA, 19 nt, Artificial Sequence
  Description of Artificial Sequence: Synthetic oligonucleotide
aagcuccaugucuucggag

SEQ ID NO: 2736787 - RNA, 19 nt, Artificial Sequence
  Description of Artificial Sequence: Synthetic oligonucleotide
cauucgguuggucucucag

SEQ ID NO: 2736788 - RNA, 19 nt, Artificial Sequence
  Description of Artificial Sequence: Synthetic oligonucleotide
agagacaccgcaugucaca

SEQ ID NO: 2736789 - RNA, 19 nt, Artificial Sequence
  Description of Artificial Sequence: Synthetic oligonucleotide
aagcaagcaugagacuguc

SEQ ID NO: 2736790 - RNA, 19 nt, Artificial Sequence
  Description of Artificial Sequence: Synthetic oligonucleotide
cacaacaucuaggugcccc

SEQ ID NO: 2736791 - RNA, 19 nt, Artificial Sequence
  Description of Artificial Sequence: Synthetic oligonucleotide
uccggaaccagugucuaca

SEQ ID NO: 2736792 - RNA, 19 nt, Artificial Sequence
  Description of Artificial Sequence: Synthetic oligonucleotide
caugucacauguccagccc

SEQ ID NO: 2736793 - RNA, 19 nt, Artificial Sequence
  Description of Artificial Sequence: Synthetic oligonucleotide
aacaucuaggugccccgca

SEQ ID NO: 2736794 - RNA, 19 nt, Artificial Sequence
  Description of Artificial Sequence: Synthetic oligonucleotide
uccauccggaaccaguguc

SEQ ID NO: 2736795 - RNA, 19 nt, Artificial Sequence
  Description of Artificial Sequence: Synthetic oligonucleotide
aucuucaacuaaauaauaa

SEQ ID NO: 2736796 - RNA, 19 nt, Artificial Sequence
  Description of Artificial Sequence: Synthetic oligonucleotide
aaucaaucacagggcagug

SEQ ID NO: 2736797 - RNA, 19 nt, Artificial Sequence
  Description of Artificial Sequence: Synthetic oligonucleotide
acagaggacuuccuuggca

SEQ ID NO: 2736798 - RNA, 19 nt, Artificial Sequence
  Description of Artificial Sequence: Synthetic oligonucleotide
gucucuagcaucccaagaa

SEQ ID NO: 2736799 - RNA, 19 nt, Artificial Sequence
  Description of Artificial Sequence: Synthetic oligonucleotide
aguugccuguuacauaaaa

SEQ ID NO: 2736800 - RNA, 19 nt, Artificial Sequence
  Description of Artificial Sequence: Synthetic oligonucleotide
caaugugggaagaguugcc

SEQ ID NO: 2736801 - RNA, 19 nt, Artificial Sequence
  Description of Artificial Sequence: Synthetic oligonucleotide
gagguauuucacaacaucu

SEQ ID NO: 2736802 - RNA, 19 nt, Artificial Sequence
  Description of Artificial Sequence: Synthetic oligonucleotide
caucccaagaagcuccaug

SEQ ID NO: 2736803 - RNA, 19 nt, Artificial Sequence
  Description of Artificial Sequence: Synthetic oligonucleotide
agugcagagcugagcagcc

SEQ ID NO: 2736804 - RNA, 19 nt, Artificial Sequence
  Description of Artificial Sequence: Synthetic oligonucleotide
aagaguugccuguuacaua

SEQ ID NO: 2736805 - RNA, 19 nt, Artificial Sequence
  Description of Artificial Sequence: Synthetic oligonucleotide
ugucacauguccagcccac

SEQ ID NO: 2736806 - RNA, 19 nt, Artificial Sequence
  Description of Artificial Sequence: Synthetic oligonucleotide
uucagucaguggacagagg

SEQ ID NO: 2736807 - RNA, 19 nt, Artificial Sequence
  Description of Artificial Sequence: Synthetic oligonucleotide
cgcauaacaagcaagcaug

SEQ ID NO: 2736808 - RNA, 19 nt, Artificial Sequence
  Description of Artificial Sequence: Synthetic oligonucleotide
gguuuucgauuucauucgg

SEQ ID NO: 2736809 - RNA, 19 nt, Artificial Sequence
  Description of Artificial Sequence: Synthetic oligonucleotide
aucaaucacagggcagugg

SEQ ID NO: 2736810 - RNA, 19 nt, Artificial Sequence
  Description of Artificial Sequence: Synthetic oligonucleotide
augucuucggagguauuuc

SEQ ID NO: 2736811 - RNA, 19 nt, Artificial Sequence
  Description of Artificial Sequence: Synthetic oligonucleotide
ucgguuggucucucagacg

SEQ ID NO: 2736812 - RNA, 19 nt, Artificial Sequence
  Description of Artificial Sequence: Synthetic oligonucleotide
uaccuucuggcuccuguca

SEQ ID NO: 2736813 - RNA, 19 nt, Artificial Sequence
  Description of Artificial Sequence: Synthetic oligonucleotide
augugggaagaguugccug

SEQ ID NO: 2736814 - RNA, 19 nt, Artificial Sequence
  Description of Artificial Sequence: Synthetic oligonucleotide
caugagacuguccuugcca

SEQ ID NO: 2736815 - RNA, 19 nt, Artificial Sequence
  Description of Artificial Sequence: Synthetic oligonucleotide
cauaacaagcaagcaugag

SEQ ID NO: 2736816 - RNA, 19 nt, Artificial Sequence
  Description of Artificial Sequence: Synthetic oligonucleotide
ugcagagcugagcagccuc

SEQ ID NO: 2736817 - RNA, 19 nt, Artificial Sequence
  Description of Artificial Sequence: Synthetic oligonucleotide
cugugaaucuucaacuaaa

SEQ ID NO: 2736818 - RNA, 19 nt, Artificial Sequence
  Description of Artificial Sequence: Synthetic oligonucleotide
uucggagguauuucacaac

SEQ ID NO: 2736819 - RNA, 19 nt, Artificial Sequence
  Description of Artificial Sequence: Synthetic oligonucleotide
gacaccgcaugucacaugu

SEQ ID NO: 2736820 - RNA, 19 nt, Artificial Sequence
  Description of Artificial Sequence: Synthetic oligonucleotide
augucacauguccagccca

SEQ ID NO: 2736821 - RNA, 19 nt, Artificial Sequence
  Description of Artificial Sequence: Synthetic oligonucleotide
ggagguauuucacaacauc

SEQ ID NO: 2736822 - RNA, 19 nt, Artificial Sequence
  Description of Artificial Sequence: Synthetic oligonucleotide
auucgguuggucucucaga

SEQ ID NO: 2736823 - RNA, 19 nt, Artificial Sequence
  Description of Artificial Sequence: Synthetic oligonucleotide
cuaggugccccgcauaaca

SEQ ID NO: 2736824 - RNA, 19 nt, Artificial Sequence
  Description of Artificial Sequence: Synthetic oligonucleotide
acauguccagcccaccagu

SEQ ID NO: 2736825 - RNA, 19 nt, Artificial Sequence
  Description of Artificial Sequence: Synthetic oligonucleotide
ccuuucuucuaguaaggag

SEQ ID NO: 2736826 - RNA, 19 nt, Artificial Sequence
  Description of Artificial Sequence: Synthetic oligonucleotide
cagugcagagcugagcagc

SEQ ID NO: 2736827 - RNA, 19 nt, Artificial Sequence
  Description of Artificial Sequence: Synthetic oligonucleotide
aaaagucacugugaaucuu

SEQ ID NO: 2736828 - RNA, 19 nt, Artificial Sequence
  Description of Artificial Sequence: Synthetic oligonucleotide
caugagugguguccauccg

SEQ ID NO: 2736829 - RNA, 19 nt, Artificial Sequence
  Description of Artificial Sequence: Synthetic oligonucleotide
agccuccaaggucucuagc

SEQ ID NO: 2736830 - RNA, 19 nt, Artificial Sequence
  Description of Artificial Sequence: Synthetic oligonucleotide
cacauguccagcccaccag

SEQ ID NO: 2736831 - RNA, 19 nt, Artificial Sequence
  Description of Artificial Sequence: Synthetic oligonucleotide
aggucucuagcaucccaag

SEQ ID NO: 2736832 - RNA, 19 nt, Artificial Sequence
  Description of Artificial Sequence: Synthetic oligonucleotide
gacuguccuugccacuucc

SEQ ID NO: 2736833 - RNA, 19 nt, Artificial Sequence
  Description of Artificial Sequence: Synthetic oligonucleotide
cuucuggcuccugucauag

SEQ ID NO: 2736834 - RNA, 19 nt, Artificial Sequence
  Description of Artificial Sequence: Synthetic oligonucleotide
ucaggguuuucgauuucau

SEQ ID NO: 2736835 - RNA, 19 nt, Artificial Sequence
  Description of Artificial Sequence: Synthetic oligonucleotide
gacggguggugcuucaguc

SEQ ID NO: 2736836 - RNA, 19 nt, Artificial Sequence
  Description of Artificial Sequence: Synthetic oligonucleotide
ugccacuuccguucuucag

SEQ ID NO: 2736837 - RNA, 19 nt, Artificial Sequence
  Description of Artificial Sequence: Synthetic oligonucleotide
guccuugccacuuccguuc

SEQ ID NO: 2736838 - RNA, 19 nt, Artificial Sequence
  Description of Artificial Sequence: Synthetic oligonucleotide
uccuuucuucuaguaagga

SEQ ID NO: 2736839 - RNA, 19 nt, Artificial Sequence
  Description of Artificial Sequence: Synthetic oligonucleotide
gacagaggacuuccuuggc

SEQ ID NO: 2736840 - RNA, 19 nt, Artificial Sequence
  Description of Artificial Sequence: Synthetic oligonucleotide
ucucucagacggguggugc

SEQ ID NO: 2736841 - RNA, 19 nt, Artificial Sequence
  Description of Artificial Sequence: Synthetic oligonucleotide
cuagcaucccaagaagcuc

SEQ ID NO: 2736842 - RNA, 19 nt, Artificial Sequence
  Description of Artificial Sequence: Synthetic oligonucleotide
caaucacagggcaguggcc

SEQ ID NO: 2736843 - RNA, 19 nt, Artificial Sequence
  Description of Artificial Sequence: Synthetic oligonucleotide
aagucacugugaaucuuca

SEQ ID NO: 2736844 - RNA, 19 nt, Artificial Sequence
  Description of Artificial Sequence: Synthetic oligonucleotide
cuucggagguauuucacaa

SEQ ID NO: 2736845 - RNA, 19 nt, Artificial Sequence
  Description of Artificial Sequence: Synthetic oligonucleotide
uaaacgucuuggccucaga

SEQ ID NO: 2736846 - RNA, 19 nt, Artificial Sequence
  Description of Artificial Sequence: Synthetic oligonucleotide
cagucaguggacagaggac

SEQ ID NO: 2736847 - RNA, 19 nt, Artificial Sequence
  Description of Artificial Sequence: Synthetic oligonucleotide
uuggucucucagacgggug

SEQ ID NO: 2736848 - RNA, 19 nt, Artificial Sequence
  Description of Artificial Sequence: Synthetic oligonucleotide
cugagcagccuccaagguc

SEQ ID NO: 2736849 - RNA, 19 nt, Artificial Sequence
  Description of Artificial Sequence: Synthetic oligonucleotide
uccagcccaccagucaggg

SEQ ID NO: 2736850 - RNA, 19 nt, Artificial Sequence
  Description of Artificial Sequence: Synthetic oligonucleotide
aucuaggugccccgcauaa

SEQ ID NO: 2736851 - RNA, 19 nt, Artificial Sequence
  Description of Artificial Sequence: Synthetic oligonucleotide
aaggucucuagcaucccaa

SEQ ID NO: 2736852 - RNA, 19 nt, Artificial Sequence
  Description of Artificial Sequence: Synthetic oligonucleotide
gaagcuccaugucuucgga

SEQ ID NO: 2736853 - RNA, 19 nt, Artificial Sequence
  Description of Artificial Sequence: Synthetic oligonucleotide
acuaaauaauaaacgucuu

SEQ ID NO: 2736854 - RNA, 19 nt, Artificial Sequence
  Description of Artificial Sequence: Synthetic oligonucleotide
guaaggagauuacauucua

SEQ ID NO: 2736855 - RNA, 19 nt, Artificial Sequence
  Description of Artificial Sequence: Synthetic oligonucleotide
aggugccccgcauaacaag

SEQ ID NO: 2736856 - RNA, 19 nt, Artificial Sequence
  Description of Artificial Sequence: Synthetic oligonucleotide
uuggccucagagacaccgc

SEQ ID NO: 2736857 - RNA, 19 nt, Artificial Sequence
  Description of Artificial Sequence: Synthetic oligonucleotide
auccggaaccagugucuac

SEQ ID NO: 2736858 - RNA, 19 nt, Artificial Sequence
  Description of Artificial Sequence: Synthetic oligonucleotide
auaaacgucuuggccucag

SEQ ID NO: 2736859 - RNA, 19 nt, Artificial Sequence
  Description of Artificial Sequence: Synthetic oligonucleotide
caguggacagaggacuucc

SEQ ID NO: 2736860 - RNA, 19 nt, Artificial Sequence
  Description of Artificial Sequence: Synthetic oligonucleotide
gaagaguugccuguuacau

SEQ ID NO: 2736861 - RNA, 19 nt, Artificial Sequence
  Description of Artificial Sequence: Synthetic oligonucleotide
gccuguuacauaaaaguca

SEQ ID NO: 2736862 - RNA, 19 nt, Artificial Sequence
  Description of Artificial Sequence: Synthetic oligonucleotide
uguccuugccacuuccguu

SEQ ID NO: 2736863 - RNA, 19 nt, Artificial Sequence
  Description of Artificial Sequence: Synthetic oligonucleotide
gugaaucuucaacuaaaua

SEQ ID NO: 2736864 - RNA, 19 nt, Artificial Sequence
  Description of Artificial Sequence: Synthetic oligonucleotide
aauaaacgucuuggccuca

SEQ ID NO: 2736865 - RNA, 19 nt, Artificial Sequence
  Description of Artificial Sequence: Synthetic oligonucleotide
gcaugucacauguccagcc

SEQ ID NO: 2736866 - RNA, 19 nt, Artificial Sequence
  Description of Artificial Sequence: Synthetic oligonucleotide
agacuguccuugccacuuc

SEQ ID NO: 2736867 - RNA, 19 nt, Artificial Sequence
  Description of Artificial Sequence: Synthetic oligonucleotide
agucaggguuuucgauuuc

SEQ ID NO: 2736868 - RNA, 19 nt, Artificial Sequence
  Description of Artificial Sequence: Synthetic oligonucleotide
ucauagcaguagacucuca

SEQ ID NO: 2736869 - RNA, 19 nt, Artificial Sequence
  Description of Artificial Sequence: Synthetic oligonucleotide
cgguuggucucucagacgg

SEQ ID NO: 2736870 - RNA, 19 nt, Artificial Sequence
  Description of Artificial Sequence: Synthetic oligonucleotide
cagagacaccgcaugucac

SEQ ID NO: 2736871 - RNA, 19 nt, Artificial Sequence
  Description of Artificial Sequence: Synthetic oligonucleotide
ugagacuguccuugccacu

SEQ ID NO: 2736872 - RNA, 19 nt, Artificial Sequence
  Description of Artificial Sequence: Synthetic oligonucleotide
uggcuccugucauagcagu

SEQ ID NO: 2736873 - RNA, 19 nt, Artificial Sequence
  Description of Artificial Sequence: Synthetic oligonucleotide
gcaagcaugagacuguccu

SEQ ID NO: 2736874 - RNA, 19 nt, Artificial Sequence
  Description of Artificial Sequence: Synthetic oligonucleotide
cuugccacuuccguucuuc

SEQ ID NO: 2736875 - RNA, 19 nt, Artificial Sequence
  Description of Artificial Sequence: Synthetic oligonucleotide
uaggugccccgcauaacaa

SEQ ID NO: 2736876 - RNA, 19 nt, Artificial Sequence
  Description of Artificial Sequence: Synthetic oligonucleotide
cuaguaaggagauuacauu

SEQ ID NO: 2736877 - RNA, 19 nt, Artificial Sequence
  Description of Artificial Sequence: Synthetic oligonucleotide
agguauuucacaacaucua

SEQ ID NO: 2736878 - RNA, 19 nt, Artificial Sequence
  Description of Artificial Sequence: Synthetic oligonucleotide
agacucucaugaguggugu

SEQ ID NO: 2736879 - RNA, 19 nt, Artificial Sequence
  Description of Artificial Sequence: Synthetic oligonucleotide
agcaagcaugagacugucc

SEQ ID NO: 2736880 - RNA, 19 nt, Artificial Sequence
  Description of Artificial Sequence: Synthetic oligonucleotide
gucauagcaguagacucuc

SEQ ID NO: 2736881 - RNA, 19 nt, Artificial Sequence
  Description of Artificial Sequence: Synthetic oligonucleotide
accagucaggguuuucgau

SEQ ID NO: 2736882 - RNA, 19 nt, Artificial Sequence
  Description of Artificial Sequence: Synthetic oligonucleotide
cuaccuucuggcuccuguc

SEQ ID NO: 2736883 - RNA, 19 nt, Artificial Sequence
  Description of Artificial Sequence: Synthetic oligonucleotide
acaucuaggugccccgcau

SEQ ID NO: 2736884 - RNA, 19 nt, Artificial Sequence
  Description of Artificial Sequence: Synthetic oligonucleotide
cagugucuacaacauccac

SEQ ID NO: 2736885 - RNA, 19 nt, Artificial Sequence
  Description of Artificial Sequence: Synthetic oligonucleotide
ccaaucaaucacagggcag

SEQ ID NO: 2736886 - RNA, 19 nt, Artificial Sequence
  Description of Artificial Sequence: Synthetic oligonucleotide
gggaagaguugccuguuac

SEQ ID NO: 2736887 - RNA, 19 nt, Artificial Sequence
  Description of Artificial Sequence: Synthetic oligonucleotide
acggguggugcuucaguca

SEQ ID NO: 2736888 - RNA, 19 nt, Artificial Sequence
  Description of Artificial Sequence: Synthetic oligonucleotide
ccccgcauaacaagcaagc

SEQ ID NO: 2736889 - RNA, 19 nt, Artificial Sequence
  Description of Artificial Sequence: Synthetic oligonucleotide
ggcaguggccuccaucugc

SEQ ID NO: 2736890 - RNA, 19 nt, Artificial Sequence
  Description of Artificial Sequence: Synthetic oligonucleotide
ugccccgcauaacaagcaa

SEQ ID NO: 2736891 - RNA, 19 nt, Artificial Sequence
  Description of Artificial Sequence: Synthetic oligonucleotide
uugccacuuccguucuuca

SEQ ID NO: 2736892 - RNA, 19 nt, Artificial Sequence
  Description of Artificial Sequence: Synthetic oligonucleotide
cauguccagcccaccaguc

SEQ ID NO: 2736893 - RNA, 19 nt, Artificial Sequence
  Description of Artificial Sequence: Synthetic oligonucleotide
ggaagaguugccuguuaca

SEQ ID NO: 2736894 - RNA, 19 nt, Artificial Sequence
  Description of Artificial Sequence: Synthetic oligonucleotide
ucgauuucauucgguuggu

SEQ ID NO: 2736895 - RNA, 19 nt, Artificial Sequence
  Description of Artificial Sequence: Synthetic oligonucleotide
guauuucaaugugggaaga

SEQ ID NO: 2736896 - RNA, 19 nt, Artificial Sequence
  Description of Artificial Sequence: Synthetic oligonucleotide
agacggguggugcuucagu

SEQ ID NO: 2736897 - RNA, 19 nt, Artificial Sequence
  Description of Artificial Sequence: Synthetic oligonucleotide
gcuccugucauagcaguag

SEQ ID NO: 2736898 - RNA, 19 nt, Artificial Sequence
  Description of Artificial Sequence: Synthetic oligonucleotide
acuguccuugccacuuccg

SEQ ID NO: 2736899 - RNA, 19 nt, Artificial Sequence
  Description of Artificial Sequence: Synthetic oligonucleotide
cucagagacaccgcauguc

SEQ ID NO: 2736900 - RNA, 19 nt, Artificial Sequence
  Description of Artificial Sequence: Synthetic oligonucleotide
caaucaaucacagggcagu

SEQ ID NO: 2736901 - RNA, 19 nt, Artificial Sequence
  Description of Artificial Sequence: Synthetic oligonucleotide
ucauucgguuggucucuca

SEQ ID NO: 2736902 - RNA, 19 nt, Artificial Sequence
  Description of Artificial Sequence: Synthetic oligonucleotide
gguggugcuucagucagug

SEQ ID NO: 2736903 - RNA, 19 nt, Artificial Sequence
  Description of Artificial Sequence: Synthetic oligonucleotide
ucacagggcaguggccucc

SEQ ID NO: 2736904 - RNA, 19 nt, Artificial Sequence
  Description of Artificial Sequence: Synthetic oligonucleotide
ucaguggacagaggacuuc

SEQ ID NO: 2736905 - RNA, 19 nt, Artificial Sequence
  Description of Artificial Sequence: Synthetic oligonucleotide
uccuugccacuuccguucu

SEQ ID NO: 2736906 - RNA, 19 nt, Artificial Sequence
  Description of Artificial Sequence: Synthetic oligonucleotide
ggagauuacauucuaccuu

SEQ ID NO: 2736907 - RNA, 19 nt, Artificial Sequence
  Description of Artificial Sequence: Synthetic oligonucleotide
agucacugugaaucuucaa

SEQ ID NO: 2736908 - RNA, 19 nt, Artificial Sequence
  Description of Artificial Sequence: Synthetic oligonucleotide
cucaugagugguguccauc

SEQ ID NO: 2736909 - RNA, 19 nt, Artificial Sequence
  Description of Artificial Sequence: Synthetic oligonucleotide
uccaccucacagccauccu

SEQ ID NO: 2736910 - RNA, 19 nt, Artificial Sequence
  Description of Artificial Sequence: Synthetic oligonucleotide
accuucuggcuccugucau

SEQ ID NO: 2736911 - RNA, 19 nt, Artificial Sequence
  Description of Artificial Sequence: Synthetic oligonucleotide
cacugugaaucuucaacua

SEQ ID NO: 2736912 - RNA, 19 nt, Artificial Sequence
  Description of Artificial Sequence: Synthetic oligonucleotide
gccacuuccguucuucaga

SEQ ID NO: 2736913 - RNA, 19 nt, Artificial Sequence
  Description of Artificial Sequence: Synthetic oligonucleotide
ugggaagaguugccuguua

SEQ ID NO: 2736914 - RNA, 19 nt, Artificial Sequence
  Description of Artificial Sequence: Synthetic oligonucleotide
ucagacggguggugcuuca

SEQ ID NO: 2736915 - RNA, 19 nt, Artificial Sequence
  Description of Artificial Sequence: Synthetic oligonucleotide
gucaggguuuucgauuuca

SEQ ID NO: 2736916 - RNA, 19 nt, Artificial Sequence
  Description of Artificial Sequence: Synthetic oligonucleotide
ugucuacaacauccaccuc

SEQ ID NO: 2736917 - RNA, 19 nt, Artificial Sequence
  Description of Artificial Sequence: Synthetic oligonucleotide
aacauccaccucacagcca

SEQ ID NO: 2736918 - RNA, 19 nt, Artificial Sequence
  Description of Artificial Sequence: Synthetic oligonucleotide
ggugccccgcauaacaagc

SEQ ID NO: 2736919 - RNA, 19 nt, Artificial Sequence
  Description of Artificial Sequence: Synthetic oligonucleotide
aucugcagcccagugcaga

SEQ ID NO: 2736920 - RNA, 19 nt, Artificial Sequence
  Description of Artificial Sequence: Synthetic oligonucleotide
guggugcuucagucagugg

SEQ ID NO: 2736921 - RNA, 19 nt, Artificial Sequence
  Description of Artificial Sequence: Synthetic oligonucleotide
ccaucugcagcccagugca

SEQ ID NO: 2736922 - RNA, 19 nt, Artificial Sequence
  Description of Artificial Sequence: Synthetic oligonucleotide
gccuccaaggucucuagca

SEQ ID NO: 2736923 - RNA, 19 nt, Artificial Sequence
  Description of Artificial Sequence: Synthetic oligonucleotide
agacaccgcaugucacaug

SEQ ID NO: 2736924 - RNA, 19 nt, Artificial Sequence
  Description of Artificial Sequence: Synthetic oligonucleotide
ucuaggugccccgcauaac

SEQ ID NO: 2736925 - RNA, 19 nt, Artificial Sequence
  Description of Artificial Sequence: Synthetic oligonucleotide
gccucagagacaccgcaug

SEQ ID NO: 2736926 - RNA, 19 nt, Artificial Sequence
  Description of Artificial Sequence: Synthetic oligonucleotide
gucuucggagguauuucac

SEQ ID NO: 2736927 - RNA, 19 nt, Artificial Sequence
  Description of Artificial Sequence: Synthetic oligonucleotide
caagcaagcaugagacugu

SEQ ID NO: 2736928 - RNA, 19 nt, Artificial Sequence
  Description of Artificial Sequence: Synthetic oligonucleotide
ccaccagucaggguuuucg

SEQ ID NO: 2736929 - RNA, 19 nt, Artificial Sequence
  Description of Artificial Sequence: Synthetic oligonucleotide
caacaucuaggugccccgc

SEQ ID NO: 2736930 - RNA, 19 nt, Artificial Sequence
  Description of Artificial Sequence: Synthetic oligonucleotide
uucuggcuccugucauagc

SEQ ID NO: 2736931 - RNA, 19 nt, Artificial Sequence
  Description of Artificial Sequence: Synthetic oligonucleotide
cagccuccaaggucucuag

SEQ ID NO: 2736932 - RNA, 19 nt, Artificial Sequence
  Description of Artificial Sequence: Synthetic oligonucleotide
gaaccagugucuacaacau

SEQ ID NO: 2736933 - RNA, 19 nt, Artificial Sequence
  Description of Artificial Sequence: Synthetic oligonucleotide
agauuacauucuaccuucu

SEQ ID NO: 2736934 - RNA, 19 nt, Artificial Sequence
  Description of Artificial Sequence: Synthetic oligonucleotide
accgcaugucacaugucca

SEQ ID NO: 2736935 - RNA, 19 nt, Artificial Sequence
  Description of Artificial Sequence: Synthetic oligonucleotide
cauagcaguagacucucau

SEQ ID NO: 2736936 - RNA, 19 nt, Artificial Sequence
  Description of Artificial Sequence: Synthetic oligonucleotide
guagacucucaugaguggu

SEQ ID NO: 2736937 - RNA, 19 nt, Artificial Sequence
  Description of Artificial Sequence: Synthetic oligonucleotide
cuccaucugcagcccagug

SEQ ID NO: 2736938 - RNA, 19 nt, Artificial Sequence
  Description of Artificial Sequence: Synthetic oligonucleotide
ccgcaugucacauguccag

SEQ ID NO: 2736939 - RNA, 19 nt, Artificial Sequence
  Description of Artificial Sequence: Synthetic oligonucleotide
ggucucuagcaucccaaga

SEQ ID NO: 2736940 - RNA, 19 nt, Artificial Sequence
  Description of Artificial Sequence: Synthetic oligonucleotide
agagcugagcagccuccaa

SEQ ID NO: 2736941 - RNA, 19 nt, Artificial Sequence
  Description of Artificial Sequence: Synthetic oligonucleotide
gcaugagacuguccuugcc

SEQ ID NO: 2736942 - RNA, 19 nt, Artificial Sequence
  Description of Artificial Sequence: Synthetic oligonucleotide
cucucaugaguggugucca

SEQ ID NO: 2736943 - RNA, 19 nt, Artificial Sequence
  Description of Artificial Sequence: Synthetic oligonucleotide
caucugcagcccagugcag

SEQ ID NO: 2736944 - RNA, 19 nt, Artificial Sequence
  Description of Artificial Sequence: Synthetic oligonucleotide
gcaguagacucucaugagu

SEQ ID NO: 2736945 - RNA, 19 nt, Artificial Sequence
  Description of Artificial Sequence: Synthetic oligonucleotide
ugguguccauccggaacca

SEQ ID NO: 2736946 - RNA, 19 nt, Artificial Sequence
  Description of Artificial Sequence: Synthetic oligonucleotide
ucuuggccucagagacacc

SEQ ID NO: 2736947 - RNA, 19 nt, Artificial Sequence
  Description of Artificial Sequence: Synthetic oligonucleotide
caccagucaggguuuucga

SEQ ID NO: 2736948 - RNA, 19 nt, Artificial Sequence
  Description of Artificial Sequence: Synthetic oligonucleotide
cagggcaguggccuccauc

SEQ ID NO: 2736949 - RNA, 19 nt, Artificial Sequence
  Description of Artificial Sequence: Synthetic oligonucleotide
gucacauguccagcccacc

SEQ ID NO: 2736950 - RNA, 19 nt, Artificial Sequence
  Description of Artificial Sequence: Synthetic oligonucleotide
gcauaacaagcaagcauga

SEQ ID NO: 2736951 - RNA, 19 nt, Artificial Sequence
  Description of Artificial Sequence: Synthetic oligonucleotide
ucacaacaucuaggugccc

SEQ ID NO: 2736952 - RNA, 19 nt, Artificial Sequence
  Description of Artificial Sequence: Synthetic oligonucleotide
ucucagacggguggugcuu

SEQ ID NO: 2736953 - RNA, 19 nt, Artificial Sequence
  Description of Artificial Sequence: Synthetic oligonucleotide
guuuucgauuucauucggu

SEQ ID NO: 2736954 - RNA, 19 nt, Artificial Sequence
  Description of Artificial Sequence: Synthetic oligonucleotide
agccauccuuuaucaucca

SEQ ID NO: 2736955 - RNA, 19 nt, Artificial Sequence
  Description of Artificial Sequence: Synthetic oligonucleotide
guuggucucucagacgggu

SEQ ID NO: 2736956 - RNA, 19 nt, Artificial Sequence
  Description of Artificial Sequence: Synthetic oligonucleotide
aguggacagaggacuuccu

SEQ ID NO: 2736957 - RNA, 19 nt, Artificial Sequence
  Description of Artificial Sequence: Synthetic oligonucleotide
uucuucuaguaaggagauu

SEQ ID NO: 2736958 - RNA, 19 nt, Artificial Sequence
  Description of Artificial Sequence: Synthetic oligonucleotide
gagacuguccuugccacuu

SEQ ID NO: 2736959 - RNA, 19 nt, Artificial Sequence
  Description of Artificial Sequence: Synthetic oligonucleotide
cucagacggguggugcuuc

SEQ ID NO: 2736960 - RNA, 19 nt, Artificial Sequence
  Description of Artificial Sequence: Synthetic oligonucleotide
cagcccaccagucaggguu

SEQ ID NO: 2736961 - RNA, 19 nt, Artificial Sequence
  Description of Artificial Sequence: Synthetic oligonucleotide
gucucucagacggguggug

SEQ ID NO: 2736962 - RNA, 19 nt, Artificial Sequence
  Description of Artificial Sequence: Synthetic oligonucleotide
gguuggucucucagacggg

SEQ ID NO: 2736963 - RNA, 19 nt, Artificial Sequence
  Description of Artificial Sequence: Synthetic oligonucleotide
cagucaggguuuucgauuu

SEQ ID NO: 2736964 - RNA, 19 nt, Artificial Sequence
  Description of Artificial Sequence: Synthetic oligonucleotide
gcuucagucaguggacaga

SEQ ID NO: 2736965 - RNA, 19 nt, Artificial Sequence
  Description of Artificial Sequence: Synthetic oligonucleotide
ccagugcagagcugagcag

SEQ ID NO: 2736966 - RNA, 19 nt, Artificial Sequence
  Description of Artificial Sequence: Synthetic oligonucleotide
gccccgcauaacaagcaag

SEQ ID NO: 2736967 - RNA, 19 nt, Artificial Sequence
  Description of Artificial Sequence: Synthetic oligonucleotide
accucacagccauccuuua

SEQ ID NO: 2736968 - RNA, 19 nt, Artificial Sequence
  Description of Artificial Sequence: Synthetic oligonucleotide
gagacaccgcaugucacau

SEQ ID NO: 2736969 - RNA, 19 nt, Artificial Sequence
  Description of Artificial Sequence: Synthetic oligonucleotide
acaccgcaugucacauguc

SEQ ID NO: 2736970 - RNA, 19 nt, Artificial Sequence
  Description of Artificial Sequence: Synthetic oligonucleotide
caguggccuccaucugcag

SEQ ID NO: 2736971 - RNA, 19 nt, Artificial Sequence
  Description of Artificial Sequence: Synthetic oligonucleotide
cagacggguggugcuucag

SEQ ID NO: 2736972 - RNA, 19 nt, Artificial Sequence
  Description of Artificial Sequence: Synthetic oligonucleotide
cuguccuugccacuuccgu

SEQ ID NO: 2736973 - RNA, 19 nt, Artificial Sequence
  Description of Artificial Sequence: Synthetic oligonucleotide
ccuuuaucauccaaucaau

SEQ ID NO: 2736974 - RNA, 19 nt, Artificial Sequence
  Description of Artificial Sequence: Synthetic oligonucleotide
cuacaacauccaccucaca

SEQ ID NO: 2736975 - RNA, 19 nt, Artificial Sequence
  Description of Artificial Sequence: Synthetic oligonucleotide
guguccauccggaaccagu

SEQ ID NO: 2736976 - RNA, 19 nt, Artificial Sequence
  Description of Artificial Sequence: Synthetic oligonucleotide
caucuaggugccccgcaua

SEQ ID NO: 2736977 - RNA, 19 nt, Artificial Sequence
  Description of Artificial Sequence: Synthetic oligonucleotide
caugucuucggagguauuu

SEQ ID NO: 2736978 - RNA, 19 nt, Artificial Sequence
  Description of Artificial Sequence: Synthetic oligonucleotide
caccucacagccauccuuu

SEQ ID NO: 2736979 - RNA, 19 nt, Artificial Sequence
  Description of Artificial Sequence: Synthetic oligonucleotide
guggacagaggacuuccuu

SEQ ID NO: 2736980 - RNA, 19 nt, Artificial Sequence
  Description of Artificial Sequence: Synthetic oligonucleotide
cauccaccucacagccauc

SEQ ID NO: 2736981 - RNA, 19 nt, Artificial Sequence
  Description of Artificial Sequence: Synthetic oligonucleotide
cucucagacggguggugcu

SEQ ID NO: 2736982 - RNA, 19 nt, Artificial Sequence
  Description of Artificial Sequence: Synthetic oligonucleotide
gugccccgcauaacaagca

SEQ ID NO: 2736983 - RNA, 19 nt, Artificial Sequence
  Description of Artificial Sequence: Synthetic oligonucleotide
aggacuuccuuggcagcuu

SEQ ID NO: 2736984 - RNA, 19 nt, Artificial Sequence
  Description of Artificial Sequence: Synthetic oligonucleotide
ccauccuuuaucauccaau

SEQ ID NO: 2736985 - RNA, 19 nt, Artificial Sequence
  Description of Artificial Sequence: Synthetic oligonucleotide
agcccagugcagagcugag

SEQ ID NO: 2736986 - RNA, 19 nt, Artificial Sequence
  Description of Artificial Sequence: Synthetic oligonucleotide
caggguuuucgauuucauu

SEQ ID NO: 2736987 - RNA, 19 nt, Artificial Sequence
  Description of Artificial Sequence: Synthetic oligonucleotide
gcaguggccuccaucugca

SEQ ID NO: 2736988 - RNA, 19 nt, Artificial Sequence
  Description of Artificial Sequence: Synthetic oligonucleotide
ccugucauagcaguagacu

SEQ ID NO: 2736989 - RNA, 19 nt, Artificial Sequence
  Description of Artificial Sequence: Synthetic oligonucleotide
gccuccaucugcagcccag

SEQ ID NO: 2736990 - RNA, 19 nt, Artificial Sequence
  Description of Artificial Sequence: Synthetic oligonucleotide
gccauccuuuaucauccaa

SEQ ID NO: 2736991 - RNA, 19 nt, Artificial Sequence
  Description of Artificial Sequence: Synthetic oligonucleotide
gguguccauccggaaccag

SEQ ID NO: 2736992 - RNA, 19 nt, Artificial Sequence
  Description of Artificial Sequence: Synthetic oligonucleotide
gaguugccuguuacauaaa

SEQ ID NO: 2736993 - RNA, 19 nt, Artificial Sequence
  Description of Artificial Sequence: Synthetic oligonucleotide
cauccggaaccagugucua

SEQ ID NO: 2736994 - RNA, 19 nt, Artificial Sequence
  Description of Artificial Sequence: Synthetic oligonucleotide
agcagccuccaaggucucu

SEQ ID NO: 2736995 - RNA, 19 nt, Artificial Sequence
  Description of Artificial Sequence: Synthetic oligonucleotide
guccauccggaaccagugu

SEQ ID NO: 2736996 - RNA, 19 nt, Artificial Sequence
  Description of Artificial Sequence: Synthetic oligonucleotide
cgcaugucacauguccagc

SEQ ID NO: 2736997 - RNA, 19 nt, Artificial Sequence
  Description of Artificial Sequence: Synthetic oligonucleotide
gcuccaugucuucggaggu

SEQ ID NO: 2736998 - RNA, 19 nt, Artificial Sequence
  Description of Artificial Sequence: Synthetic oligonucleotide
ccgcauaacaagcaagcau

SEQ ID NO: 2736999 - RNA, 19 nt, Artificial Sequence
  Description of Artificial Sequence: Synthetic oligonucleotide
ccaaggucucuagcauccc

SEQ ID NO: 2737000 - RNA, 19 nt, Artificial Sequence
  Description of Artificial Sequence: Synthetic oligonucleotide
gggcaguggccuccaucug

SEQ ID NO: 2737001 - RNA, 19 nt, Artificial Sequence
  Description of Artificial Sequence: Synthetic oligonucleotide
ccagucaggguuuucgauu

SEQ ID NO: 2737002 - RNA, 19 nt, Artificial Sequence
  Description of Artificial Sequence: Synthetic oligonucleotide
cuccaugucuucggaggua

SEQ ID NO: 2737003 - RNA, 19 nt, Artificial Sequence
  Description of Artificial Sequence: Synthetic oligonucleotide
gucaguggacagaggacuu

SEQ ID NO: 2737004 - RNA, 19 nt, Artificial Sequence
  Description of Artificial Sequence: Synthetic oligonucleotide
agcccaccagucaggguuu

SEQ ID NO: 2737005 - RNA, 19 nt, Artificial Sequence
  Description of Artificial Sequence: Synthetic oligonucleotide
ccauccggaaccagugucu

SEQ ID NO: 2737006 - RNA, 19 nt, Artificial Sequence
  Description of Artificial Sequence: Synthetic oligonucleotide
cacagccauccuuuaucau

SEQ ID NO: 2737007 - RNA, 19 nt, Artificial Sequence
  Description of Artificial Sequence: Synthetic oligonucleotide
gcugagcagccuccaaggu

SEQ ID NO: 2737008 - RNA, 19 nt, Artificial Sequence
  Description of Artificial Sequence: Synthetic oligonucleotide
cccgcauaacaagcaagca

SEQ ID NO: 2737009 - RNA, 19 nt, Artificial Sequence
  Description of Artificial Sequence: Synthetic oligonucleotide
gagcagccuccaaggucuc

SEQ ID NO: 2737010 - RNA, 19 nt, Artificial Sequence
  Description of Artificial Sequence: Synthetic oligonucleotide
cggaaccagugucuacaac

SEQ ID NO: 2737011 - RNA, 19 nt, Artificial Sequence
  Description of Artificial Sequence: Synthetic oligonucleotide
ccacuuccguucuucagau

SEQ ID NO: 2737012 - RNA, 19 nt, Artificial Sequence
  Description of Artificial Sequence: Synthetic oligonucleotide
gugggaagaguugccuguu

SEQ ID NO: 2737013 - RNA, 19 nt, Artificial Sequence
  Description of Artificial Sequence: Synthetic oligonucleotide
ccuccaaggucucuagcau

SEQ ID NO: 2737014 - RNA, 19 nt, Artificial Sequence
  Description of Artificial Sequence: Synthetic oligonucleotide
ccucagagacaccgcaugu

SEQ ID NO: 2737015 - RNA, 19 nt, Artificial Sequence
  Description of Artificial Sequence: Synthetic oligonucleotide
ccuucuggcuccugucaua

SEQ ID NO: 2737016 - RNA, 19 nt, Artificial Sequence
  Description of Artificial Sequence: Synthetic oligonucleotide
ggccuccaucugcagccca

SEQ ID NO: 2737017 - RNA, 19 nt, Artificial Sequence
  Description of Artificial Sequence: Synthetic oligonucleotide
ggucucucagacggguggu

SEQ ID NO: 2737018 - RNA, 19 nt, Artificial Sequence
  Description of Artificial Sequence: Synthetic oligonucleotide
ccggaaccagugucuacaa

SEQ ID NO: 2737019 - RNA, 19 nt, Artificial Sequence
  Description of Artificial Sequence: Synthetic oligonucleotide
ggcuccugucauagcagua

SEQ ID NO: 2737020 - RNA, 19 nt, Artificial Sequence
  Description of Artificial Sequence: Synthetic oligonucleotide
ggacuuccuuggcagcuuu

SEQ ID NO: 2737021 - RNA, 19 nt, Artificial Sequence
  Description of Artificial Sequence: Synthetic oligonucleotide
cgauuucauucgguugguc

SEQ ID NO: 2737022 - RNA, 19 nt, Artificial Sequence
  Description of Artificial Sequence: Synthetic oligonucleotide
gcagcccagugcagagcug

SEQ ID NO: 2737023 - RNA, 19 nt, Artificial Sequence
  Description of Artificial Sequence: Synthetic oligonucleotide
gugcagagcugagcagccu

SEQ ID NO: 2737024 - RNA, 19 nt, Artificial Sequence
  Description of Artificial Sequence: Synthetic oligonucleotide
cgucuuggccucagagaca

SEQ ID NO: 2737025 - RNA, 19 nt, Artificial Sequence
  Description of Artificial Sequence: Synthetic oligonucleotide
ccaccucacagccauccuu

SEQ ID NO: 2737026 - RNA, 19 nt, Artificial Sequence
  Description of Artificial Sequence: Synthetic oligonucleotide
cacuuccguucuucagauu

SEQ ID NO: 2737027 - RNA, 19 nt, Artificial Sequence
  Description of Artificial Sequence: Synthetic oligonucleotide
ccucacagccauccuuuau

SEQ ID NO: 2737028 - RNA, 19 nt, Artificial Sequence
  Description of Artificial Sequence: Synthetic oligonucleotide
cccaccagucaggguuuuc

SEQ ID NO: 2737029 - RNA, 19 nt, Artificial Sequence
  Description of Artificial Sequence: Synthetic oligonucleotide
ggccucagagacaccgcau

SEQ ID NO: 2737030 - RNA, 19 nt, Artificial Sequence
  Description of Artificial Sequence: Synthetic oligonucleotide
cggagguauuucacaacau

SEQ ID NO: 2737031 - RNA, 19 nt, Artificial Sequence
  Description of Artificial Sequence: Synthetic oligonucleotide
ggguggugcuucagucagu

SEQ ID NO: 2737032 - RNA, 19 nt, Artificial Sequence
  Description of Artificial Sequence: Synthetic oligonucleotide
ccaugucuucggagguauu

SEQ ID NO: 2737033 - RNA, 19 nt, Artificial Sequence
  Description of Artificial Sequence: Synthetic oligonucleotide
gcccaccagucaggguuuu

SEQ ID NO: 2737034 - RNA, 19 nt, Artificial Sequence
  Description of Artificial Sequence: Synthetic oligonucleotide
aauguaauagcugaagagg

SEQ ID NO: 2737035 - RNA, 19 nt, Artificial Sequence
  Description of Artificial Sequence: Synthetic oligonucleotide
acaacaaggaaauguaucc

SEQ ID NO: 2737036 - RNA, 19 nt, Artificial Sequence
  Description of Artificial Sequence: Synthetic oligonucleotide
aagaggaagggguagauag

SEQ ID NO: 2737037 - RNA, 19 nt, Artificial Sequence
  Description of Artificial Sequence: Synthetic oligonucleotide
aaagccuucuuccgaagcc

SEQ ID NO: 2737038 - RNA, 19 nt, Artificial Sequence
  Description of Artificial Sequence: Synthetic oligonucleotide
acuuaggaggcccaggacc

SEQ ID NO: 2737039 - RNA, 19 nt, Artificial Sequence
  Description of Artificial Sequence: Synthetic oligonucleotide
aacaaggaaauguauccag

SEQ ID NO: 2737040 - RNA, 19 nt, Artificial Sequence
  Description of Artificial Sequence: Synthetic oligonucleotide
aaaagccuucuuccgaagc

SEQ ID NO: 2737041 - RNA, 19 nt, Artificial Sequence
  Description of Artificial Sequence: Synthetic oligonucleotide
auagucuccaugucguugc

SEQ ID NO: 2737042 - RNA, 19 nt, Artificial Sequence
  Description of Artificial Sequence: Synthetic oligonucleotide
ucgacaauguaauagcuga

SEQ ID NO: 2737043 - RNA, 19 nt, Artificial Sequence
  Description of Artificial Sequence: Synthetic oligonucleotide
guagauagucuccaugucg

SEQ ID NO: 2737044 - RNA, 19 nt, Artificial Sequence
  Description of Artificial Sequence: Synthetic oligonucleotide
ucugucgacaauguaauag

SEQ ID NO: 2737045 - RNA, 19 nt, Artificial Sequence
  Description of Artificial Sequence: Synthetic oligonucleotide
caauguaauagcugaagag

SEQ ID NO: 2737046 - RNA, 19 nt, Artificial Sequence
  Description of Artificial Sequence: Synthetic oligonucleotide
uuggcaaaagccuucuucc

SEQ ID NO: 2737047 - RNA, 19 nt, Artificial Sequence
  Description of Artificial Sequence: Synthetic oligonucleotide
auguaauagcugaagaggc

SEQ ID NO: 2737048 - RNA, 19 nt, Artificial Sequence
  Description of Artificial Sequence: Synthetic oligonucleotide
agccacucaucacagaugg

SEQ ID NO: 2737049 - RNA, 19 nt, Artificial Sequence
  Description of Artificial Sequence: Synthetic oligonucleotide
aaagguucaggucccagga

SEQ ID NO: 2737050 - RNA, 19 nt, Artificial Sequence
  Description of Artificial Sequence: Synthetic oligonucleotide
uguucuagaagggacacca

SEQ ID NO: 2737051 - RNA, 19 nt, Artificial Sequence
  Description of Artificial Sequence: Synthetic oligonucleotide
uucuagaagggacaccaag

SEQ ID NO: 2737052 - RNA, 19 nt, Artificial Sequence
  Description of Artificial Sequence: Synthetic oligonucleotide
aaauguauccaggcgauca

SEQ ID NO: 2737053 - RNA, 19 nt, Artificial Sequence
  Description of Artificial Sequence: Synthetic oligonucleotide
guugggaucacuccuguag

SEQ ID NO: 2737054 - RNA, 19 nt, Artificial Sequence
  Description of Artificial Sequence: Synthetic oligonucleotide
ucuagaagggacaccaagu

SEQ ID NO: 2737055 - RNA, 19 nt, Artificial Sequence
  Description of Artificial Sequence: Synthetic oligonucleotide
uauccaggcgaucaaaggu

SEQ ID NO: 2737056 - RNA, 19 nt, Artificial Sequence
  Description of Artificial Sequence: Synthetic oligonucleotide
uguauccaggcgaucaaag

SEQ ID NO: 2737057 - RNA, 19 nt, Artificial Sequence
  Description of Artificial Sequence: Synthetic oligonucleotide
guagacgaagcccaggaag

SEQ ID NO: 2737058 - RNA, 19 nt, Artificial Sequence
  Description of Artificial Sequence: Synthetic oligonucleotide
aggaaauguauccaggcga

SEQ ID NO: 2737059 - RNA, 19 nt, Artificial Sequence
  Description of Artificial Sequence: Synthetic oligonucleotide
ggacauaggcuccagagcg

SEQ ID NO: 2737060 - RNA, 19 nt, Artificial Sequence
  Description of Artificial Sequence: Synthetic oligonucleotide
uagauagucuccaugucgu

SEQ ID NO: 2737061 - RNA, 19 nt, Artificial Sequence
  Description of Artificial Sequence: Synthetic oligonucleotide
caaggaaauguauccaggc

SEQ ID NO: 2737062 - RNA, 19 nt, Artificial Sequence
  Description of Artificial Sequence: Synthetic oligonucleotide
aggacauaggcuccagagc

SEQ ID NO: 2737063 - RNA, 19 nt, Artificial Sequence
  Description of Artificial Sequence: Synthetic oligonucleotide
acaauguaauagcugaaga

SEQ ID NO: 2737064 - RNA, 19 nt, Artificial Sequence
  Description of Artificial Sequence: Synthetic oligonucleotide
gacaauguaauagcugaag

SEQ ID NO: 2737065 - RNA, 19 nt, Artificial Sequence
  Description of Artificial Sequence: Synthetic oligonucleotide
guguguaccacacggcucg

SEQ ID NO: 2737066 - RNA, 19 nt, Artificial Sequence
  Description of Artificial Sequence: Synthetic oligonucleotide
acugggccaggacauaggc

SEQ ID NO: 2737067 - RNA, 19 nt, Artificial Sequence
  Description of Artificial Sequence: Synthetic oligonucleotide
acaccaaguccccagguuc

SEQ ID NO: 2737068 - RNA, 19 nt, Artificial Sequence
  Description of Artificial Sequence: Synthetic oligonucleotide
uguaauagcugaagaggcu

SEQ ID NO: 2737069 - RNA, 19 nt, Artificial Sequence
  Description of Artificial Sequence: Synthetic oligonucleotide
cugucgacaauguaauagc

SEQ ID NO: 2737070 - RNA, 19 nt, Artificial Sequence
  Description of Artificial Sequence: Synthetic oligonucleotide
uagaagggacaccaagucc

SEQ ID NO: 2737071 - RNA, 19 nt, Artificial Sequence
  Description of Artificial Sequence: Synthetic oligonucleotide
gacacaggcgaacugggcc

SEQ ID NO: 2737072 - RNA, 19 nt, Artificial Sequence
  Description of Artificial Sequence: Synthetic oligonucleotide
uagacgaagcccaggaaga

SEQ ID NO: 2737073 - RNA, 19 nt, Artificial Sequence
  Description of Artificial Sequence: Synthetic oligonucleotide
gaaggaguagacgaagccc

SEQ ID NO: 2737074 - RNA, 19 nt, Artificial Sequence
  Description of Artificial Sequence: Synthetic oligonucleotide
ucagccacucaucacagau

SEQ ID NO: 2737075 - RNA, 19 nt, Artificial Sequence
  Description of Artificial Sequence: Synthetic oligonucleotide
augucugccaucccagcac

SEQ ID NO: 2737076 - RNA, 19 nt, Artificial Sequence
  Description of Artificial Sequence: Synthetic oligonucleotide
cacucaucacagauggugg

SEQ ID NO: 2737077 - RNA, 19 nt, Artificial Sequence
  Description of Artificial Sequence: Synthetic oligonucleotide
caggacauaggcuccagag

SEQ ID NO: 2737078 - RNA, 19 nt, Artificial Sequence
  Description of Artificial Sequence: Synthetic oligonucleotide
caaagguucaggucccagg

SEQ ID NO: 2737079 - RNA, 19 nt, Artificial Sequence
  Description of Artificial Sequence: Synthetic oligonucleotide
cucgggguuggcaaaagcc

SEQ ID NO: 2737080 - RNA, 19 nt, Artificial Sequence
  Description of Artificial Sequence: Synthetic oligonucleotide
uguaccacacggcucguga

SEQ ID NO: 2737081 - RNA, 19 nt, Artificial Sequence
  Description of Artificial Sequence: Synthetic oligonucleotide
guauccaggcgaucaaagg

SEQ ID NO: 2737082 - RNA, 19 nt, Artificial Sequence
  Description of Artificial Sequence: Synthetic oligonucleotide
aaggaguagacgaagccca

SEQ ID NO: 2737083 - RNA, 19 nt, Artificial Sequence
  Description of Artificial Sequence: Synthetic oligonucleotide
ugcagagccauggagacac

SEQ ID NO: 2737084 - RNA, 19 nt, Artificial Sequence
  Description of Artificial Sequence: Synthetic oligonucleotide
ugcaugucugccaucccag

SEQ ID NO: 2737085 - RNA, 19 nt, Artificial Sequence
  Description of Artificial Sequence: Synthetic oligonucleotide
gacaacaaggaaauguauc

SEQ ID NO: 2737086 - RNA, 19 nt, Artificial Sequence
  Description of Artificial Sequence: Synthetic oligonucleotide
uugcggugggcucugaggc

SEQ ID NO: 2737087 - RNA, 19 nt, Artificial Sequence
  Description of Artificial Sequence: Synthetic oligonucleotide
ugucgacaauguaauagcu

SEQ ID NO: 2737088 - RNA, 19 nt, Artificial Sequence
  Description of Artificial Sequence: Synthetic oligonucleotide
ucaggucccaggaaggagu

SEQ ID NO: 2737089 - RNA, 19 nt, Artificial Sequence
  Description of Artificial Sequence: Synthetic oligonucleotide
ucccagaggaucugcagag

SEQ ID NO: 2737090 - RNA, 19 nt, Artificial Sequence
  Description of Artificial Sequence: Synthetic oligonucleotide
ucucagggcguccucgggg

SEQ ID NO: 2737091 - RNA, 19 nt, Artificial Sequence
  Description of Artificial Sequence: Synthetic oligonucleotide
aguacuggaggccuccaug

SEQ ID NO: 2737092 - RNA, 19 nt, Artificial Sequence
  Description of Artificial Sequence: Synthetic oligonucleotide
uggcaaaagccuucuuccg

SEQ ID NO: 2737093 - RNA, 19 nt, Artificial Sequence
  Description of Artificial Sequence: Synthetic oligonucleotide
caaguccccagguucagcc

SEQ ID NO: 2737094 - RNA, 19 nt, Artificial Sequence
  Description of Artificial Sequence: Synthetic oligonucleotide
cuagaagggacaccaaguc

SEQ ID NO: 2737095 - RNA, 19 nt, Artificial Sequence
  Description of Artificial Sequence: Synthetic oligonucleotide
acaaggaaauguauccagg

SEQ ID NO: 2737096 - RNA, 19 nt, Artificial Sequence
  Description of Artificial Sequence: Synthetic oligonucleotide
aauguauccaggcgaucaa

SEQ ID NO: 2737097 - RNA, 19 nt, Artificial Sequence
  Description of Artificial Sequence: Synthetic oligonucleotide
caccguguguaccacacgg

SEQ ID NO: 2737098 - RNA, 19 nt, Artificial Sequence
  Description of Artificial Sequence: Synthetic oligonucleotide
uaccacacggcucgugagg

SEQ ID NO: 2737099 - RNA, 19 nt, Artificial Sequence
  Description of Artificial Sequence: Synthetic oligonucleotide
cagauggugggccacuucc

SEQ ID NO: 2737100 - RNA, 19 nt, Artificial Sequence
  Description of Artificial Sequence: Synthetic oligonucleotide
ccagguucagccucgaugg

SEQ ID NO: 2737101 - RNA, 19 nt, Artificial Sequence
  Description of Artificial Sequence: Synthetic oligonucleotide
ucgggguuggcaaaagccu

SEQ ID NO: 2737102 - RNA, 19 nt, Artificial Sequence
  Description of Artificial Sequence: Synthetic oligonucleotide
agaggcuucagccacucau

SEQ ID NO: 2737103 - RNA, 19 nt, Artificial Sequence
  Description of Artificial Sequence: Synthetic oligonucleotide
uccacguugggaucacucc

SEQ ID NO: 2737104 - RNA, 19 nt, Artificial Sequence
  Description of Artificial Sequence: Synthetic oligonucleotide
guugcggugggcucugagg

SEQ ID NO: 2737105 - RNA, 19 nt, Artificial Sequence
  Description of Artificial Sequence: Synthetic oligonucleotide
uucuuccgaagccuggugu

SEQ ID NO: 2737106 - RNA, 19 nt, Artificial Sequence
  Description of Artificial Sequence: Synthetic oligonucleotide
cugaagaggcuucagccac

SEQ ID NO: 2737107 - RNA, 19 nt, Artificial Sequence
  Description of Artificial Sequence: Synthetic oligonucleotide
cgaucaaagguucaggucc

SEQ ID NO: 2737108 - RNA, 19 nt, Artificial Sequence
  Description of Artificial Sequence: Synthetic oligonucleotide
uugggaucacuccuguagu

SEQ ID NO: 2737109 - RNA, 19 nt, Artificial Sequence
  Description of Artificial Sequence: Synthetic oligonucleotide
gccuccaugucucagggcg

SEQ ID NO: 2737110 - RNA, 19 nt, Artificial Sequence
  Description of Artificial Sequence: Synthetic oligonucleotide
uccagagcggacucucggg

SEQ ID NO: 2737111 - RNA, 19 nt, Artificial Sequence
  Description of Artificial Sequence: Synthetic oligonucleotide
aggaucugcagagccaugg

SEQ ID NO: 2737112 - RNA, 19 nt, Artificial Sequence
  Description of Artificial Sequence: Synthetic oligonucleotide
aauagcugaagaggcuuca

SEQ ID NO: 2737113 - RNA, 19 nt, Artificial Sequence
  Description of Artificial Sequence: Synthetic oligonucleotide
ucccuguucuagaagggac

SEQ ID NO: 2737114 - RNA, 19 nt, Artificial Sequence
  Description of Artificial Sequence: Synthetic oligonucleotide
agagcggacucucggguuc

SEQ ID NO: 2737115 - RNA, 19 nt, Artificial Sequence
  Description of Artificial Sequence: Synthetic oligonucleotide
aggaaggaguagacgaagc

SEQ ID NO: 2737116 - RNA, 19 nt, Artificial Sequence
  Description of Artificial Sequence: Synthetic oligonucleotide
gaggccuccaugucucagg

SEQ ID NO: 2737117 - RNA, 19 nt, Artificial Sequence
  Description of Artificial Sequence: Synthetic oligonucleotide
gaguagacgaagcccagga

SEQ ID NO: 2737118 - RNA, 19 nt, Artificial Sequence
  Description of Artificial Sequence: Synthetic oligonucleotide
uccaucccuguucuagaag

SEQ ID NO: 2737119 - RNA, 19 nt, Artificial Sequence
  Description of Artificial Sequence: Synthetic oligonucleotide
cucggguucaucuugccca

SEQ ID NO: 2737120 - RNA, 19 nt, Artificial Sequence
  Description of Artificial Sequence: Synthetic oligonucleotide
aggaccagaguccaucccu

SEQ ID NO: 2737121 - RNA, 19 nt, Artificial Sequence
  Description of Artificial Sequence: Synthetic oligonucleotide
ucucggguucaucuugccc

SEQ ID NO: 2737122 - RNA, 19 nt, Artificial Sequence
  Description of Artificial Sequence: Synthetic oligonucleotide
ugggcucugaggcagcgcu

SEQ ID NO: 2737123 - RNA, 19 nt, Artificial Sequence
  Description of Artificial Sequence: Synthetic oligonucleotide
uguaguacuggaggccucc

SEQ ID NO: 2737124 - RNA, 19 nt, Artificial Sequence
  Description of Artificial Sequence: Synthetic oligonucleotide
gaagcccaggaagaggaag

SEQ ID NO: 2737125 - RNA, 19 nt, Artificial Sequence
  Description of Artificial Sequence: Synthetic oligonucleotide
aguccccagguucagccuc

SEQ ID NO: 2737126 - RNA, 19 nt, Artificial Sequence
  Description of Artificial Sequence: Synthetic oligonucleotide
gaucaaagguucagguccc

SEQ ID NO: 2737127 - RNA, 19 nt, Artificial Sequence
  Description of Artificial Sequence: Synthetic oligonucleotide
gacucucggguucaucuug

SEQ ID NO: 2737128 - RNA, 19 nt, Artificial Sequence
  Description of Artificial Sequence: Synthetic oligonucleotide
acuggaggccuccaugucu

SEQ ID NO: 2737129 - RNA, 19 nt, Artificial Sequence
  Description of Artificial Sequence: Synthetic oligonucleotide
ugccaucccagcacuuagg

SEQ ID NO: 2737130 - RNA, 19 nt, Artificial Sequence
  Description of Artificial Sequence: Synthetic oligonucleotide
aucaugguggggugcaugu

SEQ ID NO: 2737131 - RNA, 19 nt, Artificial Sequence
  Description of Artificial Sequence: Synthetic oligonucleotide
gaggcagcgcuccacguug

SEQ ID NO: 2737132 - RNA, 19 nt, Artificial Sequence
  Description of Artificial Sequence: Synthetic oligonucleotide
cuccaugucguugcggugg

SEQ ID NO: 2737133 - RNA, 19 nt, Artificial Sequence
  Description of Artificial Sequence: Synthetic oligonucleotide
uccaugucguugcgguggg

SEQ ID NO: 2737134 - RNA, 19 nt, Artificial Sequence
  Description of Artificial Sequence: Synthetic oligonucleotide
gagacacaggcgaacuggg

SEQ ID NO: 2737135 - RNA, 19 nt, Artificial Sequence
  Description of Artificial Sequence: Synthetic oligonucleotide
caucccuguucuagaaggg

SEQ ID NO: 2737136 - RNA, 19 nt, Artificial Sequence
  Description of Artificial Sequence: Synthetic oligonucleotide
aagggguagauagucucca

SEQ ID NO: 2737137 - RNA, 19 nt, Artificial Sequence
  Description of Artificial Sequence: Synthetic oligonucleotide
aucuugcccagguaggcca

SEQ ID NO: 2737138 - RNA, 19 nt, Artificial Sequence
  Description of Artificial Sequence: Synthetic oligonucleotide
gaagggguagauagucucc

SEQ ID NO: 2737139 - RNA, 19 nt, Artificial Sequence
  Description of Artificial Sequence: Synthetic oligonucleotide
agggacaccaaguccccag

SEQ ID NO: 2737140 - RNA, 19 nt, Artificial Sequence
  Description of Artificial Sequence: Synthetic oligonucleotide
ugucucagggcguccucgg

SEQ ID NO: 2737141 - RNA, 19 nt, Artificial Sequence
  Description of Artificial Sequence: Synthetic oligonucleotide
ggagacacaggcgaacugg

SEQ ID NO: 2737142 - RNA, 19 nt, Artificial Sequence
  Description of Artificial Sequence: Synthetic oligonucleotide
gcucgugaggacaacaagg

SEQ ID NO: 2737143 - RNA, 19 nt, Artificial Sequence
  Description of Artificial Sequence: Synthetic oligonucleotide
uaggccaccguguguacca

SEQ ID NO: 2737144 - RNA, 19 nt, Artificial Sequence
  Description of Artificial Sequence: Synthetic oligonucleotide
gacgaagcccaggaagagg

SEQ ID NO: 2737145 - RNA, 19 nt, Artificial Sequence
  Description of Artificial Sequence: Synthetic oligonucleotide
cucgugaggacaacaagga

SEQ ID NO: 2737146 - RNA, 19 nt, Artificial Sequence
  Description of Artificial Sequence: Synthetic oligonucleotide
gccucgauggcuucugucg

SEQ ID NO: 2737147 - RNA, 19 nt, Artificial Sequence
  Description of Artificial Sequence: Synthetic oligonucleotide
gaggaagggguagauaguc

SEQ ID NO: 2737148 - RNA, 19 nt, Artificial Sequence
  Description of Artificial Sequence: Synthetic oligonucleotide
aggccuccaugucucaggg

SEQ ID NO: 2737149 - RNA, 19 nt, Artificial Sequence
  Description of Artificial Sequence: Synthetic oligonucleotide
cuucccagaggaucugcag

SEQ ID NO: 2737150 - RNA, 19 nt, Artificial Sequence
  Description of Artificial Sequence: Synthetic oligonucleotide
gucgacaauguaauagcug

SEQ ID NO: 2737151 - RNA, 19 nt, Artificial Sequence
  Description of Artificial Sequence: Synthetic oligonucleotide
acacaggcgaacugggcca

SEQ ID NO: 2737152 - RNA, 19 nt, Artificial Sequence
  Description of Artificial Sequence: Synthetic oligonucleotide
gaucacuccuguaguacug

SEQ ID NO: 2737153 - RNA, 19 nt, Artificial Sequence
  Description of Artificial Sequence: Synthetic oligonucleotide
ucaaagguucaggucccag

SEQ ID NO: 2737154 - RNA, 19 nt, Artificial Sequence
  Description of Artificial Sequence: Synthetic oligonucleotide
uggagacacaggcgaacug

SEQ ID NO: 2737155 - RNA, 19 nt, Artificial Sequence
  Description of Artificial Sequence: Synthetic oligonucleotide
aucacuccuguaguacugg

SEQ ID NO: 2737156 - RNA, 19 nt, Artificial Sequence
  Description of Artificial Sequence: Synthetic oligonucleotide
gacauaggcuccagagcgg

SEQ ID NO: 2737157 - RNA, 19 nt, Artificial Sequence
  Description of Artificial Sequence: Synthetic oligonucleotide
uucaggucccaggaaggag

SEQ ID NO: 2737158 - RNA, 19 nt, Artificial Sequence
  Description of Artificial Sequence: Synthetic oligonucleotide
gaacugggccaggacauag

SEQ ID NO: 2737159 - RNA, 19 nt, Artificial Sequence
  Description of Artificial Sequence: Synthetic oligonucleotide
uccgaagccugguguagcc

SEQ ID NO: 2737160 - RNA, 19 nt, Artificial Sequence
  Description of Artificial Sequence: Synthetic oligonucleotide
ugucugccaucccagcacu

SEQ ID NO: 2737161 - RNA, 19 nt, Artificial Sequence
  Description of Artificial Sequence: Synthetic oligonucleotide
aagccuucuuccgaagccu

SEQ ID NO: 2737162 - RNA, 19 nt, Artificial Sequence
  Description of Artificial Sequence: Synthetic oligonucleotide
uagucuccaugucguugcg

SEQ ID NO: 2737163 - RNA, 19 nt, Artificial Sequence
  Description of Artificial Sequence: Synthetic oligonucleotide
uccaggcgaucaaagguuc

SEQ ID NO: 2737164 - RNA, 19 nt, Artificial Sequence
  Description of Artificial Sequence: Synthetic oligonucleotide
ucggguucaucuugcccag

SEQ ID NO: 2737165 - RNA, 19 nt, Artificial Sequence
  Description of Artificial Sequence: Synthetic oligonucleotide
ugaagaggcuucagccacu

SEQ ID NO: 2737166 - RNA, 19 nt, Artificial Sequence
  Description of Artificial Sequence: Synthetic oligonucleotide
ucccaggaaggaguagacg

SEQ ID NO: 2737167 - RNA, 19 nt, Artificial Sequence
  Description of Artificial Sequence: Synthetic oligonucleotide
agauggugggccacuuccc

SEQ ID NO: 2737168 - RNA, 19 nt, Artificial Sequence
  Description of Artificial Sequence: Synthetic oligonucleotide
acagauggugggccacuuc

SEQ ID NO: 2737169 - RNA, 19 nt, Artificial Sequence
  Description of Artificial Sequence: Synthetic oligonucleotide
caaaagccuucuuccgaag

SEQ ID NO: 2737170 - RNA, 19 nt, Artificial Sequence
  Description of Artificial Sequence: Synthetic oligonucleotide
acucucggguucaucuugc

SEQ ID NO: 2737171 - RNA, 19 nt, Artificial Sequence
  Description of Artificial Sequence: Synthetic oligonucleotide
cucaucacagauggugggc

SEQ ID NO: 2737172 - RNA, 19 nt, Artificial Sequence
  Description of Artificial Sequence: Synthetic oligonucleotide
ucuuccgaagccuggugua

SEQ ID NO: 2737173 - RNA, 19 nt, Artificial Sequence
  Description of Artificial Sequence: Synthetic oligonucleotide
aucugcagagccauggaga

SEQ ID NO: 2737174 - RNA, 19 nt, Artificial Sequence
  Description of Artificial Sequence: Synthetic oligonucleotide
augucguugcggugggcuc

SEQ ID NO: 2737175 - RNA, 19 nt, Artificial Sequence
  Description of Artificial Sequence: Synthetic oligonucleotide
aacugggccaggacauagg

SEQ ID NO: 2737176 - RNA, 19 nt, Artificial Sequence
  Description of Artificial Sequence: Synthetic oligonucleotide
aggcccaggaccagagucc

SEQ ID NO: 2737177 - RNA, 19 nt, Artificial Sequence
  Description of Artificial Sequence: Synthetic oligonucleotide
aguccaucccuguucuaga

SEQ ID NO: 2737178 - RNA, 19 nt, Artificial Sequence
  Description of Artificial Sequence: Synthetic oligonucleotide
ucgugaggacaacaaggaa

SEQ ID NO: 2737179 - RNA, 19 nt, Artificial Sequence
  Description of Artificial Sequence: Synthetic oligonucleotide
ggaagggguagauagucuc

SEQ ID NO: 2737180 - RNA, 19 nt, Artificial Sequence
  Description of Artificial Sequence: Synthetic oligonucleotide
acgaagcccaggaagagga

SEQ ID NO: 2737181 - RNA, 19 nt, Artificial Sequence
  Description of Artificial Sequence: Synthetic oligonucleotide
agccucgauggcuucuguc

SEQ ID NO: 2737182 - RNA, 19 nt, Artificial Sequence
  Description of Artificial Sequence: Synthetic oligonucleotide
aggacaacaaggaaaugua

SEQ ID NO: 2737183 - RNA, 19 nt, Artificial Sequence
  Description of Artificial Sequence: Synthetic oligonucleotide
cacguugggaucacuccug

SEQ ID NO: 2737184 - RNA, 19 nt, Artificial Sequence
  Description of Artificial Sequence: Synthetic oligonucleotide
auaggcuccagagcggacu

SEQ ID NO: 2737185 - RNA, 19 nt, Artificial Sequence
  Description of Artificial Sequence: Synthetic oligonucleotide
aggcuucagccacucauca

SEQ ID NO: 2737186 - RNA, 19 nt, Artificial Sequence
  Description of Artificial Sequence: Synthetic oligonucleotide
aaguccccagguucagccu

SEQ ID NO: 2737187 - RNA, 19 nt, Artificial Sequence
  Description of Artificial Sequence: Synthetic oligonucleotide
agacacaggcgaacugggc

SEQ ID NO: 2737188 - RNA, 19 nt, Artificial Sequence
  Description of Artificial Sequence: Synthetic oligonucleotide
uguagccugugaugacccc

SEQ ID NO: 2737189 - RNA, 19 nt, Artificial Sequence
  Description of Artificial Sequence: Synthetic oligonucleotide
uggggugcaugucugccau

SEQ ID NO: 2737190 - RNA, 19 nt, Artificial Sequence
  Description of Artificial Sequence: Synthetic oligonucleotide
accguguguaccacacggc

SEQ ID NO: 2737191 - RNA, 19 nt, Artificial Sequence
  Description of Artificial Sequence: Synthetic oligonucleotide
augucucagggcguccucg

SEQ ID NO: 2737192 - RNA, 19 nt, Artificial Sequence
  Description of Artificial Sequence: Synthetic oligonucleotide
aggcgaucaaagguucagg

SEQ ID NO: 2737193 - RNA, 19 nt, Artificial Sequence
  Description of Artificial Sequence: Synthetic oligonucleotide
guaccacacggcucgugag

SEQ ID NO: 2737194 - RNA, 19 nt, Artificial Sequence
  Description of Artificial Sequence: Synthetic oligonucleotide
agaggaucugcagagccau

SEQ ID NO: 2737195 - RNA, 19 nt, Artificial Sequence
  Description of Artificial Sequence: Synthetic oligonucleotide
auagcugaagaggcuucag

SEQ ID NO: 2737196 - RNA, 19 nt, Artificial Sequence
  Description of Artificial Sequence: Synthetic oligonucleotide
aguagacgaagcccaggaa

SEQ ID NO: 2737197 - RNA, 19 nt, Artificial Sequence
  Description of Artificial Sequence: Synthetic oligonucleotide
gaagggacaccaagucccc

SEQ ID NO: 2737198 - RNA, 19 nt, Artificial Sequence
  Description of Artificial Sequence: Synthetic oligonucleotide
agcacuuaggaggcccagg

SEQ ID NO: 2737199 - RNA, 19 nt, Artificial Sequence
  Description of Artificial Sequence: Synthetic oligonucleotide
cuccacguugggaucacuc

SEQ ID NO: 2737200 - RNA, 19 nt, Artificial Sequence
  Description of Artificial Sequence: Synthetic oligonucleotide
gccauggagacacaggcga

SEQ ID NO: 2737201 - RNA, 19 nt, Artificial Sequence
  Description of Artificial Sequence: Synthetic oligonucleotide
cauggagacacaggcgaac

SEQ ID NO: 2737202 - RNA, 19 nt, Artificial Sequence
  Description of Artificial Sequence: Synthetic oligonucleotide
agcgcuccacguugggauc

SEQ ID NO: 2737203 - RNA, 19 nt, Artificial Sequence
  Description of Artificial Sequence: Synthetic oligonucleotide
cugccaucccagcacuuag

SEQ ID NO: 2737204 - RNA, 19 nt, Artificial Sequence
  Description of Artificial Sequence: Synthetic oligonucleotide
ccagaggaucugcagagcc

SEQ ID NO: 2737205 - RNA, 19 nt, Artificial Sequence
  Description of Artificial Sequence: Synthetic oligonucleotide
gguucaggucccaggaagg

SEQ ID NO: 2737206 - RNA, 19 nt, Artificial Sequence
  Description of Artificial Sequence: Synthetic oligonucleotide
gguguagccugugaugacc

SEQ ID NO: 2737207 - RNA, 19 nt, Artificial Sequence
  Description of Artificial Sequence: Synthetic oligonucleotide
caggcgaucaaagguucag

SEQ ID NO: 2737208 - RNA, 19 nt, Artificial Sequence
  Description of Artificial Sequence: Synthetic oligonucleotide
agacgaagcccaggaagag

SEQ ID NO: 2737209 - RNA, 19 nt, Artificial Sequence
  Description of Artificial Sequence: Synthetic oligonucleotide
gugcaugucugccauccca

SEQ ID NO: 2737210 - RNA, 19 nt, Artificial Sequence
  Description of Artificial Sequence: Synthetic oligonucleotide
gcuucugucgacaauguaa

SEQ ID NO: 2737211 - RNA, 19 nt, Artificial Sequence
  Description of Artificial Sequence: Synthetic oligonucleotide
cuucugucgacaauguaau

SEQ ID NO: 2737212 - RNA, 19 nt, Artificial Sequence
  Description of Artificial Sequence: Synthetic oligonucleotide
ccacucaucacagauggug

SEQ ID NO: 2737213 - RNA, 19 nt, Artificial Sequence
  Description of Artificial Sequence: Synthetic oligonucleotide
caacaaggaaauguaucca

SEQ ID NO: 2737214 - RNA, 19 nt, Artificial Sequence
  Description of Artificial Sequence: Synthetic oligonucleotide
ucgauggcuucugucgaca

SEQ ID NO: 2737215 - RNA, 19 nt, Artificial Sequence
  Description of Artificial Sequence: Synthetic oligonucleotide
guguagccugugaugaccc

SEQ ID NO: 2737216 - RNA, 19 nt, Artificial Sequence
  Description of Artificial Sequence: Synthetic oligonucleotide
auggagacacaggcgaacu

SEQ ID NO: 2737217 - RNA, 19 nt, Artificial Sequence
  Description of Artificial Sequence: Synthetic oligonucleotide
aggcgaacugggccaggac

SEQ ID NO: 2737218 - RNA, 19 nt, Artificial Sequence
  Description of Artificial Sequence: Synthetic oligonucleotide
caucuugcccagguaggcc

SEQ ID NO: 2737219 - RNA, 19 nt, Artificial Sequence
  Description of Artificial Sequence: Synthetic oligonucleotide
uuccgaagccugguguagc

SEQ ID NO: 2737220 - RNA, 19 nt, Artificial Sequence
  Description of Artificial Sequence: Synthetic oligonucleotide
cagccacucaucacagaug

SEQ ID NO: 2737221 - RNA, 19 nt, Artificial Sequence
  Description of Artificial Sequence: Synthetic oligonucleotide
ugggaucacuccuguagua

SEQ ID NO: 2737222 - RNA, 19 nt, Artificial Sequence
  Description of Artificial Sequence: Synthetic oligonucleotide
acauaggcuccagagcgga

SEQ ID NO: 2737223 - RNA, 19 nt, Artificial Sequence
  Description of Artificial Sequence: Synthetic oligonucleotide
ugaggcagcgcuccacguu

SEQ ID NO: 2737224 - RNA, 19 nt, Artificial Sequence
  Description of Artificial Sequence: Synthetic oligonucleotide
caugucugccaucccagca

SEQ ID NO: 2737225 - RNA, 19 nt, Artificial Sequence
  Description of Artificial Sequence: Synthetic oligonucleotide
ucagccucgauggcuucug

SEQ ID NO: 2737226 - RNA, 19 nt, Artificial Sequence
  Description of Artificial Sequence: Synthetic oligonucleotide
cuucuuccgaagccuggug

SEQ ID NO: 2737227 - RNA, 19 nt, Artificial Sequence
  Description of Artificial Sequence: Synthetic oligonucleotide
ucuugcccagguaggccac

SEQ ID NO: 2737228 - RNA, 19 nt, Artificial Sequence
  Description of Artificial Sequence: Synthetic oligonucleotide
cccaggaaggaguagacga

SEQ ID NO: 2737229 - RNA, 19 nt, Artificial Sequence
  Description of Artificial Sequence: Synthetic oligonucleotide
cucgauggcuucugucgac

SEQ ID NO: 2737230 - RNA, 19 nt, Artificial Sequence
  Description of Artificial Sequence: Synthetic oligonucleotide
cuuccgaagccugguguag

SEQ ID NO: 2737231 - RNA, 19 nt, Artificial Sequence
  Description of Artificial Sequence: Synthetic oligonucleotide
ugaggacaacaaggaaaug

SEQ ID NO: 2737232 - RNA, 19 nt, Artificial Sequence
  Description of Artificial Sequence: Synthetic oligonucleotide
ggcaaaagccuucuuccga

SEQ ID NO: 2737233 - RNA, 19 nt, Artificial Sequence
  Description of Artificial Sequence: Synthetic oligonucleotide
gguagauagucuccauguc

SEQ ID NO: 2737234 - RNA, 19 nt, Artificial Sequence
  Description of Artificial Sequence: Synthetic oligonucleotide
ugucguugcggugggcucu

SEQ ID NO: 2737235 - RNA, 19 nt, Artificial Sequence
  Description of Artificial Sequence: Synthetic oligonucleotide
agucuccaugucguugcgg

SEQ ID NO: 2737236 - RNA, 19 nt, Artificial Sequence
  Description of Artificial Sequence: Synthetic oligonucleotide
gaggcuucagccacucauc

SEQ ID NO: 2737237 - RNA, 19 nt, Artificial Sequence
  Description of Artificial Sequence: Synthetic oligonucleotide
uucagccacucaucacaga

SEQ ID NO: 2737238 - RNA, 19 nt, Artificial Sequence
  Description of Artificial Sequence: Synthetic oligonucleotide
agguucagccucgauggcu

SEQ ID NO: 2737239 - RNA, 19 nt, Artificial Sequence
  Description of Artificial Sequence: Synthetic oligonucleotide
uacuggaggccuccauguc

SEQ ID NO: 2737240 - RNA, 19 nt, Artificial Sequence
  Description of Artificial Sequence: Synthetic oligonucleotide
ucugccaucccagcacuua

SEQ ID NO: 2737241 - RNA, 19 nt, Artificial Sequence
  Description of Artificial Sequence: Synthetic oligonucleotide
gaaauguauccaggcgauc

SEQ ID NO: 2737242 - RNA, 19 nt, Artificial Sequence
  Description of Artificial Sequence: Synthetic oligonucleotide
aucccuguucuagaaggga

SEQ ID NO: 2737243 - RNA, 19 nt, Artificial Sequence
  Description of Artificial Sequence: Synthetic oligonucleotide
ggcucgugaggacaacaag

SEQ ID NO: 2737244 - RNA, 19 nt, Artificial Sequence
  Description of Artificial Sequence: Synthetic oligonucleotide
uaguacuggaggccuccau

SEQ ID NO: 2737245 - RNA, 19 nt, Artificial Sequence
  Description of Artificial Sequence: Synthetic oligonucleotide
acguugggaucacuccugu

SEQ ID NO: 2737246 - RNA, 19 nt, Artificial Sequence
  Description of Artificial Sequence: Synthetic oligonucleotide
gcugaagaggcuucagcca

SEQ ID NO: 2737247 - RNA, 19 nt, Artificial Sequence
  Description of Artificial Sequence: Synthetic oligonucleotide
gugaggacaacaaggaaau

SEQ ID NO: 2737248 - RNA, 19 nt, Artificial Sequence
  Description of Artificial Sequence: Synthetic oligonucleotide
gucuccaugucguugcggu

SEQ ID NO: 2737249 - RNA, 19 nt, Artificial Sequence
  Description of Artificial Sequence: Synthetic oligonucleotide
cagagccauggagacacag

SEQ ID NO: 2737250 - RNA, 19 nt, Artificial Sequence
  Description of Artificial Sequence: Synthetic oligonucleotide
gaagaggcuucagccacuc

SEQ ID NO: 2737251 - RNA, 19 nt, Artificial Sequence
  Description of Artificial Sequence: Synthetic oligonucleotide
cccagguucagccucgaug

SEQ ID NO: 2737252 - RNA, 19 nt, Artificial Sequence
  Description of Artificial Sequence: Synthetic oligonucleotide
caggaccagaguccauccc

SEQ ID NO: 2737253 - RNA, 19 nt, Artificial Sequence
  Description of Artificial Sequence: Synthetic oligonucleotide
cacuuaggaggcccaggac

SEQ ID NO: 2737254 - RNA, 19 nt, Artificial Sequence
  Description of Artificial Sequence: Synthetic oligonucleotide
guacuggaggccuccaugu

SEQ ID NO: 2737255 - RNA, 19 nt, Artificial Sequence
  Description of Artificial Sequence: Synthetic oligonucleotide
cucucggguucaucuugcc

SEQ ID NO: 2737256 - RNA, 19 nt, Artificial Sequence
  Description of Artificial Sequence: Synthetic oligonucleotide
gggacaccaaguccccagg

SEQ ID NO: 2737257 - RNA, 19 nt, Artificial Sequence
  Description of Artificial Sequence: Synthetic oligonucleotide
gcaaaagccuucuuccgaa

SEQ ID NO: 2737258 - RNA, 19 nt, Artificial Sequence
  Description of Artificial Sequence: Synthetic oligonucleotide
cuguucuagaagggacacc

SEQ ID NO: 2737259 - RNA, 19 nt, Artificial Sequence
  Description of Artificial Sequence: Synthetic oligonucleotide
gucucagggcguccucggg

SEQ ID NO: 2737260 - RNA, 19 nt, Artificial Sequence
  Description of Artificial Sequence: Synthetic oligonucleotide
ggcgaacugggccaggaca

SEQ ID NO: 2737261 - RNA, 19 nt, Artificial Sequence
  Description of Artificial Sequence: Synthetic oligonucleotide
uucugucgacaauguaaua

SEQ ID NO: 2737262 - RNA, 19 nt, Artificial Sequence
  Description of Artificial Sequence: Synthetic oligonucleotide
cagaggaucugcagagcca

SEQ ID NO: 2737263 - RNA, 19 nt, Artificial Sequence
  Description of Artificial Sequence: Synthetic oligonucleotide
uuaggaggcccaggaccag

SEQ ID NO: 2737264 - RNA, 19 nt, Artificial Sequence
  Description of Artificial Sequence: Synthetic oligonucleotide
gggugcaugucugccaucc

SEQ ID NO: 2737265 - RNA, 19 nt, Artificial Sequence
  Description of Artificial Sequence: Synthetic oligonucleotide
agguaggccaccgugugua

SEQ ID NO: 2737266 - RNA, 19 nt, Artificial Sequence
  Description of Artificial Sequence: Synthetic oligonucleotide
agaggaagggguagauagu

SEQ ID NO: 2737267 - RNA, 19 nt, Artificial Sequence
  Description of Artificial Sequence: Synthetic oligonucleotide
auccaggcgaucaaagguu

SEQ ID NO: 2737268 - RNA, 19 nt, Artificial Sequence
  Description of Artificial Sequence: Synthetic oligonucleotide
caccaaguccccagguuca

SEQ ID NO: 2737269 - RNA, 19 nt, Artificial Sequence
  Description of Artificial Sequence: Synthetic oligonucleotide
ugcggugggcucugaggca

SEQ ID NO: 2737270 - RNA, 19 nt, Artificial Sequence
  Description of Artificial Sequence: Synthetic oligonucleotide
ggaguagacgaagcccagg

SEQ ID NO: 2737271 - RNA, 19 nt, Artificial Sequence
  Description of Artificial Sequence: Synthetic oligonucleotide
accacacggcucgugagga

SEQ ID NO: 2737272 - RNA, 19 nt, Artificial Sequence
  Description of Artificial Sequence: Synthetic oligonucleotide
caucaugguggggugcaug

SEQ ID NO: 2737273 - RNA, 19 nt, Artificial Sequence
  Description of Artificial Sequence: Synthetic oligonucleotide
agauagucuccaugucguu

SEQ ID NO: 2737274 - RNA, 19 nt, Artificial Sequence
  Description of Artificial Sequence: Synthetic oligonucleotide
cgugaggacaacaaggaaa

SEQ ID NO: 2737275 - RNA, 19 nt, Artificial Sequence
  Description of Artificial Sequence: Synthetic oligonucleotide
gcgaucaaagguucagguc

SEQ ID NO: 2737276 - RNA, 19 nt, Artificial Sequence
  Description of Artificial Sequence: Synthetic oligonucleotide
cauaggcuccagagcggac

SEQ ID NO: 2737277 - RNA, 19 nt, Artificial Sequence
  Description of Artificial Sequence: Synthetic oligonucleotide
aggaagggguagauagucu

SEQ ID NO: 2737278 - RNA, 19 nt, Artificial Sequence
  Description of Artificial Sequence: Synthetic oligonucleotide
accagaguccaucccuguu

SEQ ID NO: 2737279 - RNA, 19 nt, Artificial Sequence
  Description of Artificial Sequence: Synthetic oligonucleotide
auguauccaggcgaucaaa

SEQ ID NO: 2737280 - RNA, 19 nt, Artificial Sequence
  Description of Artificial Sequence: Synthetic oligonucleotide
aggaguagacgaagcccag

SEQ ID NO: 2737281 - RNA, 19 nt, Artificial Sequence
  Description of Artificial Sequence: Synthetic oligonucleotide
ccagaguccaucccuguuc

SEQ ID NO: 2737282 - RNA, 19 nt, Artificial Sequence
  Description of Artificial Sequence: Synthetic oligonucleotide
gcacuuaggaggcccagga

SEQ ID NO: 2737283 - RNA, 19 nt, Artificial Sequence
  Description of Artificial Sequence: Synthetic oligonucleotide
caucacagauggugggcca

SEQ ID NO: 2737284 - RNA, 19 nt, Artificial Sequence
  Description of Artificial Sequence: Synthetic oligonucleotide
guaggccaccguguguacc

SEQ ID NO: 2737285 - RNA, 19 nt, Artificial Sequence
  Description of Artificial Sequence: Synthetic oligonucleotide
caugguggggugcaugucu

SEQ ID NO: 2737286 - RNA, 19 nt, Artificial Sequence
  Description of Artificial Sequence: Synthetic oligonucleotide
gaagaggaagggguagaua

SEQ ID NO: 2737287 - RNA, 19 nt, Artificial Sequence
  Description of Artificial Sequence: Synthetic oligonucleotide
acuucccagaggaucugca

SEQ ID NO: 2737288 - RNA, 19 nt, Artificial Sequence
  Description of Artificial Sequence: Synthetic oligonucleotide
cuguaguacuggaggccuc

SEQ ID NO: 2737289 - RNA, 19 nt, Artificial Sequence
  Description of Artificial Sequence: Synthetic oligonucleotide
gggaucacuccuguaguac

SEQ ID NO: 2737290 - RNA, 19 nt, Artificial Sequence
  Description of Artificial Sequence: Synthetic oligonucleotide
aagccugguguagccugug

SEQ ID NO: 2737291 - RNA, 19 nt, Artificial Sequence
  Description of Artificial Sequence: Synthetic oligonucleotide
ccaggaccagaguccaucc

SEQ ID NO: 2737292 - RNA, 19 nt, Artificial Sequence
  Description of Artificial Sequence: Synthetic oligonucleotide
accaaguccccagguucag

SEQ ID NO: 2737293 - RNA, 19 nt, Artificial Sequence
  Description of Artificial Sequence: Synthetic oligonucleotide
uccaugucucagggcgucc

SEQ ID NO: 2737294 - RNA, 19 nt, Artificial Sequence
  Description of Artificial Sequence: Synthetic oligonucleotide
guucaggucccaggaagga

SEQ ID NO: 2737295 - RNA, 19 nt, Artificial Sequence
  Description of Artificial Sequence: Synthetic oligonucleotide
ggcgaucaaagguucaggu

SEQ ID NO: 2737296 - RNA, 19 nt, Artificial Sequence
  Description of Artificial Sequence: Synthetic oligonucleotide
guggggugcaugucugcca

SEQ ID NO: 2737297 - RNA, 19 nt, Artificial Sequence
  Description of Artificial Sequence: Synthetic oligonucleotide
uccucgggguuggcaaaag

SEQ ID NO: 2737298 - RNA, 19 nt, Artificial Sequence
  Description of Artificial Sequence: Synthetic oligonucleotide
cagguucagccucgauggc

SEQ ID NO: 2737299 - RNA, 19 nt, Artificial Sequence
  Description of Artificial Sequence: Synthetic oligonucleotide
gguggggugcaugucugcc

SEQ ID NO: 2737300 - RNA, 19 nt, Artificial Sequence
  Description of Artificial Sequence: Synthetic oligonucleotide
ccuguucuagaagggacac

SEQ ID NO: 2737301 - RNA, 19 nt, Artificial Sequence
  Description of Artificial Sequence: Synthetic oligonucleotide
gucccaggaaggaguagac

SEQ ID NO: 2737302 - RNA, 19 nt, Artificial Sequence
  Description of Artificial Sequence: Synthetic oligonucleotide
ggugggccacuucccagag

SEQ ID NO: 2737303 - RNA, 19 nt, Artificial Sequence
  Description of Artificial Sequence: Synthetic oligonucleotide
guccaucccuguucuagaa

SEQ ID NO: 2737304 - RNA, 19 nt, Artificial Sequence
  Description of Artificial Sequence: Synthetic oligonucleotide
ggcucugaggcagcgcucc

SEQ ID NO: 2737305 - RNA, 19 nt, Artificial Sequence
  Description of Artificial Sequence: Synthetic oligonucleotide
gccaucccagcacuuagga

SEQ ID NO: 2737306 - RNA, 19 nt, Artificial Sequence
  Description of Artificial Sequence: Synthetic oligonucleotide
agccugguguagccuguga

SEQ ID NO: 2737307 - RNA, 19 nt, Artificial Sequence
  Description of Artificial Sequence: Synthetic oligonucleotide
ggaucacuccuguaguacu

SEQ ID NO: 2737308 - RNA, 19 nt, Artificial Sequence
  Description of Artificial Sequence: Synthetic oligonucleotide
agggcguccucgggguugg

SEQ ID NO: 2737309 - RNA, 19 nt, Artificial Sequence
  Description of Artificial Sequence: Synthetic oligonucleotide
cacacggcucgugaggaca

SEQ ID NO: 2737310 - RNA, 19 nt, Artificial Sequence
  Description of Artificial Sequence: Synthetic oligonucleotide
agccuucuuccgaagccug

SEQ ID NO: 2737311 - RNA, 19 nt, Artificial Sequence
  Description of Artificial Sequence: Synthetic oligonucleotide
acggcucgugaggacaaca

SEQ ID NO: 2737312 - RNA, 19 nt, Artificial Sequence
  Description of Artificial Sequence: Synthetic oligonucleotide
gacaccaaguccccagguu

SEQ ID NO: 2737313 - RNA, 19 nt, Artificial Sequence
  Description of Artificial Sequence: Synthetic oligonucleotide
aucaaagguucagguccca

SEQ ID NO: 2737314 - RNA, 19 nt, Artificial Sequence
  Description of Artificial Sequence: Synthetic oligonucleotide
cuccaugucucagggcguc

SEQ ID NO: 2737315 - RNA, 19 nt, Artificial Sequence
  Description of Artificial Sequence: Synthetic oligonucleotide
uggaggccuccaugucuca

SEQ ID NO: 2737316 - RNA, 19 nt, Artificial Sequence
  Description of Artificial Sequence: Synthetic oligonucleotide
ggaccagaguccaucccug

SEQ ID NO: 2737317 - RNA, 19 nt, Artificial Sequence
  Description of Artificial Sequence: Synthetic oligonucleotide
cucugaggcagcgcuccac

SEQ ID NO: 2737318 - RNA, 19 nt, Artificial Sequence
  Description of Artificial Sequence: Synthetic oligonucleotide
gcaugucugccaucccagc

SEQ ID NO: 2737319 - RNA, 19 nt, Artificial Sequence
  Description of Artificial Sequence: Synthetic oligonucleotide
ugcccagguaggccaccgu

SEQ ID NO: 2737320 - RNA, 19 nt, Artificial Sequence
  Description of Artificial Sequence: Synthetic oligonucleotide
cacaggcgaacugggccag

SEQ ID NO: 2737321 - RNA, 19 nt, Artificial Sequence
  Description of Artificial Sequence: Synthetic oligonucleotide
gaggaucugcagagccaug

SEQ ID NO: 2737322 - RNA, 19 nt, Artificial Sequence
  Description of Artificial Sequence: Synthetic oligonucleotide
ggaucugcagagccaugga

SEQ ID NO: 2737323 - RNA, 19 nt, Artificial Sequence
  Description of Artificial Sequence: Synthetic oligonucleotide
gcccagguaggccaccgug

SEQ ID NO: 2737324 - RNA, 19 nt, Artificial Sequence
  Description of Artificial Sequence: Synthetic oligonucleotide
cagaguccaucccuguucu

SEQ ID NO: 2737325 - RNA, 19 nt, Artificial Sequence
  Description of Artificial Sequence: Synthetic oligonucleotide
ggugcaugucugccauccc

SEQ ID NO: 2737326 - RNA, 19 nt, Artificial Sequence
  Description of Artificial Sequence: Synthetic oligonucleotide
ccagguaggccaccgugug

SEQ ID NO: 2737327 - RNA, 19 nt, Artificial Sequence
  Description of Artificial Sequence: Synthetic oligonucleotide
cuugcccagguaggccacc

SEQ ID NO: 2737328 - RNA, 19 nt, Artificial Sequence
  Description of Artificial Sequence: Synthetic oligonucleotide
cgaagccugguguagccug

SEQ ID NO: 2737329 - RNA, 19 nt, Artificial Sequence
  Description of Artificial Sequence: Synthetic oligonucleotide
aggccaccguguguaccac

SEQ ID NO: 2737330 - RNA, 19 nt, Artificial Sequence
  Description of Artificial Sequence: Synthetic oligonucleotide
uguguaccacacggcucgu

SEQ ID NO: 2737331 - RNA, 19 nt, Artificial Sequence
  Description of Artificial Sequence: Synthetic oligonucleotide
caugucguugcggugggcu

SEQ ID NO: 2737332 - RNA, 19 nt, Artificial Sequence
  Description of Artificial Sequence: Synthetic oligonucleotide
ggaaauguauccaggcgau

SEQ ID NO: 2737333 - RNA, 19 nt, Artificial Sequence
  Description of Artificial Sequence: Synthetic oligonucleotide
cagcacuuaggaggcccag

SEQ ID NO: 2737334 - RNA, 19 nt, Artificial Sequence
  Description of Artificial Sequence: Synthetic oligonucleotide
aggucccaggaaggaguag

SEQ ID NO: 2737335 - RNA, 19 nt, Artificial Sequence
  Description of Artificial Sequence: Synthetic oligonucleotide
guucagccucgauggcuuc

SEQ ID NO: 2737336 - RNA, 19 nt, Artificial Sequence
  Description of Artificial Sequence: Synthetic oligonucleotide
gaccagaguccaucccugu

SEQ ID NO: 2737337 - RNA, 19 nt, Artificial Sequence
  Description of Artificial Sequence: Synthetic oligonucleotide
acaggcgaacugggccagg

SEQ ID NO: 2737338 - RNA, 19 nt, Artificial Sequence
  Description of Artificial Sequence: Synthetic oligonucleotide
gccuucuuccgaagccugg

SEQ ID NO: 2737339 - RNA, 19 nt, Artificial Sequence
  Description of Artificial Sequence: Synthetic oligonucleotide
cagggcguccucgggguug

SEQ ID NO: 2737340 - RNA, 19 nt, Artificial Sequence
  Description of Artificial Sequence: Synthetic oligonucleotide
gcggugggcucugaggcag

SEQ ID NO: 2737341 - RNA, 19 nt, Artificial Sequence
  Description of Artificial Sequence: Synthetic oligonucleotide
gccaccguguguaccacac

SEQ ID NO: 2737342 - RNA, 19 nt, Artificial Sequence
  Description of Artificial Sequence: Synthetic oligonucleotide
aggcagcgcuccacguugg

SEQ ID NO: 2737343 - RNA, 19 nt, Artificial Sequence
  Description of Artificial Sequence: Synthetic oligonucleotide
ggcagcgcuccacguuggg

SEQ ID NO: 2737344 - RNA, 19 nt, Artificial Sequence
  Description of Artificial Sequence: Synthetic oligonucleotide
guaguacuggaggccucca

SEQ ID NO: 2737345 - RNA, 19 nt, Artificial Sequence
  Description of Artificial Sequence: Synthetic oligonucleotide
ggaggccuccaugucucag

SEQ ID NO: 2737346 - RNA, 19 nt, Artificial Sequence
  Description of Artificial Sequence: Synthetic oligonucleotide
cagcgcuccacguugggau

SEQ ID NO: 2737347 - RNA, 19 nt, Artificial Sequence
  Description of Artificial Sequence: Synthetic oligonucleotide
guguaccacacggcucgug

SEQ ID NO: 2737348 - RNA, 19 nt, Artificial Sequence
  Description of Artificial Sequence: Synthetic oligonucleotide
guucuagaagggacaccaa

SEQ ID NO: 2737349 - RNA, 19 nt, Artificial Sequence
  Description of Artificial Sequence: Synthetic oligonucleotide
ccucgggguuggcaaaagc

SEQ ID NO: 2737350 - RNA, 19 nt, Artificial Sequence
  Description of Artificial Sequence: Synthetic oligonucleotide
agaguccaucccuguucua

SEQ ID NO: 2737351 - RNA, 19 nt, Artificial Sequence
  Description of Artificial Sequence: Synthetic oligonucleotide
cguguguaccacacggcuc

SEQ ID NO: 2737352 - RNA, 19 nt, Artificial Sequence
  Description of Artificial Sequence: Synthetic oligonucleotide
cucagggcguccucggggu

SEQ ID NO: 2737353 - RNA, 19 nt, Artificial Sequence
  Description of Artificial Sequence: Synthetic oligonucleotide
gggguuggcaaaagccuuc

SEQ ID NO: 2737354 - RNA, 19 nt, Artificial Sequence
  Description of Artificial Sequence: Synthetic oligonucleotide
gguaggccaccguguguac

SEQ ID NO: 2737355 - RNA, 19 nt, Artificial Sequence
  Description of Artificial Sequence: Synthetic oligonucleotide
cccaggaccagaguccauc

SEQ ID NO: 2737356 - RNA, 19 nt, Artificial Sequence
  Description of Artificial Sequence: Synthetic oligonucleotide
gucguugcggugggcucug

SEQ ID NO: 2737357 - RNA, 19 nt, Artificial Sequence
  Description of Artificial Sequence: Synthetic oligonucleotide
ccaggaaggaguagacgaa

SEQ ID NO: 2737358 - RNA, 19 nt, Artificial Sequence
  Description of Artificial Sequence: Synthetic oligonucleotide
gaagccugguguagccugu

SEQ ID NO: 2737359 - RNA, 19 nt, Artificial Sequence
  Description of Artificial Sequence: Synthetic oligonucleotide
gagcggacucucggguuca

SEQ ID NO: 2737360 - RNA, 19 nt, Artificial Sequence
  Description of Artificial Sequence: Synthetic oligonucleotide
gcuccagagcggacucucg

SEQ ID NO: 2737361 - RNA, 19 nt, Artificial Sequence
  Description of Artificial Sequence: Synthetic oligonucleotide
ccaccguguguaccacacg

SEQ ID NO: 2737362 - RNA, 19 nt, Artificial Sequence
  Description of Artificial Sequence: Synthetic oligonucleotide
acacggcucgugaggacaa

SEQ ID NO: 2737363 - RNA, 19 nt, Artificial Sequence
  Description of Artificial Sequence: Synthetic oligonucleotide
gcguccucgggguuggcaa

SEQ ID NO: 2737364 - RNA, 19 nt, Artificial Sequence
  Description of Artificial Sequence: Synthetic oligonucleotide
gugggcucugaggcagcgc

SEQ ID NO: 2737365 - RNA, 19 nt, Artificial Sequence
  Description of Artificial Sequence: Synthetic oligonucleotide
caggcgaacugggccagga

SEQ ID NO: 2737366 - RNA, 19 nt, Artificial Sequence
  Description of Artificial Sequence: Synthetic oligonucleotide
ggacaacaaggaaauguau

SEQ ID NO: 2737367 - RNA, 19 nt, Artificial Sequence
  Description of Artificial Sequence: Synthetic oligonucleotide
gccacuucccagaggaucu

SEQ ID NO: 2737368 - RNA, 19 nt, Artificial Sequence
  Description of Artificial Sequence: Synthetic oligonucleotide
ggccuccaugucucagggc

SEQ ID NO: 2737369 - RNA, 19 nt, Artificial Sequence
  Description of Artificial Sequence: Synthetic oligonucleotide
gggccaggacauaggcucc

SEQ ID NO: 2737370 - RNA, 19 nt, Artificial Sequence
  Description of Artificial Sequence: Synthetic oligonucleotide
uccccagguucagccucga

SEQ ID NO: 2737371 - RNA, 19 nt, Artificial Sequence
  Description of Artificial Sequence: Synthetic oligonucleotide
ccaaguccccagguucagc

SEQ ID NO: 2737372 - RNA, 19 nt, Artificial Sequence
  Description of Artificial Sequence: Synthetic oligonucleotide
cugcagagccauggagaca

SEQ ID NO: 2737373 - RNA, 19 nt, Artificial Sequence
  Description of Artificial Sequence: Synthetic oligonucleotide
ggcuucugucgacaaugua

SEQ ID NO: 2737374 - RNA, 19 nt, Artificial Sequence
  Description of Artificial Sequence: Synthetic oligonucleotide
ggacaccaaguccccaggu

SEQ ID NO: 2737375 - RNA, 19 nt, Artificial Sequence
  Description of Artificial Sequence: Synthetic oligonucleotide
cacggcucgugaggacaac

SEQ ID NO: 2737376 - RNA, 19 nt, Artificial Sequence
  Description of Artificial Sequence: Synthetic oligonucleotide
ggcccaggaccagagucca

SEQ ID NO: 2737377 - RNA, 19 nt, Artificial Sequence
  Description of Artificial Sequence: Synthetic oligonucleotide
gccaggacauaggcuccag

SEQ ID NO: 2737378 - RNA, 19 nt, Artificial Sequence
  Description of Artificial Sequence: Synthetic oligonucleotide
ggaagaggaagggguagau

SEQ ID NO: 2737379 - RNA, 19 nt, Artificial Sequence
  Description of Artificial Sequence: Synthetic oligonucleotide
gguucagccucgauggcuu

SEQ ID NO: 2737380 - RNA, 19 nt, Artificial Sequence
  Description of Artificial Sequence: Synthetic oligonucleotide
cugaggcagcgcuccacgu

SEQ ID NO: 2737381 - RNA, 19 nt, Artificial Sequence
  Description of Artificial Sequence: Synthetic oligonucleotide
guccucgggguuggcaaaa

SEQ ID NO: 2737382 - RNA, 19 nt, Artificial Sequence
  Description of Artificial Sequence: Synthetic oligonucleotide
cgacaauguaauagcugaa

SEQ ID NO: 2737383 - RNA, 19 nt, Artificial Sequence
  Description of Artificial Sequence: Synthetic oligonucleotide
cggacucucggguucaucu

SEQ ID NO: 2737384 - RNA, 19 nt, Artificial Sequence
  Description of Artificial Sequence: Synthetic oligonucleotide
ccacguugggaucacuccu

SEQ ID NO: 2737385 - RNA, 19 nt, Artificial Sequence
  Description of Artificial Sequence: Synthetic oligonucleotide
ccauggagacacaggcgaa

SEQ ID NO: 2737386 - RNA, 19 nt, Artificial Sequence
  Description of Artificial Sequence: Synthetic oligonucleotide
ccguguguaccacacggcu

SEQ ID NO: 2737387 - RNA, 19 nt, Artificial Sequence
  Description of Artificial Sequence: Synthetic oligonucleotide
gccugguguagccugugau

SEQ ID NO: 2737388 - RNA, 19 nt, Artificial Sequence
  Description of Artificial Sequence: Synthetic oligonucleotide
cagguaggccaccgugugu

SEQ ID NO: 2737389 - RNA, 19 nt, Artificial Sequence
  Description of Artificial Sequence: Synthetic oligonucleotide
ccaggacauaggcuccaga

SEQ ID NO: 2737390 - RNA, 19 nt, Artificial Sequence
  Description of Artificial Sequence: Synthetic oligonucleotide
gcgaacugggccaggacau

SEQ ID NO: 2737391 - RNA, 19 nt, Artificial Sequence
  Description of Artificial Sequence: Synthetic oligonucleotide
ggccaccguguguaccaca

SEQ ID NO: 2737392 - RNA, 19 nt, Artificial Sequence
  Description of Artificial Sequence: Synthetic oligonucleotide
cagagcggacucucggguu

SEQ ID NO: 2737393 - RNA, 19 nt, Artificial Sequence
  Description of Artificial Sequence: Synthetic oligonucleotide
ggguuggcaaaagccuucu

SEQ ID NO: 2737394 - RNA, 19 nt, Artificial Sequence
  Description of Artificial Sequence: Synthetic oligonucleotide
ggccaggacauaggcucca

SEQ ID NO: 2737395 - RNA, 19 nt, Artificial Sequence
  Description of Artificial Sequence: Synthetic oligonucleotide
ucguugcggugggcucuga

SEQ ID NO: 2737396 - RNA, 19 nt, Artificial Sequence
  Description of Artificial Sequence: Synthetic oligonucleotide
ggggugcaugucugccauc

SEQ ID NO: 2737397 - RNA, 19 nt, Artificial Sequence
  Description of Artificial Sequence: Synthetic oligonucleotide
ccagagcggacucucgggu

SEQ ID NO: 2737398 - RNA, 19 nt, Artificial Sequence
  Description of Artificial Sequence: Synthetic oligonucleotide
ggacucucggguucaucuu

SEQ ID NO: 2737399 - RNA, 19 nt, Artificial Sequence
  Description of Artificial Sequence: Synthetic oligonucleotide
ggcguccucgggguuggca

SEQ ID NO: 2737400 - RNA, 19 nt, Artificial Sequence
  Description of Artificial Sequence: Synthetic oligonucleotide
cccagguaggccaccgugu

SEQ ID NO: 2737401 - RNA, 19 nt, Artificial Sequence
  Description of Artificial Sequence: Synthetic oligonucleotide
gcgcuccacguugggauca

SEQ ID NO: 2737402 - RNA, 19 nt, Artificial Sequence
  Description of Artificial Sequence: Synthetic oligonucleotide
gcucugaggcagcgcucca

SEQ ID NO: 2737403 - RNA, 19 nt, Artificial Sequence
  Description of Artificial Sequence: Synthetic oligonucleotide
agcggacucucggguucau

SEQ ID NO: 2737404 - RNA, 19 nt, Artificial Sequence
  Description of Artificial Sequence: Synthetic oligonucleotide
ccuucuuccgaagccuggu

SEQ ID NO: 2737405 - RNA, 19 nt, Artificial Sequence
  Description of Artificial Sequence: Synthetic oligonucleotide
cggcucgugaggacaacaa

SEQ ID NO: 2737406 - RNA, 19 nt, Artificial Sequence
  Description of Artificial Sequence: Synthetic oligonucleotide
ggaggcccaggaccagagu

SEQ ID NO: 2737407 - RNA, 19 nt, Artificial Sequence
  Description of Artificial Sequence: Synthetic oligonucleotide
gguuggcaaaagccuucuu

SEQ ID NO: 2737408 - RNA, 19 nt, Artificial Sequence
  Description of Artificial Sequence: Synthetic oligonucleotide
gggcucugaggcagcgcuc

SEQ ID NO: 2737409 - RNA, 19 nt, Artificial Sequence
  Description of Artificial Sequence: Synthetic oligonucleotide
cagccucgauggcuucugu

SEQ ID NO: 2737410 - RNA, 19 nt, Artificial Sequence
  Description of Artificial Sequence: Synthetic oligonucleotide
cacagauggugggccacuu

SEQ ID NO: 2737411 - RNA, 19 nt, Artificial Sequence
  Description of Artificial Sequence: Synthetic oligonucleotide
ccuccaugucucagggcgu

SEQ ID NO: 2737412 - RNA, 19 nt, Artificial Sequence
  Description of Artificial Sequence: Synthetic oligonucleotide
gcggacucucggguucauc

SEQ ID NO: 2737413 - RNA, 19 nt, Artificial Sequence
  Description of Artificial Sequence: Synthetic oligonucleotide
cggguucaucuugcccagg

SEQ ID NO: 2737414 - RNA, 19 nt, Artificial Sequence
  Description of Artificial Sequence: Synthetic oligonucleotide
ccaugucucagggcguccu

SEQ ID NO: 2737415 - RNA, 19 nt, Artificial Sequence
  Description of Artificial Sequence: Synthetic oligonucleotide
cgaagcccaggaagaggaa

SEQ ID NO: 2737416 - RNA, 19 nt, Artificial Sequence
  Description of Artificial Sequence: Synthetic oligonucleotide
gcagagccauggagacaca

SEQ ID NO: 2737417 - RNA, 19 nt, Artificial Sequence
  Description of Artificial Sequence: Synthetic oligonucleotide
gucugccaucccagcacuu

SEQ ID NO: 2737418 - RNA, 19 nt, Artificial Sequence
  Description of Artificial Sequence: Synthetic oligonucleotide
cguugggaucacuccugua

SEQ ID NO: 2737419 - RNA, 19 nt, Artificial Sequence
  Description of Artificial Sequence: Synthetic oligonucleotide
cguccucgggguuggcaaa

SEQ ID NO: 2737420 - RNA, 19 nt, Artificial Sequence
  Description of Artificial Sequence: Synthetic oligonucleotide
cgggguuggcaaaagccuu

SEQ ID NO: 2737421 - RNA, 19 nt, Artificial Sequence
  Description of Artificial Sequence: Synthetic oligonucleotide
cgcuccacguugggaucac

SEQ ID NO: 2737422 - RNA, 19 nt, Artificial Sequence
  Description of Artificial Sequence: Synthetic oligonucleotide
ccgaagccugguguagccu

SEQ ID NO: 2737423 - RNA, 19 nt, Artificial Sequence
  Description of Artificial Sequence: Synthetic oligonucleotide
gcuccacguugggaucacu

SEQ ID NO: 2737424 - RNA, 19 nt, Artificial Sequence
  Description of Artificial Sequence: Synthetic oligonucleotide
cgaacugggccaggacaua

SEQ ID NO: 2737425 - RNA, 19 nt, Artificial Sequence
  Description of Artificial Sequence: Synthetic oligonucleotide
gggcguccucgggguuggc

SEQ ID NO: 2737426 - RNA, 19 nt, Artificial Sequence
  Description of Artificial Sequence: Synthetic oligonucleotide
gcccaggaccagaguccau

SEQ ID NO: 2737427 - RNA, 19 nt, Artificial Sequence
  Description of Artificial Sequence: Synthetic oligonucleotide
ccccagguucagccucgau

SEQ ID NO: 2737428 - RNA, 19 nt, Artificial Sequence
  Description of Artificial Sequence: Synthetic oligonucleotide
agugggauaauguucaugc

SEQ ID NO: 2737429 - RNA, 19 nt, Artificial Sequence
  Description of Artificial Sequence: Synthetic oligonucleotide
aagaagccaggcuuuaagc

SEQ ID NO: 2737430 - RNA, 19 nt, Artificial Sequence
  Description of Artificial Sequence: Synthetic oligonucleotide
uucuguagagcccagaugu

SEQ ID NO: 2737431 - RNA, 19 nt, Artificial Sequence
  Description of Artificial Sequence: Synthetic oligonucleotide
uugguauucauccucagac

SEQ ID NO: 2737432 - RNA, 19 nt, Artificial Sequence
  Description of Artificial Sequence: Synthetic oligonucleotide
uuuaagcugcucaucaaag

SEQ ID NO: 2737433 - RNA, 19 nt, Artificial Sequence
  Description of Artificial Sequence: Synthetic oligonucleotide
ugucaccucauuaaccugg

SEQ ID NO: 2737434 - RNA, 19 nt, Artificial Sequence
  Description of Artificial Sequence: Synthetic oligonucleotide
agggauauuaugcauccgg

SEQ ID NO: 2737435 - RNA, 19 nt, Artificial Sequence
  Description of Artificial Sequence: Synthetic oligonucleotide
uauuaugcauccgggaucg

SEQ ID NO: 2737436 - RNA, 19 nt, Artificial Sequence
  Description of Artificial Sequence: Synthetic oligonucleotide
uaugcauccgggaucgacg

SEQ ID NO: 2737437 - RNA, 19 nt, Artificial Sequence
  Description of Artificial Sequence: Synthetic oligonucleotide
aagaguaccugucaccuca

SEQ ID NO: 2737438 - RNA, 19 nt, Artificial Sequence
  Description of Artificial Sequence: Synthetic oligonucleotide
ucuaccuuccggaucacag

SEQ ID NO: 2737439 - RNA, 19 nt, Artificial Sequence
  Description of Artificial Sequence: Synthetic oligonucleotide
auauuaugcauccgggauc

SEQ ID NO: 2737440 - RNA, 19 nt, Artificial Sequence
  Description of Artificial Sequence: Synthetic oligonucleotide
ugugugauguccuuguaga

SEQ ID NO: 2737441 - RNA, 19 nt, Artificial Sequence
  Description of Artificial Sequence: Synthetic oligonucleotide
gaagccuuucucaagaagc

SEQ ID NO: 2737442 - RNA, 19 nt, Artificial Sequence
  Description of Artificial Sequence: Synthetic oligonucleotide
guuuucaugagaccccugg

SEQ ID NO: 2737443 - RNA, 19 nt, Artificial Sequence
  Description of Artificial Sequence: Synthetic oligonucleotide
acagucaucugucgguugc

SEQ ID NO: 2737444 - RNA, 19 nt, Artificial Sequence
  Description of Artificial Sequence: Synthetic oligonucleotide
gacgccaguuuguagaggg

SEQ ID NO: 2737445 - RNA, 19 nt, Artificial Sequence
  Description of Artificial Sequence: Synthetic oligonucleotide
ucagaagccuuucucaaga

SEQ ID NO: 2737446 - RNA, 19 nt, Artificial Sequence
  Description of Artificial Sequence: Synthetic oligonucleotide
auaauguucaugcuuuggu

SEQ ID NO: 2737447 - RNA, 19 nt, Artificial Sequence
  Description of Artificial Sequence: Synthetic oligonucleotide
uuuucaugagaccccuggg

SEQ ID NO: 2737448 - RNA, 19 nt, Artificial Sequence
  Description of Artificial Sequence: Synthetic oligonucleotide
auguucaugcuuugguggc

SEQ ID NO: 2737449 - RNA, 19 nt, Artificial Sequence
  Description of Artificial Sequence: Synthetic oligonucleotide
uuugaaucccauuccggag

SEQ ID NO: 2737450 - RNA, 19 nt, Artificial Sequence
  Description of Artificial Sequence: Synthetic oligonucleotide
aagccuuucucaagaagcc

SEQ ID NO: 2737451 - RNA, 19 nt, Artificial Sequence
  Description of Artificial Sequence: Synthetic oligonucleotide
guagacagggauauuaugc

SEQ ID NO: 2737452 - RNA, 19 nt, Artificial Sequence
  Description of Artificial Sequence: Synthetic oligonucleotide
ucauuaaccugggugacag

SEQ ID NO: 2737453 - RNA, 19 nt, Artificial Sequence
  Description of Artificial Sequence: Synthetic oligonucleotide
auuccggagacuccaaauc

SEQ ID NO: 2737454 - RNA, 19 nt, Artificial Sequence
  Description of Artificial Sequence: Synthetic oligonucleotide
aaguagggcaagcuaggag

SEQ ID NO: 2737455 - RNA, 19 nt, Artificial Sequence
  Description of Artificial Sequence: Synthetic oligonucleotide
acaaaguagggcaagcuag

SEQ ID NO: 2737456 - RNA, 19 nt, Artificial Sequence
  Description of Artificial Sequence: Synthetic oligonucleotide
uugaaucccauuccggaga

SEQ ID NO: 2737457 - RNA, 19 nt, Artificial Sequence
  Description of Artificial Sequence: Synthetic oligonucleotide
uuucaugagaccccugggu

SEQ ID NO: 2737458 - RNA, 19 nt, Artificial Sequence
  Description of Artificial Sequence: Synthetic oligonucleotide
aacaaaguagggcaagcua

SEQ ID NO: 2737459 - RNA, 19 nt, Artificial Sequence
  Description of Artificial Sequence: Synthetic oligonucleotide
uuccggagacuccaaaucc

SEQ ID NO: 2737460 - RNA, 19 nt, Artificial Sequence
  Description of Artificial Sequence: Synthetic oligonucleotide
accucauuaaccuggguga

SEQ ID NO: 2737461 - RNA, 19 nt, Artificial Sequence
  Description of Artificial Sequence: Synthetic oligonucleotide
gauguccuuguagacaggg

SEQ ID NO: 2737462 - RNA, 19 nt, Artificial Sequence
  Description of Artificial Sequence: Synthetic oligonucleotide
ugggguuuucaugagaccc

SEQ ID NO: 2737463 - RNA, 19 nt, Artificial Sequence
  Description of Artificial Sequence: Synthetic oligonucleotide
gaucgacgaacaaaguagg

SEQ ID NO: 2737464 - RNA, 19 nt, Artificial Sequence
  Description of Artificial Sequence: Synthetic oligonucleotide
caaauugguauucauccuc

SEQ ID NO: 2737465 - RNA, 19 nt, Artificial Sequence
  Description of Artificial Sequence: Synthetic oligonucleotide
uguagacagggauauuaug

SEQ ID NO: 2737466 - RNA, 19 nt, Artificial Sequence
  Description of Artificial Sequence: Synthetic oligonucleotide
caaaguagggcaagcuagg

SEQ ID NO: 2737467 - RNA, 19 nt, Artificial Sequence
  Description of Artificial Sequence: Synthetic oligonucleotide
uuccggaucacagucaucu

SEQ ID NO: 2737468 - RNA, 19 nt, Artificial Sequence
  Description of Artificial Sequence: Synthetic oligonucleotide
cagaggcugaucaucaggc

SEQ ID NO: 2737469 - RNA, 19 nt, Artificial Sequence
  Description of Artificial Sequence: Synthetic oligonucleotide
aaacaggcgcuccacaaau

SEQ ID NO: 2737470 - RNA, 19 nt, Artificial Sequence
  Description of Artificial Sequence: Synthetic oligonucleotide
ucgacgaacaaaguagggc

SEQ ID NO: 2737471 - RNA, 19 nt, Artificial Sequence
  Description of Artificial Sequence: Synthetic oligonucleotide
agaagccaggcuuuaagcu

SEQ ID NO: 2737472 - RNA, 19 nt, Artificial Sequence
  Description of Artificial Sequence: Synthetic oligonucleotide
uuaagcugcucaucaaagu

SEQ ID NO: 2737473 - RNA, 19 nt, Artificial Sequence
  Description of Artificial Sequence: Synthetic oligonucleotide
augugugauguccuuguag

SEQ ID NO: 2737474 - RNA, 19 nt, Artificial Sequence
  Description of Artificial Sequence: Synthetic oligonucleotide
uucgaagaguaccugucac

SEQ ID NO: 2737475 - RNA, 19 nt, Artificial Sequence
  Description of Artificial Sequence: Synthetic oligonucleotide
uuucucaagaagccaggcu

SEQ ID NO: 2737476 - RNA, 19 nt, Artificial Sequence
  Description of Artificial Sequence: Synthetic oligonucleotide
ggaucgacgaacaaaguag

SEQ ID NO: 2737477 - RNA, 19 nt, Artificial Sequence
  Description of Artificial Sequence: Synthetic oligonucleotide
guugccaugugugaugucc

SEQ ID NO: 2737478 - RNA, 19 nt, Artificial Sequence
  Description of Artificial Sequence: Synthetic oligonucleotide
agaggcugaucaucaggcc

SEQ ID NO: 2737479 - RNA, 19 nt, Artificial Sequence
  Description of Artificial Sequence: Synthetic oligonucleotide
cacauccuucuguagagcc

SEQ ID NO: 2737480 - RNA, 19 nt, Artificial Sequence
  Description of Artificial Sequence: Synthetic oligonucleotide
ugacaggugucuuucccag

SEQ ID NO: 2737481 - RNA, 19 nt, Artificial Sequence
  Description of Artificial Sequence: Synthetic oligonucleotide
aagcugcucaucaaaguag

SEQ ID NO: 2737482 - RNA, 19 nt, Artificial Sequence
  Description of Artificial Sequence: Synthetic oligonucleotide
aucaaaguagcccuugauu

SEQ ID NO: 2737483 - RNA, 19 nt, Artificial Sequence
  Description of Artificial Sequence: Synthetic oligonucleotide
auuaaccugggugacaggu

SEQ ID NO: 2737484 - RNA, 19 nt, Artificial Sequence
  Description of Artificial Sequence: Synthetic oligonucleotide
agaagccuuucucaagaag

SEQ ID NO: 2737485 - RNA, 19 nt, Artificial Sequence
  Description of Artificial Sequence: Synthetic oligonucleotide
caccucauuaaccugggug

SEQ ID NO: 2737486 - RNA, 19 nt, Artificial Sequence
  Description of Artificial Sequence: Synthetic oligonucleotide
aucacagucaucugucggu

SEQ ID NO: 2737487 - RNA, 19 nt, Artificial Sequence
  Description of Artificial Sequence: Synthetic oligonucleotide
ucgaagaguaccugucacc

SEQ ID NO: 2737488 - RNA, 19 nt, Artificial Sequence
  Description of Artificial Sequence: Synthetic oligonucleotide
gauauuaugcauccgggau

SEQ ID NO: 2737489 - RNA, 19 nt, Artificial Sequence
  Description of Artificial Sequence: Synthetic oligonucleotide
acaaauugguauucauccu

SEQ ID NO: 2737490 - RNA, 19 nt, Artificial Sequence
  Description of Artificial Sequence: Synthetic oligonucleotide
caagaagccaggcuuuaag

SEQ ID NO: 2737491 - RNA, 19 nt, Artificial Sequence
  Description of Artificial Sequence: Synthetic oligonucleotide
uauucauccucagacucca

SEQ ID NO: 2737492 - RNA, 19 nt, Artificial Sequence
  Description of Artificial Sequence: Synthetic oligonucleotide
ggcugugggauuuugguag

SEQ ID NO: 2737493 - RNA, 19 nt, Artificial Sequence
  Description of Artificial Sequence: Synthetic oligonucleotide
ucaucugucgguugccaug

SEQ ID NO: 2737494 - RNA, 19 nt, Artificial Sequence
  Description of Artificial Sequence: Synthetic oligonucleotide
ucagaaauucuuccacauc

SEQ ID NO: 2737495 - RNA, 19 nt, Artificial Sequence
  Description of Artificial Sequence: Synthetic oligonucleotide
ugggagugggauaauguuc

SEQ ID NO: 2737496 - RNA, 19 nt, Artificial Sequence
  Description of Artificial Sequence: Synthetic oligonucleotide
gaucaucaggccucagaag

SEQ ID NO: 2737497 - RNA, 19 nt, Artificial Sequence
  Description of Artificial Sequence: Synthetic oligonucleotide
auugguauucauccucaga

SEQ ID NO: 2737498 - RNA, 19 nt, Artificial Sequence
  Description of Artificial Sequence: Synthetic oligonucleotide
ugugggauuuugguagggg

SEQ ID NO: 2737499 - RNA, 19 nt, Artificial Sequence
  Description of Artificial Sequence: Synthetic oligonucleotide
acaggcgcuccacaaauug

SEQ ID NO: 2737500 - RNA, 19 nt, Artificial Sequence
  Description of Artificial Sequence: Synthetic oligonucleotide
uucaugagaccccuggguu

SEQ ID NO: 2737501 - RNA, 19 nt, Artificial Sequence
  Description of Artificial Sequence: Synthetic oligonucleotide
aguuuguagagggcacugc

SEQ ID NO: 2737502 - RNA, 19 nt, Artificial Sequence
  Description of Artificial Sequence: Synthetic oligonucleotide
agaccccuggguuuggcuc

SEQ ID NO: 2737503 - RNA, 19 nt, Artificial Sequence
  Description of Artificial Sequence: Synthetic oligonucleotide
uuguagacagggauauuau

SEQ ID NO: 2737504 - RNA, 19 nt, Artificial Sequence
  Description of Artificial Sequence: Synthetic oligonucleotide
uccccuucuaccuuccgga

SEQ ID NO: 2737505 - RNA, 19 nt, Artificial Sequence
  Description of Artificial Sequence: Synthetic oligonucleotide
auucgaagaguaccuguca

SEQ ID NO: 2737506 - RNA, 19 nt, Artificial Sequence
  Description of Artificial Sequence: Synthetic oligonucleotide
uccggagacuccaaaucca

SEQ ID NO: 2737507 - RNA, 19 nt, Artificial Sequence
  Description of Artificial Sequence: Synthetic oligonucleotide
ugaaucccauuccggagac

SEQ ID NO: 2737508 - RNA, 19 nt, Artificial Sequence
  Description of Artificial Sequence: Synthetic oligonucleotide
uaccuuccggaucacaguc

SEQ ID NO: 2737509 - RNA, 19 nt, Artificial Sequence
  Description of Artificial Sequence: Synthetic oligonucleotide
gauucgaagaguaccuguc

SEQ ID NO: 2737510 - RNA, 19 nt, Artificial Sequence
  Description of Artificial Sequence: Synthetic oligonucleotide
caugcuuugguggcugugg

SEQ ID NO: 2737511 - RNA, 19 nt, Artificial Sequence
  Description of Artificial Sequence: Synthetic oligonucleotide
aguaccugucaccucauua

SEQ ID NO: 2737512 - RNA, 19 nt, Artificial Sequence
  Description of Artificial Sequence: Synthetic oligonucleotide
ucugucgguugccaugugu

SEQ ID NO: 2737513 - RNA, 19 nt, Artificial Sequence
  Description of Artificial Sequence: Synthetic oligonucleotide
agagggcacugccacagag

SEQ ID NO: 2737514 - RNA, 19 nt, Artificial Sequence
  Description of Artificial Sequence: Synthetic oligonucleotide
gacagggauauuaugcauc

SEQ ID NO: 2737515 - RNA, 19 nt, Artificial Sequence
  Description of Artificial Sequence: Synthetic oligonucleotide
cugucgguugccaugugug

SEQ ID NO: 2737516 - RNA, 19 nt, Artificial Sequence
  Description of Artificial Sequence: Synthetic oligonucleotide
uccacaaauugguauucau

SEQ ID NO: 2737517 - RNA, 19 nt, Artificial Sequence
  Description of Artificial Sequence: Synthetic oligonucleotide
uggacgccaguuuguagag

SEQ ID NO: 2737518 - RNA, 19 nt, Artificial Sequence
  Description of Artificial Sequence: Synthetic oligonucleotide
aaaguagggcaagcuagga

SEQ ID NO: 2737519 - RNA, 19 nt, Artificial Sequence
  Description of Artificial Sequence: Synthetic oligonucleotide
uaccugucaccucauuaac

SEQ ID NO: 2737520 - RNA, 19 nt, Artificial Sequence
  Description of Artificial Sequence: Synthetic oligonucleotide
augcuuugguggcuguggg

SEQ ID NO: 2737521 - RNA, 19 nt, Artificial Sequence
  Description of Artificial Sequence: Synthetic oligonucleotide
guuuggcucagcugccgcg

SEQ ID NO: 2737522 - RNA, 19 nt, Artificial Sequence
  Description of Artificial Sequence: Synthetic oligonucleotide
aacgccgcgaccgccaucu

SEQ ID NO: 2737523 - RNA, 19 nt, Artificial Sequence
  Description of Artificial Sequence: Synthetic oligonucleotide
ugugggcucagaaauucuu

SEQ ID NO: 2737524 - RNA, 19 nt, Artificial Sequence
  Description of Artificial Sequence: Synthetic oligonucleotide
cuguagagcccagaugucc

SEQ ID NO: 2737525 - RNA, 19 nt, Artificial Sequence
  Description of Artificial Sequence: Synthetic oligonucleotide
guauucauccucagacucc

SEQ ID NO: 2737526 - RNA, 19 nt, Artificial Sequence
  Description of Artificial Sequence: Synthetic oligonucleotide
guaccugucaccucauuaa

SEQ ID NO: 2737527 - RNA, 19 nt, Artificial Sequence
  Description of Artificial Sequence: Synthetic oligonucleotide
ucgguugccaugugugaug

SEQ ID NO: 2737528 - RNA, 19 nt, Artificial Sequence
  Description of Artificial Sequence: Synthetic oligonucleotide
cuuucucaagaagccaggc

SEQ ID NO: 2737529 - RNA, 19 nt, Artificial Sequence
  Description of Artificial Sequence: Synthetic oligonucleotide
ucuggacgccaguuuguag

SEQ ID NO: 2737530 - RNA, 19 nt, Artificial Sequence
  Description of Artificial Sequence: Synthetic oligonucleotide
cucucuggacgccaguuug

SEQ ID NO: 2737531 - RNA, 19 nt, Artificial Sequence
  Description of Artificial Sequence: Synthetic oligonucleotide
uuaugcauccgggaucgac

SEQ ID NO: 2737532 - RNA, 19 nt, Artificial Sequence
  Description of Artificial Sequence: Synthetic oligonucleotide
cuggacgccaguuuguaga

SEQ ID NO: 2737533 - RNA, 19 nt, Artificial Sequence
  Description of Artificial Sequence: Synthetic oligonucleotide
aguagcccuugauucgaag

SEQ ID NO: 2737534 - RNA, 19 nt, Artificial Sequence
  Description of Artificial Sequence: Synthetic oligonucleotide
guagggcaagcuaggaggg

SEQ ID NO: 2737535 - RNA, 19 nt, Artificial Sequence
  Description of Artificial Sequence: Synthetic oligonucleotide
cuuuaagcugcucaucaaa

SEQ ID NO: 2737536 - RNA, 19 nt, Artificial Sequence
  Description of Artificial Sequence: Synthetic oligonucleotide
gagacuccaaauccacuuc

SEQ ID NO: 2737537 - RNA, 19 nt, Artificial Sequence
  Description of Artificial Sequence: Synthetic oligonucleotide
cuugauucgaagaguaccu

SEQ ID NO: 2737538 - RNA, 19 nt, Artificial Sequence
  Description of Artificial Sequence: Synthetic oligonucleotide
uugauucgaagaguaccug

SEQ ID NO: 2737539 - RNA, 19 nt, Artificial Sequence
  Description of Artificial Sequence: Synthetic oligonucleotide
cuucuguagagcccagaug

SEQ ID NO: 2737540 - RNA, 19 nt, Artificial Sequence
  Description of Artificial Sequence: Synthetic oligonucleotide
gggauauuaugcauccggg

SEQ ID NO: 2737541 - RNA, 19 nt, Artificial Sequence
  Description of Artificial Sequence: Synthetic oligonucleotide
caggcgcuccacaaauugg

SEQ ID NO: 2737542 - RNA, 19 nt, Artificial Sequence
  Description of Artificial Sequence: Synthetic oligonucleotide
cuuguagacagggauauua

SEQ ID NO: 2737543 - RNA, 19 nt, Artificial Sequence
  Description of Artificial Sequence: Synthetic oligonucleotide
gugucuuucccagcugugg

SEQ ID NO: 2737544 - RNA, 19 nt, Artificial Sequence
  Description of Artificial Sequence: Synthetic oligonucleotide
ccuugauucgaagaguacc

SEQ ID NO: 2737545 - RNA, 19 nt, Artificial Sequence
  Description of Artificial Sequence: Synthetic oligonucleotide
uugccaugugugauguccu

SEQ ID NO: 2737546 - RNA, 19 nt, Artificial Sequence
  Description of Artificial Sequence: Synthetic oligonucleotide
agacagggauauuaugcau

SEQ ID NO: 2737547 - RNA, 19 nt, Artificial Sequence
  Description of Artificial Sequence: Synthetic oligonucleotide
guccccuucuaccuuccgg

SEQ ID NO: 2737548 - RNA, 19 nt, Artificial Sequence
  Description of Artificial Sequence: Synthetic oligonucleotide
ugucgguugccauguguga

SEQ ID NO: 2737549 - RNA, 19 nt, Artificial Sequence
  Description of Artificial Sequence: Synthetic oligonucleotide
acgaacaaaguagggcaag

SEQ ID NO: 2737550 - RNA, 19 nt, Artificial Sequence
  Description of Artificial Sequence: Synthetic oligonucleotide
cucagacuccagaaagcug

SEQ ID NO: 2737551 - RNA, 19 nt, Artificial Sequence
  Description of Artificial Sequence: Synthetic oligonucleotide
cuccaucggacgcagcgcc

SEQ ID NO: 2737552 - RNA, 19 nt, Artificial Sequence
  Description of Artificial Sequence: Synthetic oligonucleotide
aucgacgaacaaaguaggg

SEQ ID NO: 2737553 - RNA, 19 nt, Artificial Sequence
  Description of Artificial Sequence: Synthetic oligonucleotide
gacuccagaaagcuggggu

SEQ ID NO: 2737554 - RNA, 19 nt, Artificial Sequence
  Description of Artificial Sequence: Synthetic oligonucleotide
ccgggaucgacgaacaaag

SEQ ID NO: 2737555 - RNA, 19 nt, Artificial Sequence
  Description of Artificial Sequence: Synthetic oligonucleotide
ucuguagagcccagauguc

SEQ ID NO: 2737556 - RNA, 19 nt, Artificial Sequence
  Description of Artificial Sequence: Synthetic oligonucleotide
ucucuggacgccaguuugu

SEQ ID NO: 2737557 - RNA, 19 nt, Artificial Sequence
  Description of Artificial Sequence: Synthetic oligonucleotide
aggcugaucaucaggccuc

SEQ ID NO: 2737558 - RNA, 19 nt, Artificial Sequence
  Description of Artificial Sequence: Synthetic oligonucleotide
ggcuuuaagcugcucauca

SEQ ID NO: 2737559 - RNA, 19 nt, Artificial Sequence
  Description of Artificial Sequence: Synthetic oligonucleotide
gaaacaggcgcuccacaaa

SEQ ID NO: 2737560 - RNA, 19 nt, Artificial Sequence
  Description of Artificial Sequence: Synthetic oligonucleotide
acuccagaaagcugggguu

SEQ ID NO: 2737561 - RNA, 19 nt, Artificial Sequence
  Description of Artificial Sequence: Synthetic oligonucleotide
ggugacaggugucuuuccc

SEQ ID NO: 2737562 - RNA, 19 nt, Artificial Sequence
  Description of Artificial Sequence: Synthetic oligonucleotide
gagugggauaauguucaug

SEQ ID NO: 2737563 - RNA, 19 nt, Artificial Sequence
  Description of Artificial Sequence: Synthetic oligonucleotide
ggaucacagucaucugucg

SEQ ID NO: 2737564 - RNA, 19 nt, Artificial Sequence
  Description of Artificial Sequence: Synthetic oligonucleotide
uccgggaucgacgaacaaa

SEQ ID NO: 2737565 - RNA, 19 nt, Artificial Sequence
  Description of Artificial Sequence: Synthetic oligonucleotide
ggauauuaugcauccggga

SEQ ID NO: 2737566 - RNA, 19 nt, Artificial Sequence
  Description of Artificial Sequence: Synthetic oligonucleotide
augcauccgggaucgacga

SEQ ID NO: 2737567 - RNA, 19 nt, Artificial Sequence
  Description of Artificial Sequence: Synthetic oligonucleotide
ucccauuccggagacucca

SEQ ID NO: 2737568 - RNA, 19 nt, Artificial Sequence
  Description of Artificial Sequence: Synthetic oligonucleotide
cugggguuuucaugagacc

SEQ ID NO: 2737569 - RNA, 19 nt, Artificial Sequence
  Description of Artificial Sequence: Synthetic oligonucleotide
caaauccacuuccucucug

SEQ ID NO: 2737570 - RNA, 19 nt, Artificial Sequence
  Description of Artificial Sequence: Synthetic oligonucleotide
gaggcugaucaucaggccu

SEQ ID NO: 2737571 - RNA, 19 nt, Artificial Sequence
  Description of Artificial Sequence: Synthetic oligonucleotide
caugagaccccuggguuug

SEQ ID NO: 2737572 - RNA, 19 nt, Artificial Sequence
  Description of Artificial Sequence: Synthetic oligonucleotide
gacaggugucuuucccagc

SEQ ID NO: 2737573 - RNA, 19 nt, Artificial Sequence
  Description of Artificial Sequence: Synthetic oligonucleotide
uuugguggcugugggauuu

SEQ ID NO: 2737574 - RNA, 19 nt, Artificial Sequence
  Description of Artificial Sequence: Synthetic oligonucleotide
guagagcccagaugucccc

SEQ ID NO: 2737575 - RNA, 19 nt, Artificial Sequence
  Description of Artificial Sequence: Synthetic oligonucleotide
cauuaaccugggugacagg

SEQ ID NO: 2737576 - RNA, 19 nt, Artificial Sequence
  Description of Artificial Sequence: Synthetic oligonucleotide
gucaccucauuaaccuggg

SEQ ID NO: 2737577 - RNA, 19 nt, Artificial Sequence
  Description of Artificial Sequence: Synthetic oligonucleotide
acugccacagaggcugauc

SEQ ID NO: 2737578 - RNA, 19 nt, Artificial Sequence
  Description of Artificial Sequence: Synthetic oligonucleotide
ucggacgcagcgccccgcg

SEQ ID NO: 2737579 - RNA, 19 nt, Artificial Sequence
  Description of Artificial Sequence: Synthetic oligonucleotide
ccacaaauugguauucauc

SEQ ID NO: 2737580 - RNA, 19 nt, Artificial Sequence
  Description of Artificial Sequence: Synthetic oligonucleotide
ugcuuugguggcuguggga

SEQ ID NO: 2737581 - RNA, 19 nt, Artificial Sequence
  Description of Artificial Sequence: Synthetic oligonucleotide
ugggugacaggugucuuuc

SEQ ID NO: 2737582 - RNA, 19 nt, Artificial Sequence
  Description of Artificial Sequence: Synthetic oligonucleotide
cugaucaucaggccucaga

SEQ ID NO: 2737583 - RNA, 19 nt, Artificial Sequence
  Description of Artificial Sequence: Synthetic oligonucleotide
ccuuucucaagaagccagg

SEQ ID NO: 2737584 - RNA, 19 nt, Artificial Sequence
  Description of Artificial Sequence: Synthetic oligonucleotide
aggcuuuaagcugcucauc

SEQ ID NO: 2737585 - RNA, 19 nt, Artificial Sequence
  Description of Artificial Sequence: Synthetic oligonucleotide
ggauaauguucaugcuuug

SEQ ID NO: 2737586 - RNA, 19 nt, Artificial Sequence
  Description of Artificial Sequence: Synthetic oligonucleotide
uagggcaagcuaggagggg

SEQ ID NO: 2737587 - RNA, 19 nt, Artificial Sequence
  Description of Artificial Sequence: Synthetic oligonucleotide
gccuuucucaagaagccag

SEQ ID NO: 2737588 - RNA, 19 nt, Artificial Sequence
  Description of Artificial Sequence: Synthetic oligonucleotide
gggagugggauaauguuca

SEQ ID NO: 2737589 - RNA, 19 nt, Artificial Sequence
  Description of Artificial Sequence: Synthetic oligonucleotide
cauccuucuguagagccca

SEQ ID NO: 2737590 - RNA, 19 nt, Artificial Sequence
  Description of Artificial Sequence: Synthetic oligonucleotide
uggcugugggauuuuggua

SEQ ID NO: 2737591 - RNA, 19 nt, Artificial Sequence
  Description of Artificial Sequence: Synthetic oligonucleotide
cacagaggcugaucaucag

SEQ ID NO: 2737592 - RNA, 19 nt, Artificial Sequence
  Description of Artificial Sequence: Synthetic oligonucleotide
aucccauuccggagacucc

SEQ ID NO: 2737593 - RNA, 19 nt, Artificial Sequence
  Description of Artificial Sequence: Synthetic oligonucleotide
uccaucggacgcagcgccc

SEQ ID NO: 2737594 - RNA, 19 nt, Artificial Sequence
  Description of Artificial Sequence: Synthetic oligonucleotide
ugccgcggcccguagcucc

SEQ ID NO: 2737595 - RNA, 19 nt, Artificial Sequence
  Description of Artificial Sequence: Synthetic oligonucleotide
uccggaucacagucaucug

SEQ ID NO: 2737596 - RNA, 19 nt, Artificial Sequence
  Description of Artificial Sequence: Synthetic oligonucleotide
gcucgcaacgccgcgaccg

SEQ ID NO: 2737597 - RNA, 19 nt, Artificial Sequence
  Description of Artificial Sequence: Synthetic oligonucleotide
ucaagaagccaggcuuuaa

SEQ ID NO: 2737598 - RNA, 19 nt, Artificial Sequence
  Description of Artificial Sequence: Synthetic oligonucleotide
aaccugggugacagguguc

SEQ ID NO: 2737599 - RNA, 19 nt, Artificial Sequence
  Description of Artificial Sequence: Synthetic oligonucleotide
caguuuguagagggcacug

SEQ ID NO: 2737600 - RNA, 19 nt, Artificial Sequence
  Description of Artificial Sequence: Synthetic oligonucleotide
gcugggguuuucaugagac

SEQ ID NO: 2737601 - RNA, 19 nt, Artificial Sequence
  Description of Artificial Sequence: Synthetic oligonucleotide
guagcuccaucggacgcag

SEQ ID NO: 2737602 - RNA, 19 nt, Artificial Sequence
  Description of Artificial Sequence: Synthetic oligonucleotide
gggaucgacgaacaaagua

SEQ ID NO: 2737603 - RNA, 19 nt, Artificial Sequence
  Description of Artificial Sequence: Synthetic oligonucleotide
uucaugcuuugguggcugu

SEQ ID NO: 2737604 - RNA, 19 nt, Artificial Sequence
  Description of Artificial Sequence: Synthetic oligonucleotide
cacagucaucugucgguug

SEQ ID NO: 2737605 - RNA, 19 nt, Artificial Sequence
  Description of Artificial Sequence: Synthetic oligonucleotide
gaccccuggguuuggcuca

SEQ ID NO: 2737606 - RNA, 19 nt, Artificial Sequence
  Description of Artificial Sequence: Synthetic oligonucleotide
gacgaacaaaguagggcaa

SEQ ID NO: 2737607 - RNA, 19 nt, Artificial Sequence
  Description of Artificial Sequence: Synthetic oligonucleotide
ucaccucauuaaccugggu

SEQ ID NO: 2737608 - RNA, 19 nt, Artificial Sequence
  Description of Artificial Sequence: Synthetic oligonucleotide
aggcgcuccacaaauuggu

SEQ ID NO: 2737609 - RNA, 19 nt, Artificial Sequence
  Description of Artificial Sequence: Synthetic oligonucleotide
agcugcucgcaacgccgcg

SEQ ID NO: 2737610 - RNA, 19 nt, Artificial Sequence
  Description of Artificial Sequence: Synthetic oligonucleotide
ggaaacaggcgcuccacaa

SEQ ID NO: 2737611 - RNA, 19 nt, Artificial Sequence
  Description of Artificial Sequence: Synthetic oligonucleotide
ucacagucaucugucgguu

SEQ ID NO: 2737612 - RNA, 19 nt, Artificial Sequence
  Description of Artificial Sequence: Synthetic oligonucleotide
cgacgaacaaaguagggca

SEQ ID NO: 2737613 - RNA, 19 nt, Artificial Sequence
  Description of Artificial Sequence: Synthetic oligonucleotide
cugugggauuuugguaggg

SEQ ID NO: 2737614 - RNA, 19 nt, Artificial Sequence
  Description of Artificial Sequence: Synthetic oligonucleotide
gccgcgaccgccaucuugg

SEQ ID NO: 2737615 - RNA, 19 nt, Artificial Sequence
  Description of Artificial Sequence: Synthetic oligonucleotide
agccuuucucaagaagcca

SEQ ID NO: 2737616 - RNA, 19 nt, Artificial Sequence
  Description of Artificial Sequence: Synthetic oligonucleotide
cagggauauuaugcauccg

SEQ ID NO: 2737617 - RNA, 19 nt, Artificial Sequence
  Description of Artificial Sequence: Synthetic oligonucleotide
acgccaguuuguagagggc

SEQ ID NO: 2737618 - RNA, 19 nt, Artificial Sequence
  Description of Artificial Sequence: Synthetic oligonucleotide
agcccuugauucgaagagu

SEQ ID NO: 2737619 - RNA, 19 nt, Artificial Sequence
  Description of Artificial Sequence: Synthetic oligonucleotide
gugggcucagaaauucuuc

SEQ ID NO: 2737620 - RNA, 19 nt, Artificial Sequence
  Description of Artificial Sequence: Synthetic oligonucleotide
agauguccccuucuaccuu

SEQ ID NO: 2737621 - RNA, 19 nt, Artificial Sequence
  Description of Artificial Sequence: Synthetic oligonucleotide
agucaucugucgguugcca

SEQ ID NO: 2737622 - RNA, 19 nt, Artificial Sequence
  Description of Artificial Sequence: Synthetic oligonucleotide
uagagggcacugccacaga

SEQ ID NO: 2737623 - RNA, 19 nt, Artificial Sequence
  Description of Artificial Sequence: Synthetic oligonucleotide
cauccgggaucgacgaaca

SEQ ID NO: 2737624 - RNA, 19 nt, Artificial Sequence
  Description of Artificial Sequence: Synthetic oligonucleotide
cagauguccccuucuaccu

SEQ ID NO: 2737625 - RNA, 19 nt, Artificial Sequence
  Description of Artificial Sequence: Synthetic oligonucleotide
gguuuggcucagcugccgc

SEQ ID NO: 2737626 - RNA, 19 nt, Artificial Sequence
  Description of Artificial Sequence: Synthetic oligonucleotide
accugggugacaggugucu

SEQ ID NO: 2737627 - RNA, 19 nt, Artificial Sequence
  Description of Artificial Sequence: Synthetic oligonucleotide
cagcugcucgcaacgccgc

SEQ ID NO: 2737628 - RNA, 19 nt, Artificial Sequence
  Description of Artificial Sequence: Synthetic oligonucleotide
cagucaucugucgguugcc

SEQ ID NO: 2737629 - RNA, 19 nt, Artificial Sequence
  Description of Artificial Sequence: Synthetic oligonucleotide
aucggacgcagcgccccgc

SEQ ID NO: 2737630 - RNA, 19 nt, Artificial Sequence
  Description of Artificial Sequence: Synthetic oligonucleotide
cucgcaacgccgcgaccgc

SEQ ID NO: 2737631 - RNA, 19 nt, Artificial Sequence
  Description of Artificial Sequence: Synthetic oligonucleotide
uccuucuguagagcccaga

SEQ ID NO: 2737632 - RNA, 19 nt, Artificial Sequence
  Description of Artificial Sequence: Synthetic oligonucleotide
cugcucgcaacgccgcgac

SEQ ID NO: 2737633 - RNA, 19 nt, Artificial Sequence
  Description of Artificial Sequence: Synthetic oligonucleotide
ggagacuccaaauccacuu

SEQ ID NO: 2737634 - RNA, 19 nt, Artificial Sequence
  Description of Artificial Sequence: Synthetic oligonucleotide
ugagaccccuggguuuggc

SEQ ID NO: 2737635 - RNA, 19 nt, Artificial Sequence
  Description of Artificial Sequence: Synthetic oligonucleotide
cucauuaaccugggugaca

SEQ ID NO: 2737636 - RNA, 19 nt, Artificial Sequence
  Description of Artificial Sequence: Synthetic oligonucleotide
uccucucuggacgccaguu

SEQ ID NO: 2737637 - RNA, 19 nt, Artificial Sequence
  Description of Artificial Sequence: Synthetic oligonucleotide
cccguagcuccaucggacg

SEQ ID NO: 2737638 - RNA, 19 nt, Artificial Sequence
  Description of Artificial Sequence: Synthetic oligonucleotide
caucggacgcagcgccccg

SEQ ID NO: 2737639 - RNA, 19 nt, Artificial Sequence
  Description of Artificial Sequence: Synthetic oligonucleotide
ggccucagaagccuuucuc

SEQ ID NO: 2737640 - RNA, 19 nt, Artificial Sequence
  Description of Artificial Sequence: Synthetic oligonucleotide
gcggcccguagcuccaucg

SEQ ID NO: 2737641 - RNA, 19 nt, Artificial Sequence
  Description of Artificial Sequence: Synthetic oligonucleotide
gcauccgggaucgacgaac

SEQ ID NO: 2737642 - RNA, 19 nt, Artificial Sequence
  Description of Artificial Sequence: Synthetic oligonucleotide
gagcccagauguccccuuc

SEQ ID NO: 2737643 - RNA, 19 nt, Artificial Sequence
  Description of Artificial Sequence: Synthetic oligonucleotide
ugcauccgggaucgacgaa

SEQ ID NO: 2737644 - RNA, 19 nt, Artificial Sequence
  Description of Artificial Sequence: Synthetic oligonucleotide
ugcucgcaacgccgcgacc

SEQ ID NO: 2737645 - RNA, 19 nt, Artificial Sequence
  Description of Artificial Sequence: Synthetic oligonucleotide
cauuccggagacuccaaau

SEQ ID NO: 2737646 - RNA, 19 nt, Artificial Sequence
  Description of Artificial Sequence: Synthetic oligonucleotide
cuuccggaucacagucauc

SEQ ID NO: 2737647 - RNA, 19 nt, Artificial Sequence
  Description of Artificial Sequence: Synthetic oligonucleotide
ugguggcugugggauuuug

SEQ ID NO: 2737648 - RNA, 19 nt, Artificial Sequence
  Description of Artificial Sequence: Synthetic oligonucleotide
gggauaauguucaugcuuu

SEQ ID NO: 2737649 - RNA, 19 nt, Artificial Sequence
  Description of Artificial Sequence: Synthetic oligonucleotide
aacaggcgcuccacaaauu

SEQ ID NO: 2737650 - RNA, 19 nt, Artificial Sequence
  Description of Artificial Sequence: Synthetic oligonucleotide
cuccacaaauugguauuca

SEQ ID NO: 2737651 - RNA, 19 nt, Artificial Sequence
  Description of Artificial Sequence: Synthetic oligonucleotide
cggaucacagucaucuguc

SEQ ID NO: 2737652 - RNA, 19 nt, Artificial Sequence
  Description of Artificial Sequence: Synthetic oligonucleotide
aaguagcccuugauucgaa

SEQ ID NO: 2737653 - RNA, 19 nt, Artificial Sequence
  Description of Artificial Sequence: Synthetic oligonucleotide
caggcuuuaagcugcucau

SEQ ID NO: 2737654 - RNA, 19 nt, Artificial Sequence
  Description of Artificial Sequence: Synthetic oligonucleotide
gugggauaauguucaugcu

SEQ ID NO: 2737655 - RNA, 19 nt, Artificial Sequence
  Description of Artificial Sequence: Synthetic oligonucleotide
cuaccuuccggaucacagu

SEQ ID NO: 2737656 - RNA, 19 nt, Artificial Sequence
  Description of Artificial Sequence: Synthetic oligonucleotide
cagaagccuuucucaagaa

SEQ ID NO: 2737657 - RNA, 19 nt, Artificial Sequence
  Description of Artificial Sequence: Synthetic oligonucleotide
agagcccagauguccccuu

SEQ ID NO: 2737658 - RNA, 19 nt, Artificial Sequence
  Description of Artificial Sequence: Synthetic oligonucleotide
cgaacaaaguagggcaagc

SEQ ID NO: 2737659 - RNA, 19 nt, Artificial Sequence
  Description of Artificial Sequence: Synthetic oligonucleotide
ggcugccagccacugggag

SEQ ID NO: 2737660 - RNA, 19 nt, Artificial Sequence
  Description of Artificial Sequence: Synthetic oligonucleotide
cugggagugggauaauguu

SEQ ID NO: 2737661 - RNA, 19 nt, Artificial Sequence
  Description of Artificial Sequence: Synthetic oligonucleotide
gaucucugggaggcugcca

SEQ ID NO: 2737662 - RNA, 19 nt, Artificial Sequence
  Description of Artificial Sequence: Synthetic oligonucleotide
gccaugugugauguccuug

SEQ ID NO: 2737663 - RNA, 19 nt, Artificial Sequence
  Description of Artificial Sequence: Synthetic oligonucleotide
accuuccggaucacaguca

SEQ ID NO: 2737664 - RNA, 19 nt, Artificial Sequence
  Description of Artificial Sequence: Synthetic oligonucleotide
cccuugauucgaagaguac

SEQ ID NO: 2737665 - RNA, 19 nt, Artificial Sequence
  Description of Artificial Sequence: Synthetic oligonucleotide
gccacugggagugggauaa

SEQ ID NO: 2737666 - RNA, 19 nt, Artificial Sequence
  Description of Artificial Sequence: Synthetic oligonucleotide
ggguuuggcucagcugccg

SEQ ID NO: 2737667 - RNA, 19 nt, Artificial Sequence
  Description of Artificial Sequence: Synthetic oligonucleotide
gucccgcacagcugcucgc

SEQ ID NO: 2737668 - RNA, 19 nt, Artificial Sequence
  Description of Artificial Sequence: Synthetic oligonucleotide
uagcuccaucggacgcagc

SEQ ID NO: 2737669 - RNA, 19 nt, Artificial Sequence
  Description of Artificial Sequence: Synthetic oligonucleotide
cccagauguccccuucuac

SEQ ID NO: 2737670 - RNA, 19 nt, Artificial Sequence
  Description of Artificial Sequence: Synthetic oligonucleotide
gcuccacaaauugguauuc

SEQ ID NO: 2737671 - RNA, 19 nt, Artificial Sequence
  Description of Artificial Sequence: Synthetic oligonucleotide
ucagcugccgcggcccgua

SEQ ID NO: 2737672 - RNA, 19 nt, Artificial Sequence
  Description of Artificial Sequence: Synthetic oligonucleotide
ucgcaacgccgcgaccgcc

SEQ ID NO: 2737673 - RNA, 19 nt, Artificial Sequence
  Description of Artificial Sequence: Synthetic oligonucleotide
caucugucgguugccaugu

SEQ ID NO: 2737674 - RNA, 19 nt, Artificial Sequence
  Description of Artificial Sequence: Synthetic oligonucleotide
ccguagcuccaucggacgc

SEQ ID NO: 2737675 - RNA, 19 nt, Artificial Sequence
  Description of Artificial Sequence: Synthetic oligonucleotide
ggacgccaguuuguagagg

SEQ ID NO: 2737676 - RNA, 19 nt, Artificial Sequence
  Description of Artificial Sequence: Synthetic oligonucleotide
ccucauuaaccugggugac

SEQ ID NO: 2737677 - RNA, 19 nt, Artificial Sequence
  Description of Artificial Sequence: Synthetic oligonucleotide
caugugugauguccuugua

SEQ ID NO: 2737678 - RNA, 19 nt, Artificial Sequence
  Description of Artificial Sequence: Synthetic oligonucleotide
auccgggaucgacgaacaa

SEQ ID NO: 2737679 - RNA, 19 nt, Artificial Sequence
  Description of Artificial Sequence: Synthetic oligonucleotide
gggaucucugggaggcugc

SEQ ID NO: 2737680 - RNA, 19 nt, Artificial Sequence
  Description of Artificial Sequence: Synthetic oligonucleotide
ccgcgucccgcacagcugc

SEQ ID NO: 2737681 - RNA, 19 nt, Artificial Sequence
  Description of Artificial Sequence: Synthetic oligonucleotide
ggggaaacaggcgcuccac

SEQ ID NO: 2737682 - RNA, 19 nt, Artificial Sequence
  Description of Artificial Sequence: Synthetic oligonucleotide
agaguaccugucaccucau

SEQ ID NO: 2737683 - RNA, 19 nt, Artificial Sequence
  Description of Artificial Sequence: Synthetic oligonucleotide
gguuuucaugagaccccug

SEQ ID NO: 2737684 - RNA, 19 nt, Artificial Sequence
  Description of Artificial Sequence: Synthetic oligonucleotide
gucaucugucgguugccau

SEQ ID NO: 2737685 - RNA, 19 nt, Artificial Sequence
  Description of Artificial Sequence: Synthetic oligonucleotide
gcuccaucggacgcagcgc

SEQ ID NO: 2737686 - RNA, 19 nt, Artificial Sequence
  Description of Artificial Sequence: Synthetic oligonucleotide
cucaagaagccaggcuuua

SEQ ID NO: 2737687 - RNA, 19 nt, Artificial Sequence
  Description of Artificial Sequence: Synthetic oligonucleotide
auuaugcauccgggaucga

SEQ ID NO: 2737688 - RNA, 19 nt, Artificial Sequence
  Description of Artificial Sequence: Synthetic oligonucleotide
gcccguagcuccaucggac

SEQ ID NO: 2737689 - RNA, 19 nt, Artificial Sequence
  Description of Artificial Sequence: Synthetic oligonucleotide
ggcccguagcuccaucgga

SEQ ID NO: 2737690 - RNA, 19 nt, Artificial Sequence
  Description of Artificial Sequence: Synthetic oligonucleotide
ccaugugugauguccuugu

SEQ ID NO: 2737691 - RNA, 19 nt, Artificial Sequence
  Description of Artificial Sequence: Synthetic oligonucleotide
ccaucggacgcagcgcccc

SEQ ID NO: 2737692 - RNA, 19 nt, Artificial Sequence
  Description of Artificial Sequence: Synthetic oligonucleotide
cuucuaccuuccggaucac

SEQ ID NO: 2737693 - RNA, 19 nt, Artificial Sequence
  Description of Artificial Sequence: Synthetic oligonucleotide
acgcagcgccccgcguccc

SEQ ID NO: 2737694 - RNA, 19 nt, Artificial Sequence
  Description of Artificial Sequence: Synthetic oligonucleotide
gucgguugccaugugugau

SEQ ID NO: 2737695 - RNA, 19 nt, Artificial Sequence
  Description of Artificial Sequence: Synthetic oligonucleotide
gcccuugauucgaagagua

SEQ ID NO: 2737696 - RNA, 19 nt, Artificial Sequence
  Description of Artificial Sequence: Synthetic oligonucleotide
accccuggguuuggcucag

SEQ ID NO: 2737697 - RNA, 19 nt, Artificial Sequence
  Description of Artificial Sequence: Synthetic oligonucleotide
cucuggacgccaguuugua

SEQ ID NO: 2737698 - RNA, 19 nt, Artificial Sequence
  Description of Artificial Sequence: Synthetic oligonucleotide
ggguuuucaugagaccccu

SEQ ID NO: 2737699 - RNA, 19 nt, Artificial Sequence
  Description of Artificial Sequence: Synthetic oligonucleotide
uugguggcugugggauuuu

SEQ ID NO: 2737700 - RNA, 19 nt, Artificial Sequence
  Description of Artificial Sequence: Synthetic oligonucleotide
ccggaucacagucaucugu

SEQ ID NO: 2737701 - RNA, 19 nt, Artificial Sequence
  Description of Artificial Sequence: Synthetic oligonucleotide
gcgcuccacaaauugguau

SEQ ID NO: 2737702 - RNA, 19 nt, Artificial Sequence
  Description of Artificial Sequence: Synthetic oligonucleotide
gcugccgcggcccguagcu

SEQ ID NO: 2737703 - RNA, 19 nt, Artificial Sequence
  Description of Artificial Sequence: Synthetic oligonucleotide
cgaagaguaccugucaccu

SEQ ID NO: 2737704 - RNA, 19 nt, Artificial Sequence
  Description of Artificial Sequence: Synthetic oligonucleotide
gguugccaugugugauguc

SEQ ID NO: 2737705 - RNA, 19 nt, Artificial Sequence
  Description of Artificial Sequence: Synthetic oligonucleotide
ccucagacuccagaaagcu

SEQ ID NO: 2737706 - RNA, 19 nt, Artificial Sequence
  Description of Artificial Sequence: Synthetic oligonucleotide
agccaggcuuuaagcugcu

SEQ ID NO: 2737707 - RNA, 19 nt, Artificial Sequence
  Description of Artificial Sequence: Synthetic oligonucleotide
gaguaccugucaccucauu

SEQ ID NO: 2737708 - RNA, 19 nt, Artificial Sequence
  Description of Artificial Sequence: Synthetic oligonucleotide
cuuugguggcugugggauu

SEQ ID NO: 2737709 - RNA, 19 nt, Artificial Sequence
  Description of Artificial Sequence: Synthetic oligonucleotide
gcugcucgcaacgccgcga

SEQ ID NO: 2737710 - RNA, 19 nt, Artificial Sequence
  Description of Artificial Sequence: Synthetic oligonucleotide
caacgccgcgaccgccauc

SEQ ID NO: 2737711 - RNA, 19 nt, Artificial Sequence
  Description of Artificial Sequence: Synthetic oligonucleotide
cggcccguagcuccaucgg

SEQ ID NO: 2737712 - RNA, 19 nt, Artificial Sequence
  Description of Artificial Sequence: Synthetic oligonucleotide
cgccaguuuguagagggca

SEQ ID NO: 2737713 - RNA, 19 nt, Artificial Sequence
  Description of Artificial Sequence: Synthetic oligonucleotide
cccgcgucccgcacagcug

SEQ ID NO: 2737714 - RNA, 19 nt, Artificial Sequence
  Description of Artificial Sequence: Synthetic oligonucleotide
ucccagcugugggcucaga

SEQ ID NO: 2737715 - RNA, 19 nt, Artificial Sequence
  Description of Artificial Sequence: Synthetic oligonucleotide
cagcugccgcggcccguag

SEQ ID NO: 2737716 - RNA, 19 nt, Artificial Sequence
  Description of Artificial Sequence: Synthetic oligonucleotide
ccauuccggagacuccaaa

SEQ ID NO: 2737717 - RNA, 19 nt, Artificial Sequence
  Description of Artificial Sequence: Synthetic oligonucleotide
ggcgcuccacaaauuggua

SEQ ID NO: 2737718 - RNA, 19 nt, Artificial Sequence
  Description of Artificial Sequence: Synthetic oligonucleotide
cguagcuccaucggacgca

SEQ ID NO: 2737719 - RNA, 19 nt, Artificial Sequence
  Description of Artificial Sequence: Synthetic oligonucleotide
cugccgcggcccguagcuc

SEQ ID NO: 2737720 - RNA, 19 nt, Artificial Sequence
  Description of Artificial Sequence: Synthetic oligonucleotide
ccgcgaccgccaucuuggc

SEQ ID NO: 2737721 - RNA, 19 nt, Artificial Sequence
  Description of Artificial Sequence: Synthetic oligonucleotide
cccauuccggagacuccaa

SEQ ID NO: 2737722 - RNA, 19 nt, Artificial Sequence
  Description of Artificial Sequence: Synthetic oligonucleotide
cagcgccccgcgucccgca

SEQ ID NO: 2737723 - RNA, 19 nt, Artificial Sequence
  Description of Artificial Sequence: Synthetic oligonucleotide
cccuggguuuggcucagcu

SEQ ID NO: 2737724 - RNA, 19 nt, Artificial Sequence
  Description of Artificial Sequence: Synthetic oligonucleotide
gccaggcuuuaagcugcuc

SEQ ID NO: 2737725 - RNA, 19 nt, Artificial Sequence
  Description of Artificial Sequence: Synthetic oligonucleotide
cggagacuccaaauccacu

SEQ ID NO: 2737726 - RNA, 19 nt, Artificial Sequence
  Description of Artificial Sequence: Synthetic oligonucleotide
gcgucccgcacagcugcuc

SEQ ID NO: 2737727 - RNA, 19 nt, Artificial Sequence
  Description of Artificial Sequence: Synthetic oligonucleotide
ccccgcgucccgcacagcu

SEQ ID NO: 2737728 - RNA, 19 nt, Artificial Sequence
  Description of Artificial Sequence: Synthetic oligonucleotide
ccucucuggacgccaguuu

SEQ ID NO: 2737729 - RNA, 19 nt, Artificial Sequence
  Description of Artificial Sequence: Synthetic oligonucleotide
gccgcggcccguagcucca

SEQ ID NO: 2737730 - RNA, 19 nt, Artificial Sequence
  Description of Artificial Sequence: Synthetic oligonucleotide
cccgcacagcugcucgcaa

SEQ ID NO: 2737731 - RNA, 19 nt, Artificial Sequence
  Description of Artificial Sequence: Synthetic oligonucleotide
cacugccacagaggcugau

SEQ ID NO: 2737732 - RNA, 19 nt, Artificial Sequence
  Description of Artificial Sequence: Synthetic oligonucleotide
cgguugccaugugugaugu

SEQ ID NO: 2737733 - RNA, 19 nt, Artificial Sequence
  Description of Artificial Sequence: Synthetic oligonucleotide
ccccuucuaccuuccggau

SEQ ID NO: 2737734 - RNA, 19 nt, Artificial Sequence
  Description of Artificial Sequence: Synthetic oligonucleotide
cgggaucgacgaacaaagu

SEQ ID NO: 2737735 - RNA, 19 nt, Artificial Sequence
  Description of Artificial Sequence: Synthetic oligonucleotide
ccccuggguuuggcucagc

SEQ ID NO: 2737736 - RNA, 19 nt, Artificial Sequence
  Description of Artificial Sequence: Synthetic oligonucleotide
cgcggcccguagcuccauc

SEQ ID NO: 2737737 - RNA, 19 nt, Artificial Sequence
  Description of Artificial Sequence: Synthetic oligonucleotide
ccugggugacaggugucuu

SEQ ID NO: 2737738 - RNA, 19 nt, Artificial Sequence
  Description of Artificial Sequence: Synthetic oligonucleotide
gccccgcgucccgcacagc

SEQ ID NO: 2737739 - RNA, 19 nt, Artificial Sequence
  Description of Artificial Sequence: Synthetic oligonucleotide
ccacugggagugggauaau

SEQ ID NO: 2737740 - RNA, 19 nt, Artificial Sequence
  Description of Artificial Sequence: Synthetic oligonucleotide
cgcgucccgcacagcugcu

SEQ ID NO: 2737741 - RNA, 19 nt, Artificial Sequence
  Description of Artificial Sequence: Synthetic oligonucleotide
ccgcggcccguagcuccau

SEQ ID NO: 2737742 - RNA, 19 nt, Artificial Sequence
  Description of Artificial Sequence: Synthetic oligonucleotide
agcacuuuauuccucuugc

SEQ ID NO: 2737743 - RNA, 19 nt, Artificial Sequence
  Description of Artificial Sequence: Synthetic oligonucleotide
gauggcuacgcucugcucg

SEQ ID NO: 2737744 - RNA, 19 nt, Artificial Sequence
  Description of Artificial Sequence: Synthetic oligonucleotide
accgcgagcacuuuauucc

SEQ ID NO: 2737745 - RNA, 19 nt, Artificial Sequence
  Description of Artificial Sequence: Synthetic oligonucleotide
gauguagucgauaacgugc

SEQ ID NO: 2737746 - RNA, 19 nt, Artificial Sequence
  Description of Artificial Sequence: Synthetic oligonucleotide
aacgcaugcugccucggcc

SEQ ID NO: 2737747 - RNA, 19 nt, Artificial Sequence
  Description of Artificial Sequence: Synthetic oligonucleotide
guagcagccguucaugucg

SEQ ID NO: 2737748 - RNA, 19 nt, Artificial Sequence
  Description of Artificial Sequence: Synthetic oligonucleotide
uuaacuaccccuccccaag

SEQ ID NO: 2737749 - RNA, 19 nt, Artificial Sequence
  Description of Artificial Sequence: Synthetic oligonucleotide
gaucucgccauucagggug

SEQ ID NO: 2737750 - RNA, 19 nt, Artificial Sequence
  Description of Artificial Sequence: Synthetic oligonucleotide
  modified_base (9)..(9): a, c, u, g, unknown or other
aaggugganagggcgagcc

SEQ ID NO: 2737751 - RNA, 19 nt, Artificial Sequence
  Description of Artificial Sequence: Synthetic oligonucleotide
acaagagucuuucccgggc

SEQ ID NO: 2737752 - RNA, 19 nt, Artificial Sequence
  Description of Artificial Sequence: Synthetic oligonucleotide
aaccgcgagcacuuuauuc

SEQ ID NO: 2737753 - RNA, 19 nt, Artificial Sequence
  Description of Artificial Sequence: Synthetic oligonucleotide
cacuuugcgguucugaggc

SEQ ID NO: 2737754 - RNA, 19 nt, Artificial Sequence
  Description of Artificial Sequence: Synthetic oligonucleotide
cugaucucgccauucaggg

SEQ ID NO: 2737755 - RNA, 19 nt, Artificial Sequence
  Description of Artificial Sequence: Synthetic oligonucleotide
uucagcgacacaagaugcg

SEQ ID NO: 2737756 - RNA, 19 nt, Artificial Sequence
  Description of Artificial Sequence: Synthetic oligonucleotide
cuggucaagccucugagcc

SEQ ID NO: 2737757 - RNA, 19 nt, Artificial Sequence
  Description of Artificial Sequence: Synthetic oligonucleotide
acaagaugcgaucgucggc

SEQ ID NO: 2737758 - RNA, 19 nt, Artificial Sequence
  Description of Artificial Sequence: Synthetic oligonucleotide
  modified_base (10)..(10): a, c, u, g, unknown or other
aaaggugganagggcgagc

SEQ ID NO: 2737759 - RNA, 19 nt, Artificial Sequence
  Description of Artificial Sequence: Synthetic oligonucleotide
gauaacgugcugcaggauc

SEQ ID NO: 2737760 - RNA, 19 nt, Artificial Sequence
  Description of Artificial Sequence: Synthetic oligonucleotide
gugaccagauccaaggugg

SEQ ID NO: 2737761 - RNA, 19 nt, Artificial Sequence
  Description of Artificial Sequence: Synthetic oligonucleotide
ucggauuccgaguucagcu

SEQ ID NO: 2737762 - RNA, 19 nt, Artificial Sequence
  Description of Artificial Sequence: Synthetic oligonucleotide
ugauguagucgauaacgug

SEQ ID NO: 2737763 - RNA, 19 nt, Artificial Sequence
  Description of Artificial Sequence: Synthetic oligonucleotide
ucacuuugcgguucugagg

SEQ ID NO: 2737764 - RNA, 19 nt, Artificial Sequence
  Description of Artificial Sequence: Synthetic oligonucleotide
uccgaguucagcuccagcu

SEQ ID NO: 2737765 - RNA, 19 nt, Artificial Sequence
  Description of Artificial Sequence: Synthetic oligonucleotide
cuucagcgacacaagaugc

SEQ ID NO: 2737766 - RNA, 19 nt, Artificial Sequence
  Description of Artificial Sequence: Synthetic oligonucleotide
ugguuaacuaccccucccc

SEQ ID NO: 2737767 - RNA, 19 nt, Artificial Sequence
  Description of Artificial Sequence: Synthetic oligonucleotide
cacaagaugcgaucgucgg

SEQ ID NO: 2737768 - RNA, 19 nt, Artificial Sequence
  Description of Artificial Sequence: Synthetic oligonucleotide
ugcucguccagcagggcgg

SEQ ID NO: 2737769 - RNA, 19 nt, Artificial Sequence
  Description of Artificial Sequence: Synthetic oligonucleotide
uugguuaacuaccccuccc

SEQ ID NO: 2737770 - RNA, 19 nt, Artificial Sequence
  Description of Artificial Sequence: Synthetic oligonucleotide
ugcuggucaagccucugag

SEQ ID NO: 2737771 - RNA, 19 nt, Artificial Sequence
  Description of Artificial Sequence: Synthetic oligonucleotide
agcgacacaagaugcgauc

SEQ ID NO: 2737772 - RNA, 19 nt, Artificial Sequence
  Description of Artificial Sequence: Synthetic oligonucleotide
aagagucuuucccgggcuc

SEQ ID NO: 2737773 - RNA, 19 nt, Artificial Sequence
  Description of Artificial Sequence: Synthetic oligonucleotide
accagauccaagguggccg

SEQ ID NO: 2737774 - RNA, 19 nt, Artificial Sequence
  Description of Artificial Sequence: Synthetic oligonucleotide
caggccaagcacaaccucg

SEQ ID NO: 2737775 - RNA, 19 nt, Artificial Sequence
  Description of Artificial Sequence: Synthetic oligonucleotide
gacaagagucuuucccggg

SEQ ID NO: 2737776 - RNA, 19 nt, Artificial Sequence
  Description of Artificial Sequence: Synthetic oligonucleotide
ucggcuggaacgcaugcug

SEQ ID NO: 2737777 - RNA, 19 nt, Artificial Sequence
  Description of Artificial Sequence: Synthetic oligonucleotide
cucacuuugcgguucugag

SEQ ID NO: 2737778 - RNA, 19 nt, Artificial Sequence
  Description of Artificial Sequence: Synthetic oligonucleotide
agcacaaccucgcccgcgc

SEQ ID NO: 2737779 - RNA, 19 nt, Artificial Sequence
  Description of Artificial Sequence: Synthetic oligonucleotide
acugaucucgccauucagg

SEQ ID NO: 2737780 - RNA, 19 nt, Artificial Sequence
  Description of Artificial Sequence: Synthetic oligonucleotide
aguagcagccguucauguc

SEQ ID NO: 2737781 - RNA, 19 nt, Artificial Sequence
  Description of Artificial Sequence: Synthetic oligonucleotide
gacguucaccugcugcucg

SEQ ID NO: 2737782 - RNA, 19 nt, Artificial Sequence
  Description of Artificial Sequence: Synthetic oligonucleotide
uccaccuugcucacuuugc

SEQ ID NO: 2737783 - RNA, 19 nt, Artificial Sequence
  Description of Artificial Sequence: Synthetic oligonucleotide
accuugcucacuuugcggu

SEQ ID NO: 2737784 - RNA, 19 nt, Artificial Sequence
  Description of Artificial Sequence: Synthetic oligonucleotide
ugcugcucguccagcaggg

SEQ ID NO: 2737785 - RNA, 19 nt, Artificial Sequence
  Description of Artificial Sequence: Synthetic oligonucleotide
  modified_base (11)..(11): a, c, u, g, unknown or other
gaaaggugganagggcgag

SEQ ID NO: 2737786 - RNA, 19 nt, Artificial Sequence
  Description of Artificial Sequence: Synthetic oligonucleotide
agugcgccgcuucagcgac

SEQ ID NO: 2737787 - RNA, 19 nt, Artificial Sequence
  Description of Artificial Sequence: Synthetic oligonucleotide
aaggcacugaucucgccau

SEQ ID NO: 2737788 - RNA, 19 nt, Artificial Sequence
  Description of Artificial Sequence: Synthetic oligonucleotide
gagcacuuuauuccucuug

SEQ ID NO: 2737789 - RNA, 19 nt, Artificial Sequence
  Description of Artificial Sequence: Synthetic oligonucleotide
gagcaggacguucaccugc

SEQ ID NO: 2737790 - RNA, 19 nt, Artificial Sequence
  Description of Artificial Sequence: Synthetic oligonucleotide
uucaugucguagagcagga

SEQ ID NO: 2737791 - RNA, 19 nt, Artificial Sequence
  Description of Artificial Sequence: Synthetic oligonucleotide
aggacguucaccugcugcu

SEQ ID NO: 2737792 - RNA, 19 nt, Artificial Sequence
  Description of Artificial Sequence: Synthetic oligonucleotide
ccaagcacaaccucgcccg

SEQ ID NO: 2737793 - RNA, 19 nt, Artificial Sequence
  Description of Artificial Sequence: Synthetic oligonucleotide
auggcuacgcucugcucgg

SEQ ID NO: 2737794 - RNA, 19 nt, Artificial Sequence
  Description of Artificial Sequence: Synthetic oligonucleotide
guugguuaacuaccccucc

SEQ ID NO: 2737795 - RNA, 19 nt, Artificial Sequence
  Description of Artificial Sequence: Synthetic oligonucleotide
ucuugccuccugaagggcu

SEQ ID NO: 2737796 - RNA, 19 nt, Artificial Sequence
  Description of Artificial Sequence: Synthetic oligonucleotide
  modified_base (15)..(15): a, c, u, g, unknown or other
ggcugaaaggugganaggg

SEQ ID NO: 2737797 - RNA, 19 nt, Artificial Sequence
  Description of Artificial Sequence: Synthetic oligonucleotide
uggaacgcaugcugccucg

SEQ ID NO: 2737798 - RNA, 19 nt, Artificial Sequence
  Description of Artificial Sequence: Synthetic oligonucleotide
acacaagaugcgaucgucg

SEQ ID NO: 2737799 - RNA, 19 nt, Artificial Sequence
  Description of Artificial Sequence: Synthetic oligonucleotide
aagggcuggaguccaucug

SEQ ID NO: 2737800 - RNA, 19 nt, Artificial Sequence
  Description of Artificial Sequence: Synthetic oligonucleotide
acgcaugcugccucggccg

SEQ ID NO: 2737801 - RNA, 19 nt, Artificial Sequence
  Description of Artificial Sequence: Synthetic oligonucleotide
ccauucagggugcugagcg

SEQ ID NO: 2737802 - RNA, 19 nt, Artificial Sequence
  Description of Artificial Sequence: Synthetic oligonucleotide
gcuggaguccaucuggucc

SEQ ID NO: 2737803 - RNA, 19 nt, Artificial Sequence
  Description of Artificial Sequence: Synthetic oligonucleotide
ucagcgacacaagaugcga

SEQ ID NO: 2737804 - RNA, 19 nt, Artificial Sequence
  Description of Artificial Sequence: Synthetic oligonucleotide
  modified_base (2)..(2): a, c, u, g, unknown or other
anagggcgagccucugcug

SEQ ID NO: 2737805 - RNA, 19 nt, Artificial Sequence
  Description of Artificial Sequence: Synthetic oligonucleotide
ugcucggacaggccaagca

SEQ ID NO: 2737806 - RNA, 19 nt, Artificial Sequence
  Description of Artificial Sequence: Synthetic oligonucleotide
uucugaggcaaggugggca

SEQ ID NO: 2737807 - RNA, 19 nt, Artificial Sequence
  Description of Artificial Sequence: Synthetic oligonucleotide
acaggccaagcacaaccuc

SEQ ID NO: 2737808 - RNA, 19 nt, Artificial Sequence
  Description of Artificial Sequence: Synthetic oligonucleotide
caccaguuccuugaggcgg

SEQ ID NO: 2737809 - RNA, 19 nt, Artificial Sequence
  Description of Artificial Sequence: Synthetic oligonucleotide
gagccccgugaccagaucc

SEQ ID NO: 2737810 - RNA, 19 nt, Artificial Sequence
  Description of Artificial Sequence: Synthetic oligonucleotide
auaacgugcugcaggaucu

SEQ ID NO: 2737811 - RNA, 19 nt, Artificial Sequence
  Description of Artificial Sequence: Synthetic oligonucleotide
gcgaucgucggcuggaacg

SEQ ID NO: 2737812 - RNA, 19 nt, Artificial Sequence
  Description of Artificial Sequence: Synthetic oligonucleotide
caggacguucaccugcugc

SEQ ID NO: 2737813 - RNA, 19 nt, Artificial Sequence
  Description of Artificial Sequence: Synthetic oligonucleotide
ugagcggagcccgaaccgg

SEQ ID NO: 2737814 - RNA, 19 nt, Artificial Sequence
  Description of Artificial Sequence: Synthetic oligonucleotide
cuacgcucugcucggacag

SEQ ID NO: 2737815 - RNA, 19 nt, Artificial Sequence
  Description of Artificial Sequence: Synthetic oligonucleotide
uccagcugucccgacuucg

SEQ ID NO: 2737816 - RNA, 19 nt, Artificial Sequence
  Description of Artificial Sequence: Synthetic oligonucleotide
cauucagggugcugagcgg

SEQ ID NO: 2737817 - RNA, 19 nt, Artificial Sequence
  Description of Artificial Sequence: Synthetic oligonucleotide
ugaccagauccaagguggc

SEQ ID NO: 2737818 - RNA, 19 nt, Artificial Sequence
  Description of Artificial Sequence: Synthetic oligonucleotide
cugcucguccagcagggcg

SEQ ID NO: 2737819 - RNA, 19 nt, Artificial Sequence
  Description of Artificial Sequence: Synthetic oligonucleotide
agaugcgaucgucggcugg

SEQ ID NO: 2737820 - RNA, 19 nt, Artificial Sequence
  Description of Artificial Sequence: Synthetic oligonucleotide
ucgccauucagggugcuga

SEQ ID NO: 2737821 - RNA, 19 nt, Artificial Sequence
  Description of Artificial Sequence: Synthetic oligonucleotide
uucggauuccgaguucagc

SEQ ID NO: 2737822 - RNA, 19 nt, Artificial Sequence
  Description of Artificial Sequence: Synthetic oligonucleotide
uugaggcgggaguagcagc

SEQ ID NO: 2737823 - RNA, 19 nt, Artificial Sequence
  Description of Artificial Sequence: Synthetic oligonucleotide
aagguggccgcgacaagag

SEQ ID NO: 2737824 - RNA, 19 nt, Artificial Sequence
  Description of Artificial Sequence: Synthetic oligonucleotide
  modified_base (3)..(3): a, c, u, g, unknown or other
ganagggcgagccucugcu

SEQ ID NO: 2737825 - RNA, 19 nt, Artificial Sequence
  Description of Artificial Sequence: Synthetic oligonucleotide
acaaccucgcccgcgccgc

SEQ ID NO: 2737826 - RNA, 19 nt, Artificial Sequence
  Description of Artificial Sequence: Synthetic oligonucleotide
agccguucaugucguagag

SEQ ID NO: 2737827 - RNA, 19 nt, Artificial Sequence
  Description of Artificial Sequence: Synthetic oligonucleotide
gacacaagaugcgaucguc

SEQ ID NO: 2737828 - RNA, 19 nt, Artificial Sequence
  Description of Artificial Sequence: Synthetic oligonucleotide
aagaugcgaucgucggcug

SEQ ID NO: 2737829 - RNA, 19 nt, Artificial Sequence
  Description of Artificial Sequence: Synthetic oligonucleotide
cugagcggagcccgaaccg

SEQ ID NO: 2737830 - RNA, 19 nt, Artificial Sequence
  Description of Artificial Sequence: Synthetic oligonucleotide
uucagggugcugagcggag

SEQ ID NO: 2737831 - RNA, 19 nt, Artificial Sequence
  Description of Artificial Sequence: Synthetic oligonucleotide
aagcacaaccucgcccgcg

SEQ ID NO: 2737832 - RNA, 19 nt, Artificial Sequence
  Description of Artificial Sequence: Synthetic oligonucleotide
acuucggauuccgaguuca

SEQ ID NO: 2737833 - RNA, 19 nt, Artificial Sequence
  Description of Artificial Sequence: Synthetic oligonucleotide
ggauuccgaguucagcucc

SEQ ID NO: 2737834 - RNA, 19 nt, Artificial Sequence
  Description of Artificial Sequence: Synthetic oligonucleotide
cccgugaccagauccaagg

SEQ ID NO: 2737835 - RNA, 19 nt, Artificial Sequence
  Description of Artificial Sequence: Synthetic oligonucleotide
uaacuaccccuccccaagu

SEQ ID NO: 2737836 - RNA, 19 nt, Artificial Sequence
  Description of Artificial Sequence: Synthetic oligonucleotide
cuugaggcgggaguagcag

SEQ ID NO: 2737837 - RNA, 19 nt, Artificial Sequence
  Description of Artificial Sequence: Synthetic oligonucleotide
ucucccggggaaccgcgag

SEQ ID NO: 2737838 - RNA, 19 nt, Artificial Sequence
  Description of Artificial Sequence: Synthetic oligonucleotide
cuuucccgggcucucccgg

SEQ ID NO: 2737839 - RNA, 19 nt, Artificial Sequence
  Description of Artificial Sequence: Synthetic oligonucleotide
agggcgggaaggcgcgucc

SEQ ID NO: 2737840 - RNA, 19 nt, Artificial Sequence
  Description of Artificial Sequence: Synthetic oligonucleotide
uuucccgggcucucccggg

SEQ ID NO: 2737841 - RNA, 19 nt, Artificial Sequence
  Description of Artificial Sequence: Synthetic oligonucleotide
agauggcuacgcucugcuc

SEQ ID NO: 2737842 - RNA, 19 nt, Artificial Sequence
  Description of Artificial Sequence: Synthetic oligonucleotide
acgcucugcucggacaggc

SEQ ID NO: 2737843 - RNA, 19 nt, Artificial Sequence
  Description of Artificial Sequence: Synthetic oligonucleotide
caaggcacugaucucgcca

SEQ ID NO: 2737844 - RNA, 19 nt, Artificial Sequence
  Description of Artificial Sequence: Synthetic oligonucleotide
ccaucugguccucagugcg

SEQ ID NO: 2737845 - RNA, 19 nt, Artificial Sequence
  Description of Artificial Sequence: Synthetic oligonucleotide
cucagugcgccgcuucagc

SEQ ID NO: 2737846 - RNA, 19 nt, Artificial Sequence
  Description of Artificial Sequence: Synthetic oligonucleotide
caucugguccucagugcgc

SEQ ID NO: 2737847 - RNA, 19 nt, Artificial Sequence
  Description of Artificial Sequence: Synthetic oligonucleotide
ucggacaggccaagcacaa

SEQ ID NO: 2737848 - RNA, 19 nt, Artificial Sequence
  Description of Artificial Sequence: Synthetic oligonucleotide
guuaacuaccccuccccaa

SEQ ID NO: 2737849 - RNA, 19 nt, Artificial Sequence
  Description of Artificial Sequence: Synthetic oligonucleotide
auucagggugcugagcgga

SEQ ID NO: 2737850 - RNA, 19 nt, Artificial Sequence
  Description of Artificial Sequence: Synthetic oligonucleotide
cuaccccuccccaagucuc

SEQ ID NO: 2737851 - RNA, 19 nt, Artificial Sequence
  Description of Artificial Sequence: Synthetic oligonucleotide
ugaucucgccauucagggu

SEQ ID NO: 2737852 - RNA, 19 nt, Artificial Sequence
  Description of Artificial Sequence: Synthetic oligonucleotide
uugcgguucugaggcaagg

SEQ ID NO: 2737853 - RNA, 19 nt, Artificial Sequence
  Description of Artificial Sequence: Synthetic oligonucleotide
gaacgcaugcugccucggc

SEQ ID NO: 2737854 - RNA, 19 nt, Artificial Sequence
  Description of Artificial Sequence: Synthetic oligonucleotide
uccucagugcgccgcuuca

SEQ ID NO: 2737855 - RNA, 19 nt, Artificial Sequence
  Description of Artificial Sequence: Synthetic oligonucleotide
cagggugcugagcggagcc

SEQ ID NO: 2737856 - RNA, 19 nt, Artificial Sequence
  Description of Artificial Sequence: Synthetic oligonucleotide
cacaaccucgcccgcgccg

SEQ ID NO: 2737857 - RNA, 19 nt, Artificial Sequence
  Description of Artificial Sequence: Synthetic oligonucleotide
uucccgggcucucccgggg

SEQ ID NO: 2737858 - RNA, 19 nt, Artificial Sequence
  Description of Artificial Sequence: Synthetic oligonucleotide
uccuugaggcgggaguagc

SEQ ID NO: 2737859 - RNA, 19 nt, Artificial Sequence
  Description of Artificial Sequence: Synthetic oligonucleotide
aguccaucugguccucagu

SEQ ID NO: 2737860 - RNA, 19 nt, Artificial Sequence
  Description of Artificial Sequence: Synthetic oligonucleotide
gaugcgaucgucggcugga

SEQ ID NO: 2737861 - RNA, 19 nt, Artificial Sequence
  Description of Artificial Sequence: Synthetic oligonucleotide
ucugguccucagugcgccg

SEQ ID NO: 2737862 - RNA, 19 nt, Artificial Sequence
  Description of Artificial Sequence: Synthetic oligonucleotide
cagcagggcgggaaggcgc

SEQ ID NO: 2737863 - RNA, 19 nt, Artificial Sequence
  Description of Artificial Sequence: Synthetic oligonucleotide
gcgacacaagaugcgaucg

SEQ ID NO: 2737864 - RNA, 19 nt, Artificial Sequence
  Description of Artificial Sequence: Synthetic oligonucleotide
cacuuuauuccucuugccu

SEQ ID NO: 2737865 - RNA, 19 nt, Artificial Sequence
  Description of Artificial Sequence: Synthetic oligonucleotide
cucggacaggccaagcaca

SEQ ID NO: 2737866 - RNA, 19 nt, Artificial Sequence
  Description of Artificial Sequence: Synthetic oligonucleotide
ucgucggcuggaacgcaug

SEQ ID NO: 2737867 - RNA, 19 nt, Artificial Sequence
  Description of Artificial Sequence: Synthetic oligonucleotide
ccucuugccuccugaaggg

SEQ ID NO: 2737868 - RNA, 19 nt, Artificial Sequence
  Description of Artificial Sequence: Synthetic oligonucleotide
cuucggauuccgaguucag

SEQ ID NO: 2737869 - RNA, 19 nt, Artificial Sequence
  Description of Artificial Sequence: Synthetic oligonucleotide
  modified_base (7)..(7): a, c, u, g, unknown or other
ggugganagggcgagccuc

SEQ ID NO: 2737870 - RNA, 19 nt, Artificial Sequence
  Description of Artificial Sequence: Synthetic oligonucleotide
aucucgccauucagggugc

SEQ ID NO: 2737871 - RNA, 19 nt, Artificial Sequence
  Description of Artificial Sequence: Synthetic oligonucleotide
ggucaagccucugagcccc

SEQ ID NO: 2737872 - RNA, 19 nt, Artificial Sequence
  Description of Artificial Sequence: Synthetic oligonucleotide
agcugucccgacuucggau

SEQ ID NO: 2737873 - RNA, 19 nt, Artificial Sequence
  Description of Artificial Sequence: Synthetic oligonucleotide
gaccagauccaagguggcc

SEQ ID NO: 2737874 - RNA, 19 nt, Artificial Sequence
  Description of Artificial Sequence: Synthetic oligonucleotide
uuccuugaggcgggaguag

SEQ ID NO: 2737875 - RNA, 19 nt, Artificial Sequence
  Description of Artificial Sequence: Synthetic oligonucleotide
guagagcaggacguucacc

SEQ ID NO: 2737876 - RNA, 19 nt, Artificial Sequence
  Description of Artificial Sequence: Synthetic oligonucleotide
cgguucugaggcaaggugg

SEQ ID NO: 2737877 - RNA, 19 nt, Artificial Sequence
  Description of Artificial Sequence: Synthetic oligonucleotide
uagcagccguucaugucgu

SEQ ID NO: 2737878 - RNA, 19 nt, Artificial Sequence
  Description of Artificial Sequence: Synthetic oligonucleotide
cugauguagucgauaacgu

SEQ ID NO: 2737879 - RNA, 19 nt, Artificial Sequence
  Description of Artificial Sequence: Synthetic oligonucleotide
aaccucgcccgcgccgccc

SEQ ID NO: 2737880 - RNA, 19 nt, Artificial Sequence
  Description of Artificial Sequence: Synthetic oligonucleotide
gccaagcacaaccucgccc

SEQ ID NO: 2737881 - RNA, 19 nt, Artificial Sequence
  Description of Artificial Sequence: Synthetic oligonucleotide
ugccucggccgccaaggca

SEQ ID NO: 2737882 - RNA, 19 nt, Artificial Sequence
  Description of Artificial Sequence: Synthetic oligonucleotide
cuugcucacuuugcgguuc

SEQ ID NO: 2737883 - RNA, 19 nt, Artificial Sequence
  Description of Artificial Sequence: Synthetic oligonucleotide
cuggaacgcaugcugccuc

SEQ ID NO: 2737884 - RNA, 19 nt, Artificial Sequence
  Description of Artificial Sequence: Synthetic oligonucleotide
agucgauaacgugcugcag

SEQ ID NO: 2737885 - RNA, 19 nt, Artificial Sequence
  Description of Artificial Sequence: Synthetic oligonucleotide
gcugagcggagcccgaacc

SEQ ID NO: 2737886 - RNA, 19 nt, Artificial Sequence
  Description of Artificial Sequence: Synthetic oligonucleotide
gagauggcuacgcucugcu

SEQ ID NO: 2737887 - RNA, 19 nt, Artificial Sequence
  Description of Artificial Sequence: Synthetic oligonucleotide
gcacuuuauuccucuugcc

SEQ ID NO: 2737888 - RNA, 19 nt, Artificial Sequence
  Description of Artificial Sequence: Synthetic oligonucleotide
agagucuuucccgggcucu

SEQ ID NO: 2737889 - RNA, 19 nt, Artificial Sequence
  Description of Artificial Sequence: Synthetic oligonucleotide
ucccggggaaccgcgagca

SEQ ID NO: 2737890 - RNA, 19 nt, Artificial Sequence
  Description of Artificial Sequence: Synthetic oligonucleotide
ugcgaucgucggcuggaac

SEQ ID NO: 2737891 - RNA, 19 nt, Artificial Sequence
  Description of Artificial Sequence: Synthetic oligonucleotide
caggucccugauguagucg

SEQ ID NO: 2737892 - RNA, 19 nt, Artificial Sequence
  Description of Artificial Sequence: Synthetic oligonucleotide
ugcugagcggagcccgaac

SEQ ID NO: 2737893 - RNA, 19 nt, Artificial Sequence
  Description of Artificial Sequence: Synthetic oligonucleotide
caagaugcgaucgucggcu

SEQ ID NO: 2737894 - RNA, 19 nt, Artificial Sequence
  Description of Artificial Sequence: Synthetic oligonucleotide
ugcgguucugaggcaaggu

SEQ ID NO: 2737895 - RNA, 19 nt, Artificial Sequence
  Description of Artificial Sequence: Synthetic oligonucleotide
cccgacuucggauuccgag

SEQ ID NO: 2737896 - RNA, 19 nt, Artificial Sequence
  Description of Artificial Sequence: Synthetic oligonucleotide
cgcgacaagagucuuuccc

SEQ ID NO: 2737897 - RNA, 19 nt, Artificial Sequence
  Description of Artificial Sequence: Synthetic oligonucleotide
ccaccuugcucacuuugcg

SEQ ID NO: 2737898 - RNA, 19 nt, Artificial Sequence
  Description of Artificial Sequence: Synthetic oligonucleotide
  modified_base (4)..(4): a, c, u, g, unknown or other
gganagggcgagccucugc

SEQ ID NO: 2737899 - RNA, 19 nt, Artificial Sequence
  Description of Artificial Sequence: Synthetic oligonucleotide
gguugguuaacuaccccuc

SEQ ID NO: 2737900 - RNA, 19 nt, Artificial Sequence
  Description of Artificial Sequence: Synthetic oligonucleotide
caagguggccgcgacaaga

SEQ ID NO: 2737901 - RNA, 19 nt, Artificial Sequence
  Description of Artificial Sequence: Synthetic oligonucleotide
gguuaacuaccccucccca

SEQ ID NO: 2737902 - RNA, 19 nt, Artificial Sequence
  Description of Artificial Sequence: Synthetic oligonucleotide
gaggcgggaguagcagccg

SEQ ID NO: 2737903 - RNA, 19 nt, Artificial Sequence
  Description of Artificial Sequence: Synthetic oligonucleotide
agcgcgagauggcuacgcu

SEQ ID NO: 2737904 - RNA, 19 nt, Artificial Sequence
  Description of Artificial Sequence: Synthetic oligonucleotide
cagccguucaugucguaga

SEQ ID NO: 2737905 - RNA, 19 nt, Artificial Sequence
  Description of Artificial Sequence: Synthetic oligonucleotide
  modified_base (8)..(8): a, c, u, g, unknown or other
aggugganagggcgagccu

SEQ ID NO: 2737906 - RNA, 19 nt, Artificial Sequence
  Description of Artificial Sequence: Synthetic oligonucleotide
gucccgacuucggauuccg

SEQ ID NO: 2737907 - RNA, 19 nt, Artificial Sequence
  Description of Artificial Sequence: Synthetic oligonucleotide
gccgccaaggcacugaucu

SEQ ID NO: 2737908 - RNA, 19 nt, Artificial Sequence
  Description of Artificial Sequence: Synthetic oligonucleotide
gacuucggauuccgaguuc

SEQ ID NO: 2737909 - RNA, 19 nt, Artificial Sequence
  Description of Artificial Sequence: Synthetic oligonucleotide
gcgguucugaggcaaggug

SEQ ID NO: 2737910 - RNA, 19 nt, Artificial Sequence
  Description of Artificial Sequence: Synthetic oligonucleotide
gcucggacaggccaagcac

SEQ ID NO: 2737911 - RNA, 19 nt, Artificial Sequence
  Description of Artificial Sequence: Synthetic oligonucleotide
caagcacaaccucgcccgc

SEQ ID NO: 2737912 - RNA, 19 nt, Artificial Sequence
  Description of Artificial Sequence: Synthetic oligonucleotide
gcuggucaagccucugagc

SEQ ID NO: 2737913 - RNA, 19 nt, Artificial Sequence
  Description of Artificial Sequence: Synthetic oligonucleotide
gaaggcgcgucccggcgca

SEQ ID NO: 2737914 - RNA, 19 nt, Artificial Sequence
  Description of Artificial Sequence: Synthetic oligonucleotide
ugucccgacuucggauucc

SEQ ID NO: 2737915 - RNA, 19 nt, Artificial Sequence
  Description of Artificial Sequence: Synthetic oligonucleotide
gcugccucggccgccaagg

SEQ ID NO: 2737916 - RNA, 19 nt, Artificial Sequence
  Description of Artificial Sequence: Synthetic oligonucleotide
cugguccucagugcgccgc

SEQ ID NO: 2737917 - RNA, 19 nt, Artificial Sequence
  Description of Artificial Sequence: Synthetic oligonucleotide
agauccaagguggccgcga

SEQ ID NO: 2737918 - RNA, 19 nt, Artificial Sequence
  Description of Artificial Sequence: Synthetic oligonucleotide
auuccgaguucagcuccag

SEQ ID NO: 2737919 - RNA, 19 nt, Artificial Sequence
  Description of Artificial Sequence: Synthetic oligonucleotide
ugguccucagugcgccgcu

SEQ ID NO: 2737920 - RNA, 19 nt, Artificial Sequence
  Description of Artificial Sequence: Synthetic oligonucleotide
cuggaguccaucugguccu

SEQ ID NO: 2737921 - RNA, 19 nt, Artificial Sequence
  Description of Artificial Sequence: Synthetic oligonucleotide
ucguccagcagggcgggaa

SEQ ID NO: 2737922 - RNA, 19 nt, Artificial Sequence
  Description of Artificial Sequence: Synthetic oligonucleotide
ggguugguuaacuaccccu

SEQ ID NO: 2737923 - RNA, 19 nt, Artificial Sequence
  Description of Artificial Sequence: Synthetic oligonucleotide
ugcgccgcuucagcgacac

SEQ ID NO: 2737924 - RNA, 19 nt, Artificial Sequence
  Description of Artificial Sequence: Synthetic oligonucleotide
  modified_base (5)..(5): a, c, u, g, unknown or other
ugganagggcgagccucug

SEQ ID NO: 2737925 - RNA, 19 nt, Artificial Sequence
  Description of Artificial Sequence: Synthetic oligonucleotide
gguggccgcgacaagaguc

SEQ ID NO: 2737926 - RNA, 19 nt, Artificial Sequence
  Description of Artificial Sequence: Synthetic oligonucleotide
gggguugguuaacuacccc

SEQ ID NO: 2737927 - RNA, 19 nt, Artificial Sequence
  Description of Artificial Sequence: Synthetic oligonucleotide
ccagcugucccgacuucgg

SEQ ID NO: 2737928 - RNA, 19 nt, Artificial Sequence
  Description of Artificial Sequence: Synthetic oligonucleotide
cucugagccccgugaccag

SEQ ID NO: 2737929 - RNA, 19 nt, Artificial Sequence
  Description of Artificial Sequence: Synthetic oligonucleotide
gcagccguucaugucguag

SEQ ID NO: 2737930 - RNA, 19 nt, Artificial Sequence
  Description of Artificial Sequence: Synthetic oligonucleotide
gagcggagcccgaaccggc

SEQ ID NO: 2737931 - RNA, 19 nt, Artificial Sequence
  Description of Artificial Sequence: Synthetic oligonucleotide
gggaaggcgcgucccggcg

SEQ ID NO: 2737932 - RNA, 19 nt, Artificial Sequence
  Description of Artificial Sequence: Synthetic oligonucleotide
cucccggggaaccgcgagc

SEQ ID NO: 2737933 - RNA, 19 nt, Artificial Sequence
  Description of Artificial Sequence: Synthetic oligonucleotide
cugucccgacuucggauuc

SEQ ID NO: 2737934 - RNA, 19 nt, Artificial Sequence
  Description of Artificial Sequence: Synthetic oligonucleotide
cgugaccagauccaaggug

SEQ ID NO: 2737935 - RNA, 19 nt, Artificial Sequence
  Description of Artificial Sequence: Synthetic oligonucleotide
guuccuugaggcgggagua

SEQ ID NO: 2737936 - RNA, 19 nt, Artificial Sequence
  Description of Artificial Sequence: Synthetic oligonucleotide
agcaggacguucaccugcu

SEQ ID NO: 2737937 - RNA, 19 nt, Artificial Sequence
  Description of Artificial Sequence: Synthetic oligonucleotide
agggcgagccucugcuggu

SEQ ID NO: 2737938 - RNA, 19 nt, Artificial Sequence
  Description of Artificial Sequence: Synthetic oligonucleotide
aggcgggaguagcagccgu

SEQ ID NO: 2737939 - RNA, 19 nt, Artificial Sequence
  Description of Artificial Sequence: Synthetic oligonucleotide
gggugcugagcggagcccg

SEQ ID NO: 2737940 - RNA, 19 nt, Artificial Sequence
  Description of Artificial Sequence: Synthetic oligonucleotide
gaggcaaggugggcaccag

SEQ ID NO: 2737941 - RNA, 19 nt, Artificial Sequence
  Description of Artificial Sequence: Synthetic oligonucleotide
ugagccccgugaccagauc

SEQ ID NO: 2737942 - RNA, 19 nt, Artificial Sequence
  Description of Artificial Sequence: Synthetic oligonucleotide
cagcgcgagauggcuacgc

SEQ ID NO: 2737943 - RNA, 19 nt, Artificial Sequence
  Description of Artificial Sequence: Synthetic oligonucleotide
ccgaguucagcuccagcug

SEQ ID NO: 2737944 - RNA, 19 nt, Artificial Sequence
  Description of Artificial Sequence: Synthetic oligonucleotide
uaacgugcugcaggaucuc

SEQ ID NO: 2737945 - RNA, 19 nt, Artificial Sequence
  Description of Artificial Sequence: Synthetic oligonucleotide
gcucugcucggacaggcca

SEQ ID NO: 2737946 - RNA, 19 nt, Artificial Sequence
  Description of Artificial Sequence: Synthetic oligonucleotide
ucggccgccaaggcacuga

SEQ ID NO: 2737947 - RNA, 19 nt, Artificial Sequence
  Description of Artificial Sequence: Synthetic oligonucleotide
ucccgacuucggauuccga

SEQ ID NO: 2737948 - RNA, 19 nt, Artificial Sequence
  Description of Artificial Sequence: Synthetic oligonucleotide
gcuacgcucugcucggaca

SEQ ID NO: 2737949 - RNA, 19 nt, Artificial Sequence
  Description of Artificial Sequence: Synthetic oligonucleotide
gcaaggugggcaccaguuc

SEQ ID NO: 2737950 - RNA, 19 nt, Artificial Sequence
  Description of Artificial Sequence: Synthetic oligonucleotide
cgccaaggcacugaucucg

SEQ ID NO: 2737951 - RNA, 19 nt, Artificial Sequence
  Description of Artificial Sequence: Synthetic oligonucleotide
cagauccaagguggccgcg

SEQ ID NO: 2737952 - RNA, 19 nt, Artificial Sequence
  Description of Artificial Sequence: Synthetic oligonucleotide
cagugcgccgcuucagcga

SEQ ID NO: 2737953 - RNA, 19 nt, Artificial Sequence
  Description of Artificial Sequence: Synthetic oligonucleotide
ucccgggcucucccgggga

SEQ ID NO: 2737954 - RNA, 19 nt, Artificial Sequence
  Description of Artificial Sequence: Synthetic oligonucleotide
gagucuuucccgggcucuc

SEQ ID NO: 2737955 - RNA, 19 nt, Artificial Sequence
  Description of Artificial Sequence: Synthetic oligonucleotide
ggaaggcgcgucccggcgc

SEQ ID NO: 2737956 - RNA, 19 nt, Artificial Sequence
  Description of Artificial Sequence: Synthetic oligonucleotide
guccucagugcgccgcuuc

SEQ ID NO: 2737957 - RNA, 19 nt, Artificial Sequence
  Description of Artificial Sequence: Synthetic oligonucleotide
ggaucuccaccuugcucac

SEQ ID NO: 2737958 - RNA, 19 nt, Artificial Sequence
  Description of Artificial Sequence: Synthetic oligonucleotide
cucugcucggacaggccaa

SEQ ID NO: 2737959 - RNA, 19 nt, Artificial Sequence
  Description of Artificial Sequence: Synthetic oligonucleotide
agccccgugaccagaucca

SEQ ID NO: 2737960 - RNA, 19 nt, Artificial Sequence
  Description of Artificial Sequence: Synthetic oligonucleotide
gccucggccgccaaggcac

SEQ ID NO: 2737961 - RNA, 19 nt, Artificial Sequence
  Description of Artificial Sequence: Synthetic oligonucleotide
ggaacgcaugcugccucgg

SEQ ID NO: 2737962 - RNA, 19 nt, Artificial Sequence
  Description of Artificial Sequence: Synthetic oligonucleotide
aggcgcgucccggcgcagc

SEQ ID NO: 2737963 - RNA, 19 nt, Artificial Sequence
  Description of Artificial Sequence: Synthetic oligonucleotide
gccgcgacaagagucuuuc

SEQ ID NO: 2737964 - RNA, 19 nt, Artificial Sequence
  Description of Artificial Sequence: Synthetic oligonucleotide
cgggguugguuaacuaccc

SEQ ID NO: 2737965 - RNA, 19 nt, Artificial Sequence
  Description of Artificial Sequence: Synthetic oligonucleotide
ggagcccgaaccggcagcc

SEQ ID NO: 2737966 - RNA, 19 nt, Artificial Sequence
  Description of Artificial Sequence: Synthetic oligonucleotide
ccuccccaagucucugggg

SEQ ID NO: 2737967 - RNA, 19 nt, Artificial Sequence
  Description of Artificial Sequence: Synthetic oligonucleotide
gccucugagccccgugacc

SEQ ID NO: 2737968 - RNA, 19 nt, Artificial Sequence
  Description of Artificial Sequence: Synthetic oligonucleotide
cugccucggccgccaaggc

SEQ ID NO: 2737969 - RNA, 19 nt, Artificial Sequence
  Description of Artificial Sequence: Synthetic oligonucleotide
ggccaagcacaaccucgcc

SEQ ID NO: 2737970 - RNA, 19 nt, Artificial Sequence
  Description of Artificial Sequence: Synthetic oligonucleotide
gaucgucggcuggaacgca

SEQ ID NO: 2737971 - RNA, 19 nt, Artificial Sequence
  Description of Artificial Sequence: Synthetic oligonucleotide
aucgucggcuggaacgcau

SEQ ID NO: 2737972 - RNA, 19 nt, Artificial Sequence
  Description of Artificial Sequence: Synthetic oligonucleotide
ccaaggcacugaucucgcc

SEQ ID NO: 2737973 - RNA, 19 nt, Artificial Sequence
  Description of Artificial Sequence: Synthetic oligonucleotide
gccguucaugucguagagc

SEQ ID NO: 2737974 - RNA, 19 nt, Artificial Sequence
  Description of Artificial Sequence: Synthetic oligonucleotide
gcgagcacuuuauuccucu

SEQ ID NO: 2737975 - RNA, 19 nt, Artificial Sequence
  Description of Artificial Sequence: Synthetic oligonucleotide
gcucacuuugcgguucuga

SEQ ID NO: 2737976 - RNA, 19 nt, Artificial Sequence
  Description of Artificial Sequence: Synthetic oligonucleotide
ccggcgcagcgcgagaugg

SEQ ID NO: 2737977 - RNA, 19 nt, Artificial Sequence
  Description of Artificial Sequence: Synthetic oligonucleotide
ggcuacgcucugcucggac

SEQ ID NO: 2737978 - RNA, 19 nt, Artificial Sequence
  Description of Artificial Sequence: Synthetic oligonucleotide
gccaaggcacugaucucgc

SEQ ID NO: 2737979 - RNA, 19 nt, Artificial Sequence
  Description of Artificial Sequence: Synthetic oligonucleotide
gcgcgagauggcuacgcuc

SEQ ID NO: 2737980 - RNA, 19 nt, Artificial Sequence
  Description of Artificial Sequence: Synthetic oligonucleotide
ccagcagggcgggaaggcg

SEQ ID NO: 2737981 - RNA, 19 nt, Artificial Sequence
  Description of Artificial Sequence: Synthetic oligonucleotide
caugcugccucggccgcca

SEQ ID NO: 2737982 - RNA, 19 nt, Artificial Sequence
  Description of Artificial Sequence: Synthetic oligonucleotide
  modified_base (6)..(6): a, c, u, g, unknown or other
gugganagggcgagccucu

SEQ ID NO: 2737983 - RNA, 19 nt, Artificial Sequence
  Description of Artificial Sequence: Synthetic oligonucleotide
cgcagcgcgagauggcuac

SEQ ID NO: 2737984 - RNA, 19 nt, Artificial Sequence
  Description of Artificial Sequence: Synthetic oligonucleotide
cgaucgucggcuggaacgc

SEQ ID NO: 2737985 - RNA, 19 nt, Artificial Sequence
  Description of Artificial Sequence: Synthetic oligonucleotide
ggcuggaguccaucugguc

SEQ ID NO: 2737986 - RNA, 19 nt, Artificial Sequence
  Description of Artificial Sequence: Synthetic oligonucleotide
guggccgcgacaagagucu

SEQ ID NO: 2737987 - RNA, 19 nt, Artificial Sequence
  Description of Artificial Sequence: Synthetic oligonucleotide
cggauuccgaguucagcuc

SEQ ID NO: 2737988 - RNA, 19 nt, Artificial Sequence
  Description of Artificial Sequence: Synthetic oligonucleotide
ucccggcgcagcgcgagau

SEQ ID NO: 2737989 - RNA, 19 nt, Artificial Sequence
  Description of Artificial Sequence: Synthetic oligonucleotide
ucucgccauucagggugcu

SEQ ID NO: 2737990 - RNA, 19 nt, Artificial Sequence
  Description of Artificial Sequence: Synthetic oligonucleotide
gagcccgaaccggcagccc

SEQ ID NO: 2737991 - RNA, 19 nt, Artificial Sequence
  Description of Artificial Sequence: Synthetic oligonucleotide
ccuugaggcgggaguagca

SEQ ID NO: 2737992 - RNA, 19 nt, Artificial Sequence
  Description of Artificial Sequence: Synthetic oligonucleotide
aaggcgcgucccggcgcag

SEQ ID NO: 2737993 - RNA, 19 nt, Artificial Sequence
  Description of Artificial Sequence: Synthetic oligonucleotide
cggcuggaacgcaugcugc

SEQ ID NO: 2737994 - RNA, 19 nt, Artificial Sequence
  Description of Artificial Sequence: Synthetic oligonucleotide
gcgggaaggcgcgucccgg

SEQ ID NO: 2737995 - RNA, 19 nt, Artificial Sequence
  Description of Artificial Sequence: Synthetic oligonucleotide
caaccucgcccgcgccgcc

SEQ ID NO: 2737996 - RNA, 19 nt, Artificial Sequence
  Description of Artificial Sequence: Synthetic oligonucleotide
ccccgugaccagauccaag

SEQ ID NO: 2737997 - RNA, 19 nt, Artificial Sequence
  Description of Artificial Sequence: Synthetic oligonucleotide
gaaccgcgagcacuuuauu

SEQ ID NO: 2737998 - RNA, 19 nt, Artificial Sequence
  Description of Artificial Sequence: Synthetic oligonucleotide
gcgagauggcuacgcucug

SEQ ID NO: 2737999 - RNA, 19 nt, Artificial Sequence
  Description of Artificial Sequence: Synthetic oligonucleotide
ggacguucaccugcugcuc

SEQ ID NO: 2738000 - RNA, 19 nt, Artificial Sequence
  Description of Artificial Sequence: Synthetic oligonucleotide
gcucguccagcagggcggg

SEQ ID NO: 2738001 - RNA, 19 nt, Artificial Sequence
  Description of Artificial Sequence: Synthetic oligonucleotide
cagcgacacaagaugcgau

SEQ ID NO: 2738002 - RNA, 19 nt, Artificial Sequence
  Description of Artificial Sequence: Synthetic oligonucleotide
ggaaccgcgagcacuuuau

SEQ ID NO: 2738003 - RNA, 19 nt, Artificial Sequence
  Description of Artificial Sequence: Synthetic oligonucleotide
ggcgagccucugcugguca

SEQ ID NO: 2738004 - RNA, 19 nt, Artificial Sequence
  Description of Artificial Sequence: Synthetic oligonucleotide
uggcuacgcucugcucgga

SEQ ID NO: 2738005 - RNA, 19 nt, Artificial Sequence
  Description of Artificial Sequence: Synthetic oligonucleotide
gcacaaccucgcccgcgcc

SEQ ID NO: 2738006 - RNA, 19 nt, Artificial Sequence
  Description of Artificial Sequence: Synthetic oligonucleotide
cgucggcuggaacgcaugc

SEQ ID NO: 2738007 - RNA, 19 nt, Artificial Sequence
  Description of Artificial Sequence: Synthetic oligonucleotide
cagggcgggaaggcgcguc

SEQ ID NO: 2738008 - RNA, 19 nt, Artificial Sequence
  Description of Artificial Sequence: Synthetic oligonucleotide
cgagauggcuacgcucugc

SEQ ID NO: 2738009 - RNA, 19 nt, Artificial Sequence
  Description of Artificial Sequence: Synthetic oligonucleotide
ccgacuucggauuccgagu

SEQ ID NO: 2738010 - RNA, 19 nt, Artificial Sequence
  Description of Artificial Sequence: Synthetic oligonucleotide
aggugggcaccaguuccuu

SEQ ID NO: 2738011 - RNA, 19 nt, Artificial Sequence
  Description of Artificial Sequence: Synthetic oligonucleotide
gggaaccgcgagcacuuua

SEQ ID NO: 2738012 - RNA, 19 nt, Artificial Sequence
  Description of Artificial Sequence: Synthetic oligonucleotide
cucugcuggucaagccucu

SEQ ID NO: 2738013 - RNA, 19 nt, Artificial Sequence
  Description of Artificial Sequence: Synthetic oligonucleotide
augcgaucgucggcuggaa

SEQ ID NO: 2738014 - RNA, 19 nt, Artificial Sequence
  Description of Artificial Sequence: Synthetic oligonucleotide
cucucccggggaaccgcga

SEQ ID NO: 2738015 - RNA, 19 nt, Artificial Sequence
  Description of Artificial Sequence: Synthetic oligonucleotide
gcaggacguucaccugcug

SEQ ID NO: 2738016 - RNA, 19 nt, Artificial Sequence
  Description of Artificial Sequence: Synthetic oligonucleotide
gcugucccgacuucggauu

SEQ ID NO: 2738017 - RNA, 19 nt, Artificial Sequence
  Description of Artificial Sequence: Synthetic oligonucleotide
agcagccguucaugucgua

SEQ ID NO: 2738018 - RNA, 19 nt, Artificial Sequence
  Description of Artificial Sequence: Synthetic oligonucleotide
gcgggaguagcagccguuc

SEQ ID NO: 2738019 - RNA, 19 nt, Artificial Sequence
  Description of Artificial Sequence: Synthetic oligonucleotide
cgcgagauggcuacgcucu

SEQ ID NO: 2738020 - RNA, 19 nt, Artificial Sequence
  Description of Artificial Sequence: Synthetic oligonucleotide
gcagcgcgagauggcuacg

SEQ ID NO: 2738021 - RNA, 19 nt, Artificial Sequence
  Description of Artificial Sequence: Synthetic oligonucleotide
ccaagguggccgcgacaag

SEQ ID NO: 2738022 - RNA, 19 nt, Artificial Sequence
  Description of Artificial Sequence: Synthetic oligonucleotide
ccgcgacaagagucuuucc

SEQ ID NO: 2738023 - RNA, 19 nt, Artificial Sequence
  Description of Artificial Sequence: Synthetic oligonucleotide
cgcgucccggcgcagcgcg

SEQ ID NO: 2738024 - RNA, 19 nt, Artificial Sequence
  Description of Artificial Sequence: Synthetic oligonucleotide
uggccgcgacaagagucuu

SEQ ID NO: 2738025 - RNA, 19 nt, Artificial Sequence
  Description of Artificial Sequence: Synthetic oligonucleotide
cccggccuccagcuguccc

SEQ ID NO: 2738026 - RNA, 19 nt, Artificial Sequence
  Description of Artificial Sequence: Synthetic oligonucleotide
gaucuccaccuugcucacu

SEQ ID NO: 2738027 - RNA, 19 nt, Artificial Sequence
  Description of Artificial Sequence: Synthetic oligonucleotide
cugagccccgugaccagau

SEQ ID NO: 2738028 - RNA, 19 nt, Artificial Sequence
  Description of Artificial Sequence: Synthetic oligonucleotide
cucggccgccaaggcacug

SEQ ID NO: 2738029 - RNA, 19 nt, Artificial Sequence
  Description of Artificial Sequence: Synthetic oligonucleotide
gcuggaacgcaugcugccu

SEQ ID NO: 2738030 - RNA, 19 nt, Artificial Sequence
  Description of Artificial Sequence: Synthetic oligonucleotide
cgggaaggcgcgucccggc

SEQ ID NO: 2738031 - RNA, 19 nt, Artificial Sequence
  Description of Artificial Sequence: Synthetic oligonucleotide
cgcgagcacuuuauuccuc

SEQ ID NO: 2738032 - RNA, 19 nt, Artificial Sequence
  Description of Artificial Sequence: Synthetic oligonucleotide
cgcucugcucggacaggcc

SEQ ID NO: 2738033 - RNA, 19 nt, Artificial Sequence
  Description of Artificial Sequence: Synthetic oligonucleotide
gcugcucguccagcagggc

SEQ ID NO: 2738034 - RNA, 19 nt, Artificial Sequence
  Description of Artificial Sequence: Synthetic oligonucleotide
ggugcugagcggagcccga

SEQ ID NO: 2738035 - RNA, 19 nt, Artificial Sequence
  Description of Artificial Sequence: Synthetic oligonucleotide
ccgccaaggcacugaucuc

SEQ ID NO: 2738036 - RNA, 19 nt, Artificial Sequence
  Description of Artificial Sequence: Synthetic oligonucleotide
gugcugagcggagcccgaa

SEQ ID NO: 2738037 - RNA, 19 nt, Artificial Sequence
  Description of Artificial Sequence: Synthetic oligonucleotide
cgcaugcugccucggccgc

SEQ ID NO: 2738038 - RNA, 19 nt, Artificial Sequence
  Description of Artificial Sequence: Synthetic oligonucleotide
cgccgcuucagcgacacaa

SEQ ID NO: 2738039 - RNA, 19 nt, Artificial Sequence
  Description of Artificial Sequence: Synthetic oligonucleotide
ggcgcagcgcgagauggcu

SEQ ID NO: 2738040 - RNA, 19 nt, Artificial Sequence
  Description of Artificial Sequence: Synthetic oligonucleotide
gucccggcgcagcgcgaga

SEQ ID NO: 2738041 - RNA, 19 nt, Artificial Sequence
  Description of Artificial Sequence: Synthetic oligonucleotide
gcgagccucugcuggucaa

SEQ ID NO: 2738042 - RNA, 19 nt, Artificial Sequence
  Description of Artificial Sequence: Synthetic oligonucleotide
cgggcucucccggggaacc

SEQ ID NO: 2738043 - RNA, 19 nt, Artificial Sequence
  Description of Artificial Sequence: Synthetic oligonucleotide
ccgcgagcacuuuauuccu

SEQ ID NO: 2738044 - RNA, 19 nt, Artificial Sequence
  Description of Artificial Sequence: Synthetic oligonucleotide
cugaagggcuggaguccau

SEQ ID NO: 2738045 - RNA, 19 nt, Artificial Sequence
  Description of Artificial Sequence: Synthetic oligonucleotide
gggcuggaguccaucuggu

SEQ ID NO: 2738046 - RNA, 19 nt, Artificial Sequence
  Description of Artificial Sequence: Synthetic oligonucleotide
cggcgcagcgcgagauggc

SEQ ID NO: 2738047 - RNA, 19 nt, Artificial Sequence
  Description of Artificial Sequence: Synthetic oligonucleotide
cgggaguagcagccguuca

SEQ ID NO: 2738048 - RNA, 19 nt, Artificial Sequence
  Description of Artificial Sequence: Synthetic oligonucleotide
ccgugaccagauccaaggu

SEQ ID NO: 2738049 - RNA, 19 nt, Artificial Sequence
  Description of Artificial Sequence: Synthetic oligonucleotide
cgacuucggauuccgaguu

SEQ ID NO: 2738050 - RNA, 19 nt, Artificial Sequence
  Description of Artificial Sequence: Synthetic oligonucleotide
cccggggaaccgcgagcac

SEQ ID NO: 2738051 - RNA, 19 nt, Artificial Sequence
  Description of Artificial Sequence: Synthetic oligonucleotide
gccccgugaccagauccaa

SEQ ID NO: 2738052 - RNA, 19 nt, Artificial Sequence
  Description of Artificial Sequence: Synthetic oligonucleotide
gugcgccgcuucagcgaca

SEQ ID NO: 2738053 - RNA, 19 nt, Artificial Sequence
  Description of Artificial Sequence: Synthetic oligonucleotide
cgacacaagaugcgaucgu

SEQ ID NO: 2738054 - RNA, 19 nt, Artificial Sequence
  Description of Artificial Sequence: Synthetic oligonucleotide
ccgggcucucccggggaac

SEQ ID NO: 2738055 - RNA, 19 nt, Artificial Sequence
  Description of Artificial Sequence: Synthetic oligonucleotide
ccuugcucacuuugcgguu

SEQ ID NO: 2738056 - RNA, 19 nt, Artificial Sequence
  Description of Artificial Sequence: Synthetic oligonucleotide
ggccgccaaggcacugauc

SEQ ID NO: 2738057 - RNA, 19 nt, Artificial Sequence
  Description of Artificial Sequence: Synthetic oligonucleotide
cucguccagcagggcggga

SEQ ID NO: 2738058 - RNA, 19 nt, Artificial Sequence
  Description of Artificial Sequence: Synthetic oligonucleotide
ccggggaaccgcgagcacu

SEQ ID NO: 2738059 - RNA, 19 nt, Artificial Sequence
  Description of Artificial Sequence: Synthetic oligonucleotide
ggcgggaguagcagccguu

SEQ ID NO: 2738060 - RNA, 19 nt, Artificial Sequence
  Description of Artificial Sequence: Synthetic oligonucleotide
gcgcagcgcgagauggcua

SEQ ID NO: 2738061 - RNA, 19 nt, Artificial Sequence
  Description of Artificial Sequence: Synthetic oligonucleotide
cccgggcucucccggggaa

SEQ ID NO: 2738062 - RNA, 19 nt, Artificial Sequence
  Description of Artificial Sequence: Synthetic oligonucleotide
ccucgcccgcgccgcccgc

SEQ ID NO: 2738063 - RNA, 19 nt, Artificial Sequence
  Description of Artificial Sequence: Synthetic oligonucleotide
cggggaaccgcgagcacuu

SEQ ID NO: 2738064 - RNA, 19 nt, Artificial Sequence
  Description of Artificial Sequence: Synthetic oligonucleotide
ggccgcgacaagagucuuu

SEQ ID NO: 2738065 - RNA, 19 nt, Artificial Sequence
  Description of Artificial Sequence: Synthetic oligonucleotide
ccccggccuccagcugucc

SEQ ID NO: 2738066 - RNA, 19 nt, Artificial Sequence
  Description of Artificial Sequence: Synthetic oligonucleotide
cgagcacuuuauuccucuu

SEQ ID NO: 2738067 - RNA, 19 nt, Artificial Sequence
  Description of Artificial Sequence: Synthetic oligonucleotide
gcgccgcuucagcgacaca

SEQ ID NO: 2738068 - RNA, 19 nt, Artificial Sequence
  Description of Artificial Sequence: Synthetic oligonucleotide
ccucggccgccaaggcacu

SEQ ID NO: 2738069 - RNA, 19 nt, Artificial Sequence
  Description of Artificial Sequence: Synthetic oligonucleotide
ggggaaccgcgagcacuuu

SEQ ID NO: 2738070 - RNA, 19 nt, Artificial Sequence
  Description of Artificial Sequence: Synthetic oligonucleotide
gcagggcgggaaggcgcgu

SEQ ID NO: 2738071 - RNA, 19 nt, Artificial Sequence
  Description of Artificial Sequence: Synthetic oligonucleotide
cggccgccaaggcacugau

SEQ ID NO: 2738072 - RNA, 19 nt, Artificial Sequence
  Description of Artificial Sequence: Synthetic oligonucleotide
aagacuuugugguagaaac

SEQ ID NO: 2738073 - RNA, 19 nt, Artificial Sequence
  Description of Artificial Sequence: Synthetic oligonucleotide
uuucuuacaauccaguccc

SEQ ID NO: 2738074 - RNA, 19 nt, Artificial Sequence
  Description of Artificial Sequence: Synthetic oligonucleotide
aauaagacauagcagcguc

SEQ ID NO: 2738075 - RNA, 19 nt, Artificial Sequence
  Description of Artificial Sequence: Synthetic oligonucleotide
uuuuaugacagaaugcagc

SEQ ID NO: 2738076 - RNA, 19 nt, Artificial Sequence
  Description of Artificial Sequence: Synthetic oligonucleotide
aagaaaaucagacaggcua

SEQ ID NO: 2738077 - RNA, 19 nt, Artificial Sequence
  Description of Artificial Sequence: Synthetic oligonucleotide
uaaauaagacauagcagcg

SEQ ID NO: 2738078 - RNA, 19 nt, Artificial Sequence
  Description of Artificial Sequence: Synthetic oligonucleotide
ucaaguaucaaaauaggaa

SEQ ID NO: 2738079 - RNA, 19 nt, Artificial Sequence
  Description of Artificial Sequence: Synthetic oligonucleotide
uauucagaaaccaaucuug

SEQ ID NO: 2738080 - RNA, 19 nt, Artificial Sequence
  Description of Artificial Sequence: Synthetic oligonucleotide
ugaaaggagauccagagaa

SEQ ID NO: 2738081 - RNA, 19 nt, Artificial Sequence
  Description of Artificial Sequence: Synthetic oligonucleotide
uuuucuuacaauccagucc

SEQ ID NO: 2738082 - RNA, 19 nt, Artificial Sequence
  Description of Artificial Sequence: Synthetic oligonucleotide
aaaguaagcuagcagaaga

SEQ ID NO: 2738083 - RNA, 19 nt, Artificial Sequence
  Description of Artificial Sequence: Synthetic oligonucleotide
aauauucagaaaccaaucu

SEQ ID NO: 2738084 - RNA, 19 nt, Artificial Sequence
  Description of Artificial Sequence: Synthetic oligonucleotide
uuauaauucaaagaaaauc

SEQ ID NO: 2738085 - RNA, 19 nt, Artificial Sequence
  Description of Artificial Sequence: Synthetic oligonucleotide
uccaccaugagcaacaacu

SEQ ID NO: 2738086 - RNA, 19 nt, Artificial Sequence
  Description of Artificial Sequence: Synthetic oligonucleotide
uaugacagaaugcagcuug

SEQ ID NO: 2738087 - RNA, 19 nt, Artificial Sequence
  Description of Artificial Sequence: Synthetic oligonucleotide
aagugccaaaggcagaccc

SEQ ID NO: 2738088 - RNA, 19 nt, Artificial Sequence
  Description of Artificial Sequence: Synthetic oligonucleotide
gagaagacaagccaaagac

SEQ ID NO: 2738089 - RNA, 19 nt, Artificial Sequence
  Description of Artificial Sequence: Synthetic oligonucleotide
aagccaaagacuuuguggu

SEQ ID NO: 2738090 - RNA, 19 nt, Artificial Sequence
  Description of Artificial Sequence: Synthetic oligonucleotide
ugaaguacaggccugggca

SEQ ID NO: 2738091 - RNA, 19 nt, Artificial Sequence
  Description of Artificial Sequence: Synthetic oligonucleotide
ucagaaaccaaucuugaaa

SEQ ID NO: 2738092 - RNA, 19 nt, Artificial Sequence
  Description of Artificial Sequence: Synthetic oligonucleotide
guacaguaaaacaaaaggg

SEQ ID NO: 2738093 - RNA, 19 nt, Artificial Sequence
  Description of Artificial Sequence: Synthetic oligonucleotide
cugacuaugacacaucuug

SEQ ID NO: 2738094 - RNA, 19 nt, Artificial Sequence
  Description of Artificial Sequence: Synthetic oligonucleotide
cuuugugguagaaacaccc

SEQ ID NO: 2738095 - RNA, 19 nt, Artificial Sequence
  Description of Artificial Sequence: Synthetic oligonucleotide
aagaguuuaaggaacacca

SEQ ID NO: 2738096 - RNA, 19 nt, Artificial Sequence
  Description of Artificial Sequence: Synthetic oligonucleotide
cuugaaaggagauccagag

SEQ ID NO: 2738097 - RNA, 19 nt, Artificial Sequence
  Description of Artificial Sequence: Synthetic oligonucleotide
aagggagagacccaccccg

SEQ ID NO: 2738098 - RNA, 19 nt, Artificial Sequence
  Description of Artificial Sequence: Synthetic oligonucleotide
agcaaaguaagcuagcaga

SEQ ID NO: 2738099 - RNA, 19 nt, Artificial Sequence
  Description of Artificial Sequence: Synthetic oligonucleotide
ucuggaauauucagaaacc

SEQ ID NO: 2738100 - RNA, 19 nt, Artificial Sequence
  Description of Artificial Sequence: Synthetic oligonucleotide
ugaauaaauaagacauagc

SEQ ID NO: 2738101 - RNA, 19 nt, Artificial Sequence
  Description of Artificial Sequence: Synthetic oligonucleotide
uuuaugacagaaugcagcu

SEQ ID NO: 2738102 - RNA, 19 nt, Artificial Sequence
  Description of Artificial Sequence: Synthetic oligonucleotide
uucaaguaucaaaauagga

SEQ ID NO: 2738103 - RNA, 19 nt, Artificial Sequence
  Description of Artificial Sequence: Synthetic oligonucleotide
aaaucagacaggcuaacaa

SEQ ID NO: 2738104 - RNA, 19 nt, Artificial Sequence
  Description of Artificial Sequence: Synthetic oligonucleotide
ugacacaucuugaugacug

SEQ ID NO: 2738105 - RNA, 19 nt, Artificial Sequence
  Description of Artificial Sequence: Synthetic oligonucleotide
cugaauaaauaagacauag

SEQ ID NO: 2738106 - RNA, 19 nt, Artificial Sequence
  Description of Artificial Sequence: Synthetic oligonucleotide
gaauuucuggaauauucag

SEQ ID NO: 2738107 - RNA, 19 nt, Artificial Sequence
  Description of Artificial Sequence: Synthetic oligonucleotide
guagaagaggaauuucugg

SEQ ID NO: 2738108 - RNA, 19 nt, Artificial Sequence
  Description of Artificial Sequence: Synthetic oligonucleotide
uuacaauccagucccacug

SEQ ID NO: 2738109 - RNA, 19 nt, Artificial Sequence
  Description of Artificial Sequence: Synthetic oligonucleotide
aaacaaagauuaaauaaca

SEQ ID NO: 2738110 - RNA, 19 nt, Artificial Sequence
  Description of Artificial Sequence: Synthetic oligonucleotide
aaaagcaaaguaagcuagc

SEQ ID NO: 2738111 - RNA, 19 nt, Artificial Sequence
  Description of Artificial Sequence: Synthetic oligonucleotide
agguguuuauaauucaaag

SEQ ID NO: 2738112 - RNA, 19 nt, Artificial Sequence
  Description of Artificial Sequence: Synthetic oligonucleotide
aaucacacaagugccaaag

SEQ ID NO: 2738113 - RNA, 19 nt, Artificial Sequence
  Description of Artificial Sequence: Synthetic oligonucleotide
ucacacaagugccaaaggc

SEQ ID NO: 2738114 - RNA, 19 nt, Artificial Sequence
  Description of Artificial Sequence: Synthetic oligonucleotide
ugagcaacaacucccguga

SEQ ID NO: 2738115 - RNA, 19 nt, Artificial Sequence
  Description of Artificial Sequence: Synthetic oligonucleotide
acaucuugaugacugcagc

SEQ ID NO: 2738116 - RNA, 19 nt, Artificial Sequence
  Description of Artificial Sequence: Synthetic oligonucleotide
acaaagauuaaauaacauu

SEQ ID NO: 2738117 - RNA, 19 nt, Artificial Sequence
  Description of Artificial Sequence: Synthetic oligonucleotide
auucugagcgcucaaucac

SEQ ID NO: 2738118 - RNA, 19 nt, Artificial Sequence
  Description of Artificial Sequence: Synthetic oligonucleotide
cacaagcugacuaugacac

SEQ ID NO: 2738119 - RNA, 19 nt, Artificial Sequence
  Description of Artificial Sequence: Synthetic oligonucleotide
gaguuuaaggaacaccagc

SEQ ID NO: 2738120 - RNA, 19 nt, Artificial Sequence
  Description of Artificial Sequence: Synthetic oligonucleotide
uuaaggaacaccagcuugu

SEQ ID NO: 2738121 - RNA, 19 nt, Artificial Sequence
  Description of Artificial Sequence: Synthetic oligonucleotide
agacauagcagcgucacgg

SEQ ID NO: 2738122 - RNA, 19 nt, Artificial Sequence
  Description of Artificial Sequence: Synthetic oligonucleotide
aagcaaaguaagcuagcag

SEQ ID NO: 2738123 - RNA, 19 nt, Artificial Sequence
  Description of Artificial Sequence: Synthetic oligonucleotide
aggaauuucuggaauauuc

SEQ ID NO: 2738124 - RNA, 19 nt, Artificial Sequence
  Description of Artificial Sequence: Synthetic oligonucleotide
agacccuucuacuuggcac

SEQ ID NO: 2738125 - RNA, 19 nt, Artificial Sequence
  Description of Artificial Sequence: Synthetic oligonucleotide
cuaacaacuuuauguacag

SEQ ID NO: 2738126 - RNA, 19 nt, Artificial Sequence
  Description of Artificial Sequence: Synthetic oligonucleotide
accaugagcaacaacuccc

SEQ ID NO: 2738127 - RNA, 19 nt, Artificial Sequence
  Description of Artificial Sequence: Synthetic oligonucleotide
ugugguagaaacacccuga

SEQ ID NO: 2738128 - RNA, 19 nt, Artificial Sequence
  Description of Artificial Sequence: Synthetic oligonucleotide
aauccagucccacugucca

SEQ ID NO: 2738129 - RNA, 19 nt, Artificial Sequence
  Description of Artificial Sequence: Synthetic oligonucleotide
caucguagugucuauacug

SEQ ID NO: 2738130 - RNA, 19 nt, Artificial Sequence
  Description of Artificial Sequence: Synthetic oligonucleotide
ugguuuuaugacagaaugc

SEQ ID NO: 2738131 - RNA, 19 nt, Artificial Sequence
  Description of Artificial Sequence: Synthetic oligonucleotide
uugaauucaucguaguguc

SEQ ID NO: 2738132 - RNA, 19 nt, Artificial Sequence
  Description of Artificial Sequence: Synthetic oligonucleotide
acuaugacacaucuugaug

SEQ ID NO: 2738133 - RNA, 19 nt, Artificial Sequence
  Description of Artificial Sequence: Synthetic oligonucleotide
ugagcgcucaaucacacaa

SEQ ID NO: 2738134 - RNA, 19 nt, Artificial Sequence
  Description of Artificial Sequence: Synthetic oligonucleotide
aacacccugaauaaauaag

SEQ ID NO: 2738135 - RNA, 19 nt, Artificial Sequence
  Description of Artificial Sequence: Synthetic oligonucleotide
aaaggagauccagagaaga

SEQ ID NO: 2738136 - RNA, 19 nt, Artificial Sequence
  Description of Artificial Sequence: Synthetic oligonucleotide
ugaccugaaguacaggccu

SEQ ID NO: 2738137 - RNA, 19 nt, Artificial Sequence
  Description of Artificial Sequence: Synthetic oligonucleotide
agcaacaacucccgugacc

SEQ ID NO: 2738138 - RNA, 19 nt, Artificial Sequence
  Description of Artificial Sequence: Synthetic oligonucleotide
aaaggcagacccuucuacu

SEQ ID NO: 2738139 - RNA, 19 nt, Artificial Sequence
  Description of Artificial Sequence: Synthetic oligonucleotide
ucuugaaaggagauccaga

SEQ ID NO: 2738140 - RNA, 19 nt, Artificial Sequence
  Description of Artificial Sequence: Synthetic oligonucleotide
aaacacccugaauaaauaa

SEQ ID NO: 2738141 - RNA, 19 nt, Artificial Sequence
  Description of Artificial Sequence: Synthetic oligonucleotide
auucaaguaucaaaauagg

SEQ ID NO: 2738142 - RNA, 19 nt, Artificial Sequence
  Description of Artificial Sequence: Synthetic oligonucleotide
guagugucuauacuguccc

SEQ ID NO: 2738143 - RNA, 19 nt, Artificial Sequence
  Description of Artificial Sequence: Synthetic oligonucleotide
aaagcaaaguaagcuagca

SEQ ID NO: 2738144 - RNA, 19 nt, Artificial Sequence
  Description of Artificial Sequence: Synthetic oligonucleotide
cacaagguguuuauaauuc

SEQ ID NO: 2738145 - RNA, 19 nt, Artificial Sequence
  Description of Artificial Sequence: Synthetic oligonucleotide
uugugguagaaacacccug

SEQ ID NO: 2738146 - RNA, 19 nt, Artificial Sequence
  Description of Artificial Sequence: Synthetic oligonucleotide
gguagaaacacccugaaua

SEQ ID NO: 2738147 - RNA, 19 nt, Artificial Sequence
  Description of Artificial Sequence: Synthetic oligonucleotide
gaagaguuuaaggaacacc

SEQ ID NO: 2738148 - RNA, 19 nt, Artificial Sequence
  Description of Artificial Sequence: Synthetic oligonucleotide
augcagcuugaauucaucg

SEQ ID NO: 2738149 - RNA, 19 nt, Artificial Sequence
  Description of Artificial Sequence: Synthetic oligonucleotide
uucaucguagugucuauac

SEQ ID NO: 2738150 - RNA, 19 nt, Artificial Sequence
  Description of Artificial Sequence: Synthetic oligonucleotide
acaagugccaaaggcagac

SEQ ID NO: 2738151 - RNA, 19 nt, Artificial Sequence
  Description of Artificial Sequence: Synthetic oligonucleotide
uggaauauucagaaaccaa

SEQ ID NO: 2738152 - RNA, 19 nt, Artificial Sequence
  Description of Artificial Sequence: Synthetic oligonucleotide
gacuuugugguagaaacac

SEQ ID NO: 2738153 - RNA, 19 nt, Artificial Sequence
  Description of Artificial Sequence: Synthetic oligonucleotide
aaauaagacauagcagcgu

SEQ ID NO: 2738154 - RNA, 19 nt, Artificial Sequence
  Description of Artificial Sequence: Synthetic oligonucleotide
gaaaccaaucuugaaagga

SEQ ID NO: 2738155 - RNA, 19 nt, Artificial Sequence
  Description of Artificial Sequence: Synthetic oligonucleotide
auauucagaaaccaaucuu

SEQ ID NO: 2738156 - RNA, 19 nt, Artificial Sequence
  Description of Artificial Sequence: Synthetic oligonucleotide
gaauauucagaaaccaauc

SEQ ID NO: 2738157 - RNA, 19 nt, Artificial Sequence
  Description of Artificial Sequence: Synthetic oligonucleotide
aaagauuaaauaacauuuu

SEQ ID NO: 2738158 - RNA, 19 nt, Artificial Sequence
  Description of Artificial Sequence: Synthetic oligonucleotide
uucuacuuggcaccuggcc

SEQ ID NO: 2738159 - RNA, 19 nt, Artificial Sequence
  Description of Artificial Sequence: Synthetic oligonucleotide
aaguaagcuagcagaagag

SEQ ID NO: 2738160 - RNA, 19 nt, Artificial Sequence
  Description of Artificial Sequence: Synthetic oligonucleotide
uccagagaagacaagccaa

SEQ ID NO: 2738161 - RNA, 19 nt, Artificial Sequence
  Description of Artificial Sequence: Synthetic oligonucleotide
aaggagauccagagaagac

SEQ ID NO: 2738162 - RNA, 19 nt, Artificial Sequence
  Description of Artificial Sequence: Synthetic oligonucleotide
agguuuugugcccacccac

SEQ ID NO: 2738163 - RNA, 19 nt, Artificial Sequence
  Description of Artificial Sequence: Synthetic oligonucleotide
aguuuaaggaacaccagcu

SEQ ID NO: 2738164 - RNA, 19 nt, Artificial Sequence
  Description of Artificial Sequence: Synthetic oligonucleotide
aagacauagcagcgucacg

SEQ ID NO: 2738165 - RNA, 19 nt, Artificial Sequence
  Description of Artificial Sequence: Synthetic oligonucleotide
uaccacaagguguuuauaa

SEQ ID NO: 2738166 - RNA, 19 nt, Artificial Sequence
  Description of Artificial Sequence: Synthetic oligonucleotide
uaagcuagcagaagaguuu

SEQ ID NO: 2738167 - RNA, 19 nt, Artificial Sequence
  Description of Artificial Sequence: Synthetic oligonucleotide
acccugaauaaauaagaca

SEQ ID NO: 2738168 - RNA, 19 nt, Artificial Sequence
  Description of Artificial Sequence: Synthetic oligonucleotide
caucuugaugacugcagcc

SEQ ID NO: 2738169 - RNA, 19 nt, Artificial Sequence
  Description of Artificial Sequence: Synthetic oligonucleotide
augagcaacaacucccgug

SEQ ID NO: 2738170 - RNA, 19 nt, Artificial Sequence
  Description of Artificial Sequence: Synthetic oligonucleotide
acugcagccacgcauucug

SEQ ID NO: 2738171 - RNA, 19 nt, Artificial Sequence
  Description of Artificial Sequence: Synthetic oligonucleotide
ugucuauacuguccccagg

SEQ ID NO: 2738172 - RNA, 19 nt, Artificial Sequence
  Description of Artificial Sequence: Synthetic oligonucleotide
auaggaaacaaagauuaaa

SEQ ID NO: 2738173 - RNA, 19 nt, Artificial Sequence
  Description of Artificial Sequence: Synthetic oligonucleotide
uaugacacaucuugaugac

SEQ ID NO: 2738174 - RNA, 19 nt, Artificial Sequence
  Description of Artificial Sequence: Synthetic oligonucleotide
caggcuaacaacuuuaugu

SEQ ID NO: 2738175 - RNA, 19 nt, Artificial Sequence
  Description of Artificial Sequence: Synthetic oligonucleotide
aaugcagcuugaauucauc

SEQ ID NO: 2738176 - RNA, 19 nt, Artificial Sequence
  Description of Artificial Sequence: Synthetic oligonucleotide
uuugugguagaaacacccu

SEQ ID NO: 2738177 - RNA, 19 nt, Artificial Sequence
  Description of Artificial Sequence: Synthetic oligonucleotide
uugaaaggagauccagaga

SEQ ID NO: 2738178 - RNA, 19 nt, Artificial Sequence
  Description of Artificial Sequence: Synthetic oligonucleotide
gacauagcagcgucacggg

SEQ ID NO: 2738179 - RNA, 19 nt, Artificial Sequence
  Description of Artificial Sequence: Synthetic oligonucleotide
gauccagagaagacaagcc

SEQ ID NO: 2738180 - RNA, 19 nt, Artificial Sequence
  Description of Artificial Sequence: Synthetic oligonucleotide
gacccuucuacuuggcacc

SEQ ID NO: 2738181 - RNA, 19 nt, Artificial Sequence
  Description of Artificial Sequence: Synthetic oligonucleotide
ugacuaugacacaucuuga

SEQ ID NO: 2738182 - RNA, 19 nt, Artificial Sequence
  Description of Artificial Sequence: Synthetic oligonucleotide
uaagacauagcagcgucac

SEQ ID NO: 2738183 - RNA, 19 nt, Artificial Sequence
  Description of Artificial Sequence: Synthetic oligonucleotide
auccagagaagacaagcca

SEQ ID NO: 2738184 - RNA, 19 nt, Artificial Sequence
  Description of Artificial Sequence: Synthetic oligonucleotide
ugcagcuugaauucaucgu

SEQ ID NO: 2738185 - RNA, 19 nt, Artificial Sequence
  Description of Artificial Sequence: Synthetic oligonucleotide
aaaaucagacaggcuaaca

SEQ ID NO: 2738186 - RNA, 19 nt, Artificial Sequence
  Description of Artificial Sequence: Synthetic oligonucleotide
cuugaugacugcagccacg

SEQ ID NO: 2738187 - RNA, 19 nt, Artificial Sequence
  Description of Artificial Sequence: Synthetic oligonucleotide
ucuugaugacugcagccac

SEQ ID NO: 2738188 - RNA, 19 nt, Artificial Sequence
  Description of Artificial Sequence: Synthetic oligonucleotide
acaagguguuuauaauuca

SEQ ID NO: 2738189 - RNA, 19 nt, Artificial Sequence
  Description of Artificial Sequence: Synthetic oligonucleotide
agaagaggaauuucuggaa

SEQ ID NO: 2738190 - RNA, 19 nt, Artificial Sequence
  Description of Artificial Sequence: Synthetic oligonucleotide
cagccacgcauucugagcg

SEQ ID NO: 2738191 - RNA, 19 nt, Artificial Sequence
  Description of Artificial Sequence: Synthetic oligonucleotide
ucaucguagugucuauacu

SEQ ID NO: 2738192 - RNA, 19 nt, Artificial Sequence
  Description of Artificial Sequence: Synthetic oligonucleotide
aacucccgugaccugaagu

SEQ ID NO: 2738193 - RNA, 19 nt, Artificial Sequence
  Description of Artificial Sequence: Synthetic oligonucleotide
acaauccagucccacuguc

SEQ ID NO: 2738194 - RNA, 19 nt, Artificial Sequence
  Description of Artificial Sequence: Synthetic oligonucleotide
uuugugcccacccacccaa

SEQ ID NO: 2738195 - RNA, 19 nt, Artificial Sequence
  Description of Artificial Sequence: Synthetic oligonucleotide
agacaagccaaagacuuug

SEQ ID NO: 2738196 - RNA, 19 nt, Artificial Sequence
  Description of Artificial Sequence: Synthetic oligonucleotide
uucugagcgcucaaucaca

SEQ ID NO: 2738197 - RNA, 19 nt, Artificial Sequence
  Description of Artificial Sequence: Synthetic oligonucleotide
aguagaagaggaauuucug

SEQ ID NO: 2738198 - RNA, 19 nt, Artificial Sequence
  Description of Artificial Sequence: Synthetic oligonucleotide
aauucaucguagugucuau

SEQ ID NO: 2738199 - RNA, 19 nt, Artificial Sequence
  Description of Artificial Sequence: Synthetic oligonucleotide
guuuuaugacagaaugcag

SEQ ID NO: 2738200 - RNA, 19 nt, Artificial Sequence
  Description of Artificial Sequence: Synthetic oligonucleotide
acuuugugguagaaacacc

SEQ ID NO: 2738201 - RNA, 19 nt, Artificial Sequence
  Description of Artificial Sequence: Synthetic oligonucleotide
cacccugaauaaauaagac

SEQ ID NO: 2738202 - RNA, 19 nt, Artificial Sequence
  Description of Artificial Sequence: Synthetic oligonucleotide
aacaacucccgugaccuga

SEQ ID NO: 2738203 - RNA, 19 nt, Artificial Sequence
  Description of Artificial Sequence: Synthetic oligonucleotide
acauagcagcgucacgggg

SEQ ID NO: 2738204 - RNA, 19 nt, Artificial Sequence
  Description of Artificial Sequence: Synthetic oligonucleotide
aggcuaacaacuuuaugua

SEQ ID NO: 2738205 - RNA, 19 nt, Artificial Sequence
  Description of Artificial Sequence: Synthetic oligonucleotide
agaaacacccugaauaaau

SEQ ID NO: 2738206 - RNA, 19 nt, Artificial Sequence
  Description of Artificial Sequence: Synthetic oligonucleotide
agcugacuaugacacaucu

SEQ ID NO: 2738207 - RNA, 19 nt, Artificial Sequence
  Description of Artificial Sequence: Synthetic oligonucleotide
uguccccagguuuugugcc

SEQ ID NO: 2738208 - RNA, 19 nt, Artificial Sequence
  Description of Artificial Sequence: Synthetic oligonucleotide
uucagaaaccaaucuugaa

SEQ ID NO: 2738209 - RNA, 19 nt, Artificial Sequence
  Description of Artificial Sequence: Synthetic oligonucleotide
acaagccaaagacuuugug

SEQ ID NO: 2738210 - RNA, 19 nt, Artificial Sequence
  Description of Artificial Sequence: Synthetic oligonucleotide
aaagacuuugugguagaaa

SEQ ID NO: 2738211 - RNA, 19 nt, Artificial Sequence
  Description of Artificial Sequence: Synthetic oligonucleotide
uugaugacugcagccacgc

SEQ ID NO: 2738212 - RNA, 19 nt, Artificial Sequence
  Description of Artificial Sequence: Synthetic oligonucleotide
ucugagcgcucaaucacac

SEQ ID NO: 2738213 - RNA, 19 nt, Artificial Sequence
  Description of Artificial Sequence: Synthetic oligonucleotide
uggccugaaagggagagac

SEQ ID NO: 2738214 - RNA, 19 nt, Artificial Sequence
  Description of Artificial Sequence: Synthetic oligonucleotide
acacccugaauaaauaaga

SEQ ID NO: 2738215 - RNA, 19 nt, Artificial Sequence
  Description of Artificial Sequence: Synthetic oligonucleotide
agucccacuguccaccaug

SEQ ID NO: 2738216 - RNA, 19 nt, Artificial Sequence
  Description of Artificial Sequence: Synthetic oligonucleotide
aucuugaaaggagauccag

SEQ ID NO: 2738217 - RNA, 19 nt, Artificial Sequence
  Description of Artificial Sequence: Synthetic oligonucleotide
aaggcagacccuucuacuu

SEQ ID NO: 2738218 - RNA, 19 nt, Artificial Sequence
  Description of Artificial Sequence: Synthetic oligonucleotide
gaaaggagauccagagaag

SEQ ID NO: 2738219 - RNA, 19 nt, Artificial Sequence
  Description of Artificial Sequence: Synthetic oligonucleotide
acggggaagaggugccugc

SEQ ID NO: 2738220 - RNA, 19 nt, Artificial Sequence
  Description of Artificial Sequence: Synthetic oligonucleotide
caaaggcagacccuucuac

SEQ ID NO: 2738221 - RNA, 19 nt, Artificial Sequence
  Description of Artificial Sequence: Synthetic oligonucleotide
caauccagucccacugucc

SEQ ID NO: 2738222 - RNA, 19 nt, Artificial Sequence
  Description of Artificial Sequence: Synthetic oligonucleotide
uuuugugcccacccaccca

SEQ ID NO: 2738223 - RNA, 19 nt, Artificial Sequence
  Description of Artificial Sequence: Synthetic oligonucleotide
aucagacaggcuaacaacu

SEQ ID NO: 2738224 - RNA, 19 nt, Artificial Sequence
  Description of Artificial Sequence: Synthetic oligonucleotide
gagagacccaccccgagga

SEQ ID NO: 2738225 - RNA, 19 nt, Artificial Sequence
  Description of Artificial Sequence: Synthetic oligonucleotide
cgcucaaucacacaagugc

SEQ ID NO: 2738226 - RNA, 19 nt, Artificial Sequence
  Description of Artificial Sequence: Synthetic oligonucleotide
ugaauucaucguagugucu

SEQ ID NO: 2738227 - RNA, 19 nt, Artificial Sequence
  Description of Artificial Sequence: Synthetic oligonucleotide
aauaggaaacaaagauuaa

SEQ ID NO: 2738228 - RNA, 19 nt, Artificial Sequence
  Description of Artificial Sequence: Synthetic oligonucleotide
gaauucaucguagugucua

SEQ ID NO: 2738229 - RNA, 19 nt, Artificial Sequence
  Description of Artificial Sequence: Synthetic oligonucleotide
caccaugagcaacaacucc

SEQ ID NO: 2738230 - RNA, 19 nt, Artificial Sequence
  Description of Artificial Sequence: Synthetic oligonucleotide
guuuugugcccacccaccc

SEQ ID NO: 2738231 - RNA, 19 nt, Artificial Sequence
  Description of Artificial Sequence: Synthetic oligonucleotide
agcgcucaaucacacaagu

SEQ ID NO: 2738232 - RNA, 19 nt, Artificial Sequence
  Description of Artificial Sequence: Synthetic oligonucleotide
caaaguaagcuagcagaag

SEQ ID NO: 2738233 - RNA, 19 nt, Artificial Sequence
  Description of Artificial Sequence: Synthetic oligonucleotide
cuugaauucaucguagugu

SEQ ID NO: 2738234 - RNA, 19 nt, Artificial Sequence
  Description of Artificial Sequence: Synthetic oligonucleotide
agugucuauacugucccca

SEQ ID NO: 2738235 - RNA, 19 nt, Artificial Sequence
  Description of Artificial Sequence: Synthetic oligonucleotide
gaagacaagccaaagacuu

SEQ ID NO: 2738236 - RNA, 19 nt, Artificial Sequence
  Description of Artificial Sequence: Synthetic oligonucleotide
ugcagccacgcauucugag

SEQ ID NO: 2738237 - RNA, 19 nt, Artificial Sequence
  Description of Artificial Sequence: Synthetic oligonucleotide
accacaagguguuuauaau

SEQ ID NO: 2738238 - RNA, 19 nt, Artificial Sequence
  Description of Artificial Sequence: Synthetic oligonucleotide
ugccugugguuuuaugaca

SEQ ID NO: 2738239 - RNA, 19 nt, Artificial Sequence
  Description of Artificial Sequence: Synthetic oligonucleotide
agaaaaucagacaggcuaa

SEQ ID NO: 2738240 - RNA, 19 nt, Artificial Sequence
  Description of Artificial Sequence: Synthetic oligonucleotide
gaaaaucagacaggcuaac

SEQ ID NO: 2738241 - RNA, 19 nt, Artificial Sequence
  Description of Artificial Sequence: Synthetic oligonucleotide
aaucuugaaaggagaucca

SEQ ID NO: 2738242 - RNA, 19 nt, Artificial Sequence
  Description of Artificial Sequence: Synthetic oligonucleotide
gugucuauacuguccccag

SEQ ID NO: 2738243 - RNA, 19 nt, Artificial Sequence
  Description of Artificial Sequence: Synthetic oligonucleotide
agaguuuaaggaacaccag

SEQ ID NO: 2738244 - RNA, 19 nt, Artificial Sequence
  Description of Artificial Sequence: Synthetic oligonucleotide
acuguccaccaugagcaac

SEQ ID NO: 2738245 - RNA, 19 nt, Artificial Sequence
  Description of Artificial Sequence: Synthetic oligonucleotide
cauagcagcgucacgggga

SEQ ID NO: 2738246 - RNA, 19 nt, Artificial Sequence
  Description of Artificial Sequence: Synthetic oligonucleotide
ucccgugaccugaaguaca

SEQ ID NO: 2738247 - RNA, 19 nt, Artificial Sequence
  Description of Artificial Sequence: Synthetic oligonucleotide
uccagucccacuguccacc

SEQ ID NO: 2738248 - RNA, 19 nt, Artificial Sequence
  Description of Artificial Sequence: Synthetic oligonucleotide
acaacuuuauguacaguaa

SEQ ID NO: 2738249 - RNA, 19 nt, Artificial Sequence
  Description of Artificial Sequence: Synthetic oligonucleotide
ggucauucaaguaucaaaa

SEQ ID NO: 2738250 - RNA, 19 nt, Artificial Sequence
  Description of Artificial Sequence: Synthetic oligonucleotide
agcuugaauucaucguagu

SEQ ID NO: 2738251 - RNA, 19 nt, Artificial Sequence
  Description of Artificial Sequence: Synthetic oligonucleotide
caacuuuauguacaguaaa

SEQ ID NO: 2738252 - RNA, 19 nt, Artificial Sequence
  Description of Artificial Sequence: Synthetic oligonucleotide
agcgucacggggaagaggu

SEQ ID NO: 2738253 - RNA, 19 nt, Artificial Sequence
  Description of Artificial Sequence: Synthetic oligonucleotide
gaugacugcagccacgcau

SEQ ID NO: 2738254 - RNA, 19 nt, Artificial Sequence
  Description of Artificial Sequence: Synthetic oligonucleotide
acuguccccagguuuugug

SEQ ID NO: 2738255 - RNA, 19 nt, Artificial Sequence
  Description of Artificial Sequence: Synthetic oligonucleotide
acucccgugaccugaagua

SEQ ID NO: 2738256 - RNA, 19 nt, Artificial Sequence
  Description of Artificial Sequence: Synthetic oligonucleotide
cuguccccagguuuugugc

SEQ ID NO: 2738257 - RNA, 19 nt, Artificial Sequence
  Description of Artificial Sequence: Synthetic oligonucleotide
aagcuagcagaagaguuua

SEQ ID NO: 2738258 - RNA, 19 nt, Artificial Sequence
  Description of Artificial Sequence: Synthetic oligonucleotide
caagguguuuauaauucaa

SEQ ID NO: 2738259 - RNA, 19 nt, Artificial Sequence
  Description of Artificial Sequence: Synthetic oligonucleotide
agaggaauuucuggaauau

SEQ ID NO: 2738260 - RNA, 19 nt, Artificial Sequence
  Description of Artificial Sequence: Synthetic oligonucleotide
aggcagacccuucuacuug

SEQ ID NO: 2738261 - RNA, 19 nt, Artificial Sequence
  Description of Artificial Sequence: Synthetic oligonucleotide
gcuugaauucaucguagug

SEQ ID NO: 2738262 - RNA, 19 nt, Artificial Sequence
  Description of Artificial Sequence: Synthetic oligonucleotide
aagcugacuaugacacauc

SEQ ID NO: 2738263 - RNA, 19 nt, Artificial Sequence
  Description of Artificial Sequence: Synthetic oligonucleotide
aucguagugucuauacugu

SEQ ID NO: 2738264 - RNA, 19 nt, Artificial Sequence
  Description of Artificial Sequence: Synthetic oligonucleotide
gaguagaagaggaauuucu

SEQ ID NO: 2738265 - RNA, 19 nt, Artificial Sequence
  Description of Artificial Sequence: Synthetic oligonucleotide
gcuaacaacuuuauguaca

SEQ ID NO: 2738266 - RNA, 19 nt, Artificial Sequence
  Description of Artificial Sequence: Synthetic oligonucleotide
ucuauacuguccccagguu

SEQ ID NO: 2738267 - RNA, 19 nt, Artificial Sequence
  Description of Artificial Sequence: Synthetic oligonucleotide
caccuggccugaaagggag

SEQ ID NO: 2738268 - RNA, 19 nt, Artificial Sequence
  Description of Artificial Sequence: Synthetic oligonucleotide
gccugaaagggagagaccc

SEQ ID NO: 2738269 - RNA, 19 nt, Artificial Sequence
  Description of Artificial Sequence: Synthetic oligonucleotide
gaagaggaauuucuggaau

SEQ ID NO: 2738270 - RNA, 19 nt, Artificial Sequence
  Description of Artificial Sequence: Synthetic oligonucleotide
agccacgcauucugagcgc

SEQ ID NO: 2738271 - RNA, 19 nt, Artificial Sequence
  Description of Artificial Sequence: Synthetic oligonucleotide
cucaaucacacaagugcca

SEQ ID NO: 2738272 - RNA, 19 nt, Artificial Sequence
  Description of Artificial Sequence: Synthetic oligonucleotide
gugaccugaaguacaggcc

SEQ ID NO: 2738273 - RNA, 19 nt, Artificial Sequence
  Description of Artificial Sequence: Synthetic oligonucleotide
cuggaauauucagaaacca

SEQ ID NO: 2738274 - RNA, 19 nt, Artificial Sequence
  Description of Artificial Sequence: Synthetic oligonucleotide
ggcagacccuucuacuugg

SEQ ID NO: 2738275 - RNA, 19 nt, Artificial Sequence
  Description of Artificial Sequence: Synthetic oligonucleotide
ugguagaaacacccugaau

SEQ ID NO: 2738276 - RNA, 19 nt, Artificial Sequence
  Description of Artificial Sequence: Synthetic oligonucleotide
cgugaccugaaguacaggc

SEQ ID NO: 2738277 - RNA, 19 nt, Artificial Sequence
  Description of Artificial Sequence: Synthetic oligonucleotide
ggaauuucuggaauauuca

SEQ ID NO: 2738278 - RNA, 19 nt, Artificial Sequence
  Description of Artificial Sequence: Synthetic oligonucleotide
uagugucuauacugucccc

SEQ ID NO: 2738279 - RNA, 19 nt, Artificial Sequence
  Description of Artificial Sequence: Synthetic oligonucleotide
gacuaugacacaucuugau

SEQ ID NO: 2738280 - RNA, 19 nt, Artificial Sequence
  Description of Artificial Sequence: Synthetic oligonucleotide
gccaaagacuuugugguag

SEQ ID NO: 2738281 - RNA, 19 nt, Artificial Sequence
  Description of Artificial Sequence: Synthetic oligonucleotide
gcucaaucacacaagugcc

SEQ ID NO: 2738282 - RNA, 19 nt, Artificial Sequence
  Description of Artificial Sequence: Synthetic oligonucleotide
cccugaauaaauaagacau

SEQ ID NO: 2738283 - RNA, 19 nt, Artificial Sequence
  Description of Artificial Sequence: Synthetic oligonucleotide
gaaacacccugaauaaaua

SEQ ID NO: 2738284 - RNA, 19 nt, Artificial Sequence
  Description of Artificial Sequence: Synthetic oligonucleotide
ucguagugucuauacuguc

SEQ ID NO: 2738285 - RNA, 19 nt, Artificial Sequence
  Description of Artificial Sequence: Synthetic oligonucleotide
cuucuacuuggcaccuggc

SEQ ID NO: 2738286 - RNA, 19 nt, Artificial Sequence
  Description of Artificial Sequence: Synthetic oligonucleotide
ggcaccuggccugaaaggg

SEQ ID NO: 2738287 - RNA, 19 nt, Artificial Sequence
  Description of Artificial Sequence: Synthetic oligonucleotide
accugaaguacaggccugg

SEQ ID NO: 2738288 - RNA, 19 nt, Artificial Sequence
  Description of Artificial Sequence: Synthetic oligonucleotide
uagaaacacccugaauaaa

SEQ ID NO: 2738289 - RNA, 19 nt, Artificial Sequence
  Description of Artificial Sequence: Synthetic oligonucleotide
aggaguagaagaggaauuu

SEQ ID NO: 2738290 - RNA, 19 nt, Artificial Sequence
  Description of Artificial Sequence: Synthetic oligonucleotide
uucuuacaauccaguccca

SEQ ID NO: 2738291 - RNA, 19 nt, Artificial Sequence
  Description of Artificial Sequence: Synthetic oligonucleotide
auagcagcgucacggggaa

SEQ ID NO: 2738292 - RNA, 19 nt, Artificial Sequence
  Description of Artificial Sequence: Synthetic oligonucleotide
ggcuaacaacuuuauguac

SEQ ID NO: 2738293 - RNA, 19 nt, Artificial Sequence
  Description of Artificial Sequence: Synthetic oligonucleotide
ccuucuacuuggcaccugg

SEQ ID NO: 2738294 - RNA, 19 nt, Artificial Sequence
  Description of Artificial Sequence: Synthetic oligonucleotide
ccaugagcaacaacucccg

SEQ ID NO: 2738295 - RNA, 19 nt, Artificial Sequence
  Description of Artificial Sequence: Synthetic oligonucleotide
ugugcccacccacccaagu

SEQ ID NO: 2738296 - RNA, 19 nt, Artificial Sequence
  Description of Artificial Sequence: Synthetic oligonucleotide
gucuauacuguccccaggu

SEQ ID NO: 2738297 - RNA, 19 nt, Artificial Sequence
  Description of Artificial Sequence: Synthetic oligonucleotide
caccccgaggaguagaaga

SEQ ID NO: 2738298 - RNA, 19 nt, Artificial Sequence
  Description of Artificial Sequence: Synthetic oligonucleotide
auaagacauagcagcguca

SEQ ID NO: 2738299 - RNA, 19 nt, Artificial Sequence
  Description of Artificial Sequence: Synthetic oligonucleotide
acacaucuugaugacugca

SEQ ID NO: 2738300 - RNA, 19 nt, Artificial Sequence
  Description of Artificial Sequence: Synthetic oligonucleotide
acaagcugacuaugacaca

SEQ ID NO: 2738301 - RNA, 19 nt, Artificial Sequence
  Description of Artificial Sequence: Synthetic oligonucleotide
uaaggaacaccagcuuguc

SEQ ID NO: 2738302 - RNA, 19 nt, Artificial Sequence
  Description of Artificial Sequence: Synthetic oligonucleotide
ggaauauucagaaaccaau

SEQ ID NO: 2738303 - RNA, 19 nt, Artificial Sequence
  Description of Artificial Sequence: Synthetic oligonucleotide
gagcgcucaaucacacaag

SEQ ID NO: 2738304 - RNA, 19 nt, Artificial Sequence
  Description of Artificial Sequence: Synthetic oligonucleotide
cacccaagucacuuuaaaa

SEQ ID NO: 2738305 - RNA, 19 nt, Artificial Sequence
  Description of Artificial Sequence: Synthetic oligonucleotide
agacaggcuaacaacuuua

SEQ ID NO: 2738306 - RNA, 19 nt, Artificial Sequence
  Description of Artificial Sequence: Synthetic oligonucleotide
augacacaucuugaugacu

SEQ ID NO: 2738307 - RNA, 19 nt, Artificial Sequence
  Description of Artificial Sequence: Synthetic oligonucleotide
ugaugacugcagccacgca

SEQ ID NO: 2738308 - RNA, 19 nt, Artificial Sequence
  Description of Artificial Sequence: Synthetic oligonucleotide
uuaugacagaaugcagcuu

SEQ ID NO: 2738309 - RNA, 19 nt, Artificial Sequence
  Description of Artificial Sequence: Synthetic oligonucleotide
ccagguuuugugcccaccc

SEQ ID NO: 2738310 - RNA, 19 nt, Artificial Sequence
  Description of Artificial Sequence: Synthetic oligonucleotide
gccugugguuuuaugacag

SEQ ID NO: 2738311 - RNA, 19 nt, Artificial Sequence
  Description of Artificial Sequence: Synthetic oligonucleotide
gugguagaaacacccugaa

SEQ ID NO: 2738312 - RNA, 19 nt, Artificial Sequence
  Description of Artificial Sequence: Synthetic oligonucleotide
agagacccaccccgaggag

SEQ ID NO: 2738313 - RNA, 19 nt, Artificial Sequence
  Description of Artificial Sequence: Synthetic oligonucleotide
gaccugaaguacaggccug

SEQ ID NO: 2738314 - RNA, 19 nt, Artificial Sequence
  Description of Artificial Sequence: Synthetic oligonucleotide
ugacagaaugcagcuugaa

SEQ ID NO: 2738315 - RNA, 19 nt, Artificial Sequence
  Description of Artificial Sequence: Synthetic oligonucleotide
gguuuugugcccacccacc

SEQ ID NO: 2738316 - RNA, 19 nt, Artificial Sequence
  Description of Artificial Sequence: Synthetic oligonucleotide
gcauucugagcgcucaauc

SEQ ID NO: 2738317 - RNA, 19 nt, Artificial Sequence
  Description of Artificial Sequence: Synthetic oligonucleotide
guaagcuagcagaagaguu

SEQ ID NO: 2738318 - RNA, 19 nt, Artificial Sequence
  Description of Artificial Sequence: Synthetic oligonucleotide
agugccaaaggcagacccu

SEQ ID NO: 2738319 - RNA, 19 nt, Artificial Sequence
  Description of Artificial Sequence: Synthetic oligonucleotide
gcagccacgcauucugagc

SEQ ID NO: 2738320 - RNA, 19 nt, Artificial Sequence
  Description of Artificial Sequence: Synthetic oligonucleotide
gucauucaaguaucaaaau

SEQ ID NO: 2738321 - RNA, 19 nt, Artificial Sequence
  Description of Artificial Sequence: Synthetic oligonucleotide
cugugguuuuaugacagaa

SEQ ID NO: 2738322 - RNA, 19 nt, Artificial Sequence
  Description of Artificial Sequence: Synthetic oligonucleotide
gucacggggaagaggugcc

SEQ ID NO: 2738323 - RNA, 19 nt, Artificial Sequence
  Description of Artificial Sequence: Synthetic oligonucleotide
guccccagguuuugugccc

SEQ ID NO: 2738324 - RNA, 19 nt, Artificial Sequence
  Description of Artificial Sequence: Synthetic oligonucleotide
ugguaccacaagguguuua

SEQ ID NO: 2738325 - RNA, 19 nt, Artificial Sequence
  Description of Artificial Sequence: Synthetic oligonucleotide
ugccaaaggcagacccuuc

SEQ ID NO: 2738326 - RNA, 19 nt, Artificial Sequence
  Description of Artificial Sequence: Synthetic oligonucleotide
guuuaaggaacaccagcuu

SEQ ID NO: 2738327 - RNA, 19 nt, Artificial Sequence
  Description of Artificial Sequence: Synthetic oligonucleotide
ggaguagaagaggaauuuc

SEQ ID NO: 2738328 - RNA, 19 nt, Artificial Sequence
  Description of Artificial Sequence: Synthetic oligonucleotide
gagcaacaacucccgugac

SEQ ID NO: 2738329 - RNA, 19 nt, Artificial Sequence
  Description of Artificial Sequence: Synthetic oligonucleotide
gcaaaguaagcuagcagaa

SEQ ID NO: 2738330 - RNA, 19 nt, Artificial Sequence
  Description of Artificial Sequence: Synthetic oligonucleotide
caagugccaaaggcagacc

SEQ ID NO: 2738331 - RNA, 19 nt, Artificial Sequence
  Description of Artificial Sequence: Synthetic oligonucleotide
cucccgugaccugaaguac

SEQ ID NO: 2738332 - RNA, 19 nt, Artificial Sequence
  Description of Artificial Sequence: Synthetic oligonucleotide
acccacccaagucacuuua

SEQ ID NO: 2738333 - RNA, 19 nt, Artificial Sequence
  Description of Artificial Sequence: Synthetic oligonucleotide
aguacaggccugggcaccu

SEQ ID NO: 2738334 - RNA, 19 nt, Artificial Sequence
  Description of Artificial Sequence: Synthetic oligonucleotide
augacagaaugcagcuuga

SEQ ID NO: 2738335 - RNA, 19 nt, Artificial Sequence
  Description of Artificial Sequence: Synthetic oligonucleotide
caagcugacuaugacacau

SEQ ID NO: 2738336 - RNA, 19 nt, Artificial Sequence
  Description of Artificial Sequence: Synthetic oligonucleotide
gcaacaacucccgugaccu

SEQ ID NO: 2738337 - RNA, 19 nt, Artificial Sequence
  Description of Artificial Sequence: Synthetic oligonucleotide
auucaucguagugucuaua

SEQ ID NO: 2738338 - RNA, 19 nt, Artificial Sequence
  Description of Artificial Sequence: Synthetic oligonucleotide
gugcccacccacccaaguc

SEQ ID NO: 2738339 - RNA, 19 nt, Artificial Sequence
  Description of Artificial Sequence: Synthetic oligonucleotide
uccccagguuuugugccca

SEQ ID NO: 2738340 - RNA, 19 nt, Artificial Sequence
  Description of Artificial Sequence: Synthetic oligonucleotide
caccagcuuguccucaaga

SEQ ID NO: 2738341 - RNA, 19 nt, Artificial Sequence
  Description of Artificial Sequence: Synthetic oligonucleotide
cagguuuugugcccaccca

SEQ ID NO: 2738342 - RNA, 19 nt, Artificial Sequence
  Description of Artificial Sequence: Synthetic oligonucleotide
caacaacucccgugaccug

SEQ ID NO: 2738343 - RNA, 19 nt, Artificial Sequence
  Description of Artificial Sequence: Synthetic oligonucleotide
ccaaucuugaaaggagauc

SEQ ID NO: 2738344 - RNA, 19 nt, Artificial Sequence
  Description of Artificial Sequence: Synthetic oligonucleotide
gaacaccagcuuguccuca

SEQ ID NO: 2738345 - RNA, 19 nt, Artificial Sequence
  Description of Artificial Sequence: Synthetic oligonucleotide
caaucacacaagugccaaa

SEQ ID NO: 2738346 - RNA, 19 nt, Artificial Sequence
  Description of Artificial Sequence: Synthetic oligonucleotide
gaaugcagcuugaauucau

SEQ ID NO: 2738347 - RNA, 19 nt, Artificial Sequence
  Description of Artificial Sequence: Synthetic oligonucleotide
cccgugaccugaaguacag

SEQ ID NO: 2738348 - RNA, 19 nt, Artificial Sequence
  Description of Artificial Sequence: Synthetic oligonucleotide
uacuguccccagguuuugu

SEQ ID NO: 2738349 - RNA, 19 nt, Artificial Sequence
  Description of Artificial Sequence: Synthetic oligonucleotide
gcaccucacaagcugacua

SEQ ID NO: 2738350 - RNA, 19 nt, Artificial Sequence
  Description of Artificial Sequence: Synthetic oligonucleotide
cacgcauucugagcgcuca

SEQ ID NO: 2738351 - RNA, 19 nt, Artificial Sequence
  Description of Artificial Sequence: Synthetic oligonucleotide
gguaccacaagguguuuau

SEQ ID NO: 2738352 - RNA, 19 nt, Artificial Sequence
  Description of Artificial Sequence: Synthetic oligonucleotide
uguccaccaugagcaacaa

SEQ ID NO: 2738353 - RNA, 19 nt, Artificial Sequence
  Description of Artificial Sequence: Synthetic oligonucleotide
cagcgucacggggaagagg

SEQ ID NO: 2738354 - RNA, 19 nt, Artificial Sequence
  Description of Artificial Sequence: Synthetic oligonucleotide
cccgaggaguagaagagga

SEQ ID NO: 2738355 - RNA, 19 nt, Artificial Sequence
  Description of Artificial Sequence: Synthetic oligonucleotide
cagacccuucuacuuggca

SEQ ID NO: 2738356 - RNA, 19 nt, Artificial Sequence
  Description of Artificial Sequence: Synthetic oligonucleotide
ccuggccugaaagggagag

SEQ ID NO: 2738357 - RNA, 19 nt, Artificial Sequence
  Description of Artificial Sequence: Synthetic oligonucleotide
cacggggaagaggugccug

SEQ ID NO: 2738358 - RNA, 19 nt, Artificial Sequence
  Description of Artificial Sequence: Synthetic oligonucleotide
guccaccaugagcaacaac

SEQ ID NO: 2738359 - RNA, 19 nt, Artificial Sequence
  Description of Artificial Sequence: Synthetic oligonucleotide
ucacggggaagaggugccu

SEQ ID NO: 2738360 - RNA, 19 nt, Artificial Sequence
  Description of Artificial Sequence: Synthetic oligonucleotide
gacaggcuaacaacuuuau

SEQ ID NO: 2738361 - RNA, 19 nt, Artificial Sequence
  Description of Artificial Sequence: Synthetic oligonucleotide
caacucccgugaccugaag

SEQ ID NO: 2738362 - RNA, 19 nt, Artificial Sequence
  Description of Artificial Sequence: Synthetic oligonucleotide
gacaagccaaagacuuugu

SEQ ID NO: 2738363 - RNA, 19 nt, Artificial Sequence
  Description of Artificial Sequence: Synthetic oligonucleotide
ccagagaagacaagccaaa

SEQ ID NO: 2738364 - RNA, 19 nt, Artificial Sequence
  Description of Artificial Sequence: Synthetic oligonucleotide
agacccaccccgaggagua

SEQ ID NO: 2738365 - RNA, 19 nt, Artificial Sequence
  Description of Artificial Sequence: Synthetic oligonucleotide
caaagacuuugugguagaa

SEQ ID NO: 2738366 - RNA, 19 nt, Artificial Sequence
  Description of Artificial Sequence: Synthetic oligonucleotide
cugagcgcucaaucacaca

SEQ ID NO: 2738367 - RNA, 19 nt, Artificial Sequence
  Description of Artificial Sequence: Synthetic oligonucleotide
acccuucuacuuggcaccu

SEQ ID NO: 2738368 - RNA, 19 nt, Artificial Sequence
  Description of Artificial Sequence: Synthetic oligonucleotide
cuuggcaccuggccugaaa

SEQ ID NO: 2738369 - RNA, 19 nt, Artificial Sequence
  Description of Artificial Sequence: Synthetic oligonucleotide
gagacccaccccgaggagu

SEQ ID NO: 2738370 - RNA, 19 nt, Artificial Sequence
  Description of Artificial Sequence: Synthetic oligonucleotide
ccaaagacuuugugguaga

SEQ ID NO: 2738371 - RNA, 19 nt, Artificial Sequence
  Description of Artificial Sequence: Synthetic oligonucleotide
cgucacggggaagaggugc

SEQ ID NO: 2738372 - RNA, 19 nt, Artificial Sequence
  Description of Artificial Sequence: Synthetic oligonucleotide
acaacucccgugaccugaa

SEQ ID NO: 2738373 - RNA, 19 nt, Artificial Sequence
  Description of Artificial Sequence: Synthetic oligonucleotide
acgcauucugagcgcucaa

SEQ ID NO: 2738374 - RNA, 19 nt, Artificial Sequence
  Description of Artificial Sequence: Synthetic oligonucleotide
gaggaauuucuggaauauu

SEQ ID NO: 2738375 - RNA, 19 nt, Artificial Sequence
  Description of Artificial Sequence: Synthetic oligonucleotide
agggagagacccaccccga

SEQ ID NO: 2738376 - RNA, 19 nt, Artificial Sequence
  Description of Artificial Sequence: Synthetic oligonucleotide
aggugccugccugugguuu

SEQ ID NO: 2738377 - RNA, 19 nt, Artificial Sequence
  Description of Artificial Sequence: Synthetic oligonucleotide
caccucacaagcugacuau

SEQ ID NO: 2738378 - RNA, 19 nt, Artificial Sequence
  Description of Artificial Sequence: Synthetic oligonucleotide
cugcagccacgcauucuga

SEQ ID NO: 2738379 - RNA, 19 nt, Artificial Sequence
  Description of Artificial Sequence: Synthetic oligonucleotide
ccugaaagggagagaccca

SEQ ID NO: 2738380 - RNA, 19 nt, Artificial Sequence
  Description of Artificial Sequence: Synthetic oligonucleotide
gcgcucaaucacacaagug

SEQ ID NO: 2738381 - RNA, 19 nt, Artificial Sequence
  Description of Artificial Sequence: Synthetic oligonucleotide
guaccacaagguguuuaua

SEQ ID NO: 2738382 - RNA, 19 nt, Artificial Sequence
  Description of Artificial Sequence: Synthetic oligonucleotide
acccaccccgaggaguaga

SEQ ID NO: 2738383 - RNA, 19 nt, Artificial Sequence
  Description of Artificial Sequence: Synthetic oligonucleotide
ccccgaggaguagaagagg

SEQ ID NO: 2738384 - RNA, 19 nt, Artificial Sequence
  Description of Artificial Sequence: Synthetic oligonucleotide
gacccaccccgaggaguag

SEQ ID NO: 2738385 - RNA, 19 nt, Artificial Sequence
  Description of Artificial Sequence: Synthetic oligonucleotide
agcuagcagaagaguuuaa

SEQ ID NO: 2738386 - RNA, 19 nt, Artificial Sequence
  Description of Artificial Sequence: Synthetic oligonucleotide
ggaagaggugccugccugu

SEQ ID NO: 2738387 - RNA, 19 nt, Artificial Sequence
  Description of Artificial Sequence: Synthetic oligonucleotide
caugagcaacaacucccgu

SEQ ID NO: 2738388 - RNA, 19 nt, Artificial Sequence
  Description of Artificial Sequence: Synthetic oligonucleotide
uugguaccacaagguguuu

SEQ ID NO: 2738389 - RNA, 19 nt, Artificial Sequence
  Description of Artificial Sequence: Synthetic oligonucleotide
ggccugaaagggagagacc

SEQ ID NO: 2738390 - RNA, 19 nt, Artificial Sequence
  Description of Artificial Sequence: Synthetic oligonucleotide
uagcagcgucacggggaag

SEQ ID NO: 2738391 - RNA, 19 nt, Artificial Sequence
  Description of Artificial Sequence: Synthetic oligonucleotide
ccacaagguguuuauaauu

SEQ ID NO: 2738392 - RNA, 19 nt, Artificial Sequence
  Description of Artificial Sequence: Synthetic oligonucleotide
gacugcagccacgcauucu

SEQ ID NO: 2738393 - RNA, 19 nt, Artificial Sequence
  Description of Artificial Sequence: Synthetic oligonucleotide
gcagcgucacggggaagag

SEQ ID NO: 2738394 - RNA, 19 nt, Artificial Sequence
  Description of Artificial Sequence: Synthetic oligonucleotide
cuggccugaaagggagaga

SEQ ID NO: 2738395 - RNA, 19 nt, Artificial Sequence
  Description of Artificial Sequence: Synthetic oligonucleotide
ggggucauucaaguaucaa

SEQ ID NO: 2738396 - RNA, 19 nt, Artificial Sequence
  Description of Artificial Sequence: Synthetic oligonucleotide
gccugccugugguuuuaug

SEQ ID NO: 2738397 - RNA, 19 nt, Artificial Sequence
  Description of Artificial Sequence: Synthetic oligonucleotide
gugccaaaggcagacccuu

SEQ ID NO: 2738398 - RNA, 19 nt, Artificial Sequence
  Description of Artificial Sequence: Synthetic oligonucleotide
gcaccuggccugaaaggga

SEQ ID NO: 2738399 - RNA, 19 nt, Artificial Sequence
  Description of Artificial Sequence: Synthetic oligonucleotide
ccugugguuuuaugacaga

SEQ ID NO: 2738400 - RNA, 19 nt, Artificial Sequence
  Description of Artificial Sequence: Synthetic oligonucleotide
ccacccaagucacuuuaaa

SEQ ID NO: 2738401 - RNA, 19 nt, Artificial Sequence
  Description of Artificial Sequence: Synthetic oligonucleotide
ugccugccugugguuuuau

SEQ ID NO: 2738402 - RNA, 19 nt, Artificial Sequence
  Description of Artificial Sequence: Synthetic oligonucleotide
gggcaccucacaagcugac

SEQ ID NO: 2738403 - RNA, 19 nt, Artificial Sequence
  Description of Artificial Sequence: Synthetic oligonucleotide
ccgugaccugaaguacagg

SEQ ID NO: 2738404 - RNA, 19 nt, Artificial Sequence
  Description of Artificial Sequence: Synthetic oligonucleotide
ccgaggaguagaagaggaa

SEQ ID NO: 2738405 - RNA, 19 nt, Artificial Sequence
  Description of Artificial Sequence: Synthetic oligonucleotide
ccacgcauucugagcgcuc

SEQ ID NO: 2738406 - RNA, 19 nt, Artificial Sequence
  Description of Artificial Sequence: Synthetic oligonucleotide
gaggugccugccugugguu

SEQ ID NO: 2738407 - RNA, 19 nt, Artificial Sequence
  Description of Artificial Sequence: Synthetic oligonucleotide
ccaccccgaggaguagaag

SEQ ID NO: 2738408 - RNA, 19 nt, Artificial Sequence
  Description of Artificial Sequence: Synthetic oligonucleotide
gugccugccugugguuuua

SEQ ID NO: 2738409 - RNA, 19 nt, Artificial Sequence
  Description of Artificial Sequence: Synthetic oligonucleotide
cccacccaagucacuuuaa

SEQ ID NO: 2738410 - RNA, 19 nt, Artificial Sequence
  Description of Artificial Sequence: Synthetic oligonucleotide
ggugccugccugugguuuu

SEQ ID NO: 2738411 - RNA, 19 nt, Artificial Sequence
  Description of Artificial Sequence: Synthetic oligonucleotide
ggcaccucacaagcugacu

SEQ ID NO: 2738412 - RNA, 19 nt, Artificial Sequence
  Description of Artificial Sequence: Synthetic oligonucleotide
cccaccccgaggaguagaa

SEQ ID NO: 2738413 - RNA, 19 nt, Artificial Sequence
  Description of Artificial Sequence: Synthetic oligonucleotide
gcugacuaugacacaucuu

SEQ ID NO: 2738414 - RNA, 19 nt, Artificial Sequence
  Description of Artificial Sequence: Synthetic oligonucleotide
cacccacccaagucacuuu

SEQ ID NO: 2738415 - RNA, 19 nt, Artificial Sequence
  Description of Artificial Sequence: Synthetic oligonucleotide
ccccagguuuugugcccac

SEQ ID NO: 2738416 - RNA, 19 nt, Artificial Sequence
  Description of Artificial Sequence: Synthetic oligonucleotide
gcgucacggggaagaggug

SEQ ID NO: 2738417 - RNA, 19 nt, Artificial Sequence
  Description of Artificial Sequence: Synthetic oligonucleotide
gccacgcauucugagcgcu

SEQ ID NO: 2738418 - RNA, 19 nt, Artificial Sequence
  Description of Artificial Sequence: Synthetic oligonucleotide
ccacccacccaagucacuu

SEQ ID NO: 2738419 - RNA, 19 nt, Artificial Sequence
  Description of Artificial Sequence: Synthetic oligonucleotide
cccacccacccaagucacu

SEQ ID NO: 2738420 - RNA, 19 nt, Artificial Sequence
  Description of Artificial Sequence: Synthetic oligonucleotide
agcgauacaacccagaguc

SEQ ID NO: 2738421 - RNA, 19 nt, Artificial Sequence
  Description of Artificial Sequence: Synthetic oligonucleotide
ucugagacaaggaacaucc

SEQ ID NO: 2738422 - RNA, 19 nt, Artificial Sequence
  Description of Artificial Sequence: Synthetic oligonucleotide
caaggaacauccaaaauag

SEQ ID NO: 2738423 - RNA, 19 nt, Artificial Sequence
  Description of Artificial Sequence: Synthetic oligonucleotide
aggaacauccaaaauagcc

SEQ ID NO: 2738424 - RNA, 19 nt, Artificial Sequence
  Description of Artificial Sequence: Synthetic oligonucleotide
gaagagacaacaguugugg

SEQ ID NO: 2738425 - RNA, 19 nt, Artificial Sequence
  Description of Artificial Sequence: Synthetic oligonucleotide
uguaguaggaaugauguca

SEQ ID NO: 2738426 - RNA, 19 nt, Artificial Sequence
  Description of Artificial Sequence: Synthetic oligonucleotide
ugguaaaugacacagcgau

SEQ ID NO: 2738427 - RNA, 19 nt, Artificial Sequence
  Description of Artificial Sequence: Synthetic oligonucleotide
uaacauggccucaucaggg

SEQ ID NO: 2738428 - RNA, 19 nt, Artificial Sequence
  Description of Artificial Sequence: Synthetic oligonucleotide
agagacaacaguuguggac

SEQ ID NO: 2738429 - RNA, 19 nt, Artificial Sequence
  Description of Artificial Sequence: Synthetic oligonucleotide
uccaaaauagccccaggag

SEQ ID NO: 2738430 - RNA, 19 nt, Artificial Sequence
  Description of Artificial Sequence: Synthetic oligonucleotide
ucuuguaguaggaaugaug

SEQ ID NO: 2738431 - RNA, 19 nt, Artificial Sequence
  Description of Artificial Sequence: Synthetic oligonucleotide
auuuggacauguaacaugg

SEQ ID NO: 2738432 - RNA, 19 nt, Artificial Sequence
  Description of Artificial Sequence: Synthetic oligonucleotide
augacacagcgauacaacc

SEQ ID NO: 2738433 - RNA, 19 nt, Artificial Sequence
  Description of Artificial Sequence: Synthetic oligonucleotide
uucaugauguugaagggac

SEQ ID NO: 2738434 - RNA, 19 nt, Artificial Sequence
  Description of Artificial Sequence: Synthetic oligonucleotide
uuggacauguaacauggcc

SEQ ID NO: 2738435 - RNA, 19 nt, Artificial Sequence
  Description of Artificial Sequence: Synthetic oligonucleotide
aguguguacuuccccaugc

SEQ ID NO: 2738436 - RNA, 19 nt, Artificial Sequence
  Description of Artificial Sequence: Synthetic oligonucleotide
aaugacacagcgauacaac

SEQ ID NO: 2738437 - RNA, 19 nt, Artificial Sequence
  Description of Artificial Sequence: Synthetic oligonucleotide
uuagguaaggguuggguca

SEQ ID NO: 2738438 - RNA, 19 nt, Artificial Sequence
  Description of Artificial Sequence: Synthetic oligonucleotide
guaggaaugaugucagagg

SEQ ID NO: 2738439 - RNA, 19 nt, Artificial Sequence
  Description of Artificial Sequence: Synthetic oligonucleotide
acaaggaacauccaaaaua

SEQ ID NO: 2738440 - RNA, 19 nt, Artificial Sequence
  Description of Artificial Sequence: Synthetic oligonucleotide
uaggaaugaugucagaggu

SEQ ID NO: 2738441 - RNA, 19 nt, Artificial Sequence
  Description of Artificial Sequence: Synthetic oligonucleotide
cauaccuuucuucagcggg

SEQ ID NO: 2738442 - RNA, 19 nt, Artificial Sequence
  Description of Artificial Sequence: Synthetic oligonucleotide
agucauuuggacauguaac

SEQ ID NO: 2738443 - RNA, 19 nt, Artificial Sequence
  Description of Artificial Sequence: Synthetic oligonucleotide
guaaaugacacagcgauac

SEQ ID NO: 2738444 - RNA, 19 nt, Artificial Sequence
  Description of Artificial Sequence: Synthetic oligonucleotide
ucaucuuucaguguguacu

SEQ ID NO: 2738445 - RNA, 19 nt, Artificial Sequence
  Description of Artificial Sequence: Synthetic oligonucleotide
uaaggguugggucacaguc

SEQ ID NO: 2738446 - RNA, 19 nt, Artificial Sequence
  Description of Artificial Sequence: Synthetic oligonucleotide
ucuucagcgggaucaacgg

SEQ ID NO: 2738447 - RNA, 19 nt, Artificial Sequence
  Description of Artificial Sequence: Synthetic oligonucleotide
uggacauguaacauggccu

SEQ ID NO: 2738448 - RNA, 19 nt, Artificial Sequence
  Description of Artificial Sequence: Synthetic oligonucleotide
aggaugguaaaugacacag

SEQ ID NO: 2738449 - RNA, 19 nt, Artificial Sequence
  Description of Artificial Sequence: Synthetic oligonucleotide
guaacauggccucaucagg

SEQ ID NO: 2738450 - RNA, 19 nt, Artificial Sequence
  Description of Artificial Sequence: Synthetic oligonucleotide
uguguacuuccccaugcgg

SEQ ID NO: 2738451 - RNA, 19 nt, Artificial Sequence
  Description of Artificial Sequence: Synthetic oligonucleotide
acaacccagagucugucac

SEQ ID NO: 2738452 - RNA, 19 nt, Artificial Sequence
  Description of Artificial Sequence: Synthetic oligonucleotide
ugcgcauauauuuuguggu

SEQ ID NO: 2738453 - RNA, 19 nt, Artificial Sequence
  Description of Artificial Sequence: Synthetic oligonucleotide
acuucaugauguugaaggg

SEQ ID NO: 2738454 - RNA, 19 nt, Artificial Sequence
  Description of Artificial Sequence: Synthetic oligonucleotide
aaaauagccccaggagccc

SEQ ID NO: 2738455 - RNA, 19 nt, Artificial Sequence
  Description of Artificial Sequence: Synthetic oligonucleotide
aguaggaaugaugucagag

SEQ ID NO: 2738456 - RNA, 19 nt, Artificial Sequence
  Description of Artificial Sequence: Synthetic oligonucleotide
ugacacagcgauacaaccc

SEQ ID NO: 2738457 - RNA, 19 nt, Artificial Sequence
  Description of Artificial Sequence: Synthetic oligonucleotide
aaggucagucauuuggaca

SEQ ID NO: 2738458 - RNA, 19 nt, Artificial Sequence
  Description of Artificial Sequence: Synthetic oligonucleotide
aagccuuccggcuccuggc

SEQ ID NO: 2738459 - RNA, 19 nt, Artificial Sequence
  Description of Artificial Sequence: Synthetic oligonucleotide
agugucaaaggcuccuuuc

SEQ ID NO: 2738460 - RNA, 19 nt, Artificial Sequence
  Description of Artificial Sequence: Synthetic oligonucleotide
aucaacggcagcuuggacu

SEQ ID NO: 2738461 - RNA, 19 nt, Artificial Sequence
  Description of Artificial Sequence: Synthetic oligonucleotide
uucagcgggaucaacggca

SEQ ID NO: 2738462 - RNA, 19 nt, Artificial Sequence
  Description of Artificial Sequence: Synthetic oligonucleotide
uuuguaggcgaccucucug

SEQ ID NO: 2738463 - RNA, 19 nt, Artificial Sequence
  Description of Artificial Sequence: Synthetic oligonucleotide
cucucugugaccaccagug

SEQ ID NO: 2738464 - RNA, 19 nt, Artificial Sequence
  Description of Artificial Sequence: Synthetic oligonucleotide
acagucaugucucugcgca

SEQ ID NO: 2738465 - RNA, 19 nt, Artificial Sequence
  Description of Artificial Sequence: Synthetic oligonucleotide
agggucaucuuucagugug

SEQ ID NO: 2738466 - RNA, 19 nt, Artificial Sequence
  Description of Artificial Sequence: Synthetic oligonucleotide
cugcgcauauauuuugugg

SEQ ID NO: 2738467 - RNA, 19 nt, Artificial Sequence
  Description of Artificial Sequence: Synthetic oligonucleotide
uuugugaaggugacuccag

SEQ ID NO: 2738468 - RNA, 19 nt, Artificial Sequence
  Description of Artificial Sequence: Synthetic oligonucleotide
cauuuggacauguaacaug

SEQ ID NO: 2738469 - RNA, 19 nt, Artificial Sequence
  Description of Artificial Sequence: Synthetic oligonucleotide
gucauaccuuucuucagcg

SEQ ID NO: 2738470 - RNA, 19 nt, Artificial Sequence
  Description of Artificial Sequence: Synthetic oligonucleotide
acagcgauacaacccagag

SEQ ID NO: 2738471 - RNA, 19 nt, Artificial Sequence
  Description of Artificial Sequence: Synthetic oligonucleotide
gugaccaccagugucaaag

SEQ ID NO: 2738472 - RNA, 19 nt, Artificial Sequence
  Description of Artificial Sequence: Synthetic oligonucleotide
cuuguaguaggaaugaugu

SEQ ID NO: 2738473 - RNA, 19 nt, Artificial Sequence
  Description of Artificial Sequence: Synthetic oligonucleotide
gucaccaccaggcggacgg

SEQ ID NO: 2738474 - RNA, 19 nt, Artificial Sequence
  Description of Artificial Sequence: Synthetic oligonucleotide
ucagaggugagcagacuug

SEQ ID NO: 2738475 - RNA, 19 nt, Artificial Sequence
  Description of Artificial Sequence: Synthetic oligonucleotide
aggucagucauuuggacau

SEQ ID NO: 2738476 - RNA, 19 nt, Artificial Sequence
  Description of Artificial Sequence: Synthetic oligonucleotide
aaggaacauccaaaauagc

SEQ ID NO: 2738477 - RNA, 19 nt, Artificial Sequence
  Description of Artificial Sequence: Synthetic oligonucleotide
uccagggucaggagaagag

SEQ ID NO: 2738478 - RNA, 19 nt, Artificial Sequence
  Description of Artificial Sequence: Synthetic oligonucleotide
gacacagcgauacaaccca

SEQ ID NO: 2738479 - RNA, 19 nt, Artificial Sequence
  Description of Artificial Sequence: Synthetic oligonucleotide
cuuagguaaggguuggguc

SEQ ID NO: 2738480 - RNA, 19 nt, Artificial Sequence
  Description of Artificial Sequence: Synthetic oligonucleotide
ugucucugcgcauauauuu

SEQ ID NO: 2738481 - RNA, 19 nt, Artificial Sequence
  Description of Artificial Sequence: Synthetic oligonucleotide
aaccaggucauaccuuucu

SEQ ID NO: 2738482 - RNA, 19 nt, Artificial Sequence
  Description of Artificial Sequence: Synthetic oligonucleotide
uuucaguguguacuucccc

SEQ ID NO: 2738483 - RNA, 19 nt, Artificial Sequence
  Description of Artificial Sequence: Synthetic oligonucleotide
auguugaagggacagccca

SEQ ID NO: 2738484 - RNA, 19 nt, Artificial Sequence
  Description of Artificial Sequence: Synthetic oligonucleotide
auccaaaauagccccagga

SEQ ID NO: 2738485 - RNA, 19 nt, Artificial Sequence
  Description of Artificial Sequence: Synthetic oligonucleotide
ugucaaaggcuccuuucca

SEQ ID NO: 2738486 - RNA, 19 nt, Artificial Sequence
  Description of Artificial Sequence: Synthetic oligonucleotide
acuucugagacaaggaaca

SEQ ID NO: 2738487 - RNA, 19 nt, Artificial Sequence
  Description of Artificial Sequence: Synthetic oligonucleotide
cagugguucuuguaguagg

SEQ ID NO: 2738488 - RNA, 19 nt, Artificial Sequence
  Description of Artificial Sequence: Synthetic oligonucleotide
cuugaggaauccuugguca

SEQ ID NO: 2738489 - RNA, 19 nt, Artificial Sequence
  Description of Artificial Sequence: Synthetic oligonucleotide
caaggucugucccucaacc

SEQ ID NO: 2738490 - RNA, 19 nt, Artificial Sequence
  Description of Artificial Sequence: Synthetic oligonucleotide
uggacuucugagacaagga

SEQ ID NO: 2738491 - RNA, 19 nt, Artificial Sequence
  Description of Artificial Sequence: Synthetic oligonucleotide
aggucugucccucaaccag

SEQ ID NO: 2738492 - RNA, 19 nt, Artificial Sequence
  Description of Artificial Sequence: Synthetic oligonucleotide
uggaagagcagaacagggu

SEQ ID NO: 2738493 - RNA, 19 nt, Artificial Sequence
  Description of Artificial Sequence: Synthetic oligonucleotide
cuuucaguguguacuuccc

SEQ ID NO: 2738494 - RNA, 19 nt, Artificial Sequence
  Description of Artificial Sequence: Synthetic oligonucleotide
guaguaggaaugaugucag

SEQ ID NO: 2738495 - RNA, 19 nt, Artificial Sequence
  Description of Artificial Sequence: Synthetic oligonucleotide
gucacagucaugucucugc

SEQ ID NO: 2738496 - RNA, 19 nt, Artificial Sequence
  Description of Artificial Sequence: Synthetic oligonucleotide
acaguuguggacuuaggua

SEQ ID NO: 2738497 - RNA, 19 nt, Artificial Sequence
  Description of Artificial Sequence: Synthetic oligonucleotide
gaagggacagcccacuguc

SEQ ID NO: 2738498 - RNA, 19 nt, Artificial Sequence
  Description of Artificial Sequence: Synthetic oligonucleotide
uaggcgaccucucugugac

SEQ ID NO: 2738499 - RNA, 19 nt, Artificial Sequence
  Description of Artificial Sequence: Synthetic oligonucleotide
ugcagcuucugccaagccu

SEQ ID NO: 2738500 - RNA, 19 nt, Artificial Sequence
  Description of Artificial Sequence: Synthetic oligonucleotide
ucugucacccgaaggucag

SEQ ID NO: 2738501 - RNA, 19 nt, Artificial Sequence
  Description of Artificial Sequence: Synthetic oligonucleotide
uugggaggaugguaaauga

SEQ ID NO: 2738502 - RNA, 19 nt, Artificial Sequence
  Description of Artificial Sequence: Synthetic oligonucleotide
ucucugcgcauauauuuug

SEQ ID NO: 2738503 - RNA, 19 nt, Artificial Sequence
  Description of Artificial Sequence: Synthetic oligonucleotide
ucauaccuuucuucagcgg

SEQ ID NO: 2738504 - RNA, 19 nt, Artificial Sequence
  Description of Artificial Sequence: Synthetic oligonucleotide
ucugcgcauauauuuugug

SEQ ID NO: 2738505 - RNA, 19 nt, Artificial Sequence
  Description of Artificial Sequence: Synthetic oligonucleotide
ugggucacagucaugucuc

SEQ ID NO: 2738506 - RNA, 19 nt, Artificial Sequence
  Description of Artificial Sequence: Synthetic oligonucleotide
ccaaaauagccccaggagc

SEQ ID NO: 2738507 - RNA, 19 nt, Artificial Sequence
  Description of Artificial Sequence: Synthetic oligonucleotide
cagacuugaggaauccuug

SEQ ID NO: 2738508 - RNA, 19 nt, Artificial Sequence
  Description of Artificial Sequence: Synthetic oligonucleotide
aacauggccucaucagggu

SEQ ID NO: 2738509 - RNA, 19 nt, Artificial Sequence
  Description of Artificial Sequence: Synthetic oligonucleotide
gugucaaaggcuccuuucc

SEQ ID NO: 2738510 - RNA, 19 nt, Artificial Sequence
  Description of Artificial Sequence: Synthetic oligonucleotide
uuguggacuuagguaaggg

SEQ ID NO: 2738511 - RNA, 19 nt, Artificial Sequence
  Description of Artificial Sequence: Synthetic oligonucleotide
gaaggucagucauuuggac

SEQ ID NO: 2738512 - RNA, 19 nt, Artificial Sequence
  Description of Artificial Sequence: Synthetic oligonucleotide
ucaacggcagcuuggacuu

SEQ ID NO: 2738513 - RNA, 19 nt, Artificial Sequence
  Description of Artificial Sequence: Synthetic oligonucleotide
ucagugguucuuguaguag

SEQ ID NO: 2738514 - RNA, 19 nt, Artificial Sequence
  Description of Artificial Sequence: Synthetic oligonucleotide
augauguugaagggacagc

SEQ ID NO: 2738515 - RNA, 19 nt, Artificial Sequence
  Description of Artificial Sequence: Synthetic oligonucleotide
caguuguggacuuagguaa

SEQ ID NO: 2738516 - RNA, 19 nt, Artificial Sequence
  Description of Artificial Sequence: Synthetic oligonucleotide
gaugucagaggugagcaga

SEQ ID NO: 2738517 - RNA, 19 nt, Artificial Sequence
  Description of Artificial Sequence: Synthetic oligonucleotide
ugguucuuguaguaggaau

SEQ ID NO: 2738518 - RNA, 19 nt, Artificial Sequence
  Description of Artificial Sequence: Synthetic oligonucleotide
aaaggcuccuuuccauccu

SEQ ID NO: 2738519 - RNA, 19 nt, Artificial Sequence
  Description of Artificial Sequence: Synthetic oligonucleotide
guugggaggaugguaaaug

SEQ ID NO: 2738520 - RNA, 19 nt, Artificial Sequence
  Description of Artificial Sequence: Synthetic oligonucleotide
aaggucugucccucaacca

SEQ ID NO: 2738521 - RNA, 19 nt, Artificial Sequence
  Description of Artificial Sequence: Synthetic oligonucleotide
gaauccuuggucaccacca

SEQ ID NO: 2738522 - RNA, 19 nt, Artificial Sequence
  Description of Artificial Sequence: Synthetic oligonucleotide
ugagcagacuugaggaauc

SEQ ID NO: 2738523 - RNA, 19 nt, Artificial Sequence
  Description of Artificial Sequence: Synthetic oligonucleotide
uuguaggcgaccucucugu

SEQ ID NO: 2738524 - RNA, 19 nt, Artificial Sequence
  Description of Artificial Sequence: Synthetic oligonucleotide
ucugccaagccuuccggcu

SEQ ID NO: 2738525 - RNA, 19 nt, Artificial Sequence
  Description of Artificial Sequence: Synthetic oligonucleotide
ccgaaggucagucauuugg

SEQ ID NO: 2738526 - RNA, 19 nt, Artificial Sequence
  Description of Artificial Sequence: Synthetic oligonucleotide
cagggucaggagaagagac

SEQ ID NO: 2738527 - RNA, 19 nt, Artificial Sequence
  Description of Artificial Sequence: Synthetic oligonucleotide
uguugaagggacagcccac

SEQ ID NO: 2738528 - RNA, 19 nt, Artificial Sequence
  Description of Artificial Sequence: Synthetic oligonucleotide
ucagcgggaucaacggcag

SEQ ID NO: 2738529 - RNA, 19 nt, Artificial Sequence
  Description of Artificial Sequence: Synthetic oligonucleotide
uuuggacauguaacauggc

SEQ ID NO: 2738530 - RNA, 19 nt, Artificial Sequence
  Description of Artificial Sequence: Synthetic oligonucleotide
gaacagggucaguugggag

SEQ ID NO: 2738531 - RNA, 19 nt, Artificial Sequence
  Description of Artificial Sequence: Synthetic oligonucleotide
ggucauaccuuucuucagc

SEQ ID NO: 2738532 - RNA, 19 nt, Artificial Sequence
  Description of Artificial Sequence: Synthetic oligonucleotide
gagaagagacaacaguugu

SEQ ID NO: 2738533 - RNA, 19 nt, Artificial Sequence
  Description of Artificial Sequence: Synthetic oligonucleotide
ucauuuggacauguaacau

SEQ ID NO: 2738534 - RNA, 19 nt, Artificial Sequence
  Description of Artificial Sequence: Synthetic oligonucleotide
gauguugaagggacagccc

SEQ ID NO: 2738535 - RNA, 19 nt, Artificial Sequence
  Description of Artificial Sequence: Synthetic oligonucleotide
ggaagagcagaacaggguc

SEQ ID NO: 2738536 - RNA, 19 nt, Artificial Sequence
  Description of Artificial Sequence: Synthetic oligonucleotide
auuuguaggcgaccucucu

SEQ ID NO: 2738537 - RNA, 19 nt, Artificial Sequence
  Description of Artificial Sequence: Synthetic oligonucleotide
ggaaugaugucagagguga

SEQ ID NO: 2738538 - RNA, 19 nt, Artificial Sequence
  Description of Artificial Sequence: Synthetic oligonucleotide
gguucuuguaguaggaaug

SEQ ID NO: 2738539 - RNA, 19 nt, Artificial Sequence
  Description of Artificial Sequence: Synthetic oligonucleotide
ucacccgaaggucagucau

SEQ ID NO: 2738540 - RNA, 19 nt, Artificial Sequence
  Description of Artificial Sequence: Synthetic oligonucleotide
aggucauaccuuucuucag

SEQ ID NO: 2738541 - RNA, 19 nt, Artificial Sequence
  Description of Artificial Sequence: Synthetic oligonucleotide
caggucauaccuuucuuca

SEQ ID NO: 2738542 - RNA, 19 nt, Artificial Sequence
  Description of Artificial Sequence: Synthetic oligonucleotide
acauccaaaauagccccag

SEQ ID NO: 2738543 - RNA, 19 nt, Artificial Sequence
  Description of Artificial Sequence: Synthetic oligonucleotide
uuuccauccugcagcuucu

SEQ ID NO: 2738544 - RNA, 19 nt, Artificial Sequence
  Description of Artificial Sequence: Synthetic oligonucleotide
guguguacuuccccaugcg

SEQ ID NO: 2738545 - RNA, 19 nt, Artificial Sequence
  Description of Artificial Sequence: Synthetic oligonucleotide
cagcuuggacuucugagac

SEQ ID NO: 2738546 - RNA, 19 nt, Artificial Sequence
  Description of Artificial Sequence: Synthetic oligonucleotide
ugaggaauccuuggucacc

SEQ ID NO: 2738547 - RNA, 19 nt, Artificial Sequence
  Description of Artificial Sequence: Synthetic oligonucleotide
gagacaacaguuguggacu

SEQ ID NO: 2738548 - RNA, 19 nt, Artificial Sequence
  Description of Artificial Sequence: Synthetic oligonucleotide
ugggauuuguaggcgaccu

SEQ ID NO: 2738549 - RNA, 19 nt, Artificial Sequence
  Description of Artificial Sequence: Synthetic oligonucleotide
auacaacccagagucuguc

SEQ ID NO: 2738550 - RNA, 19 nt, Artificial Sequence
  Description of Artificial Sequence: Synthetic oligonucleotide
guuguggacuuagguaagg

SEQ ID NO: 2738551 - RNA, 19 nt, Artificial Sequence
  Description of Artificial Sequence: Synthetic oligonucleotide
gacgggauggaagagcaga

SEQ ID NO: 2738552 - RNA, 19 nt, Artificial Sequence
  Description of Artificial Sequence: Synthetic oligonucleotide
cucugugaccaccaguguc

SEQ ID NO: 2738553 - RNA, 19 nt, Artificial Sequence
  Description of Artificial Sequence: Synthetic oligonucleotide
cauccaaaauagccccagg

SEQ ID NO: 2738554 - RNA, 19 nt, Artificial Sequence
  Description of Artificial Sequence: Synthetic oligonucleotide
aggccaggaucuucagugg

SEQ ID NO: 2738555 - RNA, 19 nt, Artificial Sequence
  Description of Artificial Sequence: Synthetic oligonucleotide
gaagagcagaacaggguca

SEQ ID NO: 2738556 - RNA, 19 nt, Artificial Sequence
  Description of Artificial Sequence: Synthetic oligonucleotide
gaggaugguaaaugacaca

SEQ ID NO: 2738557 - RNA, 19 nt, Artificial Sequence
  Description of Artificial Sequence: Synthetic oligonucleotide
uucugagacaaggaacauc

SEQ ID NO: 2738558 - RNA, 19 nt, Artificial Sequence
  Description of Artificial Sequence: Synthetic oligonucleotide
gaaggugacuccaggguca

SEQ ID NO: 2738559 - RNA, 19 nt, Artificial Sequence
  Description of Artificial Sequence: Synthetic oligonucleotide
aaggguugggucacaguca

SEQ ID NO: 2738560 - RNA, 19 nt, Artificial Sequence
  Description of Artificial Sequence: Synthetic oligonucleotide
augucagaggugagcagac

SEQ ID NO: 2738561 - RNA, 19 nt, Artificial Sequence
  Description of Artificial Sequence: Synthetic oligonucleotide
ggacauguaacauggccuc

SEQ ID NO: 2738562 - RNA, 19 nt, Artificial Sequence
  Description of Artificial Sequence: Synthetic oligonucleotide
uacaacccagagucuguca

SEQ ID NO: 2738563 - RNA, 19 nt, Artificial Sequence
  Description of Artificial Sequence: Synthetic oligonucleotide
ugccaagccuuccggcucc

SEQ ID NO: 2738564 - RNA, 19 nt, Artificial Sequence
  Description of Artificial Sequence: Synthetic oligonucleotide
agcgggaucaacggcagcu

SEQ ID NO: 2738565 - RNA, 19 nt, Artificial Sequence
  Description of Artificial Sequence: Synthetic oligonucleotide
aaauagccccaggagccca

SEQ ID NO: 2738566 - RNA, 19 nt, Artificial Sequence
  Description of Artificial Sequence: Synthetic oligonucleotide
cuucagcgggaucaacggc

SEQ ID NO: 2738567 - RNA, 19 nt, Artificial Sequence
  Description of Artificial Sequence: Synthetic oligonucleotide
ggaggaugguaaaugacac

SEQ ID NO: 2738568 - RNA, 19 nt, Artificial Sequence
  Description of Artificial Sequence: Synthetic oligonucleotide
cagucauuuggacauguaa

SEQ ID NO: 2738569 - RNA, 19 nt, Artificial Sequence
  Description of Artificial Sequence: Synthetic oligonucleotide
accaccagugucaaaggcu

SEQ ID NO: 2738570 - RNA, 19 nt, Artificial Sequence
  Description of Artificial Sequence: Synthetic oligonucleotide
aucuuucaguguguacuuc

SEQ ID NO: 2738571 - RNA, 19 nt, Artificial Sequence
  Description of Artificial Sequence: Synthetic oligonucleotide
aggguugggucacagucau

SEQ ID NO: 2738572 - RNA, 19 nt, Artificial Sequence
  Description of Artificial Sequence: Synthetic oligonucleotide
cacagucaugucucugcgc

SEQ ID NO: 2738573 - RNA, 19 nt, Artificial Sequence
  Description of Artificial Sequence: Synthetic oligonucleotide
aacggcagcuuggacuucu

SEQ ID NO: 2738574 - RNA, 19 nt, Artificial Sequence
  Description of Artificial Sequence: Synthetic oligonucleotide
gaggaauccuuggucacca

SEQ ID NO: 2738575 - RNA, 19 nt, Artificial Sequence
  Description of Artificial Sequence: Synthetic oligonucleotide
ucucugugaccaccagugu

SEQ ID NO: 2738576 - RNA, 19 nt, Artificial Sequence
  Description of Artificial Sequence: Synthetic oligonucleotide
uccccaugcggacuucacu

SEQ ID NO: 2738577 - RNA, 19 nt, Artificial Sequence
  Description of Artificial Sequence: Synthetic oligonucleotide
cuggcguacuucaugaugu

SEQ ID NO: 2738578 - RNA, 19 nt, Artificial Sequence
  Description of Artificial Sequence: Synthetic oligonucleotide
gaaugaugucagaggugag

SEQ ID NO: 2738579 - RNA, 19 nt, Artificial Sequence
  Description of Artificial Sequence: Synthetic oligonucleotide
aguuguggacuuagguaag

SEQ ID NO: 2738580 - RNA, 19 nt, Artificial Sequence
  Description of Artificial Sequence: Synthetic oligonucleotide
ucagucauuuggacaugua

SEQ ID NO: 2738581 - RNA, 19 nt, Artificial Sequence
  Description of Artificial Sequence: Synthetic oligonucleotide
uagguaaggguugggucac

SEQ ID NO: 2738582 - RNA, 19 nt, Artificial Sequence
  Description of Artificial Sequence: Synthetic oligonucleotide
aggcggacgggauggaaga

SEQ ID NO: 2738583 - RNA, 19 nt, Artificial Sequence
  Description of Artificial Sequence: Synthetic oligonucleotide
ucccucaaccaggucauac

SEQ ID NO: 2738584 - RNA, 19 nt, Artificial Sequence
  Description of Artificial Sequence: Synthetic oligonucleotide
uaguaggaaugaugucaga

SEQ ID NO: 2738585 - RNA, 19 nt, Artificial Sequence
  Description of Artificial Sequence: Synthetic oligonucleotide
guguacuuccccaugcgga

SEQ ID NO: 2738586 - RNA, 19 nt, Artificial Sequence
  Description of Artificial Sequence: Synthetic oligonucleotide
augguaaaugacacagcga

SEQ ID NO: 2738587 - RNA, 19 nt, Artificial Sequence
  Description of Artificial Sequence: Synthetic oligonucleotide
aggaauccuuggucaccac

SEQ ID NO: 2738588 - RNA, 19 nt, Artificial Sequence
  Description of Artificial Sequence: Synthetic oligonucleotide
aggaaugaugucagaggug

SEQ ID NO: 2738589 - RNA, 19 nt, Artificial Sequence
  Description of Artificial Sequence: Synthetic oligonucleotide
gggaggaugguaaaugaca

SEQ ID NO: 2738590 - RNA, 19 nt, Artificial Sequence
  Description of Artificial Sequence: Synthetic oligonucleotide
cuccuggcguacuucauga

SEQ ID NO: 2738591 - RNA, 19 nt, Artificial Sequence
  Description of Artificial Sequence: Synthetic oligonucleotide
gagcagacuugaggaaucc

SEQ ID NO: 2738592 - RNA, 19 nt, Artificial Sequence
  Description of Artificial Sequence: Synthetic oligonucleotide
gacuccagggucaggagaa

SEQ ID NO: 2738593 - RNA, 19 nt, Artificial Sequence
  Description of Artificial Sequence: Synthetic oligonucleotide
gacuugaggaauccuuggu

SEQ ID NO: 2738594 - RNA, 19 nt, Artificial Sequence
  Description of Artificial Sequence: Synthetic oligonucleotide
auaccuuucuucagcggga

SEQ ID NO: 2738595 - RNA, 19 nt, Artificial Sequence
  Description of Artificial Sequence: Synthetic oligonucleotide
accuuucuucagcgggauc

SEQ ID NO: 2738596 - RNA, 19 nt, Artificial Sequence
  Description of Artificial Sequence: Synthetic oligonucleotide
ugucacccgaaggucaguc

SEQ ID NO: 2738597 - RNA, 19 nt, Artificial Sequence
  Description of Artificial Sequence: Synthetic oligonucleotide
augcggacuucacugggau

SEQ ID NO: 2738598 - RNA, 19 nt, Artificial Sequence
  Description of Artificial Sequence: Synthetic oligonucleotide
acauguaacauggccucau

SEQ ID NO: 2738599 - RNA, 19 nt, Artificial Sequence
  Description of Artificial Sequence: Synthetic oligonucleotide
gugacuccagggucaggag

SEQ ID NO: 2738600 - RNA, 19 nt, Artificial Sequence
  Description of Artificial Sequence: Synthetic oligonucleotide
caccaggcggacgggaugg

SEQ ID NO: 2738601 - RNA, 19 nt, Artificial Sequence
  Description of Artificial Sequence: Synthetic oligonucleotide
gaucaacggcagcuuggac

SEQ ID NO: 2738602 - RNA, 19 nt, Artificial Sequence
  Description of Artificial Sequence: Synthetic oligonucleotide
uacuuccccaugcggacuu

SEQ ID NO: 2738603 - RNA, 19 nt, Artificial Sequence
  Description of Artificial Sequence: Synthetic oligonucleotide
ugucaaggucugucccuca

SEQ ID NO: 2738604 - RNA, 19 nt, Artificial Sequence
  Description of Artificial Sequence: Synthetic oligonucleotide
ggucugucccucaaccagg

SEQ ID NO: 2738605 - RNA, 19 nt, Artificial Sequence
  Description of Artificial Sequence: Synthetic oligonucleotide
gggaucaacggcagcuugg

SEQ ID NO: 2738606 - RNA, 19 nt, Artificial Sequence
  Description of Artificial Sequence: Synthetic oligonucleotide
uucuuguaguaggaaugau

SEQ ID NO: 2738607 - RNA, 19 nt, Artificial Sequence
  Description of Artificial Sequence: Synthetic oligonucleotide
caugucucugcgcauauau

SEQ ID NO: 2738608 - RNA, 19 nt, Artificial Sequence
  Description of Artificial Sequence: Synthetic oligonucleotide
caguguguacuuccccaug

SEQ ID NO: 2738609 - RNA, 19 nt, Artificial Sequence
  Description of Artificial Sequence: Synthetic oligonucleotide
guaggcgaccucucuguga

SEQ ID NO: 2738610 - RNA, 19 nt, Artificial Sequence
  Description of Artificial Sequence: Synthetic oligonucleotide
ggugacuccagggucagga

SEQ ID NO: 2738611 - RNA, 19 nt, Artificial Sequence
  Description of Artificial Sequence: Synthetic oligonucleotide
uuccccaugcggacuucac

SEQ ID NO: 2738612 - RNA, 19 nt, Artificial Sequence
  Description of Artificial Sequence: Synthetic oligonucleotide
caccagugucaaaggcucc

SEQ ID NO: 2738613 - RNA, 19 nt, Artificial Sequence
  Description of Artificial Sequence: Synthetic oligonucleotide
accaggucauaccuuucuu

SEQ ID NO: 2738614 - RNA, 19 nt, Artificial Sequence
  Description of Artificial Sequence: Synthetic oligonucleotide
gcguacuucaugauguuga

SEQ ID NO: 2738615 - RNA, 19 nt, Artificial Sequence
  Description of Artificial Sequence: Synthetic oligonucleotide
aguugggaggaugguaaau

SEQ ID NO: 2738616 - RNA, 19 nt, Artificial Sequence
  Description of Artificial Sequence: Synthetic oligonucleotide
cccucaaccaggucauacc

SEQ ID NO: 2738617 - RNA, 19 nt, Artificial Sequence
  Description of Artificial Sequence: Synthetic oligonucleotide
uuucuucagcgggaucaac

SEQ ID NO: 2738618 - RNA, 19 nt, Artificial Sequence
  Description of Artificial Sequence: Synthetic oligonucleotide
gacauguaacauggccuca

SEQ ID NO: 2738619 - RNA, 19 nt, Artificial Sequence
  Description of Artificial Sequence: Synthetic oligonucleotide
cuuggacuucugagacaag

SEQ ID NO: 2738620 - RNA, 19 nt, Artificial Sequence
  Description of Artificial Sequence: Synthetic oligonucleotide
gcauauauuuugugguaaa

SEQ ID NO: 2738621 - RNA, 19 nt, Artificial Sequence
  Description of Artificial Sequence: Synthetic oligonucleotide
ccaggucauaccuuucuuc

SEQ ID NO: 2738622 - RNA, 19 nt, Artificial Sequence
  Description of Artificial Sequence: Synthetic oligonucleotide
cagcccacugucaaggucu

SEQ ID NO: 2738623 - RNA, 19 nt, Artificial Sequence
  Description of Artificial Sequence: Synthetic oligonucleotide
cuucagugguucuuguagu

SEQ ID NO: 2738624 - RNA, 19 nt, Artificial Sequence
  Description of Artificial Sequence: Synthetic oligonucleotide
cugucaaggucugucccuc

SEQ ID NO: 2738625 - RNA, 19 nt, Artificial Sequence
  Description of Artificial Sequence: Synthetic oligonucleotide
agacaacaguuguggacuu

SEQ ID NO: 2738626 - RNA, 19 nt, Artificial Sequence
  Description of Artificial Sequence: Synthetic oligonucleotide
caugcggacuucacuggga

SEQ ID NO: 2738627 - RNA, 19 nt, Artificial Sequence
  Description of Artificial Sequence: Synthetic oligonucleotide
cacagcgauacaacccaga

SEQ ID NO: 2738628 - RNA, 19 nt, Artificial Sequence
  Description of Artificial Sequence: Synthetic oligonucleotide
agucaugucucugcgcaua

SEQ ID NO: 2738629 - RNA, 19 nt, Artificial Sequence
  Description of Artificial Sequence: Synthetic oligonucleotide
ccuggcguacuucaugaug

SEQ ID NO: 2738630 - RNA, 19 nt, Artificial Sequence
  Description of Artificial Sequence: Synthetic oligonucleotide
ccacugucaaggucugucc

SEQ ID NO: 2738631 - RNA, 19 nt, Artificial Sequence
  Description of Artificial Sequence: Synthetic oligonucleotide
aggcgaccucucugugacc

SEQ ID NO: 2738632 - RNA, 19 nt, Artificial Sequence
  Description of Artificial Sequence: Synthetic oligonucleotide
cacugggauuuguaggcga

SEQ ID NO: 2738633 - RNA, 19 nt, Artificial Sequence
  Description of Artificial Sequence: Synthetic oligonucleotide
gguaaggguugggucacag

SEQ ID NO: 2738634 - RNA, 19 nt, Artificial Sequence
  Description of Artificial Sequence: Synthetic oligonucleotide
ggaugguaaaugacacagc

SEQ ID NO: 2738635 - RNA, 19 nt, Artificial Sequence
  Description of Artificial Sequence: Synthetic oligonucleotide
agaggugagcagacuugag

SEQ ID NO: 2738636 - RNA, 19 nt, Artificial Sequence
  Description of Artificial Sequence: Synthetic oligonucleotide
guggacuuagguaaggguu

SEQ ID NO: 2738637 - RNA, 19 nt, Artificial Sequence
  Description of Artificial Sequence: Synthetic oligonucleotide
caaccaggucauaccuuuc

SEQ ID NO: 2738638 - RNA, 19 nt, Artificial Sequence
  Description of Artificial Sequence: Synthetic oligonucleotide
agggucaggagaagagaca

SEQ ID NO: 2738639 - RNA, 19 nt, Artificial Sequence
  Description of Artificial Sequence: Synthetic oligonucleotide
agcagacuugaggaauccu

SEQ ID NO: 2738640 - RNA, 19 nt, Artificial Sequence
  Description of Artificial Sequence: Synthetic oligonucleotide
uaccuuucuucagcgggau

SEQ ID NO: 2738641 - RNA, 19 nt, Artificial Sequence
  Description of Artificial Sequence: Synthetic oligonucleotide
gcuccuggcguacuucaug

SEQ ID NO: 2738642 - RNA, 19 nt, Artificial Sequence
  Description of Artificial Sequence: Synthetic oligonucleotide
gucagaggugagcagacuu

SEQ ID NO: 2738643 - RNA, 19 nt, Artificial Sequence
  Description of Artificial Sequence: Synthetic oligonucleotide
ggauuuguaggcgaccucu

SEQ ID NO: 2738644 - RNA, 19 nt, Artificial Sequence
  Description of Artificial Sequence: Synthetic oligonucleotide
cagaggugagcagacuuga

SEQ ID NO: 2738645 - RNA, 19 nt, Artificial Sequence
  Description of Artificial Sequence: Synthetic oligonucleotide
ccaugcggacuucacuggg

SEQ ID NO: 2738646 - RNA, 19 nt, Artificial Sequence
  Description of Artificial Sequence: Synthetic oligonucleotide
gucaaggucugucccucaa

SEQ ID NO: 2738647 - RNA, 19 nt, Artificial Sequence
  Description of Artificial Sequence: Synthetic oligonucleotide
acacagcgauacaacccag

SEQ ID NO: 2738648 - RNA, 19 nt, Artificial Sequence
  Description of Artificial Sequence: Synthetic oligonucleotide
cccaugcggacuucacugg

SEQ ID NO: 2738649 - RNA, 19 nt, Artificial Sequence
  Description of Artificial Sequence: Synthetic oligonucleotide
gggucaggagaagagacaa

SEQ ID NO: 2738650 - RNA, 19 nt, Artificial Sequence
  Description of Artificial Sequence: Synthetic oligonucleotide
ucaccaccaggcggacggg

SEQ ID NO: 2738651 - RNA, 19 nt, Artificial Sequence
  Description of Artificial Sequence: Synthetic oligonucleotide
cugagacaaggaacaucca

SEQ ID NO: 2738652 - RNA, 19 nt, Artificial Sequence
  Description of Artificial Sequence: Synthetic oligonucleotide
gucaguugggaggauggua

SEQ ID NO: 2738653 - RNA, 19 nt, Artificial Sequence
  Description of Artificial Sequence: Synthetic oligonucleotide
ggugagcagacuugaggaa

SEQ ID NO: 2738654 - RNA, 19 nt, Artificial Sequence
  Description of Artificial Sequence: Synthetic oligonucleotide
cgauacaacccagagucug

SEQ ID NO: 2738655 - RNA, 19 nt, Artificial Sequence
  Description of Artificial Sequence: Synthetic oligonucleotide
uggcguacuucaugauguu

SEQ ID NO: 2738656 - RNA, 19 nt, Artificial Sequence
  Description of Artificial Sequence: Synthetic oligonucleotide
ggcguacuucaugauguug

SEQ ID NO: 2738657 - RNA, 19 nt, Artificial Sequence
  Description of Artificial Sequence: Synthetic oligonucleotide
uccuggcguacuucaugau

SEQ ID NO: 2738658 - RNA, 19 nt, Artificial Sequence
  Description of Artificial Sequence: Synthetic oligonucleotide
acuccagggucaggagaag

SEQ ID NO: 2738659 - RNA, 19 nt, Artificial Sequence
  Description of Artificial Sequence: Synthetic oligonucleotide
cucugcgcauauauuuugu

SEQ ID NO: 2738660 - RNA, 19 nt, Artificial Sequence
  Description of Artificial Sequence: Synthetic oligonucleotide
ggaucaacggcagcuugga

SEQ ID NO: 2738661 - RNA, 19 nt, Artificial Sequence
  Description of Artificial Sequence: Synthetic oligonucleotide
ugcggacuucacugggauu

SEQ ID NO: 2738662 - RNA, 19 nt, Artificial Sequence
  Description of Artificial Sequence: Synthetic oligonucleotide
guugaagggacagcccacu

SEQ ID NO: 2738663 - RNA, 19 nt, Artificial Sequence
  Description of Artificial Sequence: Synthetic oligonucleotide
ggcgaccucucugugacca

SEQ ID NO: 2738664 - RNA, 19 nt, Artificial Sequence
  Description of Artificial Sequence: Synthetic oligonucleotide
gugagcagacuugaggaau

SEQ ID NO: 2738665 - RNA, 19 nt, Artificial Sequence
  Description of Artificial Sequence: Synthetic oligonucleotide
guaaggguugggucacagu

SEQ ID NO: 2738666 - RNA, 19 nt, Artificial Sequence
  Description of Artificial Sequence: Synthetic oligonucleotide
cccacugucaaggucuguc

SEQ ID NO: 2738667 - RNA, 19 nt, Artificial Sequence
  Description of Artificial Sequence: Synthetic oligonucleotide
ucaugucucugcgcauaua

SEQ ID NO: 2738668 - RNA, 19 nt, Artificial Sequence
  Description of Artificial Sequence: Synthetic oligonucleotide
uccggcuccuggcguacuu

SEQ ID NO: 2738669 - RNA, 19 nt, Artificial Sequence
  Description of Artificial Sequence: Synthetic oligonucleotide
gacaacaguuguggacuua

SEQ ID NO: 2738670 - RNA, 19 nt, Artificial Sequence
  Description of Artificial Sequence: Synthetic oligonucleotide
gcgcauauauuuuguggua

SEQ ID NO: 2738671 - RNA, 19 nt, Artificial Sequence
  Description of Artificial Sequence: Synthetic oligonucleotide
augucucugcgcauauauu

SEQ ID NO: 2738672 - RNA, 19 nt, Artificial Sequence
  Description of Artificial Sequence: Synthetic oligonucleotide
gacagcccacugucaaggu

SEQ ID NO: 2738673 - RNA, 19 nt, Artificial Sequence
  Description of Artificial Sequence: Synthetic oligonucleotide
gcggacgggauggaagagc

SEQ ID NO: 2738674 - RNA, 19 nt, Artificial Sequence
  Description of Artificial Sequence: Synthetic oligonucleotide
cagcgauacaacccagagu

SEQ ID NO: 2738675 - RNA, 19 nt, Artificial Sequence
  Description of Artificial Sequence: Synthetic oligonucleotide
ggucaggagaagagacaac

SEQ ID NO: 2738676 - RNA, 19 nt, Artificial Sequence
  Description of Artificial Sequence: Synthetic oligonucleotide
cagcgggaucaacggcagc

SEQ ID NO: 2738677 - RNA, 19 nt, Artificial Sequence
  Description of Artificial Sequence: Synthetic oligonucleotide
aggugacuccagggucagg

SEQ ID NO: 2738678 - RNA, 19 nt, Artificial Sequence
  Description of Artificial Sequence: Synthetic oligonucleotide
ggucagucauuuggacaug

SEQ ID NO: 2738679 - RNA, 19 nt, Artificial Sequence
  Description of Artificial Sequence: Synthetic oligonucleotide
gucaugucucugcgcauau

SEQ ID NO: 2738680 - RNA, 19 nt, Artificial Sequence
  Description of Artificial Sequence: Synthetic oligonucleotide
agcccacugucaaggucug

SEQ ID NO: 2738681 - RNA, 19 nt, Artificial Sequence
  Description of Artificial Sequence: Synthetic oligonucleotide
gucucugcgcauauauuuu

SEQ ID NO: 2738682 - RNA, 19 nt, Artificial Sequence
  Description of Artificial Sequence: Synthetic oligonucleotide
cuuccccaugcggacuuca

SEQ ID NO: 2738683 - RNA, 19 nt, Artificial Sequence
  Description of Artificial Sequence: Synthetic oligonucleotide
cucaaccaggucauaccuu

SEQ ID NO: 2738684 - RNA, 19 nt, Artificial Sequence
  Description of Artificial Sequence: Synthetic oligonucleotide
gcggacuucacugggauuu

SEQ ID NO: 2738685 - RNA, 19 nt, Artificial Sequence
  Description of Artificial Sequence: Synthetic oligonucleotide
cggacgggauggaagagca

SEQ ID NO: 2738686 - RNA, 19 nt, Artificial Sequence
  Description of Artificial Sequence: Synthetic oligonucleotide
agguaaggguugggucaca

SEQ ID NO: 2738687 - RNA, 19 nt, Artificial Sequence
  Description of Artificial Sequence: Synthetic oligonucleotide
ggacgggauggaagagcag

SEQ ID NO: 2738688 - RNA, 19 nt, Artificial Sequence
  Description of Artificial Sequence: Synthetic oligonucleotide
ggcggacgggauggaagag

SEQ ID NO: 2738689 - RNA, 19 nt, Artificial Sequence
  Description of Artificial Sequence: Synthetic oligonucleotide
cguacuucaugauguugaa

SEQ ID NO: 2738690 - RNA, 19 nt, Artificial Sequence
  Description of Artificial Sequence: Synthetic oligonucleotide
ggccaggaucuucaguggu

SEQ ID NO: 2738691 - RNA, 19 nt, Artificial Sequence
  Description of Artificial Sequence: Synthetic oligonucleotide
cgcauauauuuugugguaa

SEQ ID NO: 2738692 - RNA, 19 nt, Artificial Sequence
  Description of Artificial Sequence: Synthetic oligonucleotide
ccagggucaggagaagaga

SEQ ID NO: 2738693 - RNA, 19 nt, Artificial Sequence
  Description of Artificial Sequence: Synthetic oligonucleotide
cugugaccaccagugucaa

SEQ ID NO: 2738694 - RNA, 19 nt, Artificial Sequence
  Description of Artificial Sequence: Synthetic oligonucleotide
guacuuccccaugcggacu

SEQ ID NO: 2738695 - RNA, 19 nt, Artificial Sequence
  Description of Artificial Sequence: Synthetic oligonucleotide
cgggaucaacggcagcuug

SEQ ID NO: 2738696 - RNA, 19 nt, Artificial Sequence
  Description of Artificial Sequence: Synthetic oligonucleotide
cuucugagacaaggaacau

SEQ ID NO: 2738697 - RNA, 19 nt, Artificial Sequence
  Description of Artificial Sequence: Synthetic oligonucleotide
cccgaaggucagucauuug

SEQ ID NO: 2738698 - RNA, 19 nt, Artificial Sequence
  Description of Artificial Sequence: Synthetic oligonucleotide
ccagagucugucacccgaa

SEQ ID NO: 2738699 - RNA, 19 nt, Artificial Sequence
  Description of Artificial Sequence: Synthetic oligonucleotide
cagugucaaaggcuccuuu

SEQ ID NO: 2738700 - RNA, 19 nt, Artificial Sequence
  Description of Artificial Sequence: Synthetic oligonucleotide
caccaccaggcggacggga

SEQ ID NO: 2738701 - RNA, 19 nt, Artificial Sequence
  Description of Artificial Sequence: Synthetic oligonucleotide
gcgaccucucugugaccac

SEQ ID NO: 2738702 - RNA, 19 nt, Artificial Sequence
  Description of Artificial Sequence: Synthetic oligonucleotide
accaggcggacgggaugga

SEQ ID NO: 2738703 - RNA, 19 nt, Artificial Sequence
  Description of Artificial Sequence: Synthetic oligonucleotide
cagucaugucucugcgcau

SEQ ID NO: 2738704 - RNA, 19 nt, Artificial Sequence
  Description of Artificial Sequence: Synthetic oligonucleotide
caacggcagcuuggacuuc

SEQ ID NO: 2738705 - RNA, 19 nt, Artificial Sequence
  Description of Artificial Sequence: Synthetic oligonucleotide
cacccgaaggucagucauu

SEQ ID NO: 2738706 - RNA, 19 nt, Artificial Sequence
  Description of Artificial Sequence: Synthetic oligonucleotide
gggucaucuuucagugugu

SEQ ID NO: 2738707 - RNA, 19 nt, Artificial Sequence
  Description of Artificial Sequence: Synthetic oligonucleotide
gggucacagucaugucucu

SEQ ID NO: 2738708 - RNA, 19 nt, Artificial Sequence
  Description of Artificial Sequence: Synthetic oligonucleotide
ggguugggucacagucaug

SEQ ID NO: 2738709 - RNA, 19 nt, Artificial Sequence
  Description of Artificial Sequence: Synthetic oligonucleotide
ggucaguugggaggauggu

SEQ ID NO: 2738710 - RNA, 19 nt, Artificial Sequence
  Description of Artificial Sequence: Synthetic oligonucleotide
ccucaucagggucaucuuu

SEQ ID NO: 2738711 - RNA, 19 nt, Artificial Sequence
  Description of Artificial Sequence: Synthetic oligonucleotide
ccccaggagcccagccuuc

SEQ ID NO: 2738712 - RNA, 19 nt, Artificial Sequence
  Description of Artificial Sequence: Synthetic oligonucleotide
cggacuucacugggauuug

SEQ ID NO: 2738713 - RNA, 19 nt, Artificial Sequence
  Description of Artificial Sequence: Synthetic oligonucleotide
gcgauacaacccagagucu

SEQ ID NO: 2738714 - RNA, 19 nt, Artificial Sequence
  Description of Artificial Sequence: Synthetic oligonucleotide
ccggcuccuggcguacuuc

SEQ ID NO: 2738715 - RNA, 19 nt, Artificial Sequence
  Description of Artificial Sequence: Synthetic oligonucleotide
ggagcccagccuuccucau

SEQ ID NO: 2738716 - RNA, 19 nt, Artificial Sequence
  Description of Artificial Sequence: Synthetic oligonucleotide
cugucacccgaaggucagu

SEQ ID NO: 2738717 - RNA, 19 nt, Artificial Sequence
  Description of Artificial Sequence: Synthetic oligonucleotide
gucccucaaccaggucaua

SEQ ID NO: 2738718 - RNA, 19 nt, Artificial Sequence
  Description of Artificial Sequence: Synthetic oligonucleotide
ccaggcggacgggauggaa

SEQ ID NO: 2738719 - RNA, 19 nt, Artificial Sequence
  Description of Artificial Sequence: Synthetic oligonucleotide
gcgggaucaacggcagcuu

SEQ ID NO: 2738720 - RNA, 19 nt, Artificial Sequence
  Description of Artificial Sequence: Synthetic oligonucleotide
ggcuccuggcguacuucau

SEQ ID NO: 2738721 - RNA, 19 nt, Artificial Sequence
  Description of Artificial Sequence: Synthetic oligonucleotide
ccagugucaaaggcuccuu

SEQ ID NO: 2738722 - RNA, 19 nt, Artificial Sequence
  Description of Artificial Sequence: Synthetic oligonucleotide
gccaagccuuccggcuccu

SEQ ID NO: 2738723 - RNA, 19 nt, Artificial Sequence
  Description of Artificial Sequence: Synthetic oligonucleotide
agcauuaaaguguaauucc

SEQ ID NO: 2738724 - RNA, 19 nt, Artificial Sequence
  Description of Artificial Sequence: Synthetic oligonucleotide
  modified_base (7)..(7): a, c, u, g, unknown or other
uuuaaunauaaaaggagua

SEQ ID NO: 2738725 - RNA, 19 nt, Artificial Sequence
  Description of Artificial Sequence: Synthetic oligonucleotide
uccuuaagaauucaugagg

SEQ ID NO: 2738726 - RNA, 19 nt, Artificial Sequence
  Description of Artificial Sequence: Synthetic oligonucleotide
aaacucuuuaucccaagac

SEQ ID NO: 2738727 - RNA, 19 nt, Artificial Sequence
  Description of Artificial Sequence: Synthetic oligonucleotide
  modified_base (2)..(2): a, c, u, g, unknown or other
unauaaaaggaguauuucc

SEQ ID NO: 2738728 - RNA, 19 nt, Artificial Sequence
  Description of Artificial Sequence: Synthetic oligonucleotide
aauaacagcauuaaagugu

SEQ ID NO: 2738729 - RNA, 19 nt, Artificial Sequence
  Description of Artificial Sequence: Synthetic oligonucleotide
cuauaguugaagaagacac

SEQ ID NO: 2738730 - RNA, 19 nt, Artificial Sequence
  Description of Artificial Sequence: Synthetic oligonucleotide
  modified_base (8)..(8): a, c, u, g, unknown or other
uuuuaaunauaaaaggagu

SEQ ID NO: 2738731 - RNA, 19 nt, Artificial Sequence
  Description of Artificial Sequence: Synthetic oligonucleotide
uuccaugucaacuaggaag

SEQ ID NO: 2738732 - RNA, 19 nt, Artificial Sequence
  Description of Artificial Sequence: Synthetic oligonucleotide
auuuccguaauucacaaug

SEQ ID NO: 2738733 - RNA, 19 nt, Artificial Sequence
  Description of Artificial Sequence: Synthetic oligonucleotide
uaauaaaaucuucugguug

SEQ ID NO: 2738734 - RNA, 19 nt, Artificial Sequence
  Description of Artificial Sequence: Synthetic oligonucleotide
acaauaacagcauuaaagu

SEQ ID NO: 2738735 - RNA, 19 nt, Artificial Sequence
  Description of Artificial Sequence: Synthetic oligonucleotide
aacuagaacaauaacagca

SEQ ID NO: 2738736 - RNA, 19 nt, Artificial Sequence
  Description of Artificial Sequence: Synthetic oligonucleotide
uaaaguguaauuccuuaag

SEQ ID NO: 2738737 - RNA, 19 nt, Artificial Sequence
  Description of Artificial Sequence: Synthetic oligonucleotide
ugaaauauuguucauuaau

SEQ ID NO: 2738738 - RNA, 19 nt, Artificial Sequence
  Description of Artificial Sequence: Synthetic oligonucleotide
uuguucauuaauuuucucc

SEQ ID NO: 2738739 - RNA, 19 nt, Artificial Sequence
  Description of Artificial Sequence: Synthetic oligonucleotide
uauaaaacucuuuauccca

SEQ ID NO: 2738740 - RNA, 19 nt, Artificial Sequence
  Description of Artificial Sequence: Synthetic oligonucleotide
uacaaaaguauacugaaua

SEQ ID NO: 2738741 - RNA, 19 nt, Artificial Sequence
  Description of Artificial Sequence: Synthetic oligonucleotide
aauauuguucauuaauuuu

SEQ ID NO: 2738742 - RNA, 19 nt, Artificial Sequence
  Description of Artificial Sequence: Synthetic oligonucleotide
aaaaucuucugguugcucu

SEQ ID NO: 2738743 - RNA, 19 nt, Artificial Sequence
  Description of Artificial Sequence: Synthetic oligonucleotide
gauggggaaacagaaaugg

SEQ ID NO: 2738744 - RNA, 19 nt, Artificial Sequence
  Description of Artificial Sequence: Synthetic oligonucleotide
cuauaaaacucuuuauccc

SEQ ID NO: 2738745 - RNA, 19 nt, Artificial Sequence
  Description of Artificial Sequence: Synthetic oligonucleotide
aaauauuguucauuaauuu

SEQ ID NO: 2738746 - RNA, 19 nt, Artificial Sequence
  Description of Artificial Sequence: Synthetic oligonucleotide
aaaguguaauuccuuaaga

SEQ ID NO: 2738747 - RNA, 19 nt, Artificial Sequence
  Description of Artificial Sequence: Synthetic oligonucleotide
uaugaaauauuguucauua

SEQ ID NO: 2738748 - RNA, 19 nt, Artificial Sequence
  Description of Artificial Sequence: Synthetic oligonucleotide
aacucuuuaucccaagacu

SEQ ID NO: 2738749 - RNA, 19 nt, Artificial Sequence
  Description of Artificial Sequence: Synthetic oligonucleotide
uuaagagucuuuuccaggc

SEQ ID NO: 2738750 - RNA, 19 nt, Artificial Sequence
  Description of Artificial Sequence: Synthetic oligonucleotide
uccaugucaacuaggaagc

SEQ ID NO: 2738751 - RNA, 19 nt, Artificial Sequence
  Description of Artificial Sequence: Synthetic oligonucleotide
aguuccugaacacuguagg

SEQ ID NO: 2738752 - RNA, 19 nt, Artificial Sequence
  Description of Artificial Sequence: Synthetic oligonucleotide
ugauccaacaugcauauua

SEQ ID NO: 2738753 - RNA, 19 nt, Artificial Sequence
  Description of Artificial Sequence: Synthetic oligonucleotide
aaaaguauacugaauacau

SEQ ID NO: 2738754 - RNA, 19 nt, Artificial Sequence
  Description of Artificial Sequence: Synthetic oligonucleotide
guaauucacaaugugagag

SEQ ID NO: 2738755 - RNA, 19 nt, Artificial Sequence
  Description of Artificial Sequence: Synthetic oligonucleotide
  modified_base (4)..(4): a, c, u, g, unknown or other
aaunauaaaaggaguauuu

SEQ ID NO: 2738756 - RNA, 19 nt, Artificial Sequence
  Description of Artificial Sequence: Synthetic oligonucleotide
uuuaucccaagacucacca

SEQ ID NO: 2738757 - RNA, 19 nt, Artificial Sequence
  Description of Artificial Sequence: Synthetic oligonucleotide
auacugaauacauuguucu

SEQ ID NO: 2738758 - RNA, 19 nt, Artificial Sequence
  Description of Artificial Sequence: Synthetic oligonucleotide
agguaugaaauauuguuca

SEQ ID NO: 2738759 - RNA, 19 nt, Artificial Sequence
  Description of Artificial Sequence: Synthetic oligonucleotide
ucaaaaggccuauaguuga

SEQ ID NO: 2738760 - RNA, 19 nt, Artificial Sequence
  Description of Artificial Sequence: Synthetic oligonucleotide
aacacuguagguaugaaau

SEQ ID NO: 2738761 - RNA, 19 nt, Artificial Sequence
  Description of Artificial Sequence: Synthetic oligonucleotide
ucuaagugugguacaaaag

SEQ ID NO: 2738762 - RNA, 19 nt, Artificial Sequence
  Description of Artificial Sequence: Synthetic oligonucleotide
ugguacaaaaguauacuga

SEQ ID NO: 2738763 - RNA, 19 nt, Artificial Sequence
  Description of Artificial Sequence: Synthetic oligonucleotide
uguaauuccuuaagaauuc

SEQ ID NO: 2738764 - RNA, 19 nt, Artificial Sequence
  Description of Artificial Sequence: Synthetic oligonucleotide
cacaaugugagagaguucc

SEQ ID NO: 2738765 - RNA, 19 nt, Artificial Sequence
  Description of Artificial Sequence: Synthetic oligonucleotide
gaaccugaacccuaggcag

SEQ ID NO: 2738766 - RNA, 19 nt, Artificial Sequence
  Description of Artificial Sequence: Synthetic oligonucleotide
ugacuuuuaaaaguuguug

SEQ ID NO: 2738767 - RNA, 19 nt, Artificial Sequence
  Description of Artificial Sequence: Synthetic oligonucleotide
acaugcauauuaaugcugc

SEQ ID NO: 2738768 - RNA, 19 nt, Artificial Sequence
  Description of Artificial Sequence: Synthetic oligonucleotide
aagacucaccaucuaagug

SEQ ID NO: 2738769 - RNA, 19 nt, Artificial Sequence
  Description of Artificial Sequence: Synthetic oligonucleotide
uucauauaauaaaaucuuc

SEQ ID NO: 2738770 - RNA, 19 nt, Artificial Sequence
  Description of Artificial Sequence: Synthetic oligonucleotide
aaugugagagaguuccuga

SEQ ID NO: 2738771 - RNA, 19 nt, Artificial Sequence
  Description of Artificial Sequence: Synthetic oligonucleotide
agacucaccaucuaagugu

SEQ ID NO: 2738772 - RNA, 19 nt, Artificial Sequence
  Description of Artificial Sequence: Synthetic oligonucleotide
uccguaauucacaauguga

SEQ ID NO: 2738773 - RNA, 19 nt, Artificial Sequence
  Description of Artificial Sequence: Synthetic oligonucleotide
ucuccuuucaaauuggauu

SEQ ID NO: 2738774 - RNA, 19 nt, Artificial Sequence
  Description of Artificial Sequence: Synthetic oligonucleotide
auauuaaugcugcauauuu

SEQ ID NO: 2738775 - RNA, 19 nt, Artificial Sequence
  Description of Artificial Sequence: Synthetic oligonucleotide
  modified_base (6)..(6): a, c, u, g, unknown or other
uuaaunauaaaaggaguau

SEQ ID NO: 2738776 - RNA, 19 nt, Artificial Sequence
  Description of Artificial Sequence: Synthetic oligonucleotide
uguguguuauuucuucuca

SEQ ID NO: 2738777 - RNA, 19 nt, Artificial Sequence
  Description of Artificial Sequence: Synthetic oligonucleotide
aaaacucuuuaucccaaga

SEQ ID NO: 2738778 - RNA, 19 nt, Artificial Sequence
  Description of Artificial Sequence: Synthetic oligonucleotide
uagguaugaaauauuguuc

SEQ ID NO: 2738779 - RNA, 19 nt, Artificial Sequence
  Description of Artificial Sequence: Synthetic oligonucleotide
uaaaaguuguuguaguaau

SEQ ID NO: 2738780 - RNA, 19 nt, Artificial Sequence
  Description of Artificial Sequence: Synthetic oligonucleotide
aagaauucaugaggaaagg

SEQ ID NO: 2738781 - RNA, 19 nt, Artificial Sequence
  Description of Artificial Sequence: Synthetic oligonucleotide
uguguuauuucuucucaug

SEQ ID NO: 2738782 - RNA, 19 nt, Artificial Sequence
  Description of Artificial Sequence: Synthetic oligonucleotide
aggaguauuuccguaauuc

SEQ ID NO: 2738783 - RNA, 19 nt, Artificial Sequence
  Description of Artificial Sequence: Synthetic oligonucleotide
uaucccaagacucaccauc

SEQ ID NO: 2738784 - RNA, 19 nt, Artificial Sequence
  Description of Artificial Sequence: Synthetic oligonucleotide
aaaggccuauaguugaaga

SEQ ID NO: 2738785 - RNA, 19 nt, Artificial Sequence
  Description of Artificial Sequence: Synthetic oligonucleotide
uagaacaauaacagcauua

SEQ ID NO: 2738786 - RNA, 19 nt, Artificial Sequence
  Description of Artificial Sequence: Synthetic oligonucleotide
ugcauauuaaugcugcaua

SEQ ID NO: 2738787 - RNA, 19 nt, Artificial Sequence
  Description of Artificial Sequence: Synthetic oligonucleotide
aaaacagcaugacuuuuaa

SEQ ID NO: 2738788 - RNA, 19 nt, Artificial Sequence
  Description of Artificial Sequence: Synthetic oligonucleotide
ggagcauccucucaaaagg

SEQ ID NO: 2738789 - RNA, 19 nt, Artificial Sequence
  Description of Artificial Sequence: Synthetic oligonucleotide
cucaaaaggccuauaguug

SEQ ID NO: 2738790 - RNA, 19 nt, Artificial Sequence
  Description of Artificial Sequence: Synthetic oligonucleotide
uguagguaugaaauauugu

SEQ ID NO: 2738791 - RNA, 19 nt, Artificial Sequence
  Description of Artificial Sequence: Synthetic oligonucleotide
gaaauggccauuuucauau

SEQ ID NO: 2738792 - RNA, 19 nt, Artificial Sequence
  Description of Artificial Sequence: Synthetic oligonucleotide
cuguagguaugaaauauug

SEQ ID NO: 2738793 - RNA, 19 nt, Artificial Sequence
  Description of Artificial Sequence: Synthetic oligonucleotide
agaaccugaacccuaggca

SEQ ID NO: 2738794 - RNA, 19 nt, Artificial Sequence
  Description of Artificial Sequence: Synthetic oligonucleotide
uggagcauccucucaaaag

SEQ ID NO: 2738795 - RNA, 19 nt, Artificial Sequence
  Description of Artificial Sequence: Synthetic oligonucleotide
uuuaaaaguuguuguagua

SEQ ID NO: 2738796 - RNA, 19 nt, Artificial Sequence
  Description of Artificial Sequence: Synthetic oligonucleotide
uuaaaguguaauuccuuaa

SEQ ID NO: 2738797 - RNA, 19 nt, Artificial Sequence
  Description of Artificial Sequence: Synthetic oligonucleotide
uaacuagaacaauaacagc

SEQ ID NO: 2738798 - RNA, 19 nt, Artificial Sequence
  Description of Artificial Sequence: Synthetic oligonucleotide
ugugguacaaaaguauacu

SEQ ID NO: 2738799 - RNA, 19 nt, Artificial Sequence
  Description of Artificial Sequence: Synthetic oligonucleotide
auaguugaagaagacacca

SEQ ID NO: 2738800 - RNA, 19 nt, Artificial Sequence
  Description of Artificial Sequence: Synthetic oligonucleotide
gacaccaucgcuuucaccu

SEQ ID NO: 2738801 - RNA, 19 nt, Artificial Sequence
  Description of Artificial Sequence: Synthetic oligonucleotide
uuucuauaaaacucuuuau

SEQ ID NO: 2738802 - RNA, 19 nt, Artificial Sequence
  Description of Artificial Sequence: Synthetic oligonucleotide
  modified_base (5)..(5): a, c, u, g, unknown or other
uaaunauaaaaggaguauu

SEQ ID NO: 2738803 - RNA, 19 nt, Artificial Sequence
  Description of Artificial Sequence: Synthetic oligonucleotide
uaauucacaaugugagaga

SEQ ID NO: 2738804 - RNA, 19 nt, Artificial Sequence
  Description of Artificial Sequence: Synthetic oligonucleotide
uucuguguugagaugggga

SEQ ID NO: 2738805 - RNA, 19 nt, Artificial Sequence
  Description of Artificial Sequence: Synthetic oligonucleotide
uaggaagccacuuccugag

SEQ ID NO: 2738806 - RNA, 19 nt, Artificial Sequence
  Description of Artificial Sequence: Synthetic oligonucleotide
ggacuuaagagucuuuucc

SEQ ID NO: 2738807 - RNA, 19 nt, Artificial Sequence
  Description of Artificial Sequence: Synthetic oligonucleotide
augucaacuaggaagccac

SEQ ID NO: 2738808 - RNA, 19 nt, Artificial Sequence
  Description of Artificial Sequence: Synthetic oligonucleotide
uucauuaauuuucuccuuu

SEQ ID NO: 2738809 - RNA, 19 nt, Artificial Sequence
  Description of Artificial Sequence: Synthetic oligonucleotide
aggguaacaggacuuaaga

SEQ ID NO: 2738810 - RNA, 19 nt, Artificial Sequence
  Description of Artificial Sequence: Synthetic oligonucleotide
acagaaauggccauuuuca

SEQ ID NO: 2738811 - RNA, 19 nt, Artificial Sequence
  Description of Artificial Sequence: Synthetic oligonucleotide
aauucaugaggaaagggua

SEQ ID NO: 2738812 - RNA, 19 nt, Artificial Sequence
  Description of Artificial Sequence: Synthetic oligonucleotide
acugaauacauuguucugu

SEQ ID NO: 2738813 - RNA, 19 nt, Artificial Sequence
  Description of Artificial Sequence: Synthetic oligonucleotide
uuuccguaauucacaaugu

SEQ ID NO: 2738814 - RNA, 19 nt, Artificial Sequence
  Description of Artificial Sequence: Synthetic oligonucleotide
ucuguguugagauggggaa

SEQ ID NO: 2738815 - RNA, 19 nt, Artificial Sequence
  Description of Artificial Sequence: Synthetic oligonucleotide
guaacaggacuuaagaguc

SEQ ID NO: 2738816 - RNA, 19 nt, Artificial Sequence
  Description of Artificial Sequence: Synthetic oligonucleotide
cugaauacauuguucugug

SEQ ID NO: 2738817 - RNA, 19 nt, Artificial Sequence
  Description of Artificial Sequence: Synthetic oligonucleotide
uuccguaauucacaaugug

SEQ ID NO: 2738818 - RNA, 19 nt, Artificial Sequence
  Description of Artificial Sequence: Synthetic oligonucleotide
aggacuuaagagucuuuuc

SEQ ID NO: 2738819 - RNA, 19 nt, Artificial Sequence
  Description of Artificial Sequence: Synthetic oligonucleotide
aagacaccaucgcuuucac

SEQ ID NO: 2738820 - RNA, 19 nt, Artificial Sequence
  Description of Artificial Sequence: Synthetic oligonucleotide
ugguauucccauuccaugu

SEQ ID NO: 2738821 - RNA, 19 nt, Artificial Sequence
  Description of Artificial Sequence: Synthetic oligonucleotide
gugguacaaaaguauacug

SEQ ID NO: 2738822 - RNA, 19 nt, Artificial Sequence
  Description of Artificial Sequence: Synthetic oligonucleotide
aaggccuauaguugaagaa

SEQ ID NO: 2738823 - RNA, 19 nt, Artificial Sequence
  Description of Artificial Sequence: Synthetic oligonucleotide
aagagucuuuuccaggcau

SEQ ID NO: 2738824 - RNA, 19 nt, Artificial Sequence
  Description of Artificial Sequence: Synthetic oligonucleotide
ucauuaauuuucuccuuuc

SEQ ID NO: 2738825 - RNA, 19 nt, Artificial Sequence
  Description of Artificial Sequence: Synthetic oligonucleotide
acuuuuaaaaguuguugua

SEQ ID NO: 2738826 - RNA, 19 nt, Artificial Sequence
  Description of Artificial Sequence: Synthetic oligonucleotide
gaagccacuuccugagccg

SEQ ID NO: 2738827 - RNA, 19 nt, Artificial Sequence
  Description of Artificial Sequence: Synthetic oligonucleotide
uauuaaugcugcauauuuu

SEQ ID NO: 2738828 - RNA, 19 nt, Artificial Sequence
  Description of Artificial Sequence: Synthetic oligonucleotide
ugugagagaguuccugaac

SEQ ID NO: 2738829 - RNA, 19 nt, Artificial Sequence
  Description of Artificial Sequence: Synthetic oligonucleotide
ucucauguugauccaacau

SEQ ID NO: 2738830 - RNA, 19 nt, Artificial Sequence
  Description of Artificial Sequence: Synthetic oligonucleotide
cugaacccuaggcagagcc

SEQ ID NO: 2738831 - RNA, 19 nt, Artificial Sequence
  Description of Artificial Sequence: Synthetic oligonucleotide
aucuaagugugguacaaaa

SEQ ID NO: 2738832 - RNA, 19 nt, Artificial Sequence
  Description of Artificial Sequence: Synthetic oligonucleotide
uguugagauggggaaacag

SEQ ID NO: 2738833 - RNA, 19 nt, Artificial Sequence
  Description of Artificial Sequence: Synthetic oligonucleotide
agaacaauaacagcauuaa

SEQ ID NO: 2738834 - RNA, 19 nt, Artificial Sequence
  Description of Artificial Sequence: Synthetic oligonucleotide
aguauuuccguaauucaca

SEQ ID NO: 2738835 - RNA, 19 nt, Artificial Sequence
  Description of Artificial Sequence: Synthetic oligonucleotide
gaguauuuccguaauucac

SEQ ID NO: 2738836 - RNA, 19 nt, Artificial Sequence
  Description of Artificial Sequence: Synthetic oligonucleotide
uucucguggagcauccucu

SEQ ID NO: 2738837 - RNA, 19 nt, Artificial Sequence
  Description of Artificial Sequence: Synthetic oligonucleotide
aggaaaggguaacaggacu

SEQ ID NO: 2738838 - RNA, 19 nt, Artificial Sequence
  Description of Artificial Sequence: Synthetic oligonucleotide
uaaaaggaguauuuccgua

SEQ ID NO: 2738839 - RNA, 19 nt, Artificial Sequence
  Description of Artificial Sequence: Synthetic oligonucleotide
aggccuauaguugaagaag

SEQ ID NO: 2738840 - RNA, 19 nt, Artificial Sequence
  Description of Artificial Sequence: Synthetic oligonucleotide
auucccauuccaugucaac

SEQ ID NO: 2738841 - RNA, 19 nt, Artificial Sequence
  Description of Artificial Sequence: Synthetic oligonucleotide
uacugaauacauuguucug

SEQ ID NO: 2738842 - RNA, 19 nt, Artificial Sequence
  Description of Artificial Sequence: Synthetic oligonucleotide
ccguaauucacaaugugag

SEQ ID NO: 2738843 - RNA, 19 nt, Artificial Sequence
  Description of Artificial Sequence: Synthetic oligonucleotide
acuaggaagccacuuccug

SEQ ID NO: 2738844 - RNA, 19 nt, Artificial Sequence
  Description of Artificial Sequence: Synthetic oligonucleotide
uguguguguuauuucuucu

SEQ ID NO: 2738845 - RNA, 19 nt, Artificial Sequence
  Description of Artificial Sequence: Synthetic oligonucleotide
cuuuaucccaagacucacc

SEQ ID NO: 2738846 - RNA, 19 nt, Artificial Sequence
  Description of Artificial Sequence: Synthetic oligonucleotide
uccugaacacuguagguau

SEQ ID NO: 2738847 - RNA, 19 nt, Artificial Sequence
  Description of Artificial Sequence: Synthetic oligonucleotide
caugaggaaaggguaacag

SEQ ID NO: 2738848 - RNA, 19 nt, Artificial Sequence
  Description of Artificial Sequence: Synthetic oligonucleotide
aaggguaacaggacuuaag

SEQ ID NO: 2738849 - RNA, 19 nt, Artificial Sequence
  Description of Artificial Sequence: Synthetic oligonucleotide
cuaagugugguacaaaagu

SEQ ID NO: 2738850 - RNA, 19 nt, Artificial Sequence
  Description of Artificial Sequence: Synthetic oligonucleotide
gguacaaaaguauacugaa

SEQ ID NO: 2738851 - RNA, 19 nt, Artificial Sequence
  Description of Artificial Sequence: Synthetic oligonucleotide
ucuugguuguucucgugga

SEQ ID NO: 2738852 - RNA, 19 nt, Artificial Sequence
  Description of Artificial Sequence: Synthetic oligonucleotide
aggcauuuaaaauuuucua

SEQ ID NO: 2738853 - RNA, 19 nt, Artificial Sequence
  Description of Artificial Sequence: Synthetic oligonucleotide
guagguaugaaauauuguu

SEQ ID NO: 2738854 - RNA, 19 nt, Artificial Sequence
  Description of Artificial Sequence: Synthetic oligonucleotide
uaauuccuuaagaauucau

SEQ ID NO: 2738855 - RNA, 19 nt, Artificial Sequence
  Description of Artificial Sequence: Synthetic oligonucleotide
aagugugguacaaaaguau

SEQ ID NO: 2738856 - RNA, 19 nt, Artificial Sequence
  Description of Artificial Sequence: Synthetic oligonucleotide
cagaaccugaacccuaggc

SEQ ID NO: 2738857 - RNA, 19 nt, Artificial Sequence
  Description of Artificial Sequence: Synthetic oligonucleotide
uggccauuuucauauaaua

SEQ ID NO: 2738858 - RNA, 19 nt, Artificial Sequence
  Description of Artificial Sequence: Synthetic oligonucleotide
caaaaguauacugaauaca

SEQ ID NO: 2738859 - RNA, 19 nt, Artificial Sequence
  Description of Artificial Sequence: Synthetic oligonucleotide
ucugguugcucuugguugu

SEQ ID NO: 2738860 - RNA, 19 nt, Artificial Sequence
  Description of Artificial Sequence: Synthetic oligonucleotide
agagaguuccugaacacug

SEQ ID NO: 2738861 - RNA, 19 nt, Artificial Sequence
  Description of Artificial Sequence: Synthetic oligonucleotide
cauuccaugucaacuagga

SEQ ID NO: 2738862 - RNA, 19 nt, Artificial Sequence
  Description of Artificial Sequence: Synthetic oligonucleotide
auguugauccaacaugcau

SEQ ID NO: 2738863 - RNA, 19 nt, Artificial Sequence
  Description of Artificial Sequence: Synthetic oligonucleotide
gaauucaugaggaaagggu

SEQ ID NO: 2738864 - RNA, 19 nt, Artificial Sequence
  Description of Artificial Sequence: Synthetic oligonucleotide
ucuuuuccaggcauuuaaa

SEQ ID NO: 2738865 - RNA, 19 nt, Artificial Sequence
  Description of Artificial Sequence: Synthetic oligonucleotide
uugguuguucucguggagc

SEQ ID NO: 2738866 - RNA, 19 nt, Artificial Sequence
  Description of Artificial Sequence: Synthetic oligonucleotide
ggagccagaaccugaaccc

SEQ ID NO: 2738867 - RNA, 19 nt, Artificial Sequence
  Description of Artificial Sequence: Synthetic oligonucleotide
uacauuguucuguguugag

SEQ ID NO: 2738868 - RNA, 19 nt, Artificial Sequence
  Description of Artificial Sequence: Synthetic oligonucleotide
gaaauauuguucauuaauu

SEQ ID NO: 2738869 - RNA, 19 nt, Artificial Sequence
  Description of Artificial Sequence: Synthetic oligonucleotide
ucuuuaucccaagacucac

SEQ ID NO: 2738870 - RNA, 19 nt, Artificial Sequence
  Description of Artificial Sequence: Synthetic oligonucleotide
uuguucucguggagcaucc

SEQ ID NO: 2738871 - RNA, 19 nt, Artificial Sequence
  Description of Artificial Sequence: Synthetic oligonucleotide
ugaacccuaggcagagccc

SEQ ID NO: 2738872 - RNA, 19 nt, Artificial Sequence
  Description of Artificial Sequence: Synthetic oligonucleotide
aaacagcaugacuuuuaaa

SEQ ID NO: 2738873 - RNA, 19 nt, Artificial Sequence
  Description of Artificial Sequence: Synthetic oligonucleotide
agacaccaucgcuuucacc

SEQ ID NO: 2738874 - RNA, 19 nt, Artificial Sequence
  Description of Artificial Sequence: Synthetic oligonucleotide
ugaauacauuguucugugu

SEQ ID NO: 2738875 - RNA, 19 nt, Artificial Sequence
  Description of Artificial Sequence: Synthetic oligonucleotide
aaaguauacugaauacauu

SEQ ID NO: 2738876 - RNA, 19 nt, Artificial Sequence
  Description of Artificial Sequence: Synthetic oligonucleotide
uucaugaggaaaggguaac

SEQ ID NO: 2738877 - RNA, 19 nt, Artificial Sequence
  Description of Artificial Sequence: Synthetic oligonucleotide
ggguaacaggacuuaagag

SEQ ID NO: 2738878 - RNA, 19 nt, Artificial Sequence
  Description of Artificial Sequence: Synthetic oligonucleotide
augaaauauuguucauuaa

SEQ ID NO: 2738879 - RNA, 19 nt, Artificial Sequence
  Description of Artificial Sequence: Synthetic oligonucleotide
gaacacuguagguaugaaa

SEQ ID NO: 2738880 - RNA, 19 nt, Artificial Sequence
  Description of Artificial Sequence: Synthetic oligonucleotide
cauuaauuuucuccuuuca

SEQ ID NO: 2738881 - RNA, 19 nt, Artificial Sequence
  Description of Artificial Sequence: Synthetic oligonucleotide
caugacuuuuaaaaguugu

SEQ ID NO: 2738882 - RNA, 19 nt, Artificial Sequence
  Description of Artificial Sequence: Synthetic oligonucleotide
gucuuuuccaggcauuuaa

SEQ ID NO: 2738883 - RNA, 19 nt, Artificial Sequence
  Description of Artificial Sequence: Synthetic oligonucleotide
auaacagcauuaaagugua

SEQ ID NO: 2738884 - RNA, 19 nt, Artificial Sequence
  Description of Artificial Sequence: Synthetic oligonucleotide
uauucccauuccaugucaa

SEQ ID NO: 2738885 - RNA, 19 nt, Artificial Sequence
  Description of Artificial Sequence: Synthetic oligonucleotide
ucguggagcauccucucaa

SEQ ID NO: 2738886 - RNA, 19 nt, Artificial Sequence
  Description of Artificial Sequence: Synthetic oligonucleotide
uaacaggacuuaagagucu

SEQ ID NO: 2738887 - RNA, 19 nt, Artificial Sequence
  Description of Artificial Sequence: Synthetic oligonucleotide
gacucaccaucuaagugug

SEQ ID NO: 2738888 - RNA, 19 nt, Artificial Sequence
  Description of Artificial Sequence: Synthetic oligonucleotide
gaguuccugaacacuguag

SEQ ID NO: 2738889 - RNA, 19 nt, Artificial Sequence
  Description of Artificial Sequence: Synthetic oligonucleotide
caccaucuaagugugguac

SEQ ID NO: 2738890 - RNA, 19 nt, Artificial Sequence
  Description of Artificial Sequence: Synthetic oligonucleotide
uucaccugcuggcugguau

SEQ ID NO: 2738891 - RNA, 19 nt, Artificial Sequence
  Description of Artificial Sequence: Synthetic oligonucleotide
cuaggaagccacuuccuga

SEQ ID NO: 2738892 - RNA, 19 nt, Artificial Sequence
  Description of Artificial Sequence: Synthetic oligonucleotide
uaguugaagaagacaccau

SEQ ID NO: 2738893 - RNA, 19 nt, Artificial Sequence
  Description of Artificial Sequence: Synthetic oligonucleotide
agaagacaccaucgcuuuc

SEQ ID NO: 2738894 - RNA, 19 nt, Artificial Sequence
  Description of Artificial Sequence: Synthetic oligonucleotide
guauuuccguaauucacaa

SEQ ID NO: 2738895 - RNA, 19 nt, Artificial Sequence
  Description of Artificial Sequence: Synthetic oligonucleotide
caaugugagagaguuccug

SEQ ID NO: 2738896 - RNA, 19 nt, Artificial Sequence
  Description of Artificial Sequence: Synthetic oligonucleotide
uuccugaacacuguaggua

SEQ ID NO: 2738897 - RNA, 19 nt, Artificial Sequence
  Description of Artificial Sequence: Synthetic oligonucleotide
cuggcugguauucccauuc

SEQ ID NO: 2738898 - RNA, 19 nt, Artificial Sequence
  Description of Artificial Sequence: Synthetic oligonucleotide
cuuuuccaggcauuuaaaa

SEQ ID NO: 2738899 - RNA, 19 nt, Artificial Sequence
  Description of Artificial Sequence: Synthetic oligonucleotide
ggaagccacuuccugagcc

SEQ ID NO: 2738900 - RNA, 19 nt, Artificial Sequence
  Description of Artificial Sequence: Synthetic oligonucleotide
ucaugaggaaaggguaaca

SEQ ID NO: 2738901 - RNA, 19 nt, Artificial Sequence
  Description of Artificial Sequence: Synthetic oligonucleotide
aacaggacuuaagagucuu

SEQ ID NO: 2738902 - RNA, 19 nt, Artificial Sequence
  Description of Artificial Sequence: Synthetic oligonucleotide
ccaagacucaccaucuaag

SEQ ID NO: 2738903 - RNA, 19 nt, Artificial Sequence
  Description of Artificial Sequence: Synthetic oligonucleotide
ccuuaagaauucaugagga

SEQ ID NO: 2738904 - RNA, 19 nt, Artificial Sequence
  Description of Artificial Sequence: Synthetic oligonucleotide
cucuuuaucccaagacuca

SEQ ID NO: 2738905 - RNA, 19 nt, Artificial Sequence
  Description of Artificial Sequence: Synthetic oligonucleotide
guguuauuucuucucaugu

SEQ ID NO: 2738906 - RNA, 19 nt, Artificial Sequence
  Description of Artificial Sequence: Synthetic oligonucleotide
guaaugaugguggggugug

SEQ ID NO: 2738907 - RNA, 19 nt, Artificial Sequence
  Description of Artificial Sequence: Synthetic oligonucleotide
guguguguuauuucuucuc

SEQ ID NO: 2738908 - RNA, 19 nt, Artificial Sequence
  Description of Artificial Sequence: Synthetic oligonucleotide
ggaguauuuccguaauuca

SEQ ID NO: 2738909 - RNA, 19 nt, Artificial Sequence
  Description of Artificial Sequence: Synthetic oligonucleotide
gugugguacaaaaguauac

SEQ ID NO: 2738910 - RNA, 19 nt, Artificial Sequence
  Description of Artificial Sequence: Synthetic oligonucleotide
cuuaagaauucaugaggaa

SEQ ID NO: 2738911 - RNA, 19 nt, Artificial Sequence
  Description of Artificial Sequence: Synthetic oligonucleotide
aaaggguaacaggacuuaa

SEQ ID NO: 2738912 - RNA, 19 nt, Artificial Sequence
  Description of Artificial Sequence: Synthetic oligonucleotide
gauccaacaugcauauuaa

SEQ ID NO: 2738913 - RNA, 19 nt, Artificial Sequence
  Description of Artificial Sequence: Synthetic oligonucleotide
accaucuaagugugguaca

SEQ ID NO: 2738914 - RNA, 19 nt, Artificial Sequence
  Description of Artificial Sequence: Synthetic oligonucleotide
gcuuucaccugcuggcugg

SEQ ID NO: 2738915 - RNA, 19 nt, Artificial Sequence
  Description of Artificial Sequence: Synthetic oligonucleotide
auaaaaucuucugguugcu

SEQ ID NO: 2738916 - RNA, 19 nt, Artificial Sequence
  Description of Artificial Sequence: Synthetic oligonucleotide
ggcauuuaaaauuuucuau

SEQ ID NO: 2738917 - RNA, 19 nt, Artificial Sequence
  Description of Artificial Sequence: Synthetic oligonucleotide
guauucccauuccauguca

SEQ ID NO: 2738918 - RNA, 19 nt, Artificial Sequence
  Description of Artificial Sequence: Synthetic oligonucleotide
gaacccuaggcagagccca

SEQ ID NO: 2738919 - RNA, 19 nt, Artificial Sequence
  Description of Artificial Sequence: Synthetic oligonucleotide
uaaaaucuucugguugcuc

SEQ ID NO: 2738920 - RNA, 19 nt, Artificial Sequence
  Description of Artificial Sequence: Synthetic oligonucleotide
augcauauuaaugcugcau

SEQ ID NO: 2738921 - RNA, 19 nt, Artificial Sequence
  Description of Artificial Sequence: Synthetic oligonucleotide
aacuaggaagccacuuccu

SEQ ID NO: 2738922 - RNA, 19 nt, Artificial Sequence
  Description of Artificial Sequence: Synthetic oligonucleotide
guguaauuccuuaagaauu

SEQ ID NO: 2738923 - RNA, 19 nt, Artificial Sequence
  Description of Artificial Sequence: Synthetic oligonucleotide
ugucaacuaggaagccacu

SEQ ID NO: 2738924 - RNA, 19 nt, Artificial Sequence
  Description of Artificial Sequence: Synthetic oligonucleotide
uuguuguaguaaugauggu

SEQ ID NO: 2738925 - RNA, 19 nt, Artificial Sequence
  Description of Artificial Sequence: Synthetic oligonucleotide
uggcugguauucccauucc

SEQ ID NO: 2738926 - RNA, 19 nt, Artificial Sequence
  Description of Artificial Sequence: Synthetic oligonucleotide
uauuuccguaauucacaau

SEQ ID NO: 2738927 - RNA, 19 nt, Artificial Sequence
  Description of Artificial Sequence: Synthetic oligonucleotide
auucaugaggaaaggguaa

SEQ ID NO: 2738928 - RNA, 19 nt, Artificial Sequence
  Description of Artificial Sequence: Synthetic oligonucleotide
agugugguacaaaaguaua

SEQ ID NO: 2738929 - RNA, 19 nt, Artificial Sequence
  Description of Artificial Sequence: Synthetic oligonucleotide
acaccaucgcuuucaccug

SEQ ID NO: 2738930 - RNA, 19 nt, Artificial Sequence
  Description of Artificial Sequence: Synthetic oligonucleotide
acacuguagguaugaaaua

SEQ ID NO: 2738931 - RNA, 19 nt, Artificial Sequence
  Description of Artificial Sequence: Synthetic oligonucleotide
ugggguguguguguuauuu

SEQ ID NO: 2738932 - RNA, 19 nt, Artificial Sequence
  Description of Artificial Sequence: Synthetic oligonucleotide
auccaacaugcauauuaau

SEQ ID NO: 2738933 - RNA, 19 nt, Artificial Sequence
  Description of Artificial Sequence: Synthetic oligonucleotide
guuguucucguggagcauc

SEQ ID NO: 2738934 - RNA, 19 nt, Artificial Sequence
  Description of Artificial Sequence: Synthetic oligonucleotide
guauacugaauacauuguu

SEQ ID NO: 2738935 - RNA, 19 nt, Artificial Sequence
  Description of Artificial Sequence: Synthetic oligonucleotide
guaauuccuuaagaauuca

SEQ ID NO: 2738936 - RNA, 19 nt, Artificial Sequence
  Description of Artificial Sequence: Synthetic oligonucleotide
ccucucaaaaggccuauag

SEQ ID NO: 2738937 - RNA, 19 nt, Artificial Sequence
  Description of Artificial Sequence: Synthetic oligonucleotide
caacaugcauauuaaugcu

SEQ ID NO: 2738938 - RNA, 19 nt, Artificial Sequence
  Description of Artificial Sequence: Synthetic oligonucleotide
agaguuccugaacacugua

SEQ ID NO: 2738939 - RNA, 19 nt, Artificial Sequence
  Description of Artificial Sequence: Synthetic oligonucleotide
ucaccaucuaaguguggua

SEQ ID NO: 2738940 - RNA, 19 nt, Artificial Sequence
  Description of Artificial Sequence: Synthetic oligonucleotide
ggggaaacagaaauggcca

SEQ ID NO: 2738941 - RNA, 19 nt, Artificial Sequence
  Description of Artificial Sequence: Synthetic oligonucleotide
augacuuuuaaaaguuguu

SEQ ID NO: 2738942 - RNA, 19 nt, Artificial Sequence
  Description of Artificial Sequence: Synthetic oligonucleotide
aaauggccauuuucauaua

SEQ ID NO: 2738943 - RNA, 19 nt, Artificial Sequence
  Description of Artificial Sequence: Synthetic oligonucleotide
aaccugaacccuaggcaga

SEQ ID NO: 2738944 - RNA, 19 nt, Artificial Sequence
  Description of Artificial Sequence: Synthetic oligonucleotide
caccaucgcuuucaccugc

SEQ ID NO: 2738945 - RNA, 19 nt, Artificial Sequence
  Description of Artificial Sequence: Synthetic oligonucleotide
gguauucccauuccauguc

SEQ ID NO: 2738946 - RNA, 19 nt, Artificial Sequence
  Description of Artificial Sequence: Synthetic oligonucleotide
uuaucccaagacucaccau

SEQ ID NO: 2738947 - RNA, 19 nt, Artificial Sequence
  Description of Artificial Sequence: Synthetic oligonucleotide
accugaacccuaggcagag

SEQ ID NO: 2738948 - RNA, 19 nt, Artificial Sequence
  Description of Artificial Sequence: Synthetic oligonucleotide
caugcauauuaaugcugca

SEQ ID NO: 2738949 - RNA, 19 nt, Artificial Sequence
  Description of Artificial Sequence: Synthetic oligonucleotide
gaaaggguaacaggacuua

SEQ ID NO: 2738950 - RNA, 19 nt, Artificial Sequence
  Description of Artificial Sequence: Synthetic oligonucleotide
caugucaacuaggaagcca

SEQ ID NO: 2738951 - RNA, 19 nt, Artificial Sequence
  Description of Artificial Sequence: Synthetic oligonucleotide
ugaacacuguagguaugaa

SEQ ID NO: 2738952 - RNA, 19 nt, Artificial Sequence
  Description of Artificial Sequence: Synthetic oligonucleotide
aucccaagacucaccaucu

SEQ ID NO: 2738953 - RNA, 19 nt, Artificial Sequence
  Description of Artificial Sequence: Synthetic oligonucleotide
cugaacacuguagguauga

SEQ ID NO: 2738954 - RNA, 19 nt, Artificial Sequence
  Description of Artificial Sequence: Synthetic oligonucleotide
acuguagguaugaaauauu

SEQ ID NO: 2738955 - RNA, 19 nt, Artificial Sequence
  Description of Artificial Sequence: Synthetic oligonucleotide
caagacucaccaucuaagu

SEQ ID NO: 2738956 - RNA, 19 nt, Artificial Sequence
  Description of Artificial Sequence: Synthetic oligonucleotide
uaacagcauuaaaguguaa

SEQ ID NO: 2738957 - RNA, 19 nt, Artificial Sequence
  Description of Artificial Sequence: Synthetic oligonucleotide
cauuaaaguguaauuccuu

SEQ ID NO: 2738958 - RNA, 19 nt, Artificial Sequence
  Description of Artificial Sequence: Synthetic oligonucleotide
cucucaaaaggccuauagu

SEQ ID NO: 2738959 - RNA, 19 nt, Artificial Sequence
  Description of Artificial Sequence: Synthetic oligonucleotide
ggccauuuucauauaauaa

SEQ ID NO: 2738960 - RNA, 19 nt, Artificial Sequence
  Description of Artificial Sequence: Synthetic oligonucleotide
caaaaggccuauaguugaa

SEQ ID NO: 2738961 - RNA, 19 nt, Artificial Sequence
  Description of Artificial Sequence: Synthetic oligonucleotide
guaugaaauauuguucauu

SEQ ID NO: 2738962 - RNA, 19 nt, Artificial Sequence
  Description of Artificial Sequence: Synthetic oligonucleotide
ucaccugcuggcugguauu

SEQ ID NO: 2738963 - RNA, 19 nt, Artificial Sequence
  Description of Artificial Sequence: Synthetic oligonucleotide
ccuaggcagagcccaagcc

SEQ ID NO: 2738964 - RNA, 19 nt, Artificial Sequence
  Description of Artificial Sequence: Synthetic oligonucleotide
ggccuauaguugaagaaga

SEQ ID NO: 2738965 - RNA, 19 nt, Artificial Sequence
  Description of Artificial Sequence: Synthetic oligonucleotide
ugcuggcugguauucccau

SEQ ID NO: 2738966 - RNA, 19 nt, Artificial Sequence
  Description of Artificial Sequence: Synthetic oligonucleotide
gagagaguuccugaacacu

SEQ ID NO: 2738967 - RNA, 19 nt, Artificial Sequence
  Description of Artificial Sequence: Synthetic oligonucleotide
gcaugacuuuuaaaaguug

SEQ ID NO: 2738968 - RNA, 19 nt, Artificial Sequence
  Description of Artificial Sequence: Synthetic oligonucleotide
ccuauaguugaagaagaca

SEQ ID NO: 2738969 - RNA, 19 nt, Artificial Sequence
  Description of Artificial Sequence: Synthetic oligonucleotide
cggagccagaaccugaacc

SEQ ID NO: 2738970 - RNA, 19 nt, Artificial Sequence
  Description of Artificial Sequence: Synthetic oligonucleotide
gaugguggggugugugugu

SEQ ID NO: 2738971 - RNA, 19 nt, Artificial Sequence
  Description of Artificial Sequence: Synthetic oligonucleotide
uaaugaugguggggugugu

SEQ ID NO: 2738972 - RNA, 19 nt, Artificial Sequence
  Description of Artificial Sequence: Synthetic oligonucleotide
cauccucucaaaaggccua

SEQ ID NO: 2738973 - RNA, 19 nt, Artificial Sequence
  Description of Artificial Sequence: Synthetic oligonucleotide
cucaccaucuaaguguggu

SEQ ID NO: 2738974 - RNA, 19 nt, Artificial Sequence
  Description of Artificial Sequence: Synthetic oligonucleotide
uccugagccggagccagaa

SEQ ID NO: 2738975 - RNA, 19 nt, Artificial Sequence
  Description of Artificial Sequence: Synthetic oligonucleotide
cacuguagguaugaaauau

SEQ ID NO: 2738976 - RNA, 19 nt, Artificial Sequence
  Description of Artificial Sequence: Synthetic oligonucleotide
ucccaagacucaccaucua

SEQ ID NO: 2738977 - RNA, 19 nt, Artificial Sequence
  Description of Artificial Sequence: Synthetic oligonucleotide
acaaugugagagaguuccu

SEQ ID NO: 2738978 - RNA, 19 nt, Artificial Sequence
  Description of Artificial Sequence: Synthetic oligonucleotide
ggguguguguguuauuucu

SEQ ID NO: 2738979 - RNA, 19 nt, Artificial Sequence
  Description of Artificial Sequence: Synthetic oligonucleotide
gcauauuaaugcugcauau

SEQ ID NO: 2738980 - RNA, 19 nt, Artificial Sequence
  Description of Artificial Sequence: Synthetic oligonucleotide
acuuccugagccggagcca

SEQ ID NO: 2738981 - RNA, 19 nt, Artificial Sequence
  Description of Artificial Sequence: Synthetic oligonucleotide
guggagcauccucucaaaa

SEQ ID NO: 2738982 - RNA, 19 nt, Artificial Sequence
  Description of Artificial Sequence: Synthetic oligonucleotide
gcauuaaaguguaauuccu

SEQ ID NO: 2738983 - RNA, 19 nt, Artificial Sequence
  Description of Artificial Sequence: Synthetic oligonucleotide
agagucuuuuccaggcauu

SEQ ID NO: 2738984 - RNA, 19 nt, Artificial Sequence
  Description of Artificial Sequence: Synthetic oligonucleotide
acucaccaucuaagugugg

SEQ ID NO: 2738985 - RNA, 19 nt, Artificial Sequence
  Description of Artificial Sequence: Synthetic oligonucleotide
gagccggagccagaaccug

SEQ ID NO: 2738986 - RNA, 19 nt, Artificial Sequence
  Description of Artificial Sequence: Synthetic oligonucleotide
gguaugaaauauuguucau

SEQ ID NO: 2738987 - RNA, 19 nt, Artificial Sequence
  Description of Artificial Sequence: Synthetic oligonucleotide
gagaguuccugaacacugu

SEQ ID NO: 2738988 - RNA, 19 nt, Artificial Sequence
  Description of Artificial Sequence: Synthetic oligonucleotide
gccagaaccugaacccuag

SEQ ID NO: 2738989 - RNA, 19 nt, Artificial Sequence
  Description of Artificial Sequence: Synthetic oligonucleotide
cauauuaaugcugcauauu

SEQ ID NO: 2738990 - RNA, 19 nt, Artificial Sequence
  Description of Artificial Sequence: Synthetic oligonucleotide
agucuuuuccaggcauuua

SEQ ID NO: 2738991 - RNA, 19 nt, Artificial Sequence
  Description of Artificial Sequence: Synthetic oligonucleotide
uguucucguggagcauccu

SEQ ID NO: 2738992 - RNA, 19 nt, Artificial Sequence
  Description of Artificial Sequence: Synthetic oligonucleotide
ggcugguauucccauucca

SEQ ID NO: 2738993 - RNA, 19 nt, Artificial Sequence
  Description of Artificial Sequence: Synthetic oligonucleotide
gccuauaguugaagaagac

SEQ ID NO: 2738994 - RNA, 19 nt, Artificial Sequence
  Description of Artificial Sequence: Synthetic oligonucleotide
acccuaggcagagcccaag

SEQ ID NO: 2738995 - RNA, 19 nt, Artificial Sequence
  Description of Artificial Sequence: Synthetic oligonucleotide
auccucucaaaaggccuau

SEQ ID NO: 2738996 - RNA, 19 nt, Artificial Sequence
  Description of Artificial Sequence: Synthetic oligonucleotide
ccugaacacuguagguaug

SEQ ID NO: 2738997 - RNA, 19 nt, Artificial Sequence
  Description of Artificial Sequence: Synthetic oligonucleotide
cucguggagcauccucuca

SEQ ID NO: 2738998 - RNA, 19 nt, Artificial Sequence
  Description of Artificial Sequence: Synthetic oligonucleotide
gggguguguguguuauuuc

SEQ ID NO: 2738999 - RNA, 19 nt, Artificial Sequence
  Description of Artificial Sequence: Synthetic oligonucleotide
caucuaagugugguacaaa

SEQ ID NO: 2739000 - RNA, 19 nt, Artificial Sequence
  Description of Artificial Sequence: Synthetic oligonucleotide
cuucugguugcucuugguu

SEQ ID NO: 2739001 - RNA, 19 nt, Artificial Sequence
  Description of Artificial Sequence: Synthetic oligonucleotide
cuguguugagauggggaaa

SEQ ID NO: 2739002 - RNA, 19 nt, Artificial Sequence
  Description of Artificial Sequence: Synthetic oligonucleotide
ccagaaccugaacccuagg

SEQ ID NO: 2739003 - RNA, 19 nt, Artificial Sequence
  Description of Artificial Sequence: Synthetic oligonucleotide
gagccagaaccugaacccu

SEQ ID NO: 2739004 - RNA, 19 nt, Artificial Sequence
  Description of Artificial Sequence: Synthetic oligonucleotide
caccugcuggcugguauuc

SEQ ID NO: 2739005 - RNA, 19 nt, Artificial Sequence
  Description of Artificial Sequence: Synthetic oligonucleotide
accaucgcuuucaccugcu

SEQ ID NO: 2739006 - RNA, 19 nt, Artificial Sequence
  Description of Artificial Sequence: Synthetic oligonucleotide
aacccuaggcagagcccaa

SEQ ID NO: 2739007 - RNA, 19 nt, Artificial Sequence
  Description of Artificial Sequence: Synthetic oligonucleotide
gccacuuccugagccggag

SEQ ID NO: 2739008 - RNA, 19 nt, Artificial Sequence
  Description of Artificial Sequence: Synthetic oligonucleotide
agccggagccagaaccuga

SEQ ID NO: 2739009 - RNA, 19 nt, Artificial Sequence
  Description of Artificial Sequence: Synthetic oligonucleotide
auggugggguguguguguu

SEQ ID NO: 2739010 - RNA, 19 nt, Artificial Sequence
  Description of Artificial Sequence: Synthetic oligonucleotide
uggugggguguguguguua

SEQ ID NO: 2739011 - RNA, 19 nt, Artificial Sequence
  Description of Artificial Sequence: Synthetic oligonucleotide
caggacuuaagagucuuuu

SEQ ID NO: 2739012 - RNA, 19 nt, Artificial Sequence
  Description of Artificial Sequence: Synthetic oligonucleotide
gucaacuaggaagccacuu

SEQ ID NO: 2739013 - RNA, 19 nt, Artificial Sequence
  Description of Artificial Sequence: Synthetic oligonucleotide
cccaagacucaccaucuaa

SEQ ID NO: 2739014 - RNA, 19 nt, Artificial Sequence
  Description of Artificial Sequence: Synthetic oligonucleotide
uugauccaacaugcauauu

SEQ ID NO: 2739015 - RNA, 19 nt, Artificial Sequence
  Description of Artificial Sequence: Synthetic oligonucleotide
acaggacuuaagagucuuu

SEQ ID NO: 2739016 - RNA, 19 nt, Artificial Sequence
  Description of Artificial Sequence: Synthetic oligonucleotide
gcauccucucaaaaggccu

SEQ ID NO: 2739017 - RNA, 19 nt, Artificial Sequence
  Description of Artificial Sequence: Synthetic oligonucleotide
uuucaccugcuggcuggua

SEQ ID NO: 2739018 - RNA, 19 nt, Artificial Sequence
  Description of Artificial Sequence: Synthetic oligonucleotide
ccaucuaagugugguacaa

SEQ ID NO: 2739019 - RNA, 19 nt, Artificial Sequence
  Description of Artificial Sequence: Synthetic oligonucleotide
ccacuuccugagccggagc

SEQ ID NO: 2739020 - RNA, 19 nt, Artificial Sequence
  Description of Artificial Sequence: Synthetic oligonucleotide
agccacuuccugagccgga

SEQ ID NO: 2739021 - RNA, 19 nt, Artificial Sequence
  Description of Artificial Sequence: Synthetic oligonucleotide
ggugggguguguguguuau

SEQ ID NO: 2739022 - RNA, 19 nt, Artificial Sequence
  Description of Artificial Sequence: Synthetic oligonucleotide
cgcuuucaccugcuggcug

SEQ ID NO: 2739023 - RNA, 19 nt, Artificial Sequence
  Description of Artificial Sequence: Synthetic oligonucleotide
ccugagccggagccagaac

SEQ ID NO: 2739024 - RNA, 19 nt, Artificial Sequence
  Description of Artificial Sequence: Synthetic oligonucleotide
ccugaacccuaggcagagc

SEQ ID NO: 2739025 - RNA, 19 nt, Artificial Sequence
  Description of Artificial Sequence: Synthetic oligonucleotide
ccggagccagaaccugaac

SEQ ID NO: 2739026 - RNA, 19 nt, Artificial Sequence
  Description of Artificial Sequence: Synthetic oligonucleotide
cuuucaccugcuggcuggu

SEQ ID NO: 2739027 - RNA, 19 nt, Artificial Sequence
  Description of Artificial Sequence: Synthetic oligonucleotide
gccggagccagaaccugaa

SEQ ID NO: 2739028 - RNA, 19 nt, Artificial Sequence
  Description of Artificial Sequence: Synthetic oligonucleotide
cguggagcauccucucaaa

SEQ ID NO: 2739029 - RNA, 19 nt, Artificial Sequence
  Description of Artificial Sequence: Synthetic oligonucleotide
gcuggcugguauucccauu

SEQ ID NO: 2739030 - RNA, 19 nt, Artificial Sequence
  Description of Artificial Sequence: Synthetic oligonucleotide
gugggguguguguguuauu

SEQ ID NO: 2739031 - RNA, 19 nt, Artificial Sequence
  Description of Artificial Sequence: Synthetic oligonucleotide
cugguugcucuugguuguu

SEQ ID NO: 2739032 - RNA, 19 nt, Artificial Sequence
  Description of Artificial Sequence: Synthetic oligonucleotide
gaacaaugcacacagaucc

SEQ ID NO: 2739033 - RNA, 19 nt, Artificial Sequence
  Description of Artificial Sequence: Synthetic oligonucleotide
uguguuuugaacaaugcac

SEQ ID NO: 2739034 - RNA, 19 nt, Artificial Sequence
  Description of Artificial Sequence: Synthetic oligonucleotide
uguacuauacacaaagcac

SEQ ID NO: 2739035 - RNA, 19 nt, Artificial Sequence
  Description of Artificial Sequence: Synthetic oligonucleotide
ucugauuguguuuugaaca

SEQ ID NO: 2739036 - RNA, 19 nt, Artificial Sequence
  Description of Artificial Sequence: Synthetic oligonucleotide
agagccaugugacuggucc

SEQ ID NO: 2739037 - RNA, 19 nt, Artificial Sequence
  Description of Artificial Sequence: Synthetic oligonucleotide
gaugcagccacucagguac

SEQ ID NO: 2739038 - RNA, 19 nt, Artificial Sequence
  Description of Artificial Sequence: Synthetic oligonucleotide
aaggacucaacugugcagc

SEQ ID NO: 2739039 - RNA, 19 nt, Artificial Sequence
  Description of Artificial Sequence: Synthetic oligonucleotide
uguucauccaccuuguaga

SEQ ID NO: 2739040 - RNA, 19 nt, Artificial Sequence
  Description of Artificial Sequence: Synthetic oligonucleotide
ggaaucguagcuuuuaugg

SEQ ID NO: 2739041 - RNA, 19 nt, Artificial Sequence
  Description of Artificial Sequence: Synthetic oligonucleotide
auacacaaagcacuggagg

SEQ ID NO: 2739042 - RNA, 19 nt, Artificial Sequence
  Description of Artificial Sequence: Synthetic oligonucleotide
uuuaugguaggggagaugc

SEQ ID NO: 2739043 - RNA, 19 nt, Artificial Sequence
  Description of Artificial Sequence: Synthetic oligonucleotide
uguagggcagcccaugugg

SEQ ID NO: 2739044 - RNA, 19 nt, Artificial Sequence
  Description of Artificial Sequence: Synthetic oligonucleotide
uaucguguuagcaucuggg

SEQ ID NO: 2739045 - RNA, 19 nt, Artificial Sequence
  Description of Artificial Sequence: Synthetic oligonucleotide
uuucagagugccauacacg

SEQ ID NO: 2739046 - RNA, 19 nt, Artificial Sequence
  Description of Artificial Sequence: Synthetic oligonucleotide
uacacaaagcacuggaggc

SEQ ID NO: 2739047 - RNA, 19 nt, Artificial Sequence
  Description of Artificial Sequence: Synthetic oligonucleotide
acacagauccuucaggaag

SEQ ID NO: 2739048 - RNA, 19 nt, Artificial Sequence
  Description of Artificial Sequence: Synthetic oligonucleotide
aaucguagcuuuuauggua

SEQ ID NO: 2739049 - RNA, 19 nt, Artificial Sequence
  Description of Artificial Sequence: Synthetic oligonucleotide
aagaugugggccaucuagc

SEQ ID NO: 2739050 - RNA, 19 nt, Artificial Sequence
  Description of Artificial Sequence: Synthetic oligonucleotide
uacuauacacaaagcacug

SEQ ID NO: 2739051 - RNA, 19 nt, Artificial Sequence
  Description of Artificial Sequence: Synthetic oligonucleotide
agauccuucaggaagcaac

SEQ ID NO: 2739052 - RNA, 19 nt, Artificial Sequence
  Description of Artificial Sequence: Synthetic oligonucleotide
uucaggaagcaacucgucc

SEQ ID NO: 2739053 - RNA, 19 nt, Artificial Sequence
  Description of Artificial Sequence: Synthetic oligonucleotide
auacacgaagaugugggcc

SEQ ID NO: 2739054 - RNA, 19 nt, Artificial Sequence
  Description of Artificial Sequence: Synthetic oligonucleotide
gauuguguuuugaacaaug

SEQ ID NO: 2739055 - RNA, 19 nt, Artificial Sequence
  Description of Artificial Sequence: Synthetic oligonucleotide
ggcuguacuauacacaaag

SEQ ID NO: 2739056 - RNA, 19 nt, Artificial Sequence
  Description of Artificial Sequence: Synthetic oligonucleotide
ugaacaaugcacacagauc

SEQ ID NO: 2739057 - RNA, 19 nt, Artificial Sequence
  Description of Artificial Sequence: Synthetic oligonucleotide
guagcuuuuaugguagggg

SEQ ID NO: 2739058 - RNA, 19 nt, Artificial Sequence
  Description of Artificial Sequence: Synthetic oligonucleotide
aucguguuagcaucugggg

SEQ ID NO: 2739059 - RNA, 19 nt, Artificial Sequence
  Description of Artificial Sequence: Synthetic oligonucleotide
augacuuugugguugggcu

SEQ ID NO: 2739060 - RNA, 19 nt, Artificial Sequence
  Description of Artificial Sequence: Synthetic oligonucleotide
ucguguuagcaucuggggc

SEQ ID NO: 2739061 - RNA, 19 nt, Artificial Sequence
  Description of Artificial Sequence: Synthetic oligonucleotide
agugggaaggacucaacug

SEQ ID NO: 2739062 - RNA, 19 nt, Artificial Sequence
  Description of Artificial Sequence: Synthetic oligonucleotide
uucugauuguguuuugaac

SEQ ID NO: 2739063 - RNA, 19 nt, Artificial Sequence
  Description of Artificial Sequence: Synthetic oligonucleotide
uagcuuuuaugguagggga

SEQ ID NO: 2739064 - RNA, 19 nt, Artificial Sequence
  Description of Artificial Sequence: Synthetic oligonucleotide
uguuuugaacaaugcacac

SEQ ID NO: 2739065 - RNA, 19 nt, Artificial Sequence
  Description of Artificial Sequence: Synthetic oligonucleotide
gaucucaccuuccacacga

SEQ ID NO: 2739066 - RNA, 19 nt, Artificial Sequence
  Description of Artificial Sequence: Synthetic oligonucleotide
gaaggacucaacugugcag

SEQ ID NO: 2739067 - RNA, 19 nt, Artificial Sequence
  Description of Artificial Sequence: Synthetic oligonucleotide
cuguacuauacacaaagca

SEQ ID NO: 2739068 - RNA, 19 nt, Artificial Sequence
  Description of Artificial Sequence: Synthetic oligonucleotide
cacagauccuucaggaagc

SEQ ID NO: 2739069 - RNA, 19 nt, Artificial Sequence
  Description of Artificial Sequence: Synthetic oligonucleotide
ucuccggcaaucaccagug

SEQ ID NO: 2739070 - RNA, 19 nt, Artificial Sequence
  Description of Artificial Sequence: Synthetic oligonucleotide
aaucgcaacaucuguucau

SEQ ID NO: 2739071 - RNA, 19 nt, Artificial Sequence
  Description of Artificial Sequence: Synthetic oligonucleotide
ugugacugguccagcauga

SEQ ID NO: 2739072 - RNA, 19 nt, Artificial Sequence
  Description of Artificial Sequence: Synthetic oligonucleotide
ugugcgcugguacauggug

SEQ ID NO: 2739073 - RNA, 19 nt, Artificial Sequence
  Description of Artificial Sequence: Synthetic oligonucleotide
guggggucagccuucaaag

SEQ ID NO: 2739074 - RNA, 19 nt, Artificial Sequence
  Description of Artificial Sequence: Synthetic oligonucleotide
ugccuuggaacacugcaga

SEQ ID NO: 2739075 - RNA, 19 nt, Artificial Sequence
  Description of Artificial Sequence: Synthetic oligonucleotide
aacugugcagccucugccu

SEQ ID NO: 2739076 - RNA, 19 nt, Artificial Sequence
  Description of Artificial Sequence: Synthetic oligonucleotide
auacuuuucugauuguguu

SEQ ID NO: 2739077 - RNA, 19 nt, Artificial Sequence
  Description of Artificial Sequence: Synthetic oligonucleotide
agcaucuggggcacgagcc

SEQ ID NO: 2739078 - RNA, 19 nt, Artificial Sequence
  Description of Artificial Sequence: Synthetic oligonucleotide
cagccacucagguacauag

SEQ ID NO: 2739079 - RNA, 19 nt, Artificial Sequence
  Description of Artificial Sequence: Synthetic oligonucleotide
uuguagaucucaccuucca

SEQ ID NO: 2739080 - RNA, 19 nt, Artificial Sequence
  Description of Artificial Sequence: Synthetic oligonucleotide
cuggccucguuucagagug

SEQ ID NO: 2739081 - RNA, 19 nt, Artificial Sequence
  Description of Artificial Sequence: Synthetic oligonucleotide
guauguugugcucuccggc

SEQ ID NO: 2739082 - RNA, 19 nt, Artificial Sequence
  Description of Artificial Sequence: Synthetic oligonucleotide
aggacucaacugugcagcc

SEQ ID NO: 2739083 - RNA, 19 nt, Artificial Sequence
  Description of Artificial Sequence: Synthetic oligonucleotide
agcaugacuuugugguugg

SEQ ID NO: 2739084 - RNA, 19 nt, Artificial Sequence
  Description of Artificial Sequence: Synthetic oligonucleotide
gcaaucaccagugggaagg

SEQ ID NO: 2739085 - RNA, 19 nt, Artificial Sequence
  Description of Artificial Sequence: Synthetic oligonucleotide
ucagguacauagguggcug

SEQ ID NO: 2739086 - RNA, 19 nt, Artificial Sequence
  Description of Artificial Sequence: Synthetic oligonucleotide
agauacuuuucugauugug

SEQ ID NO: 2739087 - RNA, 19 nt, Artificial Sequence
  Description of Artificial Sequence: Synthetic oligonucleotide
ucaccagugggaaggacuc

SEQ ID NO: 2739088 - RNA, 19 nt, Artificial Sequence
  Description of Artificial Sequence: Synthetic oligonucleotide
ugggaaggacucaacugug

SEQ ID NO: 2739089 - RNA, 19 nt, Artificial Sequence
  Description of Artificial Sequence: Synthetic oligonucleotide
caacaucuguucauccacc

SEQ ID NO: 2739090 - RNA, 19 nt, Artificial Sequence
  Description of Artificial Sequence: Synthetic oligonucleotide
ugguaggggagaugcagcc

SEQ ID NO: 2739091 - RNA, 19 nt, Artificial Sequence
  Description of Artificial Sequence: Synthetic oligonucleotide
cuaucguguuagcaucugg

SEQ ID NO: 2739092 - RNA, 19 nt, Artificial Sequence
  Description of Artificial Sequence: Synthetic oligonucleotide
cuagcugcagauacuuuuc

SEQ ID NO: 2739093 - RNA, 19 nt, Artificial Sequence
  Description of Artificial Sequence: Synthetic oligonucleotide
ugacuuugugguugggcug

SEQ ID NO: 2739094 - RNA, 19 nt, Artificial Sequence
  Description of Artificial Sequence: Synthetic oligonucleotide
gaugugggccaucuagcug

SEQ ID NO: 2739095 - RNA, 19 nt, Artificial Sequence
  Description of Artificial Sequence: Synthetic oligonucleotide
ucaagcaccugcaccugca

SEQ ID NO: 2739096 - RNA, 19 nt, Artificial Sequence
  Description of Artificial Sequence: Synthetic oligonucleotide
aucgcaacaucuguucauc

SEQ ID NO: 2739097 - RNA, 19 nt, Artificial Sequence
  Description of Artificial Sequence: Synthetic oligonucleotide
aucguagcuuuuaugguag

SEQ ID NO: 2739098 - RNA, 19 nt, Artificial Sequence
  Description of Artificial Sequence: Synthetic oligonucleotide
ugggccaucuagcugcaga

SEQ ID NO: 2739099 - RNA, 19 nt, Artificial Sequence
  Description of Artificial Sequence: Synthetic oligonucleotide
guguuuugaacaaugcaca

SEQ ID NO: 2739100 - RNA, 19 nt, Artificial Sequence
  Description of Artificial Sequence: Synthetic oligonucleotide
guggcuguacuauacacaa

SEQ ID NO: 2739101 - RNA, 19 nt, Artificial Sequence
  Description of Artificial Sequence: Synthetic oligonucleotide
agaugugggccaucuagcu

SEQ ID NO: 2739102 - RNA, 19 nt, Artificial Sequence
  Description of Artificial Sequence: Synthetic oligonucleotide
guaggggagaugcagccac

SEQ ID NO: 2739103 - RNA, 19 nt, Artificial Sequence
  Description of Artificial Sequence: Synthetic oligonucleotide
agcacuggaggcuguccac

SEQ ID NO: 2739104 - RNA, 19 nt, Artificial Sequence
  Description of Artificial Sequence: Synthetic oligonucleotide
ugacugguccagcaugacu

SEQ ID NO: 2739105 - RNA, 19 nt, Artificial Sequence
  Description of Artificial Sequence: Synthetic oligonucleotide
gaaucgcaacaucuguuca

SEQ ID NO: 2739106 - RNA, 19 nt, Artificial Sequence
  Description of Artificial Sequence: Synthetic oligonucleotide
ugggcccucggaaucguag

SEQ ID NO: 2739107 - RNA, 19 nt, Artificial Sequence
  Description of Artificial Sequence: Synthetic oligonucleotide
caugacuuugugguugggc

SEQ ID NO: 2739108 - RNA, 19 nt, Artificial Sequence
  Description of Artificial Sequence: Synthetic oligonucleotide
aaucaccagugggaaggac

SEQ ID NO: 2739109 - RNA, 19 nt, Artificial Sequence
  Description of Artificial Sequence: Synthetic oligonucleotide
agccaugguauguugugcu

SEQ ID NO: 2739110 - RNA, 19 nt, Artificial Sequence
  Description of Artificial Sequence: Synthetic oligonucleotide
ucucaccuuccacacgaug

SEQ ID NO: 2739111 - RNA, 19 nt, Artificial Sequence
  Description of Artificial Sequence: Synthetic oligonucleotide
guacuauacacaaagcacu

SEQ ID NO: 2739112 - RNA, 19 nt, Artificial Sequence
  Description of Artificial Sequence: Synthetic oligonucleotide
uagcaucuggggcacgagc

SEQ ID NO: 2739113 - RNA, 19 nt, Artificial Sequence
  Description of Artificial Sequence: Synthetic oligonucleotide
acucagguacauagguggc

SEQ ID NO: 2739114 - RNA, 19 nt, Artificial Sequence
  Description of Artificial Sequence: Synthetic oligonucleotide
uuguagggcagcccaugug

SEQ ID NO: 2739115 - RNA, 19 nt, Artificial Sequence
  Description of Artificial Sequence: Synthetic oligonucleotide
agcugcagauacuuuucug

SEQ ID NO: 2739116 - RNA, 19 nt, Artificial Sequence
  Description of Artificial Sequence: Synthetic oligonucleotide
uagguggcuguacuauaca

SEQ ID NO: 2739117 - RNA, 19 nt, Artificial Sequence
  Description of Artificial Sequence: Synthetic oligonucleotide
uugccuggcacgugcagca

SEQ ID NO: 2739118 - RNA, 19 nt, Artificial Sequence
  Description of Artificial Sequence: Synthetic oligonucleotide
ugugcucuccggcaaucac

SEQ ID NO: 2739119 - RNA, 19 nt, Artificial Sequence
  Description of Artificial Sequence: Synthetic oligonucleotide
acacugcagagccauguga

SEQ ID NO: 2739120 - RNA, 19 nt, Artificial Sequence
  Description of Artificial Sequence: Synthetic oligonucleotide
uuuuaugguaggggagaug

SEQ ID NO: 2739121 - RNA, 19 nt, Artificial Sequence
  Description of Artificial Sequence: Synthetic oligonucleotide
acacgauggcccuugccug

SEQ ID NO: 2739122 - RNA, 19 nt, Artificial Sequence
  Description of Artificial Sequence: Synthetic oligonucleotide
guuuugaacaaugcacaca

SEQ ID NO: 2739123 - RNA, 19 nt, Artificial Sequence
  Description of Artificial Sequence: Synthetic oligonucleotide
ggaaucgcaacaucuguuc

SEQ ID NO: 2739124 - RNA, 19 nt, Artificial Sequence
  Description of Artificial Sequence: Synthetic oligonucleotide
ucgcaacaucuguucaucc

SEQ ID NO: 2739125 - RNA, 19 nt, Artificial Sequence
  Description of Artificial Sequence: Synthetic oligonucleotide
ugccauacacgaagaugug

SEQ ID NO: 2739126 - RNA, 19 nt, Artificial Sequence
  Description of Artificial Sequence: Synthetic oligonucleotide
ucguagcuuuuaugguagg

SEQ ID NO: 2739127 - RNA, 19 nt, Artificial Sequence
  Description of Artificial Sequence: Synthetic oligonucleotide
gcugcagauacuuuucuga

SEQ ID NO: 2739128 - RNA, 19 nt, Artificial Sequence
  Description of Artificial Sequence: Synthetic oligonucleotide
agcuuuuaugguaggggag

SEQ ID NO: 2739129 - RNA, 19 nt, Artificial Sequence
  Description of Artificial Sequence: Synthetic oligonucleotide
gcaacaucuguucauccac

SEQ ID NO: 2739130 - RNA, 19 nt, Artificial Sequence
  Description of Artificial Sequence: Synthetic oligonucleotide
gaaucguagcuuuuauggu

SEQ ID NO: 2739131 - RNA, 19 nt, Artificial Sequence
  Description of Artificial Sequence: Synthetic oligonucleotide
ugggcucccucuaucgugu

SEQ ID NO: 2739132 - RNA, 19 nt, Artificial Sequence
  Description of Artificial Sequence: Synthetic oligonucleotide
uacaugguggggucagccu

SEQ ID NO: 2739133 - RNA, 19 nt, Artificial Sequence
  Description of Artificial Sequence: Synthetic oligonucleotide
gaaagcuuugccugugcua

SEQ ID NO: 2739134 - RNA, 19 nt, Artificial Sequence
  Description of Artificial Sequence: Synthetic oligonucleotide
ucguuucagagugccauac

SEQ ID NO: 2739135 - RNA, 19 nt, Artificial Sequence
  Description of Artificial Sequence: Synthetic oligonucleotide
ucggaaucguagcuuuuau

SEQ ID NO: 2739136 - RNA, 19 nt, Artificial Sequence
  Description of Artificial Sequence: Synthetic oligonucleotide
ucuaucguguuagcaucug

SEQ ID NO: 2739137 - RNA, 19 nt, Artificial Sequence
  Description of Artificial Sequence: Synthetic oligonucleotide
acuggaggcuguccacagg

SEQ ID NO: 2739138 - RNA, 19 nt, Artificial Sequence
  Description of Artificial Sequence: Synthetic oligonucleotide
cacgauggcccuugccugg

SEQ ID NO: 2739139 - RNA, 19 nt, Artificial Sequence
  Description of Artificial Sequence: Synthetic oligonucleotide
ugcagauacuuuucugauu

SEQ ID NO: 2739140 - RNA, 19 nt, Artificial Sequence
  Description of Artificial Sequence: Synthetic oligonucleotide
agccccucaccuguuuucc

SEQ ID NO: 2739141 - RNA, 19 nt, Artificial Sequence
  Description of Artificial Sequence: Synthetic oligonucleotide
gccaucuagcugcagauac

SEQ ID NO: 2739142 - RNA, 19 nt, Artificial Sequence
  Description of Artificial Sequence: Synthetic oligonucleotide
gaagcaacucgucccugca

SEQ ID NO: 2739143 - RNA, 19 nt, Artificial Sequence
  Description of Artificial Sequence: Synthetic oligonucleotide
auggcccuugccuggcacg

SEQ ID NO: 2739144 - RNA, 19 nt, Artificial Sequence
  Description of Artificial Sequence: Synthetic oligonucleotide
ugguacaugguggggucag

SEQ ID NO: 2739145 - RNA, 19 nt, Artificial Sequence
  Description of Artificial Sequence: Synthetic oligonucleotide
cagcaugacuuugugguug

SEQ ID NO: 2739146 - RNA, 19 nt, Artificial Sequence
  Description of Artificial Sequence: Synthetic oligonucleotide
cugggcucccucuaucgug

SEQ ID NO: 2739147 - RNA, 19 nt, Artificial Sequence
  Description of Artificial Sequence: Synthetic oligonucleotide
acaugguggggucagccuu

SEQ ID NO: 2739148 - RNA, 19 nt, Artificial Sequence
  Description of Artificial Sequence: Synthetic oligonucleotide
cuugccuggcacgugcagc

SEQ ID NO: 2739149 - RNA, 19 nt, Artificial Sequence
  Description of Artificial Sequence: Synthetic oligonucleotide
guacaugguggggucagcc

SEQ ID NO: 2739150 - RNA, 19 nt, Artificial Sequence
  Description of Artificial Sequence: Synthetic oligonucleotide
ggagaugcagccacucagg

SEQ ID NO: 2739151 - RNA, 19 nt, Artificial Sequence
  Description of Artificial Sequence: Synthetic oligonucleotide
cuucaggaagcaacucguc

SEQ ID NO: 2739152 - RNA, 19 nt, Artificial Sequence
  Description of Artificial Sequence: Synthetic oligonucleotide
caugugggcccucggaauc

SEQ ID NO: 2739153 - RNA, 19 nt, Artificial Sequence
  Description of Artificial Sequence: Synthetic oligonucleotide
cucaagcaccugcaccugc

SEQ ID NO: 2739154 - RNA, 19 nt, Artificial Sequence
  Description of Artificial Sequence: Synthetic oligonucleotide
agccaugugacugguccag

SEQ ID NO: 2739155 - RNA, 19 nt, Artificial Sequence
  Description of Artificial Sequence: Synthetic oligonucleotide
uggggcacgagccccucac

SEQ ID NO: 2739156 - RNA, 19 nt, Artificial Sequence
  Description of Artificial Sequence: Synthetic oligonucleotide
uggggucagccuucaaagu

SEQ ID NO: 2739157 - RNA, 19 nt, Artificial Sequence
  Description of Artificial Sequence: Synthetic oligonucleotide
guagggcagcccauguggg

SEQ ID NO: 2739158 - RNA, 19 nt, Artificial Sequence
  Description of Artificial Sequence: Synthetic oligonucleotide
gugcgcugguacauggugg

SEQ ID NO: 2739159 - RNA, 19 nt, Artificial Sequence
  Description of Artificial Sequence: Synthetic oligonucleotide
ggaagcaacucgucccugc

SEQ ID NO: 2739160 - RNA, 19 nt, Artificial Sequence
  Description of Artificial Sequence: Synthetic oligonucleotide
uugccugugcuaggcagcc

SEQ ID NO: 2739161 - RNA, 19 nt, Artificial Sequence
  Description of Artificial Sequence: Synthetic oligonucleotide
cuaggcagccccugggcuc

SEQ ID NO: 2739162 - RNA, 19 nt, Artificial Sequence
  Description of Artificial Sequence: Synthetic oligonucleotide
uggaggcuguccacagggc

SEQ ID NO: 2739163 - RNA, 19 nt, Artificial Sequence
  Description of Artificial Sequence: Synthetic oligonucleotide
ccuuguagaucucaccuuc

SEQ ID NO: 2739164 - RNA, 19 nt, Artificial Sequence
  Description of Artificial Sequence: Synthetic oligonucleotide
ugauuguguuuugaacaau

SEQ ID NO: 2739165 - RNA, 19 nt, Artificial Sequence
  Description of Artificial Sequence: Synthetic oligonucleotide
gcugugcgcugguacaugg

SEQ ID NO: 2739166 - RNA, 19 nt, Artificial Sequence
  Description of Artificial Sequence: Synthetic oligonucleotide
ucccucuaucguguuagca

SEQ ID NO: 2739167 - RNA, 19 nt, Artificial Sequence
  Description of Artificial Sequence: Synthetic oligonucleotide
cacucaagcaccugcaccu

SEQ ID NO: 2739168 - RNA, 19 nt, Artificial Sequence
  Description of Artificial Sequence: Synthetic oligonucleotide
agggcugugcgcugguaca

SEQ ID NO: 2739169 - RNA, 19 nt, Artificial Sequence
  Description of Artificial Sequence: Synthetic oligonucleotide
gugcuaggcagccccuggg

SEQ ID NO: 2739170 - RNA, 19 nt, Artificial Sequence
  Description of Artificial Sequence: Synthetic oligonucleotide
guugggcuggccucguuuc

SEQ ID NO: 2739171 - RNA, 19 nt, Artificial Sequence
  Description of Artificial Sequence: Synthetic oligonucleotide
gauggcccuugccuggcac

SEQ ID NO: 2739172 - RNA, 19 nt, Artificial Sequence
  Description of Artificial Sequence: Synthetic oligonucleotide
uuccacacgauggcccuug

SEQ ID NO: 2739173 - RNA, 19 nt, Artificial Sequence
  Description of Artificial Sequence: Synthetic oligonucleotide
ugcagccucugccuuggaa

SEQ ID NO: 2739174 - RNA, 19 nt, Artificial Sequence
  Description of Artificial Sequence: Synthetic oligonucleotide
cacuggaggcuguccacag

SEQ ID NO: 2739175 - RNA, 19 nt, Artificial Sequence
  Description of Artificial Sequence: Synthetic oligonucleotide
accuuguagaucucaccuu

SEQ ID NO: 2739176 - RNA, 19 nt, Artificial Sequence
  Description of Artificial Sequence: Synthetic oligonucleotide
ggggucagccuucaaaguc

SEQ ID NO: 2739177 - RNA, 19 nt, Artificial Sequence
  Description of Artificial Sequence: Synthetic oligonucleotide
caugguggggucagccuuc

SEQ ID NO: 2739178 - RNA, 19 nt, Artificial Sequence
  Description of Artificial Sequence: Synthetic oligonucleotide
auccuucaggaagcaacuc

SEQ ID NO: 2739179 - RNA, 19 nt, Artificial Sequence
  Description of Artificial Sequence: Synthetic oligonucleotide
ccaggaaucgcaacaucug

SEQ ID NO: 2739180 - RNA, 19 nt, Artificial Sequence
  Description of Artificial Sequence: Synthetic oligonucleotide
augugggcccucggaaucg

SEQ ID NO: 2739181 - RNA, 19 nt, Artificial Sequence
  Description of Artificial Sequence: Synthetic oligonucleotide
gcagccaugguauguugug

SEQ ID NO: 2739182 - RNA, 19 nt, Artificial Sequence
  Description of Artificial Sequence: Synthetic oligonucleotide
gauccuucaggaagcaacu

SEQ ID NO: 2739183 - RNA, 19 nt, Artificial Sequence
  Description of Artificial Sequence: Synthetic oligonucleotide
gacugguccagcaugacuu

SEQ ID NO: 2739184 - RNA, 19 nt, Artificial Sequence
  Description of Artificial Sequence: Synthetic oligonucleotide
ccucuaucguguuagcauc

SEQ ID NO: 2739185 - RNA, 19 nt, Artificial Sequence
  Description of Artificial Sequence: Synthetic oligonucleotide
auguugugcucuccggcaa

SEQ ID NO: 2739186 - RNA, 19 nt, Artificial Sequence
  Description of Artificial Sequence: Synthetic oligonucleotide
aggggagaugcagccacuc

SEQ ID NO: 2739187 - RNA, 19 nt, Artificial Sequence
  Description of Artificial Sequence: Synthetic oligonucleotide
acaaugcacacagauccuu

SEQ ID NO: 2739188 - RNA, 19 nt, Artificial Sequence
  Description of Artificial Sequence: Synthetic oligonucleotide
gugcucuccggcaaucacc

SEQ ID NO: 2739189 - RNA, 19 nt, Artificial Sequence
  Description of Artificial Sequence: Synthetic oligonucleotide
cacacgauggcccuugccu

SEQ ID NO: 2739190 - RNA, 19 nt, Artificial Sequence
  Description of Artificial Sequence: Synthetic oligonucleotide
ccuucaaagucauccagga

SEQ ID NO: 2739191 - RNA, 19 nt, Artificial Sequence
  Description of Artificial Sequence: Synthetic oligonucleotide
gcucccucuaucguguuag

SEQ ID NO: 2739192 - RNA, 19 nt, Artificial Sequence
  Description of Artificial Sequence: Synthetic oligonucleotide
cagccaugguauguugugc

SEQ ID NO: 2739193 - RNA, 19 nt, Artificial Sequence
  Description of Artificial Sequence: Synthetic oligonucleotide
ugggcuggccucguuucag

SEQ ID NO: 2739194 - RNA, 19 nt, Artificial Sequence
  Description of Artificial Sequence: Synthetic oligonucleotide
acgauggcccuugccuggc

SEQ ID NO: 2739195 - RNA, 19 nt, Artificial Sequence
  Description of Artificial Sequence: Synthetic oligonucleotide
gcuuuuaugguaggggaga

SEQ ID NO: 2739196 - RNA, 19 nt, Artificial Sequence
  Description of Artificial Sequence: Synthetic oligonucleotide
guuagcaucuggggcacga

SEQ ID NO: 2739197 - RNA, 19 nt, Artificial Sequence
  Description of Artificial Sequence: Synthetic oligonucleotide
aucuguucauccaccuugu

SEQ ID NO: 2739198 - RNA, 19 nt, Artificial Sequence
  Description of Artificial Sequence: Synthetic oligonucleotide
ccacucaagcaccugcacc

SEQ ID NO: 2739199 - RNA, 19 nt, Artificial Sequence
  Description of Artificial Sequence: Synthetic oligonucleotide
uggcuguacuauacacaaa

SEQ ID NO: 2739200 - RNA, 19 nt, Artificial Sequence
  Description of Artificial Sequence: Synthetic oligonucleotide
gaacacugcagagccaugu

SEQ ID NO: 2739201 - RNA, 19 nt, Artificial Sequence
  Description of Artificial Sequence: Synthetic oligonucleotide
gcuguacuauacacaaagc

SEQ ID NO: 2739202 - RNA, 19 nt, Artificial Sequence
  Description of Artificial Sequence: Synthetic oligonucleotide
ucuguucauccaccuugua

SEQ ID NO: 2739203 - RNA, 19 nt, Artificial Sequence
  Description of Artificial Sequence: Synthetic oligonucleotide
ccuuggaacacugcagagc

SEQ ID NO: 2739204 - RNA, 19 nt, Artificial Sequence
  Description of Artificial Sequence: Synthetic oligonucleotide
uaggggagaugcagccacu

SEQ ID NO: 2739205 - RNA, 19 nt, Artificial Sequence
  Description of Artificial Sequence: Synthetic oligonucleotide
gccugugcuaggcagcccc

SEQ ID NO: 2739206 - RNA, 19 nt, Artificial Sequence
  Description of Artificial Sequence: Synthetic oligonucleotide
gggguuguagggcagccca

SEQ ID NO: 2739207 - RNA, 19 nt, Artificial Sequence
  Description of Artificial Sequence: Synthetic oligonucleotide
gagccccucaccuguuuuc

SEQ ID NO: 2739208 - RNA, 19 nt, Artificial Sequence
  Description of Artificial Sequence: Synthetic oligonucleotide
uguuagcaucuggggcacg

SEQ ID NO: 2739209 - RNA, 19 nt, Artificial Sequence
  Description of Artificial Sequence: Synthetic oligonucleotide
uugugcucuccggcaauca

SEQ ID NO: 2739210 - RNA, 19 nt, Artificial Sequence
  Description of Artificial Sequence: Synthetic oligonucleotide
cguguuagcaucuggggca

SEQ ID NO: 2739211 - RNA, 19 nt, Artificial Sequence
  Description of Artificial Sequence: Synthetic oligonucleotide
aggaaucgcaacaucuguu

SEQ ID NO: 2739212 - RNA, 19 nt, Artificial Sequence
  Description of Artificial Sequence: Synthetic oligonucleotide
gguggggucagccuucaaa

SEQ ID NO: 2739213 - RNA, 19 nt, Artificial Sequence
  Description of Artificial Sequence: Synthetic oligonucleotide
gcacgugcagcagccaugg

SEQ ID NO: 2739214 - RNA, 19 nt, Artificial Sequence
  Description of Artificial Sequence: Synthetic oligonucleotide
gguggcuguacuauacaca

SEQ ID NO: 2739215 - RNA, 19 nt, Artificial Sequence
  Description of Artificial Sequence: Synthetic oligonucleotide
ccuggcacgugcagcagcc

SEQ ID NO: 2739216 - RNA, 19 nt, Artificial Sequence
  Description of Artificial Sequence: Synthetic oligonucleotide
cagccucugccuuggaaca

SEQ ID NO: 2739217 - RNA, 19 nt, Artificial Sequence
  Description of Artificial Sequence: Synthetic oligonucleotide
agcagccaugguauguugu

SEQ ID NO: 2739218 - RNA, 19 nt, Artificial Sequence
  Description of Artificial Sequence: Synthetic oligonucleotide
caccuuccacacgauggcc

SEQ ID NO: 2739219 - RNA, 19 nt, Artificial Sequence
  Description of Artificial Sequence: Synthetic oligonucleotide
gccuuggaacacugcagag

SEQ ID NO: 2739220 - RNA, 19 nt, Artificial Sequence
  Description of Artificial Sequence: Synthetic oligonucleotide
cacacagauccuucaggaa

SEQ ID NO: 2739221 - RNA, 19 nt, Artificial Sequence
  Description of Artificial Sequence: Synthetic oligonucleotide
cucccucuaucguguuagc

SEQ ID NO: 2739222 - RNA, 19 nt, Artificial Sequence
  Description of Artificial Sequence: Synthetic oligonucleotide
cagcagccaugguauguug

SEQ ID NO: 2739223 - RNA, 19 nt, Artificial Sequence
  Description of Artificial Sequence: Synthetic oligonucleotide
ccacucagguacauaggug

SEQ ID NO: 2739224 - RNA, 19 nt, Artificial Sequence
  Description of Artificial Sequence: Synthetic oligonucleotide
caggaaucgcaacaucugu

SEQ ID NO: 2739225 - RNA, 19 nt, Artificial Sequence
  Description of Artificial Sequence: Synthetic oligonucleotide
gggaaggacucaacugugc

SEQ ID NO: 2739226 - RNA, 19 nt, Artificial Sequence
  Description of Artificial Sequence: Synthetic oligonucleotide
agcccaugugggcccucgg

SEQ ID NO: 2739227 - RNA, 19 nt, Artificial Sequence
  Description of Artificial Sequence: Synthetic oligonucleotide
uggccucguuucagagugc

SEQ ID NO: 2739228 - RNA, 19 nt, Artificial Sequence
  Description of Artificial Sequence: Synthetic oligonucleotide
gggucagccuucaaaguca

SEQ ID NO: 2739229 - RNA, 19 nt, Artificial Sequence
  Description of Artificial Sequence: Synthetic oligonucleotide
cucaacugugcagccucug

SEQ ID NO: 2739230 - RNA, 19 nt, Artificial Sequence
  Description of Artificial Sequence: Synthetic oligonucleotide
guuguagggcagcccaugu

SEQ ID NO: 2739231 - RNA, 19 nt, Artificial Sequence
  Description of Artificial Sequence: Synthetic oligonucleotide
caaagcacuggaggcuguc

SEQ ID NO: 2739232 - RNA, 19 nt, Artificial Sequence
  Description of Artificial Sequence: Synthetic oligonucleotide
cguagcuuuuaugguaggg

SEQ ID NO: 2739233 - RNA, 19 nt, Artificial Sequence
  Description of Artificial Sequence: Synthetic oligonucleotide
ggcuggccucguuucagag

SEQ ID NO: 2739234 - RNA, 19 nt, Artificial Sequence
  Description of Artificial Sequence: Synthetic oligonucleotide
cugcagauacuuuucugau

SEQ ID NO: 2739235 - RNA, 19 nt, Artificial Sequence
  Description of Artificial Sequence: Synthetic oligonucleotide
ccggcaaucaccaguggga

SEQ ID NO: 2739236 - RNA, 19 nt, Artificial Sequence
  Description of Artificial Sequence: Synthetic oligonucleotide
cuccggcaaucaccagugg

SEQ ID NO: 2739237 - RNA, 19 nt, Artificial Sequence
  Description of Artificial Sequence: Synthetic oligonucleotide
cucuaucguguuagcaucu

SEQ ID NO: 2739238 - RNA, 19 nt, Artificial Sequence
  Description of Artificial Sequence: Synthetic oligonucleotide
cccugggcucccucuaucg

SEQ ID NO: 2739239 - RNA, 19 nt, Artificial Sequence
  Description of Artificial Sequence: Synthetic oligonucleotide
guugugcucuccggcaauc

SEQ ID NO: 2739240 - RNA, 19 nt, Artificial Sequence
  Description of Artificial Sequence: Synthetic oligonucleotide
ggcacgagccccucaccug

SEQ ID NO: 2739241 - RNA, 19 nt, Artificial Sequence
  Description of Artificial Sequence: Synthetic oligonucleotide
aggaagcaacucgucccug

SEQ ID NO: 2739242 - RNA, 19 nt, Artificial Sequence
  Description of Artificial Sequence: Synthetic oligonucleotide
ccacagggccaccagcacc

SEQ ID NO: 2739243 - RNA, 19 nt, Artificial Sequence
  Description of Artificial Sequence: Synthetic oligonucleotide
uggcccuugccuggcacgu

SEQ ID NO: 2739244 - RNA, 19 nt, Artificial Sequence
  Description of Artificial Sequence: Synthetic oligonucleotide
cagugggaaggacucaacu

SEQ ID NO: 2739245 - RNA, 19 nt, Artificial Sequence
  Description of Artificial Sequence: Synthetic oligonucleotide
agguacauagguggcugua

SEQ ID NO: 2739246 - RNA, 19 nt, Artificial Sequence
  Description of Artificial Sequence: Synthetic oligonucleotide
cccucaccuguuuucccgg

SEQ ID NO: 2739247 - RNA, 19 nt, Artificial Sequence
  Description of Artificial Sequence: Synthetic oligonucleotide
ggccucguuucagagugcc

SEQ ID NO: 2739248 - RNA, 19 nt, Artificial Sequence
  Description of Artificial Sequence: Synthetic oligonucleotide
cucggaaucguagcuuuua

SEQ ID NO: 2739249 - RNA, 19 nt, Artificial Sequence
  Description of Artificial Sequence: Synthetic oligonucleotide
ugugggcccucggaaucgu

SEQ ID NO: 2739250 - RNA, 19 nt, Artificial Sequence
  Description of Artificial Sequence: Synthetic oligonucleotide
ggaaagcuuugccugugcu

SEQ ID NO: 2739251 - RNA, 19 nt, Artificial Sequence
  Description of Artificial Sequence: Synthetic oligonucleotide
cggaaucguagcuuuuaug

SEQ ID NO: 2739252 - RNA, 19 nt, Artificial Sequence
  Description of Artificial Sequence: Synthetic oligonucleotide
cucguuucagagugccaua

SEQ ID NO: 2739253 - RNA, 19 nt, Artificial Sequence
  Description of Artificial Sequence: Synthetic oligonucleotide
acaaagcacuggaggcugu

SEQ ID NO: 2739254 - RNA, 19 nt, Artificial Sequence
  Description of Artificial Sequence: Synthetic oligonucleotide
cagcccaugugggcccucg

SEQ ID NO: 2739255 - RNA, 19 nt, Artificial Sequence
  Description of Artificial Sequence: Synthetic oligonucleotide
gugcagcagccaugguaug

SEQ ID NO: 2739256 - RNA, 19 nt, Artificial Sequence
  Description of Artificial Sequence: Synthetic oligonucleotide
ugccuggcacgugcagcag

SEQ ID NO: 2739257 - RNA, 19 nt, Artificial Sequence
  Description of Artificial Sequence: Synthetic oligonucleotide
gagugccauacacgaagau

SEQ ID NO: 2739258 - RNA, 19 nt, Artificial Sequence
  Description of Artificial Sequence: Synthetic oligonucleotide
cugugcuaggcagccccug

SEQ ID NO: 2739259 - RNA, 19 nt, Artificial Sequence
  Description of Artificial Sequence: Synthetic oligonucleotide
cagagccaugugacugguc

SEQ ID NO: 2739260 - RNA, 19 nt, Artificial Sequence
  Description of Artificial Sequence: Synthetic oligonucleotide
gugacugguccagcaugac

SEQ ID NO: 2739261 - RNA, 19 nt, Artificial Sequence
  Description of Artificial Sequence: Synthetic oligonucleotide
ggcacgugcagcagccaug

SEQ ID NO: 2739262 - RNA, 19 nt, Artificial Sequence
  Description of Artificial Sequence: Synthetic oligonucleotide
caaucaccagugggaagga

SEQ ID NO: 2739263 - RNA, 19 nt, Artificial Sequence
  Description of Artificial Sequence: Synthetic oligonucleotide
caccagcacccucccacuc

SEQ ID NO: 2739264 - RNA, 19 nt, Artificial Sequence
  Description of Artificial Sequence: Synthetic oligonucleotide
caugugacugguccagcau

SEQ ID NO: 2739265 - RNA, 19 nt, Artificial Sequence
  Description of Artificial Sequence: Synthetic oligonucleotide
ggggagaugcagccacuca

SEQ ID NO: 2739266 - RNA, 19 nt, Artificial Sequence
  Description of Artificial Sequence: Synthetic oligonucleotide
ccaugugacugguccagca

SEQ ID NO: 2739267 - RNA, 19 nt, Artificial Sequence
  Description of Artificial Sequence: Synthetic oligonucleotide
cuuuuaugguaggggagau

SEQ ID NO: 2739268 - RNA, 19 nt, Artificial Sequence
  Description of Artificial Sequence: Synthetic oligonucleotide
cagauacuuuucugauugu

SEQ ID NO: 2739269 - RNA, 19 nt, Artificial Sequence
  Description of Artificial Sequence: Synthetic oligonucleotide
gguacaugguggggucagc

SEQ ID NO: 2739270 - RNA, 19 nt, Artificial Sequence
  Description of Artificial Sequence: Synthetic oligonucleotide
cauccaggaaucgcaacau

SEQ ID NO: 2739271 - RNA, 19 nt, Artificial Sequence
  Description of Artificial Sequence: Synthetic oligonucleotide
gguaggggagaugcagcca

SEQ ID NO: 2739272 - RNA, 19 nt, Artificial Sequence
  Description of Artificial Sequence: Synthetic oligonucleotide
cgcaacaucuguucaucca

SEQ ID NO: 2739273 - RNA, 19 nt, Artificial Sequence
  Description of Artificial Sequence: Synthetic oligonucleotide
cccacucaagcaccugcac

SEQ ID NO: 2739274 - RNA, 19 nt, Artificial Sequence
  Description of Artificial Sequence: Synthetic oligonucleotide
acgagccccucaccuguuu

SEQ ID NO: 2739275 - RNA, 19 nt, Artificial Sequence
  Description of Artificial Sequence: Synthetic oligonucleotide
ggaacacugcagagccaug

SEQ ID NO: 2739276 - RNA, 19 nt, Artificial Sequence
  Description of Artificial Sequence: Synthetic oligonucleotide
ccacacgauggcccuugcc

SEQ ID NO: 2739277 - RNA, 19 nt, Artificial Sequence
  Description of Artificial Sequence: Synthetic oligonucleotide
cccucuaucguguuagcau

SEQ ID NO: 2739278 - RNA, 19 nt, Artificial Sequence
  Description of Artificial Sequence: Synthetic oligonucleotide
ucuggggcacgagccccuc

SEQ ID NO: 2739279 - RNA, 19 nt, Artificial Sequence
  Description of Artificial Sequence: Synthetic oligonucleotide
cacgaagaugugggccauc

SEQ ID NO: 2739280 - RNA, 19 nt, Artificial Sequence
  Description of Artificial Sequence: Synthetic oligonucleotide
agccccugggcucccucua

SEQ ID NO: 2739281 - RNA, 19 nt, Artificial Sequence
  Description of Artificial Sequence: Synthetic oligonucleotide
ccuugccuggcacgugcag

SEQ ID NO: 2739282 - RNA, 19 nt, Artificial Sequence
  Description of Artificial Sequence: Synthetic oligonucleotide
cagguacauagguggcugu

SEQ ID NO: 2739283 - RNA, 19 nt, Artificial Sequence
  Description of Artificial Sequence: Synthetic oligonucleotide
ugguggggucagccuucaa

SEQ ID NO: 2739284 - RNA, 19 nt, Artificial Sequence
  Description of Artificial Sequence: Synthetic oligonucleotide
gccccucaccuguuuuccc

SEQ ID NO: 2739285 - RNA, 19 nt, Artificial Sequence
  Description of Artificial Sequence: Synthetic oligonucleotide
ggggcacgagccccucacc

SEQ ID NO: 2739286 - RNA, 19 nt, Artificial Sequence
  Description of Artificial Sequence: Synthetic oligonucleotide
cgugcagcagccaugguau

SEQ ID NO: 2739287 - RNA, 19 nt, Artificial Sequence
  Description of Artificial Sequence: Synthetic oligonucleotide
ugguugggcuggccucguu

SEQ ID NO: 2739288 - RNA, 19 nt, Artificial Sequence
  Description of Artificial Sequence: Synthetic oligonucleotide
gccaugugacugguccagc

SEQ ID NO: 2739289 - RNA, 19 nt, Artificial Sequence
  Description of Artificial Sequence: Synthetic oligonucleotide
gcacuggaggcuguccaca

SEQ ID NO: 2739290 - RNA, 19 nt, Artificial Sequence
  Description of Artificial Sequence: Synthetic oligonucleotide
gcacgagccccucaccugu

SEQ ID NO: 2739291 - RNA, 19 nt, Artificial Sequence
  Description of Artificial Sequence: Synthetic oligonucleotide
augcagccacucagguaca

SEQ ID NO: 2739292 - RNA, 19 nt, Artificial Sequence
  Description of Artificial Sequence: Synthetic oligonucleotide
gggcacgagccccucaccu

SEQ ID NO: 2739293 - RNA, 19 nt, Artificial Sequence
  Description of Artificial Sequence: Synthetic oligonucleotide
gucagccuucaaagucauc

SEQ ID NO: 2739294 - RNA, 19 nt, Artificial Sequence
  Description of Artificial Sequence: Synthetic oligonucleotide
cccaugugggcccucggaa

SEQ ID NO: 2739295 - RNA, 19 nt, Artificial Sequence
  Description of Artificial Sequence: Synthetic oligonucleotide
gggcuggccucguuucaga

SEQ ID NO: 2739296 - RNA, 19 nt, Artificial Sequence
  Description of Artificial Sequence: Synthetic oligonucleotide
gcuggccucguuucagagu

SEQ ID NO: 2739297 - RNA, 19 nt, Artificial Sequence
  Description of Artificial Sequence: Synthetic oligonucleotide
cugugcgcugguacauggu

SEQ ID NO: 2739298 - RNA, 19 nt, Artificial Sequence
  Description of Artificial Sequence: Synthetic oligonucleotide
caccagugggaaggacuca

SEQ ID NO: 2739299 - RNA, 19 nt, Artificial Sequence
  Description of Artificial Sequence: Synthetic oligonucleotide
gguugggcuggccucguuu

SEQ ID NO: 2739300 - RNA, 19 nt, Artificial Sequence
  Description of Artificial Sequence: Synthetic oligonucleotide
ggcccucggaaucguagcu

SEQ ID NO: 2739301 - RNA, 19 nt, Artificial Sequence
  Description of Artificial Sequence: Synthetic oligonucleotide
cuggggcacgagccccuca

SEQ ID NO: 2739302 - RNA, 19 nt, Artificial Sequence
  Description of Artificial Sequence: Synthetic oligonucleotide
ccuuccacacgauggcccu

SEQ ID NO: 2739303 - RNA, 19 nt, Artificial Sequence
  Description of Artificial Sequence: Synthetic oligonucleotide
caccugcaccugcagggcu

SEQ ID NO: 2739304 - RNA, 19 nt, Artificial Sequence
  Description of Artificial Sequence: Synthetic oligonucleotide
ccagcacccucccacucaa

SEQ ID NO: 2739305 - RNA, 19 nt, Artificial Sequence
  Description of Artificial Sequence: Synthetic oligonucleotide
ggacucaacugugcagccu

SEQ ID NO: 2739306 - RNA, 19 nt, Artificial Sequence
  Description of Artificial Sequence: Synthetic oligonucleotide
ggcucccucuaucguguua

SEQ ID NO: 2739307 - RNA, 19 nt, Artificial Sequence
  Description of Artificial Sequence: Synthetic oligonucleotide
cuggcacgugcagcagcca

SEQ ID NO: 2739308 - RNA, 19 nt, Artificial Sequence
  Description of Artificial Sequence: Synthetic oligonucleotide
gcagcagccaugguauguu

SEQ ID NO: 2739309 - RNA, 19 nt, Artificial Sequence
  Description of Artificial Sequence: Synthetic oligonucleotide
ggccaucuagcugcagaua

SEQ ID NO: 2739310 - RNA, 19 nt, Artificial Sequence
  Description of Artificial Sequence: Synthetic oligonucleotide
ggucagccuucaaagucau

SEQ ID NO: 2739311 - RNA, 19 nt, Artificial Sequence
  Description of Artificial Sequence: Synthetic oligonucleotide
ccucccacucaagcaccug

SEQ ID NO: 2739312 - RNA, 19 nt, Artificial Sequence
  Description of Artificial Sequence: Synthetic oligonucleotide
gcagccacucagguacaua

SEQ ID NO: 2739313 - RNA, 19 nt, Artificial Sequence
  Description of Artificial Sequence: Synthetic oligonucleotide
ccaugugggcccucggaau

SEQ ID NO: 2739314 - RNA, 19 nt, Artificial Sequence
  Description of Artificial Sequence: Synthetic oligonucleotide
gccucguuucagagugcca

SEQ ID NO: 2739315 - RNA, 19 nt, Artificial Sequence
  Description of Artificial Sequence: Synthetic oligonucleotide
gugcagccucugccuugga

SEQ ID NO: 2739316 - RNA, 19 nt, Artificial Sequence
  Description of Artificial Sequence: Synthetic oligonucleotide
cccucggaaucguagcuuu

SEQ ID NO: 2739317 - RNA, 19 nt, Artificial Sequence
  Description of Artificial Sequence: Synthetic oligonucleotide
cccuugccuggcacgugca

SEQ ID NO: 2739318 - RNA, 19 nt, Artificial Sequence
  Description of Artificial Sequence: Synthetic oligonucleotide
ccagcaugacuuugugguu

SEQ ID NO: 2739319 - RNA, 19 nt, Artificial Sequence
  Description of Artificial Sequence: Synthetic oligonucleotide
ccaccagcacccucccacu

SEQ ID NO: 2739320 - RNA, 19 nt, Artificial Sequence
  Description of Artificial Sequence: Synthetic oligonucleotide
gugggcccucggaaucgua

SEQ ID NO: 2739321 - RNA, 19 nt, Artificial Sequence
  Description of Artificial Sequence: Synthetic oligonucleotide
ccugugcuaggcagccccu

SEQ ID NO: 2739322 - RNA, 19 nt, Artificial Sequence
  Description of Artificial Sequence: Synthetic oligonucleotide
cuuccacacgauggcccuu

SEQ ID NO: 2739323 - RNA, 19 nt, Artificial Sequence
  Description of Artificial Sequence: Synthetic oligonucleotide
gggcugugcgcugguacau

SEQ ID NO: 2739324 - RNA, 19 nt, Artificial Sequence
  Description of Artificial Sequence: Synthetic oligonucleotide
cgaagaugugggccaucua

SEQ ID NO: 2739325 - RNA, 19 nt, Artificial Sequence
  Description of Artificial Sequence: Synthetic oligonucleotide
cccucccacucaagcaccu

SEQ ID NO: 2739326 - RNA, 19 nt, Artificial Sequence
  Description of Artificial Sequence: Synthetic oligonucleotide
gcccucggaaucguagcuu

SEQ ID NO: 2739327 - RNA, 19 nt, Artificial Sequence
  Description of Artificial Sequence: Synthetic oligonucleotide
ccucggaaucguagcuuuu

SEQ ID NO: 2739328 - RNA, 19 nt, Artificial Sequence
  Description of Artificial Sequence: Synthetic oligonucleotide
ggcagcccaugugggcccu

SEQ ID NO: 2739329 - RNA, 19 nt, Artificial Sequence
  Description of Artificial Sequence: Synthetic oligonucleotide
cgauggcccuugccuggca

SEQ ID NO: 2739330 - RNA, 19 nt, Artificial Sequence
  Description of Artificial Sequence: Synthetic oligonucleotide
gggcucccucuaucguguu

SEQ ID NO: 2739331 - RNA, 19 nt, Artificial Sequence
  Description of Artificial Sequence: Synthetic oligonucleotide
aaaucaaaggguuugugcc

SEQ ID NO: 2739332 - RNA, 19 nt, Artificial Sequence
  Description of Artificial Sequence: Synthetic oligonucleotide
aaaccacuggcuuuaaccc

SEQ ID NO: 2739333 - RNA, 19 nt, Artificial Sequence
  Description of Artificial Sequence: Synthetic oligonucleotide
aguacauguugacugagcc

SEQ ID NO: 2739334 - RNA, 19 nt, Artificial Sequence
  Description of Artificial Sequence: Synthetic oligonucleotide
ugggaagccauguagaggg

SEQ ID NO: 2739335 - RNA, 19 nt, Artificial Sequence
  Description of Artificial Sequence: Synthetic oligonucleotide
aauguuacguagaccaucc

SEQ ID NO: 2739336 - RNA, 19 nt, Artificial Sequence
  Description of Artificial Sequence: Synthetic oligonucleotide
caaguggaaaaucaaaggg

SEQ ID NO: 2739337 - RNA, 19 nt, Artificial Sequence
  Description of Artificial Sequence: Synthetic oligonucleotide
uacauguugacugagcccg

SEQ ID NO: 2739338 - RNA, 19 nt, Artificial Sequence
  Description of Artificial Sequence: Synthetic oligonucleotide
uccaaguggaaaaucaaag

SEQ ID NO: 2739339 - RNA, 19 nt, Artificial Sequence
  Description of Artificial Sequence: Synthetic oligonucleotide
uauuaacugacaaacccgc

SEQ ID NO: 2739340 - RNA, 19 nt, Artificial Sequence
  Description of Artificial Sequence: Synthetic oligonucleotide
aaacaaagcgcuuguguuc

SEQ ID NO: 2739341 - RNA, 19 nt, Artificial Sequence
  Description of Artificial Sequence: Synthetic oligonucleotide
uuguaguacauguugacug

SEQ ID NO: 2739342 - RNA, 19 nt, Artificial Sequence
  Description of Artificial Sequence: Synthetic oligonucleotide
cugcauuucacaaacaaac

SEQ ID NO: 2739343 - RNA, 19 nt, Artificial Sequence
  Description of Artificial Sequence: Synthetic oligonucleotide
aaggccucguuucaggugg

SEQ ID NO: 2739344 - RNA, 19 nt, Artificial Sequence
  Description of Artificial Sequence: Synthetic oligonucleotide
acguagaccauccaagugg

SEQ ID NO: 2739345 - RNA, 19 nt, Artificial Sequence
  Description of Artificial Sequence: Synthetic oligonucleotide
aaagcauuuggucgggaag

SEQ ID NO: 2739346 - RNA, 19 nt, Artificial Sequence
  Description of Artificial Sequence: Synthetic oligonucleotide
uguggcaaauaugauaggg

SEQ ID NO: 2739347 - RNA, 19 nt, Artificial Sequence
  Description of Artificial Sequence: Synthetic oligonucleotide
aaauguuacguagaccauc

SEQ ID NO: 2739348 - RNA, 19 nt, Artificial Sequence
  Description of Artificial Sequence: Synthetic oligonucleotide
uuaacugacaaacccgcug

SEQ ID NO: 2739349 - RNA, 19 nt, Artificial Sequence
  Description of Artificial Sequence: Synthetic oligonucleotide
cuggaggucaguuuagucg

SEQ ID NO: 2739350 - RNA, 19 nt, Artificial Sequence
  Description of Artificial Sequence: Synthetic oligonucleotide
aaccacuggcuuuaacccc

SEQ ID NO: 2739351 - RNA, 19 nt, Artificial Sequence
  Description of Artificial Sequence: Synthetic oligonucleotide
aaggguuugugccacgaag

SEQ ID NO: 2739352 - RNA, 19 nt, Artificial Sequence
  Description of Artificial Sequence: Synthetic oligonucleotide
accccugcggacuauaggc

SEQ ID NO: 2739353 - RNA, 19 nt, Artificial Sequence
  Description of Artificial Sequence: Synthetic oligonucleotide
ugcaacaguguauuaacug

SEQ ID NO: 2739354 - RNA, 19 nt, Artificial Sequence
  Description of Artificial Sequence: Synthetic oligonucleotide
acuuguaguacauguugac

SEQ ID NO: 2739355 - RNA, 19 nt, Artificial Sequence
  Description of Artificial Sequence: Synthetic oligonucleotide
guagagggcaaucaggcag

SEQ ID NO: 2739356 - RNA, 19 nt, Artificial Sequence
  Description of Artificial Sequence: Synthetic oligonucleotide
aagcauuuggucgggaagg

SEQ ID NO: 2739357 - RNA, 19 nt, Artificial Sequence
  Description of Artificial Sequence: Synthetic oligonucleotide
ucauaugcugucacacugg

SEQ ID NO: 2739358 - RNA, 19 nt, Artificial Sequence
  Description of Artificial Sequence: Synthetic oligonucleotide
aaggcuaauucacuuauuu

SEQ ID NO: 2739359 - RNA, 19 nt, Artificial Sequence
  Description of Artificial Sequence: Synthetic oligonucleotide
gaagccgcuaaacuuguag

SEQ ID NO: 2739360 - RNA, 19 nt, Artificial Sequence
  Description of Artificial Sequence: Synthetic oligonucleotide
aaucaaaggguuugugcca

SEQ ID NO: 2739361 - RNA, 19 nt, Artificial Sequence
  Description of Artificial Sequence: Synthetic oligonucleotide
gacuauaggcuuccgaggc

SEQ ID NO: 2739362 - RNA, 19 nt, Artificial Sequence
  Description of Artificial Sequence: Synthetic oligonucleotide
uggaaaaucaaaggguuug

SEQ ID NO: 2739363 - RNA, 19 nt, Artificial Sequence
  Description of Artificial Sequence: Synthetic oligonucleotide
uuuccuuuaguuugcaaaa

SEQ ID NO: 2739364 - RNA, 19 nt, Artificial Sequence
  Description of Artificial Sequence: Synthetic oligonucleotide
agcucuggaacuuuguucu

SEQ ID NO: 2739365 - RNA, 19 nt, Artificial Sequence
  Description of Artificial Sequence: Synthetic oligonucleotide
uaacugacaaacccgcuga

SEQ ID NO: 2739366 - RNA, 19 nt, Artificial Sequence
  Description of Artificial Sequence: Synthetic oligonucleotide
acaaacaaagcgcuugugu

SEQ ID NO: 2739367 - RNA, 19 nt, Artificial Sequence
  Description of Artificial Sequence: Synthetic oligonucleotide
uuaucuuuuccuuuaguuu

SEQ ID NO: 2739368 - RNA, 19 nt, Artificial Sequence
  Description of Artificial Sequence: Synthetic oligonucleotide
ugcauuucacaaacaaaca

SEQ ID NO: 2739369 - RNA, 19 nt, Artificial Sequence
  Description of Artificial Sequence: Synthetic oligonucleotide
aaguggaaaaucaaagggu

SEQ ID NO: 2739370 - RNA, 19 nt, Artificial Sequence
  Description of Artificial Sequence: Synthetic oligonucleotide
uguguucuuaucuuuuccu

SEQ ID NO: 2739371 - RNA, 19 nt, Artificial Sequence
  Description of Artificial Sequence: Synthetic oligonucleotide
aaucaggcaguagaugguc

SEQ ID NO: 2739372 - RNA, 19 nt, Artificial Sequence
  Description of Artificial Sequence: Synthetic oligonucleotide
uguuacguagaccauccaa

SEQ ID NO: 2739373 - RNA, 19 nt, Artificial Sequence
  Description of Artificial Sequence: Synthetic oligonucleotide
guuacguagaccauccaag

SEQ ID NO: 2739374 - RNA, 19 nt, Artificial Sequence
  Description of Artificial Sequence: Synthetic oligonucleotide
uccuccaaaggcuaauuca

SEQ ID NO: 2739375 - RNA, 19 nt, Artificial Sequence
  Description of Artificial Sequence: Synthetic oligonucleotide
guuugugccacgaagaguc

SEQ ID NO: 2739376 - RNA, 19 nt, Artificial Sequence
  Description of Artificial Sequence: Synthetic oligonucleotide
agggcaaucaggcaguaga

SEQ ID NO: 2739377 - RNA, 19 nt, Artificial Sequence
  Description of Artificial Sequence: Synthetic oligonucleotide
acuauaggcuuccgaggcc

SEQ ID NO: 2739378 - RNA, 19 nt, Artificial Sequence
  Description of Artificial Sequence: Synthetic oligonucleotide
uggaacuuuguucuuccca

SEQ ID NO: 2739379 - RNA, 19 nt, Artificial Sequence
  Description of Artificial Sequence: Synthetic oligonucleotide
acugagcccggcuucacac

SEQ ID NO: 2739380 - RNA, 19 nt, Artificial Sequence
  Description of Artificial Sequence: Synthetic oligonucleotide
acagucagcgccauggugg

SEQ ID NO: 2739381 - RNA, 19 nt, Artificial Sequence
  Description of Artificial Sequence: Synthetic oligonucleotide
cuggcuuuaaccccugcgg

SEQ ID NO: 2739382 - RNA, 19 nt, Artificial Sequence
  Description of Artificial Sequence: Synthetic oligonucleotide
aacugacaaacccgcugac

SEQ ID NO: 2739383 - RNA, 19 nt, Artificial Sequence
  Description of Artificial Sequence: Synthetic oligonucleotide
acuggcuuuaaccccugcg

SEQ ID NO: 2739384 - RNA, 19 nt, Artificial Sequence
  Description of Artificial Sequence: Synthetic oligonucleotide
aacaaagcgcuuguguucu

SEQ ID NO: 2739385 - RNA, 19 nt, Artificial Sequence
  Description of Artificial Sequence: Synthetic oligonucleotide
ucagccuucuggaagaauu

SEQ ID NO: 2739386 - RNA, 19 nt, Artificial Sequence
  Description of Artificial Sequence: Synthetic oligonucleotide
agugucauuuccugcaaca

SEQ ID NO: 2739387 - RNA, 19 nt, Artificial Sequence
  Description of Artificial Sequence: Synthetic oligonucleotide
ucccagcauagucauaugc

SEQ ID NO: 2739388 - RNA, 19 nt, Artificial Sequence
  Description of Artificial Sequence: Synthetic oligonucleotide
ucuguggaaaccacuggcu

SEQ ID NO: 2739389 - RNA, 19 nt, Artificial Sequence
  Description of Artificial Sequence: Synthetic oligonucleotide
cuuccgaggcccaagcucc

SEQ ID NO: 2739390 - RNA, 19 nt, Artificial Sequence
  Description of Artificial Sequence: Synthetic oligonucleotide
ugucauuuccugcaacagu

SEQ ID NO: 2739391 - RNA, 19 nt, Artificial Sequence
  Description of Artificial Sequence: Synthetic oligonucleotide
agcgcuuguguucuuaucu

SEQ ID NO: 2739392 - RNA, 19 nt, Artificial Sequence
  Description of Artificial Sequence: Synthetic oligonucleotide
ggaacuuuguucuucccag

SEQ ID NO: 2739393 - RNA, 19 nt, Artificial Sequence
  Description of Artificial Sequence: Synthetic oligonucleotide
uccgguaaagcauuugguc

SEQ ID NO: 2739394 - RNA, 19 nt, Artificial Sequence
  Description of Artificial Sequence: Synthetic oligonucleotide
aagccgcuaaacuuguagu

SEQ ID NO: 2739395 - RNA, 19 nt, Artificial Sequence
  Description of Artificial Sequence: Synthetic oligonucleotide
guggcaaauaugauagggg

SEQ ID NO: 2739396 - RNA, 19 nt, Artificial Sequence
  Description of Artificial Sequence: Synthetic oligonucleotide
acgaagaguccuccaaagg

SEQ ID NO: 2739397 - RNA, 19 nt, Artificial Sequence
  Description of Artificial Sequence: Synthetic oligonucleotide
caucugacaggccaucugc

SEQ ID NO: 2739398 - RNA, 19 nt, Artificial Sequence
  Description of Artificial Sequence: Synthetic oligonucleotide
uacguagaccauccaagug

SEQ ID NO: 2739399 - RNA, 19 nt, Artificial Sequence
  Description of Artificial Sequence: Synthetic oligonucleotide
uaaacuuguaguacauguu

SEQ ID NO: 2739400 - RNA, 19 nt, Artificial Sequence
  Description of Artificial Sequence: Synthetic oligonucleotide
uuacguagaccauccaagu

SEQ ID NO: 2739401 - RNA, 19 nt, Artificial Sequence
  Description of Artificial Sequence: Synthetic oligonucleotide
aucugcauuucacaaacaa

SEQ ID NO: 2739402 - RNA, 19 nt, Artificial Sequence
  Description of Artificial Sequence: Synthetic oligonucleotide
aaccccugcggacuauagg

SEQ ID NO: 2739403 - RNA, 19 nt, Artificial Sequence
  Description of Artificial Sequence: Synthetic oligonucleotide
agaauuucuguagcucugg

SEQ ID NO: 2739404 - RNA, 19 nt, Artificial Sequence
  Description of Artificial Sequence: Synthetic oligonucleotide
ccaaguggaaaaucaaagg

SEQ ID NO: 2739405 - RNA, 19 nt, Artificial Sequence
  Description of Artificial Sequence: Synthetic oligonucleotide
gaaaaucaaaggguuugug

SEQ ID NO: 2739406 - RNA, 19 nt, Artificial Sequence
  Description of Artificial Sequence: Synthetic oligonucleotide
uaguacauguugacugagc

SEQ ID NO: 2739407 - RNA, 19 nt, Artificial Sequence
  Description of Artificial Sequence: Synthetic oligonucleotide
aucaaaggguuugugccac

SEQ ID NO: 2739408 - RNA, 19 nt, Artificial Sequence
  Description of Artificial Sequence: Synthetic oligonucleotide
uagucauaugcugucacac

SEQ ID NO: 2739409 - RNA, 19 nt, Artificial Sequence
  Description of Artificial Sequence: Synthetic oligonucleotide
ugcgugaagccgcuaaacu

SEQ ID NO: 2739410 - RNA, 19 nt, Artificial Sequence
  Description of Artificial Sequence: Synthetic oligonucleotide
ucaguuuagucgguguggc

SEQ ID NO: 2739411 - RNA, 19 nt, Artificial Sequence
  Description of Artificial Sequence: Synthetic oligonucleotide
uuucagguggaugggcacg

SEQ ID NO: 2739412 - RNA, 19 nt, Artificial Sequence
  Description of Artificial Sequence: Synthetic oligonucleotide
uaaagcauuuggucgggaa

SEQ ID NO: 2739413 - RNA, 19 nt, Artificial Sequence
  Description of Artificial Sequence: Synthetic oligonucleotide
cacgccgucagccuucugg

SEQ ID NO: 2739414 - RNA, 19 nt, Artificial Sequence
  Description of Artificial Sequence: Synthetic oligonucleotide
aaacccgcugacaucugac

SEQ ID NO: 2739415 - RNA, 19 nt, Artificial Sequence
  Description of Artificial Sequence: Synthetic oligonucleotide
gauggucccucccacaguc

SEQ ID NO: 2739416 - RNA, 19 nt, Artificial Sequence
  Description of Artificial Sequence: Synthetic oligonucleotide
agaccauccaaguggaaaa

SEQ ID NO: 2739417 - RNA, 19 nt, Artificial Sequence
  Description of Artificial Sequence: Synthetic oligonucleotide
cauagucauaugcugucac

SEQ ID NO: 2739418 - RNA, 19 nt, Artificial Sequence
  Description of Artificial Sequence: Synthetic oligonucleotide
gguccgguaaagcauuugg

SEQ ID NO: 2739419 - RNA, 19 nt, Artificial Sequence
  Description of Artificial Sequence: Synthetic oligonucleotide
ugagcccggcuucacacag

SEQ ID NO: 2739420 - RNA, 19 nt, Artificial Sequence
  Description of Artificial Sequence: Synthetic oligonucleotide
auagucauaugcugucaca

SEQ ID NO: 2739421 - RNA, 19 nt, Artificial Sequence
  Description of Artificial Sequence: Synthetic oligonucleotide
aagcgcuuguguucuuauc

SEQ ID NO: 2739422 - RNA, 19 nt, Artificial Sequence
  Description of Artificial Sequence: Synthetic oligonucleotide
ccgguaaagcauuuggucg

SEQ ID NO: 2739423 - RNA, 19 nt, Artificial Sequence
  Description of Artificial Sequence: Synthetic oligonucleotide
cacgaagaguccuccaaag

SEQ ID NO: 2739424 - RNA, 19 nt, Artificial Sequence
  Description of Artificial Sequence: Synthetic oligonucleotide
gucgguguggcaaauauga

SEQ ID NO: 2739425 - RNA, 19 nt, Artificial Sequence
  Description of Artificial Sequence: Synthetic oligonucleotide
gucaguuuagucggugugg

SEQ ID NO: 2739426 - RNA, 19 nt, Artificial Sequence
  Description of Artificial Sequence: Synthetic oligonucleotide
guacauguugacugagccc

SEQ ID NO: 2739427 - RNA, 19 nt, Artificial Sequence
  Description of Artificial Sequence: Synthetic oligonucleotide
ugcgcgaccgcccuagaga

SEQ ID NO: 2739428 - RNA, 19 nt, Artificial Sequence
  Description of Artificial Sequence: Synthetic oligonucleotide
auggugguccgguaaagca

SEQ ID NO: 2739429 - RNA, 19 nt, Artificial Sequence
  Description of Artificial Sequence: Synthetic oligonucleotide
ccucguuucagguggaugg

SEQ ID NO: 2739430 - RNA, 19 nt, Artificial Sequence
  Description of Artificial Sequence: Synthetic oligonucleotide
uggcuuuaaccccugcgga

SEQ ID NO: 2739431 - RNA, 19 nt, Artificial Sequence
  Description of Artificial Sequence: Synthetic oligonucleotide
uccaaaggcuaauucacuu

SEQ ID NO: 2739432 - RNA, 19 nt, Artificial Sequence
  Description of Artificial Sequence: Synthetic oligonucleotide
uagaccauccaaguggaaa

SEQ ID NO: 2739433 - RNA, 19 nt, Artificial Sequence
  Description of Artificial Sequence: Synthetic oligonucleotide
uagucgguguggcaaauau

SEQ ID NO: 2739434 - RNA, 19 nt, Artificial Sequence
  Description of Artificial Sequence: Synthetic oligonucleotide
gaacuuuguucuucccagc

SEQ ID NO: 2739435 - RNA, 19 nt, Artificial Sequence
  Description of Artificial Sequence: Synthetic oligonucleotide
aacaaacaaagcgcuugug

SEQ ID NO: 2739436 - RNA, 19 nt, Artificial Sequence
  Description of Artificial Sequence: Synthetic oligonucleotide
aguggaaaaucaaaggguu

SEQ ID NO: 2739437 - RNA, 19 nt, Artificial Sequence
  Description of Artificial Sequence: Synthetic oligonucleotide
cuauaggcuuccgaggccc

SEQ ID NO: 2739438 - RNA, 19 nt, Artificial Sequence
  Description of Artificial Sequence: Synthetic oligonucleotide
agucauaugcugucacacu

SEQ ID NO: 2739439 - RNA, 19 nt, Artificial Sequence
  Description of Artificial Sequence: Synthetic oligonucleotide
aaagcgcuuguguucuuau

SEQ ID NO: 2739440 - RNA, 19 nt, Artificial Sequence
  Description of Artificial Sequence: Synthetic oligonucleotide
uguagagggcaaucaggca

SEQ ID NO: 2739441 - RNA, 19 nt, Artificial Sequence
  Description of Artificial Sequence: Synthetic oligonucleotide
uagagggcaaucaggcagu

SEQ ID NO: 2739442 - RNA, 19 nt, Artificial Sequence
  Description of Artificial Sequence: Synthetic oligonucleotide
aguuuagucgguguggcaa

SEQ ID NO: 2739443 - RNA, 19 nt, Artificial Sequence
  Description of Artificial Sequence: Synthetic oligonucleotide
gcuccagccaacuucugcg

SEQ ID NO: 2739444 - RNA, 19 nt, Artificial Sequence
  Description of Artificial Sequence: Synthetic oligonucleotide
agcauuuggucgggaaggc

SEQ ID NO: 2739445 - RNA, 19 nt, Artificial Sequence
  Description of Artificial Sequence: Synthetic oligonucleotide
uggucccucccacagucag

SEQ ID NO: 2739446 - RNA, 19 nt, Artificial Sequence
  Description of Artificial Sequence: Synthetic oligonucleotide
ggacuauaggcuuccgagg

SEQ ID NO: 2739447 - RNA, 19 nt, Artificial Sequence
  Description of Artificial Sequence: Synthetic oligonucleotide
gcaacaguguauuaacuga

SEQ ID NO: 2739448 - RNA, 19 nt, Artificial Sequence
  Description of Artificial Sequence: Synthetic oligonucleotide
ugacaggccaucugcauuu

SEQ ID NO: 2739449 - RNA, 19 nt, Artificial Sequence
  Description of Artificial Sequence: Synthetic oligonucleotide
aacccgcugacaucugaca

SEQ ID NO: 2739450 - RNA, 19 nt, Artificial Sequence
  Description of Artificial Sequence: Synthetic oligonucleotide
acaucugacaggccaucug

SEQ ID NO: 2739451 - RNA, 19 nt, Artificial Sequence
  Description of Artificial Sequence: Synthetic oligonucleotide
acccgcugacaucugacag

SEQ ID NO: 2739452 - RNA, 19 nt, Artificial Sequence
  Description of Artificial Sequence: Synthetic oligonucleotide
aucaggcaguagauggucc

SEQ ID NO: 2739453 - RNA, 19 nt, Artificial Sequence
  Description of Artificial Sequence: Synthetic oligonucleotide
uucugcgugaagccgcuaa

SEQ ID NO: 2739454 - RNA, 19 nt, Artificial Sequence
  Description of Artificial Sequence: Synthetic oligonucleotide
ucaaaggguuugugccacg

SEQ ID NO: 2739455 - RNA, 19 nt, Artificial Sequence
  Description of Artificial Sequence: Synthetic oligonucleotide
accgcccuagagaaggacc

SEQ ID NO: 2739456 - RNA, 19 nt, Artificial Sequence
  Description of Artificial Sequence: Synthetic oligonucleotide
aggcuuccgaggcccaagc

SEQ ID NO: 2739457 - RNA, 19 nt, Artificial Sequence
  Description of Artificial Sequence: Synthetic oligonucleotide
caggccaucugcauuucac

SEQ ID NO: 2739458 - RNA, 19 nt, Artificial Sequence
  Description of Artificial Sequence: Synthetic oligonucleotide
ugugccacgaagaguccuc

SEQ ID NO: 2739459 - RNA, 19 nt, Artificial Sequence
  Description of Artificial Sequence: Synthetic oligonucleotide
uggugguccgguaaagcau

SEQ ID NO: 2739460 - RNA, 19 nt, Artificial Sequence
  Description of Artificial Sequence: Synthetic oligonucleotide
aaaauguuacguagaccau

SEQ ID NO: 2739461 - RNA, 19 nt, Artificial Sequence
  Description of Artificial Sequence: Synthetic oligonucleotide
gucccucccacagucagcg

SEQ ID NO: 2739462 - RNA, 19 nt, Artificial Sequence
  Description of Artificial Sequence: Synthetic oligonucleotide
cuuaucuuuuccuuuaguu

SEQ ID NO: 2739463 - RNA, 19 nt, Artificial Sequence
  Description of Artificial Sequence: Synthetic oligonucleotide
uguugacugagcccggcuu

SEQ ID NO: 2739464 - RNA, 19 nt, Artificial Sequence
  Description of Artificial Sequence: Synthetic oligonucleotide
aaaggguuugugccacgaa

SEQ ID NO: 2739465 - RNA, 19 nt, Artificial Sequence
  Description of Artificial Sequence: Synthetic oligonucleotide
uuugugccacgaagagucc

SEQ ID NO: 2739466 - RNA, 19 nt, Artificial Sequence
  Description of Artificial Sequence: Synthetic oligonucleotide
uaaccccugcggacuauag

SEQ ID NO: 2739467 - RNA, 19 nt, Artificial Sequence
  Description of Artificial Sequence: Synthetic oligonucleotide
gucagcgccaugguggucc

SEQ ID NO: 2739468 - RNA, 19 nt, Artificial Sequence
  Description of Artificial Sequence: Synthetic oligonucleotide
guaguacauguugacugag

SEQ ID NO: 2739469 - RNA, 19 nt, Artificial Sequence
  Description of Artificial Sequence: Synthetic oligonucleotide
cgaagaguccuccaaaggc

SEQ ID NO: 2739470 - RNA, 19 nt, Artificial Sequence
  Description of Artificial Sequence: Synthetic oligonucleotide
gacaaacccgcugacaucu

SEQ ID NO: 2739471 - RNA, 19 nt, Artificial Sequence
  Description of Artificial Sequence: Synthetic oligonucleotide
ccugcaacaguguauuaac

SEQ ID NO: 2739472 - RNA, 19 nt, Artificial Sequence
  Description of Artificial Sequence: Synthetic oligonucleotide
caacuucugcgugaagccg

SEQ ID NO: 2739473 - RNA, 19 nt, Artificial Sequence
  Description of Artificial Sequence: Synthetic oligonucleotide
aggcuaauucacuuauuuu

SEQ ID NO: 2739474 - RNA, 19 nt, Artificial Sequence
  Description of Artificial Sequence: Synthetic oligonucleotide
gugucauuuccugcaacag

SEQ ID NO: 2739475 - RNA, 19 nt, Artificial Sequence
  Description of Artificial Sequence: Synthetic oligonucleotide
ccaacuucugcgugaagcc

SEQ ID NO: 2739476 - RNA, 19 nt, Artificial Sequence
  Description of Artificial Sequence: Synthetic oligonucleotide
ucugcgugaagccgcuaaa

SEQ ID NO: 2739477 - RNA, 19 nt, Artificial Sequence
  Description of Artificial Sequence: Synthetic oligonucleotide
guuucagguggaugggcac

SEQ ID NO: 2739478 - RNA, 19 nt, Artificial Sequence
  Description of Artificial Sequence: Synthetic oligonucleotide
aggucaguuuagucggugu

SEQ ID NO: 2739479 - RNA, 19 nt, Artificial Sequence
  Description of Artificial Sequence: Synthetic oligonucleotide
aggccaucugcauuucaca

SEQ ID NO: 2739480 - RNA, 19 nt, Artificial Sequence
  Description of Artificial Sequence: Synthetic oligonucleotide
gaagaguccuccaaaggcu

SEQ ID NO: 2739481 - RNA, 19 nt, Artificial Sequence
  Description of Artificial Sequence: Synthetic oligonucleotide
gccaacuucugcgugaagc

SEQ ID NO: 2739482 - RNA, 19 nt, Artificial Sequence
  Description of Artificial Sequence: Synthetic oligonucleotide
ggucaguuuagucggugug

SEQ ID NO: 2739483 - RNA, 19 nt, Artificial Sequence
  Description of Artificial Sequence: Synthetic oligonucleotide
guguggcaaauaugauagg

SEQ ID NO: 2739484 - RNA, 19 nt, Artificial Sequence
  Description of Artificial Sequence: Synthetic oligonucleotide
gucgggaaggccucguuuc

SEQ ID NO: 2739485 - RNA, 19 nt, Artificial Sequence
  Description of Artificial Sequence: Synthetic oligonucleotide
agccgcuaaacuuguagua

SEQ ID NO: 2739486 - RNA, 19 nt, Artificial Sequence
  Description of Artificial Sequence: Synthetic oligonucleotide
auuuggucgggaaggccuc

SEQ ID NO: 2739487 - RNA, 19 nt, Artificial Sequence
  Description of Artificial Sequence: Synthetic oligonucleotide
ucacacagccgcugccugc

SEQ ID NO: 2739488 - RNA, 19 nt, Artificial Sequence
  Description of Artificial Sequence: Synthetic oligonucleotide
caguguauuaacugacaaa

SEQ ID NO: 2739489 - RNA, 19 nt, Artificial Sequence
  Description of Artificial Sequence: Synthetic oligonucleotide
ucgggaaggccucguuuca

SEQ ID NO: 2739490 - RNA, 19 nt, Artificial Sequence
  Description of Artificial Sequence: Synthetic oligonucleotide
cauggugguccgguaaagc

SEQ ID NO: 2739491 - RNA, 19 nt, Artificial Sequence
  Description of Artificial Sequence: Synthetic oligonucleotide
uuuggucgggaaggccucg

SEQ ID NO: 2739492 - RNA, 19 nt, Artificial Sequence
  Description of Artificial Sequence: Synthetic oligonucleotide
aggguuugugccacgaaga

SEQ ID NO: 2739493 - RNA, 19 nt, Artificial Sequence
  Description of Artificial Sequence: Synthetic oligonucleotide
cggacuauaggcuuccgag

SEQ ID NO: 2739494 - RNA, 19 nt, Artificial Sequence
  Description of Artificial Sequence: Synthetic oligonucleotide
cauuuggucgggaaggccu

SEQ ID NO: 2739495 - RNA, 19 nt, Artificial Sequence
  Description of Artificial Sequence: Synthetic oligonucleotide
auuuccugcaacaguguau

SEQ ID NO: 2739496 - RNA, 19 nt, Artificial Sequence
  Description of Artificial Sequence: Synthetic oligonucleotide
uauaggcuuccgaggccca

SEQ ID NO: 2739497 - RNA, 19 nt, Artificial Sequence
  Description of Artificial Sequence: Synthetic oligonucleotide
cucguuucagguggauggg

SEQ ID NO: 2739498 - RNA, 19 nt, Artificial Sequence
  Description of Artificial Sequence: Synthetic oligonucleotide
cauccaaguggaaaaucaa

SEQ ID NO: 2739499 - RNA, 19 nt, Artificial Sequence
  Description of Artificial Sequence: Synthetic oligonucleotide
cgugaagccgcuaaacuug

SEQ ID NO: 2739500 - RNA, 19 nt, Artificial Sequence
  Description of Artificial Sequence: Synthetic oligonucleotide
cagguggaugggcacgccg

SEQ ID NO: 2739501 - RNA, 19 nt, Artificial Sequence
  Description of Artificial Sequence: Synthetic oligonucleotide
cgguaaagcauuuggucgg

SEQ ID NO: 2739502 - RNA, 19 nt, Artificial Sequence
  Description of Artificial Sequence: Synthetic oligonucleotide
auuaacugacaaacccgcu

SEQ ID NO: 2739503 - RNA, 19 nt, Artificial Sequence
  Description of Artificial Sequence: Synthetic oligonucleotide
ucguuucagguggaugggc

SEQ ID NO: 2739504 - RNA, 19 nt, Artificial Sequence
  Description of Artificial Sequence: Synthetic oligonucleotide
cccggcuucacacagccgc

SEQ ID NO: 2739505 - RNA, 19 nt, Artificial Sequence
  Description of Artificial Sequence: Synthetic oligonucleotide
auccaaguggaaaaucaaa

SEQ ID NO: 2739506 - RNA, 19 nt, Artificial Sequence
  Description of Artificial Sequence: Synthetic oligonucleotide
acugacaaacccgcugaca

SEQ ID NO: 2739507 - RNA, 19 nt, Artificial Sequence
  Description of Artificial Sequence: Synthetic oligonucleotide
gggaaggccucguuucagg

SEQ ID NO: 2739508 - RNA, 19 nt, Artificial Sequence
  Description of Artificial Sequence: Synthetic oligonucleotide
cacacagccgcugccugcg

SEQ ID NO: 2739509 - RNA, 19 nt, Artificial Sequence
  Description of Artificial Sequence: Synthetic oligonucleotide
gguaaagcauuuggucggg

SEQ ID NO: 2739510 - RNA, 19 nt, Artificial Sequence
  Description of Artificial Sequence: Synthetic oligonucleotide
cacagucagcgccauggug

SEQ ID NO: 2739511 - RNA, 19 nt, Artificial Sequence
  Description of Artificial Sequence: Synthetic oligonucleotide
gaggucaguuuagucggug

SEQ ID NO: 2739512 - RNA, 19 nt, Artificial Sequence
  Description of Artificial Sequence: Synthetic oligonucleotide
auguugacugagcccggcu

SEQ ID NO: 2739513 - RNA, 19 nt, Artificial Sequence
  Description of Artificial Sequence: Synthetic oligonucleotide
uugacugagcccggcuuca

SEQ ID NO: 2739514 - RNA, 19 nt, Artificial Sequence
  Description of Artificial Sequence: Synthetic oligonucleotide
ccauccaaguggaaaauca

SEQ ID NO: 2739515 - RNA, 19 nt, Artificial Sequence
  Description of Artificial Sequence: Synthetic oligonucleotide
ucgguguggcaaauaugau

SEQ ID NO: 2739516 - RNA, 19 nt, Artificial Sequence
  Description of Artificial Sequence: Synthetic oligonucleotide
gcgaccgcccuagagaagg

SEQ ID NO: 2739517 - RNA, 19 nt, Artificial Sequence
  Description of Artificial Sequence: Synthetic oligonucleotide
ucagcgccauggugguccg

SEQ ID NO: 2739518 - RNA, 19 nt, Artificial Sequence
  Description of Artificial Sequence: Synthetic oligonucleotide
ggugcuucuguggaaacca

SEQ ID NO: 2739519 - RNA, 19 nt, Artificial Sequence
  Description of Artificial Sequence: Synthetic oligonucleotide
cugacaaacccgcugacau

SEQ ID NO: 2739520 - RNA, 19 nt, Artificial Sequence
  Description of Artificial Sequence: Synthetic oligonucleotide
acgccgucagccuucugga

SEQ ID NO: 2739521 - RNA, 19 nt, Artificial Sequence
  Description of Artificial Sequence: Synthetic oligonucleotide
uugugccacgaagaguccu

SEQ ID NO: 2739522 - RNA, 19 nt, Artificial Sequence
  Description of Artificial Sequence: Synthetic oligonucleotide
ccauguagagggcaaucag

SEQ ID NO: 2739523 - RNA, 19 nt, Artificial Sequence
  Description of Artificial Sequence: Synthetic oligonucleotide
caaaggcuaauucacuuau

SEQ ID NO: 2739524 - RNA, 19 nt, Artificial Sequence
  Description of Artificial Sequence: Synthetic oligonucleotide
aggcccaagcuccagccaa

SEQ ID NO: 2739525 - RNA, 19 nt, Artificial Sequence
  Description of Artificial Sequence: Synthetic oligonucleotide
aaaggcuaauucacuuauu

SEQ ID NO: 2739526 - RNA, 19 nt, Artificial Sequence
  Description of Artificial Sequence: Synthetic oligonucleotide
guagauggucccucccaca

SEQ ID NO: 2739527 - RNA, 19 nt, Artificial Sequence
  Description of Artificial Sequence: Synthetic oligonucleotide
ggcuuuaaccccugcggac

SEQ ID NO: 2739528 - RNA, 19 nt, Artificial Sequence
  Description of Artificial Sequence: Synthetic oligonucleotide
cagugucauuuccugcaac

SEQ ID NO: 2739529 - RNA, 19 nt, Artificial Sequence
  Description of Artificial Sequence: Synthetic oligonucleotide
cuucuggaagaauuucugu

SEQ ID NO: 2739530 - RNA, 19 nt, Artificial Sequence
  Description of Artificial Sequence: Synthetic oligonucleotide
uuuagucgguguggcaaau

SEQ ID NO: 2739531 - RNA, 19 nt, Artificial Sequence
  Description of Artificial Sequence: Synthetic oligonucleotide
agucgguguggcaaauaug

SEQ ID NO: 2739532 - RNA, 19 nt, Artificial Sequence
  Description of Artificial Sequence: Synthetic oligonucleotide
auguuacguagaccaucca

SEQ ID NO: 2739533 - RNA, 19 nt, Artificial Sequence
  Description of Artificial Sequence: Synthetic oligonucleotide
cccgcugacaucugacagg

SEQ ID NO: 2739534 - RNA, 19 nt, Artificial Sequence
  Description of Artificial Sequence: Synthetic oligonucleotide
gcucagugucauuuccugc

SEQ ID NO: 2739535 - RNA, 19 nt, Artificial Sequence
  Description of Artificial Sequence: Synthetic oligonucleotide
ggcaguagauggucccucc

SEQ ID NO: 2739536 - RNA, 19 nt, Artificial Sequence
  Description of Artificial Sequence: Synthetic oligonucleotide
cugcgugaagccgcuaaac

SEQ ID NO: 2739537 - RNA, 19 nt, Artificial Sequence
  Description of Artificial Sequence: Synthetic oligonucleotide
gcuaaacuuguaguacaug

SEQ ID NO: 2739538 - RNA, 19 nt, Artificial Sequence
  Description of Artificial Sequence: Synthetic oligonucleotide
ugguccgguaaagcauuug

SEQ ID NO: 2739539 - RNA, 19 nt, Artificial Sequence
  Description of Artificial Sequence: Synthetic oligonucleotide
ucuguagcucuggaacuuu

SEQ ID NO: 2739540 - RNA, 19 nt, Artificial Sequence
  Description of Artificial Sequence: Synthetic oligonucleotide
ugccacgaagaguccucca

SEQ ID NO: 2739541 - RNA, 19 nt, Artificial Sequence
  Description of Artificial Sequence: Synthetic oligonucleotide
cauuuccugcaacagugua

SEQ ID NO: 2739542 - RNA, 19 nt, Artificial Sequence
  Description of Artificial Sequence: Synthetic oligonucleotide
ugggcugggaagccaugua

SEQ ID NO: 2739543 - RNA, 19 nt, Artificial Sequence
  Description of Artificial Sequence: Synthetic oligonucleotide
gcuuccgaggcccaagcuc

SEQ ID NO: 2739544 - RNA, 19 nt, Artificial Sequence
  Description of Artificial Sequence: Synthetic oligonucleotide
acaggccaucugcauuuca

SEQ ID NO: 2739545 - RNA, 19 nt, Artificial Sequence
  Description of Artificial Sequence: Synthetic oligonucleotide
acacuggaggucaguuuag

SEQ ID NO: 2739546 - RNA, 19 nt, Artificial Sequence
  Description of Artificial Sequence: Synthetic oligonucleotide
acauguugacugagcccgg

SEQ ID NO: 2739547 - RNA, 19 nt, Artificial Sequence
  Description of Artificial Sequence: Synthetic oligonucleotide
augggcacgccgucagccu

SEQ ID NO: 2739548 - RNA, 19 nt, Artificial Sequence
  Description of Artificial Sequence: Synthetic oligonucleotide
gacugagcccggcuucaca

SEQ ID NO: 2739549 - RNA, 19 nt, Artificial Sequence
  Description of Artificial Sequence: Synthetic oligonucleotide
ggcaaucaggcaguagaug

SEQ ID NO: 2739550 - RNA, 19 nt, Artificial Sequence
  Description of Artificial Sequence: Synthetic oligonucleotide
gccgcuaaacuuguaguac

SEQ ID NO: 2739551 - RNA, 19 nt, Artificial Sequence
  Description of Artificial Sequence: Synthetic oligonucleotide
uuaaccccugcggacuaua

SEQ ID NO: 2739552 - RNA, 19 nt, Artificial Sequence
  Description of Artificial Sequence: Synthetic oligonucleotide
agcgccauggugguccggu

SEQ ID NO: 2739553 - RNA, 19 nt, Artificial Sequence
  Description of Artificial Sequence: Synthetic oligonucleotide
ugucacacuggaggucagu

SEQ ID NO: 2739554 - RNA, 19 nt, Artificial Sequence
  Description of Artificial Sequence: Synthetic oligonucleotide
caaacccgcugacaucuga

SEQ ID NO: 2739555 - RNA, 19 nt, Artificial Sequence
  Description of Artificial Sequence: Synthetic oligonucleotide
uuagucgguguggcaaaua

SEQ ID NO: 2739556 - RNA, 19 nt, Artificial Sequence
  Description of Artificial Sequence: Synthetic oligonucleotide
cugcggacuauaggcuucc

SEQ ID NO: 2739557 - RNA, 19 nt, Artificial Sequence
  Description of Artificial Sequence: Synthetic oligonucleotide
gcugucacacuggagguca

SEQ ID NO: 2739558 - RNA, 19 nt, Artificial Sequence
  Description of Artificial Sequence: Synthetic oligonucleotide
ugcugucacacuggagguc

SEQ ID NO: 2739559 - RNA, 19 nt, Artificial Sequence
  Description of Artificial Sequence: Synthetic oligonucleotide
ugaagccgcuaaacuugua

SEQ ID NO: 2739560 - RNA, 19 nt, Artificial Sequence
  Description of Artificial Sequence: Synthetic oligonucleotide
uuccgaggcccaagcucca

SEQ ID NO: 2739561 - RNA, 19 nt, Artificial Sequence
  Description of Artificial Sequence: Synthetic oligonucleotide
caaaggguuugugccacga

SEQ ID NO: 2739562 - RNA, 19 nt, Artificial Sequence
  Description of Artificial Sequence: Synthetic oligonucleotide
caucugcauuucacaaaca

SEQ ID NO: 2739563 - RNA, 19 nt, Artificial Sequence
  Description of Artificial Sequence: Synthetic oligonucleotide
guguucuuaucuuuuccuu

SEQ ID NO: 2739564 - RNA, 19 nt, Artificial Sequence
  Description of Artificial Sequence: Synthetic oligonucleotide
ugcggacuauaggcuuccg

SEQ ID NO: 2739565 - RNA, 19 nt, Artificial Sequence
  Description of Artificial Sequence: Synthetic oligonucleotide
ggcuucacacagccgcugc

SEQ ID NO: 2739566 - RNA, 19 nt, Artificial Sequence
  Description of Artificial Sequence: Synthetic oligonucleotide
ggccaucugcauuucacaa

SEQ ID NO: 2739567 - RNA, 19 nt, Artificial Sequence
  Description of Artificial Sequence: Synthetic oligonucleotide
uuuaaccccugcggacuau

SEQ ID NO: 2739568 - RNA, 19 nt, Artificial Sequence
  Description of Artificial Sequence: Synthetic oligonucleotide
agccgcugccugcgcgacc

SEQ ID NO: 2739569 - RNA, 19 nt, Artificial Sequence
  Description of Artificial Sequence: Synthetic oligonucleotide
ccgcugacaucugacaggc

SEQ ID NO: 2739570 - RNA, 19 nt, Artificial Sequence
  Description of Artificial Sequence: Synthetic oligonucleotide
ucagguggaugggcacgcc

SEQ ID NO: 2739571 - RNA, 19 nt, Artificial Sequence
  Description of Artificial Sequence: Synthetic oligonucleotide
ugggcacgccgucagccuu

SEQ ID NO: 2739572 - RNA, 19 nt, Artificial Sequence
  Description of Artificial Sequence: Synthetic oligonucleotide
cugcgcgaccgcccuagag

SEQ ID NO: 2739573 - RNA, 19 nt, Artificial Sequence
  Description of Artificial Sequence: Synthetic oligonucleotide
cuccaaaggcuaauucacu

SEQ ID NO: 2739574 - RNA, 19 nt, Artificial Sequence
  Description of Artificial Sequence: Synthetic oligonucleotide
ggaaaccacuggcuuuaac

SEQ ID NO: 2739575 - RNA, 19 nt, Artificial Sequence
  Description of Artificial Sequence: Synthetic oligonucleotide
cugcaacaguguauuaacu

SEQ ID NO: 2739576 - RNA, 19 nt, Artificial Sequence
  Description of Artificial Sequence: Synthetic oligonucleotide
acuucugcgugaagccgcu

SEQ ID NO: 2739577 - RNA, 19 nt, Artificial Sequence
  Description of Artificial Sequence: Synthetic oligonucleotide
uccgaggcccaagcuccag

SEQ ID NO: 2739578 - RNA, 19 nt, Artificial Sequence
  Description of Artificial Sequence: Synthetic oligonucleotide
caguuuagucgguguggca

SEQ ID NO: 2739579 - RNA, 19 nt, Artificial Sequence
  Description of Artificial Sequence: Synthetic oligonucleotide
ggaagccauguagagggca

SEQ ID NO: 2739580 - RNA, 19 nt, Artificial Sequence
  Description of Artificial Sequence: Synthetic oligonucleotide
gaccgcccuagagaaggac

SEQ ID NO: 2739581 - RNA, 19 nt, Artificial Sequence
  Description of Artificial Sequence: Synthetic oligonucleotide
ccgcuaaacuuguaguaca

SEQ ID NO: 2739582 - RNA, 19 nt, Artificial Sequence
  Description of Artificial Sequence: Synthetic oligonucleotide
cuuuaaccccugcggacua

SEQ ID NO: 2739583 - RNA, 19 nt, Artificial Sequence
  Description of Artificial Sequence: Synthetic oligonucleotide
gccgcugccugcgcgaccg

SEQ ID NO: 2739584 - RNA, 19 nt, Artificial Sequence
  Description of Artificial Sequence: Synthetic oligonucleotide
ggaaaaucaaaggguuugu

SEQ ID NO: 2739585 - RNA, 19 nt, Artificial Sequence
  Description of Artificial Sequence: Synthetic oligonucleotide
uuggucgggaaggccucgu

SEQ ID NO: 2739586 - RNA, 19 nt, Artificial Sequence
  Description of Artificial Sequence: Synthetic oligonucleotide
gcauuuggucgggaaggcc

SEQ ID NO: 2739587 - RNA, 19 nt, Artificial Sequence
  Description of Artificial Sequence: Synthetic oligonucleotide
ccaaaggcuaauucacuua

SEQ ID NO: 2739588 - RNA, 19 nt, Artificial Sequence
  Description of Artificial Sequence: Synthetic oligonucleotide
gccacgaagaguccuccaa

SEQ ID NO: 2739589 - RNA, 19 nt, Artificial Sequence
  Description of Artificial Sequence: Synthetic oligonucleotide
ccugcggacuauaggcuuc

SEQ ID NO: 2739590 - RNA, 19 nt, Artificial Sequence
  Description of Artificial Sequence: Synthetic oligonucleotide
uggucgggaaggccucguu

SEQ ID NO: 2739591 - RNA, 19 nt, Artificial Sequence
  Description of Artificial Sequence: Synthetic oligonucleotide
cugacaucugacaggccau

SEQ ID NO: 2739592 - RNA, 19 nt, Artificial Sequence
  Description of Artificial Sequence: Synthetic oligonucleotide
cugagcccggcuucacaca

SEQ ID NO: 2739593 - RNA, 19 nt, Artificial Sequence
  Description of Artificial Sequence: Synthetic oligonucleotide
cguagaccauccaagugga

SEQ ID NO: 2739594 - RNA, 19 nt, Artificial Sequence
  Description of Artificial Sequence: Synthetic oligonucleotide
guccgguaaagcauuuggu

SEQ ID NO: 2739595 - RNA, 19 nt, Artificial Sequence
  Description of Artificial Sequence: Synthetic oligonucleotide
cccagcauagucauaugcu

SEQ ID NO: 2739596 - RNA, 19 nt, Artificial Sequence
  Description of Artificial Sequence: Synthetic oligonucleotide
gguggaugggcacgccguc

SEQ ID NO: 2739597 - RNA, 19 nt, Artificial Sequence
  Description of Artificial Sequence: Synthetic oligonucleotide
cuguggaaaccacuggcuu

SEQ ID NO: 2739598 - RNA, 19 nt, Artificial Sequence
  Description of Artificial Sequence: Synthetic oligonucleotide
gacaggccaucugcauuuc

SEQ ID NO: 2739599 - RNA, 19 nt, Artificial Sequence
  Description of Artificial Sequence: Synthetic oligonucleotide
ccagccaacuucugcguga

SEQ ID NO: 2739600 - RNA, 19 nt, Artificial Sequence
  Description of Artificial Sequence: Synthetic oligonucleotide
gcggacuauaggcuuccga

SEQ ID NO: 2739601 - RNA, 19 nt, Artificial Sequence
  Description of Artificial Sequence: Synthetic oligonucleotide
acaaacccgcugacaucug

SEQ ID NO: 2739602 - RNA, 19 nt, Artificial Sequence
  Description of Artificial Sequence: Synthetic oligonucleotide
ucccucccacagucagcgc

SEQ ID NO: 2739603 - RNA, 19 nt, Artificial Sequence
  Description of Artificial Sequence: Synthetic oligonucleotide
gagcccggcuucacacagc

SEQ ID NO: 2739604 - RNA, 19 nt, Artificial Sequence
  Description of Artificial Sequence: Synthetic oligonucleotide
guggaugggcacgccguca

SEQ ID NO: 2739605 - RNA, 19 nt, Artificial Sequence
  Description of Artificial Sequence: Synthetic oligonucleotide
gaccauccaaguggaaaau

SEQ ID NO: 2739606 - RNA, 19 nt, Artificial Sequence
  Description of Artificial Sequence: Synthetic oligonucleotide
guggaaaaucaaaggguuu

SEQ ID NO: 2739607 - RNA, 19 nt, Artificial Sequence
  Description of Artificial Sequence: Synthetic oligonucleotide
cguuucagguggaugggca

SEQ ID NO: 2739608 - RNA, 19 nt, Artificial Sequence
  Description of Artificial Sequence: Synthetic oligonucleotide
caaagcgcuuguguucuua

SEQ ID NO: 2739609 - RNA, 19 nt, Artificial Sequence
  Description of Artificial Sequence: Synthetic oligonucleotide
gcuuuaaccccugcggacu

SEQ ID NO: 2739610 - RNA, 19 nt, Artificial Sequence
  Description of Artificial Sequence: Synthetic oligonucleotide
ccgucagccuucuggaaga

SEQ ID NO: 2739611 - RNA, 19 nt, Artificial Sequence
  Description of Artificial Sequence: Synthetic oligonucleotide
gccucguuucagguggaug

SEQ ID NO: 2739612 - RNA, 19 nt, Artificial Sequence
  Description of Artificial Sequence: Synthetic oligonucleotide
cugacaggccaucugcauu

SEQ ID NO: 2739613 - RNA, 19 nt, Artificial Sequence
  Description of Artificial Sequence: Synthetic oligonucleotide
ggggugcuucuguggaaac

SEQ ID NO: 2739614 - RNA, 19 nt, Artificial Sequence
  Description of Artificial Sequence: Synthetic oligonucleotide
gugaagccgcuaaacuugu

SEQ ID NO: 2739615 - RNA, 19 nt, Artificial Sequence
  Description of Artificial Sequence: Synthetic oligonucleotide
gccauggugguccgguaaa

SEQ ID NO: 2739616 - RNA, 19 nt, Artificial Sequence
  Description of Artificial Sequence: Synthetic oligonucleotide
gcgugaagccgcuaaacuu

SEQ ID NO: 2739617 - RNA, 19 nt, Artificial Sequence
  Description of Artificial Sequence: Synthetic oligonucleotide
gguuugugccacgaagagu

SEQ ID NO: 2739618 - RNA, 19 nt, Artificial Sequence
  Description of Artificial Sequence: Synthetic oligonucleotide
cuccagccaacuucugcgu

SEQ ID NO: 2739619 - RNA, 19 nt, Artificial Sequence
  Description of Artificial Sequence: Synthetic oligonucleotide
ccauggugguccgguaaag

SEQ ID NO: 2739620 - RNA, 19 nt, Artificial Sequence
  Description of Artificial Sequence: Synthetic oligonucleotide
gaguccuccaaaggcuaau

SEQ ID NO: 2739621 - RNA, 19 nt, Artificial Sequence
  Description of Artificial Sequence: Synthetic oligonucleotide
cagucagcgccaugguggu

SEQ ID NO: 2739622 - RNA, 19 nt, Artificial Sequence
  Description of Artificial Sequence: Synthetic oligonucleotide
auggucccucccacaguca

SEQ ID NO: 2739623 - RNA, 19 nt, Artificial Sequence
  Description of Artificial Sequence: Synthetic oligonucleotide
cagccuucuggaagaauuu

SEQ ID NO: 2739624 - RNA, 19 nt, Artificial Sequence
  Description of Artificial Sequence: Synthetic oligonucleotide
ggucccucccacagucagc

SEQ ID NO: 2739625 - RNA, 19 nt, Artificial Sequence
  Description of Artificial Sequence: Synthetic oligonucleotide
agagggcaaucaggcagua

SEQ ID NO: 2739626 - RNA, 19 nt, Artificial Sequence
  Description of Artificial Sequence: Synthetic oligonucleotide
ccgaggcccaagcuccagc

SEQ ID NO: 2739627 - RNA, 19 nt, Artificial Sequence
  Description of Artificial Sequence: Synthetic oligonucleotide
gcugccugcgcgaccgccc

SEQ ID NO: 2739628 - RNA, 19 nt, Artificial Sequence
  Description of Artificial Sequence: Synthetic oligonucleotide
cagccaacuucugcgugaa

SEQ ID NO: 2739629 - RNA, 19 nt, Artificial Sequence
  Description of Artificial Sequence: Synthetic oligonucleotide
ccacgaagaguccuccaaa

SEQ ID NO: 2739630 - RNA, 19 nt, Artificial Sequence
  Description of Artificial Sequence: Synthetic oligonucleotide
gggaagccauguagagggc

SEQ ID NO: 2739631 - RNA, 19 nt, Artificial Sequence
  Description of Artificial Sequence: Synthetic oligonucleotide
guagaccauccaaguggaa

SEQ ID NO: 2739632 - RNA, 19 nt, Artificial Sequence
  Description of Artificial Sequence: Synthetic oligonucleotide
gccugcgcgaccgcccuag

SEQ ID NO: 2739633 - RNA, 19 nt, Artificial Sequence
  Description of Artificial Sequence: Synthetic oligonucleotide
ggugguccgguaaagcauu

SEQ ID NO: 2739634 - RNA, 19 nt, Artificial Sequence
  Description of Artificial Sequence: Synthetic oligonucleotide
cacuggaggucaguuuagu

SEQ ID NO: 2739635 - RNA, 19 nt, Artificial Sequence
  Description of Artificial Sequence: Synthetic oligonucleotide
ggcccaagcuccagccaac

SEQ ID NO: 2739636 - RNA, 19 nt, Artificial Sequence
  Description of Artificial Sequence: Synthetic oligonucleotide
ggucgggaaggccucguuu

SEQ ID NO: 2739637 - RNA, 19 nt, Artificial Sequence
  Description of Artificial Sequence: Synthetic oligonucleotide
ugccugcgcgaccgcccua

SEQ ID NO: 2739638 - RNA, 19 nt, Artificial Sequence
  Description of Artificial Sequence: Synthetic oligonucleotide
aggccucguuucaggugga

SEQ ID NO: 2739639 - RNA, 19 nt, Artificial Sequence
  Description of Artificial Sequence: Synthetic oligonucleotide
gggcaaucaggcaguagau

SEQ ID NO: 2739640 - RNA, 19 nt, Artificial Sequence
  Description of Artificial Sequence: Synthetic oligonucleotide
cagcgccauggugguccgg

SEQ ID NO: 2739641 - RNA, 19 nt, Artificial Sequence
  Description of Artificial Sequence: Synthetic oligonucleotide
ggcuuccgaggcccaagcu

SEQ ID NO: 2739642 - RNA, 19 nt, Artificial Sequence
  Description of Artificial Sequence: Synthetic oligonucleotide
gucagccuucuggaagaau

SEQ ID NO: 2739643 - RNA, 19 nt, Artificial Sequence
  Description of Artificial Sequence: Synthetic oligonucleotide
cugccugcgcgaccgcccu

SEQ ID NO: 2739644 - RNA, 19 nt, Artificial Sequence
  Description of Artificial Sequence: Synthetic oligonucleotide
gggcacgccgucagccuuc

SEQ ID NO: 2739645 - RNA, 19 nt, Artificial Sequence
  Description of Artificial Sequence: Synthetic oligonucleotide
cgcuaaacuuguaguacau

SEQ ID NO: 2739646 - RNA, 19 nt, Artificial Sequence
  Description of Artificial Sequence: Synthetic oligonucleotide
gcccggcuucacacagccg

SEQ ID NO: 2739647 - RNA, 19 nt, Artificial Sequence
  Description of Artificial Sequence: Synthetic oligonucleotide
ggaggucaguuuagucggu

SEQ ID NO: 2739648 - RNA, 19 nt, Artificial Sequence
  Description of Artificial Sequence: Synthetic oligonucleotide
cgcgaccgcccuagagaag

SEQ ID NO: 2739649 - RNA, 19 nt, Artificial Sequence
  Description of Artificial Sequence: Synthetic oligonucleotide
ccccugcggacuauaggcu

SEQ ID NO: 2739650 - RNA, 19 nt, Artificial Sequence
  Description of Artificial Sequence: Synthetic oligonucleotide
gugguccgguaaagcauuu

SEQ ID NO: 2739651 - RNA, 19 nt, Artificial Sequence
  Description of Artificial Sequence: Synthetic oligonucleotide
cuucugcgugaagccgcua

SEQ ID NO: 2739652 - RNA, 19 nt, Artificial Sequence
  Description of Artificial Sequence: Synthetic oligonucleotide
cggcuucacacagccgcug

SEQ ID NO: 2739653 - RNA, 19 nt, Artificial Sequence
  Description of Artificial Sequence: Synthetic oligonucleotide
cccugcggacuauaggcuu

SEQ ID NO: 2739654 - RNA, 19 nt, Artificial Sequence
  Description of Artificial Sequence: Synthetic oligonucleotide
ccggcuucacacagccgcu

SEQ ID NO: 2739655 - RNA, 19 nt, Artificial Sequence
  Description of Artificial Sequence: Synthetic oligonucleotide
gcgccauggugguccggua

SEQ ID NO: 2739656 - RNA, 19 nt, Artificial Sequence
  Description of Artificial Sequence: Synthetic oligonucleotide
gcacgccgucagccuucug

SEQ ID NO: 2739657 - RNA, 19 nt, Artificial Sequence
  Description of Artificial Sequence: Synthetic oligonucleotide
cgaccgcccuagagaagga

SEQ ID NO: 2739658 - RNA, 19 nt, Artificial Sequence
  Description of Artificial Sequence: Synthetic oligonucleotide
cucccacagucagcgccau

SEQ ID NO: 2739659 - RNA, 19 nt, Artificial Sequence
  Description of Artificial Sequence: Synthetic oligonucleotide
ggcacgccgucagccuucu

SEQ ID NO: 2739660 - RNA, 19 nt, Artificial Sequence
  Description of Artificial Sequence: Synthetic oligonucleotide
ccugcgcgaccgcccuaga

SEQ ID NO: 2739661 - RNA, 19 nt, Artificial Sequence
  Description of Artificial Sequence: Synthetic oligonucleotide
ggccucguuucagguggau

SEQ ID NO: 2739662 - RNA, 19 nt, Artificial Sequence
  Description of Artificial Sequence: Synthetic oligonucleotide
aauuuagugcucuucaucc

SEQ ID NO: 2739663 - RNA, 19 nt, Artificial Sequence
  Description of Artificial Sequence: Synthetic oligonucleotide
aauucuugaauauccagca

SEQ ID NO: 2739664 - RNA, 19 nt, Artificial Sequence
  Description of Artificial Sequence: Synthetic oligonucleotide
uuaucaaugguccaggggu

SEQ ID NO: 2739665 - RNA, 19 nt, Artificial Sequence
  Description of Artificial Sequence: Synthetic oligonucleotide
auauauugcaaccaaccgg

SEQ ID NO: 2739666 - RNA, 19 nt, Artificial Sequence
  Description of Artificial Sequence: Synthetic oligonucleotide
ugaauauccagcaaucuca

SEQ ID NO: 2739667 - RNA, 19 nt, Artificial Sequence
  Description of Artificial Sequence: Synthetic oligonucleotide
aucaguaucagucuaaccu

SEQ ID NO: 2739668 - RNA, 19 nt, Artificial Sequence
  Description of Artificial Sequence: Synthetic oligonucleotide
gauauauugcaaccaaccg

SEQ ID NO: 2739669 - RNA, 19 nt, Artificial Sequence
  Description of Artificial Sequence: Synthetic oligonucleotide
uauauugcaaccaaccggu

SEQ ID NO: 2739670 - RNA, 19 nt, Artificial Sequence
  Description of Artificial Sequence: Synthetic oligonucleotide
aucagucuaaccuagcagg

SEQ ID NO: 2739671 - RNA, 19 nt, Artificial Sequence
  Description of Artificial Sequence: Synthetic oligonucleotide
ugcuaauucuugaauaucc

SEQ ID NO: 2739672 - RNA, 19 nt, Artificial Sequence
  Description of Artificial Sequence: Synthetic oligonucleotide
uuugaaaagagccucucga

SEQ ID NO: 2739673 - RNA, 19 nt, Artificial Sequence
  Description of Artificial Sequence: Synthetic oligonucleotide
augggaagcacuuugagug

SEQ ID NO: 2739674 - RNA, 19 nt, Artificial Sequence
  Description of Artificial Sequence: Synthetic oligonucleotide
agccuuaucuuucauuucc

SEQ ID NO: 2739675 - RNA, 19 nt, Artificial Sequence
  Description of Artificial Sequence: Synthetic oligonucleotide
uuaacuuugaaaagagccu

SEQ ID NO: 2739676 - RNA, 19 nt, Artificial Sequence
  Description of Artificial Sequence: Synthetic oligonucleotide
uaagauuugcuaauucuug

SEQ ID NO: 2739677 - RNA, 19 nt, Artificial Sequence
  Description of Artificial Sequence: Synthetic oligonucleotide
aagaauuuagugcucuuca

SEQ ID NO: 2739678 - RNA, 19 nt, Artificial Sequence
  Description of Artificial Sequence: Synthetic oligonucleotide
uucauuuccuuuaacuuug

SEQ ID NO: 2739679 - RNA, 19 nt, Artificial Sequence
  Description of Artificial Sequence: Synthetic oligonucleotide
auauccagcaaucucagca

SEQ ID NO: 2739680 - RNA, 19 nt, Artificial Sequence
  Description of Artificial Sequence: Synthetic oligonucleotide
acaauaauggcaaucuugg

SEQ ID NO: 2739681 - RNA, 19 nt, Artificial Sequence
  Description of Artificial Sequence: Synthetic oligonucleotide
aaggccuucgaucucaucu

SEQ ID NO: 2739682 - RNA, 19 nt, Artificial Sequence
  Description of Artificial Sequence: Synthetic oligonucleotide
uacuuguuaucaauggucc

SEQ ID NO: 2739683 - RNA, 19 nt, Artificial Sequence
  Description of Artificial Sequence: Synthetic oligonucleotide
aagcguagcagccuuaucu

SEQ ID NO: 2739684 - RNA, 19 nt, Artificial Sequence
  Description of Artificial Sequence: Synthetic oligonucleotide
uuugagugcacagugcugg

SEQ ID NO: 2739685 - RNA, 19 nt, Artificial Sequence
  Description of Artificial Sequence: Synthetic oligonucleotide
aucuuggcggagcagaacc

SEQ ID NO: 2739686 - RNA, 19 nt, Artificial Sequence
  Description of Artificial Sequence: Synthetic oligonucleotide
ugaaaagagccucucgaag

SEQ ID NO: 2739687 - RNA, 19 nt, Artificial Sequence
  Description of Artificial Sequence: Synthetic oligonucleotide
gugacuaggaacuugcuug

SEQ ID NO: 2739688 - RNA, 19 nt, Artificial Sequence
  Description of Artificial Sequence: Synthetic oligonucleotide
aaucucagcagugacuagg

SEQ ID NO: 2739689 - RNA, 19 nt, Artificial Sequence
  Description of Artificial Sequence: Synthetic oligonucleotide
aaaguggcggagcagcuag

SEQ ID NO: 2739690 - RNA, 19 nt, Artificial Sequence
  Description of Artificial Sequence: Synthetic oligonucleotide
auugcaaccaaccggucuc

SEQ ID NO: 2739691 - RNA, 19 nt, Artificial Sequence
  Description of Artificial Sequence: Synthetic oligonucleotide
ugaauaguacuuguuauca

SEQ ID NO: 2739692 - RNA, 19 nt, Artificial Sequence
  Description of Artificial Sequence: Synthetic oligonucleotide
uaaccuagcaggaagaauu

SEQ ID NO: 2739693 - RNA, 19 nt, Artificial Sequence
  Description of Artificial Sequence: Synthetic oligonucleotide
agggguaaaaccucacggc

SEQ ID NO: 2739694 - RNA, 19 nt, Artificial Sequence
  Description of Artificial Sequence: Synthetic oligonucleotide
aaccucacggcaucggugg

SEQ ID NO: 2739695 - RNA, 19 nt, Artificial Sequence
  Description of Artificial Sequence: Synthetic oligonucleotide
aguucuccagaucuccucc

SEQ ID NO: 2739696 - RNA, 19 nt, Artificial Sequence
  Description of Artificial Sequence: Synthetic oligonucleotide
ugagaugggaagcacuuug

SEQ ID NO: 2739697 - RNA, 19 nt, Artificial Sequence
  Description of Artificial Sequence: Synthetic oligonucleotide
cuuucuuugcucaugagga

SEQ ID NO: 2739698 - RNA, 19 nt, Artificial Sequence
  Description of Artificial Sequence: Synthetic oligonucleotide
cacaauaauggcaaucuug

SEQ ID NO: 2739699 - RNA, 19 nt, Artificial Sequence
  Description of Artificial Sequence: Synthetic oligonucleotide
cuaauucuugaauauccag

SEQ ID NO: 2739700 - RNA, 19 nt, Artificial Sequence
  Description of Artificial Sequence: Synthetic oligonucleotide
uucuugaauauccagcaau

SEQ ID NO: 2739701 - RNA, 19 nt, Artificial Sequence
  Description of Artificial Sequence: Synthetic oligonucleotide
uguuccgaggauauauugc

SEQ ID NO: 2739702 - RNA, 19 nt, Artificial Sequence
  Description of Artificial Sequence: Synthetic oligonucleotide
gcagcuagugaccagagcg

SEQ ID NO: 2739703 - RNA, 19 nt, Artificial Sequence
  Description of Artificial Sequence: Synthetic oligonucleotide
uugaauauccagcaaucuc

SEQ ID NO: 2739704 - RNA, 19 nt, Artificial Sequence
  Description of Artificial Sequence: Synthetic oligonucleotide
agucuaaccuagcaggaag

SEQ ID NO: 2739705 - RNA, 19 nt, Artificial Sequence
  Description of Artificial Sequence: Synthetic oligonucleotide
auugaucucugcugaauag

SEQ ID NO: 2739706 - RNA, 19 nt, Artificial Sequence
  Description of Artificial Sequence: Synthetic oligonucleotide
aaguucuccagaucuccuc

SEQ ID NO: 2739707 - RNA, 19 nt, Artificial Sequence
  Description of Artificial Sequence: Synthetic oligonucleotide
ucuugaauauccagcaauc

SEQ ID NO: 2739708 - RNA, 19 nt, Artificial Sequence
  Description of Artificial Sequence: Synthetic oligonucleotide
uuuagugcucuucauccga

SEQ ID NO: 2739709 - RNA, 19 nt, Artificial Sequence
  Description of Artificial Sequence: Synthetic oligonucleotide
uggcaccacacacagauug

SEQ ID NO: 2739710 - RNA, 19 nt, Artificial Sequence
  Description of Artificial Sequence: Synthetic oligonucleotide
ucugucuccuccuauugcc

SEQ ID NO: 2739711 - RNA, 19 nt, Artificial Sequence
  Description of Artificial Sequence: Synthetic oligonucleotide
uaacuuucuuugcucauga

SEQ ID NO: 2739712 - RNA, 19 nt, Artificial Sequence
  Description of Artificial Sequence: Synthetic oligonucleotide
ugacuaggaacuugcuugg

SEQ ID NO: 2739713 - RNA, 19 nt, Artificial Sequence
  Description of Artificial Sequence: Synthetic oligonucleotide
caugaggaagcguagcagc

SEQ ID NO: 2739714 - RNA, 19 nt, Artificial Sequence
  Description of Artificial Sequence: Synthetic oligonucleotide
auuugcuaauucuugaaua

SEQ ID NO: 2739715 - RNA, 19 nt, Artificial Sequence
  Description of Artificial Sequence: Synthetic oligonucleotide
cuuuaacuuugaaaagagc

SEQ ID NO: 2739716 - RNA, 19 nt, Artificial Sequence
  Description of Artificial Sequence: Synthetic oligonucleotide
auuuagugcucuucauccg

SEQ ID NO: 2739717 - RNA, 19 nt, Artificial Sequence
  Description of Artificial Sequence: Synthetic oligonucleotide
gaauuuagugcucuucauc

SEQ ID NO: 2739718 - RNA, 19 nt, Artificial Sequence
  Description of Artificial Sequence: Synthetic oligonucleotide
aaugguccagggguaaaac

SEQ ID NO: 2739719 - RNA, 19 nt, Artificial Sequence
  Description of Artificial Sequence: Synthetic oligonucleotide
cagaaccugguugagaugg

SEQ ID NO: 2739720 - RNA, 19 nt, Artificial Sequence
  Description of Artificial Sequence: Synthetic oligonucleotide
acagauugaucucugcuga

SEQ ID NO: 2739721 - RNA, 19 nt, Artificial Sequence
  Description of Artificial Sequence: Synthetic oligonucleotide
cagggguaaaaccucacgg

SEQ ID NO: 2739722 - RNA, 19 nt, Artificial Sequence
  Description of Artificial Sequence: Synthetic oligonucleotide
uguuaucaaugguccaggg

SEQ ID NO: 2739723 - RNA, 19 nt, Artificial Sequence
  Description of Artificial Sequence: Synthetic oligonucleotide
aguacuuguuaucaauggu

SEQ ID NO: 2739724 - RNA, 19 nt, Artificial Sequence
  Description of Artificial Sequence: Synthetic oligonucleotide
uauugcaaccaaccggucu

SEQ ID NO: 2739725 - RNA, 19 nt, Artificial Sequence
  Description of Artificial Sequence: Synthetic oligonucleotide
uucauccgaagaaaggccu

SEQ ID NO: 2739726 - RNA, 19 nt, Artificial Sequence
  Description of Artificial Sequence: Synthetic oligonucleotide
cuuguuaucaaugguccag

SEQ ID NO: 2739727 - RNA, 19 nt, Artificial Sequence
  Description of Artificial Sequence: Synthetic oligonucleotide
cuuugaaaagagccucucg

SEQ ID NO: 2739728 - RNA, 19 nt, Artificial Sequence
  Description of Artificial Sequence: Synthetic oligonucleotide
acuuugagugcacagugcu

SEQ ID NO: 2739729 - RNA, 19 nt, Artificial Sequence
  Description of Artificial Sequence: Synthetic oligonucleotide
ugcugaauaguacuuguua

SEQ ID NO: 2739730 - RNA, 19 nt, Artificial Sequence
  Description of Artificial Sequence: Synthetic oligonucleotide
uaccuuuucugcauguaac

SEQ ID NO: 2739731 - RNA, 19 nt, Artificial Sequence
  Description of Artificial Sequence: Synthetic oligonucleotide
cuugcuuggcaccacacac

SEQ ID NO: 2739732 - RNA, 19 nt, Artificial Sequence
  Description of Artificial Sequence: Synthetic oligonucleotide
gaagaaaggccuucgaucu

SEQ ID NO: 2739733 - RNA, 19 nt, Artificial Sequence
  Description of Artificial Sequence: Synthetic oligonucleotide
aaaaccucacggcaucggu

SEQ ID NO: 2739734 - RNA, 19 nt, Artificial Sequence
  Description of Artificial Sequence: Synthetic oligonucleotide
cucagcagugacuaggaac

SEQ ID NO: 2739735 - RNA, 19 nt, Artificial Sequence
  Description of Artificial Sequence: Synthetic oligonucleotide
aucucugcugaauaguacu

SEQ ID NO: 2739736 - RNA, 19 nt, Artificial Sequence
  Description of Artificial Sequence: Synthetic oligonucleotide
uuguuaucaaugguccagg

SEQ ID NO: 2739737 - RNA, 19 nt, Artificial Sequence
  Description of Artificial Sequence: Synthetic oligonucleotide
cuaggaacuugcuuggcac

SEQ ID NO: 2739738 - RNA, 19 nt, Artificial Sequence
  Description of Artificial Sequence: Synthetic oligonucleotide
uccuccagugguaagauuu

SEQ ID NO: 2739739 - RNA, 19 nt, Artificial Sequence
  Description of Artificial Sequence: Synthetic oligonucleotide
uuuggcuaccuuuucugca

SEQ ID NO: 2739740 - RNA, 19 nt, Artificial Sequence
  Description of Artificial Sequence: Synthetic oligonucleotide
cucuucauccgaagaaagg

SEQ ID NO: 2739741 - RNA, 19 nt, Artificial Sequence
  Description of Artificial Sequence: Synthetic oligonucleotide
ucugcugaauaguacuugu

SEQ ID NO: 2739742 - RNA, 19 nt, Artificial Sequence
  Description of Artificial Sequence: Synthetic oligonucleotide
agcaguuccgagccggcgc

SEQ ID NO: 2739743 - RNA, 19 nt, Artificial Sequence
  Description of Artificial Sequence: Synthetic oligonucleotide
cacagauugaucucugcug

SEQ ID NO: 2739744 - RNA, 19 nt, Artificial Sequence
  Description of Artificial Sequence: Synthetic oligonucleotide
agcaucuucuguuccgagg

SEQ ID NO: 2739745 - RNA, 19 nt, Artificial Sequence
  Description of Artificial Sequence: Synthetic oligonucleotide
aagcacuuugagugcacag

SEQ ID NO: 2739746 - RNA, 19 nt, Artificial Sequence
  Description of Artificial Sequence: Synthetic oligonucleotide
ucaguaucagucuaaccua

SEQ ID NO: 2739747 - RNA, 19 nt, Artificial Sequence
  Description of Artificial Sequence: Synthetic oligonucleotide
agcacaauaauggcaaucu

SEQ ID NO: 2739748 - RNA, 19 nt, Artificial Sequence
  Description of Artificial Sequence: Synthetic oligonucleotide
cauguaacuuucuuugcuc

SEQ ID NO: 2739749 - RNA, 19 nt, Artificial Sequence
  Description of Artificial Sequence: Synthetic oligonucleotide
uucuuugcucaugaggaag

SEQ ID NO: 2739750 - RNA, 19 nt, Artificial Sequence
  Description of Artificial Sequence: Synthetic oligonucleotide
ucagucuaaccuagcagga

SEQ ID NO: 2739751 - RNA, 19 nt, Artificial Sequence
  Description of Artificial Sequence: Synthetic oligonucleotide
ggauauauugcaaccaacc

SEQ ID NO: 2739752 - RNA, 19 nt, Artificial Sequence
  Description of Artificial Sequence: Synthetic oligonucleotide
aagaaaggccuucgaucuc

SEQ ID NO: 2739753 - RNA, 19 nt, Artificial Sequence
  Description of Artificial Sequence: Synthetic oligonucleotide
agugguaagauuugcuaau

SEQ ID NO: 2739754 - RNA, 19 nt, Artificial Sequence
  Description of Artificial Sequence: Synthetic oligonucleotide
cugaauaguacuuguuauc

SEQ ID NO: 2739755 - RNA, 19 nt, Artificial Sequence
  Description of Artificial Sequence: Synthetic oligonucleotide
uccgaggauauauugcaac

SEQ ID NO: 2739756 - RNA, 19 nt, Artificial Sequence
  Description of Artificial Sequence: Synthetic oligonucleotide
ucugcauguaacuuucuuu

SEQ ID NO: 2739757 - RNA, 19 nt, Artificial Sequence
  Description of Artificial Sequence: Synthetic oligonucleotide
uugcucaugaggaagcgua

SEQ ID NO: 2739758 - RNA, 19 nt, Artificial Sequence
  Description of Artificial Sequence: Synthetic oligonucleotide
uugaaaagagccucucgaa

SEQ ID NO: 2739759 - RNA, 19 nt, Artificial Sequence
  Description of Artificial Sequence: Synthetic oligonucleotide
auaguacuuguuaucaaug

SEQ ID NO: 2739760 - RNA, 19 nt, Artificial Sequence
  Description of Artificial Sequence: Synthetic oligonucleotide
agaugggaagcacuuugag

SEQ ID NO: 2739761 - RNA, 19 nt, Artificial Sequence
  Description of Artificial Sequence: Synthetic oligonucleotide
acacagauugaucucugcu

SEQ ID NO: 2739762 - RNA, 19 nt, Artificial Sequence
  Description of Artificial Sequence: Synthetic oligonucleotide
gaaaagagccucucgaagu

SEQ ID NO: 2739763 - RNA, 19 nt, Artificial Sequence
  Description of Artificial Sequence: Synthetic oligonucleotide
acaucgcuucuacaacagc

SEQ ID NO: 2739764 - RNA, 19 nt, Artificial Sequence
  Description of Artificial Sequence: Synthetic oligonucleotide
guuccgaggauauauugca

SEQ ID NO: 2739765 - RNA, 19 nt, Artificial Sequence
  Description of Artificial Sequence: Synthetic oligonucleotide
ugcauguaacuuucuuugc

SEQ ID NO: 2739766 - RNA, 19 nt, Artificial Sequence
  Description of Artificial Sequence: Synthetic oligonucleotide
aacuuucuuugcucaugag

SEQ ID NO: 2739767 - RNA, 19 nt, Artificial Sequence
  Description of Artificial Sequence: Synthetic oligonucleotide
ugaucucugcugaauagua

SEQ ID NO: 2739768 - RNA, 19 nt, Artificial Sequence
  Description of Artificial Sequence: Synthetic oligonucleotide
guacuuguuaucaaugguc

SEQ ID NO: 2739769 - RNA, 19 nt, Artificial Sequence
  Description of Artificial Sequence: Synthetic oligonucleotide
uccuauugccauccagaag

SEQ ID NO: 2739770 - RNA, 19 nt, Artificial Sequence
  Description of Artificial Sequence: Synthetic oligonucleotide
cuuuggcuaccuuuucugc

SEQ ID NO: 2739771 - RNA, 19 nt, Artificial Sequence
  Description of Artificial Sequence: Synthetic oligonucleotide
acuaggaacuugcuuggca

SEQ ID NO: 2739772 - RNA, 19 nt, Artificial Sequence
  Description of Artificial Sequence: Synthetic oligonucleotide
agauuugcuaauucuugaa

SEQ ID NO: 2739773 - RNA, 19 nt, Artificial Sequence
  Description of Artificial Sequence: Synthetic oligonucleotide
gaagaauuuagugcucuuc

SEQ ID NO: 2739774 - RNA, 19 nt, Artificial Sequence
  Description of Artificial Sequence: Synthetic oligonucleotide
uaucuuucauuuccuuuaa

SEQ ID NO: 2739775 - RNA, 19 nt, Artificial Sequence
  Description of Artificial Sequence: Synthetic oligonucleotide
aggauauauugcaaccaac

SEQ ID NO: 2739776 - RNA, 19 nt, Artificial Sequence
  Description of Artificial Sequence: Synthetic oligonucleotide
ccuuuaacuuugaaaagag

SEQ ID NO: 2739777 - RNA, 19 nt, Artificial Sequence
  Description of Artificial Sequence: Synthetic oligonucleotide
uaaaaccucacggcaucgg

SEQ ID NO: 2739778 - RNA, 19 nt, Artificial Sequence
  Description of Artificial Sequence: Synthetic oligonucleotide
ucgaucucaucucugucuc

SEQ ID NO: 2739779 - RNA, 19 nt, Artificial Sequence
  Description of Artificial Sequence: Synthetic oligonucleotide
cuagugaccagagcgcagg

SEQ ID NO: 2739780 - RNA, 19 nt, Artificial Sequence
  Description of Artificial Sequence: Synthetic oligonucleotide
acggcaucgguggacaucg

SEQ ID NO: 2739781 - RNA, 19 nt, Artificial Sequence
  Description of Artificial Sequence: Synthetic oligonucleotide
uggacaucgcuucuacaac

SEQ ID NO: 2739782 - RNA, 19 nt, Artificial Sequence
  Description of Artificial Sequence: Synthetic oligonucleotide
caguaucagucuaaccuag

SEQ ID NO: 2739783 - RNA, 19 nt, Artificial Sequence
  Description of Artificial Sequence: Synthetic oligonucleotide
auggcaaucuuggcggagc

SEQ ID NO: 2739784 - RNA, 19 nt, Artificial Sequence
  Description of Artificial Sequence: Synthetic oligonucleotide
caucgcuucuacaacagca

SEQ ID NO: 2739785 - RNA, 19 nt, Artificial Sequence
  Description of Artificial Sequence: Synthetic oligonucleotide
uucuguuccgaggauauau

SEQ ID NO: 2739786 - RNA, 19 nt, Artificial Sequence
  Description of Artificial Sequence: Synthetic oligonucleotide
uggcggagcagcuagugac

SEQ ID NO: 2739787 - RNA, 19 nt, Artificial Sequence
  Description of Artificial Sequence: Synthetic oligonucleotide
acuuugaaaagagccucuc

SEQ ID NO: 2739788 - RNA, 19 nt, Artificial Sequence
  Description of Artificial Sequence: Synthetic oligonucleotide
ugcucaugaggaagcguag

SEQ ID NO: 2739789 - RNA, 19 nt, Artificial Sequence
  Description of Artificial Sequence: Synthetic oligonucleotide
agcagcuagugaccagagc

SEQ ID NO: 2739790 - RNA, 19 nt, Artificial Sequence
  Description of Artificial Sequence: Synthetic oligonucleotide
agugcucuucauccgaaga

SEQ ID NO: 2739791 - RNA, 19 nt, Artificial Sequence
  Description of Artificial Sequence: Synthetic oligonucleotide
auccagaaggcuuuggcua

SEQ ID NO: 2739792 - RNA, 19 nt, Artificial Sequence
  Description of Artificial Sequence: Synthetic oligonucleotide
aggccuucgaucucaucuc

SEQ ID NO: 2739793 - RNA, 19 nt, Artificial Sequence
  Description of Artificial Sequence: Synthetic oligonucleotide
uccuccuauugccauccag

SEQ ID NO: 2739794 - RNA, 19 nt, Artificial Sequence
  Description of Artificial Sequence: Synthetic oligonucleotide
ccuagcaggaagaauuuag

SEQ ID NO: 2739795 - RNA, 19 nt, Artificial Sequence
  Description of Artificial Sequence: Synthetic oligonucleotide
agaauuuagugcucuucau

SEQ ID NO: 2739796 - RNA, 19 nt, Artificial Sequence
  Description of Artificial Sequence: Synthetic oligonucleotide
uaggaacuugcuuggcacc

SEQ ID NO: 2739797 - RNA, 19 nt, Artificial Sequence
  Description of Artificial Sequence: Synthetic oligonucleotide
gauugaucucugcugaaua

SEQ ID NO: 2739798 - RNA, 19 nt, Artificial Sequence
  Description of Artificial Sequence: Synthetic oligonucleotide
aacuugcuuggcaccacac

SEQ ID NO: 2739799 - RNA, 19 nt, Artificial Sequence
  Description of Artificial Sequence: Synthetic oligonucleotide
guggacaucgcuucuacaa

SEQ ID NO: 2739800 - RNA, 19 nt, Artificial Sequence
  Description of Artificial Sequence: Synthetic oligonucleotide
uccagaaggcuuuggcuac

SEQ ID NO: 2739801 - RNA, 19 nt, Artificial Sequence
  Description of Artificial Sequence: Synthetic oligonucleotide
uugaucucugcugaauagu

SEQ ID NO: 2739802 - RNA, 19 nt, Artificial Sequence
  Description of Artificial Sequence: Synthetic oligonucleotide
aacuuugaaaagagccucu

SEQ ID NO: 2739803 - RNA, 19 nt, Artificial Sequence
  Description of Artificial Sequence: Synthetic oligonucleotide
aauggcaaucuuggcggag

SEQ ID NO: 2739804 - RNA, 19 nt, Artificial Sequence
  Description of Artificial Sequence: Synthetic oligonucleotide
agugacuaggaacuugcuu

SEQ ID NO: 2739805 - RNA, 19 nt, Artificial Sequence
  Description of Artificial Sequence: Synthetic oligonucleotide
guaacuuucuuugcucaug

SEQ ID NO: 2739806 - RNA, 19 nt, Artificial Sequence
  Description of Artificial Sequence: Synthetic oligonucleotide
aaaggccuucgaucucauc

SEQ ID NO: 2739807 - RNA, 19 nt, Artificial Sequence
  Description of Artificial Sequence: Synthetic oligonucleotide
uguaacuuucuuugcucau

SEQ ID NO: 2739808 - RNA, 19 nt, Artificial Sequence
  Description of Artificial Sequence: Synthetic oligonucleotide
acuuguuaucaauggucca

SEQ ID NO: 2739809 - RNA, 19 nt, Artificial Sequence
  Description of Artificial Sequence: Synthetic oligonucleotide
gacaucgcuucuacaacag

SEQ ID NO: 2739810 - RNA, 19 nt, Artificial Sequence
  Description of Artificial Sequence: Synthetic oligonucleotide
ucuccuccuauugccaucc

SEQ ID NO: 2739811 - RNA, 19 nt, Artificial Sequence
  Description of Artificial Sequence: Synthetic oligonucleotide
agaucuccuccuccagugg

SEQ ID NO: 2739812 - RNA, 19 nt, Artificial Sequence
  Description of Artificial Sequence: Synthetic oligonucleotide
gaauaguacuuguuaucaa

SEQ ID NO: 2739813 - RNA, 19 nt, Artificial Sequence
  Description of Artificial Sequence: Synthetic oligonucleotide
ugaaaguggcggagcagcu

SEQ ID NO: 2739814 - RNA, 19 nt, Artificial Sequence
  Description of Artificial Sequence: Synthetic oligonucleotide
uuagugcucuucauccgaa

SEQ ID NO: 2739815 - RNA, 19 nt, Artificial Sequence
  Description of Artificial Sequence: Synthetic oligonucleotide
ugggaagcacuuugagugc

SEQ ID NO: 2739816 - RNA, 19 nt, Artificial Sequence
  Description of Artificial Sequence: Synthetic oligonucleotide
cacuuugagugcacagugc

SEQ ID NO: 2739817 - RNA, 19 nt, Artificial Sequence
  Description of Artificial Sequence: Synthetic oligonucleotide
cuauugccauccagaaggc

SEQ ID NO: 2739818 - RNA, 19 nt, Artificial Sequence
  Description of Artificial Sequence: Synthetic oligonucleotide
cagcuagugaccagagcgc

SEQ ID NO: 2739819 - RNA, 19 nt, Artificial Sequence
  Description of Artificial Sequence: Synthetic oligonucleotide
uucugcauguaacuuucuu

SEQ ID NO: 2739820 - RNA, 19 nt, Artificial Sequence
  Description of Artificial Sequence: Synthetic oligonucleotide
uccagaucuccuccuccag

SEQ ID NO: 2739821 - RNA, 19 nt, Artificial Sequence
  Description of Artificial Sequence: Synthetic oligonucleotide
uaucaaugguccaggggua

SEQ ID NO: 2739822 - RNA, 19 nt, Artificial Sequence
  Description of Artificial Sequence: Synthetic oligonucleotide
cuuggcaccacacacagau

SEQ ID NO: 2739823 - RNA, 19 nt, Artificial Sequence
  Description of Artificial Sequence: Synthetic oligonucleotide
guaaaaccucacggcaucg

SEQ ID NO: 2739824 - RNA, 19 nt, Artificial Sequence
  Description of Artificial Sequence: Synthetic oligonucleotide
cuuugagugcacagugcug

SEQ ID NO: 2739825 - RNA, 19 nt, Artificial Sequence
  Description of Artificial Sequence: Synthetic oligonucleotide
aggaagaauuuagugcucu

SEQ ID NO: 2739826 - RNA, 19 nt, Artificial Sequence
  Description of Artificial Sequence: Synthetic oligonucleotide
uagugaccagagcgcaggg

SEQ ID NO: 2739827 - RNA, 19 nt, Artificial Sequence
  Description of Artificial Sequence: Synthetic oligonucleotide
gcuggcaucaguaucaguc

SEQ ID NO: 2739828 - RNA, 19 nt, Artificial Sequence
  Description of Artificial Sequence: Synthetic oligonucleotide
gaugggaagcacuuugagu

SEQ ID NO: 2739829 - RNA, 19 nt, Artificial Sequence
  Description of Artificial Sequence: Synthetic oligonucleotide
gauuugcuaauucuugaau

SEQ ID NO: 2739830 - RNA, 19 nt, Artificial Sequence
  Description of Artificial Sequence: Synthetic oligonucleotide
cucgaaguucuccagaucu

SEQ ID NO: 2739831 - RNA, 19 nt, Artificial Sequence
  Description of Artificial Sequence: Synthetic oligonucleotide
uccgaagaaaggccuucga

SEQ ID NO: 2739832 - RNA, 19 nt, Artificial Sequence
  Description of Artificial Sequence: Synthetic oligonucleotide
acuugcuuggcaccacaca

SEQ ID NO: 2739833 - RNA, 19 nt, Artificial Sequence
  Description of Artificial Sequence: Synthetic oligonucleotide
cuuugcucaugaggaagcg

SEQ ID NO: 2739834 - RNA, 19 nt, Artificial Sequence
  Description of Artificial Sequence: Synthetic oligonucleotide
cacacagauugaucucugc

SEQ ID NO: 2739835 - RNA, 19 nt, Artificial Sequence
  Description of Artificial Sequence: Synthetic oligonucleotide
aaccaaccggucuccggug

SEQ ID NO: 2739836 - RNA, 19 nt, Artificial Sequence
  Description of Artificial Sequence: Synthetic oligonucleotide
ucucugcugaauaguacuu

SEQ ID NO: 2739837 - RNA, 19 nt, Artificial Sequence
  Description of Artificial Sequence: Synthetic oligonucleotide
ucuguuccgaggauauauu

SEQ ID NO: 2739838 - RNA, 19 nt, Artificial Sequence
  Description of Artificial Sequence: Synthetic oligonucleotide
uugcuaauucuugaauauc

SEQ ID NO: 2739839 - RNA, 19 nt, Artificial Sequence
  Description of Artificial Sequence: Synthetic oligonucleotide
aaccggucuccggugaaag

SEQ ID NO: 2739840 - RNA, 19 nt, Artificial Sequence
  Description of Artificial Sequence: Synthetic oligonucleotide
agcacuuugagugcacagu

SEQ ID NO: 2739841 - RNA, 19 nt, Artificial Sequence
  Description of Artificial Sequence: Synthetic oligonucleotide
ucgaaguucuccagaucuc

SEQ ID NO: 2739842 - RNA, 19 nt, Artificial Sequence
  Description of Artificial Sequence: Synthetic oligonucleotide
ucuaaccuagcaggaagaa

SEQ ID NO: 2739843 - RNA, 19 nt, Artificial Sequence
  Description of Artificial Sequence: Synthetic oligonucleotide
cucugucuccuccuauugc

SEQ ID NO: 2739844 - RNA, 19 nt, Artificial Sequence
  Description of Artificial Sequence: Synthetic oligonucleotide
agugcacagugcuggcauc

SEQ ID NO: 2739845 - RNA, 19 nt, Artificial Sequence
  Description of Artificial Sequence: Synthetic oligonucleotide
gaucucugcugaauaguac

SEQ ID NO: 2739846 - RNA, 19 nt, Artificial Sequence
  Description of Artificial Sequence: Synthetic oligonucleotide
auugccauccagaaggcuu

SEQ ID NO: 2739847 - RNA, 19 nt, Artificial Sequence
  Description of Artificial Sequence: Synthetic oligonucleotide
caucgguggacaucgcuuc

SEQ ID NO: 2739848 - RNA, 19 nt, Artificial Sequence
  Description of Artificial Sequence: Synthetic oligonucleotide
uagugcucuucauccgaag

SEQ ID NO: 2739849 - RNA, 19 nt, Artificial Sequence
  Description of Artificial Sequence: Synthetic oligonucleotide
gcacuuugagugcacagug

SEQ ID NO: 2739850 - RNA, 19 nt, Artificial Sequence
  Description of Artificial Sequence: Synthetic oligonucleotide
gguaaaaccucacggcauc

SEQ ID NO: 2739851 - RNA, 19 nt, Artificial Sequence
  Description of Artificial Sequence: Synthetic oligonucleotide
ucgcuucuacaacagcauc

SEQ ID NO: 2739852 - RNA, 19 nt, Artificial Sequence
  Description of Artificial Sequence: Synthetic oligonucleotide
uugccauccagaaggcuuu

SEQ ID NO: 2739853 - RNA, 19 nt, Artificial Sequence
  Description of Artificial Sequence: Synthetic oligonucleotide
uuccgaggauauauugcaa

SEQ ID NO: 2739854 - RNA, 19 nt, Artificial Sequence
  Description of Artificial Sequence: Synthetic oligonucleotide
uuugcucaugaggaagcgu

SEQ ID NO: 2739855 - RNA, 19 nt, Artificial Sequence
  Description of Artificial Sequence: Synthetic oligonucleotide
uaauggcaaucuuggcgga

SEQ ID NO: 2739856 - RNA, 19 nt, Artificial Sequence
  Description of Artificial Sequence: Synthetic oligonucleotide
cagugguaagauuugcuaa

SEQ ID NO: 2739857 - RNA, 19 nt, Artificial Sequence
  Description of Artificial Sequence: Synthetic oligonucleotide
ucucgaaguucuccagauc

SEQ ID NO: 2739858 - RNA, 19 nt, Artificial Sequence
  Description of Artificial Sequence: Synthetic oligonucleotide
ccgaggauauauugcaacc

SEQ ID NO: 2739859 - RNA, 19 nt, Artificial Sequence
  Description of Artificial Sequence: Synthetic oligonucleotide
uccggugaaaguggcggag

SEQ ID NO: 2739860 - RNA, 19 nt, Artificial Sequence
  Description of Artificial Sequence: Synthetic oligonucleotide
uugagugcacagugcuggc

SEQ ID NO: 2739861 - RNA, 19 nt, Artificial Sequence
  Description of Artificial Sequence: Synthetic oligonucleotide
uuucugcauguaacuuucu

SEQ ID NO: 2739862 - RNA, 19 nt, Artificial Sequence
  Description of Artificial Sequence: Synthetic oligonucleotide
uggcaaucuuggcggagca

SEQ ID NO: 2739863 - RNA, 19 nt, Artificial Sequence
  Description of Artificial Sequence: Synthetic oligonucleotide
guagcagccuuaucuuuca

SEQ ID NO: 2739864 - RNA, 19 nt, Artificial Sequence
  Description of Artificial Sequence: Synthetic oligonucleotide
ugaccagagcgcaggggac

SEQ ID NO: 2739865 - RNA, 19 nt, Artificial Sequence
  Description of Artificial Sequence: Synthetic oligonucleotide
agcguagcagccuuaucuu

SEQ ID NO: 2739866 - RNA, 19 nt, Artificial Sequence
  Description of Artificial Sequence: Synthetic oligonucleotide
ugaggaagcguagcagccu

SEQ ID NO: 2739867 - RNA, 19 nt, Artificial Sequence
  Description of Artificial Sequence: Synthetic oligonucleotide
gggguaaaaccucacggca

SEQ ID NO: 2739868 - RNA, 19 nt, Artificial Sequence
  Description of Artificial Sequence: Synthetic oligonucleotide
uccagggguaaaaccucac

SEQ ID NO: 2739869 - RNA, 19 nt, Artificial Sequence
  Description of Artificial Sequence: Synthetic oligonucleotide
agugaccagagcgcagggg

SEQ ID NO: 2739870 - RNA, 19 nt, Artificial Sequence
  Description of Artificial Sequence: Synthetic oligonucleotide
ucauccgaagaaaggccuu

SEQ ID NO: 2739871 - RNA, 19 nt, Artificial Sequence
  Description of Artificial Sequence: Synthetic oligonucleotide
uucuccagaucuccuccuc

SEQ ID NO: 2739872 - RNA, 19 nt, Artificial Sequence
  Description of Artificial Sequence: Synthetic oligonucleotide
gaacuugcuuggcaccaca

SEQ ID NO: 2739873 - RNA, 19 nt, Artificial Sequence
  Description of Artificial Sequence: Synthetic oligonucleotide
agauugaucucugcugaau

SEQ ID NO: 2739874 - RNA, 19 nt, Artificial Sequence
  Description of Artificial Sequence: Synthetic oligonucleotide
agcaaucucagcagugacu

SEQ ID NO: 2739875 - RNA, 19 nt, Artificial Sequence
  Description of Artificial Sequence: Synthetic oligonucleotide
ugucuccuccuauugccau

SEQ ID NO: 2739876 - RNA, 19 nt, Artificial Sequence
  Description of Artificial Sequence: Synthetic oligonucleotide
cgaagaaaggccuucgauc

SEQ ID NO: 2739877 - RNA, 19 nt, Artificial Sequence
  Description of Artificial Sequence: Synthetic oligonucleotide
cuagcaggaagaauuuagu

SEQ ID NO: 2739878 - RNA, 19 nt, Artificial Sequence
  Description of Artificial Sequence: Synthetic oligonucleotide
agcagccuuaucuuucauu

SEQ ID NO: 2739879 - RNA, 19 nt, Artificial Sequence
  Description of Artificial Sequence: Synthetic oligonucleotide
aaccugguugagaugggaa

SEQ ID NO: 2739880 - RNA, 19 nt, Artificial Sequence
  Description of Artificial Sequence: Synthetic oligonucleotide
aggaacuugcuuggcacca

SEQ ID NO: 2739881 - RNA, 19 nt, Artificial Sequence
  Description of Artificial Sequence: Synthetic oligonucleotide
guaagauuugcuaauucuu

SEQ ID NO: 2739882 - RNA, 19 nt, Artificial Sequence
  Description of Artificial Sequence: Synthetic oligonucleotide
gugcucuucauccgaagaa

SEQ ID NO: 2739883 - RNA, 19 nt, Artificial Sequence
  Description of Artificial Sequence: Synthetic oligonucleotide
caggaagaauuuagugcuc

SEQ ID NO: 2739884 - RNA, 19 nt, Artificial Sequence
  Description of Artificial Sequence: Synthetic oligonucleotide
ggacaucgcuucuacaaca

SEQ ID NO: 2739885 - RNA, 19 nt, Artificial Sequence
  Description of Artificial Sequence: Synthetic oligonucleotide
gagaugggaagcacuuuga

SEQ ID NO: 2739886 - RNA, 19 nt, Artificial Sequence
  Description of Artificial Sequence: Synthetic oligonucleotide
agagcaguuccgagccggc

SEQ ID NO: 2739887 - RNA, 19 nt, Artificial Sequence
  Description of Artificial Sequence: Synthetic oligonucleotide
ugagugcacagugcuggca

SEQ ID NO: 2739888 - RNA, 19 nt, Artificial Sequence
  Description of Artificial Sequence: Synthetic oligonucleotide
uauugccauccagaaggcu

SEQ ID NO: 2739889 - RNA, 19 nt, Artificial Sequence
  Description of Artificial Sequence: Synthetic oligonucleotide
caaucucagcagugacuag

SEQ ID NO: 2739890 - RNA, 19 nt, Artificial Sequence
  Description of Artificial Sequence: Synthetic oligonucleotide
cuucuacaacagcaucuuc

SEQ ID NO: 2739891 - RNA, 19 nt, Artificial Sequence
  Description of Artificial Sequence: Synthetic oligonucleotide
agcuagugaccagagcgca

SEQ ID NO: 2739892 - RNA, 19 nt, Artificial Sequence
  Description of Artificial Sequence: Synthetic oligonucleotide
accagagcgcaggggacac

SEQ ID NO: 2739893 - RNA, 19 nt, Artificial Sequence
  Description of Artificial Sequence: Synthetic oligonucleotide
aaccuagcaggaagaauuu

SEQ ID NO: 2739894 - RNA, 19 nt, Artificial Sequence
  Description of Artificial Sequence: Synthetic oligonucleotide
ugcaaccaaccggucuccg

SEQ ID NO: 2739895 - RNA, 19 nt, Artificial Sequence
  Description of Artificial Sequence: Synthetic oligonucleotide
cuccagugguaagauuugc

SEQ ID NO: 2739896 - RNA, 19 nt, Artificial Sequence
  Description of Artificial Sequence: Synthetic oligonucleotide
cagcacaauaauggcaauc

SEQ ID NO: 2739897 - RNA, 19 nt, Artificial Sequence
  Description of Artificial Sequence: Synthetic oligonucleotide
gaucucaucucugucuccu

SEQ ID NO: 2739898 - RNA, 19 nt, Artificial Sequence
  Description of Artificial Sequence: Synthetic oligonucleotide
cuccuauugccauccagaa

SEQ ID NO: 2739899 - RNA, 19 nt, Artificial Sequence
  Description of Artificial Sequence: Synthetic oligonucleotide
aguuccgagccggcgccgc

SEQ ID NO: 2739900 - RNA, 19 nt, Artificial Sequence
  Description of Artificial Sequence: Synthetic oligonucleotide
cagguggccagcacaauaa

SEQ ID NO: 2739901 - RNA, 19 nt, Artificial Sequence
  Description of Artificial Sequence: Synthetic oligonucleotide
cuuggcggagcagaaccug

SEQ ID NO: 2739902 - RNA, 19 nt, Artificial Sequence
  Description of Artificial Sequence: Synthetic oligonucleotide
ccauccagaaggcuuuggc

SEQ ID NO: 2739903 - RNA, 19 nt, Artificial Sequence
  Description of Artificial Sequence: Synthetic oligonucleotide
aucgcuucuacaacagcau

SEQ ID NO: 2739904 - RNA, 19 nt, Artificial Sequence
  Description of Artificial Sequence: Synthetic oligonucleotide
auauugcaaccaaccgguc

SEQ ID NO: 2739905 - RNA, 19 nt, Artificial Sequence
  Description of Artificial Sequence: Synthetic oligonucleotide
gucuaaccuagcaggaaga

SEQ ID NO: 2739906 - RNA, 19 nt, Artificial Sequence
  Description of Artificial Sequence: Synthetic oligonucleotide
uugcaaccaaccggucucc

SEQ ID NO: 2739907 - RNA, 19 nt, Artificial Sequence
  Description of Artificial Sequence: Synthetic oligonucleotide
ccagggguaaaaccucacg

SEQ ID NO: 2739908 - RNA, 19 nt, Artificial Sequence
  Description of Artificial Sequence: Synthetic oligonucleotide
gcaaccaaccggucuccgg

SEQ ID NO: 2739909 - RNA, 19 nt, Artificial Sequence
  Description of Artificial Sequence: Synthetic oligonucleotide
agaaccugguugagauggg

SEQ ID NO: 2739910 - RNA, 19 nt, Artificial Sequence
  Description of Artificial Sequence: Synthetic oligonucleotide
gacuaggaacuugcuuggc

SEQ ID NO: 2739911 - RNA, 19 nt, Artificial Sequence
  Description of Artificial Sequence: Synthetic oligonucleotide
ugguugagaugggaagcac

SEQ ID NO: 2739912 - RNA, 19 nt, Artificial Sequence
  Description of Artificial Sequence: Synthetic oligonucleotide
cugcagcagagcaguuccg

SEQ ID NO: 2739913 - RNA, 19 nt, Artificial Sequence
  Description of Artificial Sequence: Synthetic oligonucleotide
gagcagcuagugaccagag

SEQ ID NO: 2739914 - RNA, 19 nt, Artificial Sequence
  Description of Artificial Sequence: Synthetic oligonucleotide
cagccuuaucuuucauuuc

SEQ ID NO: 2739915 - RNA, 19 nt, Artificial Sequence
  Description of Artificial Sequence: Synthetic oligonucleotide
gaagcguagcagccuuauc

SEQ ID NO: 2739916 - RNA, 19 nt, Artificial Sequence
  Description of Artificial Sequence: Synthetic oligonucleotide
cauccgaagaaaggccuuc

SEQ ID NO: 2739917 - RNA, 19 nt, Artificial Sequence
  Description of Artificial Sequence: Synthetic oligonucleotide
gcggagcagaaccugguug

SEQ ID NO: 2739918 - RNA, 19 nt, Artificial Sequence
  Description of Artificial Sequence: Synthetic oligonucleotide
gcuaauucuugaauaucca

SEQ ID NO: 2739919 - RNA, 19 nt, Artificial Sequence
  Description of Artificial Sequence: Synthetic oligonucleotide
aucgguggacaucgcuucu

SEQ ID NO: 2739920 - RNA, 19 nt, Artificial Sequence
  Description of Artificial Sequence: Synthetic oligonucleotide
ccugguugagaugggaagc

SEQ ID NO: 2739921 - RNA, 19 nt, Artificial Sequence
  Description of Artificial Sequence: Synthetic oligonucleotide
gcugaauaguacuuguuau

SEQ ID NO: 2739922 - RNA, 19 nt, Artificial Sequence
  Description of Artificial Sequence: Synthetic oligonucleotide
gaaccugguugagauggga

SEQ ID NO: 2739923 - RNA, 19 nt, Artificial Sequence
  Description of Artificial Sequence: Synthetic oligonucleotide
ucaaugguccagggguaaa

SEQ ID NO: 2739924 - RNA, 19 nt, Artificial Sequence
  Description of Artificial Sequence: Synthetic oligonucleotide
accaaccggucuccgguga

SEQ ID NO: 2739925 - RNA, 19 nt, Artificial Sequence
  Description of Artificial Sequence: Synthetic oligonucleotide
gcaaucuuggcggagcaga

SEQ ID NO: 2739926 - RNA, 19 nt, Artificial Sequence
  Description of Artificial Sequence: Synthetic oligonucleotide
cuugaauauccagcaaucu

SEQ ID NO: 2739927 - RNA, 19 nt, Artificial Sequence
  Description of Artificial Sequence: Synthetic oligonucleotide
ccuccuauugccauccaga

SEQ ID NO: 2739928 - RNA, 19 nt, Artificial Sequence
  Description of Artificial Sequence: Synthetic oligonucleotide
gguggccagcacaauaaug

SEQ ID NO: 2739929 - RNA, 19 nt, Artificial Sequence
  Description of Artificial Sequence: Synthetic oligonucleotide
aucuucuguuccgaggaua

SEQ ID NO: 2739930 - RNA, 19 nt, Artificial Sequence
  Description of Artificial Sequence: Synthetic oligonucleotide
gcauguaacuuucuuugcu

SEQ ID NO: 2739931 - RNA, 19 nt, Artificial Sequence
  Description of Artificial Sequence: Synthetic oligonucleotide
gcaggggacaccagcagcc

SEQ ID NO: 2739932 - RNA, 19 nt, Artificial Sequence
  Description of Artificial Sequence: Synthetic oligonucleotide
cugguugagaugggaagca

SEQ ID NO: 2739933 - RNA, 19 nt, Artificial Sequence
  Description of Artificial Sequence: Synthetic oligonucleotide
aucaaugguccagggguaa

SEQ ID NO: 2739934 - RNA, 19 nt, Artificial Sequence
  Description of Artificial Sequence: Synthetic oligonucleotide
gcagccuuaucuuucauuu

SEQ ID NO: 2739935 - RNA, 19 nt, Artificial Sequence
  Description of Artificial Sequence: Synthetic oligonucleotide
cugucuccuccuauugcca

SEQ ID NO: 2739936 - RNA, 19 nt, Artificial Sequence
  Description of Artificial Sequence: Synthetic oligonucleotide
agcgcaggggacaccagca

SEQ ID NO: 2739937 - RNA, 19 nt, Artificial Sequence
  Description of Artificial Sequence: Synthetic oligonucleotide
caaucuuggcggagcagaa

SEQ ID NO: 2739938 - RNA, 19 nt, Artificial Sequence
  Description of Artificial Sequence: Synthetic oligonucleotide
agguggccagcacaauaau

SEQ ID NO: 2739939 - RNA, 19 nt, Artificial Sequence
  Description of Artificial Sequence: Synthetic oligonucleotide
gcaucaguaucagucuaac

SEQ ID NO: 2739940 - RNA, 19 nt, Artificial Sequence
  Description of Artificial Sequence: Synthetic oligonucleotide
guugagaugggaagcacuu

SEQ ID NO: 2739941 - RNA, 19 nt, Artificial Sequence
  Description of Artificial Sequence: Synthetic oligonucleotide
accggucuccggugaaagu

SEQ ID NO: 2739942 - RNA, 19 nt, Artificial Sequence
  Description of Artificial Sequence: Synthetic oligonucleotide
gucuccuccuauugccauc

SEQ ID NO: 2739943 - RNA, 19 nt, Artificial Sequence
  Description of Artificial Sequence: Synthetic oligonucleotide
caaccaaccggucuccggu

SEQ ID NO: 2739944 - RNA, 19 nt, Artificial Sequence
  Description of Artificial Sequence: Synthetic oligonucleotide
gcaguuccgagccggcgcc

SEQ ID NO: 2739945 - RNA, 19 nt, Artificial Sequence
  Description of Artificial Sequence: Synthetic oligonucleotide
cguagcagccuuaucuuuc

SEQ ID NO: 2739946 - RNA, 19 nt, Artificial Sequence
  Description of Artificial Sequence: Synthetic oligonucleotide
ugcuggcaucaguaucagu

SEQ ID NO: 2739947 - RNA, 19 nt, Artificial Sequence
  Description of Artificial Sequence: Synthetic oligonucleotide
gaaaguggcggagcagcua

SEQ ID NO: 2739948 - RNA, 19 nt, Artificial Sequence
  Description of Artificial Sequence: Synthetic oligonucleotide
uuggcaccacacacagauu

SEQ ID NO: 2739949 - RNA, 19 nt, Artificial Sequence
  Description of Artificial Sequence: Synthetic oligonucleotide
gcucaugaggaagcguagc

SEQ ID NO: 2739950 - RNA, 19 nt, Artificial Sequence
  Description of Artificial Sequence: Synthetic oligonucleotide
ccuccagugguaagauuug

SEQ ID NO: 2739951 - RNA, 19 nt, Artificial Sequence
  Description of Artificial Sequence: Synthetic oligonucleotide
guggcggagcagcuaguga

SEQ ID NO: 2739952 - RNA, 19 nt, Artificial Sequence
  Description of Artificial Sequence: Synthetic oligonucleotide
cagauugaucucugcugaa

SEQ ID NO: 2739953 - RNA, 19 nt, Artificial Sequence
  Description of Artificial Sequence: Synthetic oligonucleotide
gaggaagcguagcagccuu

SEQ ID NO: 2739954 - RNA, 19 nt, Artificial Sequence
  Description of Artificial Sequence: Synthetic oligonucleotide
cucacggcaucgguggaca

SEQ ID NO: 2739955 - RNA, 19 nt, Artificial Sequence
  Description of Artificial Sequence: Synthetic oligonucleotide
ucgguggacaucgcuucua

SEQ ID NO: 2739956 - RNA, 19 nt, Artificial Sequence
  Description of Artificial Sequence: Synthetic oligonucleotide
ccggucuccggugaaagug

SEQ ID NO: 2739957 - RNA, 19 nt, Artificial Sequence
  Description of Artificial Sequence: Synthetic oligonucleotide
guccagggguaaaaccuca

SEQ ID NO: 2739958 - RNA, 19 nt, Artificial Sequence
  Description of Artificial Sequence: Synthetic oligonucleotide
ggggacaccagcagccaug

SEQ ID NO: 2739959 - RNA, 19 nt, Artificial Sequence
  Description of Artificial Sequence: Synthetic oligonucleotide
cggucuccggugaaagugg

SEQ ID NO: 2739960 - RNA, 19 nt, Artificial Sequence
  Description of Artificial Sequence: Synthetic oligonucleotide
gguccagggguaaaaccuc

SEQ ID NO: 2739961 - RNA, 19 nt, Artificial Sequence
  Description of Artificial Sequence: Synthetic oligonucleotide
gcuagugaccagagcgcag

SEQ ID NO: 2739962 - RNA, 19 nt, Artificial Sequence
  Description of Artificial Sequence: Synthetic oligonucleotide
accuagcaggaagaauuua

SEQ ID NO: 2739963 - RNA, 19 nt, Artificial Sequence
  Description of Artificial Sequence: Synthetic oligonucleotide
cacggcaucgguggacauc

SEQ ID NO: 2739964 - RNA, 19 nt, Artificial Sequence
  Description of Artificial Sequence: Synthetic oligonucleotide
cuccggugaaaguggcgga

SEQ ID NO: 2739965 - RNA, 19 nt, Artificial Sequence
  Description of Artificial Sequence: Synthetic oligonucleotide
cuacaacagcaucuucugu

SEQ ID NO: 2739966 - RNA, 19 nt, Artificial Sequence
  Description of Artificial Sequence: Synthetic oligonucleotide
gguggacaucgcuucuaca

SEQ ID NO: 2739967 - RNA, 19 nt, Artificial Sequence
  Description of Artificial Sequence: Synthetic oligonucleotide
ggcggagcagcuagugacc

SEQ ID NO: 2739968 - RNA, 19 nt, Artificial Sequence
  Description of Artificial Sequence: Synthetic oligonucleotide
aaguggcggagcagcuagu

SEQ ID NO: 2739969 - RNA, 19 nt, Artificial Sequence
  Description of Artificial Sequence: Synthetic oligonucleotide
gggaagcacuuugagugca

SEQ ID NO: 2739970 - RNA, 19 nt, Artificial Sequence
  Description of Artificial Sequence: Synthetic oligonucleotide
uccgagccggcgccgcauc

SEQ ID NO: 2739971 - RNA, 19 nt, Artificial Sequence
  Description of Artificial Sequence: Synthetic oligonucleotide
ggcaaucuuggcggagcag

SEQ ID NO: 2739972 - RNA, 19 nt, Artificial Sequence
  Description of Artificial Sequence: Synthetic oligonucleotide
cagucuaaccuagcaggaa

SEQ ID NO: 2739973 - RNA, 19 nt, Artificial Sequence
  Description of Artificial Sequence: Synthetic oligonucleotide
ggcaucaguaucagucuaa

SEQ ID NO: 2739974 - RNA, 19 nt, Artificial Sequence
  Description of Artificial Sequence: Synthetic oligonucleotide
cuaaccuagcaggaagaau

SEQ ID NO: 2739975 - RNA, 19 nt, Artificial Sequence
  Description of Artificial Sequence: Synthetic oligonucleotide
gguugagaugggaagcacu

SEQ ID NO: 2739976 - RNA, 19 nt, Artificial Sequence
  Description of Artificial Sequence: Synthetic oligonucleotide
ucacggcaucgguggacau

SEQ ID NO: 2739977 - RNA, 19 nt, Artificial Sequence
  Description of Artificial Sequence: Synthetic oligonucleotide
ccauggcugcagcagagca

SEQ ID NO: 2739978 - RNA, 19 nt, Artificial Sequence
  Description of Artificial Sequence: Synthetic oligonucleotide
ggaacuugcuuggcaccac

SEQ ID NO: 2739979 - RNA, 19 nt, Artificial Sequence
  Description of Artificial Sequence: Synthetic oligonucleotide
ggcaccacacacagauuga

SEQ ID NO: 2739980 - RNA, 19 nt, Artificial Sequence
  Description of Artificial Sequence: Synthetic oligonucleotide
gcgcaggggacaccagcag

SEQ ID NO: 2739981 - RNA, 19 nt, Artificial Sequence
  Description of Artificial Sequence: Synthetic oligonucleotide
cgaggauauauugcaacca

SEQ ID NO: 2739982 - RNA, 19 nt, Artificial Sequence
  Description of Artificial Sequence: Synthetic oligonucleotide
aucuccuccuccaguggua

SEQ ID NO: 2739983 - RNA, 19 nt, Artificial Sequence
  Description of Artificial Sequence: Synthetic oligonucleotide
agagcgcaggggacaccag

SEQ ID NO: 2739984 - RNA, 19 nt, Artificial Sequence
  Description of Artificial Sequence: Synthetic oligonucleotide
caguuccgagccggcgccg

SEQ ID NO: 2739985 - RNA, 19 nt, Artificial Sequence
  Description of Artificial Sequence: Synthetic oligonucleotide
uccagguggccagcacaau

SEQ ID NO: 2739986 - RNA, 19 nt, Artificial Sequence
  Description of Artificial Sequence: Synthetic oligonucleotide
cgcaggggacaccagcagc

SEQ ID NO: 2739987 - RNA, 19 nt, Artificial Sequence
  Description of Artificial Sequence: Synthetic oligonucleotide
ccuucgaucucaucucugu

SEQ ID NO: 2739988 - RNA, 19 nt, Artificial Sequence
  Description of Artificial Sequence: Synthetic oligonucleotide
cgaucucaucucugucucc

SEQ ID NO: 2739989 - RNA, 19 nt, Artificial Sequence
  Description of Artificial Sequence: Synthetic oligonucleotide
ccggugaaaguggcggagc

SEQ ID NO: 2739990 - RNA, 19 nt, Artificial Sequence
  Description of Artificial Sequence: Synthetic oligonucleotide
ggaagaauuuagugcucuu

SEQ ID NO: 2739991 - RNA, 19 nt, Artificial Sequence
  Description of Artificial Sequence: Synthetic oligonucleotide
gccuucgaucucaucucug

SEQ ID NO: 2739992 - RNA, 19 nt, Artificial Sequence
  Description of Artificial Sequence: Synthetic oligonucleotide
cagugacuaggaacuugcu

SEQ ID NO: 2739993 - RNA, 19 nt, Artificial Sequence
  Description of Artificial Sequence: Synthetic oligonucleotide
ggcaucgguggacaucgcu

SEQ ID NO: 2739994 - RNA, 19 nt, Artificial Sequence
  Description of Artificial Sequence: Synthetic oligonucleotide
guuccgagccggcgccgca

SEQ ID NO: 2739995 - RNA, 19 nt, Artificial Sequence
  Description of Artificial Sequence: Synthetic oligonucleotide
gcuucuacaacagcaucuu

SEQ ID NO: 2739996 - RNA, 19 nt, Artificial Sequence
  Description of Artificial Sequence: Synthetic oligonucleotide
ggguaaaaccucacggcau

SEQ ID NO: 2739997 - RNA, 19 nt, Artificial Sequence
  Description of Artificial Sequence: Synthetic oligonucleotide
ggcuaccuuuucugcaugu

SEQ ID NO: 2739998 - RNA, 19 nt, Artificial Sequence
  Description of Artificial Sequence: Synthetic oligonucleotide
cgcuucuacaacagcaucu

SEQ ID NO: 2739999 - RNA, 19 nt, Artificial Sequence
  Description of Artificial Sequence: Synthetic oligonucleotide
ccagguggccagcacaaua

SEQ ID NO: 2740000 - RNA, 19 nt, Artificial Sequence
  Description of Artificial Sequence: Synthetic oligonucleotide
cgguggacaucgcuucuac

SEQ ID NO: 2740001 - RNA, 19 nt, Artificial Sequence
  Description of Artificial Sequence: Synthetic oligonucleotide
gcggagcagcuagugacca

SEQ ID NO: 2740002 - RNA, 19 nt, Artificial Sequence
  Description of Artificial Sequence: Synthetic oligonucleotide
ggccuucgaucucaucucu

SEQ ID NO: 2740003 - RNA, 19 nt, Artificial Sequence
  Description of Artificial Sequence: Synthetic oligonucleotide
aggaagcguagcagccuua

SEQ ID NO: 2740004 - RNA, 19 nt, Artificial Sequence
  Description of Artificial Sequence: Synthetic oligonucleotide
cuucuguuccgaggauaua

SEQ ID NO: 2740005 - RNA, 19 nt, Artificial Sequence
  Description of Artificial Sequence: Synthetic oligonucleotide
caaccggucuccggugaaa

SEQ ID NO: 2740006 - RNA, 19 nt, Artificial Sequence
  Description of Artificial Sequence: Synthetic oligonucleotide
caucuucuguuccgaggau

SEQ ID NO: 2740007 - RNA, 19 nt, Artificial Sequence
  Description of Artificial Sequence: Synthetic oligonucleotide
ccucacggcaucgguggac

SEQ ID NO: 2740008 - RNA, 19 nt, Artificial Sequence
  Description of Artificial Sequence: Synthetic oligonucleotide
gcacaauaauggcaaucuu

SEQ ID NO: 2740009 - RNA, 19 nt, Artificial Sequence
  Description of Artificial Sequence: Synthetic oligonucleotide
ggaagcguagcagccuuau

SEQ ID NO: 2740010 - RNA, 19 nt, Artificial Sequence
  Description of Artificial Sequence: Synthetic oligonucleotide
ccgaagaaaggccuucgau

SEQ ID NO: 2740011 - RNA, 19 nt, Artificial Sequence
  Description of Artificial Sequence: Synthetic oligonucleotide
cuccuccuauugccaucca

SEQ ID NO: 2740012 - RNA, 19 nt, Artificial Sequence
  Description of Artificial Sequence: Synthetic oligonucleotide
gcaucgguggacaucgcuu

SEQ ID NO: 2740013 - RNA, 19 nt, Artificial Sequence
  Description of Artificial Sequence: Synthetic oligonucleotide
cggugaaaguggcggagca

SEQ ID NO: 2740014 - RNA, 19 nt, Artificial Sequence
  Description of Artificial Sequence: Synthetic oligonucleotide
cggagcagcuagugaccag

SEQ ID NO: 2740015 - RNA, 19 nt, Artificial Sequence
  Description of Artificial Sequence: Synthetic oligonucleotide
ccagaucuccuccuccagu

SEQ ID NO: 2740016 - RNA, 19 nt, Artificial Sequence
  Description of Artificial Sequence: Synthetic oligonucleotide
gcaccacacacagauugau

SEQ ID NO: 2740017 - RNA, 19 nt, Artificial Sequence
  Description of Artificial Sequence: Synthetic oligonucleotide
ccgagccggcgccgcaucc

SEQ ID NO: 2740018 - RNA, 19 nt, Artificial Sequence
  Description of Artificial Sequence: Synthetic oligonucleotide
gcguagcagccuuaucuuu

SEQ ID NO: 2740019 - RNA, 19 nt, Artificial Sequence
  Description of Artificial Sequence: Synthetic oligonucleotide
ccagagcgcaggggacacc

SEQ ID NO: 2740020 - RNA, 19 nt, Artificial Sequence
  Description of Artificial Sequence: Synthetic oligonucleotide
ccaaccggucuccggugaa

SEQ ID NO: 2740021 - RNA, 19 nt, Artificial Sequence
  Description of Artificial Sequence: Synthetic oligonucleotide
ccagcacaauaauggcaau

SEQ ID NO: 2740022 - RNA, 19 nt, Artificial Sequence
  Description of Artificial Sequence: Synthetic oligonucleotide
cagcagugacuaggaacuu

SEQ ID NO: 2740023 - RNA, 19 nt, Artificial Sequence
  Description of Artificial Sequence: Synthetic oligonucleotide
ccuccuccagugguaagau

SEQ ID NO: 2740024 - RNA, 19 nt, Artificial Sequence
  Description of Artificial Sequence: Synthetic oligonucleotide
cggcaucgguggacaucgc

SEQ ID NO: 2740025 - RNA, 19 nt, Artificial Sequence
  Description of Artificial Sequence: Synthetic oligonucleotide
uucuucaugauuuucaagg

SEQ ID NO: 2740026 - RNA, 19 nt, Artificial Sequence
  Description of Artificial Sequence: Synthetic oligonucleotide
acugugaacagccaaaauc

SEQ ID NO: 2740027 - RNA, 19 nt, Artificial Sequence
  Description of Artificial Sequence: Synthetic oligonucleotide
cauguuuucgucuaauugg

SEQ ID NO: 2740028 - RNA, 19 nt, Artificial Sequence
  Description of Artificial Sequence: Synthetic oligonucleotide
ugaacagccaaaaucagcu

SEQ ID NO: 2740029 - RNA, 19 nt, Artificial Sequence
  Description of Artificial Sequence: Synthetic oligonucleotide
aaagucucccacugaaggc

SEQ ID NO: 2740030 - RNA, 19 nt, Artificial Sequence
  Description of Artificial Sequence: Synthetic oligonucleotide
ugauuuucaaggcauagac

SEQ ID NO: 2740031 - RNA, 19 nt, Artificial Sequence
  Description of Artificial Sequence: Synthetic oligonucleotide
acauauccccaucugaugc

SEQ ID NO: 2740032 - RNA, 19 nt, Artificial Sequence
  Description of Artificial Sequence: Synthetic oligonucleotide
agaagugacaguaaacucc

SEQ ID NO: 2740033 - RNA, 19 nt, Artificial Sequence
  Description of Artificial Sequence: Synthetic oligonucleotide
auuuucaaggcauagacau

SEQ ID NO: 2740034 - RNA, 19 nt, Artificial Sequence
  Description of Artificial Sequence: Synthetic oligonucleotide
cuaauugguccucauaucg

SEQ ID NO: 2740035 - RNA, 19 nt, Artificial Sequence
  Description of Artificial Sequence: Synthetic oligonucleotide
aaugaaaccugcuccuggg

SEQ ID NO: 2740036 - RNA, 19 nt, Artificial Sequence
  Description of Artificial Sequence: Synthetic oligonucleotide
aaaugaaaccugcuccugg

SEQ ID NO: 2740037 - RNA, 19 nt, Artificial Sequence
  Description of Artificial Sequence: Synthetic oligonucleotide
uccauaaccagguaaaggu

SEQ ID NO: 2740038 - RNA, 19 nt, Artificial Sequence
  Description of Artificial Sequence: Synthetic oligonucleotide
ugauccaaaauccaccagc

SEQ ID NO: 2740039 - RNA, 19 nt, Artificial Sequence
  Description of Artificial Sequence: Synthetic oligonucleotide
ugauauuccauaaccaggu

SEQ ID NO: 2740040 - RNA, 19 nt, Artificial Sequence
  Description of Artificial Sequence: Synthetic oligonucleotide
aggcugauauuccauaacc

SEQ ID NO: 2740041 - RNA, 19 nt, Artificial Sequence
  Description of Artificial Sequence: Synthetic oligonucleotide
ucauguuuucgucuaauug

SEQ ID NO: 2740042 - RNA, 19 nt, Artificial Sequence
  Description of Artificial Sequence: Synthetic oligonucleotide
aguaaacuccccuccaggc

SEQ ID NO: 2740043 - RNA, 19 nt, Artificial Sequence
  Description of Artificial Sequence: Synthetic oligonucleotide
aacugaaucauguuuucgu

SEQ ID NO: 2740044 - RNA, 19 nt, Artificial Sequence
  Description of Artificial Sequence: Synthetic oligonucleotide
aagacuccggacuucaaag

SEQ ID NO: 2740045 - RNA, 19 nt, Artificial Sequence
  Description of Artificial Sequence: Synthetic oligonucleotide
uuucaaggcauagacaucc

SEQ ID NO: 2740046 - RNA, 19 nt, Artificial Sequence
  Description of Artificial Sequence: Synthetic oligonucleotide
aaagguaaaacugaaucau

SEQ ID NO: 2740047 - RNA, 19 nt, Artificial Sequence
  Description of Artificial Sequence: Synthetic oligonucleotide
aaaaucagcucagcaaagg

SEQ ID NO: 2740048 - RNA, 19 nt, Artificial Sequence
  Description of Artificial Sequence: Synthetic oligonucleotide
ugcacuucagcaaagugac

SEQ ID NO: 2740049 - RNA, 19 nt, Artificial Sequence
  Description of Artificial Sequence: Synthetic oligonucleotide
aacagccaaaaucagcuca

SEQ ID NO: 2740050 - RNA, 19 nt, Artificial Sequence
  Description of Artificial Sequence: Synthetic oligonucleotide
ucagaagugacaguaaacu

SEQ ID NO: 2740051 - RNA, 19 nt, Artificial Sequence
  Description of Artificial Sequence: Synthetic oligonucleotide
guuuucgucuaauuggucc

SEQ ID NO: 2740052 - RNA, 19 nt, Artificial Sequence
  Description of Artificial Sequence: Synthetic oligonucleotide
caaagucucccacugaagg

SEQ ID NO: 2740053 - RNA, 19 nt, Artificial Sequence
  Description of Artificial Sequence: Synthetic oligonucleotide
cucagcaaagguaaaacug

SEQ ID NO: 2740054 - RNA, 19 nt, Artificial Sequence
  Description of Artificial Sequence: Synthetic oligonucleotide
uccgagauaauauguuccg

SEQ ID NO: 2740055 - RNA, 19 nt, Artificial Sequence
  Description of Artificial Sequence: Synthetic oligonucleotide
ucugucucgguaucggugg

SEQ ID NO: 2740056 - RNA, 19 nt, Artificial Sequence
  Description of Artificial Sequence: Synthetic oligonucleotide
acugaaucauguuuucguc

SEQ ID NO: 2740057 - RNA, 19 nt, Artificial Sequence
  Description of Artificial Sequence: Synthetic oligonucleotide
aaggcauagacauccccag

SEQ ID NO: 2740058 - RNA, 19 nt, Artificial Sequence
  Description of Artificial Sequence: Synthetic oligonucleotide
ucgaugaggauguucuccg

SEQ ID NO: 2740059 - RNA, 19 nt, Artificial Sequence
  Description of Artificial Sequence: Synthetic oligonucleotide
ucuucaugauuuucaaggc

SEQ ID NO: 2740060 - RNA, 19 nt, Artificial Sequence
  Description of Artificial Sequence: Synthetic oligonucleotide
uaauauguuccgcuccucc

SEQ ID NO: 2740061 - RNA, 19 nt, Artificial Sequence
  Description of Artificial Sequence: Synthetic oligonucleotide
ucucgaugcacauaucccc

SEQ ID NO: 2740062 - RNA, 19 nt, Artificial Sequence
  Description of Artificial Sequence: Synthetic oligonucleotide
aucgauucagaagugacag

SEQ ID NO: 2740063 - RNA, 19 nt, Artificial Sequence
  Description of Artificial Sequence: Synthetic oligonucleotide
uaaacuccccuccaggcug

SEQ ID NO: 2740064 - RNA, 19 nt, Artificial Sequence
  Description of Artificial Sequence: Synthetic oligonucleotide
aauauguuccgcuccuccu

SEQ ID NO: 2740065 - RNA, 19 nt, Artificial Sequence
  Description of Artificial Sequence: Synthetic oligonucleotide
gauguguccuguccggucg

SEQ ID NO: 2740066 - RNA, 19 nt, Artificial Sequence
  Description of Artificial Sequence: Synthetic oligonucleotide
agcaaagugaccacagccc

SEQ ID NO: 2740067 - RNA, 19 nt, Artificial Sequence
  Description of Artificial Sequence: Synthetic oligonucleotide
uucaaagucucccacugaa

SEQ ID NO: 2740068 - RNA, 19 nt, Artificial Sequence
  Description of Artificial Sequence: Synthetic oligonucleotide
aaggcauacuguaauuggg

SEQ ID NO: 2740069 - RNA, 19 nt, Artificial Sequence
  Description of Artificial Sequence: Synthetic oligonucleotide
cugugaacagccaaaauca

SEQ ID NO: 2740070 - RNA, 19 nt, Artificial Sequence
  Description of Artificial Sequence: Synthetic oligonucleotide
gaagugacaguaaacuccc

SEQ ID NO: 2740071 - RNA, 19 nt, Artificial Sequence
  Description of Artificial Sequence: Synthetic oligonucleotide
aauugguccucauaucgau

SEQ ID NO: 2740072 - RNA, 19 nt, Artificial Sequence
  Description of Artificial Sequence: Synthetic oligonucleotide
uauguuccgcuccuccucg

SEQ ID NO: 2740073 - RNA, 19 nt, Artificial Sequence
  Description of Artificial Sequence: Synthetic oligonucleotide
ugaaaccugcuccugggcc

SEQ ID NO: 2740074 - RNA, 19 nt, Artificial Sequence
  Description of Artificial Sequence: Synthetic oligonucleotide
uaucgauucagaagugaca

SEQ ID NO: 2740075 - RNA, 19 nt, Artificial Sequence
  Description of Artificial Sequence: Synthetic oligonucleotide
ugacaguaaacuccccucc

SEQ ID NO: 2740076 - RNA, 19 nt, Artificial Sequence
  Description of Artificial Sequence: Synthetic oligonucleotide
uuccauaaccagguaaagg

SEQ ID NO: 2740077 - RNA, 19 nt, Artificial Sequence
  Description of Artificial Sequence: Synthetic oligonucleotide
auaucgauucagaagugac

SEQ ID NO: 2740078 - RNA, 19 nt, Artificial Sequence
  Description of Artificial Sequence: Synthetic oligonucleotide
ugugaacagccaaaaucag

SEQ ID NO: 2740079 - RNA, 19 nt, Artificial Sequence
  Description of Artificial Sequence: Synthetic oligonucleotide
uuuucgucuaauugguccu

SEQ ID NO: 2740080 - RNA, 19 nt, Artificial Sequence
  Description of Artificial Sequence: Synthetic oligonucleotide
agguggcugauccaaaauc

SEQ ID NO: 2740081 - RNA, 19 nt, Artificial Sequence
  Description of Artificial Sequence: Synthetic oligonucleotide
gaaaggcauacuguaauug

SEQ ID NO: 2740082 - RNA, 19 nt, Artificial Sequence
  Description of Artificial Sequence: Synthetic oligonucleotide
acgaccuggggacuugucc

SEQ ID NO: 2740083 - RNA, 19 nt, Artificial Sequence
  Description of Artificial Sequence: Synthetic oligonucleotide
uaauugguccucauaucga

SEQ ID NO: 2740084 - RNA, 19 nt, Artificial Sequence
  Description of Artificial Sequence: Synthetic oligonucleotide
cucauaucgauucagaagu

SEQ ID NO: 2740085 - RNA, 19 nt, Artificial Sequence
  Description of Artificial Sequence: Synthetic oligonucleotide
auauguuccgcuccuccuc

SEQ ID NO: 2740086 - RNA, 19 nt, Artificial Sequence
  Description of Artificial Sequence: Synthetic oligonucleotide
ugcacauauccccaucuga

SEQ ID NO: 2740087 - RNA, 19 nt, Artificial Sequence
  Description of Artificial Sequence: Synthetic oligonucleotide
ucaaagucucccacugaag

SEQ ID NO: 2740088 - RNA, 19 nt, Artificial Sequence
  Description of Artificial Sequence: Synthetic oligonucleotide
auauuccauaaccagguaa

SEQ ID NO: 2740089 - RNA, 19 nt, Artificial Sequence
  Description of Artificial Sequence: Synthetic oligonucleotide
gcugauauuccauaaccag

SEQ ID NO: 2740090 - RNA, 19 nt, Artificial Sequence
  Description of Artificial Sequence: Synthetic oligonucleotide
gaugaggauguucuccggc

SEQ ID NO: 2740091 - RNA, 19 nt, Artificial Sequence
  Description of Artificial Sequence: Synthetic oligonucleotide
agugacaguaaacuccccu

SEQ ID NO: 2740092 - RNA, 19 nt, Artificial Sequence
  Description of Artificial Sequence: Synthetic oligonucleotide
acuucagcaaagugaccac

SEQ ID NO: 2740093 - RNA, 19 nt, Artificial Sequence
  Description of Artificial Sequence: Synthetic oligonucleotide
guugccuucucucuaacca

SEQ ID NO: 2740094 - RNA, 19 nt, Artificial Sequence
  Description of Artificial Sequence: Synthetic oligonucleotide
agcucagcaaagguaaaac

SEQ ID NO: 2740095 - RNA, 19 nt, Artificial Sequence
  Description of Artificial Sequence: Synthetic oligonucleotide
gagauaauauguuccgcuc

SEQ ID NO: 2740096 - RNA, 19 nt, Artificial Sequence
  Description of Artificial Sequence: Synthetic oligonucleotide
ucaaggcauagacaucccc

SEQ ID NO: 2740097 - RNA, 19 nt, Artificial Sequence
  Description of Artificial Sequence: Synthetic oligonucleotide
aaaaugaaaccugcuccug

SEQ ID NO: 2740098 - RNA, 19 nt, Artificial Sequence
  Description of Artificial Sequence: Synthetic oligonucleotide
uugguccucauaucgauuc

SEQ ID NO: 2740099 - RNA, 19 nt, Artificial Sequence
  Description of Artificial Sequence: Synthetic oligonucleotide
augaaaccugcuccugggc

SEQ ID NO: 2740100 - RNA, 19 nt, Artificial Sequence
  Description of Artificial Sequence: Synthetic oligonucleotide
uucucucuaaccaccugca

SEQ ID NO: 2740101 - RNA, 19 nt, Artificial Sequence
  Description of Artificial Sequence: Synthetic oligonucleotide
auccccaucugaugcacac

SEQ ID NO: 2740102 - RNA, 19 nt, Artificial Sequence
  Description of Artificial Sequence: Synthetic oligonucleotide
aagguaaaacugaaucaug

SEQ ID NO: 2740103 - RNA, 19 nt, Artificial Sequence
  Description of Artificial Sequence: Synthetic oligonucleotide
uguccuguccggucgauga

SEQ ID NO: 2740104 - RNA, 19 nt, Artificial Sequence
  Description of Artificial Sequence: Synthetic oligonucleotide
aaagugaccacagcccaca

SEQ ID NO: 2740105 - RNA, 19 nt, Artificial Sequence
  Description of Artificial Sequence: Synthetic oligonucleotide
ucuaauugguccucauauc

SEQ ID NO: 2740106 - RNA, 19 nt, Artificial Sequence
  Description of Artificial Sequence: Synthetic oligonucleotide
aagucucccacugaaggcu

SEQ ID NO: 2740107 - RNA, 19 nt, Artificial Sequence
  Description of Artificial Sequence: Synthetic oligonucleotide
ucauaucgauucagaagug

SEQ ID NO: 2740108 - RNA, 19 nt, Artificial Sequence
  Description of Artificial Sequence: Synthetic oligonucleotide
uguccggucgaugaggaug

SEQ ID NO: 2740109 - RNA, 19 nt, Artificial Sequence
  Description of Artificial Sequence: Synthetic oligonucleotide
uccugaaaggcauacugua

SEQ ID NO: 2740110 - RNA, 19 nt, Artificial Sequence
  Description of Artificial Sequence: Synthetic oligonucleotide
agguaaaacugaaucaugu

SEQ ID NO: 2740111 - RNA, 19 nt, Artificial Sequence
  Description of Artificial Sequence: Synthetic oligonucleotide
cuucuucaugauuuucaag

SEQ ID NO: 2740112 - RNA, 19 nt, Artificial Sequence
  Description of Artificial Sequence: Synthetic oligonucleotide
ucuaaccaccugcacuuca

SEQ ID NO: 2740113 - RNA, 19 nt, Artificial Sequence
  Description of Artificial Sequence: Synthetic oligonucleotide
uccucauaucgauucagaa

SEQ ID NO: 2740114 - RNA, 19 nt, Artificial Sequence
  Description of Artificial Sequence: Synthetic oligonucleotide
cuaaccaccugcacuucag

SEQ ID NO: 2740115 - RNA, 19 nt, Artificial Sequence
  Description of Artificial Sequence: Synthetic oligonucleotide
cugcacuucagcaaaguga

SEQ ID NO: 2740116 - RNA, 19 nt, Artificial Sequence
  Description of Artificial Sequence: Synthetic oligonucleotide
caguaaacuccccuccagg

SEQ ID NO: 2740117 - RNA, 19 nt, Artificial Sequence
  Description of Artificial Sequence: Synthetic oligonucleotide
uuuucaaggcauagacauc

SEQ ID NO: 2740118 - RNA, 19 nt, Artificial Sequence
  Description of Artificial Sequence: Synthetic oligonucleotide
uggcugauccaaaauccac

SEQ ID NO: 2740119 - RNA, 19 nt, Artificial Sequence
  Description of Artificial Sequence: Synthetic oligonucleotide
caaggcauagacaucccca

SEQ ID NO: 2740120 - RNA, 19 nt, Artificial Sequence
  Description of Artificial Sequence: Synthetic oligonucleotide
gauuuucaaggcauagaca

SEQ ID NO: 2740121 - RNA, 19 nt, Artificial Sequence
  Description of Artificial Sequence: Synthetic oligonucleotide
ucgugcuccgagauaauau

SEQ ID NO: 2740122 - RNA, 19 nt, Artificial Sequence
  Description of Artificial Sequence: Synthetic oligonucleotide
ugaaaggcauacuguaauu

SEQ ID NO: 2740123 - RNA, 19 nt, Artificial Sequence
  Description of Artificial Sequence: Synthetic oligonucleotide
ccucauaucgauucagaag

SEQ ID NO: 2740124 - RNA, 19 nt, Artificial Sequence
  Description of Artificial Sequence: Synthetic oligonucleotide
aaucagcucagcaaaggua

SEQ ID NO: 2740125 - RNA, 19 nt, Artificial Sequence
  Description of Artificial Sequence: Synthetic oligonucleotide
gacuccggacuucaaaguc

SEQ ID NO: 2740126 - RNA, 19 nt, Artificial Sequence
  Description of Artificial Sequence: Synthetic oligonucleotide
gugacaguaaacuccccuc

SEQ ID NO: 2740127 - RNA, 19 nt, Artificial Sequence
  Description of Artificial Sequence: Synthetic oligonucleotide
gucuaauugguccucauau

SEQ ID NO: 2740128 - RNA, 19 nt, Artificial Sequence
  Description of Artificial Sequence: Synthetic oligonucleotide
auauccccaucugaugcac

SEQ ID NO: 2740129 - RNA, 19 nt, Artificial Sequence
  Description of Artificial Sequence: Synthetic oligonucleotide
cauaaccagguaaagguua

SEQ ID NO: 2740130 - RNA, 19 nt, Artificial Sequence
  Description of Artificial Sequence: Synthetic oligonucleotide
cacauauccccaucugaug

SEQ ID NO: 2740131 - RNA, 19 nt, Artificial Sequence
  Description of Artificial Sequence: Synthetic oligonucleotide
auccaagggcucgugcucc

SEQ ID NO: 2740132 - RNA, 19 nt, Artificial Sequence
  Description of Artificial Sequence: Synthetic oligonucleotide
gucgaugaggauguucucc

SEQ ID NO: 2740133 - RNA, 19 nt, Artificial Sequence
  Description of Artificial Sequence: Synthetic oligonucleotide
gugaacagccaaaaucagc

SEQ ID NO: 2740134 - RNA, 19 nt, Artificial Sequence
  Description of Artificial Sequence: Synthetic oligonucleotide
auguuuucgucuaauuggu

SEQ ID NO: 2740135 - RNA, 19 nt, Artificial Sequence
  Description of Artificial Sequence: Synthetic oligonucleotide
augauuuucaaggcauaga

SEQ ID NO: 2740136 - RNA, 19 nt, Artificial Sequence
  Description of Artificial Sequence: Synthetic oligonucleotide
cucugucucgguaucggug

SEQ ID NO: 2740137 - RNA, 19 nt, Artificial Sequence
  Description of Artificial Sequence: Synthetic oligonucleotide
agugaccacagcccacaag

SEQ ID NO: 2740138 - RNA, 19 nt, Artificial Sequence
  Description of Artificial Sequence: Synthetic oligonucleotide
uguuuucgucuaauugguc

SEQ ID NO: 2740139 - RNA, 19 nt, Artificial Sequence
  Description of Artificial Sequence: Synthetic oligonucleotide
ugcuccgagauaauauguu

SEQ ID NO: 2740140 - RNA, 19 nt, Artificial Sequence
  Description of Artificial Sequence: Synthetic oligonucleotide
auaauauguuccgcuccuc

SEQ ID NO: 2740141 - RNA, 19 nt, Artificial Sequence
  Description of Artificial Sequence: Synthetic oligonucleotide
caggggacgaccuggggac

SEQ ID NO: 2740142 - RNA, 19 nt, Artificial Sequence
  Description of Artificial Sequence: Synthetic oligonucleotide
gaugcacauauccccaucu

SEQ ID NO: 2740143 - RNA, 19 nt, Artificial Sequence
  Description of Artificial Sequence: Synthetic oligonucleotide
ucagguggcugauccaaaa

SEQ ID NO: 2740144 - RNA, 19 nt, Artificial Sequence
  Description of Artificial Sequence: Synthetic oligonucleotide
uccuguccggucgaugagg

SEQ ID NO: 2740145 - RNA, 19 nt, Artificial Sequence
  Description of Artificial Sequence: Synthetic oligonucleotide
aagugacaguaaacucccc

SEQ ID NO: 2740146 - RNA, 19 nt, Artificial Sequence
  Description of Artificial Sequence: Synthetic oligonucleotide
gucucgaugcacauauccc

SEQ ID NO: 2740147 - RNA, 19 nt, Artificial Sequence
  Description of Artificial Sequence: Synthetic oligonucleotide
accagguaaagguuauuuu

SEQ ID NO: 2740148 - RNA, 19 nt, Artificial Sequence
  Description of Artificial Sequence: Synthetic oligonucleotide
uaucgguggggugugcuug

SEQ ID NO: 2740149 - RNA, 19 nt, Artificial Sequence
  Description of Artificial Sequence: Synthetic oligonucleotide
aucauguuuucgucuaauu

SEQ ID NO: 2740150 - RNA, 19 nt, Artificial Sequence
  Description of Artificial Sequence: Synthetic oligonucleotide
agacuccggacuucaaagu

SEQ ID NO: 2740151 - RNA, 19 nt, Artificial Sequence
  Description of Artificial Sequence: Synthetic oligonucleotide
ucucgaggguggcuggggc

SEQ ID NO: 2740152 - RNA, 19 nt, Artificial Sequence
  Description of Artificial Sequence: Synthetic oligonucleotide
augcacauauccccaucug

SEQ ID NO: 2740153 - RNA, 19 nt, Artificial Sequence
  Description of Artificial Sequence: Synthetic oligonucleotide
ucucucuaaccaccugcac

SEQ ID NO: 2740154 - RNA, 19 nt, Artificial Sequence
  Description of Artificial Sequence: Synthetic oligonucleotide
caaagugaccacagcccac

SEQ ID NO: 2740155 - RNA, 19 nt, Artificial Sequence
  Description of Artificial Sequence: Synthetic oligonucleotide
uccaggcugauauuccaua

SEQ ID NO: 2740156 - RNA, 19 nt, Artificial Sequence
  Description of Artificial Sequence: Synthetic oligonucleotide
ugauguguccuguccgguc

SEQ ID NO: 2740157 - RNA, 19 nt, Artificial Sequence
  Description of Artificial Sequence: Synthetic oligonucleotide
cugauccaaaauccaccag

SEQ ID NO: 2740158 - RNA, 19 nt, Artificial Sequence
  Description of Artificial Sequence: Synthetic oligonucleotide
caggcugauauuccauaac

SEQ ID NO: 2740159 - RNA, 19 nt, Artificial Sequence
  Description of Artificial Sequence: Synthetic oligonucleotide
aucgguggggugugcuugg

SEQ ID NO: 2740160 - RNA, 19 nt, Artificial Sequence
  Description of Artificial Sequence: Synthetic oligonucleotide
ugguccucauaucgauuca

SEQ ID NO: 2740161 - RNA, 19 nt, Artificial Sequence
  Description of Artificial Sequence: Synthetic oligonucleotide
ucuccggcuugaugucucg

SEQ ID NO: 2740162 - RNA, 19 nt, Artificial Sequence
  Description of Artificial Sequence: Synthetic oligonucleotide
aagggcucgugcuccgaga

SEQ ID NO: 2740163 - RNA, 19 nt, Artificial Sequence
  Description of Artificial Sequence: Synthetic oligonucleotide
gccaaaaucagcucagcaa

SEQ ID NO: 2740164 - RNA, 19 nt, Artificial Sequence
  Description of Artificial Sequence: Synthetic oligonucleotide
ucgauucagaagugacagu

SEQ ID NO: 2740165 - RNA, 19 nt, Artificial Sequence
  Description of Artificial Sequence: Synthetic oligonucleotide
agcccacaagacuccggac

SEQ ID NO: 2740166 - RNA, 19 nt, Artificial Sequence
  Description of Artificial Sequence: Synthetic oligonucleotide
ucggucucugucucgguau

SEQ ID NO: 2740167 - RNA, 19 nt, Artificial Sequence
  Description of Artificial Sequence: Synthetic oligonucleotide
cauaucgauucagaaguga

SEQ ID NO: 2740168 - RNA, 19 nt, Artificial Sequence
  Description of Artificial Sequence: Synthetic oligonucleotide
gcugauccaaaauccacca

SEQ ID NO: 2740169 - RNA, 19 nt, Artificial Sequence
  Description of Artificial Sequence: Synthetic oligonucleotide
cucgaugcacauaucccca

SEQ ID NO: 2740170 - RNA, 19 nt, Artificial Sequence
  Description of Artificial Sequence: Synthetic oligonucleotide
uccaagggcucgugcuccg

SEQ ID NO: 2740171 - RNA, 19 nt, Artificial Sequence
  Description of Artificial Sequence: Synthetic oligonucleotide
ugucucgguaucggugggg

SEQ ID NO: 2740172 - RNA, 19 nt, Artificial Sequence
  Description of Artificial Sequence: Synthetic oligonucleotide
uccaggggacgaccugggg

SEQ ID NO: 2740173 - RNA, 19 nt, Artificial Sequence
  Description of Artificial Sequence: Synthetic oligonucleotide
ggcugauccaaaauccacc

SEQ ID NO: 2740174 - RNA, 19 nt, Artificial Sequence
  Description of Artificial Sequence: Synthetic oligonucleotide
ccaaaaucagcucagcaaa

SEQ ID NO: 2740175 - RNA, 19 nt, Artificial Sequence
  Description of Artificial Sequence: Synthetic oligonucleotide
uucgucuaauugguccuca

SEQ ID NO: 2740176 - RNA, 19 nt, Artificial Sequence
  Description of Artificial Sequence: Synthetic oligonucleotide
cagcaaagccuucuucuuc

SEQ ID NO: 2740177 - RNA, 19 nt, Artificial Sequence
  Description of Artificial Sequence: Synthetic oligonucleotide
cacacugugaacagccaaa

SEQ ID NO: 2740178 - RNA, 19 nt, Artificial Sequence
  Description of Artificial Sequence: Synthetic oligonucleotide
gacauccccaguugccuuc

SEQ ID NO: 2740179 - RNA, 19 nt, Artificial Sequence
  Description of Artificial Sequence: Synthetic oligonucleotide
gauauuccauaaccaggua

SEQ ID NO: 2740180 - RNA, 19 nt, Artificial Sequence
  Description of Artificial Sequence: Synthetic oligonucleotide
cauauccccaucugaugca

SEQ ID NO: 2740181 - RNA, 19 nt, Artificial Sequence
  Description of Artificial Sequence: Synthetic oligonucleotide
auaaccagguaaagguuau

SEQ ID NO: 2740182 - RNA, 19 nt, Artificial Sequence
  Description of Artificial Sequence: Synthetic oligonucleotide
uucagguggcugauccaaa

SEQ ID NO: 2740183 - RNA, 19 nt, Artificial Sequence
  Description of Artificial Sequence: Synthetic oligonucleotide
acuccggacuucaaagucu

SEQ ID NO: 2740184 - RNA, 19 nt, Artificial Sequence
  Description of Artificial Sequence: Synthetic oligonucleotide
cugaaucauguuuucgucu

SEQ ID NO: 2740185 - RNA, 19 nt, Artificial Sequence
  Description of Artificial Sequence: Synthetic oligonucleotide
uggggacuucucccgcucc

SEQ ID NO: 2740186 - RNA, 19 nt, Artificial Sequence
  Description of Artificial Sequence: Synthetic oligonucleotide
uccggcuugaugucucgau

SEQ ID NO: 2740187 - RNA, 19 nt, Artificial Sequence
  Description of Artificial Sequence: Synthetic oligonucleotide
cucucuaaccaccugcacu

SEQ ID NO: 2740188 - RNA, 19 nt, Artificial Sequence
  Description of Artificial Sequence: Synthetic oligonucleotide
gcuccgagauaauauguuc

SEQ ID NO: 2740189 - RNA, 19 nt, Artificial Sequence
  Description of Artificial Sequence: Synthetic oligonucleotide
uugauguguccuguccggu

SEQ ID NO: 2740190 - RNA, 19 nt, Artificial Sequence
  Description of Artificial Sequence: Synthetic oligonucleotide
uuucgucuaauugguccuc

SEQ ID NO: 2740191 - RNA, 19 nt, Artificial Sequence
  Description of Artificial Sequence: Synthetic oligonucleotide
uccggacuucaaagucucc

SEQ ID NO: 2740192 - RNA, 19 nt, Artificial Sequence
  Description of Artificial Sequence: Synthetic oligonucleotide
cuccaggggacgaccuggg

SEQ ID NO: 2740193 - RNA, 19 nt, Artificial Sequence
  Description of Artificial Sequence: Synthetic oligonucleotide
uguuccgcuccuccucgaa

SEQ ID NO: 2740194 - RNA, 19 nt, Artificial Sequence
  Description of Artificial Sequence: Synthetic oligonucleotide
aggcauagacauccccagu

SEQ ID NO: 2740195 - RNA, 19 nt, Artificial Sequence
  Description of Artificial Sequence: Synthetic oligonucleotide
caagacuccggacuucaaa

SEQ ID NO: 2740196 - RNA, 19 nt, Artificial Sequence
  Description of Artificial Sequence: Synthetic oligonucleotide
agcaaagguaaaacugaau

SEQ ID NO: 2740197 - RNA, 19 nt, Artificial Sequence
  Description of Artificial Sequence: Synthetic oligonucleotide
guaaacuccccuccaggcu

SEQ ID NO: 2740198 - RNA, 19 nt, Artificial Sequence
  Description of Artificial Sequence: Synthetic oligonucleotide
acacugugaacagccaaaa

SEQ ID NO: 2740199 - RNA, 19 nt, Artificial Sequence
  Description of Artificial Sequence: Synthetic oligonucleotide
caagggcucgugcuccgag

SEQ ID NO: 2740200 - RNA, 19 nt, Artificial Sequence
  Description of Artificial Sequence: Synthetic oligonucleotide
ucucgguaucgguggggug

SEQ ID NO: 2740201 - RNA, 19 nt, Artificial Sequence
  Description of Artificial Sequence: Synthetic oligonucleotide
gguccucauaucgauucag

SEQ ID NO: 2740202 - RNA, 19 nt, Artificial Sequence
  Description of Artificial Sequence: Synthetic oligonucleotide
cugucucgguaucgguggg

SEQ ID NO: 2740203 - RNA, 19 nt, Artificial Sequence
  Description of Artificial Sequence: Synthetic oligonucleotide
ucgaggguggcuggggccu

SEQ ID NO: 2740204 - RNA, 19 nt, Artificial Sequence
  Description of Artificial Sequence: Synthetic oligonucleotide
ucgucuaauugguccucau

SEQ ID NO: 2740205 - RNA, 19 nt, Artificial Sequence
  Description of Artificial Sequence: Synthetic oligonucleotide
ugucccugcgcagcucugc

SEQ ID NO: 2740206 - RNA, 19 nt, Artificial Sequence
  Description of Artificial Sequence: Synthetic oligonucleotide
agggcucgugcuccgagau

SEQ ID NO: 2740207 - RNA, 19 nt, Artificial Sequence
  Description of Artificial Sequence: Synthetic oligonucleotide
cucugcccggcccucucgg

SEQ ID NO: 2740208 - RNA, 19 nt, Artificial Sequence
  Description of Artificial Sequence: Synthetic oligonucleotide
cuucagcaaagugaccaca

SEQ ID NO: 2740209 - RNA, 19 nt, Artificial Sequence
  Description of Artificial Sequence: Synthetic oligonucleotide
ggcugauauuccauaacca

SEQ ID NO: 2740210 - RNA, 19 nt, Artificial Sequence
  Description of Artificial Sequence: Synthetic oligonucleotide
ggggacuugucccugcgca

SEQ ID NO: 2740211 - RNA, 19 nt, Artificial Sequence
  Description of Artificial Sequence: Synthetic oligonucleotide
ugcccggcccucucggucu

SEQ ID NO: 2740212 - RNA, 19 nt, Artificial Sequence
  Description of Artificial Sequence: Synthetic oligonucleotide
agccuucuucuucaugauu

SEQ ID NO: 2740213 - RNA, 19 nt, Artificial Sequence
  Description of Artificial Sequence: Synthetic oligonucleotide
ucgguaucgguggggugug

SEQ ID NO: 2740214 - RNA, 19 nt, Artificial Sequence
  Description of Artificial Sequence: Synthetic oligonucleotide
cuucagguggcugauccaa

SEQ ID NO: 2740215 - RNA, 19 nt, Artificial Sequence
  Description of Artificial Sequence: Synthetic oligonucleotide
agacauccccaguugccuu

SEQ ID NO: 2740216 - RNA, 19 nt, Artificial Sequence
  Description of Artificial Sequence: Synthetic oligonucleotide
ugcgcagcucugcccggcc

SEQ ID NO: 2740217 - RNA, 19 nt, Artificial Sequence
  Description of Artificial Sequence: Synthetic oligonucleotide
cagcccacaagacuccgga

SEQ ID NO: 2740218 - RNA, 19 nt, Artificial Sequence
  Description of Artificial Sequence: Synthetic oligonucleotide
acagcccacaagacuccgg

SEQ ID NO: 2740219 - RNA, 19 nt, Artificial Sequence
  Description of Artificial Sequence: Synthetic oligonucleotide
guccuguccggucgaugag

SEQ ID NO: 2740220 - RNA, 19 nt, Artificial Sequence
  Description of Artificial Sequence: Synthetic oligonucleotide
ccccaucugaugcacacug

SEQ ID NO: 2740221 - RNA, 19 nt, Artificial Sequence
  Description of Artificial Sequence: Synthetic oligonucleotide
cgugcuccgagauaauaug

SEQ ID NO: 2740222 - RNA, 19 nt, Artificial Sequence
  Description of Artificial Sequence: Synthetic oligonucleotide
aggauguucuccggcuuga

SEQ ID NO: 2740223 - RNA, 19 nt, Artificial Sequence
  Description of Artificial Sequence: Synthetic oligonucleotide
ccggacuucaaagucuccc

SEQ ID NO: 2740224 - RNA, 19 nt, Artificial Sequence
  Description of Artificial Sequence: Synthetic oligonucleotide
agcucugcccggcccucuc

SEQ ID NO: 2740225 - RNA, 19 nt, Artificial Sequence
  Description of Artificial Sequence: Synthetic oligonucleotide
cagccaaaaucagcucagc

SEQ ID NO: 2740226 - RNA, 19 nt, Artificial Sequence
  Description of Artificial Sequence: Synthetic oligonucleotide
cacagcccacaagacuccg

SEQ ID NO: 2740227 - RNA, 19 nt, Artificial Sequence
  Description of Artificial Sequence: Synthetic oligonucleotide
cacaagacuccggacuuca

SEQ ID NO: 2740228 - RNA, 19 nt, Artificial Sequence
  Description of Artificial Sequence: Synthetic oligonucleotide
caccugcacuucagcaaag

SEQ ID NO: 2740229 - RNA, 19 nt, Artificial Sequence
  Description of Artificial Sequence: Synthetic oligonucleotide
gucccugcgcagcucugcc

SEQ ID NO: 2740230 - RNA, 19 nt, Artificial Sequence
  Description of Artificial Sequence: Synthetic oligonucleotide
gggacuugucccugcgcag

SEQ ID NO: 2740231 - RNA, 19 nt, Artificial Sequence
  Description of Artificial Sequence: Synthetic oligonucleotide
guccucauaucgauucaga

SEQ ID NO: 2740232 - RNA, 19 nt, Artificial Sequence
  Description of Artificial Sequence: Synthetic oligonucleotide
gcuccaggggacgaccugg

SEQ ID NO: 2740233 - RNA, 19 nt, Artificial Sequence
  Description of Artificial Sequence: Synthetic oligonucleotide
gguaaaacugaaucauguu

SEQ ID NO: 2740234 - RNA, 19 nt, Artificial Sequence
  Description of Artificial Sequence: Synthetic oligonucleotide
ggugugcuuggcucucgag

SEQ ID NO: 2740235 - RNA, 19 nt, Artificial Sequence
  Description of Artificial Sequence: Synthetic oligonucleotide
cuucucccgcuccagggga

SEQ ID NO: 2740236 - RNA, 19 nt, Artificial Sequence
  Description of Artificial Sequence: Synthetic oligonucleotide
auguguccuguccggucga

SEQ ID NO: 2740237 - RNA, 19 nt, Artificial Sequence
  Description of Artificial Sequence: Synthetic oligonucleotide
accugcacuucagcaaagu

SEQ ID NO: 2740238 - RNA, 19 nt, Artificial Sequence
  Description of Artificial Sequence: Synthetic oligonucleotide
uggcuggggccuucaggug

SEQ ID NO: 2740239 - RNA, 19 nt, Artificial Sequence
  Description of Artificial Sequence: Synthetic oligonucleotide
cuuggcucucgaggguggc

SEQ ID NO: 2740240 - RNA, 19 nt, Artificial Sequence
  Description of Artificial Sequence: Synthetic oligonucleotide
cccugcgcagcucugcccg

SEQ ID NO: 2740241 - RNA, 19 nt, Artificial Sequence
  Description of Artificial Sequence: Synthetic oligonucleotide
ggauccaagggcucgugcu

SEQ ID NO: 2740242 - RNA, 19 nt, Artificial Sequence
  Description of Artificial Sequence: Synthetic oligonucleotide
caguugccuucucucuaac

SEQ ID NO: 2740243 - RNA, 19 nt, Artificial Sequence
  Description of Artificial Sequence: Synthetic oligonucleotide
cuccccuccaggcugauau

SEQ ID NO: 2740244 - RNA, 19 nt, Artificial Sequence
  Description of Artificial Sequence: Synthetic oligonucleotide
gcucagcaaagguaaaacu

SEQ ID NO: 2740245 - RNA, 19 nt, Artificial Sequence
  Description of Artificial Sequence: Synthetic oligonucleotide
gggauccaagggcucgugc

SEQ ID NO: 2740246 - RNA, 19 nt, Artificial Sequence
  Description of Artificial Sequence: Synthetic oligonucleotide
auugguccucauaucgauu

SEQ ID NO: 2740247 - RNA, 19 nt, Artificial Sequence
  Description of Artificial Sequence: Synthetic oligonucleotide
cagcuugauguguccuguc

SEQ ID NO: 2740248 - RNA, 19 nt, Artificial Sequence
  Description of Artificial Sequence: Synthetic oligonucleotide
uccccaucugaugcacacu

SEQ ID NO: 2740249 - RNA, 19 nt, Artificial Sequence
  Description of Artificial Sequence: Synthetic oligonucleotide
cuggggacuucucccgcuc

SEQ ID NO: 2740250 - RNA, 19 nt, Artificial Sequence
  Description of Artificial Sequence: Synthetic oligonucleotide
ccgagauaauauguuccgc

SEQ ID NO: 2740251 - RNA, 19 nt, Artificial Sequence
  Description of Artificial Sequence: Synthetic oligonucleotide
uaaccagguaaagguuauu

SEQ ID NO: 2740252 - RNA, 19 nt, Artificial Sequence
  Description of Artificial Sequence: Synthetic oligonucleotide
augucucgaugcacauauc

SEQ ID NO: 2740253 - RNA, 19 nt, Artificial Sequence
  Description of Artificial Sequence: Synthetic oligonucleotide
ggcucucgaggguggcugg

SEQ ID NO: 2740254 - RNA, 19 nt, Artificial Sequence
  Description of Artificial Sequence: Synthetic oligonucleotide
cucgguaucgguggggugu

SEQ ID NO: 2740255 - RNA, 19 nt, Artificial Sequence
  Description of Artificial Sequence: Synthetic oligonucleotide
ucugcccggcccucucggu

SEQ ID NO: 2740256 - RNA, 19 nt, Artificial Sequence
  Description of Artificial Sequence: Synthetic oligonucleotide
ccugaaaggcauacuguaa

SEQ ID NO: 2740257 - RNA, 19 nt, Artificial Sequence
  Description of Artificial Sequence: Synthetic oligonucleotide
auguuccgcuccuccucga

SEQ ID NO: 2740258 - RNA, 19 nt, Artificial Sequence
  Description of Artificial Sequence: Synthetic oligonucleotide
cgagauaauauguuccgcu

SEQ ID NO: 2740259 - RNA, 19 nt, Artificial Sequence
  Description of Artificial Sequence: Synthetic oligonucleotide
ccggcuugaugucucgaug

SEQ ID NO: 2740260 - RNA, 19 nt, Artificial Sequence
  Description of Artificial Sequence: Synthetic oligonucleotide
cagcucagcaaagguaaaa

SEQ ID NO: 2740261 - RNA, 19 nt, Artificial Sequence
  Description of Artificial Sequence: Synthetic oligonucleotide
gugcuccgagauaauaugu

SEQ ID NO: 2740262 - RNA, 19 nt, Artificial Sequence
  Description of Artificial Sequence: Synthetic oligonucleotide
ccaccagcuugaugugucc

SEQ ID NO: 2740263 - RNA, 19 nt, Artificial Sequence
  Description of Artificial Sequence: Synthetic oligonucleotide
uggggccuucagguggcug

SEQ ID NO: 2740264 - RNA, 19 nt, Artificial Sequence
  Description of Artificial Sequence: Synthetic oligonucleotide
cucuaaccaccugcacuuc

SEQ ID NO: 2740265 - RNA, 19 nt, Artificial Sequence
  Description of Artificial Sequence: Synthetic oligonucleotide
gcccacaagacuccggacu

SEQ ID NO: 2740266 - RNA, 19 nt, Artificial Sequence
  Description of Artificial Sequence: Synthetic oligonucleotide
uggggugugcuuggcucuc

SEQ ID NO: 2740267 - RNA, 19 nt, Artificial Sequence
  Description of Artificial Sequence: Synthetic oligonucleotide
cugcccggcccucucgguc

SEQ ID NO: 2740268 - RNA, 19 nt, Artificial Sequence
  Description of Artificial Sequence: Synthetic oligonucleotide
cgauucagaagugacagua

SEQ ID NO: 2740269 - RNA, 19 nt, Artificial Sequence
  Description of Artificial Sequence: Synthetic oligonucleotide
cucggucucugucucggua

SEQ ID NO: 2740270 - RNA, 19 nt, Artificial Sequence
  Description of Artificial Sequence: Synthetic oligonucleotide
cgaugaggauguucuccgg

SEQ ID NO: 2740271 - RNA, 19 nt, Artificial Sequence
  Description of Artificial Sequence: Synthetic oligonucleotide
uguguccuguccggucgau

SEQ ID NO: 2740272 - RNA, 19 nt, Artificial Sequence
  Description of Artificial Sequence: Synthetic oligonucleotide
guccggucgaugaggaugu

SEQ ID NO: 2740273 - RNA, 19 nt, Artificial Sequence
  Description of Artificial Sequence: Synthetic oligonucleotide
guguccuguccggucgaug

SEQ ID NO: 2740274 - RNA, 19 nt, Artificial Sequence
  Description of Artificial Sequence: Synthetic oligonucleotide
ccaggggacgaccugggga

SEQ ID NO: 2740275 - RNA, 19 nt, Artificial Sequence
  Description of Artificial Sequence: Synthetic oligonucleotide
ccaggcugauauuccauaa

SEQ ID NO: 2740276 - RNA, 19 nt, Artificial Sequence
  Description of Artificial Sequence: Synthetic oligonucleotide
gcacauauccccaucugau

SEQ ID NO: 2740277 - RNA, 19 nt, Artificial Sequence
  Description of Artificial Sequence: Synthetic oligonucleotide
cucgugcuccgagauaaua

SEQ ID NO: 2740278 - RNA, 19 nt, Artificial Sequence
  Description of Artificial Sequence: Synthetic oligonucleotide
ggcccucucggucucuguc

SEQ ID NO: 2740279 - RNA, 19 nt, Artificial Sequence
  Description of Artificial Sequence: Synthetic oligonucleotide
ccuccaggcugauauucca

SEQ ID NO: 2740280 - RNA, 19 nt, Artificial Sequence
  Description of Artificial Sequence: Synthetic oligonucleotide
gucucgguaucgguggggu

SEQ ID NO: 2740281 - RNA, 19 nt, Artificial Sequence
  Description of Artificial Sequence: Synthetic oligonucleotide
ccaccugcacuucagcaaa

SEQ ID NO: 2740282 - RNA, 19 nt, Artificial Sequence
  Description of Artificial Sequence: Synthetic oligonucleotide
ccuguccggucgaugagga

SEQ ID NO: 2740283 - RNA, 19 nt, Artificial Sequence
  Description of Artificial Sequence: Synthetic oligonucleotide
acaagacuccggacuucaa

SEQ ID NO: 2740284 - RNA, 19 nt, Artificial Sequence
  Description of Artificial Sequence: Synthetic oligonucleotide
cugggccagcaaagccuuc

SEQ ID NO: 2740285 - RNA, 19 nt, Artificial Sequence
  Description of Artificial Sequence: Synthetic oligonucleotide
cuccaggcugauauuccau

SEQ ID NO: 2740286 - RNA, 19 nt, Artificial Sequence
  Description of Artificial Sequence: Synthetic oligonucleotide
guaucgguggggugugcuu

SEQ ID NO: 2740287 - RNA, 19 nt, Artificial Sequence
  Description of Artificial Sequence: Synthetic oligonucleotide
ucccgcuccaggggacgac

SEQ ID NO: 2740288 - RNA, 19 nt, Artificial Sequence
  Description of Artificial Sequence: Synthetic oligonucleotide
cagguggcugauccaaaau

SEQ ID NO: 2740289 - RNA, 19 nt, Artificial Sequence
  Description of Artificial Sequence: Synthetic oligonucleotide
ggggugugcuuggcucucg

SEQ ID NO: 2740290 - RNA, 19 nt, Artificial Sequence
  Description of Artificial Sequence: Synthetic oligonucleotide
gcacuucagcaaagugacc

SEQ ID NO: 2740291 - RNA, 19 nt, Artificial Sequence
  Description of Artificial Sequence: Synthetic oligonucleotide
ccccuccaggcugauauuc

SEQ ID NO: 2740292 - RNA, 19 nt, Artificial Sequence
  Description of Artificial Sequence: Synthetic oligonucleotide
aggggacgaccuggggacu

SEQ ID NO: 2740293 - RNA, 19 nt, Artificial Sequence
  Description of Artificial Sequence: Synthetic oligonucleotide
gggugugcuuggcucucga

SEQ ID NO: 2740294 - RNA, 19 nt, Artificial Sequence
  Description of Artificial Sequence: Synthetic oligonucleotide
aacuccccuccaggcugau

SEQ ID NO: 2740295 - RNA, 19 nt, Artificial Sequence
  Description of Artificial Sequence: Synthetic oligonucleotide
gguaucgguggggugugcu

SEQ ID NO: 2740296 - RNA, 19 nt, Artificial Sequence
  Description of Artificial Sequence: Synthetic oligonucleotide
gggacgaccuggggacuug

SEQ ID NO: 2740297 - RNA, 19 nt, Artificial Sequence
  Description of Artificial Sequence: Synthetic oligonucleotide
ggggauccaagggcucgug

SEQ ID NO: 2740298 - RNA, 19 nt, Artificial Sequence
  Description of Artificial Sequence: Synthetic oligonucleotide
caaaauccaccagcuugau

SEQ ID NO: 2740299 - RNA, 19 nt, Artificial Sequence
  Description of Artificial Sequence: Synthetic oligonucleotide
gaggguggcuggggccuuc

SEQ ID NO: 2740300 - RNA, 19 nt, Artificial Sequence
  Description of Artificial Sequence: Synthetic oligonucleotide
ccggucgaugaggauguuc

SEQ ID NO: 2740301 - RNA, 19 nt, Artificial Sequence
  Description of Artificial Sequence: Synthetic oligonucleotide
cuccggcuugaugucucga

SEQ ID NO: 2740302 - RNA, 19 nt, Artificial Sequence
  Description of Artificial Sequence: Synthetic oligonucleotide
cccgcuccaggggacgacc

SEQ ID NO: 2740303 - RNA, 19 nt, Artificial Sequence
  Description of Artificial Sequence: Synthetic oligonucleotide
cccaguugccuucucucua

SEQ ID NO: 2740304 - RNA, 19 nt, Artificial Sequence
  Description of Artificial Sequence: Synthetic oligonucleotide
ccacaagacuccggacuuc

SEQ ID NO: 2740305 - RNA, 19 nt, Artificial Sequence
  Description of Artificial Sequence: Synthetic oligonucleotide
cgucuaauugguccucaua

SEQ ID NO: 2740306 - RNA, 19 nt, Artificial Sequence
  Description of Artificial Sequence: Synthetic oligonucleotide
cccacaagacuccggacuu

SEQ ID NO: 2740307 - RNA, 19 nt, Artificial Sequence
  Description of Artificial Sequence: Synthetic oligonucleotide
uccggucgaugaggauguu

SEQ ID NO: 2740308 - RNA, 19 nt, Artificial Sequence
  Description of Artificial Sequence: Synthetic oligonucleotide
acuccccuccaggcugaua

SEQ ID NO: 2740309 - RNA, 19 nt, Artificial Sequence
  Description of Artificial Sequence: Synthetic oligonucleotide
gggcucgugcuccgagaua

SEQ ID NO: 2740310 - RNA, 19 nt, Artificial Sequence
  Description of Artificial Sequence: Synthetic oligonucleotide
cuguccggucgaugaggau

SEQ ID NO: 2740311 - RNA, 19 nt, Artificial Sequence
  Description of Artificial Sequence: Synthetic oligonucleotide
ccggcccucucggucucug

SEQ ID NO: 2740312 - RNA, 19 nt, Artificial Sequence
  Description of Artificial Sequence: Synthetic oligonucleotide
ccaagggcucgugcuccga

SEQ ID NO: 2740313 - RNA, 19 nt, Artificial Sequence
  Description of Artificial Sequence: Synthetic oligonucleotide
gcccggcccucucggucuc

SEQ ID NO: 2740314 - RNA, 19 nt, Artificial Sequence
  Description of Artificial Sequence: Synthetic oligonucleotide
ggggacgaccuggggacuu

SEQ ID NO: 2740315 - RNA, 19 nt, Artificial Sequence
  Description of Artificial Sequence: Synthetic oligonucleotide
cgguaucgguggggugugc

SEQ ID NO: 2740316 - RNA, 19 nt, Artificial Sequence
  Description of Artificial Sequence: Synthetic oligonucleotide
ccgcuccaggggacgaccu

SEQ ID NO: 2740317 - RNA, 19 nt, Artificial Sequence
  Description of Artificial Sequence: Synthetic oligonucleotide
cuggggccuucagguggcu

SEQ ID NO: 2740318 - RNA, 19 nt, Artificial Sequence
  Description of Artificial Sequence: Synthetic oligonucleotide
gcucgugcuccgagauaau

SEQ ID NO: 2740319 - RNA, 19 nt, Artificial Sequence
  Description of Artificial Sequence: Synthetic oligonucleotide
cccggcccucucggucucu

SEQ ID NO: 2740320 - RNA, 19 nt, Artificial Sequence
  Description of Artificial Sequence: Synthetic oligonucleotide
aaauacagaaauuaggaag

SEQ ID NO: 2740321 - RNA, 19 nt, Artificial Sequence
  Description of Artificial Sequence: Synthetic oligonucleotide
aauaauauaagcuacuuaa

SEQ ID NO: 2740322 - RNA, 19 nt, Artificial Sequence
  Description of Artificial Sequence: Synthetic oligonucleotide
uauaauaauaauauaagcu

SEQ ID NO: 2740323 - RNA, 19 nt, Artificial Sequence
  Description of Artificial Sequence: Synthetic oligonucleotide
aauacuguacacuuuuccc

SEQ ID NO: 2740324 - RNA, 19 nt, Artificial Sequence
  Description of Artificial Sequence: Synthetic oligonucleotide
auauaagcuacuuaaagac

SEQ ID NO: 2740325 - RNA, 19 nt, Artificial Sequence
  Description of Artificial Sequence: Synthetic oligonucleotide
aauuucauauuuaaaauac

SEQ ID NO: 2740326 - RNA, 19 nt, Artificial Sequence
  Description of Artificial Sequence: Synthetic oligonucleotide
ucuaaauacaacuuuaagc

SEQ ID NO: 2740327 - RNA, 19 nt, Artificial Sequence
  Description of Artificial Sequence: Synthetic oligonucleotide
uuuaauuucauauuuaaaa

SEQ ID NO: 2740328 - RNA, 19 nt, Artificial Sequence
  Description of Artificial Sequence: Synthetic oligonucleotide
aggaaaaggauauuaaagc

SEQ ID NO: 2740329 - RNA, 19 nt, Artificial Sequence
  Description of Artificial Sequence: Synthetic oligonucleotide
aaguaagaauucuaaauac

SEQ ID NO: 2740330 - RNA, 19 nt, Artificial Sequence
  Description of Artificial Sequence: Synthetic oligonucleotide
aagaauucuaaauacaacu

SEQ ID NO: 2740331 - RNA, 19 nt, Artificial Sequence
  Description of Artificial Sequence: Synthetic oligonucleotide
uaaaauacagaaauuagga

SEQ ID NO: 2740332 - RNA, 19 nt, Artificial Sequence
  Description of Artificial Sequence: Synthetic oligonucleotide
aaauacuguacacuuuucc

SEQ ID NO: 2740333 - RNA, 19 nt, Artificial Sequence
  Description of Artificial Sequence: Synthetic oligonucleotide
acaaacaugacauuuuaac

SEQ ID NO: 2740334 - RNA, 19 nt, Artificial Sequence
  Description of Artificial Sequence: Synthetic oligonucleotide
aauauaagcuacuuaaaga

SEQ ID NO: 2740335 - RNA, 19 nt, Artificial Sequence
  Description of Artificial Sequence: Synthetic oligonucleotide
aguaauacaauuuuaauuu

SEQ ID NO: 2740336 - RNA, 19 nt, Artificial Sequence
  Description of Artificial Sequence: Synthetic oligonucleotide
uaauauaagcuacuuaaag

SEQ ID NO: 2740337 - RNA, 19 nt, Artificial Sequence
  Description of Artificial Sequence: Synthetic oligonucleotide
auuuuaaccaaaccuacac

SEQ ID NO: 2740338 - RNA, 19 nt, Artificial Sequence
  Description of Artificial Sequence: Synthetic oligonucleotide
aaaaguaguaaugucacag

SEQ ID NO: 2740339 - RNA, 19 nt, Artificial Sequence
  Description of Artificial Sequence: Synthetic oligonucleotide
uacaauuuuaauuucauau

SEQ ID NO: 2740340 - RNA, 19 nt, Artificial Sequence
  Description of Artificial Sequence: Synthetic oligonucleotide
cuauaauaauaauauaagc

SEQ ID NO: 2740341 - RNA, 19 nt, Artificial Sequence
  Description of Artificial Sequence: Synthetic oligonucleotide
ugacauuuuaaccaaaccu

SEQ ID NO: 2740342 - RNA, 19 nt, Artificial Sequence
  Description of Artificial Sequence: Synthetic oligonucleotide
aagaaacuaaaaguguacc

SEQ ID NO: 2740343 - RNA, 19 nt, Artificial Sequence
  Description of Artificial Sequence: Synthetic oligonucleotide
auaauaauaauauaagcua

SEQ ID NO: 2740344 - RNA, 19 nt, Artificial Sequence
  Description of Artificial Sequence: Synthetic oligonucleotide
ucacaguuaagacaaagcc

SEQ ID NO: 2740345 - RNA, 19 nt, Artificial Sequence
  Description of Artificial Sequence: Synthetic oligonucleotide
uaauaauaauauaagcuac

SEQ ID NO: 2740346 - RNA, 19 nt, Artificial Sequence
  Description of Artificial Sequence: Synthetic oligonucleotide
ucuguaauuauaaagguuu

SEQ ID NO: 2740347 - RNA, 19 nt, Artificial Sequence
  Description of Artificial Sequence: Synthetic oligonucleotide
aaauaaauacuguacacuu

SEQ ID NO: 2740348 - RNA, 19 nt, Artificial Sequence
  Description of Artificial Sequence: Synthetic oligonucleotide
uacuuaaagacuuacaaau

SEQ ID NO: 2740349 - RNA, 19 nt, Artificial Sequence
  Description of Artificial Sequence: Synthetic oligonucleotide
aaguaauacaauuuuaauu

SEQ ID NO: 2740350 - RNA, 19 nt, Artificial Sequence
  Description of Artificial Sequence: Synthetic oligonucleotide
caaaagaugggaaauacug

SEQ ID NO: 2740351 - RNA, 19 nt, Artificial Sequence
  Description of Artificial Sequence: Synthetic oligonucleotide
agcaguaugaagaaggccc

SEQ ID NO: 2740352 - RNA, 19 nt, Artificial Sequence
  Description of Artificial Sequence: Synthetic oligonucleotide
acaaaauaaauacuguaca

SEQ ID NO: 2740353 - RNA, 19 nt, Artificial Sequence
  Description of Artificial Sequence: Synthetic oligonucleotide
uuaauuucauauuuaaaau

SEQ ID NO: 2740354 - RNA, 19 nt, Artificial Sequence
  Description of Artificial Sequence: Synthetic oligonucleotide
aaauacaacuuuaagcaag

SEQ ID NO: 2740355 - RNA, 19 nt, Artificial Sequence
  Description of Artificial Sequence: Synthetic oligonucleotide
aagcuguucucuuugggac

SEQ ID NO: 2740356 - RNA, 19 nt, Artificial Sequence
  Description of Artificial Sequence: Synthetic oligonucleotide
uuaaagacuuacaaauuca

SEQ ID NO: 2740357 - RNA, 19 nt, Artificial Sequence
  Description of Artificial Sequence: Synthetic oligonucleotide
uaaagacuuacaaauucag

SEQ ID NO: 2740358 - RNA, 19 nt, Artificial Sequence
  Description of Artificial Sequence: Synthetic oligonucleotide
aauacagaaauuaggaagu

SEQ ID NO: 2740359 - RNA, 19 nt, Artificial Sequence
  Description of Artificial Sequence: Synthetic oligonucleotide
auacuguucuguuuuaaac

SEQ ID NO: 2740360 - RNA, 19 nt, Artificial Sequence
  Description of Artificial Sequence: Synthetic oligonucleotide
caaacaugacauuuuaacc

SEQ ID NO: 2740361 - RNA, 19 nt, Artificial Sequence
  Description of Artificial Sequence: Synthetic oligonucleotide
aaugucacaguuaagacaa

SEQ ID NO: 2740362 - RNA, 19 nt, Artificial Sequence
  Description of Artificial Sequence: Synthetic oligonucleotide
uuaagacaaagccuuaaga

SEQ ID NO: 2740363 - RNA, 19 nt, Artificial Sequence
  Description of Artificial Sequence: Synthetic oligonucleotide
augacauuuuaaccaaacc

SEQ ID NO: 2740364 - RNA, 19 nt, Artificial Sequence
  Description of Artificial Sequence: Synthetic oligonucleotide
uuaagaaacuaaaagugua

SEQ ID NO: 2740365 - RNA, 19 nt, Artificial Sequence
  Description of Artificial Sequence: Synthetic oligonucleotide
aaaaggauauuaaagcugu

SEQ ID NO: 2740366 - RNA, 19 nt, Artificial Sequence
  Description of Artificial Sequence: Synthetic oligonucleotide
aguaaugucacaguuaaga

SEQ ID NO: 2740367 - RNA, 19 nt, Artificial Sequence
  Description of Artificial Sequence: Synthetic oligonucleotide
uccccuauaauaauaauau

SEQ ID NO: 2740368 - RNA, 19 nt, Artificial Sequence
  Description of Artificial Sequence: Synthetic oligonucleotide
aaggauauuaaagcuguuc

SEQ ID NO: 2740369 - RNA, 19 nt, Artificial Sequence
  Description of Artificial Sequence: Synthetic oligonucleotide
aacaccagcaguaugaaga

SEQ ID NO: 2740370 - RNA, 19 nt, Artificial Sequence
  Description of Artificial Sequence: Synthetic oligonucleotide
aaauuaggaaguaagaauu

SEQ ID NO: 2740371 - RNA, 19 nt, Artificial Sequence
  Description of Artificial Sequence: Synthetic oligonucleotide
aagcaagucacuugucuuc

SEQ ID NO: 2740372 - RNA, 19 nt, Artificial Sequence
  Description of Artificial Sequence: Synthetic oligonucleotide
aaagaugggaaauacuguu

SEQ ID NO: 2740373 - RNA, 19 nt, Artificial Sequence
  Description of Artificial Sequence: Synthetic oligonucleotide
agacaaagccuuaagaaac

SEQ ID NO: 2740374 - RNA, 19 nt, Artificial Sequence
  Description of Artificial Sequence: Synthetic oligonucleotide
aauaauaauauaagcuacu

SEQ ID NO: 2740375 - RNA, 19 nt, Artificial Sequence
  Description of Artificial Sequence: Synthetic oligonucleotide
uuuaaccaaaccuacacuu

SEQ ID NO: 2740376 - RNA, 19 nt, Artificial Sequence
  Description of Artificial Sequence: Synthetic oligonucleotide
uaauuucauauuuaaaaua

SEQ ID NO: 2740377 - RNA, 19 nt, Artificial Sequence
  Description of Artificial Sequence: Synthetic oligonucleotide
uaagaauucuaaauacaac

SEQ ID NO: 2740378 - RNA, 19 nt, Artificial Sequence
  Description of Artificial Sequence: Synthetic oligonucleotide
uuaagcaagucacuugucu

SEQ ID NO: 2740379 - RNA, 19 nt, Artificial Sequence
  Description of Artificial Sequence: Synthetic oligonucleotide
aggauauuaaagcuguucu

SEQ ID NO: 2740380 - RNA, 19 nt, Artificial Sequence
  Description of Artificial Sequence: Synthetic oligonucleotide
uaaugucacaguuaagaca

SEQ ID NO: 2740381 - RNA, 19 nt, Artificial Sequence
  Description of Artificial Sequence: Synthetic oligonucleotide
aggaacaaaauaaauacug

SEQ ID NO: 2740382 - RNA, 19 nt, Artificial Sequence
  Description of Artificial Sequence: Synthetic oligonucleotide
gaaguaagaauucuaaaua

SEQ ID NO: 2740383 - RNA, 19 nt, Artificial Sequence
  Description of Artificial Sequence: Synthetic oligonucleotide
aauuaggaaguaagaauuc

SEQ ID NO: 2740384 - RNA, 19 nt, Artificial Sequence
  Description of Artificial Sequence: Synthetic oligonucleotide
gaaacuaaaaguguaccac

SEQ ID NO: 2740385 - RNA, 19 nt, Artificial Sequence
  Description of Artificial Sequence: Synthetic oligonucleotide
aaaguaguaaugucacagu

SEQ ID NO: 2740386 - RNA, 19 nt, Artificial Sequence
  Description of Artificial Sequence: Synthetic oligonucleotide
uccaacaccagcaguauga

SEQ ID NO: 2740387 - RNA, 19 nt, Artificial Sequence
  Description of Artificial Sequence: Synthetic oligonucleotide
acagaaauuaggaaguaag

SEQ ID NO: 2740388 - RNA, 19 nt, Artificial Sequence
  Description of Artificial Sequence: Synthetic oligonucleotide
uacacuuuccccauuagua

SEQ ID NO: 2740389 - RNA, 19 nt, Artificial Sequence
  Description of Artificial Sequence: Synthetic oligonucleotide
uauaagcuacuuaaagacu

SEQ ID NO: 2740390 - RNA, 19 nt, Artificial Sequence
  Description of Artificial Sequence: Synthetic oligonucleotide
auaaauacuguacacuuuu

SEQ ID NO: 2740391 - RNA, 19 nt, Artificial Sequence
  Description of Artificial Sequence: Synthetic oligonucleotide
ucaaaacagaaguaauaca

SEQ ID NO: 2740392 - RNA, 19 nt, Artificial Sequence
  Description of Artificial Sequence: Synthetic oligonucleotide
uaaagcuguucucuuuggg

SEQ ID NO: 2740393 - RNA, 19 nt, Artificial Sequence
  Description of Artificial Sequence: Synthetic oligonucleotide
uugucuuccccuauaauaa

SEQ ID NO: 2740394 - RNA, 19 nt, Artificial Sequence
  Description of Artificial Sequence: Synthetic oligonucleotide
uuuuaaccaaaccuacacu

SEQ ID NO: 2740395 - RNA, 19 nt, Artificial Sequence
  Description of Artificial Sequence: Synthetic oligonucleotide
agaaacuaaaaguguacca

SEQ ID NO: 2740396 - RNA, 19 nt, Artificial Sequence
  Description of Artificial Sequence: Synthetic oligonucleotide
aauacuguucuguuuuaaa

SEQ ID NO: 2740397 - RNA, 19 nt, Artificial Sequence
  Description of Artificial Sequence: Synthetic oligonucleotide
uaggaaguaagaauucuaa

SEQ ID NO: 2740398 - RNA, 19 nt, Artificial Sequence
  Description of Artificial Sequence: Synthetic oligonucleotide
aaaacaggaacaaaauaaa

SEQ ID NO: 2740399 - RNA, 19 nt, Artificial Sequence
  Description of Artificial Sequence: Synthetic oligonucleotide
accaaaccuacacuuuccc

SEQ ID NO: 2740400 - RNA, 19 nt, Artificial Sequence
  Description of Artificial Sequence: Synthetic oligonucleotide
uaauaauauaagcuacuua

SEQ ID NO: 2740401 - RNA, 19 nt, Artificial Sequence
  Description of Artificial Sequence: Synthetic oligonucleotide
acauuuuaaccaaaccuac

SEQ ID NO: 2740402 - RNA, 19 nt, Artificial Sequence
  Description of Artificial Sequence: Synthetic oligonucleotide
auuaguaggaaaaggauau

SEQ ID NO: 2740403 - RNA, 19 nt, Artificial Sequence
  Description of Artificial Sequence: Synthetic oligonucleotide
agacuuacaaauucagagu

SEQ ID NO: 2740404 - RNA, 19 nt, Artificial Sequence
  Description of Artificial Sequence: Synthetic oligonucleotide
acagaaguaauacaauuuu

SEQ ID NO: 2740405 - RNA, 19 nt, Artificial Sequence
  Description of Artificial Sequence: Synthetic oligonucleotide
guuaagacaaagccuuaag

SEQ ID NO: 2740406 - RNA, 19 nt, Artificial Sequence
  Description of Artificial Sequence: Synthetic oligonucleotide
aaccaaaccuacacuuucc

SEQ ID NO: 2740407 - RNA, 19 nt, Artificial Sequence
  Description of Artificial Sequence: Synthetic oligonucleotide
aaguaguaaugucacaguu

SEQ ID NO: 2740408 - RNA, 19 nt, Artificial Sequence
  Description of Artificial Sequence: Synthetic oligonucleotide
auacuguacacuuuucccu

SEQ ID NO: 2740409 - RNA, 19 nt, Artificial Sequence
  Description of Artificial Sequence: Synthetic oligonucleotide
gaaauuaggaaguaagaau

SEQ ID NO: 2740410 - RNA, 19 nt, Artificial Sequence
  Description of Artificial Sequence: Synthetic oligonucleotide
ucuuccaacaccagcagua

SEQ ID NO: 2740411 - RNA, 19 nt, Artificial Sequence
  Description of Artificial Sequence: Synthetic oligonucleotide
agaugggaaauacuguucu

SEQ ID NO: 2740412 - RNA, 19 nt, Artificial Sequence
  Description of Artificial Sequence: Synthetic oligonucleotide
guaguaaugucacaguuaa

SEQ ID NO: 2740413 - RNA, 19 nt, Artificial Sequence
  Description of Artificial Sequence: Synthetic oligonucleotide
aaagccuuaagaaacuaaa

SEQ ID NO: 2740414 - RNA, 19 nt, Artificial Sequence
  Description of Artificial Sequence: Synthetic oligonucleotide
aauacaacuuuaagcaagu

SEQ ID NO: 2740415 - RNA, 19 nt, Artificial Sequence
  Description of Artificial Sequence: Synthetic oligonucleotide
acacuuuccccauuaguag

SEQ ID NO: 2740416 - RNA, 19 nt, Artificial Sequence
  Description of Artificial Sequence: Synthetic oligonucleotide
agauguuggcucuuccaac

SEQ ID NO: 2740417 - RNA, 19 nt, Artificial Sequence
  Description of Artificial Sequence: Synthetic oligonucleotide
cccucuguaauuauaaagg

SEQ ID NO: 2740418 - RNA, 19 nt, Artificial Sequence
  Description of Artificial Sequence: Synthetic oligonucleotide
aaaagaugggaaauacugu

SEQ ID NO: 2740419 - RNA, 19 nt, Artificial Sequence
  Description of Artificial Sequence: Synthetic oligonucleotide
uuccccuauaauaauaaua

SEQ ID NO: 2740420 - RNA, 19 nt, Artificial Sequence
  Description of Artificial Sequence: Synthetic oligonucleotide
acuuuaagcaagucacuug

SEQ ID NO: 2740421 - RNA, 19 nt, Artificial Sequence
  Description of Artificial Sequence: Synthetic oligonucleotide
agaaauuaggaaguaagaa

SEQ ID NO: 2740422 - RNA, 19 nt, Artificial Sequence
  Description of Artificial Sequence: Synthetic oligonucleotide
uguucuguuuuaaacuaaa

SEQ ID NO: 2740423 - RNA, 19 nt, Artificial Sequence
  Description of Artificial Sequence: Synthetic oligonucleotide
caugacauuuuaaccaaac

SEQ ID NO: 2740424 - RNA, 19 nt, Artificial Sequence
  Description of Artificial Sequence: Synthetic oligonucleotide
aagcuacuuaaagacuuac

SEQ ID NO: 2740425 - RNA, 19 nt, Artificial Sequence
  Description of Artificial Sequence: Synthetic oligonucleotide
uaaauacaacuuuaagcaa

SEQ ID NO: 2740426 - RNA, 19 nt, Artificial Sequence
  Description of Artificial Sequence: Synthetic oligonucleotide
aagaugggaaauacuguuc

SEQ ID NO: 2740427 - RNA, 19 nt, Artificial Sequence
  Description of Artificial Sequence: Synthetic oligonucleotide
uuaggaaguaagaauucua

SEQ ID NO: 2740428 - RNA, 19 nt, Artificial Sequence
  Description of Artificial Sequence: Synthetic oligonucleotide
uaaccaaaccuacacuuuc

SEQ ID NO: 2740429 - RNA, 19 nt, Artificial Sequence
  Description of Artificial Sequence: Synthetic oligonucleotide
guaaugucacaguuaagac

SEQ ID NO: 2740430 - RNA, 19 nt, Artificial Sequence
  Description of Artificial Sequence: Synthetic oligonucleotide
ucuuccccuauaauaauaa

SEQ ID NO: 2740431 - RNA, 19 nt, Artificial Sequence
  Description of Artificial Sequence: Synthetic oligonucleotide
gacuuacaaauucagagua

SEQ ID NO: 2740432 - RNA, 19 nt, Artificial Sequence
  Description of Artificial Sequence: Synthetic oligonucleotide
aacuacaaacaugacauuu

SEQ ID NO: 2740433 - RNA, 19 nt, Artificial Sequence
  Description of Artificial Sequence: Synthetic oligonucleotide
uuccccauuaguaggaaaa

SEQ ID NO: 2740434 - RNA, 19 nt, Artificial Sequence
  Description of Artificial Sequence: Synthetic oligonucleotide
cauauuuaaaauacagaaa

SEQ ID NO: 2740435 - RNA, 19 nt, Artificial Sequence
  Description of Artificial Sequence: Synthetic oligonucleotide
uacuguacacuuuucccug

SEQ ID NO: 2740436 - RNA, 19 nt, Artificial Sequence
  Description of Artificial Sequence: Synthetic oligonucleotide
agcuguucucuuugggacc

SEQ ID NO: 2740437 - RNA, 19 nt, Artificial Sequence
  Description of Artificial Sequence: Synthetic oligonucleotide
agaaguaauacaauuuuaa

SEQ ID NO: 2740438 - RNA, 19 nt, Artificial Sequence
  Description of Artificial Sequence: Synthetic oligonucleotide
gacauuuuaaccaaaccua

SEQ ID NO: 2740439 - RNA, 19 nt, Artificial Sequence
  Description of Artificial Sequence: Synthetic oligonucleotide
caaaccuacacuuucccca

SEQ ID NO: 2740440 - RNA, 19 nt, Artificial Sequence
  Description of Artificial Sequence: Synthetic oligonucleotide
aacagaaguaauacaauuu

SEQ ID NO: 2740441 - RNA, 19 nt, Artificial Sequence
  Description of Artificial Sequence: Synthetic oligonucleotide
aaaacagaaguaauacaau

SEQ ID NO: 2740442 - RNA, 19 nt, Artificial Sequence
  Description of Artificial Sequence: Synthetic oligonucleotide
aaagacuuacaaauucaga

SEQ ID NO: 2740443 - RNA, 19 nt, Artificial Sequence
  Description of Artificial Sequence: Synthetic oligonucleotide
acuguacacuuuucccugc

SEQ ID NO: 2740444 - RNA, 19 nt, Artificial Sequence
  Description of Artificial Sequence: Synthetic oligonucleotide
ugucacaguuaagacaaag

SEQ ID NO: 2740445 - RNA, 19 nt, Artificial Sequence
  Description of Artificial Sequence: Synthetic oligonucleotide
gauguuggcucuuccaaca

SEQ ID NO: 2740446 - RNA, 19 nt, Artificial Sequence
  Description of Artificial Sequence: Synthetic oligonucleotide
guaagaauucuaaauacaa

SEQ ID NO: 2740447 - RNA, 19 nt, Artificial Sequence
  Description of Artificial Sequence: Synthetic oligonucleotide
aguaagaauucuaaauaca

SEQ ID NO: 2740448 - RNA, 19 nt, Artificial Sequence
  Description of Artificial Sequence: Synthetic oligonucleotide
acaguuaagacaaagccuu

SEQ ID NO: 2740449 - RNA, 19 nt, Artificial Sequence
  Description of Artificial Sequence: Synthetic oligonucleotide
agcaagucacuugucuucc

SEQ ID NO: 2740450 - RNA, 19 nt, Artificial Sequence
  Description of Artificial Sequence: Synthetic oligonucleotide
uaugaagaaggcccucugu

SEQ ID NO: 2740451 - RNA, 19 nt, Artificial Sequence
  Description of Artificial Sequence: Synthetic oligonucleotide
cacuuuccccauuaguagg

SEQ ID NO: 2740452 - RNA, 19 nt, Artificial Sequence
  Description of Artificial Sequence: Synthetic oligonucleotide
acuuuucccugccugcagg

SEQ ID NO: 2740453 - RNA, 19 nt, Artificial Sequence
  Description of Artificial Sequence: Synthetic oligonucleotide
uacacuuuucccugccugc

SEQ ID NO: 2740454 - RNA, 19 nt, Artificial Sequence
  Description of Artificial Sequence: Synthetic oligonucleotide
auuaggaaguaagaauucu

SEQ ID NO: 2740455 - RNA, 19 nt, Artificial Sequence
  Description of Artificial Sequence: Synthetic oligonucleotide
ugugguagauguuggcucu

SEQ ID NO: 2740456 - RNA, 19 nt, Artificial Sequence
  Description of Artificial Sequence: Synthetic oligonucleotide
uuaaccaaaccuacacuuu

SEQ ID NO: 2740457 - RNA, 19 nt, Artificial Sequence
  Description of Artificial Sequence: Synthetic oligonucleotide
aacuuuaagcaagucacuu

SEQ ID NO: 2740458 - RNA, 19 nt, Artificial Sequence
  Description of Artificial Sequence: Synthetic oligonucleotide
cuuaagaaacuaaaagugu

SEQ ID NO: 2740459 - RNA, 19 nt, Artificial Sequence
  Description of Artificial Sequence: Synthetic oligonucleotide
guaggaaaaggauauuaaa

SEQ ID NO: 2740460 - RNA, 19 nt, Artificial Sequence
  Description of Artificial Sequence: Synthetic oligonucleotide
aaacaggaacaaaauaaau

SEQ ID NO: 2740461 - RNA, 19 nt, Artificial Sequence
  Description of Artificial Sequence: Synthetic oligonucleotide
cuugucuuccccuauaaua

SEQ ID NO: 2740462 - RNA, 19 nt, Artificial Sequence
  Description of Artificial Sequence: Synthetic oligonucleotide
aaaccuacacuuuccccau

SEQ ID NO: 2740463 - RNA, 19 nt, Artificial Sequence
  Description of Artificial Sequence: Synthetic oligonucleotide
uacaaacaugacauuuuaa

SEQ ID NO: 2740464 - RNA, 19 nt, Artificial Sequence
  Description of Artificial Sequence: Synthetic oligonucleotide
aagucacuugucuuccccu

SEQ ID NO: 2740465 - RNA, 19 nt, Artificial Sequence
  Description of Artificial Sequence: Synthetic oligonucleotide
uaaauacuguacacuuuuc

SEQ ID NO: 2740466 - RNA, 19 nt, Artificial Sequence
  Description of Artificial Sequence: Synthetic oligonucleotide
auaagcuacuuaaagacuu

SEQ ID NO: 2740467 - RNA, 19 nt, Artificial Sequence
  Description of Artificial Sequence: Synthetic oligonucleotide
uguuggcucuuccaacacc

SEQ ID NO: 2740468 - RNA, 19 nt, Artificial Sequence
  Description of Artificial Sequence: Synthetic oligonucleotide
ugaagaaggcccucuguaa

SEQ ID NO: 2740469 - RNA, 19 nt, Artificial Sequence
  Description of Artificial Sequence: Synthetic oligonucleotide
auaauaauauaagcuacuu

SEQ ID NO: 2740470 - RNA, 19 nt, Artificial Sequence
  Description of Artificial Sequence: Synthetic oligonucleotide
gcuacuuaaagacuuacaa

SEQ ID NO: 2740471 - RNA, 19 nt, Artificial Sequence
  Description of Artificial Sequence: Synthetic oligonucleotide
aauaaauacuguacacuuu

SEQ ID NO: 2740472 - RNA, 19 nt, Artificial Sequence
  Description of Artificial Sequence: Synthetic oligonucleotide
accaccacugccccugugg

SEQ ID NO: 2740473 - RNA, 19 nt, Artificial Sequence
  Description of Artificial Sequence: Synthetic oligonucleotide
cauuaguaggaaaaggaua

SEQ ID NO: 2740474 - RNA, 19 nt, Artificial Sequence
  Description of Artificial Sequence: Synthetic oligonucleotide
gaugggaaauacuguucug

SEQ ID NO: 2740475 - RNA, 19 nt, Artificial Sequence
  Description of Artificial Sequence: Synthetic oligonucleotide
gaaguaauacaauuuuaau

SEQ ID NO: 2740476 - RNA, 19 nt, Artificial Sequence
  Description of Artificial Sequence: Synthetic oligonucleotide
gucacaguuaagacaaagc

SEQ ID NO: 2740477 - RNA, 19 nt, Artificial Sequence
  Description of Artificial Sequence: Synthetic oligonucleotide
uaagcaagucacuugucuu

SEQ ID NO: 2740478 - RNA, 19 nt, Artificial Sequence
  Description of Artificial Sequence: Synthetic oligonucleotide
cagaaauuaggaaguaaga

SEQ ID NO: 2740479 - RNA, 19 nt, Artificial Sequence
  Description of Artificial Sequence: Synthetic oligonucleotide
uaguaggaaaaggauauua

SEQ ID NO: 2740480 - RNA, 19 nt, Artificial Sequence
  Description of Artificial Sequence: Synthetic oligonucleotide
aggaaguaagaauucuaaa

SEQ ID NO: 2740481 - RNA, 19 nt, Artificial Sequence
  Description of Artificial Sequence: Synthetic oligonucleotide
cccuauaauaauaauauaa

SEQ ID NO: 2740482 - RNA, 19 nt, Artificial Sequence
  Description of Artificial Sequence: Synthetic oligonucleotide
caagucacuugucuucccc

SEQ ID NO: 2740483 - RNA, 19 nt, Artificial Sequence
  Description of Artificial Sequence: Synthetic oligonucleotide
uuuaagcaagucacuuguc

SEQ ID NO: 2740484 - RNA, 19 nt, Artificial Sequence
  Description of Artificial Sequence: Synthetic oligonucleotide
guacacuuuucccugccug

SEQ ID NO: 2740485 - RNA, 19 nt, Artificial Sequence
  Description of Artificial Sequence: Synthetic oligonucleotide
auacaauuuuaauuucaua

SEQ ID NO: 2740486 - RNA, 19 nt, Artificial Sequence
  Description of Artificial Sequence: Synthetic oligonucleotide
auauuaaagcuguucucuu

SEQ ID NO: 2740487 - RNA, 19 nt, Artificial Sequence
  Description of Artificial Sequence: Synthetic oligonucleotide
auguuggcucuuccaacac

SEQ ID NO: 2740488 - RNA, 19 nt, Artificial Sequence
  Description of Artificial Sequence: Synthetic oligonucleotide
augggaaauacuguucugu

SEQ ID NO: 2740489 - RNA, 19 nt, Artificial Sequence
  Description of Artificial Sequence: Synthetic oligonucleotide
cugugguagauguuggcuc

SEQ ID NO: 2740490 - RNA, 19 nt, Artificial Sequence
  Description of Artificial Sequence: Synthetic oligonucleotide
augaagaaggcccucugua

SEQ ID NO: 2740491 - RNA, 19 nt, Artificial Sequence
  Description of Artificial Sequence: Synthetic oligonucleotide
uaagcuacuuaaagacuua

SEQ ID NO: 2740492 - RNA, 19 nt, Artificial Sequence
  Description of Artificial Sequence: Synthetic oligonucleotide
aacuaaaaguguaccacuu

SEQ ID NO: 2740493 - RNA, 19 nt, Artificial Sequence
  Description of Artificial Sequence: Synthetic oligonucleotide
aaauacuguucuguuuuaa

SEQ ID NO: 2740494 - RNA, 19 nt, Artificial Sequence
  Description of Artificial Sequence: Synthetic oligonucleotide
aguaggaaaaggauauuaa

SEQ ID NO: 2740495 - RNA, 19 nt, Artificial Sequence
  Description of Artificial Sequence: Synthetic oligonucleotide
aagaaggcccucuguaauu

SEQ ID NO: 2740496 - RNA, 19 nt, Artificial Sequence
  Description of Artificial Sequence: Synthetic oligonucleotide
accacugccccugugguag

SEQ ID NO: 2740497 - RNA, 19 nt, Artificial Sequence
  Description of Artificial Sequence: Synthetic oligonucleotide
ggaaaaggauauuaaagcu

SEQ ID NO: 2740498 - RNA, 19 nt, Artificial Sequence
  Description of Artificial Sequence: Synthetic oligonucleotide
uggcucuuccaacaccagc

SEQ ID NO: 2740499 - RNA, 19 nt, Artificial Sequence
  Description of Artificial Sequence: Synthetic oligonucleotide
cauuuuaaccaaaccuaca

SEQ ID NO: 2740500 - RNA, 19 nt, Artificial Sequence
  Description of Artificial Sequence: Synthetic oligonucleotide
uaguaaugucacaguuaag

SEQ ID NO: 2740501 - RNA, 19 nt, Artificial Sequence
  Description of Artificial Sequence: Synthetic oligonucleotide
ugcaggcaaaagaugggaa

SEQ ID NO: 2740502 - RNA, 19 nt, Artificial Sequence
  Description of Artificial Sequence: Synthetic oligonucleotide
uacagaaauuaggaaguaa

SEQ ID NO: 2740503 - RNA, 19 nt, Artificial Sequence
  Description of Artificial Sequence: Synthetic oligonucleotide
ggaaguaagaauucuaaau

SEQ ID NO: 2740504 - RNA, 19 nt, Artificial Sequence
  Description of Artificial Sequence: Synthetic oligonucleotide
auaauauaagcuacuuaaa

SEQ ID NO: 2740505 - RNA, 19 nt, Artificial Sequence
  Description of Artificial Sequence: Synthetic oligonucleotide
acuaaaaguguaccacuuu

SEQ ID NO: 2740506 - RNA, 19 nt, Artificial Sequence
  Description of Artificial Sequence: Synthetic oligonucleotide
uguacacuuuucccugccu

SEQ ID NO: 2740507 - RNA, 19 nt, Artificial Sequence
  Description of Artificial Sequence: Synthetic oligonucleotide
gcccucuguaauuauaaag

SEQ ID NO: 2740508 - RNA, 19 nt, Artificial Sequence
  Description of Artificial Sequence: Synthetic oligonucleotide
aguaugaagaaggcccucu

SEQ ID NO: 2740509 - RNA, 19 nt, Artificial Sequence
  Description of Artificial Sequence: Synthetic oligonucleotide
uccccauuaguaggaaaag

SEQ ID NO: 2740510 - RNA, 19 nt, Artificial Sequence
  Description of Artificial Sequence: Synthetic oligonucleotide
cuuuucccugccugcaggc

SEQ ID NO: 2740511 - RNA, 19 nt, Artificial Sequence
  Description of Artificial Sequence: Synthetic oligonucleotide
aagccuuaagaaacuaaaa

SEQ ID NO: 2740512 - RNA, 19 nt, Artificial Sequence
  Description of Artificial Sequence: Synthetic oligonucleotide
guagauguuggcucuucca

SEQ ID NO: 2740513 - RNA, 19 nt, Artificial Sequence
  Description of Artificial Sequence: Synthetic oligonucleotide
guaugaagaaggcccucug

SEQ ID NO: 2740514 - RNA, 19 nt, Artificial Sequence
  Description of Artificial Sequence: Synthetic oligonucleotide
ugggaaauacuguucuguu

SEQ ID NO: 2740515 - RNA, 19 nt, Artificial Sequence
  Description of Artificial Sequence: Synthetic oligonucleotide
uuucccugccugcaggcaa

SEQ ID NO: 2740516 - RNA, 19 nt, Artificial Sequence
  Description of Artificial Sequence: Synthetic oligonucleotide
ggauauuaaagcuguucuc

SEQ ID NO: 2740517 - RNA, 19 nt, Artificial Sequence
  Description of Artificial Sequence: Synthetic oligonucleotide
uguucucuuugggaccuag

SEQ ID NO: 2740518 - RNA, 19 nt, Artificial Sequence
  Description of Artificial Sequence: Synthetic oligonucleotide
cacaguuaagacaaagccu

SEQ ID NO: 2740519 - RNA, 19 nt, Artificial Sequence
  Description of Artificial Sequence: Synthetic oligonucleotide
gccugcaggcaaaagaugg

SEQ ID NO: 2740520 - RNA, 19 nt, Artificial Sequence
  Description of Artificial Sequence: Synthetic oligonucleotide
acuacaaacaugacauuuu

SEQ ID NO: 2740521 - RNA, 19 nt, Artificial Sequence
  Description of Artificial Sequence: Synthetic oligonucleotide
aguuaagacaaagccuuaa

SEQ ID NO: 2740522 - RNA, 19 nt, Artificial Sequence
  Description of Artificial Sequence: Synthetic oligonucleotide
aguaguaaugucacaguua

SEQ ID NO: 2740523 - RNA, 19 nt, Artificial Sequence
  Description of Artificial Sequence: Synthetic oligonucleotide
auacaacuuuaagcaaguc

SEQ ID NO: 2740524 - RNA, 19 nt, Artificial Sequence
  Description of Artificial Sequence: Synthetic oligonucleotide
ugccugcaggcaaaagaug

SEQ ID NO: 2740525 - RNA, 19 nt, Artificial Sequence
  Description of Artificial Sequence: Synthetic oligonucleotide
acuuaaagacuuacaaauu

SEQ ID NO: 2740526 - RNA, 19 nt, Artificial Sequence
  Description of Artificial Sequence: Synthetic oligonucleotide
ugucuuccccuauaauaau

SEQ ID NO: 2740527 - RNA, 19 nt, Artificial Sequence
  Description of Artificial Sequence: Synthetic oligonucleotide
cuguacacuuuucccugcc

SEQ ID NO: 2740528 - RNA, 19 nt, Artificial Sequence
  Description of Artificial Sequence: Synthetic oligonucleotide
cagaaguaauacaauuuua

SEQ ID NO: 2740529 - RNA, 19 nt, Artificial Sequence
  Description of Artificial Sequence: Synthetic oligonucleotide
cccauuaguaggaaaagga

SEQ ID NO: 2740530 - RNA, 19 nt, Artificial Sequence
  Description of Artificial Sequence: Synthetic oligonucleotide
ggcaaaagaugggaaauac

SEQ ID NO: 2740531 - RNA, 19 nt, Artificial Sequence
  Description of Artificial Sequence: Synthetic oligonucleotide
cuacaaacaugacauuuua

SEQ ID NO: 2740532 - RNA, 19 nt, Artificial Sequence
  Description of Artificial Sequence: Synthetic oligonucleotide
uuuccccauuaguaggaaa

SEQ ID NO: 2740533 - RNA, 19 nt, Artificial Sequence
  Description of Artificial Sequence: Synthetic oligonucleotide
ggaaauacuguucuguuuu

SEQ ID NO: 2740534 - RNA, 19 nt, Artificial Sequence
  Description of Artificial Sequence: Synthetic oligonucleotide
caaagccuuaagaaacuaa

SEQ ID NO: 2740535 - RNA, 19 nt, Artificial Sequence
  Description of Artificial Sequence: Synthetic oligonucleotide
caacaccagcaguaugaag

SEQ ID NO: 2740536 - RNA, 19 nt, Artificial Sequence
  Description of Artificial Sequence: Synthetic oligonucleotide
ucacuugucuuccccuaua

SEQ ID NO: 2740537 - RNA, 19 nt, Artificial Sequence
  Description of Artificial Sequence: Synthetic oligonucleotide
cagcaguaugaagaaggcc

SEQ ID NO: 2740538 - RNA, 19 nt, Artificial Sequence
  Description of Artificial Sequence: Synthetic oligonucleotide
gaagaaggcccucuguaau

SEQ ID NO: 2740539 - RNA, 19 nt, Artificial Sequence
  Description of Artificial Sequence: Synthetic oligonucleotide
cuaaaaguguaccacuuuu

SEQ ID NO: 2740540 - RNA, 19 nt, Artificial Sequence
  Description of Artificial Sequence: Synthetic oligonucleotide
gguagauguuggcucuucc

SEQ ID NO: 2740541 - RNA, 19 nt, Artificial Sequence
  Description of Artificial Sequence: Synthetic oligonucleotide
acuuuccccauuaguagga

SEQ ID NO: 2740542 - RNA, 19 nt, Artificial Sequence
  Description of Artificial Sequence: Synthetic oligonucleotide
agcuacuuaaagacuuaca

SEQ ID NO: 2740543 - RNA, 19 nt, Artificial Sequence
  Description of Artificial Sequence: Synthetic oligonucleotide
acuugucuuccccuauaau

SEQ ID NO: 2740544 - RNA, 19 nt, Artificial Sequence
  Description of Artificial Sequence: Synthetic oligonucleotide
accuacacuuuccccauua

SEQ ID NO: 2740545 - RNA, 19 nt, Artificial Sequence
  Description of Artificial Sequence: Synthetic oligonucleotide
acuuacaaauucagaguaa

SEQ ID NO: 2740546 - RNA, 19 nt, Artificial Sequence
  Description of Artificial Sequence: Synthetic oligonucleotide
caggaacaaaauaaauacu

SEQ ID NO: 2740547 - RNA, 19 nt, Artificial Sequence
  Description of Artificial Sequence: Synthetic oligonucleotide
ccaaaccuacacuuucccc

SEQ ID NO: 2740548 - RNA, 19 nt, Artificial Sequence
  Description of Artificial Sequence: Synthetic oligonucleotide
agucacuugucuuccccua

SEQ ID NO: 2740549 - RNA, 19 nt, Artificial Sequence
  Description of Artificial Sequence: Synthetic oligonucleotide
cacuuuucccugccugcag

SEQ ID NO: 2740550 - RNA, 19 nt, Artificial Sequence
  Description of Artificial Sequence: Synthetic oligonucleotide
gacaaagccuuaagaaacu

SEQ ID NO: 2740551 - RNA, 19 nt, Artificial Sequence
  Description of Artificial Sequence: Synthetic oligonucleotide
ggaacaaaauaaauacugu

SEQ ID NO: 2740552 - RNA, 19 nt, Artificial Sequence
  Description of Artificial Sequence: Synthetic oligonucleotide
aaaggauauuaaagcuguu

SEQ ID NO: 2740553 - RNA, 19 nt, Artificial Sequence
  Description of Artificial Sequence: Synthetic oligonucleotide
acacuuuucccugccugca

SEQ ID NO: 2740554 - RNA, 19 nt, Artificial Sequence
  Description of Artificial Sequence: Synthetic oligonucleotide
auacagaaauuaggaagua

SEQ ID NO: 2740555 - RNA, 19 nt, Artificial Sequence
  Description of Artificial Sequence: Synthetic oligonucleotide
uucccugccugcaggcaaa

SEQ ID NO: 2740556 - RNA, 19 nt, Artificial Sequence
  Description of Artificial Sequence: Synthetic oligonucleotide
cucuguaauuauaaagguu

SEQ ID NO: 2740557 - RNA, 19 nt, Artificial Sequence
  Description of Artificial Sequence: Synthetic oligonucleotide
acaaagccuuaagaaacua

SEQ ID NO: 2740558 - RNA, 19 nt, Artificial Sequence
  Description of Artificial Sequence: Synthetic oligonucleotide
agaaggcccucuguaauua

SEQ ID NO: 2740559 - RNA, 19 nt, Artificial Sequence
  Description of Artificial Sequence: Synthetic oligonucleotide
gcaggcaaaagaugggaaa

SEQ ID NO: 2740560 - RNA, 19 nt, Artificial Sequence
  Description of Artificial Sequence: Synthetic oligonucleotide
ccccauuaguaggaaaagg

SEQ ID NO: 2740561 - RNA, 19 nt, Artificial Sequence
  Description of Artificial Sequence: Synthetic oligonucleotide
aggcaaaagaugggaaaua

SEQ ID NO: 2740562 - RNA, 19 nt, Artificial Sequence
  Description of Artificial Sequence: Synthetic oligonucleotide
cugcaggcaaaagauggga

SEQ ID NO: 2740563 - RNA, 19 nt, Artificial Sequence
  Description of Artificial Sequence: Synthetic oligonucleotide
ugguagauguuggcucuuc

SEQ ID NO: 2740564 - RNA, 19 nt, Artificial Sequence
  Description of Artificial Sequence: Synthetic oligonucleotide
cuacacuuuccccauuagu

SEQ ID NO: 2740565 - RNA, 19 nt, Artificial Sequence
  Description of Artificial Sequence: Synthetic oligonucleotide
cugccugcaggcaaaagau

SEQ ID NO: 2740566 - RNA, 19 nt, Artificial Sequence
  Description of Artificial Sequence: Synthetic oligonucleotide
ccugccugcaggcaaaaga

SEQ ID NO: 2740567 - RNA, 19 nt, Artificial Sequence
  Description of Artificial Sequence: Synthetic oligonucleotide
cacuugucuuccccuauaa

SEQ ID NO: 2740568 - RNA, 19 nt, Artificial Sequence
  Description of Artificial Sequence: Synthetic oligonucleotide
aaccuacacuuuccccauu

SEQ ID NO: 2740569 - RNA, 19 nt, Artificial Sequence
  Description of Artificial Sequence: Synthetic oligonucleotide
caccagcaguaugaagaag

SEQ ID NO: 2740570 - RNA, 19 nt, Artificial Sequence
  Description of Artificial Sequence: Synthetic oligonucleotide
gccccugugguagauguug

SEQ ID NO: 2740571 - RNA, 19 nt, Artificial Sequence
  Description of Artificial Sequence: Synthetic oligonucleotide
gucuuccccuauaauaaua

SEQ ID NO: 2740572 - RNA, 19 nt, Artificial Sequence
  Description of Artificial Sequence: Synthetic oligonucleotide
ccuacacuuuccccauuag

SEQ ID NO: 2740573 - RNA, 19 nt, Artificial Sequence
  Description of Artificial Sequence: Synthetic oligonucleotide
caguaugaagaaggcccuc

SEQ ID NO: 2740574 - RNA, 19 nt, Artificial Sequence
  Description of Artificial Sequence: Synthetic oligonucleotide
gcaagucacuugucuuccc

SEQ ID NO: 2740575 - RNA, 19 nt, Artificial Sequence
  Description of Artificial Sequence: Synthetic oligonucleotide
ccucuguaauuauaaaggu

SEQ ID NO: 2740576 - RNA, 19 nt, Artificial Sequence
  Description of Artificial Sequence: Synthetic oligonucleotide
ccccugugguagauguugg

SEQ ID NO: 2740577 - RNA, 19 nt, Artificial Sequence
  Description of Artificial Sequence: Synthetic oligonucleotide
caguuaagacaaagccuua

SEQ ID NO: 2740578 - RNA, 19 nt, Artificial Sequence
  Description of Artificial Sequence: Synthetic oligonucleotide
caggcaaaagaugggaaau

SEQ ID NO: 2740579 - RNA, 19 nt, Artificial Sequence
  Description of Artificial Sequence: Synthetic oligonucleotide
ccauuaguaggaaaaggau

SEQ ID NO: 2740580 - RNA, 19 nt, Artificial Sequence
  Description of Artificial Sequence: Synthetic oligonucleotide
acugccccugugguagaug

SEQ ID NO: 2740581 - RNA, 19 nt, Artificial Sequence
  Description of Artificial Sequence: Synthetic oligonucleotide
guucucuuugggaccuaga

SEQ ID NO: 2740582 - RNA, 19 nt, Artificial Sequence
  Description of Artificial Sequence: Synthetic oligonucleotide
cugccccugugguagaugu

SEQ ID NO: 2740583 - RNA, 19 nt, Artificial Sequence
  Description of Artificial Sequence: Synthetic oligonucleotide
cuuccccuauaauaauaau

SEQ ID NO: 2740584 - RNA, 19 nt, Artificial Sequence
  Description of Artificial Sequence: Synthetic oligonucleotide
cccugugguagauguuggc

SEQ ID NO: 2740585 - RNA, 19 nt, Artificial Sequence
  Description of Artificial Sequence: Synthetic oligonucleotide
gcaaaagaugggaaauacu

SEQ ID NO: 2740586 - RNA, 19 nt, Artificial Sequence
  Description of Artificial Sequence: Synthetic oligonucleotide
gaaggcccucuguaauuau

SEQ ID NO: 2740587 - RNA, 19 nt, Artificial Sequence
  Description of Artificial Sequence: Synthetic oligonucleotide
gggaaauacuguucuguuu

SEQ ID NO: 2740588 - RNA, 19 nt, Artificial Sequence
  Description of Artificial Sequence: Synthetic oligonucleotide
gucacuugucuuccccuau

SEQ ID NO: 2740589 - RNA, 19 nt, Artificial Sequence
  Description of Artificial Sequence: Synthetic oligonucleotide
cuuuccccauuaguaggaa

SEQ ID NO: 2740590 - RNA, 19 nt, Artificial Sequence
  Description of Artificial Sequence: Synthetic oligonucleotide
ugccccugugguagauguu

SEQ ID NO: 2740591 - RNA, 19 nt, Artificial Sequence
  Description of Artificial Sequence: Synthetic oligonucleotide
ccaucugccucugccuccc

SEQ ID NO: 2740592 - RNA, 19 nt, Artificial Sequence
  Description of Artificial Sequence: Synthetic oligonucleotide
ggcccucuguaauuauaaa

SEQ ID NO: 2740593 - RNA, 19 nt, Artificial Sequence
  Description of Artificial Sequence: Synthetic oligonucleotide
gcaguaugaagaaggcccu

SEQ ID NO: 2740594 - RNA, 19 nt, Artificial Sequence
  Description of Artificial Sequence: Synthetic oligonucleotide
ccccuauaauaauaauaua

SEQ ID NO: 2740595 - RNA, 19 nt, Artificial Sequence
  Description of Artificial Sequence: Synthetic oligonucleotide
cuuccaacaccagcaguau

SEQ ID NO: 2740596 - RNA, 19 nt, Artificial Sequence
  Description of Artificial Sequence: Synthetic oligonucleotide
gcuguucucuuugggaccu

SEQ ID NO: 2740597 - RNA, 19 nt, Artificial Sequence
  Description of Artificial Sequence: Synthetic oligonucleotide
augucacaguuaagacaaa

SEQ ID NO: 2740598 - RNA, 19 nt, Artificial Sequence
  Description of Artificial Sequence: Synthetic oligonucleotide
ucccugccugcaggcaaaa

SEQ ID NO: 2740599 - RNA, 19 nt, Artificial Sequence
  Description of Artificial Sequence: Synthetic oligonucleotide
ccugugguagauguuggcu

SEQ ID NO: 2740600 - RNA, 19 nt, Artificial Sequence
  Description of Artificial Sequence: Synthetic oligonucleotide
caccacugccccuguggua

SEQ ID NO: 2740601 - RNA, 19 nt, Artificial Sequence
  Description of Artificial Sequence: Synthetic oligonucleotide
ccaacaccagcaguaugaa

SEQ ID NO: 2740602 - RNA, 19 nt, Artificial Sequence
  Description of Artificial Sequence: Synthetic oligonucleotide
gugguagauguuggcucuu

SEQ ID NO: 2740603 - RNA, 19 nt, Artificial Sequence
  Description of Artificial Sequence: Synthetic oligonucleotide
gugcaccaccacugccccu

SEQ ID NO: 2740604 - RNA, 19 nt, Artificial Sequence
  Description of Artificial Sequence: Synthetic oligonucleotide
ccaccacugccccuguggu

SEQ ID NO: 2740605 - RNA, 19 nt, Artificial Sequence
  Description of Artificial Sequence: Synthetic oligonucleotide
cuguucucuuugggaccua

SEQ ID NO: 2740606 - RNA, 19 nt, Artificial Sequence
  Description of Artificial Sequence: Synthetic oligonucleotide
ccacugccccugugguaga

SEQ ID NO: 2740607 - RNA, 19 nt, Artificial Sequence
  Description of Artificial Sequence: Synthetic oligonucleotide
cacugccccugugguagau

SEQ ID NO: 2740608 - RNA, 19 nt, Artificial Sequence
  Description of Artificial Sequence: Synthetic oligonucleotide
uaagccaaagccaugacag

SEQ ID NO: 2740609 - RNA, 19 nt, Artificial Sequence
  Description of Artificial Sequence: Synthetic oligonucleotide
aaagccaugacagcaaagc

SEQ ID NO: 2740610 - RNA, 19 nt, Artificial Sequence
  Description of Artificial Sequence: Synthetic oligonucleotide
aaagguccacaauuccugg

SEQ ID NO: 2740611 - RNA, 19 nt, Artificial Sequence
  Description of Artificial Sequence: Synthetic oligonucleotide
aaaagguccacaauuccug

SEQ ID NO: 2740612 - RNA, 19 nt, Artificial Sequence
  Description of Artificial Sequence: Synthetic oligonucleotide
aagccaaagccaugacagc

SEQ ID NO: 2740613 - RNA, 19 nt, Artificial Sequence
  Description of Artificial Sequence: Synthetic oligonucleotide
uccacaauuccuggaaagg

SEQ ID NO: 2740614 - RNA, 19 nt, Artificial Sequence
  Description of Artificial Sequence: Synthetic oligonucleotide
uuuccuggaggcaggaaga

SEQ ID NO: 2740615 - RNA, 19 nt, Artificial Sequence
  Description of Artificial Sequence: Synthetic oligonucleotide
auaagccaaagccaugaca

SEQ ID NO: 2740616 - RNA, 19 nt, Artificial Sequence
  Description of Artificial Sequence: Synthetic oligonucleotide
acaauuccuggaaaggguc

SEQ ID NO: 2740617 - RNA, 19 nt, Artificial Sequence
  Description of Artificial Sequence: Synthetic oligonucleotide
caauuccuggaaagggucc

SEQ ID NO: 2740618 - RNA, 19 nt, Artificial Sequence
  Description of Artificial Sequence: Synthetic oligonucleotide
guccacaauuccuggaaag

SEQ ID NO: 2740619 - RNA, 19 nt, Artificial Sequence
  Description of Artificial Sequence: Synthetic oligonucleotide
aagguccacaauuccugga

SEQ ID NO: 2740620 - RNA, 19 nt, Artificial Sequence
  Description of Artificial Sequence: Synthetic oligonucleotide
caaagccaugacagcaaag

SEQ ID NO: 2740621 - RNA, 19 nt, Artificial Sequence
  Description of Artificial Sequence: Synthetic oligonucleotide
agccaaagccaugacagca

SEQ ID NO: 2740622 - RNA, 19 nt, Artificial Sequence
  Description of Artificial Sequence: Synthetic oligonucleotide
uccuggaaaggguccauuu

SEQ ID NO: 2740623 - RNA, 19 nt, Artificial Sequence
  Description of Artificial Sequence: Synthetic oligonucleotide
ccacaauuccuggaaaggg

SEQ ID NO: 2740624 - RNA, 19 nt, Artificial Sequence
  Description of Artificial Sequence: Synthetic oligonucleotide
gcugcucggggccaggccg

SEQ ID NO: 2740625 - RNA, 19 nt, Artificial Sequence
  Description of Artificial Sequence: Synthetic oligonucleotide
uuccuggaggcaggaagag

SEQ ID NO: 2740626 - RNA, 19 nt, Artificial Sequence
  Description of Artificial Sequence: Synthetic oligonucleotide
cacaauuccuggaaagggu

SEQ ID NO: 2740627 - RNA, 19 nt, Artificial Sequence
  Description of Artificial Sequence: Synthetic oligonucleotide
uccuggaggcaggaagagc

SEQ ID NO: 2740628 - RNA, 19 nt, Artificial Sequence
  Description of Artificial Sequence: Synthetic oligonucleotide
cagggcccagagcagcccc

SEQ ID NO: 2740629 - RNA, 19 nt, Artificial Sequence
  Description of Artificial Sequence: Synthetic oligonucleotide
ccuggaaaggguccauuuc

SEQ ID NO: 2740630 - RNA, 19 nt, Artificial Sequence
  Description of Artificial Sequence: Synthetic oligonucleotide
uuccuggaaaggguccauu

SEQ ID NO: 2740631 - RNA, 19 nt, Artificial Sequence
  Description of Artificial Sequence: Synthetic oligonucleotide
gguccacaauuccuggaaa

SEQ ID NO: 2740632 - RNA, 19 nt, Artificial Sequence
  Description of Artificial Sequence: Synthetic oligonucleotide
auuccuggaaaggguccau

SEQ ID NO: 2740633 - RNA, 19 nt, Artificial Sequence
  Description of Artificial Sequence: Synthetic oligonucleotide
cucggggccaggccgugca

SEQ ID NO: 2740634 - RNA, 19 nt, Artificial Sequence
  Description of Artificial Sequence: Synthetic oligonucleotide
gccaaagccaugacagcaa

SEQ ID NO: 2740635 - RNA, 19 nt, Artificial Sequence
  Description of Artificial Sequence: Synthetic oligonucleotide
ggcugcucggggccaggcc

SEQ ID NO: 2740636 - RNA, 19 nt, Artificial Sequence
  Description of Artificial Sequence: Synthetic oligonucleotide
ccaaagccaugacagcaaa

SEQ ID NO: 2740637 - RNA, 19 nt, Artificial Sequence
  Description of Artificial Sequence: Synthetic oligonucleotide
ugcucggggccaggccgug

SEQ ID NO: 2740638 - RNA, 19 nt, Artificial Sequence
  Description of Artificial Sequence: Synthetic oligonucleotide
gacgggcugcucggggcca

SEQ ID NO: 2740639 - RNA, 19 nt, Artificial Sequence
  Description of Artificial Sequence: Synthetic oligonucleotide
ggcgucggcgcgguagcgc

SEQ ID NO: 2740640 - RNA, 19 nt, Artificial Sequence
  Description of Artificial Sequence: Synthetic oligonucleotide
acgggcugcucggggccag

SEQ ID NO: 2740641 - RNA, 19 nt, Artificial Sequence
  Description of Artificial Sequence: Synthetic oligonucleotide
cgcgccagcagccgcccgc

SEQ ID NO: 2740642 - RNA, 19 nt, Artificial Sequence
  Description of Artificial Sequence: Synthetic oligonucleotide
cugcucggggccaggccgu

SEQ ID NO: 2740643 - RNA, 19 nt, Artificial Sequence
  Description of Artificial Sequence: Synthetic oligonucleotide
gggcgucggcgcgguagcg

SEQ ID NO: 2740644 - RNA, 19 nt, Artificial Sequence
  Description of Artificial Sequence: Synthetic oligonucleotide
gcgccagcagccgcccgcc

SEQ ID NO: 2740645 - RNA, 19 nt, Artificial Sequence
  Description of Artificial Sequence: Synthetic oligonucleotide
gccagcagccgcccgccgu

SEQ ID NO: 2740646 - RNA, 19 nt, Artificial Sequence
  Description of Artificial Sequence: Synthetic oligonucleotide
gcgcgccagcagccgcccg

SEQ ID NO: 2740647 - RNA, 19 nt, Artificial Sequence
  Description of Artificial Sequence: Synthetic oligonucleotide
gcucggggccaggccgugc

SEQ ID NO: 2740648 - RNA, 19 nt, Artificial Sequence
  Description of Artificial Sequence: Synthetic oligonucleotide
cgcgcgcgccagcagccgc

SEQ ID NO: 2740649 - RNA, 19 nt, Artificial Sequence
  Description of Artificial Sequence: Synthetic oligonucleotide
cgggcugcucggggccagg

SEQ ID NO: 2740650 - RNA, 19 nt, Artificial Sequence
  Description of Artificial Sequence: Synthetic oligonucleotide
ucaucaauuaggaugaugg

SEQ ID NO: 2740651 - RNA, 19 nt, Artificial Sequence
  Description of Artificial Sequence: Synthetic oligonucleotide
agacgaaacacucaaagcc

SEQ ID NO: 2740652 - RNA, 19 nt, Artificial Sequence
  Description of Artificial Sequence: Synthetic oligonucleotide
ugaaccacgauacacaggc

SEQ ID NO: 2740653 - RNA, 19 nt, Artificial Sequence
  Description of Artificial Sequence: Synthetic oligonucleotide
aguuaggugacauaggauc

SEQ ID NO: 2740654 - RNA, 19 nt, Artificial Sequence
  Description of Artificial Sequence: Synthetic oligonucleotide
aauucugccagcuuuugag

SEQ ID NO: 2740655 - RNA, 19 nt, Artificial Sequence
  Description of Artificial Sequence: Synthetic oligonucleotide
aauaaauucugccagcuuu

SEQ ID NO: 2740656 - RNA, 19 nt, Artificial Sequence
  Description of Artificial Sequence: Synthetic oligonucleotide
aguuagagauguuuauucc

SEQ ID NO: 2740657 - RNA, 19 nt, Artificial Sequence
  Description of Artificial Sequence: Synthetic oligonucleotide
uguuuauuccucuucauga

SEQ ID NO: 2740658 - RNA, 19 nt, Artificial Sequence
  Description of Artificial Sequence: Synthetic oligonucleotide
uuauaugccaaguauuuca

SEQ ID NO: 2740659 - RNA, 19 nt, Artificial Sequence
  Description of Artificial Sequence: Synthetic oligonucleotide
aagucaauaaauucugcca

SEQ ID NO: 2740660 - RNA, 19 nt, Artificial Sequence
  Description of Artificial Sequence: Synthetic oligonucleotide
auuucauauacucuucauc

SEQ ID NO: 2740661 - RNA, 19 nt, Artificial Sequence
  Description of Artificial Sequence: Synthetic oligonucleotide
aaacugauuggugaugccc

SEQ ID NO: 2740662 - RNA, 19 nt, Artificial Sequence
  Description of Artificial Sequence: Synthetic oligonucleotide
aaccacgauacacaggcac

SEQ ID NO: 2740663 - RNA, 19 nt, Artificial Sequence
  Description of Artificial Sequence: Synthetic oligonucleotide
uugccaauaaucuuguagc

SEQ ID NO: 2740664 - RNA, 19 nt, Artificial Sequence
  Description of Artificial Sequence: Synthetic oligonucleotide
aucugauguacauaauccc

SEQ ID NO: 2740665 - RNA, 19 nt, Artificial Sequence
  Description of Artificial Sequence: Synthetic oligonucleotide
aaguauuucauauacucuu

SEQ ID NO: 2740666 - RNA, 19 nt, Artificial Sequence
  Description of Artificial Sequence: Synthetic oligonucleotide
agaucugauguacauaauc

SEQ ID NO: 2740667 - RNA, 19 nt, Artificial Sequence
  Description of Artificial Sequence: Synthetic oligonucleotide
agucaauaaauucugccag

SEQ ID NO: 2740668 - RNA, 19 nt, Artificial Sequence
  Description of Artificial Sequence: Synthetic oligonucleotide
aacacucaaagccauugag

SEQ ID NO: 2740669 - RNA, 19 nt, Artificial Sequence
  Description of Artificial Sequence: Synthetic oligonucleotide
uuauugggcauccaguccc

SEQ ID NO: 2740670 - RNA, 19 nt, Artificial Sequence
  Description of Artificial Sequence: Synthetic oligonucleotide
acagacgaaacacucaaag

SEQ ID NO: 2740671 - RNA, 19 nt, Artificial Sequence
  Description of Artificial Sequence: Synthetic oligonucleotide
ucgacuuugccaaagccag

SEQ ID NO: 2740672 - RNA, 19 nt, Artificial Sequence
  Description of Artificial Sequence: Synthetic oligonucleotide
aaucucuucgacuuugcca

SEQ ID NO: 2740673 - RNA, 19 nt, Artificial Sequence
  Description of Artificial Sequence: Synthetic oligonucleotide
auuguuguggaucauggca

SEQ ID NO: 2740674 - RNA, 19 nt, Artificial Sequence
  Description of Artificial Sequence: Synthetic oligonucleotide
agaagaaacugauugguga

SEQ ID NO: 2740675 - RNA, 19 nt, Artificial Sequence
  Description of Artificial Sequence: Synthetic oligonucleotide
uaaucuuguagccacauuu

SEQ ID NO: 2740676 - RNA, 19 nt, Artificial Sequence
  Description of Artificial Sequence: Synthetic oligonucleotide
cuugccaauaaucuuguag

SEQ ID NO: 2740677 - RNA, 19 nt, Artificial Sequence
  Description of Artificial Sequence: Synthetic oligonucleotide
uggaucauggcagugagag

SEQ ID NO: 2740678 - RNA, 19 nt, Artificial Sequence
  Description of Artificial Sequence: Synthetic oligonucleotide
agaaacugauuggugaugc

SEQ ID NO: 2740679 - RNA, 19 nt, Artificial Sequence
  Description of Artificial Sequence: Synthetic oligonucleotide
gaucugauguacauaaucc

SEQ ID NO: 2740680 - RNA, 19 nt, Artificial Sequence
  Description of Artificial Sequence: Synthetic oligonucleotide
cauaggaucguucacuccc

SEQ ID NO: 2740681 - RNA, 19 nt, Artificial Sequence
  Description of Artificial Sequence: Synthetic oligonucleotide
uuuauuccucuucaugaag

SEQ ID NO: 2740682 - RNA, 19 nt, Artificial Sequence
  Description of Artificial Sequence: Synthetic oligonucleotide
uaugccaaguauuucauau

SEQ ID NO: 2740683 - RNA, 19 nt, Artificial Sequence
  Description of Artificial Sequence: Synthetic oligonucleotide
gaagaucugauguacauaa

SEQ ID NO: 2740684 - RNA, 19 nt, Artificial Sequence
  Description of Artificial Sequence: Synthetic oligonucleotide
uccagaagaaacugauugg

SEQ ID NO: 2740685 - RNA, 19 nt, Artificial Sequence
  Description of Artificial Sequence: Synthetic oligonucleotide
gacaguucaugugugaggg

SEQ ID NO: 2740686 - RNA, 19 nt, Artificial Sequence
  Description of Artificial Sequence: Synthetic oligonucleotide
acauaaucccaaaauuucc

SEQ ID NO: 2740687 - RNA, 19 nt, Artificial Sequence
  Description of Artificial Sequence: Synthetic oligonucleotide
cucaaagccauugagguag

SEQ ID NO: 2740688 - RNA, 19 nt, Artificial Sequence
  Description of Artificial Sequence: Synthetic oligonucleotide
gauacacaggcacagcacc

SEQ ID NO: 2740689 - RNA, 19 nt, Artificial Sequence
  Description of Artificial Sequence: Synthetic oligonucleotide
ugauggagugguuauuggg

SEQ ID NO: 2740690 - RNA, 19 nt, Artificial Sequence
  Description of Artificial Sequence: Synthetic oligonucleotide
aguucauggucacagacga

SEQ ID NO: 2740691 - RNA, 19 nt, Artificial Sequence
  Description of Artificial Sequence: Synthetic oligonucleotide
uucgacuuugccaaagcca

SEQ ID NO: 2740692 - RNA, 19 nt, Artificial Sequence
  Description of Artificial Sequence: Synthetic oligonucleotide
uuagagauguuuauuccuc

SEQ ID NO: 2740693 - RNA, 19 nt, Artificial Sequence
  Description of Artificial Sequence: Synthetic oligonucleotide
cuguguuucauuguugugg

SEQ ID NO: 2740694 - RNA, 19 nt, Artificial Sequence
  Description of Artificial Sequence: Synthetic oligonucleotide
cuuuugaggggacucaaag

SEQ ID NO: 2740695 - RNA, 19 nt, Artificial Sequence
  Description of Artificial Sequence: Synthetic oligonucleotide
gaugcaugugccuucucag

SEQ ID NO: 2740696 - RNA, 19 nt, Artificial Sequence
  Description of Artificial Sequence: Synthetic oligonucleotide
auuaggaugauggaguggu

SEQ ID NO: 2740697 - RNA, 19 nt, Artificial Sequence
  Description of Artificial Sequence: Synthetic oligonucleotide
auggucacagacgaaacac

SEQ ID NO: 2740698 - RNA, 19 nt, Artificial Sequence
  Description of Artificial Sequence: Synthetic oligonucleotide
uguggaucauggcagugag

SEQ ID NO: 2740699 - RNA, 19 nt, Artificial Sequence
  Description of Artificial Sequence: Synthetic oligonucleotide
ucacagagggugaaccacg

SEQ ID NO: 2740700 - RNA, 19 nt, Artificial Sequence
  Description of Artificial Sequence: Synthetic oligonucleotide
aucucuucgacuuugccaa

SEQ ID NO: 2740701 - RNA, 19 nt, Artificial Sequence
  Description of Artificial Sequence: Synthetic oligonucleotide
auguacauaaucccaaaau

SEQ ID NO: 2740702 - RNA, 19 nt, Artificial Sequence
  Description of Artificial Sequence: Synthetic oligonucleotide
agagggugaaccacgauac

SEQ ID NO: 2740703 - RNA, 19 nt, Artificial Sequence
  Description of Artificial Sequence: Synthetic oligonucleotide
gauggagugguuauugggc

SEQ ID NO: 2740704 - RNA, 19 nt, Artificial Sequence
  Description of Artificial Sequence: Synthetic oligonucleotide
aaaauuuccucugcugugu

SEQ ID NO: 2740705 - RNA, 19 nt, Artificial Sequence
  Description of Artificial Sequence: Synthetic oligonucleotide
agccacauuuccuuccagc

SEQ ID NO: 2740706 - RNA, 19 nt, Artificial Sequence
  Description of Artificial Sequence: Synthetic oligonucleotide
aauuaggaugauggagugg

SEQ ID NO: 2740707 - RNA, 19 nt, Artificial Sequence
  Description of Artificial Sequence: Synthetic oligonucleotide
auguuuauuccucuucaug

SEQ ID NO: 2740708 - RNA, 19 nt, Artificial Sequence
  Description of Artificial Sequence: Synthetic oligonucleotide
uugcuuauaugccaaguau

SEQ ID NO: 2740709 - RNA, 19 nt, Artificial Sequence
  Description of Artificial Sequence: Synthetic oligonucleotide
caguuagagauguuuauuc

SEQ ID NO: 2740710 - RNA, 19 nt, Artificial Sequence
  Description of Artificial Sequence: Synthetic oligonucleotide
ucacagacgaaacacucaa

SEQ ID NO: 2740711 - RNA, 19 nt, Artificial Sequence
  Description of Artificial Sequence: Synthetic oligonucleotide
gaugauggagugguuauug

SEQ ID NO: 2740712 - RNA, 19 nt, Artificial Sequence
  Description of Artificial Sequence: Synthetic oligonucleotide
guuaggugacauaggaucg

SEQ ID NO: 2740713 - RNA, 19 nt, Artificial Sequence
  Description of Artificial Sequence: Synthetic oligonucleotide
ucauucuuguccagaaagu

SEQ ID NO: 2740714 - RNA, 19 nt, Artificial Sequence
  Description of Artificial Sequence: Synthetic oligonucleotide
cauugagguaguuagguga

SEQ ID NO: 2740715 - RNA, 19 nt, Artificial Sequence
  Description of Artificial Sequence: Synthetic oligonucleotide
ucaauaaauucugccagcu

SEQ ID NO: 2740716 - RNA, 19 nt, Artificial Sequence
  Description of Artificial Sequence: Synthetic oligonucleotide
aaacacucaaagccauuga

SEQ ID NO: 2740717 - RNA, 19 nt, Artificial Sequence
  Description of Artificial Sequence: Synthetic oligonucleotide
caaaauuuccucugcugug

SEQ ID NO: 2740718 - RNA, 19 nt, Artificial Sequence
  Description of Artificial Sequence: Synthetic oligonucleotide
guuucauuguuguggauca

SEQ ID NO: 2740719 - RNA, 19 nt, Artificial Sequence
  Description of Artificial Sequence: Synthetic oligonucleotide
acauaggaucguucacucc

SEQ ID NO: 2740720 - RNA, 19 nt, Artificial Sequence
  Description of Artificial Sequence: Synthetic oligonucleotide
uguagccacauuuccuucc

SEQ ID NO: 2740721 - RNA, 19 nt, Artificial Sequence
  Description of Artificial Sequence: Synthetic oligonucleotide
cagacgaaacacucaaagc

SEQ ID NO: 2740722 - RNA, 19 nt, Artificial Sequence
  Description of Artificial Sequence: Synthetic oligonucleotide
ugccaauaaucuuguagcc

SEQ ID NO: 2740723 - RNA, 19 nt, Artificial Sequence
  Description of Artificial Sequence: Synthetic oligonucleotide
uauaugccaaguauuucau

SEQ ID NO: 2740724 - RNA, 19 nt, Artificial Sequence
  Description of Artificial Sequence: Synthetic oligonucleotide
augcaugugccuucucagc

SEQ ID NO: 2740725 - RNA, 19 nt, Artificial Sequence
  Description of Artificial Sequence: Synthetic oligonucleotide
ucaugaagaucugauguac

SEQ ID NO: 2740726 - RNA, 19 nt, Artificial Sequence
  Description of Artificial Sequence: Synthetic oligonucleotide
ucugccagcuuuugagggg

SEQ ID NO: 2740727 - RNA, 19 nt, Artificial Sequence
  Description of Artificial Sequence: Synthetic oligonucleotide
ccaaguauuucauauacuc

SEQ ID NO: 2740728 - RNA, 19 nt, Artificial Sequence
  Description of Artificial Sequence: Synthetic oligonucleotide
guaggcauuggacaguuca

SEQ ID NO: 2740729 - RNA, 19 nt, Artificial Sequence
  Description of Artificial Sequence: Synthetic oligonucleotide
ugcaugugccuucucagcu

SEQ ID NO: 2740730 - RNA, 19 nt, Artificial Sequence
  Description of Artificial Sequence: Synthetic oligonucleotide
uuguccagaaagucaauaa

SEQ ID NO: 2740731 - RNA, 19 nt, Artificial Sequence
  Description of Artificial Sequence: Synthetic oligonucleotide
auacucuucaucauucuug

SEQ ID NO: 2740732 - RNA, 19 nt, Artificial Sequence
  Description of Artificial Sequence: Synthetic oligonucleotide
ugcuuauaugccaaguauu

SEQ ID NO: 2740733 - RNA, 19 nt, Artificial Sequence
  Description of Artificial Sequence: Synthetic oligonucleotide
uucauggucacagacgaaa

SEQ ID NO: 2740734 - RNA, 19 nt, Artificial Sequence
  Description of Artificial Sequence: Synthetic oligonucleotide
agagaccuugccaauaauc

SEQ ID NO: 2740735 - RNA, 19 nt, Artificial Sequence
  Description of Artificial Sequence: Synthetic oligonucleotide
agggugaaccacgauacac

SEQ ID NO: 2740736 - RNA, 19 nt, Artificial Sequence
  Description of Artificial Sequence: Synthetic oligonucleotide
gucaauaaauucugccagc

SEQ ID NO: 2740737 - RNA, 19 nt, Artificial Sequence
  Description of Artificial Sequence: Synthetic oligonucleotide
ugguuauugggcauccagu

SEQ ID NO: 2740738 - RNA, 19 nt, Artificial Sequence
  Description of Artificial Sequence: Synthetic oligonucleotide
ucugcuguguuucauuguu

SEQ ID NO: 2740739 - RNA, 19 nt, Artificial Sequence
  Description of Artificial Sequence: Synthetic oligonucleotide
caggagaggaugcaugugc

SEQ ID NO: 2740740 - RNA, 19 nt, Artificial Sequence
  Description of Artificial Sequence: Synthetic oligonucleotide
ucaucauucuuguccagaa

SEQ ID NO: 2740741 - RNA, 19 nt, Artificial Sequence
  Description of Artificial Sequence: Synthetic oligonucleotide
aauaaucuuguagccacau

SEQ ID NO: 2740742 - RNA, 19 nt, Artificial Sequence
  Description of Artificial Sequence: Synthetic oligonucleotide
ucuucgacuuugccaaagc

SEQ ID NO: 2740743 - RNA, 19 nt, Artificial Sequence
  Description of Artificial Sequence: Synthetic oligonucleotide
ucggggacaggaauguccc

SEQ ID NO: 2740744 - RNA, 19 nt, Artificial Sequence
  Description of Artificial Sequence: Synthetic oligonucleotide
ugacauaggaucguucacu

SEQ ID NO: 2740745 - RNA, 19 nt, Artificial Sequence
  Description of Artificial Sequence: Synthetic oligonucleotide
uugaggggacucaaaguca

SEQ ID NO: 2740746 - RNA, 19 nt, Artificial Sequence
  Description of Artificial Sequence: Synthetic oligonucleotide
guuauugggcauccagucc

SEQ ID NO: 2740747 - RNA, 19 nt, Artificial Sequence
  Description of Artificial Sequence: Synthetic oligonucleotide
gagauguuuauuccucuuc

SEQ ID NO: 2740748 - RNA, 19 nt, Artificial Sequence
  Description of Artificial Sequence: Synthetic oligonucleotide
gaucauggcagugagagcu

SEQ ID NO: 2740749 - RNA, 19 nt, Artificial Sequence
  Description of Artificial Sequence: Synthetic oligonucleotide
aagaaacugauuggugaug

SEQ ID NO: 2740750 - RNA, 19 nt, Artificial Sequence
  Description of Artificial Sequence: Synthetic oligonucleotide
cucggggacaggaaugucc

SEQ ID NO: 2740751 - RNA, 19 nt, Artificial Sequence
  Description of Artificial Sequence: Synthetic oligonucleotide
gacauaggaucguucacuc

SEQ ID NO: 2740752 - RNA, 19 nt, Artificial Sequence
  Description of Artificial Sequence: Synthetic oligonucleotide
caauuaggaugauggagug

SEQ ID NO: 2740753 - RNA, 19 nt, Artificial Sequence
  Description of Artificial Sequence: Synthetic oligonucleotide
uucaugaagaucugaugua

SEQ ID NO: 2740754 - RNA, 19 nt, Artificial Sequence
  Description of Artificial Sequence: Synthetic oligonucleotide
ccaauaaucuuguagccac

SEQ ID NO: 2740755 - RNA, 19 nt, Artificial Sequence
  Description of Artificial Sequence: Synthetic oligonucleotide
agaggaugcaugugccuuc

SEQ ID NO: 2740756 - RNA, 19 nt, Artificial Sequence
  Description of Artificial Sequence: Synthetic oligonucleotide
aggaauguccccaggagag

SEQ ID NO: 2740757 - RNA, 19 nt, Artificial Sequence
  Description of Artificial Sequence: Synthetic oligonucleotide
uggacaguucaugugugag

SEQ ID NO: 2740758 - RNA, 19 nt, Artificial Sequence
  Description of Artificial Sequence: Synthetic oligonucleotide
cuucgacuuugccaaagcc

SEQ ID NO: 2740759 - RNA, 19 nt, Artificial Sequence
  Description of Artificial Sequence: Synthetic oligonucleotide
gaaucucuucgacuuugcc

SEQ ID NO: 2740760 - RNA, 19 nt, Artificial Sequence
  Description of Artificial Sequence: Synthetic oligonucleotide
uuccagccgagccaguuca

SEQ ID NO: 2740761 - RNA, 19 nt, Artificial Sequence
  Description of Artificial Sequence: Synthetic oligonucleotide
ucauggucacagacgaaac

SEQ ID NO: 2740762 - RNA, 19 nt, Artificial Sequence
  Description of Artificial Sequence: Synthetic oligonucleotide
cugauagagaccuugccaa

SEQ ID NO: 2740763 - RNA, 19 nt, Artificial Sequence
  Description of Artificial Sequence: Synthetic oligonucleotide
cagaagaaacugauuggug

SEQ ID NO: 2740764 - RNA, 19 nt, Artificial Sequence
  Description of Artificial Sequence: Synthetic oligonucleotide
ucguucacuccccacuccc

SEQ ID NO: 2740765 - RNA, 19 nt, Artificial Sequence
  Description of Artificial Sequence: Synthetic oligonucleotide
aucguucacuccccacucc

SEQ ID NO: 2740766 - RNA, 19 nt, Artificial Sequence
  Description of Artificial Sequence: Synthetic oligonucleotide
gacgaaacacucaaagcca

SEQ ID NO: 2740767 - RNA, 19 nt, Artificial Sequence
  Description of Artificial Sequence: Synthetic oligonucleotide
guauuucauauacucuuca

SEQ ID NO: 2740768 - RNA, 19 nt, Artificial Sequence
  Description of Artificial Sequence: Synthetic oligonucleotide
uucauauacucuucaucau

SEQ ID NO: 2740769 - RNA, 19 nt, Artificial Sequence
  Description of Artificial Sequence: Synthetic oligonucleotide
uucucaggaaucucuucga

SEQ ID NO: 2740770 - RNA, 19 nt, Artificial Sequence
  Description of Artificial Sequence: Synthetic oligonucleotide
gauguacauaaucccaaaa

SEQ ID NO: 2740771 - RNA, 19 nt, Artificial Sequence
  Description of Artificial Sequence: Synthetic oligonucleotide
gaaacugauuggugaugcc

SEQ ID NO: 2740772 - RNA, 19 nt, Artificial Sequence
  Description of Artificial Sequence: Synthetic oligonucleotide
auggagugguuauugggca

SEQ ID NO: 2740773 - RNA, 19 nt, Artificial Sequence
  Description of Artificial Sequence: Synthetic oligonucleotide
ugauguacauaaucccaaa

SEQ ID NO: 2740774 - RNA, 19 nt, Artificial Sequence
  Description of Artificial Sequence: Synthetic oligonucleotide
auagagaccuugccaauaa

SEQ ID NO: 2740775 - RNA, 19 nt, Artificial Sequence
  Description of Artificial Sequence: Synthetic oligonucleotide
ucucaggaaucucuucgac

SEQ ID NO: 2740776 - RNA, 19 nt, Artificial Sequence
  Description of Artificial Sequence: Synthetic oligonucleotide
uucaucauucuuguccaga

SEQ ID NO: 2740777 - RNA, 19 nt, Artificial Sequence
  Description of Artificial Sequence: Synthetic oligonucleotide
aggagaggaugcaugugcc

SEQ ID NO: 2740778 - RNA, 19 nt, Artificial Sequence
  Description of Artificial Sequence: Synthetic oligonucleotide
aaagccauugagguaguua

SEQ ID NO: 2740779 - RNA, 19 nt, Artificial Sequence
  Description of Artificial Sequence: Synthetic oligonucleotide
ucccaaaauuuccucugcu

SEQ ID NO: 2740780 - RNA, 19 nt, Artificial Sequence
  Description of Artificial Sequence: Synthetic oligonucleotide
cauuguuguggaucauggc

SEQ ID NO: 2740781 - RNA, 19 nt, Artificial Sequence
  Description of Artificial Sequence: Synthetic oligonucleotide
auaggaucguucacucccc

SEQ ID NO: 2740782 - RNA, 19 nt, Artificial Sequence
  Description of Artificial Sequence: Synthetic oligonucleotide
ggugaaccacgauacacag

SEQ ID NO: 2740783 - RNA, 19 nt, Artificial Sequence
  Description of Artificial Sequence: Synthetic oligonucleotide
auuuccuuccagcugucau

SEQ ID NO: 2740784 - RNA, 19 nt, Artificial Sequence
  Description of Artificial Sequence: Synthetic oligonucleotide
guuagagauguuuauuccu

SEQ ID NO: 2740785 - RNA, 19 nt, Artificial Sequence
  Description of Artificial Sequence: Synthetic oligonucleotide
ccagaaagucaauaaauuc

SEQ ID NO: 2740786 - RNA, 19 nt, Artificial Sequence
  Description of Artificial Sequence: Synthetic oligonucleotide
cauucuuguccagaaaguc

SEQ ID NO: 2740787 - RNA, 19 nt, Artificial Sequence
  Description of Artificial Sequence: Synthetic oligonucleotide
uggucacagacgaaacacu

SEQ ID NO: 2740788 - RNA, 19 nt, Artificial Sequence
  Description of Artificial Sequence: Synthetic oligonucleotide
gacaggaauguccccagga

SEQ ID NO: 2740789 - RNA, 19 nt, Artificial Sequence
  Description of Artificial Sequence: Synthetic oligonucleotide
ggugacauaggaucguuca

SEQ ID NO: 2740790 - RNA, 19 nt, Artificial Sequence
  Description of Artificial Sequence: Synthetic oligonucleotide
uaguuaggugacauaggau

SEQ ID NO: 2740791 - RNA, 19 nt, Artificial Sequence
  Description of Artificial Sequence: Synthetic oligonucleotide
caaugugaggcucggggac

SEQ ID NO: 2740792 - RNA, 19 nt, Artificial Sequence
  Description of Artificial Sequence: Synthetic oligonucleotide
cagccgagccaguucaugg

SEQ ID NO: 2740793 - RNA, 19 nt, Artificial Sequence
  Description of Artificial Sequence: Synthetic oligonucleotide
cuuauaugccaaguauuuc

SEQ ID NO: 2740794 - RNA, 19 nt, Artificial Sequence
  Description of Artificial Sequence: Synthetic oligonucleotide
cuccaggcuauccagaaga

SEQ ID NO: 2740795 - RNA, 19 nt, Artificial Sequence
  Description of Artificial Sequence: Synthetic oligonucleotide
ggacaguucaugugugagg

SEQ ID NO: 2740796 - RNA, 19 nt, Artificial Sequence
  Description of Artificial Sequence: Synthetic oligonucleotide
gguuauugggcauccaguc

SEQ ID NO: 2740797 - RNA, 19 nt, Artificial Sequence
  Description of Artificial Sequence: Synthetic oligonucleotide
aggaucguucacuccccac

SEQ ID NO: 2740798 - RNA, 19 nt, Artificial Sequence
  Description of Artificial Sequence: Synthetic oligonucleotide
uguuguggaucauggcagu

SEQ ID NO: 2740799 - RNA, 19 nt, Artificial Sequence
  Description of Artificial Sequence: Synthetic oligonucleotide
cacucaaagccauugaggu

SEQ ID NO: 2740800 - RNA, 19 nt, Artificial Sequence
  Description of Artificial Sequence: Synthetic oligonucleotide
gacuuugccaaagccagga

SEQ ID NO: 2740801 - RNA, 19 nt, Artificial Sequence
  Description of Artificial Sequence: Synthetic oligonucleotide
gaucguucacuccccacuc

SEQ ID NO: 2740802 - RNA, 19 nt, Artificial Sequence
  Description of Artificial Sequence: Synthetic oligonucleotide
uuguggaucauggcaguga

SEQ ID NO: 2740803 - RNA, 19 nt, Artificial Sequence
  Description of Artificial Sequence: Synthetic oligonucleotide
gaagaaacugauuggugau

SEQ ID NO: 2740804 - RNA, 19 nt, Artificial Sequence
  Description of Artificial Sequence: Synthetic oligonucleotide
guugcuuauaugccaagua

SEQ ID NO: 2740805 - RNA, 19 nt, Artificial Sequence
  Description of Artificial Sequence: Synthetic oligonucleotide
cauaaucccaaaauuuccu

SEQ ID NO: 2740806 - RNA, 19 nt, Artificial Sequence
  Description of Artificial Sequence: Synthetic oligonucleotide
uguccccaggagaggaugc

SEQ ID NO: 2740807 - RNA, 19 nt, Artificial Sequence
  Description of Artificial Sequence: Synthetic oligonucleotide
aauuuccucugcuguguuu

SEQ ID NO: 2740808 - RNA, 19 nt, Artificial Sequence
  Description of Artificial Sequence: Synthetic oligonucleotide
cugauguacauaaucccaa

SEQ ID NO: 2740809 - RNA, 19 nt, Artificial Sequence
  Description of Artificial Sequence: Synthetic oligonucleotide
gagaccuugccaauaaucu

SEQ ID NO: 2740810 - RNA, 19 nt, Artificial Sequence
  Description of Artificial Sequence: Synthetic oligonucleotide
aggggacucaaagucauca

SEQ ID NO: 2740811 - RNA, 19 nt, Artificial Sequence
  Description of Artificial Sequence: Synthetic oligonucleotide
aggaaucucuucgacuuug

SEQ ID NO: 2740812 - RNA, 19 nt, Artificial Sequence
  Description of Artificial Sequence: Synthetic oligonucleotide
uuaggugacauaggaucgu

SEQ ID NO: 2740813 - RNA, 19 nt, Artificial Sequence
  Description of Artificial Sequence: Synthetic oligonucleotide
aaagccaggaguaggcauu

SEQ ID NO: 2740814 - RNA, 19 nt, Artificial Sequence
  Description of Artificial Sequence: Synthetic oligonucleotide
acuuugccaaagccaggag

SEQ ID NO: 2740815 - RNA, 19 nt, Artificial Sequence
  Description of Artificial Sequence: Synthetic oligonucleotide
agagauguuuauuccucuu

SEQ ID NO: 2740816 - RNA, 19 nt, Artificial Sequence
  Description of Artificial Sequence: Synthetic oligonucleotide
cauuggacaguucaugugu

SEQ ID NO: 2740817 - RNA, 19 nt, Artificial Sequence
  Description of Artificial Sequence: Synthetic oligonucleotide
ccccugguugcuuauaugc

SEQ ID NO: 2740818 - RNA, 19 nt, Artificial Sequence
  Description of Artificial Sequence: Synthetic oligonucleotide
caaguauuucauauacucu

SEQ ID NO: 2740819 - RNA, 19 nt, Artificial Sequence
  Description of Artificial Sequence: Synthetic oligonucleotide
ugguugcuuauaugccaag

SEQ ID NO: 2740820 - RNA, 19 nt, Artificial Sequence
  Description of Artificial Sequence: Synthetic oligonucleotide
ugauagagaccuugccaau

SEQ ID NO: 2740821 - RNA, 19 nt, Artificial Sequence
  Description of Artificial Sequence: Synthetic oligonucleotide
caucaauuaggaugaugga

SEQ ID NO: 2740822 - RNA, 19 nt, Artificial Sequence
  Description of Artificial Sequence: Synthetic oligonucleotide
cucacagagggugaaccac

SEQ ID NO: 2740823 - RNA, 19 nt, Artificial Sequence
  Description of Artificial Sequence: Synthetic oligonucleotide
gaauguccccaggagagga

SEQ ID NO: 2740824 - RNA, 19 nt, Artificial Sequence
  Description of Artificial Sequence: Synthetic oligonucleotide
gugacauaggaucguucac

SEQ ID NO: 2740825 - RNA, 19 nt, Artificial Sequence
  Description of Artificial Sequence: Synthetic oligonucleotide
uauugggcauccagucccu

SEQ ID NO: 2740826 - RNA, 19 nt, Artificial Sequence
  Description of Artificial Sequence: Synthetic oligonucleotide
agaccuugccaauaaucuu

SEQ ID NO: 2740827 - RNA, 19 nt, Artificial Sequence
  Description of Artificial Sequence: Synthetic oligonucleotide
guucacuccccacucccug

SEQ ID NO: 2740828 - RNA, 19 nt, Artificial Sequence
  Description of Artificial Sequence: Synthetic oligonucleotide
caugugccuucucagcuuc

SEQ ID NO: 2740829 - RNA, 19 nt, Artificial Sequence
  Description of Artificial Sequence: Synthetic oligonucleotide
aggcauuggacaguucaug

SEQ ID NO: 2740830 - RNA, 19 nt, Artificial Sequence
  Description of Artificial Sequence: Synthetic oligonucleotide
guacauaaucccaaaauuu

SEQ ID NO: 2740831 - RNA, 19 nt, Artificial Sequence
  Description of Artificial Sequence: Synthetic oligonucleotide
cacauuuccuuccagcugu

SEQ ID NO: 2740832 - RNA, 19 nt, Artificial Sequence
  Description of Artificial Sequence: Synthetic oligonucleotide
ucacuccccacucccugug

SEQ ID NO: 2740833 - RNA, 19 nt, Artificial Sequence
  Description of Artificial Sequence: Synthetic oligonucleotide
ugggcaaugugaggcucgg

SEQ ID NO: 2740834 - RNA, 19 nt, Artificial Sequence
  Description of Artificial Sequence: Synthetic oligonucleotide
auaaucuuguagccacauu

SEQ ID NO: 2740835 - RNA, 19 nt, Artificial Sequence
  Description of Artificial Sequence: Synthetic oligonucleotide
cuucaucauucuuguccag

SEQ ID NO: 2740836 - RNA, 19 nt, Artificial Sequence
  Description of Artificial Sequence: Synthetic oligonucleotide
uugccaaagccaggaguag

SEQ ID NO: 2740837 - RNA, 19 nt, Artificial Sequence
  Description of Artificial Sequence: Synthetic oligonucleotide
uccaggcuauccagaagaa

SEQ ID NO: 2740838 - RNA, 19 nt, Artificial Sequence
  Description of Artificial Sequence: Synthetic oligonucleotide
ucaaagccauugagguagu

SEQ ID NO: 2740839 - RNA, 19 nt, Artificial Sequence
  Description of Artificial Sequence: Synthetic oligonucleotide
gagugguuauugggcaucc

SEQ ID NO: 2740840 - RNA, 19 nt, Artificial Sequence
  Description of Artificial Sequence: Synthetic oligonucleotide
uucacuccccacucccugu

SEQ ID NO: 2740841 - RNA, 19 nt, Artificial Sequence
  Description of Artificial Sequence: Synthetic oligonucleotide
uagccacauuuccuuccag

SEQ ID NO: 2740842 - RNA, 19 nt, Artificial Sequence
  Description of Artificial Sequence: Synthetic oligonucleotide
gauagagaccuugccaaua

SEQ ID NO: 2740843 - RNA, 19 nt, Artificial Sequence
  Description of Artificial Sequence: Synthetic oligonucleotide
augugugagggcugggcaa

SEQ ID NO: 2740844 - RNA, 19 nt, Artificial Sequence
  Description of Artificial Sequence: Synthetic oligonucleotide
auaugccaaguauuucaua

SEQ ID NO: 2740845 - RNA, 19 nt, Artificial Sequence
  Description of Artificial Sequence: Synthetic oligonucleotide
cugcuguguuucauuguug

SEQ ID NO: 2740846 - RNA, 19 nt, Artificial Sequence
  Description of Artificial Sequence: Synthetic oligonucleotide
acucaaagccauugaggua

SEQ ID NO: 2740847 - RNA, 19 nt, Artificial Sequence
  Description of Artificial Sequence: Synthetic oligonucleotide
gcauuggacaguucaugug

SEQ ID NO: 2740848 - RNA, 19 nt, Artificial Sequence
  Description of Artificial Sequence: Synthetic oligonucleotide
caggaauguccccaggaga

SEQ ID NO: 2740849 - RNA, 19 nt, Artificial Sequence
  Description of Artificial Sequence: Synthetic oligonucleotide
ggaugcaugugccuucuca

SEQ ID NO: 2740850 - RNA, 19 nt, Artificial Sequence
  Description of Artificial Sequence: Synthetic oligonucleotide
aggcuauccagaagaaacu

SEQ ID NO: 2740851 - RNA, 19 nt, Artificial Sequence
  Description of Artificial Sequence: Synthetic oligonucleotide
uagagaccuugccaauaau

SEQ ID NO: 2740852 - RNA, 19 nt, Artificial Sequence
  Description of Artificial Sequence: Synthetic oligonucleotide
cucuucgacuuugccaaag

SEQ ID NO: 2740853 - RNA, 19 nt, Artificial Sequence
  Description of Artificial Sequence: Synthetic oligonucleotide
cagagggugaaccacgaua

SEQ ID NO: 2740854 - RNA, 19 nt, Artificial Sequence
  Description of Artificial Sequence: Synthetic oligonucleotide
gugaaccacgauacacagg

SEQ ID NO: 2740855 - RNA, 19 nt, Artificial Sequence
  Description of Artificial Sequence: Synthetic oligonucleotide
uggagugguuauugggcau

SEQ ID NO: 2740856 - RNA, 19 nt, Artificial Sequence
  Description of Artificial Sequence: Synthetic oligonucleotide
ccaguucauggucacagac

SEQ ID NO: 2740857 - RNA, 19 nt, Artificial Sequence
  Description of Artificial Sequence: Synthetic oligonucleotide
uucaugugugagggcuggg

SEQ ID NO: 2740858 - RNA, 19 nt, Artificial Sequence
  Description of Artificial Sequence: Synthetic oligonucleotide
ggcuauccagaagaaacug

SEQ ID NO: 2740859 - RNA, 19 nt, Artificial Sequence
  Description of Artificial Sequence: Synthetic oligonucleotide
aggugacauaggaucguuc

SEQ ID NO: 2740860 - RNA, 19 nt, Artificial Sequence
  Description of Artificial Sequence: Synthetic oligonucleotide
uccccacucccugugcucc

SEQ ID NO: 2740861 - RNA, 19 nt, Artificial Sequence
  Description of Artificial Sequence: Synthetic oligonucleotide
ugaggcucggggacaggaa

SEQ ID NO: 2740862 - RNA, 19 nt, Artificial Sequence
  Description of Artificial Sequence: Synthetic oligonucleotide
cuuugccaaagccaggagu

SEQ ID NO: 2740863 - RNA, 19 nt, Artificial Sequence
  Description of Artificial Sequence: Synthetic oligonucleotide
cucuucaugaagaucugau

SEQ ID NO: 2740864 - RNA, 19 nt, Artificial Sequence
  Description of Artificial Sequence: Synthetic oligonucleotide
ccugauagagaccuugcca

SEQ ID NO: 2740865 - RNA, 19 nt, Artificial Sequence
  Description of Artificial Sequence: Synthetic oligonucleotide
accacgauacacaggcaca

SEQ ID NO: 2740866 - RNA, 19 nt, Artificial Sequence
  Description of Artificial Sequence: Synthetic oligonucleotide
aagaucugauguacauaau

SEQ ID NO: 2740867 - RNA, 19 nt, Artificial Sequence
  Description of Artificial Sequence: Synthetic oligonucleotide
acuccccacucccugugcu

SEQ ID NO: 2740868 - RNA, 19 nt, Artificial Sequence
  Description of Artificial Sequence: Synthetic oligonucleotide
uccucugcuguguuucauu

SEQ ID NO: 2740869 - RNA, 19 nt, Artificial Sequence
  Description of Artificial Sequence: Synthetic oligonucleotide
uuaggaugauggagugguu

SEQ ID NO: 2740870 - RNA, 19 nt, Artificial Sequence
  Description of Artificial Sequence: Synthetic oligonucleotide
uugagguaguuaggugaca

SEQ ID NO: 2740871 - RNA, 19 nt, Artificial Sequence
  Description of Artificial Sequence: Synthetic oligonucleotide
guuguggaucauggcagug

SEQ ID NO: 2740872 - RNA, 19 nt, Artificial Sequence
  Description of Artificial Sequence: Synthetic oligonucleotide
acgaaacacucaaagccau

SEQ ID NO: 2740873 - RNA, 19 nt, Artificial Sequence
  Description of Artificial Sequence: Synthetic oligonucleotide
ggucacagacgaaacacuc

SEQ ID NO: 2740874 - RNA, 19 nt, Artificial Sequence
  Description of Artificial Sequence: Synthetic oligonucleotide
cuuccagccgagccaguuc

SEQ ID NO: 2740875 - RNA, 19 nt, Artificial Sequence
  Description of Artificial Sequence: Synthetic oligonucleotide
cacgauacacaggcacagc

SEQ ID NO: 2740876 - RNA, 19 nt, Artificial Sequence
  Description of Artificial Sequence: Synthetic oligonucleotide
cucaggaaucucuucgacu

SEQ ID NO: 2740877 - RNA, 19 nt, Artificial Sequence
  Description of Artificial Sequence: Synthetic oligonucleotide
cccugguugcuuauaugcc

SEQ ID NO: 2740878 - RNA, 19 nt, Artificial Sequence
  Description of Artificial Sequence: Synthetic oligonucleotide
gagggugaaccacgauaca

SEQ ID NO: 2740879 - RNA, 19 nt, Artificial Sequence
  Description of Artificial Sequence: Synthetic oligonucleotide
ggaauguccccaggagagg

SEQ ID NO: 2740880 - RNA, 19 nt, Artificial Sequence
  Description of Artificial Sequence: Synthetic oligonucleotide
augugaggcucggggacag

SEQ ID NO: 2740881 - RNA, 19 nt, Artificial Sequence
  Description of Artificial Sequence: Synthetic oligonucleotide
aauguccccaggagaggau

SEQ ID NO: 2740882 - RNA, 19 nt, Artificial Sequence
  Description of Artificial Sequence: Synthetic oligonucleotide
ccugguugcuuauaugcca

SEQ ID NO: 2740883 - RNA, 19 nt, Artificial Sequence
  Description of Artificial Sequence: Synthetic oligonucleotide
aggaugcaugugccuucuc

SEQ ID NO: 2740884 - RNA, 19 nt, Artificial Sequence
  Description of Artificial Sequence: Synthetic oligonucleotide
gccaauaaucuuguagcca

SEQ ID NO: 2740885 - RNA, 19 nt, Artificial Sequence
  Description of Artificial Sequence: Synthetic oligonucleotide
uaggugacauaggaucguu

SEQ ID NO: 2740886 - RNA, 19 nt, Artificial Sequence
  Description of Artificial Sequence: Synthetic oligonucleotide
ggaucauggcagugagagc

SEQ ID NO: 2740887 - RNA, 19 nt, Artificial Sequence
  Description of Artificial Sequence: Synthetic oligonucleotide
gggugaaccacgauacaca

SEQ ID NO: 2740888 - RNA, 19 nt, Artificial Sequence
  Description of Artificial Sequence: Synthetic oligonucleotide
ggacaggaauguccccagg

SEQ ID NO: 2740889 - RNA, 19 nt, Artificial Sequence
  Description of Artificial Sequence: Synthetic oligonucleotide
ggcauuggacaguucaugu

SEQ ID NO: 2740890 - RNA, 19 nt, Artificial Sequence
  Description of Artificial Sequence: Synthetic oligonucleotide
auugggcauccagucccuc

SEQ ID NO: 2740891 - RNA, 19 nt, Artificial Sequence
  Description of Artificial Sequence: Synthetic oligonucleotide
augugccuucucagcuucc

SEQ ID NO: 2740892 - RNA, 19 nt, Artificial Sequence
  Description of Artificial Sequence: Synthetic oligonucleotide
agcuuuugaggggacucaa

SEQ ID NO: 2740893 - RNA, 19 nt, Artificial Sequence
  Description of Artificial Sequence: Synthetic oligonucleotide
uuucauuguuguggaucau

SEQ ID NO: 2740894 - RNA, 19 nt, Artificial Sequence
  Description of Artificial Sequence: Synthetic oligonucleotide
gcuauccagaagaaacuga

SEQ ID NO: 2740895 - RNA, 19 nt, Artificial Sequence
  Description of Artificial Sequence: Synthetic oligonucleotide
caucauucuuguccagaaa

SEQ ID NO: 2740896 - RNA, 19 nt, Artificial Sequence
  Description of Artificial Sequence: Synthetic oligonucleotide
ggaucguucacuccccacu

SEQ ID NO: 2740897 - RNA, 19 nt, Artificial Sequence
  Description of Artificial Sequence: Synthetic oligonucleotide
cccugauagagaccuugcc

SEQ ID NO: 2740898 - RNA, 19 nt, Artificial Sequence
  Description of Artificial Sequence: Synthetic oligonucleotide
ucucuucgacuuugccaaa

SEQ ID NO: 2740899 - RNA, 19 nt, Artificial Sequence
  Description of Artificial Sequence: Synthetic oligonucleotide
ggaaucucuucgacuuugc

SEQ ID NO: 2740900 - RNA, 19 nt, Artificial Sequence
  Description of Artificial Sequence: Synthetic oligonucleotide
ugugaggcucggggacagg

SEQ ID NO: 2740901 - RNA, 19 nt, Artificial Sequence
  Description of Artificial Sequence: Synthetic oligonucleotide
ccacgauacacaggcacag

SEQ ID NO: 2740902 - RNA, 19 nt, Artificial Sequence
  Description of Artificial Sequence: Synthetic oligonucleotide
gccacauuuccuuccagcu

SEQ ID NO: 2740903 - RNA, 19 nt, Artificial Sequence
  Description of Artificial Sequence: Synthetic oligonucleotide
cccucacagagggugaacc

SEQ ID NO: 2740904 - RNA, 19 nt, Artificial Sequence
  Description of Artificial Sequence: Synthetic oligonucleotide
aggcucggggacaggaaug

SEQ ID NO: 2740905 - RNA, 19 nt, Artificial Sequence
  Description of Artificial Sequence: Synthetic oligonucleotide
gugaggcucggggacagga

SEQ ID NO: 2740906 - RNA, 19 nt, Artificial Sequence
  Description of Artificial Sequence: Synthetic oligonucleotide
ggagugguuauugggcauc

SEQ ID NO: 2740907 - RNA, 19 nt, Artificial Sequence
  Description of Artificial Sequence: Synthetic oligonucleotide
cacagacgaaacacucaaa

SEQ ID NO: 2740908 - RNA, 19 nt, Artificial Sequence
  Description of Artificial Sequence: Synthetic oligonucleotide
gccaggaguaggcauugga

SEQ ID NO: 2740909 - RNA, 19 nt, Artificial Sequence
  Description of Artificial Sequence: Synthetic oligonucleotide
ugccagcuuuugaggggac

SEQ ID NO: 2740910 - RNA, 19 nt, Artificial Sequence
  Description of Artificial Sequence: Synthetic oligonucleotide
cacuccccacucccugugc

SEQ ID NO: 2740911 - RNA, 19 nt, Artificial Sequence
  Description of Artificial Sequence: Synthetic oligonucleotide
gcuccaggcuauccagaag

SEQ ID NO: 2740912 - RNA, 19 nt, Artificial Sequence
  Description of Artificial Sequence: Synthetic oligonucleotide
gcuuauaugccaaguauuu

SEQ ID NO: 2740913 - RNA, 19 nt, Artificial Sequence
  Description of Artificial Sequence: Synthetic oligonucleotide
cugccagcuuuugagggga

SEQ ID NO: 2740914 - RNA, 19 nt, Artificial Sequence
  Description of Artificial Sequence: Synthetic oligonucleotide
ccccugauagagaccuugc

SEQ ID NO: 2740915 - RNA, 19 nt, Artificial Sequence
  Description of Artificial Sequence: Synthetic oligonucleotide
agucccucacagaggguga

SEQ ID NO: 2740916 - RNA, 19 nt, Artificial Sequence
  Description of Artificial Sequence: Synthetic oligonucleotide
uuccucugcuguguuucau

SEQ ID NO: 2740917 - RNA, 19 nt, Artificial Sequence
  Description of Artificial Sequence: Synthetic oligonucleotide
cuccccacucccugugcuc

SEQ ID NO: 2740918 - RNA, 19 nt, Artificial Sequence
  Description of Artificial Sequence: Synthetic oligonucleotide
gaaccacgauacacaggca

SEQ ID NO: 2740919 - RNA, 19 nt, Artificial Sequence
  Description of Artificial Sequence: Synthetic oligonucleotide
uccccaggagaggaugcau

SEQ ID NO: 2740920 - RNA, 19 nt, Artificial Sequence
  Description of Artificial Sequence: Synthetic oligonucleotide
agccaggaguaggcauugg

SEQ ID NO: 2740921 - RNA, 19 nt, Artificial Sequence
  Description of Artificial Sequence: Synthetic oligonucleotide
ucccucacagagggugaac

SEQ ID NO: 2740922 - RNA, 19 nt, Artificial Sequence
  Description of Artificial Sequence: Synthetic oligonucleotide
ccagcuuuugaggggacuc

SEQ ID NO: 2740923 - RNA, 19 nt, Artificial Sequence
  Description of Artificial Sequence: Synthetic oligonucleotide
gccauugagguaguuaggu

SEQ ID NO: 2740924 - RNA, 19 nt, Artificial Sequence
  Description of Artificial Sequence: Synthetic oligonucleotide
uccagccgagccaguucau

SEQ ID NO: 2740925 - RNA, 19 nt, Artificial Sequence
  Description of Artificial Sequence: Synthetic oligonucleotide
gaggggacucaaagucauc

SEQ ID NO: 2740926 - RNA, 19 nt, Artificial Sequence
  Description of Artificial Sequence: Synthetic oligonucleotide
ccagaagaaacugauuggu

SEQ ID NO: 2740927 - RNA, 19 nt, Artificial Sequence
  Description of Artificial Sequence: Synthetic oligonucleotide
caauaaauucugccagcuu

SEQ ID NO: 2740928 - RNA, 19 nt, Artificial Sequence
  Description of Artificial Sequence: Synthetic oligonucleotide
gaggaugcaugugccuucu

SEQ ID NO: 2740929 - RNA, 19 nt, Artificial Sequence
  Description of Artificial Sequence: Synthetic oligonucleotide
gguugcuuauaugccaagu

SEQ ID NO: 2740930 - RNA, 19 nt, Artificial Sequence
  Description of Artificial Sequence: Synthetic oligonucleotide
cagcugucauucucaggaa

SEQ ID NO: 2740931 - RNA, 19 nt, Artificial Sequence
  Description of Artificial Sequence: Synthetic oligonucleotide
guggaucauggcagugaga

SEQ ID NO: 2740932 - RNA, 19 nt, Artificial Sequence
  Description of Artificial Sequence: Synthetic oligonucleotide
aucauggcagugagagcuu

SEQ ID NO: 2740933 - RNA, 19 nt, Artificial Sequence
  Description of Artificial Sequence: Synthetic oligonucleotide
gugugagggcugggcaaug

SEQ ID NO: 2740934 - RNA, 19 nt, Artificial Sequence
  Description of Artificial Sequence: Synthetic oligonucleotide
guucauggucacagacgaa

SEQ ID NO: 2740935 - RNA, 19 nt, Artificial Sequence
  Description of Artificial Sequence: Synthetic oligonucleotide
ccaggagaggaugcaugug

SEQ ID NO: 2740936 - RNA, 19 nt, Artificial Sequence
  Description of Artificial Sequence: Synthetic oligonucleotide
gcuuuugaggggacucaaa

SEQ ID NO: 2740937 - RNA, 19 nt, Artificial Sequence
  Description of Artificial Sequence: Synthetic oligonucleotide
gucccucacagagggugaa

SEQ ID NO: 2740938 - RNA, 19 nt, Artificial Sequence
  Description of Artificial Sequence: Synthetic oligonucleotide
ggaguaggcauuggacagu

SEQ ID NO: 2740939 - RNA, 19 nt, Artificial Sequence
  Description of Artificial Sequence: Synthetic oligonucleotide
cccaggagaggaugcaugu

SEQ ID NO: 2740940 - RNA, 19 nt, Artificial Sequence
  Description of Artificial Sequence: Synthetic oligonucleotide
ccucuucaugaagaucuga

SEQ ID NO: 2740941 - RNA, 19 nt, Artificial Sequence
  Description of Artificial Sequence: Synthetic oligonucleotide
ggcucggggacaggaaugu

SEQ ID NO: 2740942 - RNA, 19 nt, Artificial Sequence
  Description of Artificial Sequence: Synthetic oligonucleotide
gcaugugccuucucagcuu

SEQ ID NO: 2740943 - RNA, 19 nt, Artificial Sequence
  Description of Artificial Sequence: Synthetic oligonucleotide
ccaggcuauccagaagaaa

SEQ ID NO: 2740944 - RNA, 19 nt, Artificial Sequence
  Description of Artificial Sequence: Synthetic oligonucleotide
agcuuccagccgagccagu

SEQ ID NO: 2740945 - RNA, 19 nt, Artificial Sequence
  Description of Artificial Sequence: Synthetic oligonucleotide
cccacucccugugcuccag

SEQ ID NO: 2740946 - RNA, 19 nt, Artificial Sequence
  Description of Artificial Sequence: Synthetic oligonucleotide
gcucggggacaggaauguc

SEQ ID NO: 2740947 - RNA, 19 nt, Artificial Sequence
  Description of Artificial Sequence: Synthetic oligonucleotide
gccagcuuuugaggggacu

SEQ ID NO: 2740948 - RNA, 19 nt, Artificial Sequence
  Description of Artificial Sequence: Synthetic oligonucleotide
ccuugccaauaaucuugua

SEQ ID NO: 2740949 - RNA, 19 nt, Artificial Sequence
  Description of Artificial Sequence: Synthetic oligonucleotide
caaagccauugagguaguu

SEQ ID NO: 2740950 - RNA, 19 nt, Artificial Sequence
  Description of Artificial Sequence: Synthetic oligonucleotide
gcuuccagccgagccaguu

SEQ ID NO: 2740951 - RNA, 19 nt, Artificial Sequence
  Description of Artificial Sequence: Synthetic oligonucleotide
cgaaacacucaaagccauu

SEQ ID NO: 2740952 - RNA, 19 nt, Artificial Sequence
  Description of Artificial Sequence: Synthetic oligonucleotide
ccccacucccugugcucca

SEQ ID NO: 2740953 - RNA, 19 nt, Artificial Sequence
  Description of Artificial Sequence: Synthetic oligonucleotide
aauagcaccucgcacaggc

SEQ ID NO: 2740954 - RNA, 19 nt, Artificial Sequence
  Description of Artificial Sequence: Synthetic oligonucleotide
guugacaucauaauugccg

SEQ ID NO: 2740955 - RNA, 19 nt, Artificial Sequence
  Description of Artificial Sequence: Synthetic oligonucleotide
uugacaucauaauugccgg

SEQ ID NO: 2740956 - RNA, 19 nt, Artificial Sequence
  Description of Artificial Sequence: Synthetic oligonucleotide
gaugccauccacuuggcgc

SEQ ID NO: 2740957 - RNA, 19 nt, Artificial Sequence
  Description of Artificial Sequence: Synthetic oligonucleotide
acguugacaucauaauugc

SEQ ID NO: 2740958 - RNA, 19 nt, Artificial Sequence
  Description of Artificial Sequence: Synthetic oligonucleotide
ucuugcaaauuucaucugc

SEQ ID NO: 2740959 - RNA, 19 nt, Artificial Sequence
  Description of Artificial Sequence: Synthetic oligonucleotide
ugucccaccacacagcggc

SEQ ID NO: 2740960 - RNA, 19 nt, Artificial Sequence
  Description of Artificial Sequence: Synthetic oligonucleotide
cacguugacaucauaauug

SEQ ID NO: 2740961 - RNA, 19 nt, Artificial Sequence
  Description of Artificial Sequence: Synthetic oligonucleotide
aaauuucaucugcagcuuc

SEQ ID NO: 2740962 - RNA, 19 nt, Artificial Sequence
  Description of Artificial Sequence: Synthetic oligonucleotide
uauaguagaugccauccac

SEQ ID NO: 2740963 - RNA, 19 nt, Artificial Sequence
  Description of Artificial Sequence: Synthetic oligonucleotide
agaggguagguucaggauc

SEQ ID NO: 2740964 - RNA, 19 nt, Artificial Sequence
  Description of Artificial Sequence: Synthetic oligonucleotide
uucaggaucaggccuagca

SEQ ID NO: 2740965 - RNA, 19 nt, Artificial Sequence
  Description of Artificial Sequence: Synthetic oligonucleotide
guuauaguagaugccaucc

SEQ ID NO: 2740966 - RNA, 19 nt, Artificial Sequence
  Description of Artificial Sequence: Synthetic oligonucleotide
uggaggacguuguugagag

SEQ ID NO: 2740967 - RNA, 19 nt, Artificial Sequence
  Description of Artificial Sequence: Synthetic oligonucleotide
uuguugagagcguggaccg

SEQ ID NO: 2740968 - RNA, 19 nt, Artificial Sequence
  Description of Artificial Sequence: Synthetic oligonucleotide
agugggucagcuugugugc

SEQ ID NO: 2740969 - RNA, 19 nt, Artificial Sequence
  Description of Artificial Sequence: Synthetic oligonucleotide
accaauagcaccucgcaca

SEQ ID NO: 2740970 - RNA, 19 nt, Artificial Sequence
  Description of Artificial Sequence: Synthetic oligonucleotide
uuugaguccagguuauagu

SEQ ID NO: 2740971 - RNA, 19 nt, Artificial Sequence
  Description of Artificial Sequence: Synthetic oligonucleotide
ucagcuugugugcagccag

SEQ ID NO: 2740972 - RNA, 19 nt, Artificial Sequence
  Description of Artificial Sequence: Synthetic oligonucleotide
ugagacaugcccuccucgg

SEQ ID NO: 2740973 - RNA, 19 nt, Artificial Sequence
  Description of Artificial Sequence: Synthetic oligonucleotide
aagcuuugaguccagguua

SEQ ID NO: 2740974 - RNA, 19 nt, Artificial Sequence
  Description of Artificial Sequence: Synthetic oligonucleotide
uuauaguagaugccaucca

SEQ ID NO: 2740975 - RNA, 19 nt, Artificial Sequence
  Description of Artificial Sequence: Synthetic oligonucleotide
aauggcagggccagcaguc

SEQ ID NO: 2740976 - RNA, 19 nt, Artificial Sequence
  Description of Artificial Sequence: Synthetic oligonucleotide
ugcgaugaggguucagccg

SEQ ID NO: 2740977 - RNA, 19 nt, Artificial Sequence
  Description of Artificial Sequence: Synthetic oligonucleotide
gacaucauaauugccggug

SEQ ID NO: 2740978 - RNA, 19 nt, Artificial Sequence
  Description of Artificial Sequence: Synthetic oligonucleotide
uagguucaggaucaggccu

SEQ ID NO: 2740979 - RNA, 19 nt, Artificial Sequence
  Description of Artificial Sequence: Synthetic oligonucleotide
uguuguuggaggacguugu

SEQ ID NO: 2740980 - RNA, 19 nt, Artificial Sequence
  Description of Artificial Sequence: Synthetic oligonucleotide
ucuggggccagccucuugc

SEQ ID NO: 2740981 - RNA, 19 nt, Artificial Sequence
  Description of Artificial Sequence: Synthetic oligonucleotide
gcuaaagagcuguuguugg

SEQ ID NO: 2740982 - RNA, 19 nt, Artificial Sequence
  Description of Artificial Sequence: Synthetic oligonucleotide
uugaguccagguuauagua

SEQ ID NO: 2740983 - RNA, 19 nt, Artificial Sequence
  Description of Artificial Sequence: Synthetic oligonucleotide
ucgugguacacugagggug

SEQ ID NO: 2740984 - RNA, 19 nt, Artificial Sequence
  Description of Artificial Sequence: Synthetic oligonucleotide
caggaucaggccuagcacc

SEQ ID NO: 2740985 - RNA, 19 nt, Artificial Sequence
  Description of Artificial Sequence: Synthetic oligonucleotide
acagcggccaggcccaggc

SEQ ID NO: 2740986 - RNA, 19 nt, Artificial Sequence
  Description of Artificial Sequence: Synthetic oligonucleotide
accgcgcacagcucuagcc

SEQ ID NO: 2740987 - RNA, 19 nt, Artificial Sequence
  Description of Artificial Sequence: Synthetic oligonucleotide
cuuugaguccagguuauag

SEQ ID NO: 2740988 - RNA, 19 nt, Artificial Sequence
  Description of Artificial Sequence: Synthetic oligonucleotide
ugggacagcggucuccucc

SEQ ID NO: 2740989 - RNA, 19 nt, Artificial Sequence
  Description of Artificial Sequence: Synthetic oligonucleotide
ucacguugacaucauaauu

SEQ ID NO: 2740990 - RNA, 19 nt, Artificial Sequence
  Description of Artificial Sequence: Synthetic oligonucleotide
gcucgugguacacugaggg

SEQ ID NO: 2740991 - RNA, 19 nt, Artificial Sequence
  Description of Artificial Sequence: Synthetic oligonucleotide
gucuccucuaccuccuugg

SEQ ID NO: 2740992 - RNA, 19 nt, Artificial Sequence
  Description of Artificial Sequence: Synthetic oligonucleotide
cagugggucagcuugugug

SEQ ID NO: 2740993 - RNA, 19 nt, Artificial Sequence
  Description of Artificial Sequence: Synthetic oligonucleotide
aucacguugacaucauaau

SEQ ID NO: 2740994 - RNA, 19 nt, Artificial Sequence
  Description of Artificial Sequence: Synthetic oligonucleotide
gaaggcucugacaccaucc

SEQ ID NO: 2740995 - RNA, 19 nt, Artificial Sequence
  Description of Artificial Sequence: Synthetic oligonucleotide
ucauaauugccggugccca

SEQ ID NO: 2740996 - RNA, 19 nt, Artificial Sequence
  Description of Artificial Sequence: Synthetic oligonucleotide
aaggcucugacaccauccu

SEQ ID NO: 2740997 - RNA, 19 nt, Artificial Sequence
  Description of Artificial Sequence: Synthetic oligonucleotide
acugagggugggcucggcc

SEQ ID NO: 2740998 - RNA, 19 nt, Artificial Sequence
  Description of Artificial Sequence: Synthetic oligonucleotide
agcuuccuggcuaaagagc

SEQ ID NO: 2740999 - RNA, 19 nt, Artificial Sequence
  Description of Artificial Sequence: Synthetic oligonucleotide
auaauugccggugcccagg

SEQ ID NO: 2741000 - RNA, 19 nt, Artificial Sequence
  Description of Artificial Sequence: Synthetic oligonucleotide
gaguccagguuauaguaga

SEQ ID NO: 2741001 - RNA, 19 nt, Artificial Sequence
  Description of Artificial Sequence: Synthetic oligonucleotide
cucgcacaggccuugggcc

SEQ ID NO: 2741002 - RNA, 19 nt, Artificial Sequence
  Description of Artificial Sequence: Synthetic oligonucleotide
gaucacguugacaucauaa

SEQ ID NO: 2741003 - RNA, 19 nt, Artificial Sequence
  Description of Artificial Sequence: Synthetic oligonucleotide
agcagucccagcgacacag

SEQ ID NO: 2741004 - RNA, 19 nt, Artificial Sequence
  Description of Artificial Sequence: Synthetic oligonucleotide
guugagagcguggaccgcg

SEQ ID NO: 2741005 - RNA, 19 nt, Artificial Sequence
  Description of Artificial Sequence: Synthetic oligonucleotide
accaccaauagcaccucgc

SEQ ID NO: 2741006 - RNA, 19 nt, Artificial Sequence
  Description of Artificial Sequence: Synthetic oligonucleotide
caugaucacguugacauca

SEQ ID NO: 2741007 - RNA, 19 nt, Artificial Sequence
  Description of Artificial Sequence: Synthetic oligonucleotide
gcaaauuucaucugcagcu

SEQ ID NO: 2741008 - RNA, 19 nt, Artificial Sequence
  Description of Artificial Sequence: Synthetic oligonucleotide
gagcuguuguuggaggacg

SEQ ID NO: 2741009 - RNA, 19 nt, Artificial Sequence
  Description of Artificial Sequence: Synthetic oligonucleotide
agagcuguuguuggaggac

SEQ ID NO: 2741010 - RNA, 19 nt, Artificial Sequence
  Description of Artificial Sequence: Synthetic oligonucleotide
augccauccacuuggcgca

SEQ ID NO: 2741011 - RNA, 19 nt, Artificial Sequence
  Description of Artificial Sequence: Synthetic oligonucleotide
cugcgaugaggguucagcc

SEQ ID NO: 2741012 - RNA, 19 nt, Artificial Sequence
  Description of Artificial Sequence: Synthetic oligonucleotide
gcgaugaggguucagccgg

SEQ ID NO: 2741013 - RNA, 19 nt, Artificial Sequence
  Description of Artificial Sequence: Synthetic oligonucleotide
cagcuuccuggcuaaagag

SEQ ID NO: 2741014 - RNA, 19 nt, Artificial Sequence
  Description of Artificial Sequence: Synthetic oligonucleotide
gugcccgaagcuuugaguc

SEQ ID NO: 2741015 - RNA, 19 nt, Artificial Sequence
  Description of Artificial Sequence: Synthetic oligonucleotide
gacguuguugagagcgugg

SEQ ID NO: 2741016 - RNA, 19 nt, Artificial Sequence
  Description of Artificial Sequence: Synthetic oligonucleotide
ugucaggaaggcucugaca

SEQ ID NO: 2741017 - RNA, 19 nt, Artificial Sequence
  Description of Artificial Sequence: Synthetic oligonucleotide
uugccggugcccaggaggc

SEQ ID NO: 2741018 - RNA, 19 nt, Artificial Sequence
  Description of Artificial Sequence: Synthetic oligonucleotide
agacaugcccuccucggcu

SEQ ID NO: 2741019 - RNA, 19 nt, Artificial Sequence
  Description of Artificial Sequence: Synthetic oligonucleotide
agaugccauccacuuggcg

SEQ ID NO: 2741020 - RNA, 19 nt, Artificial Sequence
  Description of Artificial Sequence: Synthetic oligonucleotide
cagguuauaguagaugcca

SEQ ID NO: 2741021 - RNA, 19 nt, Artificial Sequence
  Description of Artificial Sequence: Synthetic oligonucleotide
gucccagcgacacaggaga

SEQ ID NO: 2741022 - RNA, 19 nt, Artificial Sequence
  Description of Artificial Sequence: Synthetic oligonucleotide
auaguagaugccauccacu

SEQ ID NO: 2741023 - RNA, 19 nt, Artificial Sequence
  Description of Artificial Sequence: Synthetic oligonucleotide
uccacuuggcgcagggcca

SEQ ID NO: 2741024 - RNA, 19 nt, Artificial Sequence
  Description of Artificial Sequence: Synthetic oligonucleotide
cauaauugccggugcccag

SEQ ID NO: 2741025 - RNA, 19 nt, Artificial Sequence
  Description of Artificial Sequence: Synthetic oligonucleotide
gagacaugcccuccucggc

SEQ ID NO: 2741026 - RNA, 19 nt, Artificial Sequence
  Description of Artificial Sequence: Synthetic oligonucleotide
uuggaggacguuguugaga

SEQ ID NO: 2741027 - RNA, 19 nt, Artificial Sequence
  Description of Artificial Sequence: Synthetic oligonucleotide
ugacaucauaauugccggu

SEQ ID NO: 2741028 - RNA, 19 nt, Artificial Sequence
  Description of Artificial Sequence: Synthetic oligonucleotide
uucaggugcccgaagcuuu

SEQ ID NO: 2741029 - RNA, 19 nt, Artificial Sequence
  Description of Artificial Sequence: Synthetic oligonucleotide
uaauugccggugcccagga

SEQ ID NO: 2741030 - RNA, 19 nt, Artificial Sequence
  Description of Artificial Sequence: Synthetic oligonucleotide
ucaggugcccgaagcuuug

SEQ ID NO: 2741031 - RNA, 19 nt, Artificial Sequence
  Description of Artificial Sequence: Synthetic oligonucleotide
caggccuagcaccuggggc

SEQ ID NO: 2741032 - RNA, 19 nt, Artificial Sequence
  Description of Artificial Sequence: Synthetic oligonucleotide
ugcccgaagcuuugagucc

SEQ ID NO: 2741033 - RNA, 19 nt, Artificial Sequence
  Description of Artificial Sequence: Synthetic oligonucleotide
aauugccggugcccaggag

SEQ ID NO: 2741034 - RNA, 19 nt, Artificial Sequence
  Description of Artificial Sequence: Synthetic oligonucleotide
agggcagcugucaggaagg

SEQ ID NO: 2741035 - RNA, 19 nt, Artificial Sequence
  Description of Artificial Sequence: Synthetic oligonucleotide
ugcagcuuccuggcuaaag

SEQ ID NO: 2741036 - RNA, 19 nt, Artificial Sequence
  Description of Artificial Sequence: Synthetic oligonucleotide
agugccggcggcgcaaugg

SEQ ID NO: 2741037 - RNA, 19 nt, Artificial Sequence
  Description of Artificial Sequence: Synthetic oligonucleotide
cuguuguuggaggacguug

SEQ ID NO: 2741038 - RNA, 19 nt, Artificial Sequence
  Description of Artificial Sequence: Synthetic oligonucleotide
ugccgcucgugguacacug

SEQ ID NO: 2741039 - RNA, 19 nt, Artificial Sequence
  Description of Artificial Sequence: Synthetic oligonucleotide
gguuauaguagaugccauc

SEQ ID NO: 2741040 - RNA, 19 nt, Artificial Sequence
  Description of Artificial Sequence: Synthetic oligonucleotide
ggcuaaagagcuguuguug

SEQ ID NO: 2741041 - RNA, 19 nt, Artificial Sequence
  Description of Artificial Sequence: Synthetic oligonucleotide
gccaugaucacguugacau

SEQ ID NO: 2741042 - RNA, 19 nt, Artificial Sequence
  Description of Artificial Sequence: Synthetic oligonucleotide
uccggggccugagacaugc

SEQ ID NO: 2741043 - RNA, 19 nt, Artificial Sequence
  Description of Artificial Sequence: Synthetic oligonucleotide
guuggaggacguuguugag

SEQ ID NO: 2741044 - RNA, 19 nt, Artificial Sequence
  Description of Artificial Sequence: Synthetic oligonucleotide
aggcucugacaccauccuc

SEQ ID NO: 2741045 - RNA, 19 nt, Artificial Sequence
  Description of Artificial Sequence: Synthetic oligonucleotide
uugagagcguggaccgcgc

SEQ ID NO: 2741046 - RNA, 19 nt, Artificial Sequence
  Description of Artificial Sequence: Synthetic oligonucleotide
caccaauagcaccucgcac

SEQ ID NO: 2741047 - RNA, 19 nt, Artificial Sequence
  Description of Artificial Sequence: Synthetic oligonucleotide
gaggguucagccgggaguc

SEQ ID NO: 2741048 - RNA, 19 nt, Artificial Sequence
  Description of Artificial Sequence: Synthetic oligonucleotide
cugucaggaaggcucugac

SEQ ID NO: 2741049 - RNA, 19 nt, Artificial Sequence
  Description of Artificial Sequence: Synthetic oligonucleotide
agcugggacagcggucucc

SEQ ID NO: 2741050 - RNA, 19 nt, Artificial Sequence
  Description of Artificial Sequence: Synthetic oligonucleotide
ucuccucuaccuccuuggu

SEQ ID NO: 2741051 - RNA, 19 nt, Artificial Sequence
  Description of Artificial Sequence: Synthetic oligonucleotide
agggccacccagugccggc

SEQ ID NO: 2741052 - RNA, 19 nt, Artificial Sequence
  Description of Artificial Sequence: Synthetic oligonucleotide
guccagguuauaguagaug

SEQ ID NO: 2741053 - RNA, 19 nt, Artificial Sequence
  Description of Artificial Sequence: Synthetic oligonucleotide
ccagguuauaguagaugcc

SEQ ID NO: 2741054 - RNA, 19 nt, Artificial Sequence
  Description of Artificial Sequence: Synthetic oligonucleotide
uucagccgggagucugggg

SEQ ID NO: 2741055 - RNA, 19 nt, Artificial Sequence
  Description of Artificial Sequence: Synthetic oligonucleotide
auggcagggccagcagucc

SEQ ID NO: 2741056 - RNA, 19 nt, Artificial Sequence
  Description of Artificial Sequence: Synthetic oligonucleotide
cugacaccauccucacccc

SEQ ID NO: 2741057 - RNA, 19 nt, Artificial Sequence
  Description of Artificial Sequence: Synthetic oligonucleotide
ggagaggguagguucagga

SEQ ID NO: 2741058 - RNA, 19 nt, Artificial Sequence
  Description of Artificial Sequence: Synthetic oligonucleotide
accacacagcggccaggcc

SEQ ID NO: 2741059 - RNA, 19 nt, Artificial Sequence
  Description of Artificial Sequence: Synthetic oligonucleotide
ccagcgacacaggagaggg

SEQ ID NO: 2741060 - RNA, 19 nt, Artificial Sequence
  Description of Artificial Sequence: Synthetic oligonucleotide
ggucaccaccaauagcacc

SEQ ID NO: 2741061 - RNA, 19 nt, Artificial Sequence
  Description of Artificial Sequence: Synthetic oligonucleotide
auagcaccucgcacaggcc

SEQ ID NO: 2741062 - RNA, 19 nt, Artificial Sequence
  Description of Artificial Sequence: Synthetic oligonucleotide
gaggcugcgaugaggguuc

SEQ ID NO: 2741063 - RNA, 19 nt, Artificial Sequence
  Description of Artificial Sequence: Synthetic oligonucleotide
cuuccuggcuaaagagcug

SEQ ID NO: 2741064 - RNA, 19 nt, Artificial Sequence
  Description of Artificial Sequence: Synthetic oligonucleotide
gagagcguggaccgcgcac

SEQ ID NO: 2741065 - RNA, 19 nt, Artificial Sequence
  Description of Artificial Sequence: Synthetic oligonucleotide
ucccagcgacacaggagag

SEQ ID NO: 2741066 - RNA, 19 nt, Artificial Sequence
  Description of Artificial Sequence: Synthetic oligonucleotide
ucgcacaggccuugggcca

SEQ ID NO: 2741067 - RNA, 19 nt, Artificial Sequence
  Description of Artificial Sequence: Synthetic oligonucleotide
agcgacacaggagagggua

SEQ ID NO: 2741068 - RNA, 19 nt, Artificial Sequence
  Description of Artificial Sequence: Synthetic oligonucleotide
gccucuugcaaauuucauc

SEQ ID NO: 2741069 - RNA, 19 nt, Artificial Sequence
  Description of Artificial Sequence: Synthetic oligonucleotide
gucaccaccaauagcaccu

SEQ ID NO: 2741070 - RNA, 19 nt, Artificial Sequence
  Description of Artificial Sequence: Synthetic oligonucleotide
ccucuugcaaauuucaucu

SEQ ID NO: 2741071 - RNA, 19 nt, Artificial Sequence
  Description of Artificial Sequence: Synthetic oligonucleotide
cuggcuaaagagcuguugu

SEQ ID NO: 2741072 - RNA, 19 nt, Artificial Sequence
  Description of Artificial Sequence: Synthetic oligonucleotide
agucccagcgacacaggag

SEQ ID NO: 2741073 - RNA, 19 nt, Artificial Sequence
  Description of Artificial Sequence: Synthetic oligonucleotide
ccacacagcggccaggccc

SEQ ID NO: 2741074 - RNA, 19 nt, Artificial Sequence
  Description of Artificial Sequence: Synthetic oligonucleotide
acguuguugagagcgugga

SEQ ID NO: 2741075 - RNA, 19 nt, Artificial Sequence
  Description of Artificial Sequence: Synthetic oligonucleotide
gcagccaugaucacguuga

SEQ ID NO: 2741076 - RNA, 19 nt, Artificial Sequence
  Description of Artificial Sequence: Synthetic oligonucleotide
ugaucacguugacaucaua

SEQ ID NO: 2741077 - RNA, 19 nt, Artificial Sequence
  Description of Artificial Sequence: Synthetic oligonucleotide
acaggagaggguagguuca

SEQ ID NO: 2741078 - RNA, 19 nt, Artificial Sequence
  Description of Artificial Sequence: Synthetic oligonucleotide
agagcguggaccgcgcaca

SEQ ID NO: 2741079 - RNA, 19 nt, Artificial Sequence
  Description of Artificial Sequence: Synthetic oligonucleotide
ccaauagcaccucgcacag

SEQ ID NO: 2741080 - RNA, 19 nt, Artificial Sequence
  Description of Artificial Sequence: Synthetic oligonucleotide
ucggccgcgcuuccggggc

SEQ ID NO: 2741081 - RNA, 19 nt, Artificial Sequence
  Description of Artificial Sequence: Synthetic oligonucleotide
cagccucuugcaaauuuca

SEQ ID NO: 2741082 - RNA, 19 nt, Artificial Sequence
  Description of Artificial Sequence: Synthetic oligonucleotide
gacaugcccuccucggcuc

SEQ ID NO: 2741083 - RNA, 19 nt, Artificial Sequence
  Description of Artificial Sequence: Synthetic oligonucleotide
ggcucugacaccauccuca

SEQ ID NO: 2741084 - RNA, 19 nt, Artificial Sequence
  Description of Artificial Sequence: Synthetic oligonucleotide
caccaccaauagcaccucg

SEQ ID NO: 2741085 - RNA, 19 nt, Artificial Sequence
  Description of Artificial Sequence: Synthetic oligonucleotide
aggaucaggccuagcaccu

SEQ ID NO: 2741086 - RNA, 19 nt, Artificial Sequence
  Description of Artificial Sequence: Synthetic oligonucleotide
gcugcgaugaggguucagc

SEQ ID NO: 2741087 - RNA, 19 nt, Artificial Sequence
  Description of Artificial Sequence: Synthetic oligonucleotide
aggagaggguagguucagg

SEQ ID NO: 2741088 - RNA, 19 nt, Artificial Sequence
  Description of Artificial Sequence: Synthetic oligonucleotide
gcagcuuccuggcuaaaga

SEQ ID NO: 2741089 - RNA, 19 nt, Artificial Sequence
  Description of Artificial Sequence: Synthetic oligonucleotide
accucgcacaggccuuggg

SEQ ID NO: 2741090 - RNA, 19 nt, Artificial Sequence
  Description of Artificial Sequence: Synthetic oligonucleotide
cacacagcggccaggccca

SEQ ID NO: 2741091 - RNA, 19 nt, Artificial Sequence
  Description of Artificial Sequence: Synthetic oligonucleotide
cgugguacacugagggugg

SEQ ID NO: 2741092 - RNA, 19 nt, Artificial Sequence
  Description of Artificial Sequence: Synthetic oligonucleotide
gagcguggaccgcgcacag

SEQ ID NO: 2741093 - RNA, 19 nt, Artificial Sequence
  Description of Artificial Sequence: Synthetic oligonucleotide
cagccgggagucuggggcc

SEQ ID NO: 2741094 - RNA, 19 nt, Artificial Sequence
  Description of Artificial Sequence: Synthetic oligonucleotide
guucagccgggagucuggg

SEQ ID NO: 2741095 - RNA, 19 nt, Artificial Sequence
  Description of Artificial Sequence: Synthetic oligonucleotide
guacacugagggugggcuc

SEQ ID NO: 2741096 - RNA, 19 nt, Artificial Sequence
  Description of Artificial Sequence: Synthetic oligonucleotide
cucugacaccauccucacc

SEQ ID NO: 2741097 - RNA, 19 nt, Artificial Sequence
  Description of Artificial Sequence: Synthetic oligonucleotide
agccaugaucacguugaca

SEQ ID NO: 2741098 - RNA, 19 nt, Artificial Sequence
  Description of Artificial Sequence: Synthetic oligonucleotide
cucggccgcgcuuccgggg

SEQ ID NO: 2741099 - RNA, 19 nt, Artificial Sequence
  Description of Artificial Sequence: Synthetic oligonucleotide
agcuuugaguccagguuau

SEQ ID NO: 2741100 - RNA, 19 nt, Artificial Sequence
  Description of Artificial Sequence: Synthetic oligonucleotide
ggcgcaauggcagggccag

SEQ ID NO: 2741101 - RNA, 19 nt, Artificial Sequence
  Description of Artificial Sequence: Synthetic oligonucleotide
gaccgcgcacagcucuagc

SEQ ID NO: 2741102 - RNA, 19 nt, Artificial Sequence
  Description of Artificial Sequence: Synthetic oligonucleotide
gguucagccgggagucugg

SEQ ID NO: 2741103 - RNA, 19 nt, Artificial Sequence
  Description of Artificial Sequence: Synthetic oligonucleotide
agcguggaccgcgcacagc

SEQ ID NO: 2741104 - RNA, 19 nt, Artificial Sequence
  Description of Artificial Sequence: Synthetic oligonucleotide
caauagcaccucgcacagg

SEQ ID NO: 2741105 - RNA, 19 nt, Artificial Sequence
  Description of Artificial Sequence: Synthetic oligonucleotide
ucccaccacacagcggcca

SEQ ID NO: 2741106 - RNA, 19 nt, Artificial Sequence
  Description of Artificial Sequence: Synthetic oligonucleotide
uggcgcagggccacccagu

SEQ ID NO: 2741107 - RNA, 19 nt, Artificial Sequence
  Description of Artificial Sequence: Synthetic oligonucleotide
ccccuagggcuucaggugc

SEQ ID NO: 2741108 - RNA, 19 nt, Artificial Sequence
  Description of Artificial Sequence: Synthetic oligonucleotide
ccgcgcacagcucuagccg

SEQ ID NO: 2741109 - RNA, 19 nt, Artificial Sequence
  Description of Artificial Sequence: Synthetic oligonucleotide
ggaaggcucugacaccauc

SEQ ID NO: 2741110 - RNA, 19 nt, Artificial Sequence
  Description of Artificial Sequence: Synthetic oligonucleotide
ggcucggccgcgcuuccgg

SEQ ID NO: 2741111 - RNA, 19 nt, Artificial Sequence
  Description of Artificial Sequence: Synthetic oligonucleotide
ggguagguucaggaucagg

SEQ ID NO: 2741112 - RNA, 19 nt, Artificial Sequence
  Description of Artificial Sequence: Synthetic oligonucleotide
aguccagguuauaguagau

SEQ ID NO: 2741113 - RNA, 19 nt, Artificial Sequence
  Description of Artificial Sequence: Synthetic oligonucleotide
ggacguuguugagagcgug

SEQ ID NO: 2741114 - RNA, 19 nt, Artificial Sequence
  Description of Artificial Sequence: Synthetic oligonucleotide
gcuuccuggcuaaagagcu

SEQ ID NO: 2741115 - RNA, 19 nt, Artificial Sequence
  Description of Artificial Sequence: Synthetic oligonucleotide
agcaccuggggcagggcca

SEQ ID NO: 2741116 - RNA, 19 nt, Artificial Sequence
  Description of Artificial Sequence: Synthetic oligonucleotide
agcuguuguuggaggacgu

SEQ ID NO: 2741117 - RNA, 19 nt, Artificial Sequence
  Description of Artificial Sequence: Synthetic oligonucleotide
ucaccaccaauagcaccuc

SEQ ID NO: 2741118 - RNA, 19 nt, Artificial Sequence
  Description of Artificial Sequence: Synthetic oligonucleotide
gugguacacugaggguggg

SEQ ID NO: 2741119 - RNA, 19 nt, Artificial Sequence
  Description of Artificial Sequence: Synthetic oligonucleotide
cagucccagcgacacagga

SEQ ID NO: 2741120 - RNA, 19 nt, Artificial Sequence
  Description of Artificial Sequence: Synthetic oligonucleotide
ucuagccgcugccgcucgu

SEQ ID NO: 2741121 - RNA, 19 nt, Artificial Sequence
  Description of Artificial Sequence: Synthetic oligonucleotide
ccagcagucccagcgacac

SEQ ID NO: 2741122 - RNA, 19 nt, Artificial Sequence
  Description of Artificial Sequence: Synthetic oligonucleotide
gucagcuugugugcagcca

SEQ ID NO: 2741123 - RNA, 19 nt, Artificial Sequence
  Description of Artificial Sequence: Synthetic oligonucleotide
uccuggcuaaagagcuguu

SEQ ID NO: 2741124 - RNA, 19 nt, Artificial Sequence
  Description of Artificial Sequence: Synthetic oligonucleotide
gagggugggcucggccgcg

SEQ ID NO: 2741125 - RNA, 19 nt, Artificial Sequence
  Description of Artificial Sequence: Synthetic oligonucleotide
uggaccgcgcacagcucua

SEQ ID NO: 2741126 - RNA, 19 nt, Artificial Sequence
  Description of Artificial Sequence: Synthetic oligonucleotide
agccucuugcaaauuucau

SEQ ID NO: 2741127 - RNA, 19 nt, Artificial Sequence
  Description of Artificial Sequence: Synthetic oligonucleotide
augaucacguugacaucau

SEQ ID NO: 2741128 - RNA, 19 nt, Artificial Sequence
  Description of Artificial Sequence: Synthetic oligonucleotide
gcucugacaccauccucac

SEQ ID NO: 2741129 - RNA, 19 nt, Artificial Sequence
  Description of Artificial Sequence: Synthetic oligonucleotide
guggaccgcgcacagcucu

SEQ ID NO: 2741130 - RNA, 19 nt, Artificial Sequence
  Description of Artificial Sequence: Synthetic oligonucleotide
cuagccgcugccgcucgug

SEQ ID NO: 2741131 - RNA, 19 nt, Artificial Sequence
  Description of Artificial Sequence: Synthetic oligonucleotide
cucuaccuccuuggucacc

SEQ ID NO: 2741132 - RNA, 19 nt, Artificial Sequence
  Description of Artificial Sequence: Synthetic oligonucleotide
aggacguuguugagagcgu

SEQ ID NO: 2741133 - RNA, 19 nt, Artificial Sequence
  Description of Artificial Sequence: Synthetic oligonucleotide
gacagcggucuccuccugu

SEQ ID NO: 2741134 - RNA, 19 nt, Artificial Sequence
  Description of Artificial Sequence: Synthetic oligonucleotide
gggucagcuugugugcagc

SEQ ID NO: 2741135 - RNA, 19 nt, Artificial Sequence
  Description of Artificial Sequence: Synthetic oligonucleotide
ggggccagccucuugcaaa

SEQ ID NO: 2741136 - RNA, 19 nt, Artificial Sequence
  Description of Artificial Sequence: Synthetic oligonucleotide
ccuagcaccuggggcaggg

SEQ ID NO: 2741137 - RNA, 19 nt, Artificial Sequence
  Description of Artificial Sequence: Synthetic oligonucleotide
cagggccacccagugccgg

SEQ ID NO: 2741138 - RNA, 19 nt, Artificial Sequence
  Description of Artificial Sequence: Synthetic oligonucleotide
ccgcucgugguacacugag

SEQ ID NO: 2741139 - RNA, 19 nt, Artificial Sequence
  Description of Artificial Sequence: Synthetic oligonucleotide
cuaccuccuuggucaccac

SEQ ID NO: 2741140 - RNA, 19 nt, Artificial Sequence
  Description of Artificial Sequence: Synthetic oligonucleotide
agggcuucaggugcccgaa

SEQ ID NO: 2741141 - RNA, 19 nt, Artificial Sequence
  Description of Artificial Sequence: Synthetic oligonucleotide
ccaccaauagcaccucgca

SEQ ID NO: 2741142 - RNA, 19 nt, Artificial Sequence
  Description of Artificial Sequence: Synthetic oligonucleotide
agggugggcucggccgcgc

SEQ ID NO: 2741143 - RNA, 19 nt, Artificial Sequence
  Description of Artificial Sequence: Synthetic oligonucleotide
cuagcaccuggggcagggc

SEQ ID NO: 2741144 - RNA, 19 nt, Artificial Sequence
  Description of Artificial Sequence: Synthetic oligonucleotide
caauggcagggccagcagu

SEQ ID NO: 2741145 - RNA, 19 nt, Artificial Sequence
  Description of Artificial Sequence: Synthetic oligonucleotide
ggugcccgaagcuuugagu

SEQ ID NO: 2741146 - RNA, 19 nt, Artificial Sequence
  Description of Artificial Sequence: Synthetic oligonucleotide
ccaugaucacguugacauc

SEQ ID NO: 2741147 - RNA, 19 nt, Artificial Sequence
  Description of Artificial Sequence: Synthetic oligonucleotide
caaauuucaucugcagcuu

SEQ ID NO: 2741148 - RNA, 19 nt, Artificial Sequence
  Description of Artificial Sequence: Synthetic oligonucleotide
ggaggacguuguugagagc

SEQ ID NO: 2741149 - RNA, 19 nt, Artificial Sequence
  Description of Artificial Sequence: Synthetic oligonucleotide
gccggcggcgcaauggcag

SEQ ID NO: 2741150 - RNA, 19 nt, Artificial Sequence
  Description of Artificial Sequence: Synthetic oligonucleotide
cccagcgacacaggagagg

SEQ ID NO: 2741151 - RNA, 19 nt, Artificial Sequence
  Description of Artificial Sequence: Synthetic oligonucleotide
ggguucagccgggagucug

SEQ ID NO: 2741152 - RNA, 19 nt, Artificial Sequence
  Description of Artificial Sequence: Synthetic oligonucleotide
gcguggaccgcgcacagcu

SEQ ID NO: 2741153 - RNA, 19 nt, Artificial Sequence
  Description of Artificial Sequence: Synthetic oligonucleotide
guucaggaucaggccuagc

SEQ ID NO: 2741154 - RNA, 19 nt, Artificial Sequence
  Description of Artificial Sequence: Synthetic oligonucleotide
cccuagggcuucaggugcc

SEQ ID NO: 2741155 - RNA, 19 nt, Artificial Sequence
  Description of Artificial Sequence: Synthetic oligonucleotide
agcugucaggaaggcucug

SEQ ID NO: 2741156 - RNA, 19 nt, Artificial Sequence
  Description of Artificial Sequence: Synthetic oligonucleotide
cuuccggggccugagacau

SEQ ID NO: 2741157 - RNA, 19 nt, Artificial Sequence
  Description of Artificial Sequence: Synthetic oligonucleotide
cgcgcacagcucuagccgc

SEQ ID NO: 2741158 - RNA, 19 nt, Artificial Sequence
  Description of Artificial Sequence: Synthetic oligonucleotide
gcugucaggaaggcucuga

SEQ ID NO: 2741159 - RNA, 19 nt, Artificial Sequence
  Description of Artificial Sequence: Synthetic oligonucleotide
cacaggccuugggccaggg

SEQ ID NO: 2741160 - RNA, 19 nt, Artificial Sequence
  Description of Artificial Sequence: Synthetic oligonucleotide
aggcagugggucagcuugu

SEQ ID NO: 2741161 - RNA, 19 nt, Artificial Sequence
  Description of Artificial Sequence: Synthetic oligonucleotide
ggucuccuccugucccacc

SEQ ID NO: 2741162 - RNA, 19 nt, Artificial Sequence
  Description of Artificial Sequence: Synthetic oligonucleotide
gcccgaagcuuugagucca

SEQ ID NO: 2741163 - RNA, 19 nt, Artificial Sequence
  Description of Artificial Sequence: Synthetic oligonucleotide
cggggccugagacaugccc

SEQ ID NO: 2741164 - RNA, 19 nt, Artificial Sequence
  Description of Artificial Sequence: Synthetic oligonucleotide
gcggcgcaauggcagggcc

SEQ ID NO: 2741165 - RNA, 19 nt, Artificial Sequence
  Description of Artificial Sequence: Synthetic oligonucleotide
cuggggccagccucuugca

SEQ ID NO: 2741166 - RNA, 19 nt, Artificial Sequence
  Description of Artificial Sequence: Synthetic oligonucleotide
caccucgcacaggccuugg

SEQ ID NO: 2741167 - RNA, 19 nt, Artificial Sequence
  Description of Artificial Sequence: Synthetic oligonucleotide
gcucggccgcgcuuccggg

SEQ ID NO: 2741168 - RNA, 19 nt, Artificial Sequence
  Description of Artificial Sequence: Synthetic oligonucleotide
ggccacccagugccggcgg

SEQ ID NO: 2741169 - RNA, 19 nt, Artificial Sequence
  Description of Artificial Sequence: Synthetic oligonucleotide
cgaugaggguucagccggg

SEQ ID NO: 2741170 - RNA, 19 nt, Artificial Sequence
  Description of Artificial Sequence: Synthetic oligonucleotide
ggaucaggccuagcaccug

SEQ ID NO: 2741171 - RNA, 19 nt, Artificial Sequence
  Description of Artificial Sequence: Synthetic oligonucleotide
gccggugcccaggaggcug

SEQ ID NO: 2741172 - RNA, 19 nt, Artificial Sequence
  Description of Artificial Sequence: Synthetic oligonucleotide
ggccuagcaccuggggcag

SEQ ID NO: 2741173 - RNA, 19 nt, Artificial Sequence
  Description of Artificial Sequence: Synthetic oligonucleotide
ccuugcagggcagccauga

SEQ ID NO: 2741174 - RNA, 19 nt, Artificial Sequence
  Description of Artificial Sequence: Synthetic oligonucleotide
cgcucgugguacacugagg

SEQ ID NO: 2741175 - RNA, 19 nt, Artificial Sequence
  Description of Artificial Sequence: Synthetic oligonucleotide
cagcggccaggcccaggcc

SEQ ID NO: 2741176 - RNA, 19 nt, Artificial Sequence
  Description of Artificial Sequence: Synthetic oligonucleotide
gggacagcggucuccuccu

SEQ ID NO: 2741177 - RNA, 19 nt, Artificial Sequence
  Description of Artificial Sequence: Synthetic oligonucleotide
gucccaccacacagcggcc

SEQ ID NO: 2741178 - RNA, 19 nt, Artificial Sequence
  Description of Artificial Sequence: Synthetic oligonucleotide
ccggcggcgcaauggcagg

SEQ ID NO: 2741179 - RNA, 19 nt, Artificial Sequence
  Description of Artificial Sequence: Synthetic oligonucleotide
cuucaggugcccgaagcuu

SEQ ID NO: 2741180 - RNA, 19 nt, Artificial Sequence
  Description of Artificial Sequence: Synthetic oligonucleotide
ggaccgcgcacagcucuag

SEQ ID NO: 2741181 - RNA, 19 nt, Artificial Sequence
  Description of Artificial Sequence: Synthetic oligonucleotide
agccgggagucuggggcca

SEQ ID NO: 2741182 - RNA, 19 nt, Artificial Sequence
  Description of Artificial Sequence: Synthetic oligonucleotide
ccgaagcuuugaguccagg

SEQ ID NO: 2741183 - RNA, 19 nt, Artificial Sequence
  Description of Artificial Sequence: Synthetic oligonucleotide
cugggacagcggucuccuc

SEQ ID NO: 2741184 - RNA, 19 nt, Artificial Sequence
  Description of Artificial Sequence: Synthetic oligonucleotide
ggccugagacaugcccucc

SEQ ID NO: 2741185 - RNA, 19 nt, Artificial Sequence
  Description of Artificial Sequence: Synthetic oligonucleotide
cacugagggugggcucggc

SEQ ID NO: 2741186 - RNA, 19 nt, Artificial Sequence
  Description of Artificial Sequence: Synthetic oligonucleotide
ggaggcugcgaugaggguu

SEQ ID NO: 2741187 - RNA, 19 nt, Artificial Sequence
  Description of Artificial Sequence: Synthetic oligonucleotide
gggccagcagucccagcga

SEQ ID NO: 2741188 - RNA, 19 nt, Artificial Sequence
  Description of Artificial Sequence: Synthetic oligonucleotide
ggcggcgcaauggcagggc

SEQ ID NO: 2741189 - RNA, 19 nt, Artificial Sequence
  Description of Artificial Sequence: Synthetic oligonucleotide
ugccggugcccaggaggcu

SEQ ID NO: 2741190 - RNA, 19 nt, Artificial Sequence
  Description of Artificial Sequence: Synthetic oligonucleotide
cccgaagcuuugaguccag

SEQ ID NO: 2741191 - RNA, 19 nt, Artificial Sequence
  Description of Artificial Sequence: Synthetic oligonucleotide
ccggugcccaggaggcugc

SEQ ID NO: 2741192 - RNA, 19 nt, Artificial Sequence
  Description of Artificial Sequence: Synthetic oligonucleotide
ggacagcggucuccuccug

SEQ ID NO: 2741193 - RNA, 19 nt, Artificial Sequence
  Description of Artificial Sequence: Synthetic oligonucleotide
ccuccugucccaccacaca

SEQ ID NO: 2741194 - RNA, 19 nt, Artificial Sequence
  Description of Artificial Sequence: Synthetic oligonucleotide
gcggucuccuccuguccca

SEQ ID NO: 2741195 - RNA, 19 nt, Artificial Sequence
  Description of Artificial Sequence: Synthetic oligonucleotide
ccacccagugccggcggcg

SEQ ID NO: 2741196 - RNA, 19 nt, Artificial Sequence
  Description of Artificial Sequence: Synthetic oligonucleotide
gcagggccacccagugccg

SEQ ID NO: 2741197 - RNA, 19 nt, Artificial Sequence
  Description of Artificial Sequence: Synthetic oligonucleotide
gcugccgcucgugguacac

SEQ ID NO: 2741198 - RNA, 19 nt, Artificial Sequence
  Description of Artificial Sequence: Synthetic oligonucleotide
gcaccucgcacaggccuug

SEQ ID NO: 2741199 - RNA, 19 nt, Artificial Sequence
  Description of Artificial Sequence: Synthetic oligonucleotide
cagcugggacagcggucuc

SEQ ID NO: 2741200 - RNA, 19 nt, Artificial Sequence
  Description of Artificial Sequence: Synthetic oligonucleotide
gccagccucuugcaaauuu

SEQ ID NO: 2741201 - RNA, 19 nt, Artificial Sequence
  Description of Artificial Sequence: Synthetic oligonucleotide
cagcagucccagcgacaca

SEQ ID NO: 2741202 - RNA, 19 nt, Artificial Sequence
  Description of Artificial Sequence: Synthetic oligonucleotide
cagugccggcggcgcaaug

SEQ ID NO: 2741203 - RNA, 19 nt, Artificial Sequence
  Description of Artificial Sequence: Synthetic oligonucleotide
gccgcugccgcucguggua

SEQ ID NO: 2741204 - RNA, 19 nt, Artificial Sequence
  Description of Artificial Sequence: Synthetic oligonucleotide
caggugcccgaagcuuuga

SEQ ID NO: 2741205 - RNA, 19 nt, Artificial Sequence
  Description of Artificial Sequence: Synthetic oligonucleotide
gggccagccucuugcaaau

SEQ ID NO: 2741206 - RNA, 19 nt, Artificial Sequence
  Description of Artificial Sequence: Synthetic oligonucleotide
ggccuugggccagggcagc

SEQ ID NO: 2741207 - RNA, 19 nt, Artificial Sequence
  Description of Artificial Sequence: Synthetic oligonucleotide
cgcaauggcagggccagca

SEQ ID NO: 2741208 - RNA, 19 nt, Artificial Sequence
  Description of Artificial Sequence: Synthetic oligonucleotide
gcacaggccuugggccagg

SEQ ID NO: 2741209 - RNA, 19 nt, Artificial Sequence
  Description of Artificial Sequence: Synthetic oligonucleotide
ggcugcgaugaggguucag

SEQ ID NO: 2741210 - RNA, 19 nt, Artificial Sequence
  Description of Artificial Sequence: Synthetic oligonucleotide
aggcugcgaugaggguuca

SEQ ID NO: 2741211 - RNA, 19 nt, Artificial Sequence
  Description of Artificial Sequence: Synthetic oligonucleotide
gccagcagucccagcgaca

SEQ ID NO: 2741212 - RNA, 19 nt, Artificial Sequence
  Description of Artificial Sequence: Synthetic oligonucleotide
cagcgacacaggagagggu

SEQ ID NO: 2741213 - RNA, 19 nt, Artificial Sequence
  Description of Artificial Sequence: Synthetic oligonucleotide
caccuggggcagggccagc

SEQ ID NO: 2741214 - RNA, 19 nt, Artificial Sequence
  Description of Artificial Sequence: Synthetic oligonucleotide
gggcucggccgcgcuuccg

SEQ ID NO: 2741215 - RNA, 19 nt, Artificial Sequence
  Description of Artificial Sequence: Synthetic oligonucleotide
cgcacaggccuugggccag

SEQ ID NO: 2741216 - RNA, 19 nt, Artificial Sequence
  Description of Artificial Sequence: Synthetic oligonucleotide
gcuuugaguccagguuaua

SEQ ID NO: 2741217 - RNA, 19 nt, Artificial Sequence
  Description of Artificial Sequence: Synthetic oligonucleotide
ccggggccugagacaugcc

SEQ ID NO: 2741218 - RNA, 19 nt, Artificial Sequence
  Description of Artificial Sequence: Synthetic oligonucleotide
cguggaccgcgcacagcuc

SEQ ID NO: 2741219 - RNA, 19 nt, Artificial Sequence
  Description of Artificial Sequence: Synthetic oligonucleotide
gccgcucgugguacacuga

SEQ ID NO: 2741220 - RNA, 19 nt, Artificial Sequence
  Description of Artificial Sequence: Synthetic oligonucleotide
ccgcugccgcucgugguac

SEQ ID NO: 2741221 - RNA, 19 nt, Artificial Sequence
  Description of Artificial Sequence: Synthetic oligonucleotide
gccgggagucuggggccag

SEQ ID NO: 2741222 - RNA, 19 nt, Artificial Sequence
  Description of Artificial Sequence: Synthetic oligonucleotide
gcuguuguuggaggacguu

SEQ ID NO: 2741223 - RNA, 19 nt, Artificial Sequence
  Description of Artificial Sequence: Synthetic oligonucleotide
cgcgcuuccggggccugag

SEQ ID NO: 2741224 - RNA, 19 nt, Artificial Sequence
  Description of Artificial Sequence: Synthetic oligonucleotide
cggcgcaauggcagggcca

SEQ ID NO: 2741225 - RNA, 19 nt, Artificial Sequence
  Description of Artificial Sequence: Synthetic oligonucleotide
cugccgcucgugguacacu

SEQ ID NO: 2741226 - RNA, 19 nt, Artificial Sequence
  Description of Artificial Sequence: Synthetic oligonucleotide
ccgggagucuggggccagc

SEQ ID NO: 2741227 - RNA, 19 nt, Artificial Sequence
  Description of Artificial Sequence: Synthetic oligonucleotide
gcgcaauggcagggccagc

SEQ ID NO: 2741228 - RNA, 19 nt, Artificial Sequence
  Description of Artificial Sequence: Synthetic oligonucleotide
gcgcuuccggggccugaga

SEQ ID NO: 2741229 - RNA, 19 nt, Artificial Sequence
  Description of Artificial Sequence: Synthetic oligonucleotide
cggcggcgcaauggcaggg

SEQ ID NO: 2741230 - RNA, 19 nt, Artificial Sequence
  Description of Artificial Sequence: Synthetic oligonucleotide
cugcagcuuccuggcuaaa

SEQ ID NO: 2741231 - RNA, 19 nt, Artificial Sequence
  Description of Artificial Sequence: Synthetic oligonucleotide
cggucuccuccugucccac

SEQ ID NO: 2741232 - RNA, 19 nt, Artificial Sequence
  Description of Artificial Sequence: Synthetic oligonucleotide
ccagggcagcugucaggaa

SEQ ID NO: 2741233 - RNA, 19 nt, Artificial Sequence
  Description of Artificial Sequence: Synthetic oligonucleotide
gcgcacagcucuagccgcu

SEQ ID NO: 2741234 - RNA, 19 nt, Artificial Sequence
  Description of Artificial Sequence: Synthetic oligonucleotide
cccagugccggcggcgcaa

SEQ ID NO: 2741235 - RNA, 19 nt, Artificial Sequence
  Description of Artificial Sequence: Synthetic oligonucleotide
gccgcgcuuccggggccug

SEQ ID NO: 2741236 - RNA, 19 nt, Artificial Sequence
  Description of Artificial Sequence: Synthetic oligonucleotide
cggccgcgcuuccggggcc

SEQ ID NO: 2741237 - RNA, 19 nt, Artificial Sequence
  Description of Artificial Sequence: Synthetic oligonucleotide
gccuugggccagggcagcu

SEQ ID NO: 2741238 - RNA, 19 nt, Artificial Sequence
  Description of Artificial Sequence: Synthetic oligonucleotide
ggccgcgcuuccggggccu

SEQ ID NO: 2741239 - RNA, 19 nt, Artificial Sequence
  Description of Artificial Sequence: Synthetic oligonucleotide
ggccagccucuugcaaauu

SEQ ID NO: 2741240 - RNA, 19 nt, Artificial Sequence
  Description of Artificial Sequence: Synthetic oligonucleotide
ccgcgcuuccggggccuga

SEQ ID NO: 2741241 - RNA, 19 nt, Artificial Sequence
  Description of Artificial Sequence: Synthetic oligonucleotide
ccagugccggcggcgcaau

SEQ ID NO: 2741242 - RNA, 19 nt, Artificial Sequence
  Description of Artificial Sequence: Synthetic oligonucleotide
aaaccugugauccugaauc

SEQ ID NO: 2741243 - RNA, 19 nt, Artificial Sequence
  Description of Artificial Sequence: Synthetic oligonucleotide
aagauaagaaauaaguagc

SEQ ID NO: 2741244 - RNA, 19 nt, Artificial Sequence
  Description of Artificial Sequence: Synthetic oligonucleotide
auaagaaauaaguagcuuc

SEQ ID NO: 2741245 - RNA, 19 nt, Artificial Sequence
  Description of Artificial Sequence: Synthetic oligonucleotide
uugacuuuuauacaacugg

SEQ ID NO: 2741246 - RNA, 19 nt, Artificial Sequence
  Description of Artificial Sequence: Synthetic oligonucleotide
aaaccuaaagaccccaccc

SEQ ID NO: 2741247 - RNA, 19 nt, Artificial Sequence
  Description of Artificial Sequence: Synthetic oligonucleotide
aaauuucugacacagccuc

SEQ ID NO: 2741248 - RNA, 19 nt, Artificial Sequence
  Description of Artificial Sequence: Synthetic oligonucleotide
acuuuuauacaacuggugg

SEQ ID NO: 2741249 - RNA, 19 nt, Artificial Sequence
  Description of Artificial Sequence: Synthetic oligonucleotide
aauaaguagcuucacauau

SEQ ID NO: 2741250 - RNA, 19 nt, Artificial Sequence
  Description of Artificial Sequence: Synthetic oligonucleotide
ugaguauuaguucaccucc

SEQ ID NO: 2741251 - RNA, 19 nt, Artificial Sequence
  Description of Artificial Sequence: Synthetic oligonucleotide
uccaagaaagauaagaaau

SEQ ID NO: 2741252 - RNA, 19 nt, Artificial Sequence
  Description of Artificial Sequence: Synthetic oligonucleotide
uucacauaucacaaagugg

SEQ ID NO: 2741253 - RNA, 19 nt, Artificial Sequence
  Description of Artificial Sequence: Synthetic oligonucleotide
uugaacacuccucagagca

SEQ ID NO: 2741254 - RNA, 19 nt, Artificial Sequence
  Description of Artificial Sequence: Synthetic oligonucleotide
aaccuaaagaccccacccc

SEQ ID NO: 2741255 - RNA, 19 nt, Artificial Sequence
  Description of Artificial Sequence: Synthetic oligonucleotide
agaaagauaagaaauaagu

SEQ ID NO: 2741256 - RNA, 19 nt, Artificial Sequence
  Description of Artificial Sequence: Synthetic oligonucleotide
aguagcugccaccugaccc

SEQ ID NO: 2741257 - RNA, 19 nt, Artificial Sequence
  Description of Artificial Sequence: Synthetic oligonucleotide
cuuuuauacaacugguggg

SEQ ID NO: 2741258 - RNA, 19 nt, Artificial Sequence
  Description of Artificial Sequence: Synthetic oligonucleotide
uuauuugacuuuuauacaa

SEQ ID NO: 2741259 - RNA, 19 nt, Artificial Sequence
  Description of Artificial Sequence: Synthetic oligonucleotide
cuuguucacagguaaacgg

SEQ ID NO: 2741260 - RNA, 19 nt, Artificial Sequence
  Description of Artificial Sequence: Synthetic oligonucleotide
aguagcuucacauaucaca

SEQ ID NO: 2741261 - RNA, 19 nt, Artificial Sequence
  Description of Artificial Sequence: Synthetic oligonucleotide
uauuaguucaccucccugc

SEQ ID NO: 2741262 - RNA, 19 nt, Artificial Sequence
  Description of Artificial Sequence: Synthetic oligonucleotide
uaaguagcuucacauauca

SEQ ID NO: 2741263 - RNA, 19 nt, Artificial Sequence
  Description of Artificial Sequence: Synthetic oligonucleotide
agcugaagcagucuucucc

SEQ ID NO: 2741264 - RNA, 19 nt, Artificial Sequence
  Description of Artificial Sequence: Synthetic oligonucleotide
aaugaauggccuuguucac

SEQ ID NO: 2741265 - RNA, 19 nt, Artificial Sequence
  Description of Artificial Sequence: Synthetic oligonucleotide
gaugaugccugggagaugg

SEQ ID NO: 2741266 - RNA, 19 nt, Artificial Sequence
  Description of Artificial Sequence: Synthetic oligonucleotide
auuaguucaccucccugcc

SEQ ID NO: 2741267 - RNA, 19 nt, Artificial Sequence
  Description of Artificial Sequence: Synthetic oligonucleotide
ggaaauuucugacacagcc

SEQ ID NO: 2741268 - RNA, 19 nt, Artificial Sequence
  Description of Artificial Sequence: Synthetic oligonucleotide
aagaccccaccccaggacc

SEQ ID NO: 2741269 - RNA, 19 nt, Artificial Sequence
  Description of Artificial Sequence: Synthetic oligonucleotide
acaaagugggguuuggaag

SEQ ID NO: 2741270 - RNA, 19 nt, Artificial Sequence
  Description of Artificial Sequence: Synthetic oligonucleotide
auuauuugacuuuuauaca

SEQ ID NO: 2741271 - RNA, 19 nt, Artificial Sequence
  Description of Artificial Sequence: Synthetic oligonucleotide
aagaaagauaagaaauaag

SEQ ID NO: 2741272 - RNA, 19 nt, Artificial Sequence
  Description of Artificial Sequence: Synthetic oligonucleotide
agcuucacauaucacaaag

SEQ ID NO: 2741273 - RNA, 19 nt, Artificial Sequence
  Description of Artificial Sequence: Synthetic oligonucleotide
  modified_base (13)..(13): a, c, u, g, unknown or other
cacacaggcaganaggggc

SEQ ID NO: 2741274 - RNA, 19 nt, Artificial Sequence
  Description of Artificial Sequence: Synthetic oligonucleotide
uuuuauacaacugguggga

SEQ ID NO: 2741275 - RNA, 19 nt, Artificial Sequence
  Description of Artificial Sequence: Synthetic oligonucleotide
cugaguucagagauguugg

SEQ ID NO: 2741276 - RNA, 19 nt, Artificial Sequence
  Description of Artificial Sequence: Synthetic oligonucleotide
aauggccuuguucacaggu

SEQ ID NO: 2741277 - RNA, 19 nt, Artificial Sequence
  Description of Artificial Sequence: Synthetic oligonucleotide
uacaacucuuccaagugug

SEQ ID NO: 2741278 - RNA, 19 nt, Artificial Sequence
  Description of Artificial Sequence: Synthetic oligonucleotide
ucugacacagccuccaaga

SEQ ID NO: 2741279 - RNA, 19 nt, Artificial Sequence
  Description of Artificial Sequence: Synthetic oligonucleotide
ugacuuuuauacaacuggu

SEQ ID NO: 2741280 - RNA, 19 nt, Artificial Sequence
  Description of Artificial Sequence: Synthetic oligonucleotide
uauacaacuggugggagug

SEQ ID NO: 2741281 - RNA, 19 nt, Artificial Sequence
  Description of Artificial Sequence: Synthetic oligonucleotide
ugaauggccuuguucacag

SEQ ID NO: 2741282 - RNA, 19 nt, Artificial Sequence
  Description of Artificial Sequence: Synthetic oligonucleotide
aagaaauaaguagcuucac

SEQ ID NO: 2741283 - RNA, 19 nt, Artificial Sequence
  Description of Artificial Sequence: Synthetic oligonucleotide
ucaaugaauggccuuguuc

SEQ ID NO: 2741284 - RNA, 19 nt, Artificial Sequence
  Description of Artificial Sequence: Synthetic oligonucleotide
uucauuauuugacuuuuau

SEQ ID NO: 2741285 - RNA, 19 nt, Artificial Sequence
  Description of Artificial Sequence: Synthetic oligonucleotide
gugggagucacacaggcag

SEQ ID NO: 2741286 - RNA, 19 nt, Artificial Sequence
  Description of Artificial Sequence: Synthetic oligonucleotide
gaaauaaguagcuucacau

SEQ ID NO: 2741287 - RNA, 19 nt, Artificial Sequence
  Description of Artificial Sequence: Synthetic oligonucleotide
agaaauaaguagcuucaca

SEQ ID NO: 2741288 - RNA, 19 nt, Artificial Sequence
  Description of Artificial Sequence: Synthetic oligonucleotide
ucgucuuccagagagacac

SEQ ID NO: 2741289 - RNA, 19 nt, Artificial Sequence
  Description of Artificial Sequence: Synthetic oligonucleotide
uucacagguaaacggaccu

SEQ ID NO: 2741290 - RNA, 19 nt, Artificial Sequence
  Description of Artificial Sequence: Synthetic oligonucleotide
aagugucucgugcucaaug

SEQ ID NO: 2741291 - RNA, 19 nt, Artificial Sequence
  Description of Artificial Sequence: Synthetic oligonucleotide
aauuucugacacagccucc

SEQ ID NO: 2741292 - RNA, 19 nt, Artificial Sequence
  Description of Artificial Sequence: Synthetic oligonucleotide
ucauuauuugacuuuuaua

SEQ ID NO: 2741293 - RNA, 19 nt, Artificial Sequence
  Description of Artificial Sequence: Synthetic oligonucleotide
acagcuauuggggaggcuc

SEQ ID NO: 2741294 - RNA, 19 nt, Artificial Sequence
  Description of Artificial Sequence: Synthetic oligonucleotide
agauguugggguagaaacc

SEQ ID NO: 2741295 - RNA, 19 nt, Artificial Sequence
  Description of Artificial Sequence: Synthetic oligonucleotide
ugaguucagagauguuggg

SEQ ID NO: 2741296 - RNA, 19 nt, Artificial Sequence
  Description of Artificial Sequence: Synthetic oligonucleotide
ugggguagaaaccugugau

SEQ ID NO: 2741297 - RNA, 19 nt, Artificial Sequence
  Description of Artificial Sequence: Synthetic oligonucleotide
uguucacagguaaacggac

SEQ ID NO: 2741298 - RNA, 19 nt, Artificial Sequence
  Description of Artificial Sequence: Synthetic oligonucleotide
ucucgugcucaaugaaugg

SEQ ID NO: 2741299 - RNA, 19 nt, Artificial Sequence
  Description of Artificial Sequence: Synthetic oligonucleotide
cugaguauuaguucaccuc

SEQ ID NO: 2741300 - RNA, 19 nt, Artificial Sequence
  Description of Artificial Sequence: Synthetic oligonucleotide
uaaacggaccuucccuucc

SEQ ID NO: 2741301 - RNA, 19 nt, Artificial Sequence
  Description of Artificial Sequence: Synthetic oligonucleotide
uccugaugaugccugggag

SEQ ID NO: 2741302 - RNA, 19 nt, Artificial Sequence
  Description of Artificial Sequence: Synthetic oligonucleotide
gaguucagagauguugggg

SEQ ID NO: 2741303 - RNA, 19 nt, Artificial Sequence
  Description of Artificial Sequence: Synthetic oligonucleotide
agauaagaaauaaguagcu

SEQ ID NO: 2741304 - RNA, 19 nt, Artificial Sequence
  Description of Artificial Sequence: Synthetic oligonucleotide
uguugggguagaaaccugu

SEQ ID NO: 2741305 - RNA, 19 nt, Artificial Sequence
  Description of Artificial Sequence: Synthetic oligonucleotide
uuuauacaacuggugggag

SEQ ID NO: 2741306 - RNA, 19 nt, Artificial Sequence
  Description of Artificial Sequence: Synthetic oligonucleotide
gacuuuuauacaacuggug

SEQ ID NO: 2741307 - RNA, 19 nt, Artificial Sequence
  Description of Artificial Sequence: Synthetic oligonucleotide
uucugacacagccuccaag

SEQ ID NO: 2741308 - RNA, 19 nt, Artificial Sequence
  Description of Artificial Sequence: Synthetic oligonucleotide
aguuugggguggcuagacc

SEQ ID NO: 2741309 - RNA, 19 nt, Artificial Sequence
  Description of Artificial Sequence: Synthetic oligonucleotide
uaugucaucuccucucguc

SEQ ID NO: 2741310 - RNA, 19 nt, Artificial Sequence
  Description of Artificial Sequence: Synthetic oligonucleotide
uuauacaacuggugggagu

SEQ ID NO: 2741311 - RNA, 19 nt, Artificial Sequence
  Description of Artificial Sequence: Synthetic oligonucleotide
cuaaagaccccaccccagg

SEQ ID NO: 2741312 - RNA, 19 nt, Artificial Sequence
  Description of Artificial Sequence: Synthetic oligonucleotide
aaguuugggguggcuagac

SEQ ID NO: 2741313 - RNA, 19 nt, Artificial Sequence
  Description of Artificial Sequence: Synthetic oligonucleotide
uccaagugugggcaggaca

SEQ ID NO: 2741314 - RNA, 19 nt, Artificial Sequence
  Description of Artificial Sequence: Synthetic oligonucleotide
aaaagugucucgugcucaa

SEQ ID NO: 2741315 - RNA, 19 nt, Artificial Sequence
  Description of Artificial Sequence: Synthetic oligonucleotide
gcuguaaugcuccagcccc

SEQ ID NO: 2741316 - RNA, 19 nt, Artificial Sequence
  Description of Artificial Sequence: Synthetic oligonucleotide
uccuaugucaucuccucuc

SEQ ID NO: 2741317 - RNA, 19 nt, Artificial Sequence
  Description of Artificial Sequence: Synthetic oligonucleotide
agguaaacggaccuucccu

SEQ ID NO: 2741318 - RNA, 19 nt, Artificial Sequence
  Description of Artificial Sequence: Synthetic oligonucleotide
cacauaucacaaagugggg

SEQ ID NO: 2741319 - RNA, 19 nt, Artificial Sequence
  Description of Artificial Sequence: Synthetic oligonucleotide
ugaacacuccucagagcag

SEQ ID NO: 2741320 - RNA, 19 nt, Artificial Sequence
  Description of Artificial Sequence: Synthetic oligonucleotide
aaccugugauccugaaucu

SEQ ID NO: 2741321 - RNA, 19 nt, Artificial Sequence
  Description of Artificial Sequence: Synthetic oligonucleotide
agugucucgugcucaauga

SEQ ID NO: 2741322 - RNA, 19 nt, Artificial Sequence
  Description of Artificial Sequence: Synthetic oligonucleotide
uuuagcuguaaugcuccag

SEQ ID NO: 2741323 - RNA, 19 nt, Artificial Sequence
  Description of Artificial Sequence: Synthetic oligonucleotide
  modified_base (16)..(16): a, c, u, g, unknown or other
agucacacaggcaganagg

SEQ ID NO: 2741324 - RNA, 19 nt, Artificial Sequence
  Description of Artificial Sequence: Synthetic oligonucleotide
ugcucaaugaauggccuug

SEQ ID NO: 2741325 - RNA, 19 nt, Artificial Sequence
  Description of Artificial Sequence: Synthetic oligonucleotide
auaaguagcuucacauauc

SEQ ID NO: 2741326 - RNA, 19 nt, Artificial Sequence
  Description of Artificial Sequence: Synthetic oligonucleotide
ugauccugaaucucuuggu

SEQ ID NO: 2741327 - RNA, 19 nt, Artificial Sequence
  Description of Artificial Sequence: Synthetic oligonucleotide
aguauuaguucaccucccu

SEQ ID NO: 2741328 - RNA, 19 nt, Artificial Sequence
  Description of Artificial Sequence: Synthetic oligonucleotide
aaagcccuuuuccuuccug

SEQ ID NO: 2741329 - RNA, 19 nt, Artificial Sequence
  Description of Artificial Sequence: Synthetic oligonucleotide
acauaucacaaaguggggu

SEQ ID NO: 2741330 - RNA, 19 nt, Artificial Sequence
  Description of Artificial Sequence: Synthetic oligonucleotide
accuuuagcuguaaugcuc

SEQ ID NO: 2741331 - RNA, 19 nt, Artificial Sequence
  Description of Artificial Sequence: Synthetic oligonucleotide
guagaaaccugugauccug

SEQ ID NO: 2741332 - RNA, 19 nt, Artificial Sequence
  Description of Artificial Sequence: Synthetic oligonucleotide
uuccugaugaugccuggga

SEQ ID NO: 2741333 - RNA, 19 nt, Artificial Sequence
  Description of Artificial Sequence: Synthetic oligonucleotide
  modified_base (2)..(2): a, c, u, g, unknown or other
anaggggcuggaaauuucu

SEQ ID NO: 2741334 - RNA, 19 nt, Artificial Sequence
  Description of Artificial Sequence: Synthetic oligonucleotide
gggguuuggaaguuugggg

SEQ ID NO: 2741335 - RNA, 19 nt, Artificial Sequence
  Description of Artificial Sequence: Synthetic oligonucleotide
gacccuacaacucuuccaa

SEQ ID NO: 2741336 - RNA, 19 nt, Artificial Sequence
  Description of Artificial Sequence: Synthetic oligonucleotide
uucagagauguugggguag

SEQ ID NO: 2741337 - RNA, 19 nt, Artificial Sequence
  Description of Artificial Sequence: Synthetic oligonucleotide
guuuggaaguuuggggugg

SEQ ID NO: 2741338 - RNA, 19 nt, Artificial Sequence
  Description of Artificial Sequence: Synthetic oligonucleotide
guauuaguucaccucccug

SEQ ID NO: 2741339 - RNA, 19 nt, Artificial Sequence
  Description of Artificial Sequence: Synthetic oligonucleotide
gaacacuccucagagcagc

SEQ ID NO: 2741340 - RNA, 19 nt, Artificial Sequence
  Description of Artificial Sequence: Synthetic oligonucleotide
cuugaacacuccucagagc

SEQ ID NO: 2741341 - RNA, 19 nt, Artificial Sequence
  Description of Artificial Sequence: Synthetic oligonucleotide
ugucucgugcucaaugaau

SEQ ID NO: 2741342 - RNA, 19 nt, Artificial Sequence
  Description of Artificial Sequence: Synthetic oligonucleotide
ucuccucucgucuuccaga

SEQ ID NO: 2741343 - RNA, 19 nt, Artificial Sequence
  Description of Artificial Sequence: Synthetic oligonucleotide
augucaucuccucucgucu

SEQ ID NO: 2741344 - RNA, 19 nt, Artificial Sequence
  Description of Artificial Sequence: Synthetic oligonucleotide
gagaaaaccuaaagacccc

SEQ ID NO: 2741345 - RNA, 19 nt, Artificial Sequence
  Description of Artificial Sequence: Synthetic oligonucleotide
cuuccuaugucaucuccuc

SEQ ID NO: 2741346 - RNA, 19 nt, Artificial Sequence
  Description of Artificial Sequence: Synthetic oligonucleotide
ggaaguuugggguggcuag

SEQ ID NO: 2741347 - RNA, 19 nt, Artificial Sequence
  Description of Artificial Sequence: Synthetic oligonucleotide
accuaaagaccccacccca

SEQ ID NO: 2741348 - RNA, 19 nt, Artificial Sequence
  Description of Artificial Sequence: Synthetic oligonucleotide
ugccaccugaccccaaagc

SEQ ID NO: 2741349 - RNA, 19 nt, Artificial Sequence
  Description of Artificial Sequence: Synthetic oligonucleotide
ggguagaaaccugugaucc

SEQ ID NO: 2741350 - RNA, 19 nt, Artificial Sequence
  Description of Artificial Sequence: Synthetic oligonucleotide
uagcuguaaugcuccagcc

SEQ ID NO: 2741351 - RNA, 19 nt, Artificial Sequence
  Description of Artificial Sequence: Synthetic oligonucleotide
acagguaaacggaccuucc

SEQ ID NO: 2741352 - RNA, 19 nt, Artificial Sequence
  Description of Artificial Sequence: Synthetic oligonucleotide
ugggcaggacagcuauugg

SEQ ID NO: 2741353 - RNA, 19 nt, Artificial Sequence
  Description of Artificial Sequence: Synthetic oligonucleotide
augccugggagaugggguc

SEQ ID NO: 2741354 - RNA, 19 nt, Artificial Sequence
  Description of Artificial Sequence: Synthetic oligonucleotide
uccuucauuauuugacuuu

SEQ ID NO: 2741355 - RNA, 19 nt, Artificial Sequence
  Description of Artificial Sequence: Synthetic oligonucleotide
uagaaaccugugauccuga

SEQ ID NO: 2741356 - RNA, 19 nt, Artificial Sequence
  Description of Artificial Sequence: Synthetic oligonucleotide
caacucuuccaaguguggg

SEQ ID NO: 2741357 - RNA, 19 nt, Artificial Sequence
  Description of Artificial Sequence: Synthetic oligonucleotide
uggccuuguucacagguaa

SEQ ID NO: 2741358 - RNA, 19 nt, Artificial Sequence
  Description of Artificial Sequence: Synthetic oligonucleotide
gaagcagucuucuccagcu

SEQ ID NO: 2741359 - RNA, 19 nt, Artificial Sequence
  Description of Artificial Sequence: Synthetic oligonucleotide
ccuuuagcuguaaugcucc

SEQ ID NO: 2741360 - RNA, 19 nt, Artificial Sequence
  Description of Artificial Sequence: Synthetic oligonucleotide
agacccuacaacucuucca

SEQ ID NO: 2741361 - RNA, 19 nt, Artificial Sequence
  Description of Artificial Sequence: Synthetic oligonucleotide
agaaaaccuaaagacccca

SEQ ID NO: 2741362 - RNA, 19 nt, Artificial Sequence
  Description of Artificial Sequence: Synthetic oligonucleotide
gucucgugcucaaugaaug

SEQ ID NO: 2741363 - RNA, 19 nt, Artificial Sequence
  Description of Artificial Sequence: Synthetic oligonucleotide
auuucugacacagccucca

SEQ ID NO: 2741364 - RNA, 19 nt, Artificial Sequence
  Description of Artificial Sequence: Synthetic oligonucleotide
guagcuucacauaucacaa

SEQ ID NO: 2741365 - RNA, 19 nt, Artificial Sequence
  Description of Artificial Sequence: Synthetic oligonucleotide
ggcuggaaauuucugacac

SEQ ID NO: 2741366 - RNA, 19 nt, Artificial Sequence
  Description of Artificial Sequence: Synthetic oligonucleotide
gaguauuaguucaccuccc

SEQ ID NO: 2741367 - RNA, 19 nt, Artificial Sequence
  Description of Artificial Sequence: Synthetic oligonucleotide
uuccuaugucaucuccucu

SEQ ID NO: 2741368 - RNA, 19 nt, Artificial Sequence
  Description of Artificial Sequence: Synthetic oligonucleotide
caggacagcuauuggggag

SEQ ID NO: 2741369 - RNA, 19 nt, Artificial Sequence
  Description of Artificial Sequence: Synthetic oligonucleotide
ccaagugugggcaggacag

SEQ ID NO: 2741370 - RNA, 19 nt, Artificial Sequence
  Description of Artificial Sequence: Synthetic oligonucleotide
ccaccuuuagcuguaaugc

SEQ ID NO: 2741371 - RNA, 19 nt, Artificial Sequence
  Description of Artificial Sequence: Synthetic oligonucleotide
ggcaggacagcuauugggg

SEQ ID NO: 2741372 - RNA, 19 nt, Artificial Sequence
  Description of Artificial Sequence: Synthetic oligonucleotide
ccuugaacacuccucagag

SEQ ID NO: 2741373 - RNA, 19 nt, Artificial Sequence
  Description of Artificial Sequence: Synthetic oligonucleotide
cagguaaacggaccuuccc

SEQ ID NO: 2741374 - RNA, 19 nt, Artificial Sequence
  Description of Artificial Sequence: Synthetic oligonucleotide
  modified_base (10)..(10): a, c, u, g, unknown or other
acaggcaganaggggcugg

SEQ ID NO: 2741375 - RNA, 19 nt, Artificial Sequence
  Description of Artificial Sequence: Synthetic oligonucleotide
aaugcuccagccccucuuu

SEQ ID NO: 2741376 - RNA, 19 nt, Artificial Sequence
  Description of Artificial Sequence: Synthetic oligonucleotide
gggcaggacagcuauuggg

SEQ ID NO: 2741377 - RNA, 19 nt, Artificial Sequence
  Description of Artificial Sequence: Synthetic oligonucleotide
accucccugccccaaaaug

SEQ ID NO: 2741378 - RNA, 19 nt, Artificial Sequence
  Description of Artificial Sequence: Synthetic oligonucleotide
aagugugggcaggacagcu

SEQ ID NO: 2741379 - RNA, 19 nt, Artificial Sequence
  Description of Artificial Sequence: Synthetic oligonucleotide
cucgugcucaaugaauggc

SEQ ID NO: 2741380 - RNA, 19 nt, Artificial Sequence
  Description of Artificial Sequence: Synthetic oligonucleotide
ggagaugggguccugcccc

SEQ ID NO: 2741381 - RNA, 19 nt, Artificial Sequence
  Description of Artificial Sequence: Synthetic oligonucleotide
cagccuccaagaaagauaa

SEQ ID NO: 2741382 - RNA, 19 nt, Artificial Sequence
  Description of Artificial Sequence: Synthetic oligonucleotide
uggggacagacccuacaac

SEQ ID NO: 2741383 - RNA, 19 nt, Artificial Sequence
  Description of Artificial Sequence: Synthetic oligonucleotide
uccugaguauuaguucacc

SEQ ID NO: 2741384 - RNA, 19 nt, Artificial Sequence
  Description of Artificial Sequence: Synthetic oligonucleotide
gaaaaccuaaagaccccac

SEQ ID NO: 2741385 - RNA, 19 nt, Artificial Sequence
  Description of Artificial Sequence: Synthetic oligonucleotide
auuggggaggcuccugagu

SEQ ID NO: 2741386 - RNA, 19 nt, Artificial Sequence
  Description of Artificial Sequence: Synthetic oligonucleotide
gguuuggaaguuuggggug

SEQ ID NO: 2741387 - RNA, 19 nt, Artificial Sequence
  Description of Artificial Sequence: Synthetic oligonucleotide
ccucucgucuuccagagag

SEQ ID NO: 2741388 - RNA, 19 nt, Artificial Sequence
  Description of Artificial Sequence: Synthetic oligonucleotide
aucuccucucgucuuccag

SEQ ID NO: 2741389 - RNA, 19 nt, Artificial Sequence
  Description of Artificial Sequence: Synthetic oligonucleotide
acaacucuuccaagugugg

SEQ ID NO: 2741390 - RNA, 19 nt, Artificial Sequence
  Description of Artificial Sequence: Synthetic oligonucleotide
guucacagguaaacggacc

SEQ ID NO: 2741391 - RNA, 19 nt, Artificial Sequence
  Description of Artificial Sequence: Synthetic oligonucleotide
aucacaaagugggguuugg

SEQ ID NO: 2741392 - RNA, 19 nt, Artificial Sequence
  Description of Artificial Sequence: Synthetic oligonucleotide
guggcuagaccugaguuca

SEQ ID NO: 2741393 - RNA, 19 nt, Artificial Sequence
  Description of Artificial Sequence: Synthetic oligonucleotide
cagcuauuggggaggcucc

SEQ ID NO: 2741394 - RNA, 19 nt, Artificial Sequence
  Description of Artificial Sequence: Synthetic oligonucleotide
gcuccugaguauuaguuca

SEQ ID NO: 2741395 - RNA, 19 nt, Artificial Sequence
  Description of Artificial Sequence: Synthetic oligonucleotide
ccugaguucagagauguug

SEQ ID NO: 2741396 - RNA, 19 nt, Artificial Sequence
  Description of Artificial Sequence: Synthetic oligonucleotide
gcuagaccugaguucagag

SEQ ID NO: 2741397 - RNA, 19 nt, Artificial Sequence
  Description of Artificial Sequence: Synthetic oligonucleotide
cuagaccugaguucagaga

SEQ ID NO: 2741398 - RNA, 19 nt, Artificial Sequence
  Description of Artificial Sequence: Synthetic oligonucleotide
cacaaagugggguuuggaa

SEQ ID NO: 2741399 - RNA, 19 nt, Artificial Sequence
  Description of Artificial Sequence: Synthetic oligonucleotide
cagacccuacaacucuucc

SEQ ID NO: 2741400 - RNA, 19 nt, Artificial Sequence
  Description of Artificial Sequence: Synthetic oligonucleotide
caaagugggguuuggaagu

SEQ ID NO: 2741401 - RNA, 19 nt, Artificial Sequence
  Description of Artificial Sequence: Synthetic oligonucleotide
guaaacggaccuucccuuc

SEQ ID NO: 2741402 - RNA, 19 nt, Artificial Sequence
  Description of Artificial Sequence: Synthetic oligonucleotide
ucagagauguugggguaga

SEQ ID NO: 2741403 - RNA, 19 nt, Artificial Sequence
  Description of Artificial Sequence: Synthetic oligonucleotide
cacagguaaacggaccuuc

SEQ ID NO: 2741404 - RNA, 19 nt, Artificial Sequence
  Description of Artificial Sequence: Synthetic oligonucleotide
ggggcuggaaauuucugac

SEQ ID NO: 2741405 - RNA, 19 nt, Artificial Sequence
  Description of Artificial Sequence: Synthetic oligonucleotide
agugggguuuggaaguuug

SEQ ID NO: 2741406 - RNA, 19 nt, Artificial Sequence
  Description of Artificial Sequence: Synthetic oligonucleotide
gugggcaggacagcuauug

SEQ ID NO: 2741407 - RNA, 19 nt, Artificial Sequence
  Description of Artificial Sequence: Synthetic oligonucleotide
gccaccugaccccaaagcc

SEQ ID NO: 2741408 - RNA, 19 nt, Artificial Sequence
  Description of Artificial Sequence: Synthetic oligonucleotide
uuuggaaguuugggguggc

SEQ ID NO: 2741409 - RNA, 19 nt, Artificial Sequence
  Description of Artificial Sequence: Synthetic oligonucleotide
  modified_base (3)..(3): a, c, u, g, unknown or other
ganaggggcuggaaauuuc

SEQ ID NO: 2741410 - RNA, 19 nt, Artificial Sequence
  Description of Artificial Sequence: Synthetic oligonucleotide
ucaucuccucucgucuucc

SEQ ID NO: 2741411 - RNA, 19 nt, Artificial Sequence
  Description of Artificial Sequence: Synthetic oligonucleotide
cuuccugaugaugccuggg

SEQ ID NO: 2741412 - RNA, 19 nt, Artificial Sequence
  Description of Artificial Sequence: Synthetic oligonucleotide
ucacaaagugggguuugga

SEQ ID NO: 2741413 - RNA, 19 nt, Artificial Sequence
  Description of Artificial Sequence: Synthetic oligonucleotide
cacccuugaacacuccuca

SEQ ID NO: 2741414 - RNA, 19 nt, Artificial Sequence
  Description of Artificial Sequence: Synthetic oligonucleotide
cuccugaguauuaguucac

SEQ ID NO: 2741415 - RNA, 19 nt, Artificial Sequence
  Description of Artificial Sequence: Synthetic oligonucleotide
  modified_base (4)..(4): a, c, u, g, unknown or other
aganaggggcuggaaauuu

SEQ ID NO: 2741416 - RNA, 19 nt, Artificial Sequence
  Description of Artificial Sequence: Synthetic oligonucleotide
gauaagaaauaaguagcuu

SEQ ID NO: 2741417 - RNA, 19 nt, Artificial Sequence
  Description of Artificial Sequence: Synthetic oligonucleotide
aggaccagcugaagcaguc

SEQ ID NO: 2741418 - RNA, 19 nt, Artificial Sequence
  Description of Artificial Sequence: Synthetic oligonucleotide
acccuugaacacuccucag

SEQ ID NO: 2741419 - RNA, 19 nt, Artificial Sequence
  Description of Artificial Sequence: Synthetic oligonucleotide
gguggcuagaccugaguuc

SEQ ID NO: 2741420 - RNA, 19 nt, Artificial Sequence
  Description of Artificial Sequence: Synthetic oligonucleotide
ccuuguucacagguaaacg

SEQ ID NO: 2741421 - RNA, 19 nt, Artificial Sequence
  Description of Artificial Sequence: Synthetic oligonucleotide
gaugggguccugccccacc

SEQ ID NO: 2741422 - RNA, 19 nt, Artificial Sequence
  Description of Artificial Sequence: Synthetic oligonucleotide
uuccccacccuugaacacu

SEQ ID NO: 2741423 - RNA, 19 nt, Artificial Sequence
  Description of Artificial Sequence: Synthetic oligonucleotide
guugggguagaaaccugug

SEQ ID NO: 2741424 - RNA, 19 nt, Artificial Sequence
  Description of Artificial Sequence: Synthetic oligonucleotide
uggaaguuugggguggcua

SEQ ID NO: 2741425 - RNA, 19 nt, Artificial Sequence
  Description of Artificial Sequence: Synthetic oligonucleotide
acagccuccaagaaagaua

SEQ ID NO: 2741426 - RNA, 19 nt, Artificial Sequence
  Description of Artificial Sequence: Synthetic oligonucleotide
ccaccugaccccaaagccc

SEQ ID NO: 2741427 - RNA, 19 nt, Artificial Sequence
  Description of Artificial Sequence: Synthetic oligonucleotide
agaaaccugugauccugaa

SEQ ID NO: 2741428 - RNA, 19 nt, Artificial Sequence
  Description of Artificial Sequence: Synthetic oligonucleotide
cuucccuuccuaugucauc

SEQ ID NO: 2741429 - RNA, 19 nt, Artificial Sequence
  Description of Artificial Sequence: Synthetic oligonucleotide
ccaagaaagauaagaaaua

SEQ ID NO: 2741430 - RNA, 19 nt, Artificial Sequence
  Description of Artificial Sequence: Synthetic oligonucleotide
auaucacaaagugggguuu

SEQ ID NO: 2741431 - RNA, 19 nt, Artificial Sequence
  Description of Artificial Sequence: Synthetic oligonucleotide
aaagugggguuuggaaguu

SEQ ID NO: 2741432 - RNA, 19 nt, Artificial Sequence
  Description of Artificial Sequence: Synthetic oligonucleotide
cuauuggggaggcuccuga

SEQ ID NO: 2741433 - RNA, 19 nt, Artificial Sequence
  Description of Artificial Sequence: Synthetic oligonucleotide
ugaccccaaagcccuuuuc

SEQ ID NO: 2741434 - RNA, 19 nt, Artificial Sequence
  Description of Artificial Sequence: Synthetic oligonucleotide
gaccugaguucagagaugu

SEQ ID NO: 2741435 - RNA, 19 nt, Artificial Sequence
  Description of Artificial Sequence: Synthetic oligonucleotide
uccccacccuugaacacuc

SEQ ID NO: 2741436 - RNA, 19 nt, Artificial Sequence
  Description of Artificial Sequence: Synthetic oligonucleotide
uguaaugcuccagccccuc

SEQ ID NO: 2741437 - RNA, 19 nt, Artificial Sequence
  Description of Artificial Sequence: Synthetic oligonucleotide
ggguuuggaaguuuggggu

SEQ ID NO: 2741438 - RNA, 19 nt, Artificial Sequence
  Description of Artificial Sequence: Synthetic oligonucleotide
  modified_base (7)..(7): a, c, u, g, unknown or other
ggcaganaggggcuggaaa

SEQ ID NO: 2741439 - RNA, 19 nt, Artificial Sequence
  Description of Artificial Sequence: Synthetic oligonucleotide
gaaguuugggguggcuaga

SEQ ID NO: 2741440 - RNA, 19 nt, Artificial Sequence
  Description of Artificial Sequence: Synthetic oligonucleotide
ccuaaagaccccaccccag

SEQ ID NO: 2741441 - RNA, 19 nt, Artificial Sequence
  Description of Artificial Sequence: Synthetic oligonucleotide
acuccucagagcagcuggg

SEQ ID NO: 2741442 - RNA, 19 nt, Artificial Sequence
  Description of Artificial Sequence: Synthetic oligonucleotide
aacacuccucagagcagcu

SEQ ID NO: 2741443 - RNA, 19 nt, Artificial Sequence
  Description of Artificial Sequence: Synthetic oligonucleotide
uggcuagaccugaguucag

SEQ ID NO: 2741444 - RNA, 19 nt, Artificial Sequence
  Description of Artificial Sequence: Synthetic oligonucleotide
uugggguggcuagaccuga

SEQ ID NO: 2741445 - RNA, 19 nt, Artificial Sequence
  Description of Artificial Sequence: Synthetic oligonucleotide
gggguagaaaccugugauc

SEQ ID NO: 2741446 - RNA, 19 nt, Artificial Sequence
  Description of Artificial Sequence: Synthetic oligonucleotide
guucagagauguuggggua

SEQ ID NO: 2741447 - RNA, 19 nt, Artificial Sequence
  Description of Artificial Sequence: Synthetic oligonucleotide
gaugccugggagauggggu

SEQ ID NO: 2741448 - RNA, 19 nt, Artificial Sequence
  Description of Artificial Sequence: Synthetic oligonucleotide
aaagugucucgugcucaau

SEQ ID NO: 2741449 - RNA, 19 nt, Artificial Sequence
  Description of Artificial Sequence: Synthetic oligonucleotide
gaaaccugugauccugaau

SEQ ID NO: 2741450 - RNA, 19 nt, Artificial Sequence
  Description of Artificial Sequence: Synthetic oligonucleotide
cuacaacucuuccaagugu

SEQ ID NO: 2741451 - RNA, 19 nt, Artificial Sequence
  Description of Artificial Sequence: Synthetic oligonucleotide
aacggaccuucccuuccua

SEQ ID NO: 2741452 - RNA, 19 nt, Artificial Sequence
  Description of Artificial Sequence: Synthetic oligonucleotide
gaccuucccuuccuauguc

SEQ ID NO: 2741453 - RNA, 19 nt, Artificial Sequence
  Description of Artificial Sequence: Synthetic oligonucleotide
ggggacagacccuacaacu

SEQ ID NO: 2741454 - RNA, 19 nt, Artificial Sequence
  Description of Artificial Sequence: Synthetic oligonucleotide
cuuuagcuguaaugcucca

SEQ ID NO: 2741455 - RNA, 19 nt, Artificial Sequence
  Description of Artificial Sequence: Synthetic oligonucleotide
ucccugccccaaaaugaaa

SEQ ID NO: 2741456 - RNA, 19 nt, Artificial Sequence
  Description of Artificial Sequence: Synthetic oligonucleotide
ugccugggagauggggucc

SEQ ID NO: 2741457 - RNA, 19 nt, Artificial Sequence
  Description of Artificial Sequence: Synthetic oligonucleotide
agaccugaguucagagaug

SEQ ID NO: 2741458 - RNA, 19 nt, Artificial Sequence
  Description of Artificial Sequence: Synthetic oligonucleotide
caagugugggcaggacagc

SEQ ID NO: 2741459 - RNA, 19 nt, Artificial Sequence
  Description of Artificial Sequence: Synthetic oligonucleotide
uccucucgucuuccagaga

SEQ ID NO: 2741460 - RNA, 19 nt, Artificial Sequence
  Description of Artificial Sequence: Synthetic oligonucleotide
cuucauuauuugacuuuua

SEQ ID NO: 2741461 - RNA, 19 nt, Artificial Sequence
  Description of Artificial Sequence: Synthetic oligonucleotide
cugccaccugaccccaaag

SEQ ID NO: 2741462 - RNA, 19 nt, Artificial Sequence
  Description of Artificial Sequence: Synthetic oligonucleotide
ucacagguaaacggaccuu

SEQ ID NO: 2741463 - RNA, 19 nt, Artificial Sequence
  Description of Artificial Sequence: Synthetic oligonucleotide
cucccugccccaaaaugaa

SEQ ID NO: 2741464 - RNA, 19 nt, Artificial Sequence
  Description of Artificial Sequence: Synthetic oligonucleotide
acggaccuucccuuccuau

SEQ ID NO: 2741465 - RNA, 19 nt, Artificial Sequence
  Description of Artificial Sequence: Synthetic oligonucleotide
aguucaccucccugcccca

SEQ ID NO: 2741466 - RNA, 19 nt, Artificial Sequence
  Description of Artificial Sequence: Synthetic oligonucleotide
  modified_base (6)..(6): a, c, u, g, unknown or other
gcaganaggggcuggaaau

SEQ ID NO: 2741467 - RNA, 19 nt, Artificial Sequence
  Description of Artificial Sequence: Synthetic oligonucleotide
ggaggcuccugaguauuag

SEQ ID NO: 2741468 - RNA, 19 nt, Artificial Sequence
  Description of Artificial Sequence: Synthetic oligonucleotide
aggcuccugaguauuaguu

SEQ ID NO: 2741469 - RNA, 19 nt, Artificial Sequence
  Description of Artificial Sequence: Synthetic oligonucleotide
gugucucgugcucaaugaa

SEQ ID NO: 2741470 - RNA, 19 nt, Artificial Sequence
  Description of Artificial Sequence: Synthetic oligonucleotide
cugggagaugggguccugc

SEQ ID NO: 2741471 - RNA, 19 nt, Artificial Sequence
  Description of Artificial Sequence: Synthetic oligonucleotide
cagagagacacagaccacu

SEQ ID NO: 2741472 - RNA, 19 nt, Artificial Sequence
  Description of Artificial Sequence: Synthetic oligonucleotide
uuggaaguuugggguggcu

SEQ ID NO: 2741473 - RNA, 19 nt, Artificial Sequence
  Description of Artificial Sequence: Synthetic oligonucleotide
auguugggguagaaaccug

SEQ ID NO: 2741474 - RNA, 19 nt, Artificial Sequence
  Description of Artificial Sequence: Synthetic oligonucleotide
ccugaugaugccugggaga

SEQ ID NO: 2741475 - RNA, 19 nt, Artificial Sequence
  Description of Artificial Sequence: Synthetic oligonucleotide
ugccccaccuuuagcugua

SEQ ID NO: 2741476 - RNA, 19 nt, Artificial Sequence
  Description of Artificial Sequence: Synthetic oligonucleotide
cucgucuuccagagagaca

SEQ ID NO: 2741477 - RNA, 19 nt, Artificial Sequence
  Description of Artificial Sequence: Synthetic oligonucleotide
gaggcuccugaguauuagu

SEQ ID NO: 2741478 - RNA, 19 nt, Artificial Sequence
  Description of Artificial Sequence: Synthetic oligonucleotide
  modified_base (11)..(11): a, c, u, g, unknown or other
cacaggcaganaggggcug

SEQ ID NO: 2741479 - RNA, 19 nt, Artificial Sequence
  Description of Artificial Sequence: Synthetic oligonucleotide
ccucccugccccaaaauga

SEQ ID NO: 2741480 - RNA, 19 nt, Artificial Sequence
  Description of Artificial Sequence: Synthetic oligonucleotide
gggcuggaaauuucugaca

SEQ ID NO: 2741481 - RNA, 19 nt, Artificial Sequence
  Description of Artificial Sequence: Synthetic oligonucleotide
uuccaagugugggcaggac

SEQ ID NO: 2741482 - RNA, 19 nt, Artificial Sequence
  Description of Artificial Sequence: Synthetic oligonucleotide
caccugaccccaaagcccu

SEQ ID NO: 2741483 - RNA, 19 nt, Artificial Sequence
  Description of Artificial Sequence: Synthetic oligonucleotide
cugacacagccuccaagaa

SEQ ID NO: 2741484 - RNA, 19 nt, Artificial Sequence
  Description of Artificial Sequence: Synthetic oligonucleotide
ggacagacccuacaacucu

SEQ ID NO: 2741485 - RNA, 19 nt, Artificial Sequence
  Description of Artificial Sequence: Synthetic oligonucleotide
ucccuuccuaugucaucuc

SEQ ID NO: 2741486 - RNA, 19 nt, Artificial Sequence
  Description of Artificial Sequence: Synthetic oligonucleotide
aagugggguuuggaaguuu

SEQ ID NO: 2741487 - RNA, 19 nt, Artificial Sequence
  Description of Artificial Sequence: Synthetic oligonucleotide
cccuuccuaugucaucucc

SEQ ID NO: 2741488 - RNA, 19 nt, Artificial Sequence
  Description of Artificial Sequence: Synthetic oligonucleotide
agaugggguccugccccac

SEQ ID NO: 2741489 - RNA, 19 nt, Artificial Sequence
  Description of Artificial Sequence: Synthetic oligonucleotide
gggacagacccuacaacuc

SEQ ID NO: 2741490 - RNA, 19 nt, Artificial Sequence
  Description of Artificial Sequence: Synthetic oligonucleotide
caccuuuagcuguaaugcu

SEQ ID NO: 2741491 - RNA, 19 nt, Artificial Sequence
  Description of Artificial Sequence: Synthetic oligonucleotide
agcuauuggggaggcuccu

SEQ ID NO: 2741492 - RNA, 19 nt, Artificial Sequence
  Description of Artificial Sequence: Synthetic oligonucleotide
ccacccuugaacacuccuc

SEQ ID NO: 2741493 - RNA, 19 nt, Artificial Sequence
  Description of Artificial Sequence: Synthetic oligonucleotide
ggaccuucccuuccuaugu

SEQ ID NO: 2741494 - RNA, 19 nt, Artificial Sequence
  Description of Artificial Sequence: Synthetic oligonucleotide
cucucgucuuccagagaga

SEQ ID NO: 2741495 - RNA, 19 nt, Artificial Sequence
  Description of Artificial Sequence: Synthetic oligonucleotide
cugaugaugccugggagau

SEQ ID NO: 2741496 - RNA, 19 nt, Artificial Sequence
  Description of Artificial Sequence: Synthetic oligonucleotide
gguaaacggaccuucccuu

SEQ ID NO: 2741497 - RNA, 19 nt, Artificial Sequence
  Description of Artificial Sequence: Synthetic oligonucleotide
ccccaggaccagcugaagc

SEQ ID NO: 2741498 - RNA, 19 nt, Artificial Sequence
  Description of Artificial Sequence: Synthetic oligonucleotide
gugugggcaggacagcuau

SEQ ID NO: 2741499 - RNA, 19 nt, Artificial Sequence
  Description of Artificial Sequence: Synthetic oligonucleotide
ccugaaucucuuggugggg

SEQ ID NO: 2741500 - RNA, 19 nt, Artificial Sequence
  Description of Artificial Sequence: Synthetic oligonucleotide
gguagaaaccugugauccu

SEQ ID NO: 2741501 - RNA, 19 nt, Artificial Sequence
  Description of Artificial Sequence: Synthetic oligonucleotide
cuccuucauuauuugacuu

SEQ ID NO: 2741502 - RNA, 19 nt, Artificial Sequence
  Description of Artificial Sequence: Synthetic oligonucleotide
gagagacacagaccacuuu

SEQ ID NO: 2741503 - RNA, 19 nt, Artificial Sequence
  Description of Artificial Sequence: Synthetic oligonucleotide
ccagagagacacagaccac

SEQ ID NO: 2741504 - RNA, 19 nt, Artificial Sequence
  Description of Artificial Sequence: Synthetic oligonucleotide
auggccuuguucacaggua

SEQ ID NO: 2741505 - RNA, 19 nt, Artificial Sequence
  Description of Artificial Sequence: Synthetic oligonucleotide
augaugccugggagauggg

SEQ ID NO: 2741506 - RNA, 19 nt, Artificial Sequence
  Description of Artificial Sequence: Synthetic oligonucleotide
caccccaggaccagcugaa

SEQ ID NO: 2741507 - RNA, 19 nt, Artificial Sequence
  Description of Artificial Sequence: Synthetic oligonucleotide
cccugccccaaaaugaaaa

SEQ ID NO: 2741508 - RNA, 19 nt, Artificial Sequence
  Description of Artificial Sequence: Synthetic oligonucleotide
cccuugaacacuccucaga

SEQ ID NO: 2741509 - RNA, 19 nt, Artificial Sequence
  Description of Artificial Sequence: Synthetic oligonucleotide
caacuggugggaguggggu

SEQ ID NO: 2741510 - RNA, 19 nt, Artificial Sequence
  Description of Artificial Sequence: Synthetic oligonucleotide
cagccccucuuuuccccac

SEQ ID NO: 2741511 - RNA, 19 nt, Artificial Sequence
  Description of Artificial Sequence: Synthetic oligonucleotide
ccugaguauuaguucaccu

SEQ ID NO: 2741512 - RNA, 19 nt, Artificial Sequence
  Description of Artificial Sequence: Synthetic oligonucleotide
guaaugcuccagccccucu

SEQ ID NO: 2741513 - RNA, 19 nt, Artificial Sequence
  Description of Artificial Sequence: Synthetic oligonucleotide
ggcuagaccugaguucaga

SEQ ID NO: 2741514 - RNA, 19 nt, Artificial Sequence
  Description of Artificial Sequence: Synthetic oligonucleotide
gcuauuggggaggcuccug

SEQ ID NO: 2741515 - RNA, 19 nt, Artificial Sequence
  Description of Artificial Sequence: Synthetic oligonucleotide
cuguaaugcuccagccccu

SEQ ID NO: 2741516 - RNA, 19 nt, Artificial Sequence
  Description of Artificial Sequence: Synthetic oligonucleotide
cuaugucaucuccucucgu

SEQ ID NO: 2741517 - RNA, 19 nt, Artificial Sequence
  Description of Artificial Sequence: Synthetic oligonucleotide
  modified_base (8)..(8): a, c, u, g, unknown or other
aggcaganaggggcuggaa

SEQ ID NO: 2741518 - RNA, 19 nt, Artificial Sequence
  Description of Artificial Sequence: Synthetic oligonucleotide
gcuucacauaucacaaagu

SEQ ID NO: 2741519 - RNA, 19 nt, Artificial Sequence
  Description of Artificial Sequence: Synthetic oligonucleotide
  modified_base (19)..(19): a, c, u, g, unknown or other
gggagucacacaggcagan

SEQ ID NO: 2741520 - RNA, 19 nt, Artificial Sequence
  Description of Artificial Sequence: Synthetic oligonucleotide
cggaccuucccuuccuaug

SEQ ID NO: 2741521 - RNA, 19 nt, Artificial Sequence
  Description of Artificial Sequence: Synthetic oligonucleotide
cccuacaacucuuccaagu

SEQ ID NO: 2741522 - RNA, 19 nt, Artificial Sequence
  Description of Artificial Sequence: Synthetic oligonucleotide
ggugggagucacacaggca

SEQ ID NO: 2741523 - RNA, 19 nt, Artificial Sequence
  Description of Artificial Sequence: Synthetic oligonucleotide
  modified_base (9)..(9): a, c, u, g, unknown or other
caggcaganaggggcugga

SEQ ID NO: 2741524 - RNA, 19 nt, Artificial Sequence
  Description of Artificial Sequence: Synthetic oligonucleotide
cacagccuccaagaaagau

SEQ ID NO: 2741525 - RNA, 19 nt, Artificial Sequence
  Description of Artificial Sequence: Synthetic oligonucleotide
ggguggcuagaccugaguu

SEQ ID NO: 2741526 - RNA, 19 nt, Artificial Sequence
  Description of Artificial Sequence: Synthetic oligonucleotide
gugcucaaugaauggccuu

SEQ ID NO: 2741527 - RNA, 19 nt, Artificial Sequence
  Description of Artificial Sequence: Synthetic oligonucleotide
caggaccagcugaagcagu

SEQ ID NO: 2741528 - RNA, 19 nt, Artificial Sequence
  Description of Artificial Sequence: Synthetic oligonucleotide
  modified_base (5)..(5): a, c, u, g, unknown or other
caganaggggcuggaaauu

SEQ ID NO: 2741529 - RNA, 19 nt, Artificial Sequence
  Description of Artificial Sequence: Synthetic oligonucleotide
cucaaugaauggccuuguu

SEQ ID NO: 2741530 - RNA, 19 nt, Artificial Sequence
  Description of Artificial Sequence: Synthetic oligonucleotide
ccaccccaggaccagcuga

SEQ ID NO: 2741531 - RNA, 19 nt, Artificial Sequence
  Description of Artificial Sequence: Synthetic oligonucleotide
  modified_base (18)..(18): a, c, u, g, unknown or other
ggagucacacaggcagana

SEQ ID NO: 2741532 - RNA, 19 nt, Artificial Sequence
  Description of Artificial Sequence: Synthetic oligonucleotide
caaagcccuuuuccuuccu

SEQ ID NO: 2741533 - RNA, 19 nt, Artificial Sequence
  Description of Artificial Sequence: Synthetic oligonucleotide
guucaccucccugccccaa

SEQ ID NO: 2741534 - RNA, 19 nt, Artificial Sequence
  Description of Artificial Sequence: Synthetic oligonucleotide
accugaguucagagauguu

SEQ ID NO: 2741535 - RNA, 19 nt, Artificial Sequence
  Description of Artificial Sequence: Synthetic oligonucleotide
gcucaaugaauggccuugu

SEQ ID NO: 2741536 - RNA, 19 nt, Artificial Sequence
  Description of Artificial Sequence: Synthetic oligonucleotide
gggguggcuagaccugagu

SEQ ID NO: 2741537 - RNA, 19 nt, Artificial Sequence
  Description of Artificial Sequence: Synthetic oligonucleotide
ggaccagcugaagcagucu

SEQ ID NO: 2741538 - RNA, 19 nt, Artificial Sequence
  Description of Artificial Sequence: Synthetic oligonucleotide
cccacccuugaacacuccu

SEQ ID NO: 2741539 - RNA, 19 nt, Artificial Sequence
  Description of Artificial Sequence: Synthetic oligonucleotide
gggaggcuccugaguauua

SEQ ID NO: 2741540 - RNA, 19 nt, Artificial Sequence
  Description of Artificial Sequence: Synthetic oligonucleotide
ggguggggacagacccuac

SEQ ID NO: 2741541 - RNA, 19 nt, Artificial Sequence
  Description of Artificial Sequence: Synthetic oligonucleotide
aauccgauuccucugaauc

SEQ ID NO: 2741542 - RNA, 19 nt, Artificial Sequence
  Description of Artificial Sequence: Synthetic oligonucleotide
agauuugaugcauuuaaac

SEQ ID NO: 2741543 - RNA, 19 nt, Artificial Sequence
  Description of Artificial Sequence: Synthetic oligonucleotide
aaagauuugaugcauuuaa

SEQ ID NO: 2741544 - RNA, 19 nt, Artificial Sequence
  Description of Artificial Sequence: Synthetic oligonucleotide
ugauuuacuguuacaaucc

SEQ ID NO: 2741545 - RNA, 19 nt, Artificial Sequence
  Description of Artificial Sequence: Synthetic oligonucleotide
aaagguuuccugcaggcag

SEQ ID NO: 2741546 - RNA, 19 nt, Artificial Sequence
  Description of Artificial Sequence: Synthetic oligonucleotide
uuugaugcauuuaaacugc

SEQ ID NO: 2741547 - RNA, 19 nt, Artificial Sequence
  Description of Artificial Sequence: Synthetic oligonucleotide
auuaucaagugauuuacug

SEQ ID NO: 2741548 - RNA, 19 nt, Artificial Sequence
  Description of Artificial Sequence: Synthetic oligonucleotide
aaagagcucgucuucugac

SEQ ID NO: 2741549 - RNA, 19 nt, Artificial Sequence
  Description of Artificial Sequence: Synthetic oligonucleotide
uuaaacugcacagagaguc

SEQ ID NO: 2741550 - RNA, 19 nt, Artificial Sequence
  Description of Artificial Sequence: Synthetic oligonucleotide
uggaauauugcucuucuga

SEQ ID NO: 2741551 - RNA, 19 nt, Artificial Sequence
  Description of Artificial Sequence: Synthetic oligonucleotide
gauguuauccuugacuggg

SEQ ID NO: 2741552 - RNA, 19 nt, Artificial Sequence
  Description of Artificial Sequence: Synthetic oligonucleotide
accuacacagcccagguac

SEQ ID NO: 2741553 - RNA, 19 nt, Artificial Sequence
  Description of Artificial Sequence: Synthetic oligonucleotide
uggauguuauccuugacug

SEQ ID NO: 2741554 - RNA, 19 nt, Artificial Sequence
  Description of Artificial Sequence: Synthetic oligonucleotide
aguucacugaucuuuaucu

SEQ ID NO: 2741555 - RNA, 19 nt, Artificial Sequence
  Description of Artificial Sequence: Synthetic oligonucleotide
aguccguagaacuagaccu

SEQ ID NO: 2741556 - RNA, 19 nt, Artificial Sequence
  Description of Artificial Sequence: Synthetic oligonucleotide
uacuguuacaauccgauuc

SEQ ID NO: 2741557 - RNA, 19 nt, Artificial Sequence
  Description of Artificial Sequence: Synthetic oligonucleotide
auuaaagguuuccugcagg

SEQ ID NO: 2741558 - RNA, 19 nt, Artificial Sequence
  Description of Artificial Sequence: Synthetic oligonucleotide
gcugagaaagauuugaugc

SEQ ID NO: 2741559 - RNA, 19 nt, Artificial Sequence
  Description of Artificial Sequence: Synthetic oligonucleotide
gauuuacuguuacaauccg

SEQ ID NO: 2741560 - RNA, 19 nt, Artificial Sequence
  Description of Artificial Sequence: Synthetic oligonucleotide
ucuggagugagcuggaugu

SEQ ID NO: 2741561 - RNA, 19 nt, Artificial Sequence
  Description of Artificial Sequence: Synthetic oligonucleotide
agagagucuaugcuuuccc

SEQ ID NO: 2741562 - RNA, 19 nt, Artificial Sequence
  Description of Artificial Sequence: Synthetic oligonucleotide
uuaucaagugauuuacugu

SEQ ID NO: 2741563 - RNA, 19 nt, Artificial Sequence
  Description of Artificial Sequence: Synthetic oligonucleotide
gaauccgaauccuuacugg

SEQ ID NO: 2741564 - RNA, 19 nt, Artificial Sequence
  Description of Artificial Sequence: Synthetic oligonucleotide
uccuugauuaucaagugau

SEQ ID NO: 2741565 - RNA, 19 nt, Artificial Sequence
  Description of Artificial Sequence: Synthetic oligonucleotide
ugucugucuuugaaaaggg

SEQ ID NO: 2741566 - RNA, 19 nt, Artificial Sequence
  Description of Artificial Sequence: Synthetic oligonucleotide
ugaauccgaauccuuacug

SEQ ID NO: 2741567 - RNA, 19 nt, Artificial Sequence
  Description of Artificial Sequence: Synthetic oligonucleotide
uguuggcugggauuaaagg

SEQ ID NO: 2741568 - RNA, 19 nt, Artificial Sequence
  Description of Artificial Sequence: Synthetic oligonucleotide
uuaaagguuuccugcaggc

SEQ ID NO: 2741569 - RNA, 19 nt, Artificial Sequence
  Description of Artificial Sequence: Synthetic oligonucleotide
cugaucuuuaucugcagcc

SEQ ID NO: 2741570 - RNA, 19 nt, Artificial Sequence
  Description of Artificial Sequence: Synthetic oligonucleotide
gaacuagaccuacacagcc

SEQ ID NO: 2741571 - RNA, 19 nt, Artificial Sequence
  Description of Artificial Sequence: Synthetic oligonucleotide
guuguagagagagaguccg

SEQ ID NO: 2741572 - RNA, 19 nt, Artificial Sequence
  Description of Artificial Sequence: Synthetic oligonucleotide
cuaugcuuucccgagaugg

SEQ ID NO: 2741573 - RNA, 19 nt, Artificial Sequence
  Description of Artificial Sequence: Synthetic oligonucleotide
ucuucuggacacuuccugg

SEQ ID NO: 2741574 - RNA, 19 nt, Artificial Sequence
  Description of Artificial Sequence: Synthetic oligonucleotide
auccgauuccucugaaucc

SEQ ID NO: 2741575 - RNA, 19 nt, Artificial Sequence
  Description of Artificial Sequence: Synthetic oligonucleotide
acggaagcuuuucagaauc

SEQ ID NO: 2741576 - RNA, 19 nt, Artificial Sequence
  Description of Artificial Sequence: Synthetic oligonucleotide
uaucaagugauuuacuguu

SEQ ID NO: 2741577 - RNA, 19 nt, Artificial Sequence
  Description of Artificial Sequence: Synthetic oligonucleotide
ugauuaucaagugauuuac

SEQ ID NO: 2741578 - RNA, 19 nt, Artificial Sequence
  Description of Artificial Sequence: Synthetic oligonucleotide
aauccgaauccuuacugga

SEQ ID NO: 2741579 - RNA, 19 nt, Artificial Sequence
  Description of Artificial Sequence: Synthetic oligonucleotide
gauuugaugcauuuaaacu

SEQ ID NO: 2741580 - RNA, 19 nt, Artificial Sequence
  Description of Artificial Sequence: Synthetic oligonucleotide
gaauauugcucuucugagc

SEQ ID NO: 2741581 - RNA, 19 nt, Artificial Sequence
  Description of Artificial Sequence: Synthetic oligonucleotide
uccgaauccuuacuggaag

SEQ ID NO: 2741582 - RNA, 19 nt, Artificial Sequence
  Description of Artificial Sequence: Synthetic oligonucleotide
gugauuuacuguuacaauc

SEQ ID NO: 2741583 - RNA, 19 nt, Artificial Sequence
  Description of Artificial Sequence: Synthetic oligonucleotide
uccuagaguucacugaucu

SEQ ID NO: 2741584 - RNA, 19 nt, Artificial Sequence
  Description of Artificial Sequence: Synthetic oligonucleotide
aagugauuuacuguuacaa

SEQ ID NO: 2741585 - RNA, 19 nt, Artificial Sequence
  Description of Artificial Sequence: Synthetic oligonucleotide
uuuuccuagaguucacuga

SEQ ID NO: 2741586 - RNA, 19 nt, Artificial Sequence
  Description of Artificial Sequence: Synthetic oligonucleotide
ucgggcuuguuaaagagcu

SEQ ID NO: 2741587 - RNA, 19 nt, Artificial Sequence
  Description of Artificial Sequence: Synthetic oligonucleotide
agagagaguccguagaacu

SEQ ID NO: 2741588 - RNA, 19 nt, Artificial Sequence
  Description of Artificial Sequence: Synthetic oligonucleotide
uuuccuagaguucacugau

SEQ ID NO: 2741589 - RNA, 19 nt, Artificial Sequence
  Description of Artificial Sequence: Synthetic oligonucleotide
aacuagaccuacacagccc

SEQ ID NO: 2741590 - RNA, 19 nt, Artificial Sequence
  Description of Artificial Sequence: Synthetic oligonucleotide
aggggcuucuuacaggacg

SEQ ID NO: 2741591 - RNA, 19 nt, Artificial Sequence
  Description of Artificial Sequence: Synthetic oligonucleotide
uuugaaaagggagguaaca

SEQ ID NO: 2741592 - RNA, 19 nt, Artificial Sequence
  Description of Artificial Sequence: Synthetic oligonucleotide
augguguuuucucuucugg

SEQ ID NO: 2741593 - RNA, 19 nt, Artificial Sequence
  Description of Artificial Sequence: Synthetic oligonucleotide
cuugacuggggacaggggc

SEQ ID NO: 2741594 - RNA, 19 nt, Artificial Sequence
  Description of Artificial Sequence: Synthetic oligonucleotide
cuugaucuugguuguagag

SEQ ID NO: 2741595 - RNA, 19 nt, Artificial Sequence
  Description of Artificial Sequence: Synthetic oligonucleotide
aucuugguuguagagagag

SEQ ID NO: 2741596 - RNA, 19 nt, Artificial Sequence
  Description of Artificial Sequence: Synthetic oligonucleotide
uguuuucucuucuggacac

SEQ ID NO: 2741597 - RNA, 19 nt, Artificial Sequence
  Description of Artificial Sequence: Synthetic oligonucleotide
agaacuagaccuacacagc

SEQ ID NO: 2741598 - RNA, 19 nt, Artificial Sequence
  Description of Artificial Sequence: Synthetic oligonucleotide
uuauccuugacuggggaca

SEQ ID NO: 2741599 - RNA, 19 nt, Artificial Sequence
  Description of Artificial Sequence: Synthetic oligonucleotide
gagagucuaugcuuucccg

SEQ ID NO: 2741600 - RNA, 19 nt, Artificial Sequence
  Description of Artificial Sequence: Synthetic oligonucleotide
gagucuaugcuuucccgag

SEQ ID NO: 2741601 - RNA, 19 nt, Artificial Sequence
  Description of Artificial Sequence: Synthetic oligonucleotide
uccgauuccucugaauccg

SEQ ID NO: 2741602 - RNA, 19 nt, Artificial Sequence
  Description of Artificial Sequence: Synthetic oligonucleotide
ucugaauccgaauccuuac

SEQ ID NO: 2741603 - RNA, 19 nt, Artificial Sequence
  Description of Artificial Sequence: Synthetic oligonucleotide
uguuaaagagcucgucuuc

SEQ ID NO: 2741604 - RNA, 19 nt, Artificial Sequence
  Description of Artificial Sequence: Synthetic oligonucleotide
aguggaauauugcucuucu

SEQ ID NO: 2741605 - RNA, 19 nt, Artificial Sequence
  Description of Artificial Sequence: Synthetic oligonucleotide
uagagagagaguccguaga

SEQ ID NO: 2741606 - RNA, 19 nt, Artificial Sequence
  Description of Artificial Sequence: Synthetic oligonucleotide
uuccuugauuaucaaguga

SEQ ID NO: 2741607 - RNA, 19 nt, Artificial Sequence
  Description of Artificial Sequence: Synthetic oligonucleotide
gggauuaaagguuuccugc

SEQ ID NO: 2741608 - RNA, 19 nt, Artificial Sequence
  Description of Artificial Sequence: Synthetic oligonucleotide
uaaagagcucgucuucuga

SEQ ID NO: 2741609 - RNA, 19 nt, Artificial Sequence
  Description of Artificial Sequence: Synthetic oligonucleotide
gacucuggcaggcaccagg

SEQ ID NO: 2741610 - RNA, 19 nt, Artificial Sequence
  Description of Artificial Sequence: Synthetic oligonucleotide
uuacaauccgauuccucug

SEQ ID NO: 2741611 - RNA, 19 nt, Artificial Sequence
  Description of Artificial Sequence: Synthetic oligonucleotide
gcauuuaaacugcacagag

SEQ ID NO: 2741612 - RNA, 19 nt, Artificial Sequence
  Description of Artificial Sequence: Synthetic oligonucleotide
acuagaccuacacagccca

SEQ ID NO: 2741613 - RNA, 19 nt, Artificial Sequence
  Description of Artificial Sequence: Synthetic oligonucleotide
aucaugguguuuucucuuc

SEQ ID NO: 2741614 - RNA, 19 nt, Artificial Sequence
  Description of Artificial Sequence: Synthetic oligonucleotide
agagcucgucuucugacuc

SEQ ID NO: 2741615 - RNA, 19 nt, Artificial Sequence
  Description of Artificial Sequence: Synthetic oligonucleotide
ucugauuuccuugauuauc

SEQ ID NO: 2741616 - RNA, 19 nt, Artificial Sequence
  Description of Artificial Sequence: Synthetic oligonucleotide
uacaauccgauuccucuga

SEQ ID NO: 2741617 - RNA, 19 nt, Artificial Sequence
  Description of Artificial Sequence: Synthetic oligonucleotide
gaguccguagaacuagacc

SEQ ID NO: 2741618 - RNA, 19 nt, Artificial Sequence
  Description of Artificial Sequence: Synthetic oligonucleotide
ucacucaguggaauauugc

SEQ ID NO: 2741619 - RNA, 19 nt, Artificial Sequence
  Description of Artificial Sequence: Synthetic oligonucleotide
acacuuccuggcuucuugc

SEQ ID NO: 2741620 - RNA, 19 nt, Artificial Sequence
  Description of Artificial Sequence: Synthetic oligonucleotide
ucugacucuggagugagcu

SEQ ID NO: 2741621 - RNA, 19 nt, Artificial Sequence
  Description of Artificial Sequence: Synthetic oligonucleotide
agaaagauuugaugcauuu

SEQ ID NO: 2741622 - RNA, 19 nt, Artificial Sequence
  Description of Artificial Sequence: Synthetic oligonucleotide
uguuauccuugacugggga

SEQ ID NO: 2741623 - RNA, 19 nt, Artificial Sequence
  Description of Artificial Sequence: Synthetic oligonucleotide
agugauuuacuguuacaau

SEQ ID NO: 2741624 - RNA, 19 nt, Artificial Sequence
  Description of Artificial Sequence: Synthetic oligonucleotide
uuguuaaagagcucgucuu

SEQ ID NO: 2741625 - RNA, 19 nt, Artificial Sequence
  Description of Artificial Sequence: Synthetic oligonucleotide
aagugugucugucuuugaa

SEQ ID NO: 2741626 - RNA, 19 nt, Artificial Sequence
  Description of Artificial Sequence: Synthetic oligonucleotide
uugcucgaaguucugauuu

SEQ ID NO: 2741627 - RNA, 19 nt, Artificial Sequence
  Description of Artificial Sequence: Synthetic oligonucleotide
aagagcucgucuucugacu

SEQ ID NO: 2741628 - RNA, 19 nt, Artificial Sequence
  Description of Artificial Sequence: Synthetic oligonucleotide
ugcauuuaaacugcacaga

SEQ ID NO: 2741629 - RNA, 19 nt, Artificial Sequence
  Description of Artificial Sequence: Synthetic oligonucleotide
guuacaauccgauuccucu

SEQ ID NO: 2741630 - RNA, 19 nt, Artificial Sequence
  Description of Artificial Sequence: Synthetic oligonucleotide
uguggaccagcccaccuca

SEQ ID NO: 2741631 - RNA, 19 nt, Artificial Sequence
  Description of Artificial Sequence: Synthetic oligonucleotide
guagagagagaguccguag

SEQ ID NO: 2741632 - RNA, 19 nt, Artificial Sequence
  Description of Artificial Sequence: Synthetic oligonucleotide
gacaggggcuucuuacagg

SEQ ID NO: 2741633 - RNA, 19 nt, Artificial Sequence
  Description of Artificial Sequence: Synthetic oligonucleotide
agagucuaugcuuucccga

SEQ ID NO: 2741634 - RNA, 19 nt, Artificial Sequence
  Description of Artificial Sequence: Synthetic oligonucleotide
agagaguccguagaacuag

SEQ ID NO: 2741635 - RNA, 19 nt, Artificial Sequence
  Description of Artificial Sequence: Synthetic oligonucleotide
ucgucuucugacucuggag

SEQ ID NO: 2741636 - RNA, 19 nt, Artificial Sequence
  Description of Artificial Sequence: Synthetic oligonucleotide
ugagaaagauuugaugcau

SEQ ID NO: 2741637 - RNA, 19 nt, Artificial Sequence
  Description of Artificial Sequence: Synthetic oligonucleotide
uagaccuacacagcccagg

SEQ ID NO: 2741638 - RNA, 19 nt, Artificial Sequence
  Description of Artificial Sequence: Synthetic oligonucleotide
uugacuggggacaggggcu

SEQ ID NO: 2741639 - RNA, 19 nt, Artificial Sequence
  Description of Artificial Sequence: Synthetic oligonucleotide
uguuacaauccgauuccuc

SEQ ID NO: 2741640 - RNA, 19 nt, Artificial Sequence
  Description of Artificial Sequence: Synthetic oligonucleotide
uugcucaggccacugacuc

SEQ ID NO: 2741641 - RNA, 19 nt, Artificial Sequence
  Description of Artificial Sequence: Synthetic oligonucleotide
ugcuuucccgagauggugu

SEQ ID NO: 2741642 - RNA, 19 nt, Artificial Sequence
  Description of Artificial Sequence: Synthetic oligonucleotide
ugagcgcgcgcacacucgg

SEQ ID NO: 2741643 - RNA, 19 nt, Artificial Sequence
  Description of Artificial Sequence: Synthetic oligonucleotide
guucacugaucuuuaucug

SEQ ID NO: 2741644 - RNA, 19 nt, Artificial Sequence
  Description of Artificial Sequence: Synthetic oligonucleotide
aggacggaagcuuuucaga

SEQ ID NO: 2741645 - RNA, 19 nt, Artificial Sequence
  Description of Artificial Sequence: Synthetic oligonucleotide
cugcacagagagucuaugc

SEQ ID NO: 2741646 - RNA, 19 nt, Artificial Sequence
  Description of Artificial Sequence: Synthetic oligonucleotide
ucaugguguuuucucuucu

SEQ ID NO: 2741647 - RNA, 19 nt, Artificial Sequence
  Description of Artificial Sequence: Synthetic oligonucleotide
gaguucacugaucuuuauc

SEQ ID NO: 2741648 - RNA, 19 nt, Artificial Sequence
  Description of Artificial Sequence: Synthetic oligonucleotide
aguugcucgaaguucugau

SEQ ID NO: 2741649 - RNA, 19 nt, Artificial Sequence
  Description of Artificial Sequence: Synthetic oligonucleotide
agagagagaguccguagaa

SEQ ID NO: 2741650 - RNA, 19 nt, Artificial Sequence
  Description of Artificial Sequence: Synthetic oligonucleotide
caggacggaagcuuuucag

SEQ ID NO: 2741651 - RNA, 19 nt, Artificial Sequence
  Description of Artificial Sequence: Synthetic oligonucleotide
acagagagucuaugcuuuc

SEQ ID NO: 2741652 - RNA, 19 nt, Artificial Sequence
  Description of Artificial Sequence: Synthetic oligonucleotide
gggcuuguuaaagagcucg

SEQ ID NO: 2741653 - RNA, 19 nt, Artificial Sequence
  Description of Artificial Sequence: Synthetic oligonucleotide
aagauuugaugcauuuaaa

SEQ ID NO: 2741654 - RNA, 19 nt, Artificial Sequence
  Description of Artificial Sequence: Synthetic oligonucleotide
guuggcugggauuaaaggu

SEQ ID NO: 2741655 - RNA, 19 nt, Artificial Sequence
  Description of Artificial Sequence: Synthetic oligonucleotide
cuguuggcugggauuaaag

SEQ ID NO: 2741656 - RNA, 19 nt, Artificial Sequence
  Description of Artificial Sequence: Synthetic oligonucleotide
guagaacuagaccuacaca

SEQ ID NO: 2741657 - RNA, 19 nt, Artificial Sequence
  Description of Artificial Sequence: Synthetic oligonucleotide
acugacucuggcaggcacc

SEQ ID NO: 2741658 - RNA, 19 nt, Artificial Sequence
  Description of Artificial Sequence: Synthetic oligonucleotide
uuguuucuugcaagugugu

SEQ ID NO: 2741659 - RNA, 19 nt, Artificial Sequence
  Description of Artificial Sequence: Synthetic oligonucleotide
agugguccucacucagugg

SEQ ID NO: 2741660 - RNA, 19 nt, Artificial Sequence
  Description of Artificial Sequence: Synthetic oligonucleotide
guuauccuugacuggggac

SEQ ID NO: 2741661 - RNA, 19 nt, Artificial Sequence
  Description of Artificial Sequence: Synthetic oligonucleotide
caggcagugguccucacuc

SEQ ID NO: 2741662 - RNA, 19 nt, Artificial Sequence
  Description of Artificial Sequence: Synthetic oligonucleotide
ucuuacaggacggaagcuu

SEQ ID NO: 2741663 - RNA, 19 nt, Artificial Sequence
  Description of Artificial Sequence: Synthetic oligonucleotide
cucgggcuuguuaaagagc

SEQ ID NO: 2741664 - RNA, 19 nt, Artificial Sequence
  Description of Artificial Sequence: Synthetic oligonucleotide
uguagagagagaguccgua

SEQ ID NO: 2741665 - RNA, 19 nt, Artificial Sequence
  Description of Artificial Sequence: Synthetic oligonucleotide
cucuucuggacacuuccug

SEQ ID NO: 2741666 - RNA, 19 nt, Artificial Sequence
  Description of Artificial Sequence: Synthetic oligonucleotide
ggauguuauccuugacugg

SEQ ID NO: 2741667 - RNA, 19 nt, Artificial Sequence
  Description of Artificial Sequence: Synthetic oligonucleotide
ucuugguuguagagagaga

SEQ ID NO: 2741668 - RNA, 19 nt, Artificial Sequence
  Description of Artificial Sequence: Synthetic oligonucleotide
uaaagguuuccugcaggca

SEQ ID NO: 2741669 - RNA, 19 nt, Artificial Sequence
  Description of Artificial Sequence: Synthetic oligonucleotide
gggagguaacaguugcucg

SEQ ID NO: 2741670 - RNA, 19 nt, Artificial Sequence
  Description of Artificial Sequence: Synthetic oligonucleotide
ucuaugcuuucccgagaug

SEQ ID NO: 2741671 - RNA, 19 nt, Artificial Sequence
  Description of Artificial Sequence: Synthetic oligonucleotide
uucuggacacuuccuggcu

SEQ ID NO: 2741672 - RNA, 19 nt, Artificial Sequence
  Description of Artificial Sequence: Synthetic oligonucleotide
uauccuugacuggggacag

SEQ ID NO: 2741673 - RNA, 19 nt, Artificial Sequence
  Description of Artificial Sequence: Synthetic oligonucleotide
agaccuacacagcccaggu

SEQ ID NO: 2741674 - RNA, 19 nt, Artificial Sequence
  Description of Artificial Sequence: Synthetic oligonucleotide
ucugagcgcgcgcacacuc

SEQ ID NO: 2741675 - RNA, 19 nt, Artificial Sequence
  Description of Artificial Sequence: Synthetic oligonucleotide
ucuucugacucuggaguga

SEQ ID NO: 2741676 - RNA, 19 nt, Artificial Sequence
  Description of Artificial Sequence: Synthetic oligonucleotide
auuuacuguuacaauccga

SEQ ID NO: 2741677 - RNA, 19 nt, Artificial Sequence
  Description of Artificial Sequence: Synthetic oligonucleotide
agaguccguagaacuagac

SEQ ID NO: 2741678 - RNA, 19 nt, Artificial Sequence
  Description of Artificial Sequence: Synthetic oligonucleotide
uggaaggcugagaaagauu

SEQ ID NO: 2741679 - RNA, 19 nt, Artificial Sequence
  Description of Artificial Sequence: Synthetic oligonucleotide
guucucagcaucauggugu

SEQ ID NO: 2741680 - RNA, 19 nt, Artificial Sequence
  Description of Artificial Sequence: Synthetic oligonucleotide
uccucugaauccgaauccu

SEQ ID NO: 2741681 - RNA, 19 nt, Artificial Sequence
  Description of Artificial Sequence: Synthetic oligonucleotide
aaacugcacagagagucua

SEQ ID NO: 2741682 - RNA, 19 nt, Artificial Sequence
  Description of Artificial Sequence: Synthetic oligonucleotide
uuacuguuacaauccgauu

SEQ ID NO: 2741683 - RNA, 19 nt, Artificial Sequence
  Description of Artificial Sequence: Synthetic oligonucleotide
gagagagaguccguagaac

SEQ ID NO: 2741684 - RNA, 19 nt, Artificial Sequence
  Description of Artificial Sequence: Synthetic oligonucleotide
acaggacggaagcuuuuca

SEQ ID NO: 2741685 - RNA, 19 nt, Artificial Sequence
  Description of Artificial Sequence: Synthetic oligonucleotide
guuucuugcaagugugucu

SEQ ID NO: 2741686 - RNA, 19 nt, Artificial Sequence
  Description of Artificial Sequence: Synthetic oligonucleotide
ggaccagcccaccucaugc

SEQ ID NO: 2741687 - RNA, 19 nt, Artificial Sequence
  Description of Artificial Sequence: Synthetic oligonucleotide
gaucuuuaucugcagcccu

SEQ ID NO: 2741688 - RNA, 19 nt, Artificial Sequence
  Description of Artificial Sequence: Synthetic oligonucleotide
gaaagauuugaugcauuua

SEQ ID NO: 2741689 - RNA, 19 nt, Artificial Sequence
  Description of Artificial Sequence: Synthetic oligonucleotide
uggaccagcccaccucaug

SEQ ID NO: 2741690 - RNA, 19 nt, Artificial Sequence
  Description of Artificial Sequence: Synthetic oligonucleotide
uuguagagagagaguccgu

SEQ ID NO: 2741691 - RNA, 19 nt, Artificial Sequence
  Description of Artificial Sequence: Synthetic oligonucleotide
cuucugacucuggagugag

SEQ ID NO: 2741692 - RNA, 19 nt, Artificial Sequence
  Description of Artificial Sequence: Synthetic oligonucleotide
uugcucuucugagcgcgcg

SEQ ID NO: 2741693 - RNA, 19 nt, Artificial Sequence
  Description of Artificial Sequence: Synthetic oligonucleotide
uccguagaacuagaccuac

SEQ ID NO: 2741694 - RNA, 19 nt, Artificial Sequence
  Description of Artificial Sequence: Synthetic oligonucleotide
agucuaugcuuucccgaga

SEQ ID NO: 2741695 - RNA, 19 nt, Artificial Sequence
  Description of Artificial Sequence: Synthetic oligonucleotide
ggagguaacaguugcucga

SEQ ID NO: 2741696 - RNA, 19 nt, Artificial Sequence
  Description of Artificial Sequence: Synthetic oligonucleotide
caagugauuuacuguuaca

SEQ ID NO: 2741697 - RNA, 19 nt, Artificial Sequence
  Description of Artificial Sequence: Synthetic oligonucleotide
agguaacaguugcucgaag

SEQ ID NO: 2741698 - RNA, 19 nt, Artificial Sequence
  Description of Artificial Sequence: Synthetic oligonucleotide
aagguuuccugcaggcagu

SEQ ID NO: 2741699 - RNA, 19 nt, Artificial Sequence
  Description of Artificial Sequence: Synthetic oligonucleotide
ugcucuucugagcgcgcgc

SEQ ID NO: 2741700 - RNA, 19 nt, Artificial Sequence
  Description of Artificial Sequence: Synthetic oligonucleotide
cagguaccuuguuucuugc

SEQ ID NO: 2741701 - RNA, 19 nt, Artificial Sequence
  Description of Artificial Sequence: Synthetic oligonucleotide
auguuauccuugacugggg

SEQ ID NO: 2741702 - RNA, 19 nt, Artificial Sequence
  Description of Artificial Sequence: Synthetic oligonucleotide
guggaauauugcucuucug

SEQ ID NO: 2741703 - RNA, 19 nt, Artificial Sequence
  Description of Artificial Sequence: Synthetic oligonucleotide
ugcucgaaguucugauuuc

SEQ ID NO: 2741704 - RNA, 19 nt, Artificial Sequence
  Description of Artificial Sequence: Synthetic oligonucleotide
cuggacacuuccuggcuuc

SEQ ID NO: 2741705 - RNA, 19 nt, Artificial Sequence
  Description of Artificial Sequence: Synthetic oligonucleotide
acugcacagagagucuaug

SEQ ID NO: 2741706 - RNA, 19 nt, Artificial Sequence
  Description of Artificial Sequence: Synthetic oligonucleotide
uuccuagaguucacugauc

SEQ ID NO: 2741707 - RNA, 19 nt, Artificial Sequence
  Description of Artificial Sequence: Synthetic oligonucleotide
acacucgggcuuguuaaag

SEQ ID NO: 2741708 - RNA, 19 nt, Artificial Sequence
  Description of Artificial Sequence: Synthetic oligonucleotide
uaucugcagcccuggcuug

SEQ ID NO: 2741709 - RNA, 19 nt, Artificial Sequence
  Description of Artificial Sequence: Synthetic oligonucleotide
ucuucugagcgcgcgcaca

SEQ ID NO: 2741710 - RNA, 19 nt, Artificial Sequence
  Description of Artificial Sequence: Synthetic oligonucleotide
cuucugagcgcgcgcacac

SEQ ID NO: 2741711 - RNA, 19 nt, Artificial Sequence
  Description of Artificial Sequence: Synthetic oligonucleotide
ggacaggggcuucuuacag

SEQ ID NO: 2741712 - RNA, 19 nt, Artificial Sequence
  Description of Artificial Sequence: Synthetic oligonucleotide
cgaaguucugauuuccuug

SEQ ID NO: 2741713 - RNA, 19 nt, Artificial Sequence
  Description of Artificial Sequence: Synthetic oligonucleotide
cguagaacuagaccuacac

SEQ ID NO: 2741714 - RNA, 19 nt, Artificial Sequence
  Description of Artificial Sequence: Synthetic oligonucleotide
uccucacucaguggaauau

SEQ ID NO: 2741715 - RNA, 19 nt, Artificial Sequence
  Description of Artificial Sequence: Synthetic oligonucleotide
uucuuacaggacggaagcu

SEQ ID NO: 2741716 - RNA, 19 nt, Artificial Sequence
  Description of Artificial Sequence: Synthetic oligonucleotide
cucugaauccgaauccuua

SEQ ID NO: 2741717 - RNA, 19 nt, Artificial Sequence
  Description of Artificial Sequence: Synthetic oligonucleotide
cugagcgcgcgcacacucg

SEQ ID NO: 2741718 - RNA, 19 nt, Artificial Sequence
  Description of Artificial Sequence: Synthetic oligonucleotide
augguguggaccagcccac

SEQ ID NO: 2741719 - RNA, 19 nt, Artificial Sequence
  Description of Artificial Sequence: Synthetic oligonucleotide
cuagaccuacacagcccag

SEQ ID NO: 2741720 - RNA, 19 nt, Artificial Sequence
  Description of Artificial Sequence: Synthetic oligonucleotide
uuacaggacggaagcuuuu

SEQ ID NO: 2741721 - RNA, 19 nt, Artificial Sequence
  Description of Artificial Sequence: Synthetic oligonucleotide
aagggagguaacaguugcu

SEQ ID NO: 2741722 - RNA, 19 nt, Artificial Sequence
  Description of Artificial Sequence: Synthetic oligonucleotide
accuuguuucuugcaagug

SEQ ID NO: 2741723 - RNA, 19 nt, Artificial Sequence
  Description of Artificial Sequence: Synthetic oligonucleotide
cugacucuggagugagcug

SEQ ID NO: 2741724 - RNA, 19 nt, Artificial Sequence
  Description of Artificial Sequence: Synthetic oligonucleotide
uacaggacggaagcuuuuc

SEQ ID NO: 2741725 - RNA, 19 nt, Artificial Sequence
  Description of Artificial Sequence: Synthetic oligonucleotide
gauuaucaagugauuuacu

SEQ ID NO: 2741726 - RNA, 19 nt, Artificial Sequence
  Description of Artificial Sequence: Synthetic oligonucleotide
gguuguagagagagagucc

SEQ ID NO: 2741727 - RNA, 19 nt, Artificial Sequence
  Description of Artificial Sequence: Synthetic oligonucleotide
cuagaguucacugaucuuu

SEQ ID NO: 2741728 - RNA, 19 nt, Artificial Sequence
  Description of Artificial Sequence: Synthetic oligonucleotide
ggggcuucuuacaggacgg

SEQ ID NO: 2741729 - RNA, 19 nt, Artificial Sequence
  Description of Artificial Sequence: Synthetic oligonucleotide
ccagguaccuuguuucuug

SEQ ID NO: 2741730 - RNA, 19 nt, Artificial Sequence
  Description of Artificial Sequence: Synthetic oligonucleotide
gguaacaguugcucgaagu

SEQ ID NO: 2741731 - RNA, 19 nt, Artificial Sequence
  Description of Artificial Sequence: Synthetic oligonucleotide
cacugacucuggcaggcac

SEQ ID NO: 2741732 - RNA, 19 nt, Artificial Sequence
  Description of Artificial Sequence: Synthetic oligonucleotide
ggacggaagcuuuucagaa

SEQ ID NO: 2741733 - RNA, 19 nt, Artificial Sequence
  Description of Artificial Sequence: Synthetic oligonucleotide
ccgaauccuuacuggaagg

SEQ ID NO: 2741734 - RNA, 19 nt, Artificial Sequence
  Description of Artificial Sequence: Synthetic oligonucleotide
ggcagugguccucacucag

SEQ ID NO: 2741735 - RNA, 19 nt, Artificial Sequence
  Description of Artificial Sequence: Synthetic oligonucleotide
ggcuugaucuugguuguag

SEQ ID NO: 2741736 - RNA, 19 nt, Artificial Sequence
  Description of Artificial Sequence: Synthetic oligonucleotide
ugcaagugugucugucuuu

SEQ ID NO: 2741737 - RNA, 19 nt, Artificial Sequence
  Description of Artificial Sequence: Synthetic oligonucleotide
ggggacaggggcuucuuac

SEQ ID NO: 2741738 - RNA, 19 nt, Artificial Sequence
  Description of Artificial Sequence: Synthetic oligonucleotide
ugcucaggccacugacucu

SEQ ID NO: 2741739 - RNA, 19 nt, Artificial Sequence
  Description of Artificial Sequence: Synthetic oligonucleotide
uggagugagcuggauguua

SEQ ID NO: 2741740 - RNA, 19 nt, Artificial Sequence
  Description of Artificial Sequence: Synthetic oligonucleotide
acaauccgauuccucugaa

SEQ ID NO: 2741741 - RNA, 19 nt, Artificial Sequence
  Description of Artificial Sequence: Synthetic oligonucleotide
auccuuacuggaaggcuga

SEQ ID NO: 2741742 - RNA, 19 nt, Artificial Sequence
  Description of Artificial Sequence: Synthetic oligonucleotide
agcucgucuucugacucug

SEQ ID NO: 2741743 - RNA, 19 nt, Artificial Sequence
  Description of Artificial Sequence: Synthetic oligonucleotide
caguggaauauugcucuuc

SEQ ID NO: 2741744 - RNA, 19 nt, Artificial Sequence
  Description of Artificial Sequence: Synthetic oligonucleotide
aacugcacagagagucuau

SEQ ID NO: 2741745 - RNA, 19 nt, Artificial Sequence
  Description of Artificial Sequence: Synthetic oligonucleotide
cuugcaagugugucugucu

SEQ ID NO: 2741746 - RNA, 19 nt, Artificial Sequence
  Description of Artificial Sequence: Synthetic oligonucleotide
gagguaacaguugcucgaa

SEQ ID NO: 2741747 - RNA, 19 nt, Artificial Sequence
  Description of Artificial Sequence: Synthetic oligonucleotide
cacucgggcuuguuaaaga

SEQ ID NO: 2741748 - RNA, 19 nt, Artificial Sequence
  Description of Artificial Sequence: Synthetic oligonucleotide
gagugagcuggauguuauc

SEQ ID NO: 2741749 - RNA, 19 nt, Artificial Sequence
  Description of Artificial Sequence: Synthetic oligonucleotide
gagagaguccguagaacua

SEQ ID NO: 2741750 - RNA, 19 nt, Artificial Sequence
  Description of Artificial Sequence: Synthetic oligonucleotide
gcucgaaguucugauuucc

SEQ ID NO: 2741751 - RNA, 19 nt, Artificial Sequence
  Description of Artificial Sequence: Synthetic oligonucleotide
gaccagcccaccucaugca

SEQ ID NO: 2741752 - RNA, 19 nt, Artificial Sequence
  Description of Artificial Sequence: Synthetic oligonucleotide
guguggaccagcccaccuc

SEQ ID NO: 2741753 - RNA, 19 nt, Artificial Sequence
  Description of Artificial Sequence: Synthetic oligonucleotide
aggcaccaggggcuugauc

SEQ ID NO: 2741754 - RNA, 19 nt, Artificial Sequence
  Description of Artificial Sequence: Synthetic oligonucleotide
aucaagugauuuacuguua

SEQ ID NO: 2741755 - RNA, 19 nt, Artificial Sequence
  Description of Artificial Sequence: Synthetic oligonucleotide
cuuacaggacggaagcuuu

SEQ ID NO: 2741756 - RNA, 19 nt, Artificial Sequence
  Description of Artificial Sequence: Synthetic oligonucleotide
aggcagugguccucacuca

SEQ ID NO: 2741757 - RNA, 19 nt, Artificial Sequence
  Description of Artificial Sequence: Synthetic oligonucleotide
cucaggccacugacucugg

SEQ ID NO: 2741758 - RNA, 19 nt, Artificial Sequence
  Description of Artificial Sequence: Synthetic oligonucleotide
gagaguccguagaacuaga

SEQ ID NO: 2741759 - RNA, 19 nt, Artificial Sequence
  Description of Artificial Sequence: Synthetic oligonucleotide
gcucaggccacugacucug

SEQ ID NO: 2741760 - RNA, 19 nt, Artificial Sequence
  Description of Artificial Sequence: Synthetic oligonucleotide
gcuugaucuugguuguaga

SEQ ID NO: 2741761 - RNA, 19 nt, Artificial Sequence
  Description of Artificial Sequence: Synthetic oligonucleotide
gucuaugcuuucccgagau

SEQ ID NO: 2741762 - RNA, 19 nt, Artificial Sequence
  Description of Artificial Sequence: Synthetic oligonucleotide
gacggaagcuuuucagaau

SEQ ID NO: 2741763 - RNA, 19 nt, Artificial Sequence
  Description of Artificial Sequence: Synthetic oligonucleotide
gaucuugguuguagagaga

SEQ ID NO: 2741764 - RNA, 19 nt, Artificial Sequence
  Description of Artificial Sequence: Synthetic oligonucleotide
gcacacucgggcuuguuaa

SEQ ID NO: 2741765 - RNA, 19 nt, Artificial Sequence
  Description of Artificial Sequence: Synthetic oligonucleotide
uucccgagaugguguggac

SEQ ID NO: 2741766 - RNA, 19 nt, Artificial Sequence
  Description of Artificial Sequence: Synthetic oligonucleotide
ccuacacagcccagguacc

SEQ ID NO: 2741767 - RNA, 19 nt, Artificial Sequence
  Description of Artificial Sequence: Synthetic oligonucleotide
cacagagagucuaugcuuu

SEQ ID NO: 2741768 - RNA, 19 nt, Artificial Sequence
  Description of Artificial Sequence: Synthetic oligonucleotide
gcuuucccgagauggugug

SEQ ID NO: 2741769 - RNA, 19 nt, Artificial Sequence
  Description of Artificial Sequence: Synthetic oligonucleotide
cugaauccgaauccuuacu

SEQ ID NO: 2741770 - RNA, 19 nt, Artificial Sequence
  Description of Artificial Sequence: Synthetic oligonucleotide
agguuuccugcaggcagug

SEQ ID NO: 2741771 - RNA, 19 nt, Artificial Sequence
  Description of Artificial Sequence: Synthetic oligonucleotide
cuugcucaggccacugacu

SEQ ID NO: 2741772 - RNA, 19 nt, Artificial Sequence
  Description of Artificial Sequence: Synthetic oligonucleotide
ggccacugacucuggcagg

SEQ ID NO: 2741773 - RNA, 19 nt, Artificial Sequence
  Description of Artificial Sequence: Synthetic oligonucleotide
acaguugcucgaaguucug

SEQ ID NO: 2741774 - RNA, 19 nt, Artificial Sequence
  Description of Artificial Sequence: Synthetic oligonucleotide
gcuuguuaaagagcucguc

SEQ ID NO: 2741775 - RNA, 19 nt, Artificial Sequence
  Description of Artificial Sequence: Synthetic oligonucleotide
gccacugacucuggcaggc

SEQ ID NO: 2741776 - RNA, 19 nt, Artificial Sequence
  Description of Artificial Sequence: Synthetic oligonucleotide
uacacagcccagguaccuu

SEQ ID NO: 2741777 - RNA, 19 nt, Artificial Sequence
  Description of Artificial Sequence: Synthetic oligonucleotide
ugguguggaccagcccacc

SEQ ID NO: 2741778 - RNA, 19 nt, Artificial Sequence
  Description of Artificial Sequence: Synthetic oligonucleotide
gcaucaugguguuuucucu

SEQ ID NO: 2741779 - RNA, 19 nt, Artificial Sequence
  Description of Artificial Sequence: Synthetic oligonucleotide
cucgaaguucugauuuccu

SEQ ID NO: 2741780 - RNA, 19 nt, Artificial Sequence
  Description of Artificial Sequence: Synthetic oligonucleotide
agcccaccucaugcaaggg

SEQ ID NO: 2741781 - RNA, 19 nt, Artificial Sequence
  Description of Artificial Sequence: Synthetic oligonucleotide
gagaaagauuugaugcauu

SEQ ID NO: 2741782 - RNA, 19 nt, Artificial Sequence
  Description of Artificial Sequence: Synthetic oligonucleotide
ccuugacuggggacagggg

SEQ ID NO: 2741783 - RNA, 19 nt, Artificial Sequence
  Description of Artificial Sequence: Synthetic oligonucleotide
guugcucgaaguucugauu

SEQ ID NO: 2741784 - RNA, 19 nt, Artificial Sequence
  Description of Artificial Sequence: Synthetic oligonucleotide
gaccuacacagcccaggua

SEQ ID NO: 2741785 - RNA, 19 nt, Artificial Sequence
  Description of Artificial Sequence: Synthetic oligonucleotide
auccuugacuggggacagg

SEQ ID NO: 2741786 - RNA, 19 nt, Artificial Sequence
  Description of Artificial Sequence: Synthetic oligonucleotide
cgaauccuuacuggaaggc

SEQ ID NO: 2741787 - RNA, 19 nt, Artificial Sequence
  Description of Artificial Sequence: Synthetic oligonucleotide
ugacuggggacaggggcuu

SEQ ID NO: 2741788 - RNA, 19 nt, Artificial Sequence
  Description of Artificial Sequence: Synthetic oligonucleotide
caggggcuucuuacaggac

SEQ ID NO: 2741789 - RNA, 19 nt, Artificial Sequence
  Description of Artificial Sequence: Synthetic oligonucleotide
gacucuggagugagcugga

SEQ ID NO: 2741790 - RNA, 19 nt, Artificial Sequence
  Description of Artificial Sequence: Synthetic oligonucleotide
caucaugguguuuucucuu

SEQ ID NO: 2741791 - RNA, 19 nt, Artificial Sequence
  Description of Artificial Sequence: Synthetic oligonucleotide
uucugagcgcgcgcacacu

SEQ ID NO: 2741792 - RNA, 19 nt, Artificial Sequence
  Description of Artificial Sequence: Synthetic oligonucleotide
gcuggauguuauccuugac

SEQ ID NO: 2741793 - RNA, 19 nt, Artificial Sequence
  Description of Artificial Sequence: Synthetic oligonucleotide
gagcucgucuucugacucu

SEQ ID NO: 2741794 - RNA, 19 nt, Artificial Sequence
  Description of Artificial Sequence: Synthetic oligonucleotide
ccuuguuucuugcaagugu

SEQ ID NO: 2741795 - RNA, 19 nt, Artificial Sequence
  Description of Artificial Sequence: Synthetic oligonucleotide
guccguagaacuagaccua

SEQ ID NO: 2741796 - RNA, 19 nt, Artificial Sequence
  Description of Artificial Sequence: Synthetic oligonucleotide
cacacucgggcuuguuaaa

SEQ ID NO: 2741797 - RNA, 19 nt, Artificial Sequence
  Description of Artificial Sequence: Synthetic oligonucleotide
gguuuccugcaggcagugg

SEQ ID NO: 2741798 - RNA, 19 nt, Artificial Sequence
  Description of Artificial Sequence: Synthetic oligonucleotide
caguugcucgaaguucuga

SEQ ID NO: 2741799 - RNA, 19 nt, Artificial Sequence
  Description of Artificial Sequence: Synthetic oligonucleotide
acagcccagguaccuuguu

SEQ ID NO: 2741800 - RNA, 19 nt, Artificial Sequence
  Description of Artificial Sequence: Synthetic oligonucleotide
ggggcuugaucuugguugu

SEQ ID NO: 2741801 - RNA, 19 nt, Artificial Sequence
  Description of Artificial Sequence: Synthetic oligonucleotide
caauccgauuccucugaau

SEQ ID NO: 2741802 - RNA, 19 nt, Artificial Sequence
  Description of Artificial Sequence: Synthetic oligonucleotide
cacuuccuggcuucuugcu

SEQ ID NO: 2741803 - RNA, 19 nt, Artificial Sequence
  Description of Artificial Sequence: Synthetic oligonucleotide
ggcuucuuacaggacggaa

SEQ ID NO: 2741804 - RNA, 19 nt, Artificial Sequence
  Description of Artificial Sequence: Synthetic oligonucleotide
gcucuucugagcgcgcgca

SEQ ID NO: 2741805 - RNA, 19 nt, Artificial Sequence
  Description of Artificial Sequence: Synthetic oligonucleotide
cgagaugguguggaccagc

SEQ ID NO: 2741806 - RNA, 19 nt, Artificial Sequence
  Description of Artificial Sequence: Synthetic oligonucleotide
cuacacagcccagguaccu

SEQ ID NO: 2741807 - RNA, 19 nt, Artificial Sequence
  Description of Artificial Sequence: Synthetic oligonucleotide
cuguuacaauccgauuccu

SEQ ID NO: 2741808 - RNA, 19 nt, Artificial Sequence
  Description of Artificial Sequence: Synthetic oligonucleotide
cgucuucugacucuggagu

SEQ ID NO: 2741809 - RNA, 19 nt, Artificial Sequence
  Description of Artificial Sequence: Synthetic oligonucleotide
gguguggaccagcccaccu

SEQ ID NO: 2741810 - RNA, 19 nt, Artificial Sequence
  Description of Artificial Sequence: Synthetic oligonucleotide
ggagugagcuggauguuau

SEQ ID NO: 2741811 - RNA, 19 nt, Artificial Sequence
  Description of Artificial Sequence: Synthetic oligonucleotide
cagcccuggcuuguucuca

SEQ ID NO: 2741812 - RNA, 19 nt, Artificial Sequence
  Description of Artificial Sequence: Synthetic oligonucleotide
gacuggggacaggggcuuc

SEQ ID NO: 2741813 - RNA, 19 nt, Artificial Sequence
  Description of Artificial Sequence: Synthetic oligonucleotide
ccguagaacuagaccuaca

SEQ ID NO: 2741814 - RNA, 19 nt, Artificial Sequence
  Description of Artificial Sequence: Synthetic oligonucleotide
cacagcccagguaccuugu

SEQ ID NO: 2741815 - RNA, 19 nt, Artificial Sequence
  Description of Artificial Sequence: Synthetic oligonucleotide
ccuuacuggaaggcugaga

SEQ ID NO: 2741816 - RNA, 19 nt, Artificial Sequence
  Description of Artificial Sequence: Synthetic oligonucleotide
gcccuggcuuguucucagc

SEQ ID NO: 2741817 - RNA, 19 nt, Artificial Sequence
  Description of Artificial Sequence: Synthetic oligonucleotide
ccugcaggcagugguccuc

SEQ ID NO: 2741818 - RNA, 19 nt, Artificial Sequence
  Description of Artificial Sequence: Synthetic oligonucleotide
ccgauuccucugaauccga

SEQ ID NO: 2741819 - RNA, 19 nt, Artificial Sequence
  Description of Artificial Sequence: Synthetic oligonucleotide
ccuugauuaucaagugauu

SEQ ID NO: 2741820 - RNA, 19 nt, Artificial Sequence
  Description of Artificial Sequence: Synthetic oligonucleotide
gcaggcagugguccucacu

SEQ ID NO: 2741821 - RNA, 19 nt, Artificial Sequence
  Description of Artificial Sequence: Synthetic oligonucleotide
gguccucacucaguggaau

SEQ ID NO: 2741822 - RNA, 19 nt, Artificial Sequence
  Description of Artificial Sequence: Synthetic oligonucleotide
caggggcuugaucuugguu

SEQ ID NO: 2741823 - RNA, 19 nt, Artificial Sequence
  Description of Artificial Sequence: Synthetic oligonucleotide
ccgagaugguguggaccag

SEQ ID NO: 2741824 - RNA, 19 nt, Artificial Sequence
  Description of Artificial Sequence: Synthetic oligonucleotide
cgggcuuguuaaagagcuc

SEQ ID NO: 2741825 - RNA, 19 nt, Artificial Sequence
  Description of Artificial Sequence: Synthetic oligonucleotide
cgauuccucugaauccgaa

SEQ ID NO: 2741826 - RNA, 19 nt, Artificial Sequence
  Description of Artificial Sequence: Synthetic oligonucleotide
ccuggcuuguucucagcau

SEQ ID NO: 2741827 - RNA, 19 nt, Artificial Sequence
  Description of Artificial Sequence: Synthetic oligonucleotide
gcgcgcacacucgggcuug

SEQ ID NO: 2741828 - RNA, 19 nt, Artificial Sequence
  Description of Artificial Sequence: Synthetic oligonucleotide
gcagugguccucacucagu

SEQ ID NO: 2741829 - RNA, 19 nt, Artificial Sequence
  Description of Artificial Sequence: Synthetic oligonucleotide
ggcaggcaccaggggcuug

SEQ ID NO: 2741830 - RNA, 19 nt, Artificial Sequence
  Description of Artificial Sequence: Synthetic oligonucleotide
ccuagaguucacugaucuu

SEQ ID NO: 2741831 - RNA, 19 nt, Artificial Sequence
  Description of Artificial Sequence: Synthetic oligonucleotide
ccucugaauccgaauccuu

SEQ ID NO: 2741832 - RNA, 19 nt, Artificial Sequence
  Description of Artificial Sequence: Synthetic oligonucleotide
cgcacacucgggcuuguua

SEQ ID NO: 2741833 - RNA, 19 nt, Artificial Sequence
  Description of Artificial Sequence: Synthetic oligonucleotide
cggaagcuuuucagaaucu

SEQ ID NO: 2741834 - RNA, 19 nt, Artificial Sequence
  Description of Artificial Sequence: Synthetic oligonucleotide
cuggagugagcuggauguu

SEQ ID NO: 2741835 - RNA, 19 nt, Artificial Sequence
  Description of Artificial Sequence: Synthetic oligonucleotide
guggaccagcccaccucau

SEQ ID NO: 2741836 - RNA, 19 nt, Artificial Sequence
  Description of Artificial Sequence: Synthetic oligonucleotide
ccacugacucuggcaggca

SEQ ID NO: 2741837 - RNA, 19 nt, Artificial Sequence
  Description of Artificial Sequence: Synthetic oligonucleotide
gggcuugaucuugguugua

SEQ ID NO: 2741838 - RNA, 19 nt, Artificial Sequence
  Description of Artificial Sequence: Synthetic oligonucleotide
ccucacucaguggaauauu

SEQ ID NO: 2741839 - RNA, 19 nt, Artificial Sequence
  Description of Artificial Sequence: Synthetic oligonucleotide
ggacacuuccuggcuucuu

SEQ ID NO: 2741840 - RNA, 19 nt, Artificial Sequence
  Description of Artificial Sequence: Synthetic oligonucleotide
caggcaccaggggcuugau

SEQ ID NO: 2741841 - RNA, 19 nt, Artificial Sequence
  Description of Artificial Sequence: Synthetic oligonucleotide
gcgcacacucgggcuuguu

SEQ ID NO: 2741842 - RNA, 19 nt, Artificial Sequence
  Description of Artificial Sequence: Synthetic oligonucleotide
cgcgcacacucgggcuugu

SEQ ID NO: 2741843 - RNA, 19 nt, Artificial Sequence
  Description of Artificial Sequence: Synthetic oligonucleotide
aauauauauauauauauau

SEQ ID NO: 2741844 - RNA, 19 nt, Artificial Sequence
  Description of Artificial Sequence: Synthetic oligonucleotide
uacaauaaaacauuuacag

SEQ ID NO: 2741845 - RNA, 19 nt, Artificial Sequence
  Description of Artificial Sequence: Synthetic oligonucleotide
uauauauauauauauauga

SEQ ID NO: 2741846 - RNA, 19 nt, Artificial Sequence
  Description of Artificial Sequence: Synthetic oligonucleotide
uauauauauauauauaugu

SEQ ID NO: 2741847 - RNA, 19 nt, Artificial Sequence
  Description of Artificial Sequence: Synthetic oligonucleotide
uauauauauauauaugugc

SEQ ID NO: 2741848 - RNA, 19 nt, Artificial Sequence
  Description of Artificial Sequence: Synthetic oligonucleotide
uccuuuaaaacccagagug

SEQ ID NO: 2741849 - RNA, 19 nt, Artificial Sequence
  Description of Artificial Sequence: Synthetic oligonucleotide
aacagaaagacucaggugu

SEQ ID NO: 2741850 - RNA, 19 nt, Artificial Sequence
  Description of Artificial Sequence: Synthetic oligonucleotide
aauauagcuuuauuuauag

SEQ ID NO: 2741851 - RNA, 19 nt, Artificial Sequence
  Description of Artificial Sequence: Synthetic oligonucleotide
uauauauauauauauauau

SEQ ID NO: 2741852 - RNA, 19 nt, Artificial Sequence
  Description of Artificial Sequence: Synthetic oligonucleotide
uauauaugaauauauauau

SEQ ID NO: 2741853 - RNA, 19 nt, Artificial Sequence
  Description of Artificial Sequence: Synthetic oligonucleotide
aaagcaaaacaaaucaccc

SEQ ID NO: 2741854 - RNA, 19 nt, Artificial Sequence
  Description of Artificial Sequence: Synthetic oligonucleotide
uauaugaauauauauauau

SEQ ID NO: 2741855 - RNA, 19 nt, Artificial Sequence
  Description of Artificial Sequence: Synthetic oligonucleotide
caauaaaacauuuacaguc

SEQ ID NO: 2741856 - RNA, 19 nt, Artificial Sequence
  Description of Artificial Sequence: Synthetic oligonucleotide
aaaacagaaagacucaggu

SEQ ID NO: 2741857 - RNA, 19 nt, Artificial Sequence
  Description of Artificial Sequence: Synthetic oligonucleotide
auauauauauaugugcugc

SEQ ID NO: 2741858 - RNA, 19 nt, Artificial Sequence
  Description of Artificial Sequence: Synthetic oligonucleotide
uguauauauauauauauau

SEQ ID NO: 2741859 - RNA, 19 nt, Artificial Sequence
  Description of Artificial Sequence: Synthetic oligonucleotide
cuuacaauaaaacauuuac

SEQ ID NO: 2741860 - RNA, 19 nt, Artificial Sequence
  Description of Artificial Sequence: Synthetic oligonucleotide
uauauauauaugaauauau

SEQ ID NO: 2741861 - RNA, 19 nt, Artificial Sequence
  Description of Artificial Sequence: Synthetic oligonucleotide
aaacaaaucacccagcuua

SEQ ID NO: 2741862 - RNA, 19 nt, Artificial Sequence
  Description of Artificial Sequence: Synthetic oligonucleotide
ugaauauauauauauauau

SEQ ID NO: 2741863 - RNA, 19 nt, Artificial Sequence
  Description of Artificial Sequence: Synthetic oligonucleotide
uaugaauauauauauauau

SEQ ID NO: 2741864 - RNA, 19 nt, Artificial Sequence
  Description of Artificial Sequence: Synthetic oligonucleotide
ugcaaagcaaaacaaauca

SEQ ID NO: 2741865 - RNA, 19 nt, Artificial Sequence
  Description of Artificial Sequence: Synthetic oligonucleotide
ggaacuaugaauaaaaucc

SEQ ID NO: 2741866 - RNA, 19 nt, Artificial Sequence
  Description of Artificial Sequence: Synthetic oligonucleotide
uauuuauagaaucuuacaa

SEQ ID NO: 2741867 - RNA, 19 nt, Artificial Sequence
  Description of Artificial Sequence: Synthetic oligonucleotide
uuuauuuauagaaucuuac

SEQ ID NO: 2741868 - RNA, 19 nt, Artificial Sequence
  Description of Artificial Sequence: Synthetic oligonucleotide
uaaggaauccacauuauca

SEQ ID NO: 2741869 - RNA, 19 nt, Artificial Sequence
  Description of Artificial Sequence: Synthetic oligonucleotide
ucuauuucuucucauaaca

SEQ ID NO: 2741870 - RNA, 19 nt, Artificial Sequence
  Description of Artificial Sequence: Synthetic oligonucleotide
uauauauaugaauauauau

SEQ ID NO: 2741871 - RNA, 19 nt, Artificial Sequence
  Description of Artificial Sequence: Synthetic oligonucleotide
ucuacauaaguuauuuaag

SEQ ID NO: 2741872 - RNA, 19 nt, Artificial Sequence
  Description of Artificial Sequence: Synthetic oligonucleotide
cacauuaucaauaugauaa

SEQ ID NO: 2741873 - RNA, 19 nt, Artificial Sequence
  Description of Artificial Sequence: Synthetic oligonucleotide
uguguauauauauauauau

SEQ ID NO: 2741874 - RNA, 19 nt, Artificial Sequence
  Description of Artificial Sequence: Synthetic oligonucleotide
ugugauggaacuguaaagg

SEQ ID NO: 2741875 - RNA, 19 nt, Artificial Sequence
  Description of Artificial Sequence: Synthetic oligonucleotide
caaagcaaaacaaaucacc

SEQ ID NO: 2741876 - RNA, 19 nt, Artificial Sequence
  Description of Artificial Sequence: Synthetic oligonucleotide
uuggcaaugaaccaguacu

SEQ ID NO: 2741877 - RNA, 19 nt, Artificial Sequence
  Description of Artificial Sequence: Synthetic oligonucleotide
uauauauauauauaugaau

SEQ ID NO: 2741878 - RNA, 19 nt, Artificial Sequence
  Description of Artificial Sequence: Synthetic oligonucleotide
agcaaaacaaaucacccag

SEQ ID NO: 2741879 - RNA, 19 nt, Artificial Sequence
  Description of Artificial Sequence: Synthetic oligonucleotide
ucagucaugcaaacaaugg

SEQ ID NO: 2741880 - RNA, 19 nt, Artificial Sequence
  Description of Artificial Sequence: Synthetic oligonucleotide
uuaaguuucuauuucuucu

SEQ ID NO: 2741881 - RNA, 19 nt, Artificial Sequence
  Description of Artificial Sequence: Synthetic oligonucleotide
uuuauagaaucuuacaaua

SEQ ID NO: 2741882 - RNA, 19 nt, Artificial Sequence
  Description of Artificial Sequence: Synthetic oligonucleotide
agaaucuuacaauaaaaca

SEQ ID NO: 2741883 - RNA, 19 nt, Artificial Sequence
  Description of Artificial Sequence: Synthetic oligonucleotide
uuacaauaaaacauuuaca

SEQ ID NO: 2741884 - RNA, 19 nt, Artificial Sequence
  Description of Artificial Sequence: Synthetic oligonucleotide
cuuuuaaugguacaguuuc

SEQ ID NO: 2741885 - RNA, 19 nt, Artificial Sequence
  Description of Artificial Sequence: Synthetic oligonucleotide
uguguguauauauauauau

SEQ ID NO: 2741886 - RNA, 19 nt, Artificial Sequence
  Description of Artificial Sequence: Synthetic oligonucleotide
uaugugcugcuuuuaaugg

SEQ ID NO: 2741887 - RNA, 19 nt, Artificial Sequence
  Description of Artificial Sequence: Synthetic oligonucleotide
uauauauauauaugaauau

SEQ ID NO: 2741888 - RNA, 19 nt, Artificial Sequence
  Description of Artificial Sequence: Synthetic oligonucleotide
cauaaguuauuuaaguuuc

SEQ ID NO: 2741889 - RNA, 19 nt, Artificial Sequence
  Description of Artificial Sequence: Synthetic oligonucleotide
uuauuuauagaaucuuaca

SEQ ID NO: 2741890 - RNA, 19 nt, Artificial Sequence
  Description of Artificial Sequence: Synthetic oligonucleotide
uauagaaucuuacaauaaa

SEQ ID NO: 2741891 - RNA, 19 nt, Artificial Sequence
  Description of Artificial Sequence: Synthetic oligonucleotide
uauuucuucucauaacacc

SEQ ID NO: 2741892 - RNA, 19 nt, Artificial Sequence
  Description of Artificial Sequence: Synthetic oligonucleotide
aaugguacaguuuccugug

SEQ ID NO: 2741893 - RNA, 19 nt, Artificial Sequence
  Description of Artificial Sequence: Synthetic oligonucleotide
uaugaauaaaauccucucu

SEQ ID NO: 2741894 - RNA, 19 nt, Artificial Sequence
  Description of Artificial Sequence: Synthetic oligonucleotide
agucaugcaaacaauggcc

SEQ ID NO: 2741895 - RNA, 19 nt, Artificial Sequence
  Description of Artificial Sequence: Synthetic oligonucleotide
auuuauagaaucuuacaau

SEQ ID NO: 2741896 - RNA, 19 nt, Artificial Sequence
  Description of Artificial Sequence: Synthetic oligonucleotide
aguuacugaagaaugcucc

SEQ ID NO: 2741897 - RNA, 19 nt, Artificial Sequence
  Description of Artificial Sequence: Synthetic oligonucleotide
uauauauauauaugugcug

SEQ ID NO: 2741898 - RNA, 19 nt, Artificial Sequence
  Description of Artificial Sequence: Synthetic oligonucleotide
aaugaaccaguacugucag

SEQ ID NO: 2741899 - RNA, 19 nt, Artificial Sequence
  Description of Artificial Sequence: Synthetic oligonucleotide
aguccuuuaaaacccagag

SEQ ID NO: 2741900 - RNA, 19 nt, Artificial Sequence
  Description of Artificial Sequence: Synthetic oligonucleotide
guucacuaaaacuggaucc

SEQ ID NO: 2741901 - RNA, 19 nt, Artificial Sequence
  Description of Artificial Sequence: Synthetic oligonucleotide
uuuacagucuacauaaguu

SEQ ID NO: 2741902 - RNA, 19 nt, Artificial Sequence
  Description of Artificial Sequence: Synthetic oligonucleotide
uaucaauaugauaauaaua

SEQ ID NO: 2741903 - RNA, 19 nt, Artificial Sequence
  Description of Artificial Sequence: Synthetic oligonucleotide
uguaaagggaacuaugaau

SEQ ID NO: 2741904 - RNA, 19 nt, Artificial Sequence
  Description of Artificial Sequence: Synthetic oligonucleotide
aaaauacugugauggaacu

SEQ ID NO: 2741905 - RNA, 19 nt, Artificial Sequence
  Description of Artificial Sequence: Synthetic oligonucleotide
auaugugcugcuuuuaaug

SEQ ID NO: 2741906 - RNA, 19 nt, Artificial Sequence
  Description of Artificial Sequence: Synthetic oligonucleotide
aguacugucagucaugcaa

SEQ ID NO: 2741907 - RNA, 19 nt, Artificial Sequence
  Description of Artificial Sequence: Synthetic oligonucleotide
aagaggguucacuaaaacu

SEQ ID NO: 2741908 - RNA, 19 nt, Artificial Sequence
  Description of Artificial Sequence: Synthetic oligonucleotide
uuaaaacccagagugaaga

SEQ ID NO: 2741909 - RNA, 19 nt, Artificial Sequence
  Description of Artificial Sequence: Synthetic oligonucleotide
uuuaaaacccagagugaag

SEQ ID NO: 2741910 - RNA, 19 nt, Artificial Sequence
  Description of Artificial Sequence: Synthetic oligonucleotide
auauauauauauaugugcu

SEQ ID NO: 2741911 - RNA, 19 nt, Artificial Sequence
  Description of Artificial Sequence: Synthetic oligonucleotide
uuucuauuucuucucauaa

SEQ ID NO: 2741912 - RNA, 19 nt, Artificial Sequence
  Description of Artificial Sequence: Synthetic oligonucleotide
aucugcaucucuuuggaag

SEQ ID NO: 2741913 - RNA, 19 nt, Artificial Sequence
  Description of Artificial Sequence: Synthetic oligonucleotide
aaacagaaagacucaggug

SEQ ID NO: 2741914 - RNA, 19 nt, Artificial Sequence
  Description of Artificial Sequence: Synthetic oligonucleotide
acauaaguuauuuaaguuu

SEQ ID NO: 2741915 - RNA, 19 nt, Artificial Sequence
  Description of Artificial Sequence: Synthetic oligonucleotide
auauauauauauaugaaua

SEQ ID NO: 2741916 - RNA, 19 nt, Artificial Sequence
  Description of Artificial Sequence: Synthetic oligonucleotide
cagguguuggcaaugaacc

SEQ ID NO: 2741917 - RNA, 19 nt, Artificial Sequence
  Description of Artificial Sequence: Synthetic oligonucleotide
gaagaguuacugaagaaug

SEQ ID NO: 2741918 - RNA, 19 nt, Artificial Sequence
  Description of Artificial Sequence: Synthetic oligonucleotide
acuaaaacuggauccuagg

SEQ ID NO: 2741919 - RNA, 19 nt, Artificial Sequence
  Description of Artificial Sequence: Synthetic oligonucleotide
uuaucaauaugauaauaau

SEQ ID NO: 2741920 - RNA, 19 nt, Artificial Sequence
  Description of Artificial Sequence: Synthetic oligonucleotide
aaguuauuuaaguuucuau

SEQ ID NO: 2741921 - RNA, 19 nt, Artificial Sequence
  Description of Artificial Sequence: Synthetic oligonucleotide
aaggaauccacauuaucaa

SEQ ID NO: 2741922 - RNA, 19 nt, Artificial Sequence
  Description of Artificial Sequence: Synthetic oligonucleotide
uccuaggcaauccagagaa

SEQ ID NO: 2741923 - RNA, 19 nt, Artificial Sequence
  Description of Artificial Sequence: Synthetic oligonucleotide
acaauaaaacauuuacagu

SEQ ID NO: 2741924 - RNA, 19 nt, Artificial Sequence
  Description of Artificial Sequence: Synthetic oligonucleotide
auauauauauauauaugug

SEQ ID NO: 2741925 - RNA, 19 nt, Artificial Sequence
  Description of Artificial Sequence: Synthetic oligonucleotide
agugaagaguuacugaaga

SEQ ID NO: 2741926 - RNA, 19 nt, Artificial Sequence
  Description of Artificial Sequence: Synthetic oligonucleotide
auauauauauauauauaug

SEQ ID NO: 2741927 - RNA, 19 nt, Artificial Sequence
  Description of Artificial Sequence: Synthetic oligonucleotide
agaggguucacuaaaacug

SEQ ID NO: 2741928 - RNA, 19 nt, Artificial Sequence
  Description of Artificial Sequence: Synthetic oligonucleotide
cuaagaaaggcuccgggag

SEQ ID NO: 2741929 - RNA, 19 nt, Artificial Sequence
  Description of Artificial Sequence: Synthetic oligonucleotide
uuauagaaucuuacaauaa

SEQ ID NO: 2741930 - RNA, 19 nt, Artificial Sequence
  Description of Artificial Sequence: Synthetic oligonucleotide
uaaugguacaguuuccugu

SEQ ID NO: 2741931 - RNA, 19 nt, Artificial Sequence
  Description of Artificial Sequence: Synthetic oligonucleotide
auuuacagucuacauaagu

SEQ ID NO: 2741932 - RNA, 19 nt, Artificial Sequence
  Description of Artificial Sequence: Synthetic oligonucleotide
aagcaaaacaaaucaccca

SEQ ID NO: 2741933 - RNA, 19 nt, Artificial Sequence
  Description of Artificial Sequence: Synthetic oligonucleotide
agaauauagcuuuauuuau

SEQ ID NO: 2741934 - RNA, 19 nt, Artificial Sequence
  Description of Artificial Sequence: Synthetic oligonucleotide
aaacaauggccccugggcu

SEQ ID NO: 2741935 - RNA, 19 nt, Artificial Sequence
  Description of Artificial Sequence: Synthetic oligonucleotide
ugauggaacuguaaaggga

SEQ ID NO: 2741936 - RNA, 19 nt, Artificial Sequence
  Description of Artificial Sequence: Synthetic oligonucleotide
aacuaugaauaaaauccuc

SEQ ID NO: 2741937 - RNA, 19 nt, Artificial Sequence
  Description of Artificial Sequence: Synthetic oligonucleotide
caaacaauggccccugggc

SEQ ID NO: 2741938 - RNA, 19 nt, Artificial Sequence
  Description of Artificial Sequence: Synthetic oligonucleotide
uuaucugcaucucuuugga

SEQ ID NO: 2741939 - RNA, 19 nt, Artificial Sequence
  Description of Artificial Sequence: Synthetic oligonucleotide
uuuuaaugguacaguuucc

SEQ ID NO: 2741940 - RNA, 19 nt, Artificial Sequence
  Description of Artificial Sequence: Synthetic oligonucleotide
agagugaagaguuacugaa

SEQ ID NO: 2741941 - RNA, 19 nt, Artificial Sequence
  Description of Artificial Sequence: Synthetic oligonucleotide
auuaucaauaugauaauaa

SEQ ID NO: 2741942 - RNA, 19 nt, Artificial Sequence
  Description of Artificial Sequence: Synthetic oligonucleotide
augaauaaaauccucucuu

SEQ ID NO: 2741943 - RNA, 19 nt, Artificial Sequence
  Description of Artificial Sequence: Synthetic oligonucleotide
uauauauaugugcugcuuu

SEQ ID NO: 2741944 - RNA, 19 nt, Artificial Sequence
  Description of Artificial Sequence: Synthetic oligonucleotide
auauauaugaauauauaua

SEQ ID NO: 2741945 - RNA, 19 nt, Artificial Sequence
  Description of Artificial Sequence: Synthetic oligonucleotide
ucagguguuggcaaugaac

SEQ ID NO: 2741946 - RNA, 19 nt, Artificial Sequence
  Description of Artificial Sequence: Synthetic oligonucleotide
uagcuuuauuuauagaauc

SEQ ID NO: 2741947 - RNA, 19 nt, Artificial Sequence
  Description of Artificial Sequence: Synthetic oligonucleotide
uuacagucuacauaaguua

SEQ ID NO: 2741948 - RNA, 19 nt, Artificial Sequence
  Description of Artificial Sequence: Synthetic oligonucleotide
gugauggaacuguaaaggg

SEQ ID NO: 2741949 - RNA, 19 nt, Artificial Sequence
  Description of Artificial Sequence: Synthetic oligonucleotide
gauccuaggcaauccagag

SEQ ID NO: 2741950 - RNA, 19 nt, Artificial Sequence
  Description of Artificial Sequence: Synthetic oligonucleotide
gucuacauaaguuauuuaa

SEQ ID NO: 2741951 - RNA, 19 nt, Artificial Sequence
  Description of Artificial Sequence: Synthetic oligonucleotide
aggcaauccagagaagucc

SEQ ID NO: 2741952 - RNA, 19 nt, Artificial Sequence
  Description of Artificial Sequence: Synthetic oligonucleotide
uauauauauaugugcugcu

SEQ ID NO: 2741953 - RNA, 19 nt, Artificial Sequence
  Description of Artificial Sequence: Synthetic oligonucleotide
uuuaaugguacaguuuccu

SEQ ID NO: 2741954 - RNA, 19 nt, Artificial Sequence
  Description of Artificial Sequence: Synthetic oligonucleotide
auccacauuaucaauauga

SEQ ID NO: 2741955 - RNA, 19 nt, Artificial Sequence
  Description of Artificial Sequence: Synthetic oligonucleotide
uacauaaguuauuuaaguu

SEQ ID NO: 2741956 - RNA, 19 nt, Artificial Sequence
  Description of Artificial Sequence: Synthetic oligonucleotide
ucucauaacaccugaguua

SEQ ID NO: 2741957 - RNA, 19 nt, Artificial Sequence
  Description of Artificial Sequence: Synthetic oligonucleotide
uugcaaagcaaaacaaauc

SEQ ID NO: 2741958 - RNA, 19 nt, Artificial Sequence
  Description of Artificial Sequence: Synthetic oligonucleotide
uuaaugguacaguuuccug

SEQ ID NO: 2741959 - RNA, 19 nt, Artificial Sequence
  Description of Artificial Sequence: Synthetic oligonucleotide
aaguuucuauuucuucuca

SEQ ID NO: 2741960 - RNA, 19 nt, Artificial Sequence
  Description of Artificial Sequence: Synthetic oligonucleotide
uucucauaacaccugaguu

SEQ ID NO: 2741961 - RNA, 19 nt, Artificial Sequence
  Description of Artificial Sequence: Synthetic oligonucleotide
aacaauggccccugggcug

SEQ ID NO: 2741962 - RNA, 19 nt, Artificial Sequence
  Description of Artificial Sequence: Synthetic oligonucleotide
ugaagaguuacugaagaau

SEQ ID NO: 2741963 - RNA, 19 nt, Artificial Sequence
  Description of Artificial Sequence: Synthetic oligonucleotide
uaaguuucuauuucuucuc

SEQ ID NO: 2741964 - RNA, 19 nt, Artificial Sequence
  Description of Artificial Sequence: Synthetic oligonucleotide
cuauuucuucucauaacac

SEQ ID NO: 2741965 - RNA, 19 nt, Artificial Sequence
  Description of Artificial Sequence: Synthetic oligonucleotide
ucugcaucucuuuggaaga

SEQ ID NO: 2741966 - RNA, 19 nt, Artificial Sequence
  Description of Artificial Sequence: Synthetic oligonucleotide
aagggaacuaugaauaaaa

SEQ ID NO: 2741967 - RNA, 19 nt, Artificial Sequence
  Description of Artificial Sequence: Synthetic oligonucleotide
uacagucuacauaaguuau

SEQ ID NO: 2741968 - RNA, 19 nt, Artificial Sequence
  Description of Artificial Sequence: Synthetic oligonucleotide
auuucuucucauaacaccu

SEQ ID NO: 2741969 - RNA, 19 nt, Artificial Sequence
  Description of Artificial Sequence: Synthetic oligonucleotide
acuaugaauaaaauccucu

SEQ ID NO: 2741970 - RNA, 19 nt, Artificial Sequence
  Description of Artificial Sequence: Synthetic oligonucleotide
uuuggaagaggguucacua

SEQ ID NO: 2741971 - RNA, 19 nt, Artificial Sequence
  Description of Artificial Sequence: Synthetic oligonucleotide
acugugauggaacuguaaa

SEQ ID NO: 2741972 - RNA, 19 nt, Artificial Sequence
  Description of Artificial Sequence: Synthetic oligonucleotide
auauauauauauauaugaa

SEQ ID NO: 2741973 - RNA, 19 nt, Artificial Sequence
  Description of Artificial Sequence: Synthetic oligonucleotide
aaaacccagagugaagagu

SEQ ID NO: 2741974 - RNA, 19 nt, Artificial Sequence
  Description of Artificial Sequence: Synthetic oligonucleotide
aaagacucagguguuggca

SEQ ID NO: 2741975 - RNA, 19 nt, Artificial Sequence
  Description of Artificial Sequence: Synthetic oligonucleotide
acuaagaaaggcuccggga

SEQ ID NO: 2741976 - RNA, 19 nt, Artificial Sequence
  Description of Artificial Sequence: Synthetic oligonucleotide
cagaauauagcuuuauuua

SEQ ID NO: 2741977 - RNA, 19 nt, Artificial Sequence
  Description of Artificial Sequence: Synthetic oligonucleotide
uaacaccugaguuauuuaa

SEQ ID NO: 2741978 - RNA, 19 nt, Artificial Sequence
  Description of Artificial Sequence: Synthetic oligonucleotide
ucuucucauaacaccugag

SEQ ID NO: 2741979 - RNA, 19 nt, Artificial Sequence
  Description of Artificial Sequence: Synthetic oligonucleotide
uguguguguguguauauau

SEQ ID NO: 2741980 - RNA, 19 nt, Artificial Sequence
  Description of Artificial Sequence: Synthetic oligonucleotide
uaagaaaggcuccgggaga

SEQ ID NO: 2741981 - RNA, 19 nt, Artificial Sequence
  Description of Artificial Sequence: Synthetic oligonucleotide
aacuguaaagggaacuaug

SEQ ID NO: 2741982 - RNA, 19 nt, Artificial Sequence
  Description of Artificial Sequence: Synthetic oligonucleotide
aaaacaaaucacccagcuu

SEQ ID NO: 2741983 - RNA, 19 nt, Artificial Sequence
  Description of Artificial Sequence: Synthetic oligonucleotide
cagucaugcaaacaauggc

SEQ ID NO: 2741984 - RNA, 19 nt, Artificial Sequence
  Description of Artificial Sequence: Synthetic oligonucleotide
uucuauuucuucucauaac

SEQ ID NO: 2741985 - RNA, 19 nt, Artificial Sequence
  Description of Artificial Sequence: Synthetic oligonucleotide
uucuucucauaacaccuga

SEQ ID NO: 2741986 - RNA, 19 nt, Artificial Sequence
  Description of Artificial Sequence: Synthetic oligonucleotide
uccacauuaucaauaugau

SEQ ID NO: 2741987 - RNA, 19 nt, Artificial Sequence
  Description of Artificial Sequence: Synthetic oligonucleotide
guuacugaagaaugcuccc

SEQ ID NO: 2741988 - RNA, 19 nt, Artificial Sequence
  Description of Artificial Sequence: Synthetic oligonucleotide
uggcaaugaaccaguacug

SEQ ID NO: 2741989 - RNA, 19 nt, Artificial Sequence
  Description of Artificial Sequence: Synthetic oligonucleotide
gaauauauauauauauaua

SEQ ID NO: 2741990 - RNA, 19 nt, Artificial Sequence
  Description of Artificial Sequence: Synthetic oligonucleotide
aagaaaggcuccgggagag

SEQ ID NO: 2741991 - RNA, 19 nt, Artificial Sequence
  Description of Artificial Sequence: Synthetic oligonucleotide
ugggcugugacugugggca

SEQ ID NO: 2741992 - RNA, 19 nt, Artificial Sequence
  Description of Artificial Sequence: Synthetic oligonucleotide
gaggguucacuaaaacugg

SEQ ID NO: 2741993 - RNA, 19 nt, Artificial Sequence
  Description of Artificial Sequence: Synthetic oligonucleotide
cugugauggaacuguaaag

SEQ ID NO: 2741994 - RNA, 19 nt, Artificial Sequence
  Description of Artificial Sequence: Synthetic oligonucleotide
agaaagacucagguguugg

SEQ ID NO: 2741995 - RNA, 19 nt, Artificial Sequence
  Description of Artificial Sequence: Synthetic oligonucleotide
auauauauauaugaauaua

SEQ ID NO: 2741996 - RNA, 19 nt, Artificial Sequence
  Description of Artificial Sequence: Synthetic oligonucleotide
caauaugauaauaauaaau

SEQ ID NO: 2741997 - RNA, 19 nt, Artificial Sequence
  Description of Artificial Sequence: Synthetic oligonucleotide
uucacuaaaacuggauccu

SEQ ID NO: 2741998 - RNA, 19 nt, Artificial Sequence
  Description of Artificial Sequence: Synthetic oligonucleotide
uggaagaggguucacuaaa

SEQ ID NO: 2741999 - RNA, 19 nt, Artificial Sequence
  Description of Artificial Sequence: Synthetic oligonucleotide
guaaagggaacuaugaaua

SEQ ID NO: 2742000 - RNA, 19 nt, Artificial Sequence
  Description of Artificial Sequence: Synthetic oligonucleotide
uggauccuaggcaauccag

SEQ ID NO: 2742001 - RNA, 19 nt, Artificial Sequence
  Description of Artificial Sequence: Synthetic oligonucleotide
acuggcuccccaaaguggc

SEQ ID NO: 2742002 - RNA, 19 nt, Artificial Sequence
  Description of Artificial Sequence: Synthetic oligonucleotide
aagacucagguguuggcaa

SEQ ID NO: 2742003 - RNA, 19 nt, Artificial Sequence
  Description of Artificial Sequence: Synthetic oligonucleotide
aaauacugugauggaacug

SEQ ID NO: 2742004 - RNA, 19 nt, Artificial Sequence
  Description of Artificial Sequence: Synthetic oligonucleotide
gaagaggguucacuaaaac

SEQ ID NO: 2742005 - RNA, 19 nt, Artificial Sequence
  Description of Artificial Sequence: Synthetic oligonucleotide
ugugcugcuuuuaauggua

SEQ ID NO: 2742006 - RNA, 19 nt, Artificial Sequence
  Description of Artificial Sequence: Synthetic oligonucleotide
cacuaaaacuggauccuag

SEQ ID NO: 2742007 - RNA, 19 nt, Artificial Sequence
  Description of Artificial Sequence: Synthetic oligonucleotide
auauauauauauauauaua

SEQ ID NO: 2742008 - RNA, 19 nt, Artificial Sequence
  Description of Artificial Sequence: Synthetic oligonucleotide
auagaaucuuacaauaaaa

SEQ ID NO: 2742009 - RNA, 19 nt, Artificial Sequence
  Description of Artificial Sequence: Synthetic oligonucleotide
uaaagggaacuaugaauaa

SEQ ID NO: 2742010 - RNA, 19 nt, Artificial Sequence
  Description of Artificial Sequence: Synthetic oligonucleotide
aacuggauccuaggcaauc

SEQ ID NO: 2742011 - RNA, 19 nt, Artificial Sequence
  Description of Artificial Sequence: Synthetic oligonucleotide
auauauaugugcugcuuuu

SEQ ID NO: 2742012 - RNA, 19 nt, Artificial Sequence
  Description of Artificial Sequence: Synthetic oligonucleotide
acuggauccuaggcaaucc

SEQ ID NO: 2742013 - RNA, 19 nt, Artificial Sequence
  Description of Artificial Sequence: Synthetic oligonucleotide
ucaugcaaacaauggcccc

SEQ ID NO: 2742014 - RNA, 19 nt, Artificial Sequence
  Description of Artificial Sequence: Synthetic oligonucleotide
cacuaagaaaggcuccggg

SEQ ID NO: 2742015 - RNA, 19 nt, Artificial Sequence
  Description of Artificial Sequence: Synthetic oligonucleotide
uauaugugcugcuuuuaau

SEQ ID NO: 2742016 - RNA, 19 nt, Artificial Sequence
  Description of Artificial Sequence: Synthetic oligonucleotide
gaaagacucagguguuggc

SEQ ID NO: 2742017 - RNA, 19 nt, Artificial Sequence
  Description of Artificial Sequence: Synthetic oligonucleotide
ugcuuuuaaugguacaguu

SEQ ID NO: 2742018 - RNA, 19 nt, Artificial Sequence
  Description of Artificial Sequence: Synthetic oligonucleotide
aaacccagagugaagaguu

SEQ ID NO: 2742019 - RNA, 19 nt, Artificial Sequence
  Description of Artificial Sequence: Synthetic oligonucleotide
ucucuuuggaagaggguuc

SEQ ID NO: 2742020 - RNA, 19 nt, Artificial Sequence
  Description of Artificial Sequence: Synthetic oligonucleotide
auauaugugcugcuuuuaa

SEQ ID NO: 2742021 - RNA, 19 nt, Artificial Sequence
  Description of Artificial Sequence: Synthetic oligonucleotide
guuauuuaaguuucuauuu

SEQ ID NO: 2742022 - RNA, 19 nt, Artificial Sequence
  Description of Artificial Sequence: Synthetic oligonucleotide
agaguuacugaagaaugcu

SEQ ID NO: 2742023 - RNA, 19 nt, Artificial Sequence
  Description of Artificial Sequence: Synthetic oligonucleotide
acuguaaagggaacuauga

SEQ ID NO: 2742024 - RNA, 19 nt, Artificial Sequence
  Description of Artificial Sequence: Synthetic oligonucleotide
accacuaagaaaggcuccg

SEQ ID NO: 2742025 - RNA, 19 nt, Artificial Sequence
  Description of Artificial Sequence: Synthetic oligonucleotide
aaggcuccgggagagacug

SEQ ID NO: 2742026 - RNA, 19 nt, Artificial Sequence
  Description of Artificial Sequence: Synthetic oligonucleotide
uuacugaagaaugcucccc

SEQ ID NO: 2742027 - RNA, 19 nt, Artificial Sequence
  Description of Artificial Sequence: Synthetic oligonucleotide
cuaaggaauccacauuauc

SEQ ID NO: 2742028 - RNA, 19 nt, Artificial Sequence
  Description of Artificial Sequence: Synthetic oligonucleotide
uacagaauauagcuuuauu

SEQ ID NO: 2742029 - RNA, 19 nt, Artificial Sequence
  Description of Artificial Sequence: Synthetic oligonucleotide
acauuaucaauaugauaau

SEQ ID NO: 2742030 - RNA, 19 nt, Artificial Sequence
  Description of Artificial Sequence: Synthetic oligonucleotide
aaguggcuaaggaauccac

SEQ ID NO: 2742031 - RNA, 19 nt, Artificial Sequence
  Description of Artificial Sequence: Synthetic oligonucleotide
aauccagagaaguccuuua

SEQ ID NO: 2742032 - RNA, 19 nt, Artificial Sequence
  Description of Artificial Sequence: Synthetic oligonucleotide
acaccugaguuauuuaaaa

SEQ ID NO: 2742033 - RNA, 19 nt, Artificial Sequence
  Description of Artificial Sequence: Synthetic oligonucleotide
auagcuuuauuuauagaau

SEQ ID NO: 2742034 - RNA, 19 nt, Artificial Sequence
  Description of Artificial Sequence: Synthetic oligonucleotide
cuacauaaguuauuuaagu

SEQ ID NO: 2742035 - RNA, 19 nt, Artificial Sequence
  Description of Artificial Sequence: Synthetic oligonucleotide
uccagagaaguccuuuaaa

SEQ ID NO: 2742036 - RNA, 19 nt, Artificial Sequence
  Description of Artificial Sequence: Synthetic oligonucleotide
gucaugcaaacaauggccc

SEQ ID NO: 2742037 - RNA, 19 nt, Artificial Sequence
  Description of Artificial Sequence: Synthetic oligonucleotide
uaaguuauuuaaguuucua

SEQ ID NO: 2742038 - RNA, 19 nt, Artificial Sequence
  Description of Artificial Sequence: Synthetic oligonucleotide
auauauauaugaauauaua

SEQ ID NO: 2742039 - RNA, 19 nt, Artificial Sequence
  Description of Artificial Sequence: Synthetic oligonucleotide
auauagcuuuauuuauaga

SEQ ID NO: 2742040 - RNA, 19 nt, Artificial Sequence
  Description of Artificial Sequence: Synthetic oligonucleotide
guauauauauauauauaua

SEQ ID NO: 2742041 - RNA, 19 nt, Artificial Sequence
  Description of Artificial Sequence: Synthetic oligonucleotide
augaauauauauauauaua

SEQ ID NO: 2742042 - RNA, 19 nt, Artificial Sequence
  Description of Artificial Sequence: Synthetic oligonucleotide
uaggcaauccagagaaguc

SEQ ID NO: 2742043 - RNA, 19 nt, Artificial Sequence
  Description of Artificial Sequence: Synthetic oligonucleotide
auaaaacauuuacagucua

SEQ ID NO: 2742044 - RNA, 19 nt, Artificial Sequence
  Description of Artificial Sequence: Synthetic oligonucleotide
agagacuggcuccccaaag

SEQ ID NO: 2742045 - RNA, 19 nt, Artificial Sequence
  Description of Artificial Sequence: Synthetic oligonucleotide
agacuggcuccccaaagug

SEQ ID NO: 2742046 - RNA, 19 nt, Artificial Sequence
  Description of Artificial Sequence: Synthetic oligonucleotide
ugguacaguuuccuguggu

SEQ ID NO: 2742047 - RNA, 19 nt, Artificial Sequence
  Description of Artificial Sequence: Synthetic oligonucleotide
gagugaagaguuacugaag

SEQ ID NO: 2742048 - RNA, 19 nt, Artificial Sequence
  Description of Artificial Sequence: Synthetic oligonucleotide
gacugugggcaccacuaag

SEQ ID NO: 2742049 - RNA, 19 nt, Artificial Sequence
  Description of Artificial Sequence: Synthetic oligonucleotide
gaauauagcuuuauuuaua

SEQ ID NO: 2742050 - RNA, 19 nt, Artificial Sequence
  Description of Artificial Sequence: Synthetic oligonucleotide
ugcaucucuuuggaagagg

SEQ ID NO: 2742051 - RNA, 19 nt, Artificial Sequence
  Description of Artificial Sequence: Synthetic oligonucleotide
ugucagucaugcaaacaau

SEQ ID NO: 2742052 - RNA, 19 nt, Artificial Sequence
  Description of Artificial Sequence: Synthetic oligonucleotide
gucagucaugcaaacaaug

SEQ ID NO: 2742053 - RNA, 19 nt, Artificial Sequence
  Description of Artificial Sequence: Synthetic oligonucleotide
gguucacuaaaacuggauc

SEQ ID NO: 2742054 - RNA, 19 nt, Artificial Sequence
  Description of Artificial Sequence: Synthetic oligonucleotide
cugucagucaugcaaacaa

SEQ ID NO: 2742055 - RNA, 19 nt, Artificial Sequence
  Description of Artificial Sequence: Synthetic oligonucleotide
acccagagugaagaguuac

SEQ ID NO: 2742056 - RNA, 19 nt, Artificial Sequence
  Description of Artificial Sequence: Synthetic oligonucleotide
auaugaauauauauauaua

SEQ ID NO: 2742057 - RNA, 19 nt, Artificial Sequence
  Description of Artificial Sequence: Synthetic oligonucleotide
caaaguggcuaaggaaucc

SEQ ID NO: 2742058 - RNA, 19 nt, Artificial Sequence
  Description of Artificial Sequence: Synthetic oligonucleotide
uacaguuuccugugguaaa

SEQ ID NO: 2742059 - RNA, 19 nt, Artificial Sequence
  Description of Artificial Sequence: Synthetic oligonucleotide
aacaccugaguuauuuaaa

SEQ ID NO: 2742060 - RNA, 19 nt, Artificial Sequence
  Description of Artificial Sequence: Synthetic oligonucleotide
guuggcaaugaaccaguac

SEQ ID NO: 2742061 - RNA, 19 nt, Artificial Sequence
  Description of Artificial Sequence: Synthetic oligonucleotide
gguguuggcaaugaaccag

SEQ ID NO: 2742062 - RNA, 19 nt, Artificial Sequence
  Description of Artificial Sequence: Synthetic oligonucleotide
ugacgugugugugugugug

SEQ ID NO: 2742063 - RNA, 19 nt, Artificial Sequence
  Description of Artificial Sequence: Synthetic oligonucleotide
augguacaguuuccugugg

SEQ ID NO: 2742064 - RNA, 19 nt, Artificial Sequence
  Description of Artificial Sequence: Synthetic oligonucleotide
gaaguccuuuaaaacccag

SEQ ID NO: 2742065 - RNA, 19 nt, Artificial Sequence
  Description of Artificial Sequence: Synthetic oligonucleotide
gaauccacauuaucaauau

SEQ ID NO: 2742066 - RNA, 19 nt, Artificial Sequence
  Description of Artificial Sequence: Synthetic oligonucleotide
caccacuaagaaaggcucc

SEQ ID NO: 2742067 - RNA, 19 nt, Artificial Sequence
  Description of Artificial Sequence: Synthetic oligonucleotide
uuggaagaggguucacuaa

SEQ ID NO: 2742068 - RNA, 19 nt, Artificial Sequence
  Description of Artificial Sequence: Synthetic oligonucleotide
uccgggagagacuggcucc

SEQ ID NO: 2742069 - RNA, 19 nt, Artificial Sequence
  Description of Artificial Sequence: Synthetic oligonucleotide
augugcugcuuuuaauggu

SEQ ID NO: 2742070 - RNA, 19 nt, Artificial Sequence
  Description of Artificial Sequence: Synthetic oligonucleotide
gcugcuuuuaaugguacag

SEQ ID NO: 2742071 - RNA, 19 nt, Artificial Sequence
  Description of Artificial Sequence: Synthetic oligonucleotide
aaguccuuuaaaacccaga

SEQ ID NO: 2742072 - RNA, 19 nt, Artificial Sequence
  Description of Artificial Sequence: Synthetic oligonucleotide
gaacuaugaauaaaauccu

SEQ ID NO: 2742073 - RNA, 19 nt, Artificial Sequence
  Description of Artificial Sequence: Synthetic oligonucleotide
guuucuauuucuucucaua

SEQ ID NO: 2742074 - RNA, 19 nt, Artificial Sequence
  Description of Artificial Sequence: Synthetic oligonucleotide
gaaaggcuccgggagagac

SEQ ID NO: 2742075 - RNA, 19 nt, Artificial Sequence
  Description of Artificial Sequence: Synthetic oligonucleotide
ugcaaacaauggccccugg

SEQ ID NO: 2742076 - RNA, 19 nt, Artificial Sequence
  Description of Artificial Sequence: Synthetic oligonucleotide
uacugugauggaacuguaa

SEQ ID NO: 2742077 - RNA, 19 nt, Artificial Sequence
  Description of Artificial Sequence: Synthetic oligonucleotide
uauauaugugcugcuuuua

SEQ ID NO: 2742078 - RNA, 19 nt, Artificial Sequence
  Description of Artificial Sequence: Synthetic oligonucleotide
auauauauaugugcugcuu

SEQ ID NO: 2742079 - RNA, 19 nt, Artificial Sequence
  Description of Artificial Sequence: Synthetic oligonucleotide
uuacagaauauagcuuuau

SEQ ID NO: 2742080 - RNA, 19 nt, Artificial Sequence
  Description of Artificial Sequence: Synthetic oligonucleotide
uguguguguguguguauau

SEQ ID NO: 2742081 - RNA, 19 nt, Artificial Sequence
  Description of Artificial Sequence: Synthetic oligonucleotide
auauaugaauauauauaua

SEQ ID NO: 2742082 - RNA, 19 nt, Artificial Sequence
  Description of Artificial Sequence: Synthetic oligonucleotide
aacaaaucacccagcuuau

SEQ ID NO: 2742083 - RNA, 19 nt, Artificial Sequence
  Description of Artificial Sequence: Synthetic oligonucleotide
gcaucucuuuggaagaggg

SEQ ID NO: 2742084 - RNA, 19 nt, Artificial Sequence
  Description of Artificial Sequence: Synthetic oligonucleotide
gaaccaguacugucaguca

SEQ ID NO: 2742085 - RNA, 19 nt, Artificial Sequence
  Description of Artificial Sequence: Synthetic oligonucleotide
auaaguuauuuaaguuucu

SEQ ID NO: 2742086 - RNA, 19 nt, Artificial Sequence
  Description of Artificial Sequence: Synthetic oligonucleotide
gcaaacaauggccccuggg

SEQ ID NO: 2742087 - RNA, 19 nt, Artificial Sequence
  Description of Artificial Sequence: Synthetic oligonucleotide
auaacaccugaguuauuua

SEQ ID NO: 2742088 - RNA, 19 nt, Artificial Sequence
  Description of Artificial Sequence: Synthetic oligonucleotide
ggcuaaggaauccacauua

SEQ ID NO: 2742089 - RNA, 19 nt, Artificial Sequence
  Description of Artificial Sequence: Synthetic oligonucleotide
guguauauauauauauaua

SEQ ID NO: 2742090 - RNA, 19 nt, Artificial Sequence
  Description of Artificial Sequence: Synthetic oligonucleotide
ugugggcaccacuaagaaa

SEQ ID NO: 2742091 - RNA, 19 nt, Artificial Sequence
  Description of Artificial Sequence: Synthetic oligonucleotide
auccuaggcaauccagaga

SEQ ID NO: 2742092 - RNA, 19 nt, Artificial Sequence
  Description of Artificial Sequence: Synthetic oligonucleotide
uacugucagucaugcaaac

SEQ ID NO: 2742093 - RNA, 19 nt, Artificial Sequence
  Description of Artificial Sequence: Synthetic oligonucleotide
cagagugaagaguuacuga

SEQ ID NO: 2742094 - RNA, 19 nt, Artificial Sequence
  Description of Artificial Sequence: Synthetic oligonucleotide
acugugggcaccacuaaga

SEQ ID NO: 2742095 - RNA, 19 nt, Artificial Sequence
  Description of Artificial Sequence: Synthetic oligonucleotide
agguguuggcaaugaacca

SEQ ID NO: 2742096 - RNA, 19 nt, Artificial Sequence
  Description of Artificial Sequence: Synthetic oligonucleotide
auccagagaaguccuuuaa

SEQ ID NO: 2742097 - RNA, 19 nt, Artificial Sequence
  Description of Artificial Sequence: Synthetic oligonucleotide
auggaacuguaaagggaac

SEQ ID NO: 2742098 - RNA, 19 nt, Artificial Sequence
  Description of Artificial Sequence: Synthetic oligonucleotide
ugugugugugugugugugu

SEQ ID NO: 2742099 - RNA, 19 nt, Artificial Sequence
  Description of Artificial Sequence: Synthetic oligonucleotide
acccagcuuaucugcaucu

SEQ ID NO: 2742100 - RNA, 19 nt, Artificial Sequence
  Description of Artificial Sequence: Synthetic oligonucleotide
agucuacauaaguuauuua

SEQ ID NO: 2742101 - RNA, 19 nt, Artificial Sequence
  Description of Artificial Sequence: Synthetic oligonucleotide
gcuuaucugcaucucuuug

SEQ ID NO: 2742102 - RNA, 19 nt, Artificial Sequence
  Description of Artificial Sequence: Synthetic oligonucleotide
acaaaucacccagcuuauc

SEQ ID NO: 2742103 - RNA, 19 nt, Artificial Sequence
  Description of Artificial Sequence: Synthetic oligonucleotide
gugugugugugugugugug

SEQ ID NO: 2742104 - RNA, 19 nt, Artificial Sequence
  Description of Artificial Sequence: Synthetic oligonucleotide
uggcuaaggaauccacauu

SEQ ID NO: 2742105 - RNA, 19 nt, Artificial Sequence
  Description of Artificial Sequence: Synthetic oligonucleotide
cuguaaagggaacuaugaa

SEQ ID NO: 2742106 - RNA, 19 nt, Artificial Sequence
  Description of Artificial Sequence: Synthetic oligonucleotide
gugaagaguuacugaagaa

SEQ ID NO: 2742107 - RNA, 19 nt, Artificial Sequence
  Description of Artificial Sequence: Synthetic oligonucleotide
aguggcuaaggaauccaca

SEQ ID NO: 2742108 - RNA, 19 nt, Artificial Sequence
  Description of Artificial Sequence: Synthetic oligonucleotide
acgugugugugugugugug

SEQ ID NO: 2742109 - RNA, 19 nt, Artificial Sequence
  Description of Artificial Sequence: Synthetic oligonucleotide
cuucucauaacaccugagu

SEQ ID NO: 2742110 - RNA, 19 nt, Artificial Sequence
  Description of Artificial Sequence: Synthetic oligonucleotide
cuccccaaaguggcuaagg

SEQ ID NO: 2742111 - RNA, 19 nt, Artificial Sequence
  Description of Artificial Sequence: Synthetic oligonucleotide
ugacugugggcaccacuaa

SEQ ID NO: 2742112 - RNA, 19 nt, Artificial Sequence
  Description of Artificial Sequence: Synthetic oligonucleotide
gcaaagcaaaacaaaucac

SEQ ID NO: 2742113 - RNA, 19 nt, Artificial Sequence
  Description of Artificial Sequence: Synthetic oligonucleotide
guguguauauauauauaua

SEQ ID NO: 2742114 - RNA, 19 nt, Artificial Sequence
  Description of Artificial Sequence: Synthetic oligonucleotide
agcuuaucugcaucucuuu

SEQ ID NO: 2742115 - RNA, 19 nt, Artificial Sequence
  Description of Artificial Sequence: Synthetic oligonucleotide
uguguguguguguguguau

SEQ ID NO: 2742116 - RNA, 19 nt, Artificial Sequence
  Description of Artificial Sequence: Synthetic oligonucleotide
ucacuaaaacuggauccua

SEQ ID NO: 2742117 - RNA, 19 nt, Artificial Sequence
  Description of Artificial Sequence: Synthetic oligonucleotide
gacucagguguuggcaaug

SEQ ID NO: 2742118 - RNA, 19 nt, Artificial Sequence
  Description of Artificial Sequence: Synthetic oligonucleotide
auggccccugggcugugac

SEQ ID NO: 2742119 - RNA, 19 nt, Artificial Sequence
  Description of Artificial Sequence: Synthetic oligonucleotide
uguuggcaaugaaccagua

SEQ ID NO: 2742120 - RNA, 19 nt, Artificial Sequence
  Description of Artificial Sequence: Synthetic oligonucleotide
acaguuuccugugguaaaa

SEQ ID NO: 2742121 - RNA, 19 nt, Artificial Sequence
  Description of Artificial Sequence: Synthetic oligonucleotide
guggcuaaggaauccacau

SEQ ID NO: 2742122 - RNA, 19 nt, Artificial Sequence
  Description of Artificial Sequence: Synthetic oligonucleotide
aaaggcuccgggagagacu

SEQ ID NO: 2742123 - RNA, 19 nt, Artificial Sequence
  Description of Artificial Sequence: Synthetic oligonucleotide
cuccgggagagacuggcuc

SEQ ID NO: 2742124 - RNA, 19 nt, Artificial Sequence
  Description of Artificial Sequence: Synthetic oligonucleotide
cuaggcaauccagagaagu

SEQ ID NO: 2742125 - RNA, 19 nt, Artificial Sequence
  Description of Artificial Sequence: Synthetic oligonucleotide
ucacccagcuuaucugcau

SEQ ID NO: 2742126 - RNA, 19 nt, Artificial Sequence
  Description of Artificial Sequence: Synthetic oligonucleotide
accaguacugucagucaug

SEQ ID NO: 2742127 - RNA, 19 nt, Artificial Sequence
  Description of Artificial Sequence: Synthetic oligonucleotide
cucauaacaccugaguuau

SEQ ID NO: 2742128 - RNA, 19 nt, Artificial Sequence
  Description of Artificial Sequence: Synthetic oligonucleotide
guacugucagucaugcaaa

SEQ ID NO: 2742129 - RNA, 19 nt, Artificial Sequence
  Description of Artificial Sequence: Synthetic oligonucleotide
cagaaagacucagguguug

SEQ ID NO: 2742130 - RNA, 19 nt, Artificial Sequence
  Description of Artificial Sequence: Synthetic oligonucleotide
ccagagugaagaguuacug

SEQ ID NO: 2742131 - RNA, 19 nt, Artificial Sequence
  Description of Artificial Sequence: Synthetic oligonucleotide
agggaacuaugaauaaaau

SEQ ID NO: 2742132 - RNA, 19 nt, Artificial Sequence
  Description of Artificial Sequence: Synthetic oligonucleotide
agacucagguguuggcaau

SEQ ID NO: 2742133 - RNA, 19 nt, Artificial Sequence
  Description of Artificial Sequence: Synthetic oligonucleotide
cugggcugugacugugggc

SEQ ID NO: 2742134 - RNA, 19 nt, Artificial Sequence
  Description of Artificial Sequence: Synthetic oligonucleotide
ccaaaguggcuaaggaauc

SEQ ID NO: 2742135 - RNA, 19 nt, Artificial Sequence
  Description of Artificial Sequence: Synthetic oligonucleotide
guccuuuaaaacccagagu

SEQ ID NO: 2742136 - RNA, 19 nt, Artificial Sequence
  Description of Artificial Sequence: Synthetic oligonucleotide
cauaacaccugaguuauuu

SEQ ID NO: 2742137 - RNA, 19 nt, Artificial Sequence
  Description of Artificial Sequence: Synthetic oligonucleotide
ccaguacugucagucaugc

SEQ ID NO: 2742138 - RNA, 19 nt, Artificial Sequence
  Description of Artificial Sequence: Synthetic oligonucleotide
augaaccaguacugucagu

SEQ ID NO: 2742139 - RNA, 19 nt, Artificial Sequence
  Description of Artificial Sequence: Synthetic oligonucleotide
cugcaucucuuuggaagag

SEQ ID NO: 2742140 - RNA, 19 nt, Artificial Sequence
  Description of Artificial Sequence: Synthetic oligonucleotide
cacccagcuuaucugcauc

SEQ ID NO: 2742141 - RNA, 19 nt, Artificial Sequence
  Description of Artificial Sequence: Synthetic oligonucleotide
acucagguguuggcaauga

SEQ ID NO: 2742142 - RNA, 19 nt, Artificial Sequence
  Description of Artificial Sequence: Synthetic oligonucleotide
cugcugacgugugugugug

SEQ ID NO: 2742143 - RNA, 19 nt, Artificial Sequence
  Description of Artificial Sequence: Synthetic oligonucleotide
aaacuggauccuaggcaau

SEQ ID NO: 2742144 - RNA, 19 nt, Artificial Sequence
  Description of Artificial Sequence: Synthetic oligonucleotide
gugacugugggcaccacua

SEQ ID NO: 2742145 - RNA, 19 nt, Artificial Sequence
  Description of Artificial Sequence: Synthetic oligonucleotide
cucuuuggaagaggguuca

SEQ ID NO: 2742146 - RNA, 19 nt, Artificial Sequence
  Description of Artificial Sequence: Synthetic oligonucleotide
gaacuguaaagggaacuau

SEQ ID NO: 2742147 - RNA, 19 nt, Artificial Sequence
  Description of Artificial Sequence: Synthetic oligonucleotide
gcaccacuaagaaaggcuc

SEQ ID NO: 2742148 - RNA, 19 nt, Artificial Sequence
  Description of Artificial Sequence: Synthetic oligonucleotide
gagagacuggcuccccaaa

SEQ ID NO: 2742149 - RNA, 19 nt, Artificial Sequence
  Description of Artificial Sequence: Synthetic oligonucleotide
ucuuuggaagaggguucac

SEQ ID NO: 2742150 - RNA, 19 nt, Artificial Sequence
  Description of Artificial Sequence: Synthetic oligonucleotide
acagucuacauaaguuauu

SEQ ID NO: 2742151 - RNA, 19 nt, Artificial Sequence
  Description of Artificial Sequence: Synthetic oligonucleotide
gcugacgugugugugugug

SEQ ID NO: 2742152 - RNA, 19 nt, Artificial Sequence
  Description of Artificial Sequence: Synthetic oligonucleotide
aggguucacuaaaacugga

SEQ ID NO: 2742153 - RNA, 19 nt, Artificial Sequence
  Description of Artificial Sequence: Synthetic oligonucleotide
ggaacuguaaagggaacua

SEQ ID NO: 2742154 - RNA, 19 nt, Artificial Sequence
  Description of Artificial Sequence: Synthetic oligonucleotide
guguguguauauauauaua

SEQ ID NO: 2742155 - RNA, 19 nt, Artificial Sequence
  Description of Artificial Sequence: Synthetic oligonucleotide
ggauccuaggcaauccaga

SEQ ID NO: 2742156 - RNA, 19 nt, Artificial Sequence
  Description of Artificial Sequence: Synthetic oligonucleotide
ucauaacaccugaguuauu

SEQ ID NO: 2742157 - RNA, 19 nt, Artificial Sequence
  Description of Artificial Sequence: Synthetic oligonucleotide
cugugggcaccacuaagaa

SEQ ID NO: 2742158 - RNA, 19 nt, Artificial Sequence
  Description of Artificial Sequence: Synthetic oligonucleotide
gguacaguuuccuguggua

SEQ ID NO: 2742159 - RNA, 19 nt, Artificial Sequence
  Description of Artificial Sequence: Synthetic oligonucleotide
cccaaaguggcuaaggaau

SEQ ID NO: 2742160 - RNA, 19 nt, Artificial Sequence
  Description of Artificial Sequence: Synthetic oligonucleotide
gugcugcuuuuaaugguac

SEQ ID NO: 2742161 - RNA, 19 nt, Artificial Sequence
  Description of Artificial Sequence: Synthetic oligonucleotide
cuuuggaagaggguucacu

SEQ ID NO: 2742162 - RNA, 19 nt, Artificial Sequence
  Description of Artificial Sequence: Synthetic oligonucleotide
guguguguguguauauaua

SEQ ID NO: 2742163 - RNA, 19 nt, Artificial Sequence
  Description of Artificial Sequence: Synthetic oligonucleotide
cagucuacauaaguuauuu

SEQ ID NO: 2742164 - RNA, 19 nt, Artificial Sequence
  Description of Artificial Sequence: Synthetic oligonucleotide
guguguguguguguguaua

SEQ ID NO: 2742165 - RNA, 19 nt, Artificial Sequence
  Description of Artificial Sequence: Synthetic oligonucleotide
gugugugugugugugugua

SEQ ID NO: 2742166 - RNA, 19 nt, Artificial Sequence
  Description of Artificial Sequence: Synthetic oligonucleotide
uggcuccccaaaguggcua

SEQ ID NO: 2742167 - RNA, 19 nt, Artificial Sequence
  Description of Artificial Sequence: Synthetic oligonucleotide
ugcugacgugugugugugu

SEQ ID NO: 2742168 - RNA, 19 nt, Artificial Sequence
  Description of Artificial Sequence: Synthetic oligonucleotide
guguuggcaaugaaccagu

SEQ ID NO: 2742169 - RNA, 19 nt, Artificial Sequence
  Description of Artificial Sequence: Synthetic oligonucleotide
cugcuuuuaaugguacagu

SEQ ID NO: 2742170 - RNA, 19 nt, Artificial Sequence
  Description of Artificial Sequence: Synthetic oligonucleotide
ggaagaggguucacuaaaa

SEQ ID NO: 2742171 - RNA, 19 nt, Artificial Sequence
  Description of Artificial Sequence: Synthetic oligonucleotide
ccacuaagaaaggcuccgg

SEQ ID NO: 2742172 - RNA, 19 nt, Artificial Sequence
  Description of Artificial Sequence: Synthetic oligonucleotide
ccacauuaucaauaugaua

SEQ ID NO: 2742173 - RNA, 19 nt, Artificial Sequence
  Description of Artificial Sequence: Synthetic oligonucleotide
gcuuuauuuauagaaucuu

SEQ ID NO: 2742174 - RNA, 19 nt, Artificial Sequence
  Description of Artificial Sequence: Synthetic oligonucleotide
ggagagacuggcuccccaa

SEQ ID NO: 2742175 - RNA, 19 nt, Artificial Sequence
  Description of Artificial Sequence: Synthetic oligonucleotide
caucucuuuggaagagggu

SEQ ID NO: 2742176 - RNA, 19 nt, Artificial Sequence
  Description of Artificial Sequence: Synthetic oligonucleotide
auacugugauggaacugua

SEQ ID NO: 2742177 - RNA, 19 nt, Artificial Sequence
  Description of Artificial Sequence: Synthetic oligonucleotide
gacgugugugugugugugu

SEQ ID NO: 2742178 - RNA, 19 nt, Artificial Sequence
  Description of Artificial Sequence: Synthetic oligonucleotide
guguguguguguguauaua

SEQ ID NO: 2742179 - RNA, 19 nt, Artificial Sequence
  Description of Artificial Sequence: Synthetic oligonucleotide
cagcuuaucugcaucucuu

SEQ ID NO: 2742180 - RNA, 19 nt, Artificial Sequence
  Description of Artificial Sequence: Synthetic oligonucleotide
gggcaccacuaagaaaggc

SEQ ID NO: 2742181 - RNA, 19 nt, Artificial Sequence
  Description of Artificial Sequence: Synthetic oligonucleotide
ccuaggcaauccagagaag

SEQ ID NO: 2742182 - RNA, 19 nt, Artificial Sequence
  Description of Artificial Sequence: Synthetic oligonucleotide
cucagguguuggcaaugaa

SEQ ID NO: 2742183 - RNA, 19 nt, Artificial Sequence
  Description of Artificial Sequence: Synthetic oligonucleotide
caguacugucagucaugca

SEQ ID NO: 2742184 - RNA, 19 nt, Artificial Sequence
  Description of Artificial Sequence: Synthetic oligonucleotide
ggcaauccagagaaguccu

SEQ ID NO: 2742185 - RNA, 19 nt, Artificial Sequence
  Description of Artificial Sequence: Synthetic oligonucleotide
gggagagacuggcucccca

SEQ ID NO: 2742186 - RNA, 19 nt, Artificial Sequence
  Description of Artificial Sequence: Synthetic oligonucleotide
ggcugugacugugggcacc

SEQ ID NO: 2742187 - RNA, 19 nt, Artificial Sequence
  Description of Artificial Sequence: Synthetic oligonucleotide
gcuuuuaaugguacaguuu

SEQ ID NO: 2742188 - RNA, 19 nt, Artificial Sequence
  Description of Artificial Sequence: Synthetic oligonucleotide
caauccagagaaguccuuu

SEQ ID NO: 2742189 - RNA, 19 nt, Artificial Sequence
  Description of Artificial Sequence: Synthetic oligonucleotide
cccugggcugugacugugg

SEQ ID NO: 2742190 - RNA, 19 nt, Artificial Sequence
  Description of Artificial Sequence: Synthetic oligonucleotide
cugacgugugugugugugu

SEQ ID NO: 2742191 - RNA, 19 nt, Artificial Sequence
  Description of Artificial Sequence: Synthetic oligonucleotide
gcugugacugugggcacca

SEQ ID NO: 2742192 - RNA, 19 nt, Artificial Sequence
  Description of Artificial Sequence: Synthetic oligonucleotide
ggcuccccaaaguggcuaa

SEQ ID NO: 2742193 - RNA, 19 nt, Artificial Sequence
  Description of Artificial Sequence: Synthetic oligonucleotide
ccgggagagacuggcuccc

SEQ ID NO: 2742194 - RNA, 19 nt, Artificial Sequence
  Description of Artificial Sequence: Synthetic oligonucleotide
ccagcuuaucugcaucucu

SEQ ID NO: 2742195 - RNA, 19 nt, Artificial Sequence
  Description of Artificial Sequence: Synthetic oligonucleotide
ggguucacuaaaacuggau

SEQ ID NO: 2742196 - RNA, 19 nt, Artificial Sequence
  Description of Artificial Sequence: Synthetic oligonucleotide
gcuaaggaauccacauuau

SEQ ID NO: 2742197 - RNA, 19 nt, Artificial Sequence
  Description of Artificial Sequence: Synthetic oligonucleotide
gcuccccaaaguggcuaag

SEQ ID NO: 2742198 - RNA, 19 nt, Artificial Sequence
  Description of Artificial Sequence: Synthetic oligonucleotide
gggcugugacugugggcac

SEQ ID NO: 2742199 - RNA, 19 nt, Artificial Sequence
  Description of Artificial Sequence: Synthetic oligonucleotide
cccagcuuaucugcaucuc

SEQ ID NO: 2742200 - RNA, 19 nt, Artificial Sequence
  Description of Artificial Sequence: Synthetic oligonucleotide
ccugcugacgugugugugu

SEQ ID NO: 2742201 - RNA, 19 nt, Artificial Sequence
  Description of Artificial Sequence: Synthetic oligonucleotide
cccugcugacgugugugug

SEQ ID NO: 2742202 - RNA, 19 nt, Artificial Sequence
  Description of Artificial Sequence: Synthetic oligonucleotide
cccagagugaagaguuacu

SEQ ID NO: 2742203 - RNA, 19 nt, Artificial Sequence
  Description of Artificial Sequence: Synthetic oligonucleotide
cuggcuccccaaaguggcu

SEQ ID NO: 2742204 - RNA, 19 nt, Artificial Sequence
  Description of Artificial Sequence: Synthetic oligonucleotide
ccccugggcugugacugug

SEQ ID NO: 2742205 - RNA, 19 nt, Artificial Sequence
  Description of Artificial Sequence: Synthetic oligonucleotide
gcaauccagagaaguccuu

SEQ ID NO: 2742206 - RNA, 19 nt, Artificial Sequence
  Description of Artificial Sequence: Synthetic oligonucleotide
cgugugugugugugugugu

SEQ ID NO: 2742207 - RNA, 19 nt, Artificial Sequence
  Description of Artificial Sequence: Synthetic oligonucleotide
cgggagagacuggcucccc

SEQ ID NO: 2742208 - RNA, 19 nt, Artificial Sequence
  Description of Artificial Sequence: Synthetic oligonucleotide
gcuccgggagagacuggcu

SEQ ID NO: 2742209 - RNA, 19 nt, Artificial Sequence
  Description of Artificial Sequence: Synthetic oligonucleotide
ccccugcugacgugugugu

SEQ ID NO: 2742210 - RNA, 19 nt, Artificial Sequence
  Description of Artificial Sequence: Synthetic oligonucleotide
aaagacugguccuuguccg

SEQ ID NO: 2742211 - RNA, 19 nt, Artificial Sequence
  Description of Artificial Sequence: Synthetic oligonucleotide
auaggcgauguccucaccc

SEQ ID NO: 2742212 - RNA, 19 nt, Artificial Sequence
  Description of Artificial Sequence: Synthetic oligonucleotide
ugggcgugaacuuauaggc

SEQ ID NO: 2742213 - RNA, 19 nt, Artificial Sequence
  Description of Artificial Sequence: Synthetic oligonucleotide
gaacuuauaggcgaugucc

SEQ ID NO: 2742214 - RNA, 19 nt, Artificial Sequence
  Description of Artificial Sequence: Synthetic oligonucleotide
uguuucacagccugcacag

SEQ ID NO: 2742215 - RNA, 19 nt, Artificial Sequence
  Description of Artificial Sequence: Synthetic oligonucleotide
uggcuuuuccacacgaggg

SEQ ID NO: 2742216 - RNA, 19 nt, Artificial Sequence
  Description of Artificial Sequence: Synthetic oligonucleotide
uugggcgugaacuuauagg

SEQ ID NO: 2742217 - RNA, 19 nt, Artificial Sequence
  Description of Artificial Sequence: Synthetic oligonucleotide
uugaccagaacagugcggg

SEQ ID NO: 2742218 - RNA, 19 nt, Artificial Sequence
  Description of Artificial Sequence: Synthetic oligonucleotide
uggugacacgggaagaugg

SEQ ID NO: 2742219 - RNA, 19 nt, Artificial Sequence
  Description of Artificial Sequence: Synthetic oligonucleotide
gaugcccacaccgugaccg

SEQ ID NO: 2742220 - RNA, 19 nt, Artificial Sequence
  Description of Artificial Sequence: Synthetic oligonucleotide
uucucgcucaccuggacgg

SEQ ID NO: 2742221 - RNA, 19 nt, Artificial Sequence
  Description of Artificial Sequence: Synthetic oligonucleotide
acggaugucuguuucacag

SEQ ID NO: 2742222 - RNA, 19 nt, Artificial Sequence
  Description of Artificial Sequence: Synthetic oligonucleotide
gauguccucacccuccggg

SEQ ID NO: 2742223 - RNA, 19 nt, Artificial Sequence
  Description of Artificial Sequence: Synthetic oligonucleotide
ugacaugccaaccccacug

SEQ ID NO: 2742224 - RNA, 19 nt, Artificial Sequence
  Description of Artificial Sequence: Synthetic oligonucleotide
augccaaccccacugcugc

SEQ ID NO: 2742225 - RNA, 19 nt, Artificial Sequence
  Description of Artificial Sequence: Synthetic oligonucleotide
ucuccaucggcguugacca

SEQ ID NO: 2742226 - RNA, 19 nt, Artificial Sequence
  Description of Artificial Sequence: Synthetic oligonucleotide
uccacacgaggguugaugg

SEQ ID NO: 2742227 - RNA, 19 nt, Artificial Sequence
  Description of Artificial Sequence: Synthetic oligonucleotide
ucaaugcucacgacagccg

SEQ ID NO: 2742228 - RNA, 19 nt, Artificial Sequence
  Description of Artificial Sequence: Synthetic oligonucleotide
gaaccugcccuccaggucc

SEQ ID NO: 2742229 - RNA, 19 nt, Artificial Sequence
  Description of Artificial Sequence: Synthetic oligonucleotide
ucggcguugaccagaacag

SEQ ID NO: 2742230 - RNA, 19 nt, Artificial Sequence
  Description of Artificial Sequence: Synthetic oligonucleotide
gagauggugacacgggaag

SEQ ID NO: 2742231 - RNA, 19 nt, Artificial Sequence
  Description of Artificial Sequence: Synthetic oligonucleotide
agguccaccucgucaaugc

SEQ ID NO: 2742232 - RNA, 19 nt, Artificial Sequence
  Description of Artificial Sequence: Synthetic oligonucleotide
uguggaugaccccugcgcc

SEQ ID NO: 2742233 - RNA, 19 nt, Artificial Sequence
  Description of Artificial Sequence: Synthetic oligonucleotide
accagaacagugcgggagc

SEQ ID NO: 2742234 - RNA, 19 nt, Artificial Sequence
  Description of Artificial Sequence: Synthetic oligonucleotide
uucuugaggcgcacgaacc

SEQ ID NO: 2742235 - RNA, 19 nt, Artificial Sequence
  Description of Artificial Sequence: Synthetic oligonucleotide
caaagacugguccuugucc

SEQ ID NO: 2742236 - RNA, 19 nt, Artificial Sequence
  Description of Artificial Sequence: Synthetic oligonucleotide
aucggcguugaccagaaca

SEQ ID NO: 2742237 - RNA, 19 nt, Artificial Sequence
  Description of Artificial Sequence: Synthetic oligonucleotide
uccgaggcguucuugaggc

SEQ ID NO: 2742238 - RNA, 19 nt, Artificial Sequence
  Description of Artificial Sequence: Synthetic oligonucleotide
acauacuugggcgugaacu

SEQ ID NO: 2742239 - RNA, 19 nt, Artificial Sequence
  Description of Artificial Sequence: Synthetic oligonucleotide
uccaccucgucaaugcuca

SEQ ID NO: 2742240 - RNA, 19 nt, Artificial Sequence
  Description of Artificial Sequence: Synthetic oligonucleotide
cuggcuuuuccacacgagg

SEQ ID NO: 2742241 - RNA, 19 nt, Artificial Sequence
  Description of Artificial Sequence: Synthetic oligonucleotide
ggaccuagucucuugaucc

SEQ ID NO: 2742242 - RNA, 19 nt, Artificial Sequence
  Description of Artificial Sequence: Synthetic oligonucleotide
acugguccuuguccgaggc

SEQ ID NO: 2742243 - RNA, 19 nt, Artificial Sequence
  Description of Artificial Sequence: Synthetic oligonucleotide
ugaccccugcgccagaugc

SEQ ID NO: 2742244 - RNA, 19 nt, Artificial Sequence
  Description of Artificial Sequence: Synthetic oligonucleotide
agucucuugauccuccagu

SEQ ID NO: 2742245 - RNA, 19 nt, Artificial Sequence
  Description of Artificial Sequence: Synthetic oligonucleotide
aacuuauaggcgauguccu

SEQ ID NO: 2742246 - RNA, 19 nt, Artificial Sequence
  Description of Artificial Sequence: Synthetic oligonucleotide
gagguggcccgagagaugg

SEQ ID NO: 2742247 - RNA, 19 nt, Artificial Sequence
  Description of Artificial Sequence: Synthetic oligonucleotide
ugacacgggaagaugggcu

SEQ ID NO: 2742248 - RNA, 19 nt, Artificial Sequence
  Description of Artificial Sequence: Synthetic oligonucleotide
caaugcucacgacagccgg

SEQ ID NO: 2742249 - RNA, 19 nt, Artificial Sequence
  Description of Artificial Sequence: Synthetic oligonucleotide
ucuugauccuccaguuccc

SEQ ID NO: 2742250 - RNA, 19 nt, Artificial Sequence
  Description of Artificial Sequence: Synthetic oligonucleotide
ugcugcuugagguggcccg

SEQ ID NO: 2742251 - RNA, 19 nt, Artificial Sequence
  Description of Artificial Sequence: Synthetic oligonucleotide
gucaaugcucacgacagcc

SEQ ID NO: 2742252 - RNA, 19 nt, Artificial Sequence
  Description of Artificial Sequence: Synthetic oligonucleotide
ucuggcuuuuccacacgag

SEQ ID NO: 2742253 - RNA, 19 nt, Artificial Sequence
  Description of Artificial Sequence: Synthetic oligonucleotide
guuccccaaagacuggucc

SEQ ID NO: 2742254 - RNA, 19 nt, Artificial Sequence
  Description of Artificial Sequence: Synthetic oligonucleotide
ugaacuuauaggcgauguc

SEQ ID NO: 2742255 - RNA, 19 nt, Artificial Sequence
  Description of Artificial Sequence: Synthetic oligonucleotide
cucacgacagccgggaccg

SEQ ID NO: 2742256 - RNA, 19 nt, Artificial Sequence
  Description of Artificial Sequence: Synthetic oligonucleotide
ucuugaggcgcacgaaccu

SEQ ID NO: 2742257 - RNA, 19 nt, Artificial Sequence
  Description of Artificial Sequence: Synthetic oligonucleotide
cacacgaggguugaugggg

SEQ ID NO: 2742258 - RNA, 19 nt, Artificial Sequence
  Description of Artificial Sequence: Synthetic oligonucleotide
cuguggaugaccccugcgc

SEQ ID NO: 2742259 - RNA, 19 nt, Artificial Sequence
  Description of Artificial Sequence: Synthetic oligonucleotide
uuauaggcgauguccucac

SEQ ID NO: 2742260 - RNA, 19 nt, Artificial Sequence
  Description of Artificial Sequence: Synthetic oligonucleotide
cuugcugcggccccggccc

SEQ ID NO: 2742261 - RNA, 19 nt, Artificial Sequence
  Description of Artificial Sequence: Synthetic oligonucleotide
accucgucaaugcucacga

SEQ ID NO: 2742262 - RNA, 19 nt, Artificial Sequence
  Description of Artificial Sequence: Synthetic oligonucleotide
uugaggcgcacgaaccugc

SEQ ID NO: 2742263 - RNA, 19 nt, Artificial Sequence
  Description of Artificial Sequence: Synthetic oligonucleotide
gacacgggaagaugggcug

SEQ ID NO: 2742264 - RNA, 19 nt, Artificial Sequence
  Description of Artificial Sequence: Synthetic oligonucleotide
uccccauucucgcucaccu

SEQ ID NO: 2742265 - RNA, 19 nt, Artificial Sequence
  Description of Artificial Sequence: Synthetic oligonucleotide
gaccagaacagugcgggag

SEQ ID NO: 2742266 - RNA, 19 nt, Artificial Sequence
  Description of Artificial Sequence: Synthetic oligonucleotide
aaugcucacgacagccggg

SEQ ID NO: 2742267 - RNA, 19 nt, Artificial Sequence
  Description of Artificial Sequence: Synthetic oligonucleotide
accgugaccgucuggccgg

SEQ ID NO: 2742268 - RNA, 19 nt, Artificial Sequence
  Description of Artificial Sequence: Synthetic oligonucleotide
guucuugaggcgcacgaac

SEQ ID NO: 2742269 - RNA, 19 nt, Artificial Sequence
  Description of Artificial Sequence: Synthetic oligonucleotide
uggagccugagccacugcu

SEQ ID NO: 2742270 - RNA, 19 nt, Artificial Sequence
  Description of Artificial Sequence: Synthetic oligonucleotide
cuuuuccacacgaggguug

SEQ ID NO: 2742271 - RNA, 19 nt, Artificial Sequence
  Description of Artificial Sequence: Synthetic oligonucleotide
ugauccuccaguuccccaa

SEQ ID NO: 2742272 - RNA, 19 nt, Artificial Sequence
  Description of Artificial Sequence: Synthetic oligonucleotide
cucuccaucggcguugacc

SEQ ID NO: 2742273 - RNA, 19 nt, Artificial Sequence
  Description of Artificial Sequence: Synthetic oligonucleotide
cuugggcgugaacuuauag

SEQ ID NO: 2742274 - RNA, 19 nt, Artificial Sequence
  Description of Artificial Sequence: Synthetic oligonucleotide
acugacaugccaaccccac

SEQ ID NO: 2742275 - RNA, 19 nt, Artificial Sequence
  Description of Artificial Sequence: Synthetic oligonucleotide
uagucucuugauccuccag

SEQ ID NO: 2742276 - RNA, 19 nt, Artificial Sequence
  Description of Artificial Sequence: Synthetic oligonucleotide
gagccuugggucuccuccg

SEQ ID NO: 2742277 - RNA, 19 nt, Artificial Sequence
  Description of Artificial Sequence: Synthetic oligonucleotide
gcgcgcaagacauacuugg

SEQ ID NO: 2742278 - RNA, 19 nt, Artificial Sequence
  Description of Artificial Sequence: Synthetic oligonucleotide
ugcucuggcuuuuccacac

SEQ ID NO: 2742279 - RNA, 19 nt, Artificial Sequence
  Description of Artificial Sequence: Synthetic oligonucleotide
gacaugccaaccccacugc

SEQ ID NO: 2742280 - RNA, 19 nt, Artificial Sequence
  Description of Artificial Sequence: Synthetic oligonucleotide
agaacagugcgggagcucu

SEQ ID NO: 2742281 - RNA, 19 nt, Artificial Sequence
  Description of Artificial Sequence: Synthetic oligonucleotide
uuguccgaggcguucuuga

SEQ ID NO: 2742282 - RNA, 19 nt, Artificial Sequence
  Description of Artificial Sequence: Synthetic oligonucleotide
ucuccuccgucuccagccg

SEQ ID NO: 2742283 - RNA, 19 nt, Artificial Sequence
  Description of Artificial Sequence: Synthetic oligonucleotide
cacaccgugaccgucuggc

SEQ ID NO: 2742284 - RNA, 19 nt, Artificial Sequence
  Description of Artificial Sequence: Synthetic oligonucleotide
gagcucuccccacagcccc

SEQ ID NO: 2742285 - RNA, 19 nt, Artificial Sequence
  Description of Artificial Sequence: Synthetic oligonucleotide
aagacugguccuuguccga

SEQ ID NO: 2742286 - RNA, 19 nt, Artificial Sequence
  Description of Artificial Sequence: Synthetic oligonucleotide
caugccaaccccacugcug

SEQ ID NO: 2742287 - RNA, 19 nt, Artificial Sequence
  Description of Artificial Sequence: Synthetic oligonucleotide
uccuccaguuccccaaaga

SEQ ID NO: 2742288 - RNA, 19 nt, Artificial Sequence
  Description of Artificial Sequence: Synthetic oligonucleotide
uuccccaaagacugguccu

SEQ ID NO: 2742289 - RNA, 19 nt, Artificial Sequence
  Description of Artificial Sequence: Synthetic oligonucleotide
ugaccgucuggccggcgcg

SEQ ID NO: 2742290 - RNA, 19 nt, Artificial Sequence
  Description of Artificial Sequence: Synthetic oligonucleotide
gagagauggugacacggga

SEQ ID NO: 2742291 - RNA, 19 nt, Artificial Sequence
  Description of Artificial Sequence: Synthetic oligonucleotide
ucaccuggacggaugucug

SEQ ID NO: 2742292 - RNA, 19 nt, Artificial Sequence
  Description of Artificial Sequence: Synthetic oligonucleotide
ugcugcgcgagccuugggu

SEQ ID NO: 2742293 - RNA, 19 nt, Artificial Sequence
  Description of Artificial Sequence: Synthetic oligonucleotide
uugagguggcccgagagau

SEQ ID NO: 2742294 - RNA, 19 nt, Artificial Sequence
  Description of Artificial Sequence: Synthetic oligonucleotide
cucgucaaugcucacgaca

SEQ ID NO: 2742295 - RNA, 19 nt, Artificial Sequence
  Description of Artificial Sequence: Synthetic oligonucleotide
uuccacacgaggguugaug

SEQ ID NO: 2742296 - RNA, 19 nt, Artificial Sequence
  Description of Artificial Sequence: Synthetic oligonucleotide
cgcaagacauacuugggcg

SEQ ID NO: 2742297 - RNA, 19 nt, Artificial Sequence
  Description of Artificial Sequence: Synthetic oligonucleotide
uuuuccacacgaggguuga

SEQ ID NO: 2742298 - RNA, 19 nt, Artificial Sequence
  Description of Artificial Sequence: Synthetic oligonucleotide
aggcgcacgaaccugcccu

SEQ ID NO: 2742299 - RNA, 19 nt, Artificial Sequence
  Description of Artificial Sequence: Synthetic oligonucleotide
gacagcuucagccucuccu

SEQ ID NO: 2742300 - RNA, 19 nt, Artificial Sequence
  Description of Artificial Sequence: Synthetic oligonucleotide
guccgaggcguucuugagg

SEQ ID NO: 2742301 - RNA, 19 nt, Artificial Sequence
  Description of Artificial Sequence: Synthetic oligonucleotide
guugaccagaacagugcgg

SEQ ID NO: 2742302 - RNA, 19 nt, Artificial Sequence
  Description of Artificial Sequence: Synthetic oligonucleotide
uaggcgauguccucacccu

SEQ ID NO: 2742303 - RNA, 19 nt, Artificial Sequence
  Description of Artificial Sequence: Synthetic oligonucleotide
acaccgugaccgucuggcc

SEQ ID NO: 2742304 - RNA, 19 nt, Artificial Sequence
  Description of Artificial Sequence: Synthetic oligonucleotide
ugguccuuguccgaggcgu

SEQ ID NO: 2742305 - RNA, 19 nt, Artificial Sequence
  Description of Artificial Sequence: Synthetic oligonucleotide
caccgugaccgucuggccg

SEQ ID NO: 2742306 - RNA, 19 nt, Artificial Sequence
  Description of Artificial Sequence: Synthetic oligonucleotide
uguccgaggcguucuugag

SEQ ID NO: 2742307 - RNA, 19 nt, Artificial Sequence
  Description of Artificial Sequence: Synthetic oligonucleotide
gacugguccuuguccgagg

SEQ ID NO: 2742308 - RNA, 19 nt, Artificial Sequence
  Description of Artificial Sequence: Synthetic oligonucleotide
cuuauaggcgauguccuca

SEQ ID NO: 2742309 - RNA, 19 nt, Artificial Sequence
  Description of Artificial Sequence: Synthetic oligonucleotide
agugcgggagcucucccca

SEQ ID NO: 2742310 - RNA, 19 nt, Artificial Sequence
  Description of Artificial Sequence: Synthetic oligonucleotide
uggaugaccccugcgccag

SEQ ID NO: 2742311 - RNA, 19 nt, Artificial Sequence
  Description of Artificial Sequence: Synthetic oligonucleotide
caagacauacuugggcgug

SEQ ID NO: 2742312 - RNA, 19 nt, Artificial Sequence
  Description of Artificial Sequence: Synthetic oligonucleotide
uggacggaugucuguuuca

SEQ ID NO: 2742313 - RNA, 19 nt, Artificial Sequence
  Description of Artificial Sequence: Synthetic oligonucleotide
uauaggcgauguccucacc

SEQ ID NO: 2742314 - RNA, 19 nt, Artificial Sequence
  Description of Artificial Sequence: Synthetic oligonucleotide
cccauucucgcucaccugg

SEQ ID NO: 2742315 - RNA, 19 nt, Artificial Sequence
  Description of Artificial Sequence: Synthetic oligonucleotide
uuccuccuccuccuccucc

SEQ ID NO: 2742316 - RNA, 19 nt, Artificial Sequence
  Description of Artificial Sequence: Synthetic oligonucleotide
ggcgugaacuuauaggcga

SEQ ID NO: 2742317 - RNA, 19 nt, Artificial Sequence
  Description of Artificial Sequence: Synthetic oligonucleotide
uccgucuccagccgccggc

SEQ ID NO: 2742318 - RNA, 19 nt, Artificial Sequence
  Description of Artificial Sequence: Synthetic oligonucleotide
uguccucacccuccgggac

SEQ ID NO: 2742319 - RNA, 19 nt, Artificial Sequence
  Description of Artificial Sequence: Synthetic oligonucleotide
cuguuucacagccugcaca

SEQ ID NO: 2742320 - RNA, 19 nt, Artificial Sequence
  Description of Artificial Sequence: Synthetic oligonucleotide
aagacauacuugggcguga

SEQ ID NO: 2742321 - RNA, 19 nt, Artificial Sequence
  Description of Artificial Sequence: Synthetic oligonucleotide
agccacugcugcgcgagcc

SEQ ID NO: 2742322 - RNA, 19 nt, Artificial Sequence
  Description of Artificial Sequence: Synthetic oligonucleotide
accccugcgccagaugccc

SEQ ID NO: 2742323 - RNA, 19 nt, Artificial Sequence
  Description of Artificial Sequence: Synthetic oligonucleotide
caccuccucuccaucggcg

SEQ ID NO: 2742324 - RNA, 19 nt, Artificial Sequence
  Description of Artificial Sequence: Synthetic oligonucleotide
uccaucggcguugaccaga

SEQ ID NO: 2742325 - RNA, 19 nt, Artificial Sequence
  Description of Artificial Sequence: Synthetic oligonucleotide
gggagcucuccccacagcc

SEQ ID NO: 2742326 - RNA, 19 nt, Artificial Sequence
  Description of Artificial Sequence: Synthetic oligonucleotide
agcugcucuggcuuuucca

SEQ ID NO: 2742327 - RNA, 19 nt, Artificial Sequence
  Description of Artificial Sequence: Synthetic oligonucleotide
uugggucuccuccgucucc

SEQ ID NO: 2742328 - RNA, 19 nt, Artificial Sequence
  Description of Artificial Sequence: Synthetic oligonucleotide
uccuccuccuccuccuccc

SEQ ID NO: 2742329 - RNA, 19 nt, Artificial Sequence
  Description of Artificial Sequence: Synthetic oligonucleotide
gcgccagaugcccacaccg

SEQ ID NO: 2742330 - RNA, 19 nt, Artificial Sequence
  Description of Artificial Sequence: Synthetic oligonucleotide
cacgaaccugcccuccagg

SEQ ID NO: 2742331 - RNA, 19 nt, Artificial Sequence
  Description of Artificial Sequence: Synthetic oligonucleotide
aggcgauguccucacccuc

SEQ ID NO: 2742332 - RNA, 19 nt, Artificial Sequence
  Description of Artificial Sequence: Synthetic oligonucleotide
uggccggcgcgcaagacau

SEQ ID NO: 2742333 - RNA, 19 nt, Artificial Sequence
  Description of Artificial Sequence: Synthetic oligonucleotide
acgaaccugcccuccaggu

SEQ ID NO: 2742334 - RNA, 19 nt, Artificial Sequence
  Description of Artificial Sequence: Synthetic oligonucleotide
ugaggcgcacgaaccugcc

SEQ ID NO: 2742335 - RNA, 19 nt, Artificial Sequence
  Description of Artificial Sequence: Synthetic oligonucleotide
uccuccgucuccagccgcc

SEQ ID NO: 2742336 - RNA, 19 nt, Artificial Sequence
  Description of Artificial Sequence: Synthetic oligonucleotide
accuagucucuugauccuc

SEQ ID NO: 2742337 - RNA, 19 nt, Artificial Sequence
  Description of Artificial Sequence: Synthetic oligonucleotide
ugcgccagaugcccacacc

SEQ ID NO: 2742338 - RNA, 19 nt, Artificial Sequence
  Description of Artificial Sequence: Synthetic oligonucleotide
gacuguggaugaccccugc

SEQ ID NO: 2742339 - RNA, 19 nt, Artificial Sequence
  Description of Artificial Sequence: Synthetic oligonucleotide
cuggacggaugucuguuuc

SEQ ID NO: 2742340 - RNA, 19 nt, Artificial Sequence
  Description of Artificial Sequence: Synthetic oligonucleotide
cuugauccuccaguucccc

SEQ ID NO: 2742341 - RNA, 19 nt, Artificial Sequence
  Description of Artificial Sequence: Synthetic oligonucleotide
gcgcaagacauacuugggc

SEQ ID NO: 2742342 - RNA, 19 nt, Artificial Sequence
  Description of Artificial Sequence: Synthetic oligonucleotide
caccucgucaaugcucacg

SEQ ID NO: 2742343 - RNA, 19 nt, Artificial Sequence
  Description of Artificial Sequence: Synthetic oligonucleotide
acaugccaaccccacugcu

SEQ ID NO: 2742344 - RNA, 19 nt, Artificial Sequence
  Description of Artificial Sequence: Synthetic oligonucleotide
agacugguccuuguccgag

SEQ ID NO: 2742345 - RNA, 19 nt, Artificial Sequence
  Description of Artificial Sequence: Synthetic oligonucleotide
ucgcucaccuggacggaug

SEQ ID NO: 2742346 - RNA, 19 nt, Artificial Sequence
  Description of Artificial Sequence: Synthetic oligonucleotide
uccgggaccuagucucuug

SEQ ID NO: 2742347 - RNA, 19 nt, Artificial Sequence
  Description of Artificial Sequence: Synthetic oligonucleotide
ccgugcuggagccugagcc

SEQ ID NO: 2742348 - RNA, 19 nt, Artificial Sequence
  Description of Artificial Sequence: Synthetic oligonucleotide
cuugaggcgcacgaaccug

SEQ ID NO: 2742349 - RNA, 19 nt, Artificial Sequence
  Description of Artificial Sequence: Synthetic oligonucleotide
gcuugagguggcccgagag

SEQ ID NO: 2742350 - RNA, 19 nt, Artificial Sequence
  Description of Artificial Sequence: Synthetic oligonucleotide
ccuagucucuugauccucc

SEQ ID NO: 2742351 - RNA, 19 nt, Artificial Sequence
  Description of Artificial Sequence: Synthetic oligonucleotide
auguccucacccuccggga

SEQ ID NO: 2742352 - RNA, 19 nt, Artificial Sequence
  Description of Artificial Sequence: Synthetic oligonucleotide
gcugcucuggcuuuuccac

SEQ ID NO: 2742353 - RNA, 19 nt, Artificial Sequence
  Description of Artificial Sequence: Synthetic oligonucleotide
ggugacacgggaagauggg

SEQ ID NO: 2742354 - RNA, 19 nt, Artificial Sequence
  Description of Artificial Sequence: Synthetic oligonucleotide
ccuccaguuccccaaagac

SEQ ID NO: 2742355 - RNA, 19 nt, Artificial Sequence
  Description of Artificial Sequence: Synthetic oligonucleotide
cuugagguggcccgagaga

SEQ ID NO: 2742356 - RNA, 19 nt, Artificial Sequence
  Description of Artificial Sequence: Synthetic oligonucleotide
acacgggaagaugggcugg

SEQ ID NO: 2742357 - RNA, 19 nt, Artificial Sequence
  Description of Artificial Sequence: Synthetic oligonucleotide
aguuccccaaagacugguc

SEQ ID NO: 2742358 - RNA, 19 nt, Artificial Sequence
  Description of Artificial Sequence: Synthetic oligonucleotide
ugaccagaacagugcggga

SEQ ID NO: 2742359 - RNA, 19 nt, Artificial Sequence
  Description of Artificial Sequence: Synthetic oligonucleotide
acugcugcgcgagccuugg

SEQ ID NO: 2742360 - RNA, 19 nt, Artificial Sequence
  Description of Artificial Sequence: Synthetic oligonucleotide
auggugacacgggaagaug

SEQ ID NO: 2742361 - RNA, 19 nt, Artificial Sequence
  Description of Artificial Sequence: Synthetic oligonucleotide
uggcccgagagauggugac

SEQ ID NO: 2742362 - RNA, 19 nt, Artificial Sequence
  Description of Artificial Sequence: Synthetic oligonucleotide
ggcguugaccagaacagug

SEQ ID NO: 2742363 - RNA, 19 nt, Artificial Sequence
  Description of Artificial Sequence: Synthetic oligonucleotide
gacggaugucuguuucaca

SEQ ID NO: 2742364 - RNA, 19 nt, Artificial Sequence
  Description of Artificial Sequence: Synthetic oligonucleotide
gacauacuugggcgugaac

SEQ ID NO: 2742365 - RNA, 19 nt, Artificial Sequence
  Description of Artificial Sequence: Synthetic oligonucleotide
agccgccggcgcuugcugc

SEQ ID NO: 2742366 - RNA, 19 nt, Artificial Sequence
  Description of Artificial Sequence: Synthetic oligonucleotide
agagauggugacacgggaa

SEQ ID NO: 2742367 - RNA, 19 nt, Artificial Sequence
  Description of Artificial Sequence: Synthetic oligonucleotide
gugacacgggaagaugggc

SEQ ID NO: 2742368 - RNA, 19 nt, Artificial Sequence
  Description of Artificial Sequence: Synthetic oligonucleotide
cagugcgggagcucucccc

SEQ ID NO: 2742369 - RNA, 19 nt, Artificial Sequence
  Description of Artificial Sequence: Synthetic oligonucleotide
agauggugacacgggaaga

SEQ ID NO: 2742370 - RNA, 19 nt, Artificial Sequence
  Description of Artificial Sequence: Synthetic oligonucleotide
guccucacccuccgggacc

SEQ ID NO: 2742371 - RNA, 19 nt, Artificial Sequence
  Description of Artificial Sequence: Synthetic oligonucleotide
uccuccccauucucgcuca

SEQ ID NO: 2742372 - RNA, 19 nt, Artificial Sequence
  Description of Artificial Sequence: Synthetic oligonucleotide
cuugggucuccuccgucuc

SEQ ID NO: 2742373 - RNA, 19 nt, Artificial Sequence
  Description of Artificial Sequence: Synthetic oligonucleotide
cauucucgcucaccuggac

SEQ ID NO: 2742374 - RNA, 19 nt, Artificial Sequence
  Description of Artificial Sequence: Synthetic oligonucleotide
ccgagagauggugacacgg

SEQ ID NO: 2742375 - RNA, 19 nt, Artificial Sequence
  Description of Artificial Sequence: Synthetic oligonucleotide
gugaccgucuggccggcgc

SEQ ID NO: 2742376 - RNA, 19 nt, Artificial Sequence
  Description of Artificial Sequence: Synthetic oligonucleotide
cguugaccagaacagugcg

SEQ ID NO: 2742377 - RNA, 19 nt, Artificial Sequence
  Description of Artificial Sequence: Synthetic oligonucleotide
gacagccgggaccggggcc

SEQ ID NO: 2742378 - RNA, 19 nt, Artificial Sequence
  Description of Artificial Sequence: Synthetic oligonucleotide
gcucacgacagccgggacc

SEQ ID NO: 2742379 - RNA, 19 nt, Artificial Sequence
  Description of Artificial Sequence: Synthetic oligonucleotide
gggaccuagucucuugauc

SEQ ID NO: 2742380 - RNA, 19 nt, Artificial Sequence
  Description of Artificial Sequence: Synthetic oligonucleotide
gggcgugaacuuauaggcg

SEQ ID NO: 2742381 - RNA, 19 nt, Artificial Sequence
  Description of Artificial Sequence: Synthetic oligonucleotide
ucacccuccgggaccuagu

SEQ ID NO: 2742382 - RNA, 19 nt, Artificial Sequence
  Description of Artificial Sequence: Synthetic oligonucleotide
gaggcgcacgaaccugccc

SEQ ID NO: 2742383 - RNA, 19 nt, Artificial Sequence
  Description of Artificial Sequence: Synthetic oligonucleotide
guggaugaccccugcgcca

SEQ ID NO: 2742384 - RNA, 19 nt, Artificial Sequence
  Description of Artificial Sequence: Synthetic oligonucleotide
uccuuguccgaggcguucu

SEQ ID NO: 2742385 - RNA, 19 nt, Artificial Sequence
  Description of Artificial Sequence: Synthetic oligonucleotide
gagccgcuucccgugcugg

SEQ ID NO: 2742386 - RNA, 19 nt, Artificial Sequence
  Description of Artificial Sequence: Synthetic oligonucleotide
gugaacuuauaggcgaugu

SEQ ID NO: 2742387 - RNA, 19 nt, Artificial Sequence
  Description of Artificial Sequence: Synthetic oligonucleotide
cuucccgugcuggagccug

SEQ ID NO: 2742388 - RNA, 19 nt, Artificial Sequence
  Description of Artificial Sequence: Synthetic oligonucleotide
gauggugacacgggaagau

SEQ ID NO: 2742389 - RNA, 19 nt, Artificial Sequence
  Description of Artificial Sequence: Synthetic oligonucleotide
cucuggcuuuuccacacga

SEQ ID NO: 2742390 - RNA, 19 nt, Artificial Sequence
  Description of Artificial Sequence: Synthetic oligonucleotide
ggccugcugggccaggcgg

SEQ ID NO: 2742391 - RNA, 19 nt, Artificial Sequence
  Description of Artificial Sequence: Synthetic oligonucleotide
cacgggaagaugggcuggg

SEQ ID NO: 2742392 - RNA, 19 nt, Artificial Sequence
  Description of Artificial Sequence: Synthetic oligonucleotide
augcucacgacagccggga

SEQ ID NO: 2742393 - RNA, 19 nt, Artificial Sequence
  Description of Artificial Sequence: Synthetic oligonucleotide
cacgacagccgggaccggg

SEQ ID NO: 2742394 - RNA, 19 nt, Artificial Sequence
  Description of Artificial Sequence: Synthetic oligonucleotide
cgagagauggugacacggg

SEQ ID NO: 2742395 - RNA, 19 nt, Artificial Sequence
  Description of Artificial Sequence: Synthetic oligonucleotide
ccacugacaugccaacccc

SEQ ID NO: 2742396 - RNA, 19 nt, Artificial Sequence
  Description of Artificial Sequence: Synthetic oligonucleotide
gcguugaccagaacagugc

SEQ ID NO: 2742397 - RNA, 19 nt, Artificial Sequence
  Description of Artificial Sequence: Synthetic oligonucleotide
gaccggggccugcugggcc

SEQ ID NO: 2742398 - RNA, 19 nt, Artificial Sequence
  Description of Artificial Sequence: Synthetic oligonucleotide
acgacagccgggaccgggg

SEQ ID NO: 2742399 - RNA, 19 nt, Artificial Sequence
  Description of Artificial Sequence: Synthetic oligonucleotide
auacuugggcgugaacuua

SEQ ID NO: 2742400 - RNA, 19 nt, Artificial Sequence
  Description of Artificial Sequence: Synthetic oligonucleotide
cuuguccgaggcguucuug

SEQ ID NO: 2742401 - RNA, 19 nt, Artificial Sequence
  Description of Artificial Sequence: Synthetic oligonucleotide
gccagaugcccacaccgug

SEQ ID NO: 2742402 - RNA, 19 nt, Artificial Sequence
  Description of Artificial Sequence: Synthetic oligonucleotide
cauacuugggcgugaacuu

SEQ ID NO: 2742403 - RNA, 19 nt, Artificial Sequence
  Description of Artificial Sequence: Synthetic oligonucleotide
gaccuagucucuugauccu

SEQ ID NO: 2742404 - RNA, 19 nt, Artificial Sequence
  Description of Artificial Sequence: Synthetic oligonucleotide
aggcgggagccgcuucccg

SEQ ID NO: 2742405 - RNA, 19 nt, Artificial Sequence
  Description of Artificial Sequence: Synthetic oligonucleotide
cccuccgggaccuagucuc

SEQ ID NO: 2742406 - RNA, 19 nt, Artificial Sequence
  Description of Artificial Sequence: Synthetic oligonucleotide
cuccucuccaucggcguug

SEQ ID NO: 2742407 - RNA, 19 nt, Artificial Sequence
  Description of Artificial Sequence: Synthetic oligonucleotide
acagccgggaccggggccu

SEQ ID NO: 2742408 - RNA, 19 nt, Artificial Sequence
  Description of Artificial Sequence: Synthetic oligonucleotide
gcgauguccucacccuccg

SEQ ID NO: 2742409 - RNA, 19 nt, Artificial Sequence
  Description of Artificial Sequence: Synthetic oligonucleotide
uccucacccuccgggaccu

SEQ ID NO: 2742410 - RNA, 19 nt, Artificial Sequence
  Description of Artificial Sequence: Synthetic oligonucleotide
uccccaaagacugguccuu

SEQ ID NO: 2742411 - RNA, 19 nt, Artificial Sequence
  Description of Artificial Sequence: Synthetic oligonucleotide
ggcgauguccucacccucc

SEQ ID NO: 2742412 - RNA, 19 nt, Artificial Sequence
  Description of Artificial Sequence: Synthetic oligonucleotide
ugcucacgacagccgggac

SEQ ID NO: 2742413 - RNA, 19 nt, Artificial Sequence
  Description of Artificial Sequence: Synthetic oligonucleotide
ccaaagacugguccuuguc

SEQ ID NO: 2742414 - RNA, 19 nt, Artificial Sequence
  Description of Artificial Sequence: Synthetic oligonucleotide
ugcuggagccugagccacu

SEQ ID NO: 2742415 - RNA, 19 nt, Artificial Sequence
  Description of Artificial Sequence: Synthetic oligonucleotide
cucacccuccgggaccuag

SEQ ID NO: 2742416 - RNA, 19 nt, Artificial Sequence
  Description of Artificial Sequence: Synthetic oligonucleotide
acccuccgggaccuagucu

SEQ ID NO: 2742417 - RNA, 19 nt, Artificial Sequence
  Description of Artificial Sequence: Synthetic oligonucleotide
cagcugcucuggcuuuucc

SEQ ID NO: 2742418 - RNA, 19 nt, Artificial Sequence
  Description of Artificial Sequence: Synthetic oligonucleotide
cugcucuggcuuuuccaca

SEQ ID NO: 2742419 - RNA, 19 nt, Artificial Sequence
  Description of Artificial Sequence: Synthetic oligonucleotide
gaccccugcgccagaugcc

SEQ ID NO: 2742420 - RNA, 19 nt, Artificial Sequence
  Description of Artificial Sequence: Synthetic oligonucleotide
ggacggaugucuguuucac

SEQ ID NO: 2742421 - RNA, 19 nt, Artificial Sequence
  Description of Artificial Sequence: Synthetic oligonucleotide
cucaccuggacggaugucu

SEQ ID NO: 2742422 - RNA, 19 nt, Artificial Sequence
  Description of Artificial Sequence: Synthetic oligonucleotide
gucucuugauccuccaguu

SEQ ID NO: 2742423 - RNA, 19 nt, Artificial Sequence
  Description of Artificial Sequence: Synthetic oligonucleotide
agacauacuugggcgugaa

SEQ ID NO: 2742424 - RNA, 19 nt, Artificial Sequence
  Description of Artificial Sequence: Synthetic oligonucleotide
cagguccaccucgucaaug

SEQ ID NO: 2742425 - RNA, 19 nt, Artificial Sequence
  Description of Artificial Sequence: Synthetic oligonucleotide
agccuugggucuccuccgu

SEQ ID NO: 2742426 - RNA, 19 nt, Artificial Sequence
  Description of Artificial Sequence: Synthetic oligonucleotide
gggaccggggccugcuggg

SEQ ID NO: 2742427 - RNA, 19 nt, Artificial Sequence
  Description of Artificial Sequence: Synthetic oligonucleotide
cuccccauucucgcucacc

SEQ ID NO: 2742428 - RNA, 19 nt, Artificial Sequence
  Description of Artificial Sequence: Synthetic oligonucleotide
cacugcugcgcgagccuug

SEQ ID NO: 2742429 - RNA, 19 nt, Artificial Sequence
  Description of Artificial Sequence: Synthetic oligonucleotide
ccacacgaggguugauggg

SEQ ID NO: 2742430 - RNA, 19 nt, Artificial Sequence
  Description of Artificial Sequence: Synthetic oligonucleotide
gguggcccgagagauggug

SEQ ID NO: 2742431 - RNA, 19 nt, Artificial Sequence
  Description of Artificial Sequence: Synthetic oligonucleotide
accuggacggaugucuguu

SEQ ID NO: 2742432 - RNA, 19 nt, Artificial Sequence
  Description of Artificial Sequence: Synthetic oligonucleotide
accggggccugcugggcca

SEQ ID NO: 2742433 - RNA, 19 nt, Artificial Sequence
  Description of Artificial Sequence: Synthetic oligonucleotide
uucccgugcuggagccuga

SEQ ID NO: 2742434 - RNA, 19 nt, Artificial Sequence
  Description of Artificial Sequence: Synthetic oligonucleotide
ccaguuccccaaagacugg

SEQ ID NO: 2742435 - RNA, 19 nt, Artificial Sequence
  Description of Artificial Sequence: Synthetic oligonucleotide
cuccgucuccagccgccgg

SEQ ID NO: 2742436 - RNA, 19 nt, Artificial Sequence
  Description of Artificial Sequence: Synthetic oligonucleotide
gaugucuguuucacagccu

SEQ ID NO: 2742437 - RNA, 19 nt, Artificial Sequence
  Description of Artificial Sequence: Synthetic oligonucleotide
gcucuggcuuuuccacacg

SEQ ID NO: 2742438 - RNA, 19 nt, Artificial Sequence
  Description of Artificial Sequence: Synthetic oligonucleotide
cuggccggcgcgcaagaca

SEQ ID NO: 2742439 - RNA, 19 nt, Artificial Sequence
  Description of Artificial Sequence: Synthetic oligonucleotide
uccucuccaucggcguuga

SEQ ID NO: 2742440 - RNA, 19 nt, Artificial Sequence
  Description of Artificial Sequence: Synthetic oligonucleotide
gcugcgcgagccuuggguc

SEQ ID NO: 2742441 - RNA, 19 nt, Artificial Sequence
  Description of Artificial Sequence: Synthetic oligonucleotide
ggagcucuccccacagccc

SEQ ID NO: 2742442 - RNA, 19 nt, Artificial Sequence
  Description of Artificial Sequence: Synthetic oligonucleotide
ucucgcucaccuggacgga

SEQ ID NO: 2742443 - RNA, 19 nt, Artificial Sequence
  Description of Artificial Sequence: Synthetic oligonucleotide
augcccacaccgugaccgu

SEQ ID NO: 2742444 - RNA, 19 nt, Artificial Sequence
  Description of Artificial Sequence: Synthetic oligonucleotide
gcccgagagauggugacac

SEQ ID NO: 2742445 - RNA, 19 nt, Artificial Sequence
  Description of Artificial Sequence: Synthetic oligonucleotide
gcacgaaccugcccuccag

SEQ ID NO: 2742446 - RNA, 19 nt, Artificial Sequence
  Description of Artificial Sequence: Synthetic oligonucleotide
ugccaaccccacugcugcu

SEQ ID NO: 2742447 - RNA, 19 nt, Artificial Sequence
  Description of Artificial Sequence: Synthetic oligonucleotide
cacccuccgggaccuaguc

SEQ ID NO: 2742448 - RNA, 19 nt, Artificial Sequence
  Description of Artificial Sequence: Synthetic oligonucleotide
gcaagacauacuugggcgu

SEQ ID NO: 2742449 - RNA, 19 nt, Artificial Sequence
  Description of Artificial Sequence: Synthetic oligonucleotide
gcguucuugaggcgcacga

SEQ ID NO: 2742450 - RNA, 19 nt, Artificial Sequence
  Description of Artificial Sequence: Synthetic oligonucleotide
cuccaucggcguugaccag

SEQ ID NO: 2742451 - RNA, 19 nt, Artificial Sequence
  Description of Artificial Sequence: Synthetic oligonucleotide
cugcgccagaugcccacac

SEQ ID NO: 2742452 - RNA, 19 nt, Artificial Sequence
  Description of Artificial Sequence: Synthetic oligonucleotide
ucccgugcuggagccugag

SEQ ID NO: 2742453 - RNA, 19 nt, Artificial Sequence
  Description of Artificial Sequence: Synthetic oligonucleotide
cgcgcaagacauacuuggg

SEQ ID NO: 2742454 - RNA, 19 nt, Artificial Sequence
  Description of Artificial Sequence: Synthetic oligonucleotide
ugcggccccggcccacuga

SEQ ID NO: 2742455 - RNA, 19 nt, Artificial Sequence
  Description of Artificial Sequence: Synthetic oligonucleotide
gcuugcugcggccccggcc

SEQ ID NO: 2742456 - RNA, 19 nt, Artificial Sequence
  Description of Artificial Sequence: Synthetic oligonucleotide
ccugagccacugcugcgcg

SEQ ID NO: 2742457 - RNA, 19 nt, Artificial Sequence
  Description of Artificial Sequence: Synthetic oligonucleotide
ccaaccccacugcugcugc

SEQ ID NO: 2742458 - RNA, 19 nt, Artificial Sequence
  Description of Artificial Sequence: Synthetic oligonucleotide
cuggagccugagccacugc

SEQ ID NO: 2742459 - RNA, 19 nt, Artificial Sequence
  Description of Artificial Sequence: Synthetic oligonucleotide
gagccacugcugcgcgagc

SEQ ID NO: 2742460 - RNA, 19 nt, Artificial Sequence
  Description of Artificial Sequence: Synthetic oligonucleotide
ugcgcgagccuugggucuc

SEQ ID NO: 2742461 - RNA, 19 nt, Artificial Sequence
  Description of Artificial Sequence: Synthetic oligonucleotide
cuuccuccuccuccuccuc

SEQ ID NO: 2742462 - RNA, 19 nt, Artificial Sequence
  Description of Artificial Sequence: Synthetic oligonucleotide
gggacuguggaugaccccu

SEQ ID NO: 2742463 - RNA, 19 nt, Artificial Sequence
  Description of Artificial Sequence: Synthetic oligonucleotide
cggaugucuguuucacagc

SEQ ID NO: 2742464 - RNA, 19 nt, Artificial Sequence
  Description of Artificial Sequence: Synthetic oligonucleotide
gaacagugcgggagcucuc

SEQ ID NO: 2742465 - RNA, 19 nt, Artificial Sequence
  Description of Artificial Sequence: Synthetic oligonucleotide
aaccugcccuccaggucca

SEQ ID NO: 2742466 - RNA, 19 nt, Artificial Sequence
  Description of Artificial Sequence: Synthetic oligonucleotide
cagaacagugcgggagcuc

SEQ ID NO: 2742467 - RNA, 19 nt, Artificial Sequence
  Description of Artificial Sequence: Synthetic oligonucleotide
agccgcuucccgugcugga

SEQ ID NO: 2742468 - RNA, 19 nt, Artificial Sequence
  Description of Artificial Sequence: Synthetic oligonucleotide
cugcuugagguggcccgag

SEQ ID NO: 2742469 - RNA, 19 nt, Artificial Sequence
  Description of Artificial Sequence: Synthetic oligonucleotide
ggggacuguggaugacccc

SEQ ID NO: 2742470 - RNA, 19 nt, Artificial Sequence
  Description of Artificial Sequence: Synthetic oligonucleotide
gaccgucuggccggcgcgc

SEQ ID NO: 2742471 - RNA, 19 nt, Artificial Sequence
  Description of Artificial Sequence: Synthetic oligonucleotide
gccgccggcgcuugcugcg

SEQ ID NO: 2742472 - RNA, 19 nt, Artificial Sequence
  Description of Artificial Sequence: Synthetic oligonucleotide
ggcccacugacaugccaac

SEQ ID NO: 2742473 - RNA, 19 nt, Artificial Sequence
  Description of Artificial Sequence: Synthetic oligonucleotide
ggcgcgcaagacauacuug

SEQ ID NO: 2742474 - RNA, 19 nt, Artificial Sequence
  Description of Artificial Sequence: Synthetic oligonucleotide
guggcccgagagaugguga

SEQ ID NO: 2742475 - RNA, 19 nt, Artificial Sequence
  Description of Artificial Sequence: Synthetic oligonucleotide
ucuggccggcgcgcaagac

SEQ ID NO: 2742476 - RNA, 19 nt, Artificial Sequence
  Description of Artificial Sequence: Synthetic oligonucleotide
gcgggagcucuccccacag

SEQ ID NO: 2742477 - RNA, 19 nt, Artificial Sequence
  Description of Artificial Sequence: Synthetic oligonucleotide
cugcccuccagguccaccu

SEQ ID NO: 2742478 - RNA, 19 nt, Artificial Sequence
  Description of Artificial Sequence: Synthetic oligonucleotide
cgaggcguucuugaggcgc

SEQ ID NO: 2742479 - RNA, 19 nt, Artificial Sequence
  Description of Artificial Sequence: Synthetic oligonucleotide
ccccggcccacugacaugc

SEQ ID NO: 2742480 - RNA, 19 nt, Artificial Sequence
  Description of Artificial Sequence: Synthetic oligonucleotide
uuuccacacgaggguugau

SEQ ID NO: 2742481 - RNA, 19 nt, Artificial Sequence
  Description of Artificial Sequence: Synthetic oligonucleotide
caggcgggagccgcuuccc

SEQ ID NO: 2742482 - RNA, 19 nt, Artificial Sequence
  Description of Artificial Sequence: Synthetic oligonucleotide
gcgggagccgcuucccgug

SEQ ID NO: 2742483 - RNA, 19 nt, Artificial Sequence
  Description of Artificial Sequence: Synthetic oligonucleotide
ggagccgcuucccgugcug

SEQ ID NO: 2742484 - RNA, 19 nt, Artificial Sequence
  Description of Artificial Sequence: Synthetic oligonucleotide
gcuggagccugagccacug

SEQ ID NO: 2742485 - RNA, 19 nt, Artificial Sequence
  Description of Artificial Sequence: Synthetic oligonucleotide
cccgagagauggugacacg

SEQ ID NO: 2742486 - RNA, 19 nt, Artificial Sequence
  Description of Artificial Sequence: Synthetic oligonucleotide
ucacgacagccgggaccgg

SEQ ID NO: 2742487 - RNA, 19 nt, Artificial Sequence
  Description of Artificial Sequence: Synthetic oligonucleotide
uugcugcggccccggccca

SEQ ID NO: 2742488 - RNA, 19 nt, Artificial Sequence
  Description of Artificial Sequence: Synthetic oligonucleotide
ugcccacaccgugaccguc

SEQ ID NO: 2742489 - RNA, 19 nt, Artificial Sequence
  Description of Artificial Sequence: Synthetic oligonucleotide
guccuuguccgaggcguuc

SEQ ID NO: 2742490 - RNA, 19 nt, Artificial Sequence
  Description of Artificial Sequence: Synthetic oligonucleotide
ggacuguggaugaccccug

SEQ ID NO: 2742491 - RNA, 19 nt, Artificial Sequence
  Description of Artificial Sequence: Synthetic oligonucleotide
ccaggcgggagccgcuucc

SEQ ID NO: 2742492 - RNA, 19 nt, Artificial Sequence
  Description of Artificial Sequence: Synthetic oligonucleotide
gccggcgcgcaagacauac

SEQ ID NO: 2742493 - RNA, 19 nt, Artificial Sequence
  Description of Artificial Sequence: Synthetic oligonucleotide
ccaccuccucuccaucggc

SEQ ID NO: 2742494 - RNA, 19 nt, Artificial Sequence
  Description of Artificial Sequence: Synthetic oligonucleotide
cugcugcgcgagccuuggg

SEQ ID NO: 2742495 - RNA, 19 nt, Artificial Sequence
  Description of Artificial Sequence: Synthetic oligonucleotide
cugacaugccaaccccacu

SEQ ID NO: 2742496 - RNA, 19 nt, Artificial Sequence
  Description of Artificial Sequence: Synthetic oligonucleotide
gccaaccccacugcugcug

SEQ ID NO: 2742497 - RNA, 19 nt, Artificial Sequence
  Description of Artificial Sequence: Synthetic oligonucleotide
gccugcugggccaggcggg

SEQ ID NO: 2742498 - RNA, 19 nt, Artificial Sequence
  Description of Artificial Sequence: Synthetic oligonucleotide
cucuccccacagccccagc

SEQ ID NO: 2742499 - RNA, 19 nt, Artificial Sequence
  Description of Artificial Sequence: Synthetic oligonucleotide
ggacagcuucagccucucc

SEQ ID NO: 2742500 - RNA, 19 nt, Artificial Sequence
  Description of Artificial Sequence: Synthetic oligonucleotide
ccgcuucccgugcuggagc

SEQ ID NO: 2742501 - RNA, 19 nt, Artificial Sequence
  Description of Artificial Sequence: Synthetic oligonucleotide
gccgcuucccgugcuggag

SEQ ID NO: 2742502 - RNA, 19 nt, Artificial Sequence
  Description of Artificial Sequence: Synthetic oligonucleotide
cugagccacugcugcgcga

SEQ ID NO: 2742503 - RNA, 19 nt, Artificial Sequence
  Description of Artificial Sequence: Synthetic oligonucleotide
cagccgccggcgcuugcug

SEQ ID NO: 2742504 - RNA, 19 nt, Artificial Sequence
  Description of Artificial Sequence: Synthetic oligonucleotide
cgucaaugcucacgacagc

SEQ ID NO: 2742505 - RNA, 19 nt, Artificial Sequence
  Description of Artificial Sequence: Synthetic oligonucleotide
gucuggccggcgcgcaaga

SEQ ID NO: 2742506 - RNA, 19 nt, Artificial Sequence
  Description of Artificial Sequence: Synthetic oligonucleotide
gcccacugacaugccaacc

SEQ ID NO: 2742507 - RNA, 19 nt, Artificial Sequence
  Description of Artificial Sequence: Synthetic oligonucleotide
gaugaccccugcgccagau

SEQ ID NO: 2742508 - RNA, 19 nt, Artificial Sequence
  Description of Artificial Sequence: Synthetic oligonucleotide
acuugggcgugaacuuaua

SEQ ID NO: 2742509 - RNA, 19 nt, Artificial Sequence
  Description of Artificial Sequence: Synthetic oligonucleotide
caucggcguugaccagaac

SEQ ID NO: 2742510 - RNA, 19 nt, Artificial Sequence
  Description of Artificial Sequence: Synthetic oligonucleotide
ggcgcuugcugcggccccg

SEQ ID NO: 2742511 - RNA, 19 nt, Artificial Sequence
  Description of Artificial Sequence: Synthetic oligonucleotide
ggcgcacgaaccugcccuc

SEQ ID NO: 2742512 - RNA, 19 nt, Artificial Sequence
  Description of Artificial Sequence: Synthetic oligonucleotide
caguuccccaaagacuggu

SEQ ID NO: 2742513 - RNA, 19 nt, Artificial Sequence
  Description of Artificial Sequence: Synthetic oligonucleotide
ccauucucgcucaccugga

SEQ ID NO: 2742514 - RNA, 19 nt, Artificial Sequence
  Description of Artificial Sequence: Synthetic oligonucleotide
cgugaacuuauaggcgaug

SEQ ID NO: 2742515 - RNA, 19 nt, Artificial Sequence
  Description of Artificial Sequence: Synthetic oligonucleotide
agccgggaccggggccugc

SEQ ID NO: 2742516 - RNA, 19 nt, Artificial Sequence
  Description of Artificial Sequence: Synthetic oligonucleotide
cugcgcgagccuugggucu

SEQ ID NO: 2742517 - RNA, 19 nt, Artificial Sequence
  Description of Artificial Sequence: Synthetic oligonucleotide
cugcugggccaggcgggag

SEQ ID NO: 2742518 - RNA, 19 nt, Artificial Sequence
  Description of Artificial Sequence: Synthetic oligonucleotide
ccccauucucgcucaccug

SEQ ID NO: 2742519 - RNA, 19 nt, Artificial Sequence
  Description of Artificial Sequence: Synthetic oligonucleotide
accgucuggccggcgcgca

SEQ ID NO: 2742520 - RNA, 19 nt, Artificial Sequence
  Description of Artificial Sequence: Synthetic oligonucleotide
cccugcgccagaugcccac

SEQ ID NO: 2742521 - RNA, 19 nt, Artificial Sequence
  Description of Artificial Sequence: Synthetic oligonucleotide
agcucuccccacagcccca

SEQ ID NO: 2742522 - RNA, 19 nt, Artificial Sequence
  Description of Artificial Sequence: Synthetic oligonucleotide
cgaaccugcccuccagguc

SEQ ID NO: 2742523 - RNA, 19 nt, Artificial Sequence
  Description of Artificial Sequence: Synthetic oligonucleotide
ccgaggcguucuugaggcg

SEQ ID NO: 2742524 - RNA, 19 nt, Artificial Sequence
  Description of Artificial Sequence: Synthetic oligonucleotide
gcugcuugagguggcccga

SEQ ID NO: 2742525 - RNA, 19 nt, Artificial Sequence
  Description of Artificial Sequence: Synthetic oligonucleotide
accugcccuccagguccac

SEQ ID NO: 2742526 - RNA, 19 nt, Artificial Sequence
  Description of Artificial Sequence: Synthetic oligonucleotide
cgggaccggggccugcugg

SEQ ID NO: 2742527 - RNA, 19 nt, Artificial Sequence
  Description of Artificial Sequence: Synthetic oligonucleotide
gcucuccccacagccccag

SEQ ID NO: 2742528 - RNA, 19 nt, Artificial Sequence
  Description of Artificial Sequence: Synthetic oligonucleotide
caccuggacggaugucugu

SEQ ID NO: 2742529 - RNA, 19 nt, Artificial Sequence
  Description of Artificial Sequence: Synthetic oligonucleotide
ccccaaagacugguccuug

SEQ ID NO: 2742530 - RNA, 19 nt, Artificial Sequence
  Description of Artificial Sequence: Synthetic oligonucleotide
ccuugggucuccuccgucu

SEQ ID NO: 2742531 - RNA, 19 nt, Artificial Sequence
  Description of Artificial Sequence: Synthetic oligonucleotide
ccacaccgugaccgucugg

SEQ ID NO: 2742532 - RNA, 19 nt, Artificial Sequence
  Description of Artificial Sequence: Synthetic oligonucleotide
ccuccuccuccuccucccc

SEQ ID NO: 2742533 - RNA, 19 nt, Artificial Sequence
  Description of Artificial Sequence: Synthetic oligonucleotide
ccaucggcguugaccagaa

SEQ ID NO: 2742534 - RNA, 19 nt, Artificial Sequence
  Description of Artificial Sequence: Synthetic oligonucleotide
ccgggaccuagucucuuga

SEQ ID NO: 2742535 - RNA, 19 nt, Artificial Sequence
  Description of Artificial Sequence: Synthetic oligonucleotide
gccuugggucuccuccguc

SEQ ID NO: 2742536 - RNA, 19 nt, Artificial Sequence
  Description of Artificial Sequence: Synthetic oligonucleotide
cccacaccgugaccgucug

SEQ ID NO: 2742537 - RNA, 19 nt, Artificial Sequence
  Description of Artificial Sequence: Synthetic oligonucleotide
ugcugcggccccggcccac

SEQ ID NO: 2742538 - RNA, 19 nt, Artificial Sequence
  Description of Artificial Sequence: Synthetic oligonucleotide
ccgucuccagccgccggcg

SEQ ID NO: 2742539 - RNA, 19 nt, Artificial Sequence
  Description of Artificial Sequence: Synthetic oligonucleotide
gcuuuuccacacgaggguu

SEQ ID NO: 2742540 - RNA, 19 nt, Artificial Sequence
  Description of Artificial Sequence: Synthetic oligonucleotide
cccgugcuggagccugagc

SEQ ID NO: 2742541 - RNA, 19 nt, Artificial Sequence
  Description of Artificial Sequence: Synthetic oligonucleotide
ccuccgucuccagccgccg

SEQ ID NO: 2742542 - RNA, 19 nt, Artificial Sequence
  Description of Artificial Sequence: Synthetic oligonucleotide
cgauguccucacccuccgg

SEQ ID NO: 2742543 - RNA, 19 nt, Artificial Sequence
  Description of Artificial Sequence: Synthetic oligonucleotide
ggcccgagagauggugaca

SEQ ID NO: 2742544 - RNA, 19 nt, Artificial Sequence
  Description of Artificial Sequence: Synthetic oligonucleotide
ggaccggggccugcugggc

SEQ ID NO: 2742545 - RNA, 19 nt, Artificial Sequence
  Description of Artificial Sequence: Synthetic oligonucleotide
ggcgggagccgcuucccgu

SEQ ID NO: 2742546 - RNA, 19 nt, Artificial Sequence
  Description of Artificial Sequence: Synthetic oligonucleotide
cugcggccccggcccacug

SEQ ID NO: 2742547 - RNA, 19 nt, Artificial Sequence
  Description of Artificial Sequence: Synthetic oligonucleotide
gcgcacgaaccugcccucc

SEQ ID NO: 2742548 - RNA, 19 nt, Artificial Sequence
  Description of Artificial Sequence: Synthetic oligonucleotide
ggccccggcccacugacau

SEQ ID NO: 2742549 - RNA, 19 nt, Artificial Sequence
  Description of Artificial Sequence: Synthetic oligonucleotide
cgacagccgggaccggggc

SEQ ID NO: 2742550 - RNA, 19 nt, Artificial Sequence
  Description of Artificial Sequence: Synthetic oligonucleotide
gccccggcccacugacaug

SEQ ID NO: 2742551 - RNA, 19 nt, Artificial Sequence
  Description of Artificial Sequence: Synthetic oligonucleotide
agguggcccgagagauggu

SEQ ID NO: 2742552 - RNA, 19 nt, Artificial Sequence
  Description of Artificial Sequence: Synthetic oligonucleotide
ccggcgcuugcugcggccc

SEQ ID NO: 2742553 - RNA, 19 nt, Artificial Sequence
  Description of Artificial Sequence: Synthetic oligonucleotide
ggaugaccccugcgccaga

SEQ ID NO: 2742554 - RNA, 19 nt, Artificial Sequence
  Description of Artificial Sequence: Synthetic oligonucleotide
gcgcuugcugcggccccgg

SEQ ID NO: 2742555 - RNA, 19 nt, Artificial Sequence
  Description of Artificial Sequence: Synthetic oligonucleotide
cccaaagacugguccuugu

SEQ ID NO: 2742556 - RNA, 19 nt, Artificial Sequence
  Description of Artificial Sequence: Synthetic oligonucleotide
ccaccucgucaaugcucac

SEQ ID NO: 2742557 - RNA, 19 nt, Artificial Sequence
  Description of Artificial Sequence: Synthetic oligonucleotide
cggcccacugacaugccaa

SEQ ID NO: 2742558 - RNA, 19 nt, Artificial Sequence
  Description of Artificial Sequence: Synthetic oligonucleotide
caaccccacugcugcugcu

SEQ ID NO: 2742559 - RNA, 19 nt, Artificial Sequence
  Description of Artificial Sequence: Synthetic oligonucleotide
gccccagcugcucuggcuu

SEQ ID NO: 2742560 - RNA, 19 nt, Artificial Sequence
  Description of Artificial Sequence: Synthetic oligonucleotide
ggggacagcuucagccucu

SEQ ID NO: 2742561 - RNA, 19 nt, Artificial Sequence
  Description of Artificial Sequence: Synthetic oligonucleotide
gcucaccuggacggauguc

SEQ ID NO: 2742562 - RNA, 19 nt, Artificial Sequence
  Description of Artificial Sequence: Synthetic oligonucleotide
cgggagcucuccccacagc

SEQ ID NO: 2742563 - RNA, 19 nt, Artificial Sequence
  Description of Artificial Sequence: Synthetic oligonucleotide
gcgagccuugggucuccuc

SEQ ID NO: 2742564 - RNA, 19 nt, Artificial Sequence
  Description of Artificial Sequence: Synthetic oligonucleotide
cucgcucaccuggacggau

SEQ ID NO: 2742565 - RNA, 19 nt, Artificial Sequence
  Description of Artificial Sequence: Synthetic oligonucleotide
cgucuggccggcgcgcaag

SEQ ID NO: 2742566 - RNA, 19 nt, Artificial Sequence
  Description of Artificial Sequence: Synthetic oligonucleotide
ccggcccacugacaugcca

SEQ ID NO: 2742567 - RNA, 19 nt, Artificial Sequence
  Description of Artificial Sequence: Synthetic oligonucleotide
gccaggcgggagccgcuuc

SEQ ID NO: 2742568 - RNA, 19 nt, Artificial Sequence
  Description of Artificial Sequence: Synthetic oligonucleotide
gcgugaacuuauaggcgau

SEQ ID NO: 2742569 - RNA, 19 nt, Artificial Sequence
  Description of Artificial Sequence: Synthetic oligonucleotide
ccuccccauucucgcucac

SEQ ID NO: 2742570 - RNA, 19 nt, Artificial Sequence
  Description of Artificial Sequence: Synthetic oligonucleotide
cccggcccacugacaugcc

SEQ ID NO: 2742571 - RNA, 19 nt, Artificial Sequence
  Description of Artificial Sequence: Synthetic oligonucleotide
cagccgggaccggggccug

SEQ ID NO: 2742572 - RNA, 19 nt, Artificial Sequence
  Description of Artificial Sequence: Synthetic oligonucleotide
ccagaacagugcgggagcu

SEQ ID NO: 2742573 - RNA, 19 nt, Artificial Sequence
  Description of Artificial Sequence: Synthetic oligonucleotide
cguucuugaggcgcacgaa

SEQ ID NO: 2742574 - RNA, 19 nt, Artificial Sequence
  Description of Artificial Sequence: Synthetic oligonucleotide
cgcacgaaccugcccucca

SEQ ID NO: 2742575 - RNA, 19 nt, Artificial Sequence
  Description of Artificial Sequence: Synthetic oligonucleotide
gggagccgcuucccgugcu

SEQ ID NO: 2742576 - RNA, 19 nt, Artificial Sequence
  Description of Artificial Sequence: Synthetic oligonucleotide
gcgcgagccuugggucucc

SEQ ID NO: 2742577 - RNA, 19 nt, Artificial Sequence
  Description of Artificial Sequence: Synthetic oligonucleotide
ccgccggcgcuugcugcgg

SEQ ID NO: 2742578 - RNA, 19 nt, Artificial Sequence
  Description of Artificial Sequence: Synthetic oligonucleotide
cggcgcuugcugcggcccc

SEQ ID NO: 2742579 - RNA, 19 nt, Artificial Sequence
  Description of Artificial Sequence: Synthetic oligonucleotide
ccuggacggaugucuguuu

SEQ ID NO: 2742580 - RNA, 19 nt, Artificial Sequence
  Description of Artificial Sequence: Synthetic oligonucleotide
ccugcgccagaugcccaca

SEQ ID NO: 2742581 - RNA, 19 nt, Artificial Sequence
  Description of Artificial Sequence: Synthetic oligonucleotide
ccgugaccgucuggccggc

SEQ ID NO: 2742582 - RNA, 19 nt, Artificial Sequence
  Description of Artificial Sequence: Synthetic oligonucleotide
ccuccgggaccuagucucu

SEQ ID NO: 2742583 - RNA, 19 nt, Artificial Sequence
  Description of Artificial Sequence: Synthetic oligonucleotide
ccucuccaucggcguugac

SEQ ID NO: 2742584 - RNA, 19 nt, Artificial Sequence
  Description of Artificial Sequence: Synthetic oligonucleotide
cggcgcgcaagacauacuu

SEQ ID NO: 2742585 - RNA, 19 nt, Artificial Sequence
  Description of Artificial Sequence: Synthetic oligonucleotide
cgugaccgucuggccggcg

SEQ ID NO: 2742586 - RNA, 19 nt, Artificial Sequence
  Description of Artificial Sequence: Synthetic oligonucleotide
ccccugcgccagaugccca

SEQ ID NO: 2742587 - RNA, 19 nt, Artificial Sequence
  Description of Artificial Sequence: Synthetic oligonucleotide
gguccuuguccgaggcguu

SEQ ID NO: 2742588 - RNA, 19 nt, Artificial Sequence
  Description of Artificial Sequence: Synthetic oligonucleotide
cgccagaugcccacaccgu

SEQ ID NO: 2742589 - RNA, 19 nt, Artificial Sequence
  Description of Artificial Sequence: Synthetic oligonucleotide
cgcucaccuggacggaugu

SEQ ID NO: 2742590 - RNA, 19 nt, Artificial Sequence
  Description of Artificial Sequence: Synthetic oligonucleotide
cgcuugcugcggccccggc

SEQ ID NO: 2742591 - RNA, 19 nt, Artificial Sequence
  Description of Artificial Sequence: Synthetic oligonucleotide
ccggggccugcugggccag

SEQ ID NO: 2742592 - RNA, 19 nt, Artificial Sequence
  Description of Artificial Sequence: Synthetic oligonucleotide
cgccggcgcuugcugcggc

SEQ ID NO: 2742593 - RNA, 19 nt, Artificial Sequence
  Description of Artificial Sequence: Synthetic oligonucleotide
ccuccucuccaucggcguu

SEQ ID NO: 2742594 - RNA, 19 nt, Artificial Sequence
  Description of Artificial Sequence: Synthetic oligonucleotide
cgggaccuagucucuugau

SEQ ID NO: 2742595 - RNA, 19 nt, Artificial Sequence
  Description of Artificial Sequence: Synthetic oligonucleotide
ccggcgcgcaagacauacu

SEQ ID NO: 2742596 - RNA, 19 nt, Artificial Sequence
  Description of Artificial Sequence: Synthetic oligonucleotide
ccagccgccggcgcuugcu

SEQ ID NO: 2742597 - RNA, 19 nt, Artificial Sequence
  Description of Artificial Sequence: Synthetic oligonucleotide
gcugcggccccggcccacu

SEQ ID NO: 2742598 - RNA, 19 nt, Artificial Sequence
  Description of Artificial Sequence: Synthetic oligonucleotide
ccgucuggccggcgcgcaa

SEQ ID NO: 2742599 - RNA, 19 nt, Artificial Sequence
  Description of Artificial Sequence: Synthetic oligonucleotide
cggcguugaccagaacagu

SEQ ID NO: 2742600 - RNA, 19 nt, Artificial Sequence
  Description of Artificial Sequence: Synthetic oligonucleotide
gggccaggcgggagccgcu

SEQ ID NO: 2742601 - RNA, 19 nt, Artificial Sequence
  Description of Artificial Sequence: Synthetic oligonucleotide
ccccagcugcucuggcuuu

SEQ ID NO: 2742602 - RNA, 19 nt, Artificial Sequence
  Description of Artificial Sequence: Synthetic oligonucleotide
ccacugcugcgcgagccuu

SEQ ID NO: 2742603 - RNA, 19 nt, Artificial Sequence
  Description of Artificial Sequence: Synthetic oligonucleotide
ggccggcgcgcaagacaua

SEQ ID NO: 2742604 - RNA, 19 nt, Artificial Sequence
  Description of Artificial Sequence: Synthetic oligonucleotide
cggggccugcugggccagg

SEQ ID NO: 2742605 - RNA, 19 nt, Artificial Sequence
  Description of Artificial Sequence: Synthetic oligonucleotide
ccucacccuccgggaccua

SEQ ID NO: 2742606 - RNA, 19 nt, Artificial Sequence
  Description of Artificial Sequence: Synthetic oligonucleotide
cgcgagccuugggucuccu

SEQ ID NO: 2742607 - RNA, 19 nt, Artificial Sequence
  Description of Artificial Sequence: Synthetic oligonucleotide
gaagacaugauucacagcg

SEQ ID NO: 2742608 - RNA, 19 nt, Artificial Sequence
  Description of Artificial Sequence: Synthetic oligonucleotide
ugauuuaucuccauggagg

SEQ ID NO: 2742609 - RNA, 19 nt, Artificial Sequence
  Description of Artificial Sequence: Synthetic oligonucleotide
auaugauuuaucuccaugg

SEQ ID NO: 2742610 - RNA, 19 nt, Artificial Sequence
  Description of Artificial Sequence: Synthetic oligonucleotide
aauaugauuuaucuccaug

SEQ ID NO: 2742611 - RNA, 19 nt, Artificial Sequence
  Description of Artificial Sequence: Synthetic oligonucleotide
aguaaugaguuucucauug

SEQ ID NO: 2742612 - RNA, 19 nt, Artificial Sequence
  Description of Artificial Sequence: Synthetic oligonucleotide
caggaugacaggaagaugc

SEQ ID NO: 2742613 - RNA, 19 nt, Artificial Sequence
  Description of Artificial Sequence: Synthetic oligonucleotide
uggaggcuaacccaaaagg

SEQ ID NO: 2742614 - RNA, 19 nt, Artificial Sequence
  Description of Artificial Sequence: Synthetic oligonucleotide
aacgacuuagccuggcuuc

SEQ ID NO: 2742615 - RNA, 19 nt, Artificial Sequence
  Description of Artificial Sequence: Synthetic oligonucleotide
agacaugauucacagcgcc

SEQ ID NO: 2742616 - RNA, 19 nt, Artificial Sequence
  Description of Artificial Sequence: Synthetic oligonucleotide
uuuugcucaauucaguaau

SEQ ID NO: 2742617 - RNA, 19 nt, Artificial Sequence
  Description of Artificial Sequence: Synthetic oligonucleotide
ucugacaacaaaggaaagg

SEQ ID NO: 2742618 - RNA, 19 nt, Artificial Sequence
  Description of Artificial Sequence: Synthetic oligonucleotide
ugaugauuuugacaggaug

SEQ ID NO: 2742619 - RNA, 19 nt, Artificial Sequence
  Description of Artificial Sequence: Synthetic oligonucleotide
aaugcucugggcugacagc

SEQ ID NO: 2742620 - RNA, 19 nt, Artificial Sequence
  Description of Artificial Sequence: Synthetic oligonucleotide
uuucuugugucauuucucc

SEQ ID NO: 2742621 - RNA, 19 nt, Artificial Sequence
  Description of Artificial Sequence: Synthetic oligonucleotide
ucuugugucauuucuccag

SEQ ID NO: 2742622 - RNA, 19 nt, Artificial Sequence
  Description of Artificial Sequence: Synthetic oligonucleotide
gauuuaucuccauggaggc

SEQ ID NO: 2742623 - RNA, 19 nt, Artificial Sequence
  Description of Artificial Sequence: Synthetic oligonucleotide
cauuucuccagucagggac

SEQ ID NO: 2742624 - RNA, 19 nt, Artificial Sequence
  Description of Artificial Sequence: Synthetic oligonucleotide
uaugauuuaucuccaugga

SEQ ID NO: 2742625 - RNA, 19 nt, Artificial Sequence
  Description of Artificial Sequence: Synthetic oligonucleotide
cucggaacgacuuagccug

SEQ ID NO: 2742626 - RNA, 19 nt, Artificial Sequence
  Description of Artificial Sequence: Synthetic oligonucleotide
ugaaaaugacaggagaaca

SEQ ID NO: 2742627 - RNA, 19 nt, Artificial Sequence
  Description of Artificial Sequence: Synthetic oligonucleotide
ugacaggagaacaucuucc

SEQ ID NO: 2742628 - RNA, 19 nt, Artificial Sequence
  Description of Artificial Sequence: Synthetic oligonucleotide
gaugauuuugacaggauga

SEQ ID NO: 2742629 - RNA, 19 nt, Artificial Sequence
  Description of Artificial Sequence: Synthetic oligonucleotide
gugaagacaugauucacag

SEQ ID NO: 2742630 - RNA, 19 nt, Artificial Sequence
  Description of Artificial Sequence: Synthetic oligonucleotide
gacaacaaaggaaaggaac

SEQ ID NO: 2742631 - RNA, 19 nt, Artificial Sequence
  Description of Artificial Sequence: Synthetic oligonucleotide
cucgacaugagccagaaga

SEQ ID NO: 2742632 - RNA, 19 nt, Artificial Sequence
  Description of Artificial Sequence: Synthetic oligonucleotide
ugucauuucuccagucagg

SEQ ID NO: 2742633 - RNA, 19 nt, Artificial Sequence
  Description of Artificial Sequence: Synthetic oligonucleotide
uggucuccgagucugaccc

SEQ ID NO: 2742634 - RNA, 19 nt, Artificial Sequence
  Description of Artificial Sequence: Synthetic oligonucleotide
gacagucucgacaugagcc

SEQ ID NO: 2742635 - RNA, 19 nt, Artificial Sequence
  Description of Artificial Sequence: Synthetic oligonucleotide
ucuccauggaggcuaaccc

SEQ ID NO: 2742636 - RNA, 19 nt, Artificial Sequence
  Description of Artificial Sequence: Synthetic oligonucleotide
ucugaggcaaagcuuggcc

SEQ ID NO: 2742637 - RNA, 19 nt, Artificial Sequence
  Description of Artificial Sequence: Synthetic oligonucleotide
agugcuucuggcucuguac

SEQ ID NO: 2742638 - RNA, 19 nt, Artificial Sequence
  Description of Artificial Sequence: Synthetic oligonucleotide
augacaggagaacaucuuc

SEQ ID NO: 2742639 - RNA, 19 nt, Artificial Sequence
  Description of Artificial Sequence: Synthetic oligonucleotide
acaggaagaugcuucgagg

SEQ ID NO: 2742640 - RNA, 19 nt, Artificial Sequence
  Description of Artificial Sequence: Synthetic oligonucleotide
aggaaaagcacuggucucc

SEQ ID NO: 2742641 - RNA, 19 nt, Artificial Sequence
  Description of Artificial Sequence: Synthetic oligonucleotide
ucagggacucagaauauga

SEQ ID NO: 2742642 - RNA, 19 nt, Artificial Sequence
  Description of Artificial Sequence: Synthetic oligonucleotide
ucgacaugagccagaagag

SEQ ID NO: 2742643 - RNA, 19 nt, Artificial Sequence
  Description of Artificial Sequence: Synthetic oligonucleotide
gaaugcucugggcugacag

SEQ ID NO: 2742644 - RNA, 19 nt, Artificial Sequence
  Description of Artificial Sequence: Synthetic oligonucleotide
cagaagagaagaucugagg

SEQ ID NO: 2742645 - RNA, 19 nt, Artificial Sequence
  Description of Artificial Sequence: Synthetic oligonucleotide
gaugcuucgaggaaccgcc

SEQ ID NO: 2742646 - RNA, 19 nt, Artificial Sequence
  Description of Artificial Sequence: Synthetic oligonucleotide
gucacaagucccuggaggg

SEQ ID NO: 2742647 - RNA, 19 nt, Artificial Sequence
  Description of Artificial Sequence: Synthetic oligonucleotide
augauuuugacaggaugac

SEQ ID NO: 2742648 - RNA, 19 nt, Artificial Sequence
  Description of Artificial Sequence: Synthetic oligonucleotide
augacaggaagaugcuucg

SEQ ID NO: 2742649 - RNA, 19 nt, Artificial Sequence
  Description of Artificial Sequence: Synthetic oligonucleotide
aagacaugauucacagcgc

SEQ ID NO: 2742650 - RNA, 19 nt, Artificial Sequence
  Description of Artificial Sequence: Synthetic oligonucleotide
cucuguacaggaaaagcac

SEQ ID NO: 2742651 - RNA, 19 nt, Artificial Sequence
  Description of Artificial Sequence: Synthetic oligonucleotide
auugaugauuuugacagga

SEQ ID NO: 2742652 - RNA, 19 nt, Artificial Sequence
  Description of Artificial Sequence: Synthetic oligonucleotide
uuuaucuccauggaggcua

SEQ ID NO: 2742653 - RNA, 19 nt, Artificial Sequence
  Description of Artificial Sequence: Synthetic oligonucleotide
aaggaaaggaacacuucag

SEQ ID NO: 2742654 - RNA, 19 nt, Artificial Sequence
  Description of Artificial Sequence: Synthetic oligonucleotide
uaaugaguuucucauugau

SEQ ID NO: 2742655 - RNA, 19 nt, Artificial Sequence
  Description of Artificial Sequence: Synthetic oligonucleotide
uuugcucaauucaguaaug

SEQ ID NO: 2742656 - RNA, 19 nt, Artificial Sequence
  Description of Artificial Sequence: Synthetic oligonucleotide
uucuugagcugcuuugcag

SEQ ID NO: 2742657 - RNA, 19 nt, Artificial Sequence
  Description of Artificial Sequence: Synthetic oligonucleotide
cuuagccuggcuucuauac

SEQ ID NO: 2742658 - RNA, 19 nt, Artificial Sequence
  Description of Artificial Sequence: Synthetic oligonucleotide
aauucaguaaugaguuucu

SEQ ID NO: 2742659 - RNA, 19 nt, Artificial Sequence
  Description of Artificial Sequence: Synthetic oligonucleotide
ugcacguguauccuggcac

SEQ ID NO: 2742660 - RNA, 19 nt, Artificial Sequence
  Description of Artificial Sequence: Synthetic oligonucleotide
agaucugaggcaaagcuug

SEQ ID NO: 2742661 - RNA, 19 nt, Artificial Sequence
  Description of Artificial Sequence: Synthetic oligonucleotide
ugacccugaaugcucuggg

SEQ ID NO: 2742662 - RNA, 19 nt, Artificial Sequence
  Description of Artificial Sequence: Synthetic oligonucleotide
agaagaucugaggcaaagc

SEQ ID NO: 2742663 - RNA, 19 nt, Artificial Sequence
  Description of Artificial Sequence: Synthetic oligonucleotide
uggaugacagucucgacau

SEQ ID NO: 2742664 - RNA, 19 nt, Artificial Sequence
  Description of Artificial Sequence: Synthetic oligonucleotide
uacucggaacgacuuagcc

SEQ ID NO: 2742665 - RNA, 19 nt, Artificial Sequence
  Description of Artificial Sequence: Synthetic oligonucleotide
aagagaagaucugaggcaa

SEQ ID NO: 2742666 - RNA, 19 nt, Artificial Sequence
  Description of Artificial Sequence: Synthetic oligonucleotide
ucuggcucuguacaggaaa

SEQ ID NO: 2742667 - RNA, 19 nt, Artificial Sequence
  Description of Artificial Sequence: Synthetic oligonucleotide
auucacagcgccuucuacu

SEQ ID NO: 2742668 - RNA, 19 nt, Artificial Sequence
  Description of Artificial Sequence: Synthetic oligonucleotide
agcgccuucuacucggaac

SEQ ID NO: 2742669 - RNA, 19 nt, Artificial Sequence
  Description of Artificial Sequence: Synthetic oligonucleotide
ucgaggaaccgccuguuca

SEQ ID NO: 2742670 - RNA, 19 nt, Artificial Sequence
  Description of Artificial Sequence: Synthetic oligonucleotide
cucccucugacaacaaagg

SEQ ID NO: 2742671 - RNA, 19 nt, Artificial Sequence
  Description of Artificial Sequence: Synthetic oligonucleotide
agaugcuucgaggaaccgc

SEQ ID NO: 2742672 - RNA, 19 nt, Artificial Sequence
  Description of Artificial Sequence: Synthetic oligonucleotide
ccaaaaggcaggcugaggg

SEQ ID NO: 2742673 - RNA, 19 nt, Artificial Sequence
  Description of Artificial Sequence: Synthetic oligonucleotide
gaagucuggugacuggaug

SEQ ID NO: 2742674 - RNA, 19 nt, Artificial Sequence
  Description of Artificial Sequence: Synthetic oligonucleotide
ugggugaagacaugauuca

SEQ ID NO: 2742675 - RNA, 19 nt, Artificial Sequence
  Description of Artificial Sequence: Synthetic oligonucleotide
cucagaauaugauuuaucu

SEQ ID NO: 2742676 - RNA, 19 nt, Artificial Sequence
  Description of Artificial Sequence: Synthetic oligonucleotide
ugacaggaugacaggaaga

SEQ ID NO: 2742677 - RNA, 19 nt, Artificial Sequence
  Description of Artificial Sequence: Synthetic oligonucleotide
cugaaaaugacaggagaac

SEQ ID NO: 2742678 - RNA, 19 nt, Artificial Sequence
  Description of Artificial Sequence: Synthetic oligonucleotide
gagaacaucuuccauuucu

SEQ ID NO: 2742679 - RNA, 19 nt, Artificial Sequence
  Description of Artificial Sequence: Synthetic oligonucleotide
uucuauacccagugcacgu

SEQ ID NO: 2742680 - RNA, 19 nt, Artificial Sequence
  Description of Artificial Sequence: Synthetic oligonucleotide
cugacaacaaaggaaagga

SEQ ID NO: 2742681 - RNA, 19 nt, Artificial Sequence
  Description of Artificial Sequence: Synthetic oligonucleotide
uccuucuugagcugcuuug

SEQ ID NO: 2742682 - RNA, 19 nt, Artificial Sequence
  Description of Artificial Sequence: Synthetic oligonucleotide
cuucuauacccagugcacg

SEQ ID NO: 2742683 - RNA, 19 nt, Artificial Sequence
  Description of Artificial Sequence: Synthetic oligonucleotide
gaagaugcuucgaggaacc

SEQ ID NO: 2742684 - RNA, 19 nt, Artificial Sequence
  Description of Artificial Sequence: Synthetic oligonucleotide
ugacaacaaaggaaaggaa

SEQ ID NO: 2742685 - RNA, 19 nt, Artificial Sequence
  Description of Artificial Sequence: Synthetic oligonucleotide
ugacagucucgacaugagc

SEQ ID NO: 2742686 - RNA, 19 nt, Artificial Sequence
  Description of Artificial Sequence: Synthetic oligonucleotide
acucggaacgacuuagccu

SEQ ID NO: 2742687 - RNA, 19 nt, Artificial Sequence
  Description of Artificial Sequence: Synthetic oligonucleotide
aagggcaaguucugaaaau

SEQ ID NO: 2742688 - RNA, 19 nt, Artificial Sequence
  Description of Artificial Sequence: Synthetic oligonucleotide
uccauggaggcuaacccaa

SEQ ID NO: 2742689 - RNA, 19 nt, Artificial Sequence
  Description of Artificial Sequence: Synthetic oligonucleotide
acucagaauaugauuuauc

SEQ ID NO: 2742690 - RNA, 19 nt, Artificial Sequence
  Description of Artificial Sequence: Synthetic oligonucleotide
ugagccagaagagaagauc

SEQ ID NO: 2742691 - RNA, 19 nt, Artificial Sequence
  Description of Artificial Sequence: Synthetic oligonucleotide
cuggcuucuauacccagug

SEQ ID NO: 2742692 - RNA, 19 nt, Artificial Sequence
  Description of Artificial Sequence: Synthetic oligonucleotide
gaggcuaacccaaaaggca

SEQ ID NO: 2742693 - RNA, 19 nt, Artificial Sequence
  Description of Artificial Sequence: Synthetic oligonucleotide
ucccucugacaacaaagga

SEQ ID NO: 2742694 - RNA, 19 nt, Artificial Sequence
  Description of Artificial Sequence: Synthetic oligonucleotide
ucuugggaagggcaaguuc

SEQ ID NO: 2742695 - RNA, 19 nt, Artificial Sequence
  Description of Artificial Sequence: Synthetic oligonucleotide
cagugcacguguauccugg

SEQ ID NO: 2742696 - RNA, 19 nt, Artificial Sequence
  Description of Artificial Sequence: Synthetic oligonucleotide
ugauuuugacaggaugaca

SEQ ID NO: 2742697 - RNA, 19 nt, Artificial Sequence
  Description of Artificial Sequence: Synthetic oligonucleotide
caagggugagcucugggug

SEQ ID NO: 2742698 - RNA, 19 nt, Artificial Sequence
  Description of Artificial Sequence: Synthetic oligonucleotide
ugaagacaugauucacagc

SEQ ID NO: 2742699 - RNA, 19 nt, Artificial Sequence
  Description of Artificial Sequence: Synthetic oligonucleotide
acagucucgacaugagcca

SEQ ID NO: 2742700 - RNA, 19 nt, Artificial Sequence
  Description of Artificial Sequence: Synthetic oligonucleotide
ugagcucugggugaagaca

SEQ ID NO: 2742701 - RNA, 19 nt, Artificial Sequence
  Description of Artificial Sequence: Synthetic oligonucleotide
ugggcugacagccuuccaa

SEQ ID NO: 2742702 - RNA, 19 nt, Artificial Sequence
  Description of Artificial Sequence: Synthetic oligonucleotide
uugcucaauucaguaauga

SEQ ID NO: 2742703 - RNA, 19 nt, Artificial Sequence
  Description of Artificial Sequence: Synthetic oligonucleotide
gacaugagccagaagagaa

SEQ ID NO: 2742704 - RNA, 19 nt, Artificial Sequence
  Description of Artificial Sequence: Synthetic oligonucleotide
guucugaaaaugacaggag

SEQ ID NO: 2742705 - RNA, 19 nt, Artificial Sequence
  Description of Artificial Sequence: Synthetic oligonucleotide
caacaaaggaaaggaacac

SEQ ID NO: 2742706 - RNA, 19 nt, Artificial Sequence
  Description of Artificial Sequence: Synthetic oligonucleotide
gagggucacaagucccugg

SEQ ID NO: 2742707 - RNA, 19 nt, Artificial Sequence
  Description of Artificial Sequence: Synthetic oligonucleotide
agggcaaguucugaaaaug

SEQ ID NO: 2742708 - RNA, 19 nt, Artificial Sequence
  Description of Artificial Sequence: Synthetic oligonucleotide
cuggaugacagucucgaca

SEQ ID NO: 2742709 - RNA, 19 nt, Artificial Sequence
  Description of Artificial Sequence: Synthetic oligonucleotide
uucuugugucauuucucca

SEQ ID NO: 2742710 - RNA, 19 nt, Artificial Sequence
  Description of Artificial Sequence: Synthetic oligonucleotide
aggcuaacccaaaaggcag

SEQ ID NO: 2742711 - RNA, 19 nt, Artificial Sequence
  Description of Artificial Sequence: Synthetic oligonucleotide
uugggaagggcaaguucug

SEQ ID NO: 2742712 - RNA, 19 nt, Artificial Sequence
  Description of Artificial Sequence: Synthetic oligonucleotide
cagucagggacucagaaua

SEQ ID NO: 2742713 - RNA, 19 nt, Artificial Sequence
  Description of Artificial Sequence: Synthetic oligonucleotide
caggaagaugcuucgagga

SEQ ID NO: 2742714 - RNA, 19 nt, Artificial Sequence
  Description of Artificial Sequence: Synthetic oligonucleotide
uucagcuuuccugccagug

SEQ ID NO: 2742715 - RNA, 19 nt, Artificial Sequence
  Description of Artificial Sequence: Synthetic oligonucleotide
gauucacagcgccuucuac

SEQ ID NO: 2742716 - RNA, 19 nt, Artificial Sequence
  Description of Artificial Sequence: Synthetic oligonucleotide
agucuggugacuggaugac

SEQ ID NO: 2742717 - RNA, 19 nt, Artificial Sequence
  Description of Artificial Sequence: Synthetic oligonucleotide
aaugacaggagaacaucuu

SEQ ID NO: 2742718 - RNA, 19 nt, Artificial Sequence
  Description of Artificial Sequence: Synthetic oligonucleotide
gcugacagccuuccaaggg

SEQ ID NO: 2742719 - RNA, 19 nt, Artificial Sequence
  Description of Artificial Sequence: Synthetic oligonucleotide
ucuauacccagugcacgug

SEQ ID NO: 2742720 - RNA, 19 nt, Artificial Sequence
  Description of Artificial Sequence: Synthetic oligonucleotide
guaaugaguuucucauuga

SEQ ID NO: 2742721 - RNA, 19 nt, Artificial Sequence
  Description of Artificial Sequence: Synthetic oligonucleotide
aagaugcuucgaggaaccg

SEQ ID NO: 2742722 - RNA, 19 nt, Artificial Sequence
  Description of Artificial Sequence: Synthetic oligonucleotide
aacccaaaaggcaggcuga

SEQ ID NO: 2742723 - RNA, 19 nt, Artificial Sequence
  Description of Artificial Sequence: Synthetic oligonucleotide
uggugccucccucugacaa

SEQ ID NO: 2742724 - RNA, 19 nt, Artificial Sequence
  Description of Artificial Sequence: Synthetic oligonucleotide
uggagggaggacacuggug

SEQ ID NO: 2742725 - RNA, 19 nt, Artificial Sequence
  Description of Artificial Sequence: Synthetic oligonucleotide
ggaggcuaacccaaaaggc

SEQ ID NO: 2742726 - RNA, 19 nt, Artificial Sequence
  Description of Artificial Sequence: Synthetic oligonucleotide
gcgccuucuacucggaacg

SEQ ID NO: 2742727 - RNA, 19 nt, Artificial Sequence
  Description of Artificial Sequence: Synthetic oligonucleotide
gaucugaggcaaagcuugg

SEQ ID NO: 2742728 - RNA, 19 nt, Artificial Sequence
  Description of Artificial Sequence: Synthetic oligonucleotide
ucauuucuccagucaggga

SEQ ID NO: 2742729 - RNA, 19 nt, Artificial Sequence
  Description of Artificial Sequence: Synthetic oligonucleotide
agucugacccugaaugcuc

SEQ ID NO: 2742730 - RNA, 19 nt, Artificial Sequence
  Description of Artificial Sequence: Synthetic oligonucleotide
ucccaggacucuugggaag

SEQ ID NO: 2742731 - RNA, 19 nt, Artificial Sequence
  Description of Artificial Sequence: Synthetic oligonucleotide
ugaguuucucauugaugau

SEQ ID NO: 2742732 - RNA, 19 nt, Artificial Sequence
  Description of Artificial Sequence: Synthetic oligonucleotide
agggucacaagucccugga

SEQ ID NO: 2742733 - RNA, 19 nt, Artificial Sequence
  Description of Artificial Sequence: Synthetic oligonucleotide
ggcuucuauacccagugca

SEQ ID NO: 2742734 - RNA, 19 nt, Artificial Sequence
  Description of Artificial Sequence: Synthetic oligonucleotide
ccgagucugacccugaaug

SEQ ID NO: 2742735 - RNA, 19 nt, Artificial Sequence
  Description of Artificial Sequence: Synthetic oligonucleotide
caggaaaagcacuggucuc

SEQ ID NO: 2742736 - RNA, 19 nt, Artificial Sequence
  Description of Artificial Sequence: Synthetic oligonucleotide
cuacucggaacgacuuagc

SEQ ID NO: 2742737 - RNA, 19 nt, Artificial Sequence
  Description of Artificial Sequence: Synthetic oligonucleotide
uggugacuggaugacaguc

SEQ ID NO: 2742738 - RNA, 19 nt, Artificial Sequence
  Description of Artificial Sequence: Synthetic oligonucleotide
cacaagucccuggagggag

SEQ ID NO: 2742739 - RNA, 19 nt, Artificial Sequence
  Description of Artificial Sequence: Synthetic oligonucleotide
gacccugaaugcucugggc

SEQ ID NO: 2742740 - RNA, 19 nt, Artificial Sequence
  Description of Artificial Sequence: Synthetic oligonucleotide
aggaagaugcuucgaggaa

SEQ ID NO: 2742741 - RNA, 19 nt, Artificial Sequence
  Description of Artificial Sequence: Synthetic oligonucleotide
ucaauucaguaaugaguuu

SEQ ID NO: 2742742 - RNA, 19 nt, Artificial Sequence
  Description of Artificial Sequence: Synthetic oligonucleotide
acaugagccagaagagaag

SEQ ID NO: 2742743 - RNA, 19 nt, Artificial Sequence
  Description of Artificial Sequence: Synthetic oligonucleotide
ugauucacagcgccuucua

SEQ ID NO: 2742744 - RNA, 19 nt, Artificial Sequence
  Description of Artificial Sequence: Synthetic oligonucleotide
uggcuucuauacccagugc

SEQ ID NO: 2742745 - RNA, 19 nt, Artificial Sequence
  Description of Artificial Sequence: Synthetic oligonucleotide
acaggagaacaucuuccau

SEQ ID NO: 2742746 - RNA, 19 nt, Artificial Sequence
  Description of Artificial Sequence: Synthetic oligonucleotide
ccucccucugacaacaaag

SEQ ID NO: 2742747 - RNA, 19 nt, Artificial Sequence
  Description of Artificial Sequence: Synthetic oligonucleotide
caugagccagaagagaaga

SEQ ID NO: 2742748 - RNA, 19 nt, Artificial Sequence
  Description of Artificial Sequence: Synthetic oligonucleotide
acguguauccuggcacagc

SEQ ID NO: 2742749 - RNA, 19 nt, Artificial Sequence
  Description of Artificial Sequence: Synthetic oligonucleotide
gacucuugggaagggcaag

SEQ ID NO: 2742750 - RNA, 19 nt, Artificial Sequence
  Description of Artificial Sequence: Synthetic oligonucleotide
ucggaacgacuuagccugg

SEQ ID NO: 2742751 - RNA, 19 nt, Artificial Sequence
  Description of Artificial Sequence: Synthetic oligonucleotide
ggaagaugcuucgaggaac

SEQ ID NO: 2742752 - RNA, 19 nt, Artificial Sequence
  Description of Artificial Sequence: Synthetic oligonucleotide
uuaucuccauggaggcuaa

SEQ ID NO: 2742753 - RNA, 19 nt, Artificial Sequence
  Description of Artificial Sequence: Synthetic oligonucleotide
acaugauucacagcgccuu

SEQ ID NO: 2742754 - RNA, 19 nt, Artificial Sequence
  Description of Artificial Sequence: Synthetic oligonucleotide
ucugggcugacagccuucc

SEQ ID NO: 2742755 - RNA, 19 nt, Artificial Sequence
  Description of Artificial Sequence: Synthetic oligonucleotide
uauacccagugcacgugua

SEQ ID NO: 2742756 - RNA, 19 nt, Artificial Sequence
  Description of Artificial Sequence: Synthetic oligonucleotide
uggcucuguacaggaaaag

SEQ ID NO: 2742757 - RNA, 19 nt, Artificial Sequence
  Description of Artificial Sequence: Synthetic oligonucleotide
cugccagugcuucuggcuc

SEQ ID NO: 2742758 - RNA, 19 nt, Artificial Sequence
  Description of Artificial Sequence: Synthetic oligonucleotide
auuuaucuccauggaggcu

SEQ ID NO: 2742759 - RNA, 19 nt, Artificial Sequence
  Description of Artificial Sequence: Synthetic oligonucleotide
ggaaaagcacuggucuccg

SEQ ID NO: 2742760 - RNA, 19 nt, Artificial Sequence
  Description of Artificial Sequence: Synthetic oligonucleotide
auuucuccagucagggacu

SEQ ID NO: 2742761 - RNA, 19 nt, Artificial Sequence
  Description of Artificial Sequence: Synthetic oligonucleotide
aggaaccgccuguucagcu

SEQ ID NO: 2742762 - RNA, 19 nt, Artificial Sequence
  Description of Artificial Sequence: Synthetic oligonucleotide
acaggaugacaggaagaug

SEQ ID NO: 2742763 - RNA, 19 nt, Artificial Sequence
  Description of Artificial Sequence: Synthetic oligonucleotide
ugagggucacaagucccug

SEQ ID NO: 2742764 - RNA, 19 nt, Artificial Sequence
  Description of Artificial Sequence: Synthetic oligonucleotide
caugauucacagcgccuuc

SEQ ID NO: 2742765 - RNA, 19 nt, Artificial Sequence
  Description of Artificial Sequence: Synthetic oligonucleotide
aggcugagggucacaaguc

SEQ ID NO: 2742766 - RNA, 19 nt, Artificial Sequence
  Description of Artificial Sequence: Synthetic oligonucleotide
ucucgacaugagccagaag

SEQ ID NO: 2742767 - RNA, 19 nt, Artificial Sequence
  Description of Artificial Sequence: Synthetic oligonucleotide
ucacaagucccuggaggga

SEQ ID NO: 2742768 - RNA, 19 nt, Artificial Sequence
  Description of Artificial Sequence: Synthetic oligonucleotide
gggcugacagccuuccaag

SEQ ID NO: 2742769 - RNA, 19 nt, Artificial Sequence
  Description of Artificial Sequence: Synthetic oligonucleotide
augauucacagcgccuucu

SEQ ID NO: 2742770 - RNA, 19 nt, Artificial Sequence
  Description of Artificial Sequence: Synthetic oligonucleotide
ucugacccugaaugcucug

SEQ ID NO: 2742771 - RNA, 19 nt, Artificial Sequence
  Description of Artificial Sequence: Synthetic oligonucleotide
ggcugagggucacaagucc

SEQ ID NO: 2742772 - RNA, 19 nt, Artificial Sequence
  Description of Artificial Sequence: Synthetic oligonucleotide
agccuuccaagggugagcu

SEQ ID NO: 2742773 - RNA, 19 nt, Artificial Sequence
  Description of Artificial Sequence: Synthetic oligonucleotide
uccgagucugacccugaau

SEQ ID NO: 2742774 - RNA, 19 nt, Artificial Sequence
  Description of Artificial Sequence: Synthetic oligonucleotide
uucgaggaaccgccuguuc

SEQ ID NO: 2742775 - RNA, 19 nt, Artificial Sequence
  Description of Artificial Sequence: Synthetic oligonucleotide
gcucuguacaggaaaagca

SEQ ID NO: 2742776 - RNA, 19 nt, Artificial Sequence
  Description of Artificial Sequence: Synthetic oligonucleotide
auacccagugcacguguau

SEQ ID NO: 2742777 - RNA, 19 nt, Artificial Sequence
  Description of Artificial Sequence: Synthetic oligonucleotide
gucagggacucagaauaug

SEQ ID NO: 2742778 - RNA, 19 nt, Artificial Sequence
  Description of Artificial Sequence: Synthetic oligonucleotide
cguguauccuggcacagcc

SEQ ID NO: 2742779 - RNA, 19 nt, Artificial Sequence
  Description of Artificial Sequence: Synthetic oligonucleotide
guacaggaaaagcacuggu

SEQ ID NO: 2742780 - RNA, 19 nt, Artificial Sequence
  Description of Artificial Sequence: Synthetic oligonucleotide
gcucaauucaguaaugagu

SEQ ID NO: 2742781 - RNA, 19 nt, Artificial Sequence
  Description of Artificial Sequence: Synthetic oligonucleotide
agcacuggucuccgagucu

SEQ ID NO: 2742782 - RNA, 19 nt, Artificial Sequence
  Description of Artificial Sequence: Synthetic oligonucleotide
uacccagugcacguguauc

SEQ ID NO: 2742783 - RNA, 19 nt, Artificial Sequence
  Description of Artificial Sequence: Synthetic oligonucleotide
ggcugacagccuuccaagg

SEQ ID NO: 2742784 - RNA, 19 nt, Artificial Sequence
  Description of Artificial Sequence: Synthetic oligonucleotide
uuccaagggugagcucugg

SEQ ID NO: 2742785 - RNA, 19 nt, Artificial Sequence
  Description of Artificial Sequence: Synthetic oligonucleotide
ucccggguuccuucuugag

SEQ ID NO: 2742786 - RNA, 19 nt, Artificial Sequence
  Description of Artificial Sequence: Synthetic oligonucleotide
gcugcuuugcagcugucuc

SEQ ID NO: 2742787 - RNA, 19 nt, Artificial Sequence
  Description of Artificial Sequence: Synthetic oligonucleotide
caggcugagggucacaagu

SEQ ID NO: 2742788 - RNA, 19 nt, Artificial Sequence
  Description of Artificial Sequence: Synthetic oligonucleotide
ucuccgagucugacccuga

SEQ ID NO: 2742789 - RNA, 19 nt, Artificial Sequence
  Description of Artificial Sequence: Synthetic oligonucleotide
acucuugggaagggcaagu

SEQ ID NO: 2742790 - RNA, 19 nt, Artificial Sequence
  Description of Artificial Sequence: Synthetic oligonucleotide
gacacuggugccucccucu

SEQ ID NO: 2742791 - RNA, 19 nt, Artificial Sequence
  Description of Artificial Sequence: Synthetic oligonucleotide
acccaaaaggcaggcugag

SEQ ID NO: 2742792 - RNA, 19 nt, Artificial Sequence
  Description of Artificial Sequence: Synthetic oligonucleotide
gcuucuauacccagugcac

SEQ ID NO: 2742793 - RNA, 19 nt, Artificial Sequence
  Description of Artificial Sequence: Synthetic oligonucleotide
ggaagggcaaguucugaaa

SEQ ID NO: 2742794 - RNA, 19 nt, Artificial Sequence
  Description of Artificial Sequence: Synthetic oligonucleotide
ggcuaacccaaaaggcagg

SEQ ID NO: 2742795 - RNA, 19 nt, Artificial Sequence
  Description of Artificial Sequence: Synthetic oligonucleotide
acuuagccuggcuucuaua

SEQ ID NO: 2742796 - RNA, 19 nt, Artificial Sequence
  Description of Artificial Sequence: Synthetic oligonucleotide
gaggaaccgccuguucagc

SEQ ID NO: 2742797 - RNA, 19 nt, Artificial Sequence
  Description of Artificial Sequence: Synthetic oligonucleotide
accgccuguucagcuuucc

SEQ ID NO: 2742798 - RNA, 19 nt, Artificial Sequence
  Description of Artificial Sequence: Synthetic oligonucleotide
aggaugacaggaagaugcu

SEQ ID NO: 2742799 - RNA, 19 nt, Artificial Sequence
  Description of Artificial Sequence: Synthetic oligonucleotide
cagucucgacaugagccag

SEQ ID NO: 2742800 - RNA, 19 nt, Artificial Sequence
  Description of Artificial Sequence: Synthetic oligonucleotide
aggaacacuucagucuuuu

SEQ ID NO: 2742801 - RNA, 19 nt, Artificial Sequence
  Description of Artificial Sequence: Synthetic oligonucleotide
cugaggcaaagcuuggccu

SEQ ID NO: 2742802 - RNA, 19 nt, Artificial Sequence
  Description of Artificial Sequence: Synthetic oligonucleotide
gcuaacccaaaaggcaggc

SEQ ID NO: 2742803 - RNA, 19 nt, Artificial Sequence
  Description of Artificial Sequence: Synthetic oligonucleotide
acgacuuagccuggcuucu

SEQ ID NO: 2742804 - RNA, 19 nt, Artificial Sequence
  Description of Artificial Sequence: Synthetic oligonucleotide
gaacgacuuagccuggcuu

SEQ ID NO: 2742805 - RNA, 19 nt, Artificial Sequence
  Description of Artificial Sequence: Synthetic oligonucleotide
gagucugacccugaaugcu

SEQ ID NO: 2742806 - RNA, 19 nt, Artificial Sequence
  Description of Artificial Sequence: Synthetic oligonucleotide
cuugugucauuucuccagu

SEQ ID NO: 2742807 - RNA, 19 nt, Artificial Sequence
  Description of Artificial Sequence: Synthetic oligonucleotide
agcugcuuugcagcugucu

SEQ ID NO: 2742808 - RNA, 19 nt, Artificial Sequence
  Description of Artificial Sequence: Synthetic oligonucleotide
cacguguauccuggcacag

SEQ ID NO: 2742809 - RNA, 19 nt, Artificial Sequence
  Description of Artificial Sequence: Synthetic oligonucleotide
uuucuccagucagggacuc

SEQ ID NO: 2742810 - RNA, 19 nt, Artificial Sequence
  Description of Artificial Sequence: Synthetic oligonucleotide
gacucagaauaugauuuau

SEQ ID NO: 2742811 - RNA, 19 nt, Artificial Sequence
  Description of Artificial Sequence: Synthetic oligonucleotide
ugaaugcucugggcugaca

SEQ ID NO: 2742812 - RNA, 19 nt, Artificial Sequence
  Description of Artificial Sequence: Synthetic oligonucleotide
cauggaggcuaacccaaaa

SEQ ID NO: 2742813 - RNA, 19 nt, Artificial Sequence
  Description of Artificial Sequence: Synthetic oligonucleotide
cugacagccuuccaagggu

SEQ ID NO: 2742814 - RNA, 19 nt, Artificial Sequence
  Description of Artificial Sequence: Synthetic oligonucleotide
gcugagggucacaaguccc

SEQ ID NO: 2742815 - RNA, 19 nt, Artificial Sequence
  Description of Artificial Sequence: Synthetic oligonucleotide
cagccuuccaagggugagc

SEQ ID NO: 2742816 - RNA, 19 nt, Artificial Sequence
  Description of Artificial Sequence: Synthetic oligonucleotide
ccuucuugagcugcuuugc

SEQ ID NO: 2742817 - RNA, 19 nt, Artificial Sequence
  Description of Artificial Sequence: Synthetic oligonucleotide
gggacucagaauaugauuu

SEQ ID NO: 2742818 - RNA, 19 nt, Artificial Sequence
  Description of Artificial Sequence: Synthetic oligonucleotide
cucccaggacucuugggaa

SEQ ID NO: 2742819 - RNA, 19 nt, Artificial Sequence
  Description of Artificial Sequence: Synthetic oligonucleotide
gacaugauucacagcgccu

SEQ ID NO: 2742820 - RNA, 19 nt, Artificial Sequence
  Description of Artificial Sequence: Synthetic oligonucleotide
cgagucugacccugaaugc

SEQ ID NO: 2742821 - RNA, 19 nt, Artificial Sequence
  Description of Artificial Sequence: Synthetic oligonucleotide
cccugaaugcucugggcug

SEQ ID NO: 2742822 - RNA, 19 nt, Artificial Sequence
  Description of Artificial Sequence: Synthetic oligonucleotide
gccagaagagaagaucuga

SEQ ID NO: 2742823 - RNA, 19 nt, Artificial Sequence
  Description of Artificial Sequence: Synthetic oligonucleotide
aaccgccuguucagcuuuc

SEQ ID NO: 2742824 - RNA, 19 nt, Artificial Sequence
  Description of Artificial Sequence: Synthetic oligonucleotide
gggaagggcaaguucugaa

SEQ ID NO: 2742825 - RNA, 19 nt, Artificial Sequence
  Description of Artificial Sequence: Synthetic oligonucleotide
gugcacguguauccuggca

SEQ ID NO: 2742826 - RNA, 19 nt, Artificial Sequence
  Description of Artificial Sequence: Synthetic oligonucleotide
ggacucagaauaugauuua

SEQ ID NO: 2742827 - RNA, 19 nt, Artificial Sequence
  Description of Artificial Sequence: Synthetic oligonucleotide
gagcucugggugaagacau

SEQ ID NO: 2742828 - RNA, 19 nt, Artificial Sequence
  Description of Artificial Sequence: Synthetic oligonucleotide
agucagggacucagaauau

SEQ ID NO: 2742829 - RNA, 19 nt, Artificial Sequence
  Description of Artificial Sequence: Synthetic oligonucleotide
cugagggucacaagucccu

SEQ ID NO: 2742830 - RNA, 19 nt, Artificial Sequence
  Description of Artificial Sequence: Synthetic oligonucleotide
gacagccuuccaaggguga

SEQ ID NO: 2742831 - RNA, 19 nt, Artificial Sequence
  Description of Artificial Sequence: Synthetic oligonucleotide
cuauacccagugcacgugu

SEQ ID NO: 2742832 - RNA, 19 nt, Artificial Sequence
  Description of Artificial Sequence: Synthetic oligonucleotide
cgaggaaccgccuguucag

SEQ ID NO: 2742833 - RNA, 19 nt, Artificial Sequence
  Description of Artificial Sequence: Synthetic oligonucleotide
uggccugcucccggguucc

SEQ ID NO: 2742834 - RNA, 19 nt, Artificial Sequence
  Description of Artificial Sequence: Synthetic oligonucleotide
gacuuagccuggcuucuau

SEQ ID NO: 2742835 - RNA, 19 nt, Artificial Sequence
  Description of Artificial Sequence: Synthetic oligonucleotide
agucucgacaugagccaga

SEQ ID NO: 2742836 - RNA, 19 nt, Artificial Sequence
  Description of Artificial Sequence: Synthetic oligonucleotide
gcacguguauccuggcaca

SEQ ID NO: 2742837 - RNA, 19 nt, Artificial Sequence
  Description of Artificial Sequence: Synthetic oligonucleotide
ggugccucccucugacaac

SEQ ID NO: 2742838 - RNA, 19 nt, Artificial Sequence
  Description of Artificial Sequence: Synthetic oligonucleotide
cccaggacucuugggaagg

SEQ ID NO: 2742839 - RNA, 19 nt, Artificial Sequence
  Description of Artificial Sequence: Synthetic oligonucleotide
ugucucucccaggacucuu

SEQ ID NO: 2742840 - RNA, 19 nt, Artificial Sequence
  Description of Artificial Sequence: Synthetic oligonucleotide
gaaccgccuguucagcuuu

SEQ ID NO: 2742841 - RNA, 19 nt, Artificial Sequence
  Description of Artificial Sequence: Synthetic oligonucleotide
agagaagaucugaggcaaa

SEQ ID NO: 2742842 - RNA, 19 nt, Artificial Sequence
  Description of Artificial Sequence: Synthetic oligonucleotide
cgccuguucagcuuuccug

SEQ ID NO: 2742843 - RNA, 19 nt, Artificial Sequence
  Description of Artificial Sequence: Synthetic oligonucleotide
gucucgacaugagccagaa

SEQ ID NO: 2742844 - RNA, 19 nt, Artificial Sequence
  Description of Artificial Sequence: Synthetic oligonucleotide
ggagaacaucuuccauuuc

SEQ ID NO: 2742845 - RNA, 19 nt, Artificial Sequence
  Description of Artificial Sequence: Synthetic oligonucleotide
gcucugggugaagacauga

SEQ ID NO: 2742846 - RNA, 19 nt, Artificial Sequence
  Description of Artificial Sequence: Synthetic oligonucleotide
ccagugcacguguauccug

SEQ ID NO: 2742847 - RNA, 19 nt, Artificial Sequence
  Description of Artificial Sequence: Synthetic oligonucleotide
cucccggguuccuucuuga

SEQ ID NO: 2742848 - RNA, 19 nt, Artificial Sequence
  Description of Artificial Sequence: Synthetic oligonucleotide
cuuccauuucuugugucau

SEQ ID NO: 2742849 - RNA, 19 nt, Artificial Sequence
  Description of Artificial Sequence: Synthetic oligonucleotide
cagcugucucucccaggac

SEQ ID NO: 2742850 - RNA, 19 nt, Artificial Sequence
  Description of Artificial Sequence: Synthetic oligonucleotide
ccggguuccuucuugagcu

SEQ ID NO: 2742851 - RNA, 19 nt, Artificial Sequence
  Description of Artificial Sequence: Synthetic oligonucleotide
cugaaugcucugggcugac

SEQ ID NO: 2742852 - RNA, 19 nt, Artificial Sequence
  Description of Artificial Sequence: Synthetic oligonucleotide
gucuggugacuggaugaca

SEQ ID NO: 2742853 - RNA, 19 nt, Artificial Sequence
  Description of Artificial Sequence: Synthetic oligonucleotide
gcugucucucccaggacuc

SEQ ID NO: 2742854 - RNA, 19 nt, Artificial Sequence
  Description of Artificial Sequence: Synthetic oligonucleotide
gcucccggguuccuucuug

SEQ ID NO: 2742855 - RNA, 19 nt, Artificial Sequence
  Description of Artificial Sequence: Synthetic oligonucleotide
agcucugggugaagacaug

SEQ ID NO: 2742856 - RNA, 19 nt, Artificial Sequence
  Description of Artificial Sequence: Synthetic oligonucleotide
cccaaaaggcaggcugagg

SEQ ID NO: 2742857 - RNA, 19 nt, Artificial Sequence
  Description of Artificial Sequence: Synthetic oligonucleotide
caguaaugaguuucucauu

SEQ ID NO: 2742858 - RNA, 19 nt, Artificial Sequence
  Description of Artificial Sequence: Synthetic oligonucleotide
ggacacuggugccucccuc

SEQ ID NO: 2742859 - RNA, 19 nt, Artificial Sequence
  Description of Artificial Sequence: Synthetic oligonucleotide
ggugacuggaugacagucu

SEQ ID NO: 2742860 - RNA, 19 nt, Artificial Sequence
  Description of Artificial Sequence: Synthetic oligonucleotide
caagucccuggagggagga

SEQ ID NO: 2742861 - RNA, 19 nt, Artificial Sequence
  Description of Artificial Sequence: Synthetic oligonucleotide
gcuucgaggaaccgccugu

SEQ ID NO: 2742862 - RNA, 19 nt, Artificial Sequence
  Description of Artificial Sequence: Synthetic oligonucleotide
ugcucccggguuccuucuu

SEQ ID NO: 2742863 - RNA, 19 nt, Artificial Sequence
  Description of Artificial Sequence: Synthetic oligonucleotide
ggaacgacuuagccuggcu

SEQ ID NO: 2742864 - RNA, 19 nt, Artificial Sequence
  Description of Artificial Sequence: Synthetic oligonucleotide
ggacucuugggaagggcaa

SEQ ID NO: 2742865 - RNA, 19 nt, Artificial Sequence
  Description of Artificial Sequence: Synthetic oligonucleotide
cucugggugaagacaugau

SEQ ID NO: 2742866 - RNA, 19 nt, Artificial Sequence
  Description of Artificial Sequence: Synthetic oligonucleotide
gucugacccugaaugcucu

SEQ ID NO: 2742867 - RNA, 19 nt, Artificial Sequence
  Description of Artificial Sequence: Synthetic oligonucleotide
cuggugacuggaugacagu

SEQ ID NO: 2742868 - RNA, 19 nt, Artificial Sequence
  Description of Artificial Sequence: Synthetic oligonucleotide
cuaacccaaaaggcaggcu

SEQ ID NO: 2742869 - RNA, 19 nt, Artificial Sequence
  Description of Artificial Sequence: Synthetic oligonucleotide
gccuucuacucggaacgac

SEQ ID NO: 2742870 - RNA, 19 nt, Artificial Sequence
  Description of Artificial Sequence: Synthetic oligonucleotide
augcuucgaggaaccgccu

SEQ ID NO: 2742871 - RNA, 19 nt, Artificial Sequence
  Description of Artificial Sequence: Synthetic oligonucleotide
ucccuggagggaggacacu

SEQ ID NO: 2742872 - RNA, 19 nt, Artificial Sequence
  Description of Artificial Sequence: Synthetic oligonucleotide
cuggugccucccucugaca

SEQ ID NO: 2742873 - RNA, 19 nt, Artificial Sequence
  Description of Artificial Sequence: Synthetic oligonucleotide
acagcgccuucuacucgga

SEQ ID NO: 2742874 - RNA, 19 nt, Artificial Sequence
  Description of Artificial Sequence: Synthetic oligonucleotide
cuccgagucugacccugaa

SEQ ID NO: 2742875 - RNA, 19 nt, Artificial Sequence
  Description of Artificial Sequence: Synthetic oligonucleotide
ccugaaugcucugggcuga

SEQ ID NO: 2742876 - RNA, 19 nt, Artificial Sequence
  Description of Artificial Sequence: Synthetic oligonucleotide
guguauccuggcacagccu

SEQ ID NO: 2742877 - RNA, 19 nt, Artificial Sequence
  Description of Artificial Sequence: Synthetic oligonucleotide
cugggcugacagccuucca

SEQ ID NO: 2742878 - RNA, 19 nt, Artificial Sequence
  Description of Artificial Sequence: Synthetic oligonucleotide
ggaaccgccuguucagcuu

SEQ ID NO: 2742879 - RNA, 19 nt, Artificial Sequence
  Description of Artificial Sequence: Synthetic oligonucleotide
cgacaugagccagaagaga

SEQ ID NO: 2742880 - RNA, 19 nt, Artificial Sequence
  Description of Artificial Sequence: Synthetic oligonucleotide
gagcugcuuugcagcuguc

SEQ ID NO: 2742881 - RNA, 19 nt, Artificial Sequence
  Description of Artificial Sequence: Synthetic oligonucleotide
ccuggcuucuauacccagu

SEQ ID NO: 2742882 - RNA, 19 nt, Artificial Sequence
  Description of Artificial Sequence: Synthetic oligonucleotide
ccagucagggacucagaau

SEQ ID NO: 2742883 - RNA, 19 nt, Artificial Sequence
  Description of Artificial Sequence: Synthetic oligonucleotide
cagcgccuucuacucggaa

SEQ ID NO: 2742884 - RNA, 19 nt, Artificial Sequence
  Description of Artificial Sequence: Synthetic oligonucleotide
cuucgaggaaccgccuguu

SEQ ID NO: 2742885 - RNA, 19 nt, Artificial Sequence
  Description of Artificial Sequence: Synthetic oligonucleotide
cucuugggaagggcaaguu

SEQ ID NO: 2742886 - RNA, 19 nt, Artificial Sequence
  Description of Artificial Sequence: Synthetic oligonucleotide
cggaacgacuuagccuggc

SEQ ID NO: 2742887 - RNA, 19 nt, Artificial Sequence
  Description of Artificial Sequence: Synthetic oligonucleotide
cggguuccuucuugagcug

SEQ ID NO: 2742888 - RNA, 19 nt, Artificial Sequence
  Description of Artificial Sequence: Synthetic oligonucleotide
gccuuccaagggugagcuc

SEQ ID NO: 2742889 - RNA, 19 nt, Artificial Sequence
  Description of Artificial Sequence: Synthetic oligonucleotide
ggucuccgagucugacccu

SEQ ID NO: 2742890 - RNA, 19 nt, Artificial Sequence
  Description of Artificial Sequence: Synthetic oligonucleotide
cccagugcacguguauccu

SEQ ID NO: 2742891 - RNA, 19 nt, Artificial Sequence
  Description of Artificial Sequence: Synthetic oligonucleotide
ccgccuguucagcuuuccu

SEQ ID NO: 2742892 - RNA, 19 nt, Artificial Sequence
  Description of Artificial Sequence: Synthetic oligonucleotide
cgccuucuacucggaacga

SEQ ID NO: 2742893 - RNA, 19 nt, Artificial Sequence
  Description of Artificial Sequence: Synthetic oligonucleotide
cgacuuagccuggcuucua

SEQ ID NO: 2742894 - RNA, 19 nt, Artificial Sequence
  Description of Artificial Sequence: Synthetic oligonucleotide
aucucaagaauucuuaucc

SEQ ID NO: 2742895 - RNA, 19 nt, Artificial Sequence
  Description of Artificial Sequence: Synthetic oligonucleotide
uguauucucaagcaaaccg

SEQ ID NO: 2742896 - RNA, 19 nt, Artificial Sequence
  Description of Artificial Sequence: Synthetic oligonucleotide
aaagagugaacguucugcc

SEQ ID NO: 2742897 - RNA, 19 nt, Artificial Sequence
  Description of Artificial Sequence: Synthetic oligonucleotide
ucaucaauguccaacaagc

SEQ ID NO: 2742898 - RNA, 19 nt, Artificial Sequence
  Description of Artificial Sequence: Synthetic oligonucleotide
uuaacagacacacauugug

SEQ ID NO: 2742899 - RNA, 19 nt, Artificial Sequence
  Description of Artificial Sequence: Synthetic oligonucleotide
uguuaacagacacacauug

SEQ ID NO: 2742900 - RNA, 19 nt, Artificial Sequence
  Description of Artificial Sequence: Synthetic oligonucleotide
auauaaaggagauaggcgu

SEQ ID NO: 2742901 - RNA, 19 nt, Artificial Sequence
  Description of Artificial Sequence: Synthetic oligonucleotide
ucaagaauucuuauccagg

SEQ ID NO: 2742902 - RNA, 19 nt, Artificial Sequence
  Description of Artificial Sequence: Synthetic oligonucleotide
gagaggaacgaguugaagg

SEQ ID NO: 2742903 - RNA, 19 nt, Artificial Sequence
  Description of Artificial Sequence: Synthetic oligonucleotide
caguauauaaaggagauag

SEQ ID NO: 2742904 - RNA, 19 nt, Artificial Sequence
  Description of Artificial Sequence: Synthetic oligonucleotide
ugugaagcuggucugacag

SEQ ID NO: 2742905 - RNA, 19 nt, Artificial Sequence
  Description of Artificial Sequence: Synthetic oligonucleotide
uccacaacuaaggaaaugg

SEQ ID NO: 2742906 - RNA, 19 nt, Artificial Sequence
  Description of Artificial Sequence: Synthetic oligonucleotide
ucagcaguauauaaaggag

SEQ ID NO: 2742907 - RNA, 19 nt, Artificial Sequence
  Description of Artificial Sequence: Synthetic oligonucleotide
gaugaagcugcccacacag

SEQ ID NO: 2742908 - RNA, 19 nt, Artificial Sequence
  Description of Artificial Sequence: Synthetic oligonucleotide
uugaucuguauucucaagc

SEQ ID NO: 2742909 - RNA, 19 nt, Artificial Sequence
  Description of Artificial Sequence: Synthetic oligonucleotide
aagaauucuuauccagggg

SEQ ID NO: 2742910 - RNA, 19 nt, Artificial Sequence
  Description of Artificial Sequence: Synthetic oligonucleotide
caagaauucuuauccaggg

SEQ ID NO: 2742911 - RNA, 19 nt, Artificial Sequence
  Description of Artificial Sequence: Synthetic oligonucleotide
agaauucuuauccagggga

SEQ ID NO: 2742912 - RNA, 19 nt, Artificial Sequence
  Description of Artificial Sequence: Synthetic oligonucleotide
acaguagccgaacugcagc

SEQ ID NO: 2742913 - RNA, 19 nt, Artificial Sequence
  Description of Artificial Sequence: Synthetic oligonucleotide
uucucaagcaaaccgcuag

SEQ ID NO: 2742914 - RNA, 19 nt, Artificial Sequence
  Description of Artificial Sequence: Synthetic oligonucleotide
ucugaaucaucaaugucca

SEQ ID NO: 2742915 - RNA, 19 nt, Artificial Sequence
  Description of Artificial Sequence: Synthetic oligonucleotide
acaacuaaggaaaugggag

SEQ ID NO: 2742916 - RNA, 19 nt, Artificial Sequence
  Description of Artificial Sequence: Synthetic oligonucleotide
agagaugccuuggaaaucc

SEQ ID NO: 2742917 - RNA, 19 nt, Artificial Sequence
  Description of Artificial Sequence: Synthetic oligonucleotide
auuccguguuaacagacac

SEQ ID NO: 2742918 - RNA, 19 nt, Artificial Sequence
  Description of Artificial Sequence: Synthetic oligonucleotide
uggaaauccgccuuguucu

SEQ ID NO: 2742919 - RNA, 19 nt, Artificial Sequence
  Description of Artificial Sequence: Synthetic oligonucleotide
caaagcacagaucugaauc

SEQ ID NO: 2742920 - RNA, 19 nt, Artificial Sequence
  Description of Artificial Sequence: Synthetic oligonucleotide
gauagugcuggcaaagagg

SEQ ID NO: 2742921 - RNA, 19 nt, Artificial Sequence
  Description of Artificial Sequence: Synthetic oligonucleotide
caaaccgcuaggaugaagc

SEQ ID NO: 2742922 - RNA, 19 nt, Artificial Sequence
  Description of Artificial Sequence: Synthetic oligonucleotide
aaaggcucgcucuggagag

SEQ ID NO: 2742923 - RNA, 19 nt, Artificial Sequence
  Description of Artificial Sequence: Synthetic oligonucleotide
aacgaguugaaggggaagg

SEQ ID NO: 2742924 - RNA, 19 nt, Artificial Sequence
  Description of Artificial Sequence: Synthetic oligonucleotide
ugaucuguauucucaagca

SEQ ID NO: 2742925 - RNA, 19 nt, Artificial Sequence
  Description of Artificial Sequence: Synthetic oligonucleotide
aaugggagcaguucagcca

SEQ ID NO: 2742926 - RNA, 19 nt, Artificial Sequence
  Description of Artificial Sequence: Synthetic oligonucleotide
uucaugacgacaaggugca

SEQ ID NO: 2742927 - RNA, 19 nt, Artificial Sequence
  Description of Artificial Sequence: Synthetic oligonucleotide
uggucugacagaguaaagg

SEQ ID NO: 2742928 - RNA, 19 nt, Artificial Sequence
  Description of Artificial Sequence: Synthetic oligonucleotide
aacuccacaacuaaggaaa

SEQ ID NO: 2742929 - RNA, 19 nt, Artificial Sequence
  Description of Artificial Sequence: Synthetic oligonucleotide
aucaucaauguccaacaag

SEQ ID NO: 2742930 - RNA, 19 nt, Artificial Sequence
  Description of Artificial Sequence: Synthetic oligonucleotide
aaauccgccuuguucuggg

SEQ ID NO: 2742931 - RNA, 19 nt, Artificial Sequence
  Description of Artificial Sequence: Synthetic oligonucleotide
aguucagccaacgaaguuc

SEQ ID NO: 2742932 - RNA, 19 nt, Artificial Sequence
  Description of Artificial Sequence: Synthetic oligonucleotide
aacagacacacauugugaa

SEQ ID NO: 2742933 - RNA, 19 nt, Artificial Sequence
  Description of Artificial Sequence: Synthetic oligonucleotide
auaaaggagauaggcgucc

SEQ ID NO: 2742934 - RNA, 19 nt, Artificial Sequence
  Description of Artificial Sequence: Synthetic oligonucleotide
gaaucaucaauguccaaca

SEQ ID NO: 2742935 - RNA, 19 nt, Artificial Sequence
  Description of Artificial Sequence: Synthetic oligonucleotide
gaaguucaugacgacaagg

SEQ ID NO: 2742936 - RNA, 19 nt, Artificial Sequence
  Description of Artificial Sequence: Synthetic oligonucleotide
ucugccaaucuccaacucc

SEQ ID NO: 2742937 - RNA, 19 nt, Artificial Sequence
  Description of Artificial Sequence: Synthetic oligonucleotide
guucaugacgacaaggugc

SEQ ID NO: 2742938 - RNA, 19 nt, Artificial Sequence
  Description of Artificial Sequence: Synthetic oligonucleotide
ugaagcugcccacacagga

SEQ ID NO: 2742939 - RNA, 19 nt, Artificial Sequence
  Description of Artificial Sequence: Synthetic oligonucleotide
caggggaugucaaagagug

SEQ ID NO: 2742940 - RNA, 19 nt, Artificial Sequence
  Description of Artificial Sequence: Synthetic oligonucleotide
uauucucaagcaaaccgcu

SEQ ID NO: 2742941 - RNA, 19 nt, Artificial Sequence
  Description of Artificial Sequence: Synthetic oligonucleotide
caacuaaggaaaugggagc

SEQ ID NO: 2742942 - RNA, 19 nt, Artificial Sequence
  Description of Artificial Sequence: Synthetic oligonucleotide
caaagagugaacguucugc

SEQ ID NO: 2742943 - RNA, 19 nt, Artificial Sequence
  Description of Artificial Sequence: Synthetic oligonucleotide
ucucaagcaaaccgcuagg

SEQ ID NO: 2742944 - RNA, 19 nt, Artificial Sequence
  Description of Artificial Sequence: Synthetic oligonucleotide
gucagcaguauauaaagga

SEQ ID NO: 2742945 - RNA, 19 nt, Artificial Sequence
  Description of Artificial Sequence: Synthetic oligonucleotide
ugucaaagagugaacguuc

SEQ ID NO: 2742946 - RNA, 19 nt, Artificial Sequence
  Description of Artificial Sequence: Synthetic oligonucleotide
gagaugaccgacaccaccg

SEQ ID NO: 2742947 - RNA, 19 nt, Artificial Sequence
  Description of Artificial Sequence: Synthetic oligonucleotide
uuggaaauccgccuuguuc

SEQ ID NO: 2742948 - RNA, 19 nt, Artificial Sequence
  Description of Artificial Sequence: Synthetic oligonucleotide
aacuaaggaaaugggagca

SEQ ID NO: 2742949 - RNA, 19 nt, Artificial Sequence
  Description of Artificial Sequence: Synthetic oligonucleotide
uaggcguccagcaacuuca

SEQ ID NO: 2742950 - RNA, 19 nt, Artificial Sequence
  Description of Artificial Sequence: Synthetic oligonucleotide
accgacaccaccgaggccg

SEQ ID NO: 2742951 - RNA, 19 nt, Artificial Sequence
  Description of Artificial Sequence: Synthetic oligonucleotide
ggucugacagaguaaaggg

SEQ ID NO: 2742952 - RNA, 19 nt, Artificial Sequence
  Description of Artificial Sequence: Synthetic oligonucleotide
uauaaaggagauaggcguc

SEQ ID NO: 2742953 - RNA, 19 nt, Artificial Sequence
  Description of Artificial Sequence: Synthetic oligonucleotide
ugaagcuggucugacagag

SEQ ID NO: 2742954 - RNA, 19 nt, Artificial Sequence
  Description of Artificial Sequence: Synthetic oligonucleotide
uccguguuaacagacacac

SEQ ID NO: 2742955 - RNA, 19 nt, Artificial Sequence
  Description of Artificial Sequence: Synthetic oligonucleotide
aaucuccaacuccacaacu

SEQ ID NO: 2742956 - RNA, 19 nt, Artificial Sequence
  Description of Artificial Sequence: Synthetic oligonucleotide
aaguucaugacgacaaggu

SEQ ID NO: 2742957 - RNA, 19 nt, Artificial Sequence
  Description of Artificial Sequence: Synthetic oligonucleotide
aagcaaaccgcuaggauga

SEQ ID NO: 2742958 - RNA, 19 nt, Artificial Sequence
  Description of Artificial Sequence: Synthetic oligonucleotide
acaaggugcaggauagugc

SEQ ID NO: 2742959 - RNA, 19 nt, Artificial Sequence
  Description of Artificial Sequence: Synthetic oligonucleotide
ugaacguucugccaaucuc

SEQ ID NO: 2742960 - RNA, 19 nt, Artificial Sequence
  Description of Artificial Sequence: Synthetic oligonucleotide
acacacauugugaagcugg

SEQ ID NO: 2742961 - RNA, 19 nt, Artificial Sequence
  Description of Artificial Sequence: Synthetic oligonucleotide
uggcaaagaggaaaucagc

SEQ ID NO: 2742962 - RNA, 19 nt, Artificial Sequence
  Description of Artificial Sequence: Synthetic oligonucleotide
gagacaguagccgaacugc

SEQ ID NO: 2742963 - RNA, 19 nt, Artificial Sequence
  Description of Artificial Sequence: Synthetic oligonucleotide
cagacacacauugugaagc

SEQ ID NO: 2742964 - RNA, 19 nt, Artificial Sequence
  Description of Artificial Sequence: Synthetic oligonucleotide
acagaucugaaucaucaau

SEQ ID NO: 2742965 - RNA, 19 nt, Artificial Sequence
  Description of Artificial Sequence: Synthetic oligonucleotide
aggaaaugggagcaguuca

SEQ ID NO: 2742966 - RNA, 19 nt, Artificial Sequence
  Description of Artificial Sequence: Synthetic oligonucleotide
gagauaggcguccagcaac

SEQ ID NO: 2742967 - RNA, 19 nt, Artificial Sequence
  Description of Artificial Sequence: Synthetic oligonucleotide
gaugccuuggaaauccgcc

SEQ ID NO: 2742968 - RNA, 19 nt, Artificial Sequence
  Description of Artificial Sequence: Synthetic oligonucleotide
acgaacgcgggacacuucg

SEQ ID NO: 2742969 - RNA, 19 nt, Artificial Sequence
  Description of Artificial Sequence: Synthetic oligonucleotide
aacuucagccgcuggggag

SEQ ID NO: 2742970 - RNA, 19 nt, Artificial Sequence
  Description of Artificial Sequence: Synthetic oligonucleotide
uccaggaaccgcgagauga

SEQ ID NO: 2742971 - RNA, 19 nt, Artificial Sequence
  Description of Artificial Sequence: Synthetic oligonucleotide
gaguugaaggggaaggugc

SEQ ID NO: 2742972 - RNA, 19 nt, Artificial Sequence
  Description of Artificial Sequence: Synthetic oligonucleotide
guauucucaagcaaaccgc

SEQ ID NO: 2742973 - RNA, 19 nt, Artificial Sequence
  Description of Artificial Sequence: Synthetic oligonucleotide
aguauauaaaggagauagg

SEQ ID NO: 2742974 - RNA, 19 nt, Artificial Sequence
  Description of Artificial Sequence: Synthetic oligonucleotide
gaacguucugccaaucucc

SEQ ID NO: 2742975 - RNA, 19 nt, Artificial Sequence
  Description of Artificial Sequence: Synthetic oligonucleotide
aguucaugacgacaaggug

SEQ ID NO: 2742976 - RNA, 19 nt, Artificial Sequence
  Description of Artificial Sequence: Synthetic oligonucleotide
uauccaggggaugucaaag

SEQ ID NO: 2742977 - RNA, 19 nt, Artificial Sequence
  Description of Artificial Sequence: Synthetic oligonucleotide
ugaccgacaccaccgaggc

SEQ ID NO: 2742978 - RNA, 19 nt, Artificial Sequence
  Description of Artificial Sequence: Synthetic oligonucleotide
ugcaggauagugcuggcaa

SEQ ID NO: 2742979 - RNA, 19 nt, Artificial Sequence
  Description of Artificial Sequence: Synthetic oligonucleotide
ucagcaaaggcucgcucug

SEQ ID NO: 2742980 - RNA, 19 nt, Artificial Sequence
  Description of Artificial Sequence: Synthetic oligonucleotide
aagagugaacguucugcca

SEQ ID NO: 2742981 - RNA, 19 nt, Artificial Sequence
  Description of Artificial Sequence: Synthetic oligonucleotide
agagugaacguucugccaa

SEQ ID NO: 2742982 - RNA, 19 nt, Artificial Sequence
  Description of Artificial Sequence: Synthetic oligonucleotide
aacaagcugucaucucaag

SEQ ID NO: 2742983 - RNA, 19 nt, Artificial Sequence
  Description of Artificial Sequence: Synthetic oligonucleotide
auaggcguccagcaacuuc

SEQ ID NO: 2742984 - RNA, 19 nt, Artificial Sequence
  Description of Artificial Sequence: Synthetic oligonucleotide
caagcugucaucucaagaa

SEQ ID NO: 2742985 - RNA, 19 nt, Artificial Sequence
  Description of Artificial Sequence: Synthetic oligonucleotide
ggaugucaaagagugaacg

SEQ ID NO: 2742986 - RNA, 19 nt, Artificial Sequence
  Description of Artificial Sequence: Synthetic oligonucleotide
aucagcaaaggcucgcucu

SEQ ID NO: 2742987 - RNA, 19 nt, Artificial Sequence
  Description of Artificial Sequence: Synthetic oligonucleotide
aagcugcccacacaggaga

SEQ ID NO: 2742988 - RNA, 19 nt, Artificial Sequence
  Description of Artificial Sequence: Synthetic oligonucleotide
uggagagaugccuuggaaa

SEQ ID NO: 2742989 - RNA, 19 nt, Artificial Sequence
  Description of Artificial Sequence: Synthetic oligonucleotide
auuucacacccagucaggg

SEQ ID NO: 2742990 - RNA, 19 nt, Artificial Sequence
  Description of Artificial Sequence: Synthetic oligonucleotide
auagugcuggcaaagagga

SEQ ID NO: 2742991 - RNA, 19 nt, Artificial Sequence
  Description of Artificial Sequence: Synthetic oligonucleotide
aggaugaagcugcccacac

SEQ ID NO: 2742992 - RNA, 19 nt, Artificial Sequence
  Description of Artificial Sequence: Synthetic oligonucleotide
cauuucacacccagucagg

SEQ ID NO: 2742993 - RNA, 19 nt, Artificial Sequence
  Description of Artificial Sequence: Synthetic oligonucleotide
caucucaagaauucuuauc

SEQ ID NO: 2742994 - RNA, 19 nt, Artificial Sequence
  Description of Artificial Sequence: Synthetic oligonucleotide
acauugugaagcuggucug

SEQ ID NO: 2742995 - RNA, 19 nt, Artificial Sequence
  Description of Artificial Sequence: Synthetic oligonucleotide
aaaccgcuaggaugaagcu

SEQ ID NO: 2742996 - RNA, 19 nt, Artificial Sequence
  Description of Artificial Sequence: Synthetic oligonucleotide
guugaucuguauucucaag

SEQ ID NO: 2742997 - RNA, 19 nt, Artificial Sequence
  Description of Artificial Sequence: Synthetic oligonucleotide
gacaaggugcaggauagug

SEQ ID NO: 2742998 - RNA, 19 nt, Artificial Sequence
  Description of Artificial Sequence: Synthetic oligonucleotide
acaagcugucaucucaaga

SEQ ID NO: 2742999 - RNA, 19 nt, Artificial Sequence
  Description of Artificial Sequence: Synthetic oligonucleotide
ugucaucucaagaauucuu

SEQ ID NO: 2743000 - RNA, 19 nt, Artificial Sequence
  Description of Artificial Sequence: Synthetic oligonucleotide
acacuucggauaccggacg

SEQ ID NO: 2743001 - RNA, 19 nt, Artificial Sequence
  Description of Artificial Sequence: Synthetic oligonucleotide
uggacuccccauuucacac

SEQ ID NO: 2743002 - RNA, 19 nt, Artificial Sequence
  Description of Artificial Sequence: Synthetic oligonucleotide
ucaagcaaaccgcuaggau

SEQ ID NO: 2743003 - RNA, 19 nt, Artificial Sequence
  Description of Artificial Sequence: Synthetic oligonucleotide
uggggaguggagcucaagu

SEQ ID NO: 2743004 - RNA, 19 nt, Artificial Sequence
  Description of Artificial Sequence: Synthetic oligonucleotide
ucaucucaagaauucuuau

SEQ ID NO: 2743005 - RNA, 19 nt, Artificial Sequence
  Description of Artificial Sequence: Synthetic oligonucleotide
aagcugucaucucaagaau

SEQ ID NO: 2743006 - RNA, 19 nt, Artificial Sequence
  Description of Artificial Sequence: Synthetic oligonucleotide
auguccaacaagcugucau

SEQ ID NO: 2743007 - RNA, 19 nt, Artificial Sequence
  Description of Artificial Sequence: Synthetic oligonucleotide
accgcgagaugaccgacac

SEQ ID NO: 2743008 - RNA, 19 nt, Artificial Sequence
  Description of Artificial Sequence: Synthetic oligonucleotide
cacacaggagaugaagccg

SEQ ID NO: 2743009 - RNA, 19 nt, Artificial Sequence
  Description of Artificial Sequence: Synthetic oligonucleotide
cacagcaaagcacagaucu

SEQ ID NO: 2743010 - RNA, 19 nt, Artificial Sequence
  Description of Artificial Sequence: Synthetic oligonucleotide
gucugacagaguaaagggg

SEQ ID NO: 2743011 - RNA, 19 nt, Artificial Sequence
  Description of Artificial Sequence: Synthetic oligonucleotide
gacuccccauuucacaccc

SEQ ID NO: 2743012 - RNA, 19 nt, Artificial Sequence
  Description of Artificial Sequence: Synthetic oligonucleotide
acacaggagaugaagccgg

SEQ ID NO: 2743013 - RNA, 19 nt, Artificial Sequence
  Description of Artificial Sequence: Synthetic oligonucleotide
agugcuggcaaagaggaaa

SEQ ID NO: 2743014 - RNA, 19 nt, Artificial Sequence
  Description of Artificial Sequence: Synthetic oligonucleotide
ucagccaacgaaguucaug

SEQ ID NO: 2743015 - RNA, 19 nt, Artificial Sequence
  Description of Artificial Sequence: Synthetic oligonucleotide
cacaacuaaggaaauggga

SEQ ID NO: 2743016 - RNA, 19 nt, Artificial Sequence
  Description of Artificial Sequence: Synthetic oligonucleotide
aguggagcucaaguacucc

SEQ ID NO: 2743017 - RNA, 19 nt, Artificial Sequence
  Description of Artificial Sequence: Synthetic oligonucleotide
cagccaacgaaguucauga

SEQ ID NO: 2743018 - RNA, 19 nt, Artificial Sequence
  Description of Artificial Sequence: Synthetic oligonucleotide
auugugaagcuggucugac

SEQ ID NO: 2743019 - RNA, 19 nt, Artificial Sequence
  Description of Artificial Sequence: Synthetic oligonucleotide
aaggugcccacgaggagac

SEQ ID NO: 2743020 - RNA, 19 nt, Artificial Sequence
  Description of Artificial Sequence: Synthetic oligonucleotide
uuucacacccagucagggc

SEQ ID NO: 2743021 - RNA, 19 nt, Artificial Sequence
  Description of Artificial Sequence: Synthetic oligonucleotide
gaaaugggagcaguucagc

SEQ ID NO: 2743022 - RNA, 19 nt, Artificial Sequence
  Description of Artificial Sequence: Synthetic oligonucleotide
aggagauaggcguccagca

SEQ ID NO: 2743023 - RNA, 19 nt, Artificial Sequence
  Description of Artificial Sequence: Synthetic oligonucleotide
gcguccagcaacuucagcc

SEQ ID NO: 2743024 - RNA, 19 nt, Artificial Sequence
  Description of Artificial Sequence: Synthetic oligonucleotide
caguagccgaacugcagcg

SEQ ID NO: 2743025 - RNA, 19 nt, Artificial Sequence
  Description of Artificial Sequence: Synthetic oligonucleotide
uuccguguuaacagacaca

SEQ ID NO: 2743026 - RNA, 19 nt, Artificial Sequence
  Description of Artificial Sequence: Synthetic oligonucleotide
aaaucagcaaaggcucgcu

SEQ ID NO: 2743027 - RNA, 19 nt, Artificial Sequence
  Description of Artificial Sequence: Synthetic oligonucleotide
agcaguauauaaaggagau

SEQ ID NO: 2743028 - RNA, 19 nt, Artificial Sequence
  Description of Artificial Sequence: Synthetic oligonucleotide
ucuggacuccccauuucac

SEQ ID NO: 2743029 - RNA, 19 nt, Artificial Sequence
  Description of Artificial Sequence: Synthetic oligonucleotide
aauccgccuuguucugggg

SEQ ID NO: 2743030 - RNA, 19 nt, Artificial Sequence
  Description of Artificial Sequence: Synthetic oligonucleotide
cagcaguauauaaaggaga

SEQ ID NO: 2743031 - RNA, 19 nt, Artificial Sequence
  Description of Artificial Sequence: Synthetic oligonucleotide
ucuuauccaggggauguca

SEQ ID NO: 2743032 - RNA, 19 nt, Artificial Sequence
  Description of Artificial Sequence: Synthetic oligonucleotide
gaugaccgacaccaccgag

SEQ ID NO: 2743033 - RNA, 19 nt, Artificial Sequence
  Description of Artificial Sequence: Synthetic oligonucleotide
acgacaaggugcaggauag

SEQ ID NO: 2743034 - RNA, 19 nt, Artificial Sequence
  Description of Artificial Sequence: Synthetic oligonucleotide
augaccgacaccaccgagg

SEQ ID NO: 2743035 - RNA, 19 nt, Artificial Sequence
  Description of Artificial Sequence: Synthetic oligonucleotide
gacacuucggauaccggac

SEQ ID NO: 2743036 - RNA, 19 nt, Artificial Sequence
  Description of Artificial Sequence: Synthetic oligonucleotide
agacacacauugugaagcu

SEQ ID NO: 2743037 - RNA, 19 nt, Artificial Sequence
  Description of Artificial Sequence: Synthetic oligonucleotide
gaugucaaagagugaacgu

SEQ ID NO: 2743038 - RNA, 19 nt, Artificial Sequence
  Description of Artificial Sequence: Synthetic oligonucleotide
gacgacaaggugcaggaua

SEQ ID NO: 2743039 - RNA, 19 nt, Artificial Sequence
  Description of Artificial Sequence: Synthetic oligonucleotide
guagccgaacugcagcgcc

SEQ ID NO: 2743040 - RNA, 19 nt, Artificial Sequence
  Description of Artificial Sequence: Synthetic oligonucleotide
aguagccgaacugcagcgc

SEQ ID NO: 2743041 - RNA, 19 nt, Artificial Sequence
  Description of Artificial Sequence: Synthetic oligonucleotide
augggagcaguucagccaa

SEQ ID NO: 2743042 - RNA, 19 nt, Artificial Sequence
  Description of Artificial Sequence: Synthetic oligonucleotide
gaucuguauucucaagcaa

SEQ ID NO: 2743043 - RNA, 19 nt, Artificial Sequence
  Description of Artificial Sequence: Synthetic oligonucleotide
agaugccuuggaaauccgc

SEQ ID NO: 2743044 - RNA, 19 nt, Artificial Sequence
  Description of Artificial Sequence: Synthetic oligonucleotide
ccauuucacacccagucag

SEQ ID NO: 2743045 - RNA, 19 nt, Artificial Sequence
  Description of Artificial Sequence: Synthetic oligonucleotide
agccaacgaaguucaugac

SEQ ID NO: 2743046 - RNA, 19 nt, Artificial Sequence
  Description of Artificial Sequence: Synthetic oligonucleotide
augucaaagagugaacguu

SEQ ID NO: 2743047 - RNA, 19 nt, Artificial Sequence
  Description of Artificial Sequence: Synthetic oligonucleotide
gccgacaugacgaacgcgg

SEQ ID NO: 2743048 - RNA, 19 nt, Artificial Sequence
  Description of Artificial Sequence: Synthetic oligonucleotide
gacaguagccgaacugcag

SEQ ID NO: 2743049 - RNA, 19 nt, Artificial Sequence
  Description of Artificial Sequence: Synthetic oligonucleotide
caaucuccaacuccacaac

SEQ ID NO: 2743050 - RNA, 19 nt, Artificial Sequence
  Description of Artificial Sequence: Synthetic oligonucleotide
cuccaacuccacaacuaag

SEQ ID NO: 2743051 - RNA, 19 nt, Artificial Sequence
  Description of Artificial Sequence: Synthetic oligonucleotide
aggaaccgcgagaugaccg

SEQ ID NO: 2743052 - RNA, 19 nt, Artificial Sequence
  Description of Artificial Sequence: Synthetic oligonucleotide
acuaaggaaaugggagcag

SEQ ID NO: 2743053 - RNA, 19 nt, Artificial Sequence
  Description of Artificial Sequence: Synthetic oligonucleotide
augccuuggaaauccgccu

SEQ ID NO: 2743054 - RNA, 19 nt, Artificial Sequence
  Description of Artificial Sequence: Synthetic oligonucleotide
cugccaaucuccaacucca

SEQ ID NO: 2743055 - RNA, 19 nt, Artificial Sequence
  Description of Artificial Sequence: Synthetic oligonucleotide
uuauccaggggaugucaaa

SEQ ID NO: 2743056 - RNA, 19 nt, Artificial Sequence
  Description of Artificial Sequence: Synthetic oligonucleotide
aacgcgggacacuucggau

SEQ ID NO: 2743057 - RNA, 19 nt, Artificial Sequence
  Description of Artificial Sequence: Synthetic oligonucleotide
acgaggagacaguagccga

SEQ ID NO: 2743058 - RNA, 19 nt, Artificial Sequence
  Description of Artificial Sequence: Synthetic oligonucleotide
ccaacgaaguucaugacga

SEQ ID NO: 2743059 - RNA, 19 nt, Artificial Sequence
  Description of Artificial Sequence: Synthetic oligonucleotide
gaacgaguugaaggggaag

SEQ ID NO: 2743060 - RNA, 19 nt, Artificial Sequence
  Description of Artificial Sequence: Synthetic oligonucleotide
cuccccauuucacacccag

SEQ ID NO: 2743061 - RNA, 19 nt, Artificial Sequence
  Description of Artificial Sequence: Synthetic oligonucleotide
caggauagugcuggcaaag

SEQ ID NO: 2743062 - RNA, 19 nt, Artificial Sequence
  Description of Artificial Sequence: Synthetic oligonucleotide
gggaguggagcucaaguac

SEQ ID NO: 2743063 - RNA, 19 nt, Artificial Sequence
  Description of Artificial Sequence: Synthetic oligonucleotide
uugugaagcuggucugaca

SEQ ID NO: 2743064 - RNA, 19 nt, Artificial Sequence
  Description of Artificial Sequence: Synthetic oligonucleotide
gcucaaguacuccuccagg

SEQ ID NO: 2743065 - RNA, 19 nt, Artificial Sequence
  Description of Artificial Sequence: Synthetic oligonucleotide
aacguucugccaaucucca

SEQ ID NO: 2743066 - RNA, 19 nt, Artificial Sequence
  Description of Artificial Sequence: Synthetic oligonucleotide
uccagcaacuucagccgcu

SEQ ID NO: 2743067 - RNA, 19 nt, Artificial Sequence
  Description of Artificial Sequence: Synthetic oligonucleotide
cccacgaggagacaguagc

SEQ ID NO: 2743068 - RNA, 19 nt, Artificial Sequence
  Description of Artificial Sequence: Synthetic oligonucleotide
ccacaacuaaggaaauggg

SEQ ID NO: 2743069 - RNA, 19 nt, Artificial Sequence
  Description of Artificial Sequence: Synthetic oligonucleotide
gaagccggagaggaacgag

SEQ ID NO: 2743070 - RNA, 19 nt, Artificial Sequence
  Description of Artificial Sequence: Synthetic oligonucleotide
auccaggggaugucaaaga

SEQ ID NO: 2743071 - RNA, 19 nt, Artificial Sequence
  Description of Artificial Sequence: Synthetic oligonucleotide
uaaaggagauaggcgucca

SEQ ID NO: 2743072 - RNA, 19 nt, Artificial Sequence
  Description of Artificial Sequence: Synthetic oligonucleotide
accgaggccgacaugacga

SEQ ID NO: 2743073 - RNA, 19 nt, Artificial Sequence
  Description of Artificial Sequence: Synthetic oligonucleotide
caaggugcaggauagugcu

SEQ ID NO: 2743074 - RNA, 19 nt, Artificial Sequence
  Description of Artificial Sequence: Synthetic oligonucleotide
gaaggggaaggugcccacg

SEQ ID NO: 2743075 - RNA, 19 nt, Artificial Sequence
  Description of Artificial Sequence: Synthetic oligonucleotide
ccacacaggagaugaagcc

SEQ ID NO: 2743076 - RNA, 19 nt, Artificial Sequence
  Description of Artificial Sequence: Synthetic oligonucleotide
ggagcucaaguacuccucc

SEQ ID NO: 2743077 - RNA, 19 nt, Artificial Sequence
  Description of Artificial Sequence: Synthetic oligonucleotide
gaacgcgggacacuucgga

SEQ ID NO: 2743078 - RNA, 19 nt, Artificial Sequence
  Description of Artificial Sequence: Synthetic oligonucleotide
caauguccaacaagcuguc

SEQ ID NO: 2743079 - RNA, 19 nt, Artificial Sequence
  Description of Artificial Sequence: Synthetic oligonucleotide
ggaaaucagcaaaggcucg

SEQ ID NO: 2743080 - RNA, 19 nt, Artificial Sequence
  Description of Artificial Sequence: Synthetic oligonucleotide
agcaaaggcucgcucugga

SEQ ID NO: 2743081 - RNA, 19 nt, Artificial Sequence
  Description of Artificial Sequence: Synthetic oligonucleotide
guucagccaacgaaguuca

SEQ ID NO: 2743082 - RNA, 19 nt, Artificial Sequence
  Description of Artificial Sequence: Synthetic oligonucleotide
ggaaaugggagcaguucag

SEQ ID NO: 2743083 - RNA, 19 nt, Artificial Sequence
  Description of Artificial Sequence: Synthetic oligonucleotide
gacacacauugugaagcug

SEQ ID NO: 2743084 - RNA, 19 nt, Artificial Sequence
  Description of Artificial Sequence: Synthetic oligonucleotide
acacauugugaagcugguc

SEQ ID NO: 2743085 - RNA, 19 nt, Artificial Sequence
  Description of Artificial Sequence: Synthetic oligonucleotide
agccgaacugcagcgcccc

SEQ ID NO: 2743086 - RNA, 19 nt, Artificial Sequence
  Description of Artificial Sequence: Synthetic oligonucleotide
aagccggagaggaacgagu

SEQ ID NO: 2743087 - RNA, 19 nt, Artificial Sequence
  Description of Artificial Sequence: Synthetic oligonucleotide
aauguccaacaagcuguca

SEQ ID NO: 2743088 - RNA, 19 nt, Artificial Sequence
  Description of Artificial Sequence: Synthetic oligonucleotide
agugaacguucugccaauc

SEQ ID NO: 2743089 - RNA, 19 nt, Artificial Sequence
  Description of Artificial Sequence: Synthetic oligonucleotide
uagccgaacugcagcgccc

SEQ ID NO: 2743090 - RNA, 19 nt, Artificial Sequence
  Description of Artificial Sequence: Synthetic oligonucleotide
cagcaaagcacagaucuga

SEQ ID NO: 2743091 - RNA, 19 nt, Artificial Sequence
  Description of Artificial Sequence: Synthetic oligonucleotide
ggacacuucggauaccgga

SEQ ID NO: 2743092 - RNA, 19 nt, Artificial Sequence
  Description of Artificial Sequence: Synthetic oligonucleotide
cggucagcaguauauaaag

SEQ ID NO: 2743093 - RNA, 19 nt, Artificial Sequence
  Description of Artificial Sequence: Synthetic oligonucleotide
ugaaggggaaggugcccac

SEQ ID NO: 2743094 - RNA, 19 nt, Artificial Sequence
  Description of Artificial Sequence: Synthetic oligonucleotide
ugccuuggaaauccgccuu

SEQ ID NO: 2743095 - RNA, 19 nt, Artificial Sequence
  Description of Artificial Sequence: Synthetic oligonucleotide
cuggucugacagaguaaag

SEQ ID NO: 2743096 - RNA, 19 nt, Artificial Sequence
  Description of Artificial Sequence: Synthetic oligonucleotide
agaugaccgacaccaccga

SEQ ID NO: 2743097 - RNA, 19 nt, Artificial Sequence
  Description of Artificial Sequence: Synthetic oligonucleotide
gucaucucaagaauucuua

SEQ ID NO: 2743098 - RNA, 19 nt, Artificial Sequence
  Description of Artificial Sequence: Synthetic oligonucleotide
gagaugccuuggaaauccg

SEQ ID NO: 2743099 - RNA, 19 nt, Artificial Sequence
  Description of Artificial Sequence: Synthetic oligonucleotide
cucuggagagaugccuugg

SEQ ID NO: 2743100 - RNA, 19 nt, Artificial Sequence
  Description of Artificial Sequence: Synthetic oligonucleotide
agccgcuggggaguggagc

SEQ ID NO: 2743101 - RNA, 19 nt, Artificial Sequence
  Description of Artificial Sequence: Synthetic oligonucleotide
aggagacaguagccgaacu

SEQ ID NO: 2743102 - RNA, 19 nt, Artificial Sequence
  Description of Artificial Sequence: Synthetic oligonucleotide
uucugccaaucuccaacuc

SEQ ID NO: 2743103 - RNA, 19 nt, Artificial Sequence
  Description of Artificial Sequence: Synthetic oligonucleotide
acaugacgaacgcgggaca

SEQ ID NO: 2743104 - RNA, 19 nt, Artificial Sequence
  Description of Artificial Sequence: Synthetic oligonucleotide
gcacagaucugaaucauca

SEQ ID NO: 2743105 - RNA, 19 nt, Artificial Sequence
  Description of Artificial Sequence: Synthetic oligonucleotide
ucgucuggacuccccauuu

SEQ ID NO: 2743106 - RNA, 19 nt, Artificial Sequence
  Description of Artificial Sequence: Synthetic oligonucleotide
caccgaggccgacaugacg

SEQ ID NO: 2743107 - RNA, 19 nt, Artificial Sequence
  Description of Artificial Sequence: Synthetic oligonucleotide
caugacgaacgcgggacac

SEQ ID NO: 2743108 - RNA, 19 nt, Artificial Sequence
  Description of Artificial Sequence: Synthetic oligonucleotide
gaggagacaguagccgaac

SEQ ID NO: 2743109 - RNA, 19 nt, Artificial Sequence
  Description of Artificial Sequence: Synthetic oligonucleotide
ggggaugucaaagagugaa

SEQ ID NO: 2743110 - RNA, 19 nt, Artificial Sequence
  Description of Artificial Sequence: Synthetic oligonucleotide
caacgaaguucaugacgac

SEQ ID NO: 2743111 - RNA, 19 nt, Artificial Sequence
  Description of Artificial Sequence: Synthetic oligonucleotide
cuggacuccccauuucaca

SEQ ID NO: 2743112 - RNA, 19 nt, Artificial Sequence
  Description of Artificial Sequence: Synthetic oligonucleotide
agauaggcguccagcaacu

SEQ ID NO: 2743113 - RNA, 19 nt, Artificial Sequence
  Description of Artificial Sequence: Synthetic oligonucleotide
ugccaaucuccaacuccac

SEQ ID NO: 2743114 - RNA, 19 nt, Artificial Sequence
  Description of Artificial Sequence: Synthetic oligonucleotide
guccagcaacuucagccgc

SEQ ID NO: 2743115 - RNA, 19 nt, Artificial Sequence
  Description of Artificial Sequence: Synthetic oligonucleotide
cucgcucuggagagaugcc

SEQ ID NO: 2743116 - RNA, 19 nt, Artificial Sequence
  Description of Artificial Sequence: Synthetic oligonucleotide
gagagaugccuuggaaauc

SEQ ID NO: 2743117 - RNA, 19 nt, Artificial Sequence
  Description of Artificial Sequence: Synthetic oligonucleotide
acgaguugaaggggaaggu

SEQ ID NO: 2743118 - RNA, 19 nt, Artificial Sequence
  Description of Artificial Sequence: Synthetic oligonucleotide
ugaagccggagaggaacga

SEQ ID NO: 2743119 - RNA, 19 nt, Artificial Sequence
  Description of Artificial Sequence: Synthetic oligonucleotide
cuuauccaggggaugucaa

SEQ ID NO: 2743120 - RNA, 19 nt, Artificial Sequence
  Description of Artificial Sequence: Synthetic oligonucleotide
gguugaucuguauucucaa

SEQ ID NO: 2743121 - RNA, 19 nt, Artificial Sequence
  Description of Artificial Sequence: Synthetic oligonucleotide
caacaagcugucaucucaa

SEQ ID NO: 2743122 - RNA, 19 nt, Artificial Sequence
  Description of Artificial Sequence: Synthetic oligonucleotide
aggauagugcuggcaaaga

SEQ ID NO: 2743123 - RNA, 19 nt, Artificial Sequence
  Description of Artificial Sequence: Synthetic oligonucleotide
ccaacaagcugucaucuca

SEQ ID NO: 2743124 - RNA, 19 nt, Artificial Sequence
  Description of Artificial Sequence: Synthetic oligonucleotide
ccaaucuccaacuccacaa

SEQ ID NO: 2743125 - RNA, 19 nt, Artificial Sequence
  Description of Artificial Sequence: Synthetic oligonucleotide
cuccacaacuaaggaaaug

SEQ ID NO: 2743126 - RNA, 19 nt, Artificial Sequence
  Description of Artificial Sequence: Synthetic oligonucleotide
ugacgaacgcgggacacuu

SEQ ID NO: 2743127 - RNA, 19 nt, Artificial Sequence
  Description of Artificial Sequence: Synthetic oligonucleotide
gaauucuuauccaggggau

SEQ ID NO: 2743128 - RNA, 19 nt, Artificial Sequence
  Description of Artificial Sequence: Synthetic oligonucleotide
ggaaauccgccuuguucug

SEQ ID NO: 2743129 - RNA, 19 nt, Artificial Sequence
  Description of Artificial Sequence: Synthetic oligonucleotide
acaccaccgaggccgacau

SEQ ID NO: 2743130 - RNA, 19 nt, Artificial Sequence
  Description of Artificial Sequence: Synthetic oligonucleotide
agacaguagccgaacugca

SEQ ID NO: 2743131 - RNA, 19 nt, Artificial Sequence
  Description of Artificial Sequence: Synthetic oligonucleotide
gaguggagcucaaguacuc

SEQ ID NO: 2743132 - RNA, 19 nt, Artificial Sequence
  Description of Artificial Sequence: Synthetic oligonucleotide
cucaagcaaaccgcuagga

SEQ ID NO: 2743133 - RNA, 19 nt, Artificial Sequence
  Description of Artificial Sequence: Synthetic oligonucleotide
guucugccaaucuccaacu

SEQ ID NO: 2743134 - RNA, 19 nt, Artificial Sequence
  Description of Artificial Sequence: Synthetic oligonucleotide
aucuccaacuccacaacua

SEQ ID NO: 2743135 - RNA, 19 nt, Artificial Sequence
  Description of Artificial Sequence: Synthetic oligonucleotide
cugcccacacaggagauga

SEQ ID NO: 2743136 - RNA, 19 nt, Artificial Sequence
  Description of Artificial Sequence: Synthetic oligonucleotide
agcugucaucucaagaauu

SEQ ID NO: 2743137 - RNA, 19 nt, Artificial Sequence
  Description of Artificial Sequence: Synthetic oligonucleotide
ggguugaucuguauucuca

SEQ ID NO: 2743138 - RNA, 19 nt, Artificial Sequence
  Description of Artificial Sequence: Synthetic oligonucleotide
acgcgggacacuucggaua

SEQ ID NO: 2743139 - RNA, 19 nt, Artificial Sequence
  Description of Artificial Sequence: Synthetic oligonucleotide
ggagaggaacgaguugaag

SEQ ID NO: 2743140 - RNA, 19 nt, Artificial Sequence
  Description of Artificial Sequence: Synthetic oligonucleotide
gcaaaggcucgcucuggag

SEQ ID NO: 2743141 - RNA, 19 nt, Artificial Sequence
  Description of Artificial Sequence: Synthetic oligonucleotide
aaccgcgagaugaccgaca

SEQ ID NO: 2743142 - RNA, 19 nt, Artificial Sequence
  Description of Artificial Sequence: Synthetic oligonucleotide
cauugugaagcuggucuga

SEQ ID NO: 2743143 - RNA, 19 nt, Artificial Sequence
  Description of Artificial Sequence: Synthetic oligonucleotide
caggaaccgcgagaugacc

SEQ ID NO: 2743144 - RNA, 19 nt, Artificial Sequence
  Description of Artificial Sequence: Synthetic oligonucleotide
ggacuccccauuucacacc

SEQ ID NO: 2743145 - RNA, 19 nt, Artificial Sequence
  Description of Artificial Sequence: Synthetic oligonucleotide
gacaccaccgaggccgaca

SEQ ID NO: 2743146 - RNA, 19 nt, Artificial Sequence
  Description of Artificial Sequence: Synthetic oligonucleotide
gggagcaguucagccaacg

SEQ ID NO: 2743147 - RNA, 19 nt, Artificial Sequence
  Description of Artificial Sequence: Synthetic oligonucleotide
cgagaugaccgacaccacc

SEQ ID NO: 2743148 - RNA, 19 nt, Artificial Sequence
  Description of Artificial Sequence: Synthetic oligonucleotide
cuggagagaugccuuggaa

SEQ ID NO: 2743149 - RNA, 19 nt, Artificial Sequence
  Description of Artificial Sequence: Synthetic oligonucleotide
agcaaagcacagaucugaa

SEQ ID NO: 2743150 - RNA, 19 nt, Artificial Sequence
  Description of Artificial Sequence: Synthetic oligonucleotide
ccacgaggagacaguagcc

SEQ ID NO: 2743151 - RNA, 19 nt, Artificial Sequence
  Description of Artificial Sequence: Synthetic oligonucleotide
gaaccgcgagaugaccgac

SEQ ID NO: 2743152 - RNA, 19 nt, Artificial Sequence
  Description of Artificial Sequence: Synthetic oligonucleotide
augacgaacgcgggacacu

SEQ ID NO: 2743153 - RNA, 19 nt, Artificial Sequence
  Description of Artificial Sequence: Synthetic oligonucleotide
gugaacguucugccaaucu

SEQ ID NO: 2743154 - RNA, 19 nt, Artificial Sequence
  Description of Artificial Sequence: Synthetic oligonucleotide
ggaaccgcgagaugaccga

SEQ ID NO: 2743155 - RNA, 19 nt, Artificial Sequence
  Description of Artificial Sequence: Synthetic oligonucleotide
cuaaggaaaugggagcagu

SEQ ID NO: 2743156 - RNA, 19 nt, Artificial Sequence
  Description of Artificial Sequence: Synthetic oligonucleotide
ccgacaugacgaacgcggg

SEQ ID NO: 2743157 - RNA, 19 nt, Artificial Sequence
  Description of Artificial Sequence: Synthetic oligonucleotide
gcucuggagagaugccuug

SEQ ID NO: 2743158 - RNA, 19 nt, Artificial Sequence
  Description of Artificial Sequence: Synthetic oligonucleotide
gucaaagagugaacguucu

SEQ ID NO: 2743159 - RNA, 19 nt, Artificial Sequence
  Description of Artificial Sequence: Synthetic oligonucleotide
ucaugacgacaaggugcag

SEQ ID NO: 2743160 - RNA, 19 nt, Artificial Sequence
  Description of Artificial Sequence: Synthetic oligonucleotide
gcccacacaggagaugaag

SEQ ID NO: 2743161 - RNA, 19 nt, Artificial Sequence
  Description of Artificial Sequence: Synthetic oligonucleotide
cagucagggccacagcaaa

SEQ ID NO: 2743162 - RNA, 19 nt, Artificial Sequence
  Description of Artificial Sequence: Synthetic oligonucleotide
ugcuggcaaagaggaaauc

SEQ ID NO: 2743163 - RNA, 19 nt, Artificial Sequence
  Description of Artificial Sequence: Synthetic oligonucleotide
ccaacuccacaacuaagga

SEQ ID NO: 2743164 - RNA, 19 nt, Artificial Sequence
  Description of Artificial Sequence: Synthetic oligonucleotide
ggagauaggcguccagcaa

SEQ ID NO: 2743165 - RNA, 19 nt, Artificial Sequence
  Description of Artificial Sequence: Synthetic oligonucleotide
cgcgagaugaccgacacca

SEQ ID NO: 2743166 - RNA, 19 nt, Artificial Sequence
  Description of Artificial Sequence: Synthetic oligonucleotide
gggguugaucuguauucuc

SEQ ID NO: 2743167 - RNA, 19 nt, Artificial Sequence
  Description of Artificial Sequence: Synthetic oligonucleotide
auucucaagcaaaccgcua

SEQ ID NO: 2743168 - RNA, 19 nt, Artificial Sequence
  Description of Artificial Sequence: Synthetic oligonucleotide
aaggcucgcucuggagaga

SEQ ID NO: 2743169 - RNA, 19 nt, Artificial Sequence
  Description of Artificial Sequence: Synthetic oligonucleotide
ggugcaggauagugcuggc

SEQ ID NO: 2743170 - RNA, 19 nt, Artificial Sequence
  Description of Artificial Sequence: Synthetic oligonucleotide
gggaugucaaagagugaac

SEQ ID NO: 2743171 - RNA, 19 nt, Artificial Sequence
  Description of Artificial Sequence: Synthetic oligonucleotide
ugggagcaguucagccaac

SEQ ID NO: 2743172 - RNA, 19 nt, Artificial Sequence
  Description of Artificial Sequence: Synthetic oligonucleotide
ggaugaagcugcccacaca

SEQ ID NO: 2743173 - RNA, 19 nt, Artificial Sequence
  Description of Artificial Sequence: Synthetic oligonucleotide
uucagccaacgaaguucau

SEQ ID NO: 2743174 - RNA, 19 nt, Artificial Sequence
  Description of Artificial Sequence: Synthetic oligonucleotide
acuccacaacuaaggaaau

SEQ ID NO: 2743175 - RNA, 19 nt, Artificial Sequence
  Description of Artificial Sequence: Synthetic oligonucleotide
ugcccacgaggagacagua

SEQ ID NO: 2743176 - RNA, 19 nt, Artificial Sequence
  Description of Artificial Sequence: Synthetic oligonucleotide
guacuccuccaggaaccgc

SEQ ID NO: 2743177 - RNA, 19 nt, Artificial Sequence
  Description of Artificial Sequence: Synthetic oligonucleotide
gagugaacguucugccaau

SEQ ID NO: 2743178 - RNA, 19 nt, Artificial Sequence
  Description of Artificial Sequence: Synthetic oligonucleotide
ccaggaaccgcgagaugac

SEQ ID NO: 2743179 - RNA, 19 nt, Artificial Sequence
  Description of Artificial Sequence: Synthetic oligonucleotide
ccggagaggaacgaguuga

SEQ ID NO: 2743180 - RNA, 19 nt, Artificial Sequence
  Description of Artificial Sequence: Synthetic oligonucleotide
uucagccgcuggggagugg

SEQ ID NO: 2743181 - RNA, 19 nt, Artificial Sequence
  Description of Artificial Sequence: Synthetic oligonucleotide
gcaaaccgcuaggaugaag

SEQ ID NO: 2743182 - RNA, 19 nt, Artificial Sequence
  Description of Artificial Sequence: Synthetic oligonucleotide
cgggacacuucggauaccg

SEQ ID NO: 2743183 - RNA, 19 nt, Artificial Sequence
  Description of Artificial Sequence: Synthetic oligonucleotide
aggcucgcucuggagagau

SEQ ID NO: 2743184 - RNA, 19 nt, Artificial Sequence
  Description of Artificial Sequence: Synthetic oligonucleotide
gggacacuucggauaccgg

SEQ ID NO: 2743185 - RNA, 19 nt, Artificial Sequence
  Description of Artificial Sequence: Synthetic oligonucleotide
agccggagaggaacgaguu

SEQ ID NO: 2743186 - RNA, 19 nt, Artificial Sequence
  Description of Artificial Sequence: Synthetic oligonucleotide
cugaaucaucaauguccaa

SEQ ID NO: 2743187 - RNA, 19 nt, Artificial Sequence
  Description of Artificial Sequence: Synthetic oligonucleotide
gccggagaggaacgaguug

SEQ ID NO: 2743188 - RNA, 19 nt, Artificial Sequence
  Description of Artificial Sequence: Synthetic oligonucleotide
ggaguggagcucaaguacu

SEQ ID NO: 2743189 - RNA, 19 nt, Artificial Sequence
  Description of Artificial Sequence: Synthetic oligonucleotide
cuggggaguggagcucaag

SEQ ID NO: 2743190 - RNA, 19 nt, Artificial Sequence
  Description of Artificial Sequence: Synthetic oligonucleotide
ccggucagcaguauauaaa

SEQ ID NO: 2743191 - RNA, 19 nt, Artificial Sequence
  Description of Artificial Sequence: Synthetic oligonucleotide
cgaaguucaugacgacaag

SEQ ID NO: 2743192 - RNA, 19 nt, Artificial Sequence
  Description of Artificial Sequence: Synthetic oligonucleotide
cugucaucucaagaauucu

SEQ ID NO: 2743193 - RNA, 19 nt, Artificial Sequence
  Description of Artificial Sequence: Synthetic oligonucleotide
gugcaggauagugcuggca

SEQ ID NO: 2743194 - RNA, 19 nt, Artificial Sequence
  Description of Artificial Sequence: Synthetic oligonucleotide
cuccaggaaccgcgagaug

SEQ ID NO: 2743195 - RNA, 19 nt, Artificial Sequence
  Description of Artificial Sequence: Synthetic oligonucleotide
gcaggauagugcuggcaaa

SEQ ID NO: 2743196 - RNA, 19 nt, Artificial Sequence
  Description of Artificial Sequence: Synthetic oligonucleotide
cuucagccgcuggggagug

SEQ ID NO: 2743197 - RNA, 19 nt, Artificial Sequence
  Description of Artificial Sequence: Synthetic oligonucleotide
aggggaugucaaagaguga

SEQ ID NO: 2743198 - RNA, 19 nt, Artificial Sequence
  Description of Artificial Sequence: Synthetic oligonucleotide
ggccgacaugacgaacgcg

SEQ ID NO: 2743199 - RNA, 19 nt, Artificial Sequence
  Description of Artificial Sequence: Synthetic oligonucleotide
cgcgggacacuucggauac

SEQ ID NO: 2743200 - RNA, 19 nt, Artificial Sequence
  Description of Artificial Sequence: Synthetic oligonucleotide
gacgaacgcgggacacuuc

SEQ ID NO: 2743201 - RNA, 19 nt, Artificial Sequence
  Description of Artificial Sequence: Synthetic oligonucleotide
gggucgucuggacucccca

SEQ ID NO: 2743202 - RNA, 19 nt, Artificial Sequence
  Description of Artificial Sequence: Synthetic oligonucleotide
ccgaacugcagcgccccgg

SEQ ID NO: 2743203 - RNA, 19 nt, Artificial Sequence
  Description of Artificial Sequence: Synthetic oligonucleotide
cagccgcuggggaguggag

SEQ ID NO: 2743204 - RNA, 19 nt, Artificial Sequence
  Description of Artificial Sequence: Synthetic oligonucleotide
gucgucuggacuccccauu

SEQ ID NO: 2743205 - RNA, 19 nt, Artificial Sequence
  Description of Artificial Sequence: Synthetic oligonucleotide
cgaacgcgggacacuucgg

SEQ ID NO: 2743206 - RNA, 19 nt, Artificial Sequence
  Description of Artificial Sequence: Synthetic oligonucleotide
agcaaaccgcuaggaugaa

SEQ ID NO: 2743207 - RNA, 19 nt, Artificial Sequence
  Description of Artificial Sequence: Synthetic oligonucleotide
cccggucagcaguauauaa

SEQ ID NO: 2743208 - RNA, 19 nt, Artificial Sequence
  Description of Artificial Sequence: Synthetic oligonucleotide
cuuggaaauccgccuuguu

SEQ ID NO: 2743209 - RNA, 19 nt, Artificial Sequence
  Description of Artificial Sequence: Synthetic oligonucleotide
gccgaacugcagcgccccg

SEQ ID NO: 2743210 - RNA, 19 nt, Artificial Sequence
  Description of Artificial Sequence: Synthetic oligonucleotide
caguucagccaacgaaguu

SEQ ID NO: 2743211 - RNA, 19 nt, Artificial Sequence
  Description of Artificial Sequence: Synthetic oligonucleotide
gccgcuggggaguggagcu

SEQ ID NO: 2743212 - RNA, 19 nt, Artificial Sequence
  Description of Artificial Sequence: Synthetic oligonucleotide
acuccccauuucacaccca

SEQ ID NO: 2743213 - RNA, 19 nt, Artificial Sequence
  Description of Artificial Sequence: Synthetic oligonucleotide
caccaccgaggccgacaug

SEQ ID NO: 2743214 - RNA, 19 nt, Artificial Sequence
  Description of Artificial Sequence: Synthetic oligonucleotide
ggggucgucuggacucccc

SEQ ID NO: 2743215 - RNA, 19 nt, Artificial Sequence
  Description of Artificial Sequence: Synthetic oligonucleotide
ccgcuaggaugaagcugcc

SEQ ID NO: 2743216 - RNA, 19 nt, Artificial Sequence
  Description of Artificial Sequence: Synthetic oligonucleotide
ccguguuaacagacacaca

SEQ ID NO: 2743217 - RNA, 19 nt, Artificial Sequence
  Description of Artificial Sequence: Synthetic oligonucleotide
agcgccccggucagcagua

SEQ ID NO: 2743218 - RNA, 19 nt, Artificial Sequence
  Description of Artificial Sequence: Synthetic oligonucleotide
gauaggcguccagcaacuu

SEQ ID NO: 2743219 - RNA, 19 nt, Artificial Sequence
  Description of Artificial Sequence: Synthetic oligonucleotide
ccgcgagaugaccgacacc

SEQ ID NO: 2743220 - RNA, 19 nt, Artificial Sequence
  Description of Artificial Sequence: Synthetic oligonucleotide
gcgagaugaccgacaccac

SEQ ID NO: 2743221 - RNA, 19 nt, Artificial Sequence
  Description of Artificial Sequence: Synthetic oligonucleotide
cgacaugacgaacgcggga

SEQ ID NO: 2743222 - RNA, 19 nt, Artificial Sequence
  Description of Artificial Sequence: Synthetic oligonucleotide
cgucuggacuccccauuuc

SEQ ID NO: 2743223 - RNA, 19 nt, Artificial Sequence
  Description of Artificial Sequence: Synthetic oligonucleotide
ggucgucuggacuccccau

SEQ ID NO: 2743224 - RNA, 19 nt, Artificial Sequence
  Description of Artificial Sequence: Synthetic oligonucleotide
cagcgccccggucagcagu

SEQ ID NO: 2743225 - RNA, 19 nt, Artificial Sequence
  Description of Artificial Sequence: Synthetic oligonucleotide
ccuccaggaaccgcgagau

SEQ ID NO: 2743226 - RNA, 19 nt, Artificial Sequence
  Description of Artificial Sequence: Synthetic oligonucleotide
cugcagcgccccggucagc

SEQ ID NO: 2743227 - RNA, 19 nt, Artificial Sequence
  Description of Artificial Sequence: Synthetic oligonucleotide
gccccggucagcaguauau

SEQ ID NO: 2743228 - RNA, 19 nt, Artificial Sequence
  Description of Artificial Sequence: Synthetic oligonucleotide
cggagaggaacgaguugaa

SEQ ID NO: 2743229 - RNA, 19 nt, Artificial Sequence
  Description of Artificial Sequence: Synthetic oligonucleotide
cgaggccgacaugacgaac

SEQ ID NO: 2743230 - RNA, 19 nt, Artificial Sequence
  Description of Artificial Sequence: Synthetic oligonucleotide
gcgggacacuucggauacc

SEQ ID NO: 2743231 - RNA, 19 nt, Artificial Sequence
  Description of Artificial Sequence: Synthetic oligonucleotide
ccuuggaaauccgccuugu

SEQ ID NO: 2743232 - RNA, 19 nt, Artificial Sequence
  Description of Artificial Sequence: Synthetic oligonucleotide
ccgaggccgacaugacgaa

SEQ ID NO: 2743233 - RNA, 19 nt, Artificial Sequence
  Description of Artificial Sequence: Synthetic oligonucleotide
ccgacaccaccgaggccga

SEQ ID NO: 2743234 - RNA, 19 nt, Artificial Sequence
  Description of Artificial Sequence: Synthetic oligonucleotide
cgcuggggaguggagcuca

SEQ ID NO: 2743235 - RNA, 19 nt, Artificial Sequence
  Description of Artificial Sequence: Synthetic oligonucleotide
ccgcuggggaguggagcuc

SEQ ID NO: 2743236 - RNA, 19 nt, Artificial Sequence
  Description of Artificial Sequence: Synthetic oligonucleotide
ccccggucagcaguauaua

SEQ ID NO: 2743237 - RNA, 19 nt, Artificial Sequence
  Description of Artificial Sequence: Synthetic oligonucleotide
cgacaccaccgaggccgac

SEQ ID NO: 2743238 - RNA, 19 nt, Artificial Sequence
  Description of Artificial Sequence: Synthetic oligonucleotide
cgccccggucagcaguaua

SEQ ID NO: 2743239 - RNA, 19 nt, Artificial Sequence
  Description of Artificial Sequence: Synthetic oligonucleotide
gcgccccggucagcaguau

SEQ ID NO: 2743240 - RNA, 19 nt, Artificial Sequence
  Description of Artificial Sequence: Synthetic oligonucleotide
aacacgaucuuccggggcc

SEQ ID NO: 2743241 - RNA, 19 nt, Artificial Sequence
  Description of Artificial Sequence: Synthetic oligonucleotide
uugaucaucgaauuuucgg

SEQ ID NO: 2743242 - RNA, 19 nt, Artificial Sequence
  Description of Artificial Sequence: Synthetic oligonucleotide
aacacggcggcauagcgac

SEQ ID NO: 2743243 - RNA, 19 nt, Artificial Sequence
  Description of Artificial Sequence: Synthetic oligonucleotide
gaauuuucggaucugggcc

SEQ ID NO: 2743244 - RNA, 19 nt, Artificial Sequence
  Description of Artificial Sequence: Synthetic oligonucleotide
uccauguuuauucucuggg

SEQ ID NO: 2743245 - RNA, 19 nt, Artificial Sequence
  Description of Artificial Sequence: Synthetic oligonucleotide
uuuggaaggcuucuguccg

SEQ ID NO: 2743246 - RNA, 19 nt, Artificial Sequence
  Description of Artificial Sequence: Synthetic oligonucleotide
aaguagacugaauccuggc

SEQ ID NO: 2743247 - RNA, 19 nt, Artificial Sequence
  Description of Artificial Sequence: Synthetic oligonucleotide
uacuuaagcucauagucag

SEQ ID NO: 2743248 - RNA, 19 nt, Artificial Sequence
  Description of Artificial Sequence: Synthetic oligonucleotide
ugaucaucgaauuuucgga

SEQ ID NO: 2743249 - RNA, 19 nt, Artificial Sequence
  Description of Artificial Sequence: Synthetic oligonucleotide
uaauccauguuuauucucu

SEQ ID NO: 2743250 - RNA, 19 nt, Artificial Sequence
  Description of Artificial Sequence: Synthetic oligonucleotide
aggaggagaagccaccacc

SEQ ID NO: 2743251 - RNA, 19 nt, Artificial Sequence
  Description of Artificial Sequence: Synthetic oligonucleotide
ugcuuauccaggaagccag

SEQ ID NO: 2743252 - RNA, 19 nt, Artificial Sequence
  Description of Artificial Sequence: Synthetic oligonucleotide
acagcgagccugcuuaucc

SEQ ID NO: 2743253 - RNA, 19 nt, Artificial Sequence
  Description of Artificial Sequence: Synthetic oligonucleotide
aaacacgaucuuccggggc

SEQ ID NO: 2743254 - RNA, 19 nt, Artificial Sequence
  Description of Artificial Sequence: Synthetic oligonucleotide
uagcucgucagcaaacacg

SEQ ID NO: 2743255 - RNA, 19 nt, Artificial Sequence
  Description of Artificial Sequence: Synthetic oligonucleotide
uaagcucauagucaggcac

SEQ ID NO: 2743256 - RNA, 19 nt, Artificial Sequence
  Description of Artificial Sequence: Synthetic oligonucleotide
ucgucagcaaacacgaucu

SEQ ID NO: 2743257 - RNA, 19 nt, Artificial Sequence
  Description of Artificial Sequence: Synthetic oligonucleotide
aauuuucggaucugggccu

SEQ ID NO: 2743258 - RNA, 19 nt, Artificial Sequence
  Description of Artificial Sequence: Synthetic oligonucleotide
gguacuuaagcucauaguc

SEQ ID NO: 2743259 - RNA, 19 nt, Artificial Sequence
  Description of Artificial Sequence: Synthetic oligonucleotide
ucgaauuuucggaucuggg

SEQ ID NO: 2743260 - RNA, 19 nt, Artificial Sequence
  Description of Artificial Sequence: Synthetic oligonucleotide
cucauagucaggcacuggg

SEQ ID NO: 2743261 - RNA, 19 nt, Artificial Sequence
  Description of Artificial Sequence: Synthetic oligonucleotide
cucagaaguagacugaauc

SEQ ID NO: 2743262 - RNA, 19 nt, Artificial Sequence
  Description of Artificial Sequence: Synthetic oligonucleotide
ucaucgaauuuucggaucu

SEQ ID NO: 2743263 - RNA, 19 nt, Artificial Sequence
  Description of Artificial Sequence: Synthetic oligonucleotide
uucagguagugacagcgag

SEQ ID NO: 2743264 - RNA, 19 nt, Artificial Sequence
  Description of Artificial Sequence: Synthetic oligonucleotide
gcaaacacgaucuuccggg

SEQ ID NO: 2743265 - RNA, 19 nt, Artificial Sequence
  Description of Artificial Sequence: Synthetic oligonucleotide
uucucaaacucucuccgga

SEQ ID NO: 2743266 - RNA, 19 nt, Artificial Sequence
  Description of Artificial Sequence: Synthetic oligonucleotide
cuugaggugccucaguuug

SEQ ID NO: 2743267 - RNA, 19 nt, Artificial Sequence
  Description of Artificial Sequence: Synthetic oligonucleotide
aauccauguuuauucucug

SEQ ID NO: 2743268 - RNA, 19 nt, Artificial Sequence
  Description of Artificial Sequence: Synthetic oligonucleotide
gaaguagacugaauccugg

SEQ ID NO: 2743269 - RNA, 19 nt, Artificial Sequence
  Description of Artificial Sequence: Synthetic oligonucleotide
aucaucgaauuuucggauc

SEQ ID NO: 2743270 - RNA, 19 nt, Artificial Sequence
  Description of Artificial Sequence: Synthetic oligonucleotide
cuugaucaucgaauuuucg

SEQ ID NO: 2743271 - RNA, 19 nt, Artificial Sequence
  Description of Artificial Sequence: Synthetic oligonucleotide
agcaaacacgaucuuccgg

SEQ ID NO: 2743272 - RNA, 19 nt, Artificial Sequence
  Description of Artificial Sequence: Synthetic oligonucleotide
caguuugcccuucagguag

SEQ ID NO: 2743273 - RNA, 19 nt, Artificial Sequence
  Description of Artificial Sequence: Synthetic oligonucleotide
ucauagucaggcacugggc

SEQ ID NO: 2743274 - RNA, 19 nt, Artificial Sequence
  Description of Artificial Sequence: Synthetic oligonucleotide
uugcccuucagguagugac

SEQ ID NO: 2743275 - RNA, 19 nt, Artificial Sequence
  Description of Artificial Sequence: Synthetic oligonucleotide
auccauguuuauucucugg

SEQ ID NO: 2743276 - RNA, 19 nt, Artificial Sequence
  Description of Artificial Sequence: Synthetic oligonucleotide
aguagacugaauccuggcu

SEQ ID NO: 2743277 - RNA, 19 nt, Artificial Sequence
  Description of Artificial Sequence: Synthetic oligonucleotide
ucuuccggggccucgugcg

SEQ ID NO: 2743278 - RNA, 19 nt, Artificial Sequence
  Description of Artificial Sequence: Synthetic oligonucleotide
acgugagccuccuucuggc

SEQ ID NO: 2743279 - RNA, 19 nt, Artificial Sequence
  Description of Artificial Sequence: Synthetic oligonucleotide
cagguagugacagcgagcc

SEQ ID NO: 2743280 - RNA, 19 nt, Artificial Sequence
  Description of Artificial Sequence: Synthetic oligonucleotide
ucagguagugacagcgagc

SEQ ID NO: 2743281 - RNA, 19 nt, Artificial Sequence
  Description of Artificial Sequence: Synthetic oligonucleotide
ugcggagcuccccaggucc

SEQ ID NO: 2743282 - RNA, 19 nt, Artificial Sequence
  Description of Artificial Sequence: Synthetic oligonucleotide
caugggaggaggagaagcc

SEQ ID NO: 2743283 - RNA, 19 nt, Artificial Sequence
  Description of Artificial Sequence: Synthetic oligonucleotide
aucgaauuuucggaucugg

SEQ ID NO: 2743284 - RNA, 19 nt, Artificial Sequence
  Description of Artificial Sequence: Synthetic oligonucleotide
gacugguuccccaugggag

SEQ ID NO: 2743285 - RNA, 19 nt, Artificial Sequence
  Description of Artificial Sequence: Synthetic oligonucleotide
cucgucagcaaacacgauc

SEQ ID NO: 2743286 - RNA, 19 nt, Artificial Sequence
  Description of Artificial Sequence: Synthetic oligonucleotide
uuaagcucauagucaggca

SEQ ID NO: 2743287 - RNA, 19 nt, Artificial Sequence
  Description of Artificial Sequence: Synthetic oligonucleotide
cuucucaaacucucuccgg

SEQ ID NO: 2743288 - RNA, 19 nt, Artificial Sequence
  Description of Artificial Sequence: Synthetic oligonucleotide
ugggacucucaacaggacu

SEQ ID NO: 2743289 - RNA, 19 nt, Artificial Sequence
  Description of Artificial Sequence: Synthetic oligonucleotide
cucaaacucucuccggacc

SEQ ID NO: 2743290 - RNA, 19 nt, Artificial Sequence
  Description of Artificial Sequence: Synthetic oligonucleotide
cuaauccauguuuauucuc

SEQ ID NO: 2743291 - RNA, 19 nt, Artificial Sequence
  Description of Artificial Sequence: Synthetic oligonucleotide
cugcgugacgcccacgugg

SEQ ID NO: 2743292 - RNA, 19 nt, Artificial Sequence
  Description of Artificial Sequence: Synthetic oligonucleotide
auagucaggcacugggcug

SEQ ID NO: 2743293 - RNA, 19 nt, Artificial Sequence
  Description of Artificial Sequence: Synthetic oligonucleotide
uggagcuccgagaacucug

SEQ ID NO: 2743294 - RNA, 19 nt, Artificial Sequence
  Description of Artificial Sequence: Synthetic oligonucleotide
uggcggguacuuaagcuca

SEQ ID NO: 2743295 - RNA, 19 nt, Artificial Sequence
  Description of Artificial Sequence: Synthetic oligonucleotide
uuauccaggaagccaggau

SEQ ID NO: 2743296 - RNA, 19 nt, Artificial Sequence
  Description of Artificial Sequence: Synthetic oligonucleotide
acucucuccggacccgagc

SEQ ID NO: 2743297 - RNA, 19 nt, Artificial Sequence
  Description of Artificial Sequence: Synthetic oligonucleotide
acuggcggguacuuaagcu

SEQ ID NO: 2743298 - RNA, 19 nt, Artificial Sequence
  Description of Artificial Sequence: Synthetic oligonucleotide
ggcauagcgacuccggucc

SEQ ID NO: 2743299 - RNA, 19 nt, Artificial Sequence
  Description of Artificial Sequence: Synthetic oligonucleotide
gaagccaggauccgcccgc

SEQ ID NO: 2743300 - RNA, 19 nt, Artificial Sequence
  Description of Artificial Sequence: Synthetic oligonucleotide
caaacacgaucuuccgggg

SEQ ID NO: 2743301 - RNA, 19 nt, Artificial Sequence
  Description of Artificial Sequence: Synthetic oligonucleotide
aucuuccggggccucgugc

SEQ ID NO: 2743302 - RNA, 19 nt, Artificial Sequence
  Description of Artificial Sequence: Synthetic oligonucleotide
gccuaauccauguuuauuc

SEQ ID NO: 2743303 - RNA, 19 nt, Artificial Sequence
  Description of Artificial Sequence: Synthetic oligonucleotide
ucucaaacucucuccggac

SEQ ID NO: 2743304 - RNA, 19 nt, Artificial Sequence
  Description of Artificial Sequence: Synthetic oligonucleotide
gguagugacagcgagccug

SEQ ID NO: 2743305 - RNA, 19 nt, Artificial Sequence
  Description of Artificial Sequence: Synthetic oligonucleotide
guagacugaauccuggcua

SEQ ID NO: 2743306 - RNA, 19 nt, Artificial Sequence
  Description of Artificial Sequence: Synthetic oligonucleotide
uagacugaauccuggcuau

SEQ ID NO: 2743307 - RNA, 19 nt, Artificial Sequence
  Description of Artificial Sequence: Synthetic oligonucleotide
guacuuaagcucauaguca

SEQ ID NO: 2743308 - RNA, 19 nt, Artificial Sequence
  Description of Artificial Sequence: Synthetic oligonucleotide
agcgacuccggucccucgc

SEQ ID NO: 2743309 - RNA, 19 nt, Artificial Sequence
  Description of Artificial Sequence: Synthetic oligonucleotide
agaaguagacugaauccug

SEQ ID NO: 2743310 - RNA, 19 nt, Artificial Sequence
  Description of Artificial Sequence: Synthetic oligonucleotide
uggagcuuggccugcguga

SEQ ID NO: 2743311 - RNA, 19 nt, Artificial Sequence
  Description of Artificial Sequence: Synthetic oligonucleotide
cucugggacucucaacagg

SEQ ID NO: 2743312 - RNA, 19 nt, Artificial Sequence
  Description of Artificial Sequence: Synthetic oligonucleotide
gaucugggccuugaggugc

SEQ ID NO: 2743313 - RNA, 19 nt, Artificial Sequence
  Description of Artificial Sequence: Synthetic oligonucleotide
uuggaaggcuucuguccgg

SEQ ID NO: 2743314 - RNA, 19 nt, Artificial Sequence
  Description of Artificial Sequence: Synthetic oligonucleotide
aacaggacugguuccccau

SEQ ID NO: 2743315 - RNA, 19 nt, Artificial Sequence
  Description of Artificial Sequence: Synthetic oligonucleotide
cugguccuggaacacggcg

SEQ ID NO: 2743316 - RNA, 19 nt, Artificial Sequence
  Description of Artificial Sequence: Synthetic oligonucleotide
cacgugagccuccuucugg

SEQ ID NO: 2743317 - RNA, 19 nt, Artificial Sequence
  Description of Artificial Sequence: Synthetic oligonucleotide
ucgcgcugcucacuggcgg

SEQ ID NO: 2743318 - RNA, 19 nt, Artificial Sequence
  Description of Artificial Sequence: Synthetic oligonucleotide
ugcgugcugguccuggaac

SEQ ID NO: 2743319 - RNA, 19 nt, Artificial Sequence
  Description of Artificial Sequence: Synthetic oligonucleotide
ugccacgugagccuccuuc

SEQ ID NO: 2743320 - RNA, 19 nt, Artificial Sequence
  Description of Artificial Sequence: Synthetic oligonucleotide
uccuggcuaucacuguccc

SEQ ID NO: 2743321 - RNA, 19 nt, Artificial Sequence
  Description of Artificial Sequence: Synthetic oligonucleotide
cuggcggguacuuaagcuc

SEQ ID NO: 2743322 - RNA, 19 nt, Artificial Sequence
  Description of Artificial Sequence: Synthetic oligonucleotide
auccuggcuaucacugucc

SEQ ID NO: 2743323 - RNA, 19 nt, Artificial Sequence
  Description of Artificial Sequence: Synthetic oligonucleotide
cucaacaggacugguuccc

SEQ ID NO: 2743324 - RNA, 19 nt, Artificial Sequence
  Description of Artificial Sequence: Synthetic oligonucleotide
cagcaaacacgaucuuccg

SEQ ID NO: 2743325 - RNA, 19 nt, Artificial Sequence
  Description of Artificial Sequence: Synthetic oligonucleotide
ucaguuugcccuucaggua

SEQ ID NO: 2743326 - RNA, 19 nt, Artificial Sequence
  Description of Artificial Sequence: Synthetic oligonucleotide
caggacugguuccccaugg

SEQ ID NO: 2743327 - RNA, 19 nt, Artificial Sequence
  Description of Artificial Sequence: Synthetic oligonucleotide
aagcucauagucaggcacu

SEQ ID NO: 2743328 - RNA, 19 nt, Artificial Sequence
  Description of Artificial Sequence: Synthetic oligonucleotide
agcucgucagcaaacacga

SEQ ID NO: 2743329 - RNA, 19 nt, Artificial Sequence
  Description of Artificial Sequence: Synthetic oligonucleotide
uggaaggcuucuguccggg

SEQ ID NO: 2743330 - RNA, 19 nt, Artificial Sequence
  Description of Artificial Sequence: Synthetic oligonucleotide
uugaggugccucaguuugc

SEQ ID NO: 2743331 - RNA, 19 nt, Artificial Sequence
  Description of Artificial Sequence: Synthetic oligonucleotide
agcgagccugcuuauccag

SEQ ID NO: 2743332 - RNA, 19 nt, Artificial Sequence
  Description of Artificial Sequence: Synthetic oligonucleotide
ugcccuucagguagugaca

SEQ ID NO: 2743333 - RNA, 19 nt, Artificial Sequence
  Description of Artificial Sequence: Synthetic oligonucleotide
ggggcagugacuucagcag

SEQ ID NO: 2743334 - RNA, 19 nt, Artificial Sequence
  Description of Artificial Sequence: Synthetic oligonucleotide
ggaacacggcggcauagcg

SEQ ID NO: 2743335 - RNA, 19 nt, Artificial Sequence
  Description of Artificial Sequence: Synthetic oligonucleotide
gcuccgagaacucugcgug

SEQ ID NO: 2743336 - RNA, 19 nt, Artificial Sequence
  Description of Artificial Sequence: Synthetic oligonucleotide
cgaauuuucggaucugggc

SEQ ID NO: 2743337 - RNA, 19 nt, Artificial Sequence
  Description of Artificial Sequence: Synthetic oligonucleotide
gaucaucgaauuuucggau

SEQ ID NO: 2743338 - RNA, 19 nt, Artificial Sequence
  Description of Artificial Sequence: Synthetic oligonucleotide
agcuccgagaacucugcgu

SEQ ID NO: 2743339 - RNA, 19 nt, Artificial Sequence
  Description of Artificial Sequence: Synthetic oligonucleotide
ugcgugacgcccacguggu

SEQ ID NO: 2743340 - RNA, 19 nt, Artificial Sequence
  Description of Artificial Sequence: Synthetic oligonucleotide
gacugaauccuggcuauca

SEQ ID NO: 2743341 - RNA, 19 nt, Artificial Sequence
  Description of Artificial Sequence: Synthetic oligonucleotide
cuagcucgucagcaaacac

SEQ ID NO: 2743342 - RNA, 19 nt, Artificial Sequence
  Description of Artificial Sequence: Synthetic oligonucleotide
ucaacaggacugguucccc

SEQ ID NO: 2743343 - RNA, 19 nt, Artificial Sequence
  Description of Artificial Sequence: Synthetic oligonucleotide
aggugccuaauccauguuu

SEQ ID NO: 2743344 - RNA, 19 nt, Artificial Sequence
  Description of Artificial Sequence: Synthetic oligonucleotide
acuuaagcucauagucagg

SEQ ID NO: 2743345 - RNA, 19 nt, Artificial Sequence
  Description of Artificial Sequence: Synthetic oligonucleotide
uccccuugaucaucgaauu

SEQ ID NO: 2743346 - RNA, 19 nt, Artificial Sequence
  Description of Artificial Sequence: Synthetic oligonucleotide
gggacucucaacaggacug

SEQ ID NO: 2743347 - RNA, 19 nt, Artificial Sequence
  Description of Artificial Sequence: Synthetic oligonucleotide
ucgugcggagcuccccagg

SEQ ID NO: 2743348 - RNA, 19 nt, Artificial Sequence
  Description of Artificial Sequence: Synthetic oligonucleotide
uccgagaacucugcgugcu

SEQ ID NO: 2743349 - RNA, 19 nt, Artificial Sequence
  Description of Artificial Sequence: Synthetic oligonucleotide
gagcuccgagaacucugcg

SEQ ID NO: 2743350 - RNA, 19 nt, Artificial Sequence
  Description of Artificial Sequence: Synthetic oligonucleotide
gucagcaaacacgaucuuc

SEQ ID NO: 2743351 - RNA, 19 nt, Artificial Sequence
  Description of Artificial Sequence: Synthetic oligonucleotide
guaggugccuaauccaugu

SEQ ID NO: 2743352 - RNA, 19 nt, Artificial Sequence
  Description of Artificial Sequence: Synthetic oligonucleotide
caaacucucuccggacccg

SEQ ID NO: 2743353 - RNA, 19 nt, Artificial Sequence
  Description of Artificial Sequence: Synthetic oligonucleotide
acaggacugguuccccaug

SEQ ID NO: 2743354 - RNA, 19 nt, Artificial Sequence
  Description of Artificial Sequence: Synthetic oligonucleotide
uuggccugcgugacgccca

SEQ ID NO: 2743355 - RNA, 19 nt, Artificial Sequence
  Description of Artificial Sequence: Synthetic oligonucleotide
guagugacagcgagccugc

SEQ ID NO: 2743356 - RNA, 19 nt, Artificial Sequence
  Description of Artificial Sequence: Synthetic oligonucleotide
gacccgagcugccacguga

SEQ ID NO: 2743357 - RNA, 19 nt, Artificial Sequence
  Description of Artificial Sequence: Synthetic oligonucleotide
cacuggcggguacuuaagc

SEQ ID NO: 2743358 - RNA, 19 nt, Artificial Sequence
  Description of Artificial Sequence: Synthetic oligonucleotide
gggcagugacuucagcagg

SEQ ID NO: 2743359 - RNA, 19 nt, Artificial Sequence
  Description of Artificial Sequence: Synthetic oligonucleotide
ggcccgggcgccuagcucg

SEQ ID NO: 2743360 - RNA, 19 nt, Artificial Sequence
  Description of Artificial Sequence: Synthetic oligonucleotide
uggaacacggcggcauagc

SEQ ID NO: 2743361 - RNA, 19 nt, Artificial Sequence
  Description of Artificial Sequence: Synthetic oligonucleotide
uuccccaugggaggaggag

SEQ ID NO: 2743362 - RNA, 19 nt, Artificial Sequence
  Description of Artificial Sequence: Synthetic oligonucleotide
ucccucgcgcugcucacug

SEQ ID NO: 2743363 - RNA, 19 nt, Artificial Sequence
  Description of Artificial Sequence: Synthetic oligonucleotide
cacguggugcuggagcucc

SEQ ID NO: 2743364 - RNA, 19 nt, Artificial Sequence
  Description of Artificial Sequence: Synthetic oligonucleotide
gaggaggagaagccaccac

SEQ ID NO: 2743365 - RNA, 19 nt, Artificial Sequence
  Description of Artificial Sequence: Synthetic oligonucleotide
ggugcuggagcuccgagaa

SEQ ID NO: 2743366 - RNA, 19 nt, Artificial Sequence
  Description of Artificial Sequence: Synthetic oligonucleotide
aaacucucuccggacccga

SEQ ID NO: 2743367 - RNA, 19 nt, Artificial Sequence
  Description of Artificial Sequence: Synthetic oligonucleotide
cauagucaggcacugggcu

SEQ ID NO: 2743368 - RNA, 19 nt, Artificial Sequence
  Description of Artificial Sequence: Synthetic oligonucleotide
uccccaugggaggaggaga

SEQ ID NO: 2743369 - RNA, 19 nt, Artificial Sequence
  Description of Artificial Sequence: Synthetic oligonucleotide
cucuccggacccgagcugc

SEQ ID NO: 2743370 - RNA, 19 nt, Artificial Sequence
  Description of Artificial Sequence: Synthetic oligonucleotide
cuccgagaacucugcgugc

SEQ ID NO: 2743371 - RNA, 19 nt, Artificial Sequence
  Description of Artificial Sequence: Synthetic oligonucleotide
ucucuccggacccgagcug

SEQ ID NO: 2743372 - RNA, 19 nt, Artificial Sequence
  Description of Artificial Sequence: Synthetic oligonucleotide
ugccuaauccauguuuauu

SEQ ID NO: 2743373 - RNA, 19 nt, Artificial Sequence
  Description of Artificial Sequence: Synthetic oligonucleotide
uuugcccuucagguaguga

SEQ ID NO: 2743374 - RNA, 19 nt, Artificial Sequence
  Description of Artificial Sequence: Synthetic oligonucleotide
ccuugaucaucgaauuuuc

SEQ ID NO: 2743375 - RNA, 19 nt, Artificial Sequence
  Description of Artificial Sequence: Synthetic oligonucleotide
acggcggcauagcgacucc

SEQ ID NO: 2743376 - RNA, 19 nt, Artificial Sequence
  Description of Artificial Sequence: Synthetic oligonucleotide
cuggcuaucacuguccccu

SEQ ID NO: 2743377 - RNA, 19 nt, Artificial Sequence
  Description of Artificial Sequence: Synthetic oligonucleotide
acacucagaaguagacuga

SEQ ID NO: 2743378 - RNA, 19 nt, Artificial Sequence
  Description of Artificial Sequence: Synthetic oligonucleotide
cuuggccugcgugacgccc

SEQ ID NO: 2743379 - RNA, 19 nt, Artificial Sequence
  Description of Artificial Sequence: Synthetic oligonucleotide
gaacacggcggcauagcga

SEQ ID NO: 2743380 - RNA, 19 nt, Artificial Sequence
  Description of Artificial Sequence: Synthetic oligonucleotide
gagcuuggccugcgugacg

SEQ ID NO: 2743381 - RNA, 19 nt, Artificial Sequence
  Description of Artificial Sequence: Synthetic oligonucleotide
cucgcgcugcucacuggcg

SEQ ID NO: 2743382 - RNA, 19 nt, Artificial Sequence
  Description of Artificial Sequence: Synthetic oligonucleotide
aggauccgcccgcuucuuc

SEQ ID NO: 2743383 - RNA, 19 nt, Artificial Sequence
  Description of Artificial Sequence: Synthetic oligonucleotide
uuucggaucugggccuuga

SEQ ID NO: 2743384 - RNA, 19 nt, Artificial Sequence
  Description of Artificial Sequence: Synthetic oligonucleotide
cuucagguagugacagcga

SEQ ID NO: 2743385 - RNA, 19 nt, Artificial Sequence
  Description of Artificial Sequence: Synthetic oligonucleotide
uccggacccgagcugccac

SEQ ID NO: 2743386 - RNA, 19 nt, Artificial Sequence
  Description of Artificial Sequence: Synthetic oligonucleotide
ucugcgugcugguccugga

SEQ ID NO: 2743387 - RNA, 19 nt, Artificial Sequence
  Description of Artificial Sequence: Synthetic oligonucleotide
gaggugccucaguuugccc

SEQ ID NO: 2743388 - RNA, 19 nt, Artificial Sequence
  Description of Artificial Sequence: Synthetic oligonucleotide
ggacucucaacaggacugg

SEQ ID NO: 2743389 - RNA, 19 nt, Artificial Sequence
  Description of Artificial Sequence: Synthetic oligonucleotide
aucugggccuugaggugcc

SEQ ID NO: 2743390 - RNA, 19 nt, Artificial Sequence
  Description of Artificial Sequence: Synthetic oligonucleotide
agacugaauccuggcuauc

SEQ ID NO: 2743391 - RNA, 19 nt, Artificial Sequence
  Description of Artificial Sequence: Synthetic oligonucleotide
uagcgacuccggucccucg

SEQ ID NO: 2743392 - RNA, 19 nt, Artificial Sequence
  Description of Artificial Sequence: Synthetic oligonucleotide
ccaugggaggaggagaagc

SEQ ID NO: 2743393 - RNA, 19 nt, Artificial Sequence
  Description of Artificial Sequence: Synthetic oligonucleotide
acuccggucccucgcgcug

SEQ ID NO: 2743394 - RNA, 19 nt, Artificial Sequence
  Description of Artificial Sequence: Synthetic oligonucleotide
cccgcuucuucucaaacuc

SEQ ID NO: 2743395 - RNA, 19 nt, Artificial Sequence
  Description of Artificial Sequence: Synthetic oligonucleotide
cugcuuauccaggaagcca

SEQ ID NO: 2743396 - RNA, 19 nt, Artificial Sequence
  Description of Artificial Sequence: Synthetic oligonucleotide
ucuccggacccgagcugcc

SEQ ID NO: 2743397 - RNA, 19 nt, Artificial Sequence
  Description of Artificial Sequence: Synthetic oligonucleotide
gccaccaccgucuccagga

SEQ ID NO: 2743398 - RNA, 19 nt, Artificial Sequence
  Description of Artificial Sequence: Synthetic oligonucleotide
aacucucuccggacccgag

SEQ ID NO: 2743399 - RNA, 19 nt, Artificial Sequence
  Description of Artificial Sequence: Synthetic oligonucleotide
gcuaucacuguccccuuga

SEQ ID NO: 2743400 - RNA, 19 nt, Artificial Sequence
  Description of Artificial Sequence: Synthetic oligonucleotide
gaucuuccggggccucgug

SEQ ID NO: 2743401 - RNA, 19 nt, Artificial Sequence
  Description of Artificial Sequence: Synthetic oligonucleotide
caucgaauuuucggaucug

SEQ ID NO: 2743402 - RNA, 19 nt, Artificial Sequence
  Description of Artificial Sequence: Synthetic oligonucleotide
cuuauccaggaagccagga

SEQ ID NO: 2743403 - RNA, 19 nt, Artificial Sequence
  Description of Artificial Sequence: Synthetic oligonucleotide
uggggcggggccccagagc

SEQ ID NO: 2743404 - RNA, 19 nt, Artificial Sequence
  Description of Artificial Sequence: Synthetic oligonucleotide
gugcugguccuggaacacg

SEQ ID NO: 2743405 - RNA, 19 nt, Artificial Sequence
  Description of Artificial Sequence: Synthetic oligonucleotide
gugacuucagcagggccuc

SEQ ID NO: 2743406 - RNA, 19 nt, Artificial Sequence
  Description of Artificial Sequence: Synthetic oligonucleotide
gauccgcccgcuucuucuc

SEQ ID NO: 2743407 - RNA, 19 nt, Artificial Sequence
  Description of Artificial Sequence: Synthetic oligonucleotide
cuuccggggccucgugcgg

SEQ ID NO: 2743408 - RNA, 19 nt, Artificial Sequence
  Description of Artificial Sequence: Synthetic oligonucleotide
acgaucuuccggggccucg

SEQ ID NO: 2743409 - RNA, 19 nt, Artificial Sequence
  Description of Artificial Sequence: Synthetic oligonucleotide
cacggcggcauagcgacuc

SEQ ID NO: 2743410 - RNA, 19 nt, Artificial Sequence
  Description of Artificial Sequence: Synthetic oligonucleotide
uaggugccuaauccauguu

SEQ ID NO: 2743411 - RNA, 19 nt, Artificial Sequence
  Description of Artificial Sequence: Synthetic oligonucleotide
ccauguuuauucucuggga

SEQ ID NO: 2743412 - RNA, 19 nt, Artificial Sequence
  Description of Artificial Sequence: Synthetic oligonucleotide
cucgugcggagcuccccag

SEQ ID NO: 2743413 - RNA, 19 nt, Artificial Sequence
  Description of Artificial Sequence: Synthetic oligonucleotide
cggguacuuaagcucauag

SEQ ID NO: 2743414 - RNA, 19 nt, Artificial Sequence
  Description of Artificial Sequence: Synthetic oligonucleotide
ggacugguuccccauggga

SEQ ID NO: 2743415 - RNA, 19 nt, Artificial Sequence
  Description of Artificial Sequence: Synthetic oligonucleotide
ggugccuaauccauguuua

SEQ ID NO: 2743416 - RNA, 19 nt, Artificial Sequence
  Description of Artificial Sequence: Synthetic oligonucleotide
gagcuccccagguccgggc

SEQ ID NO: 2743417 - RNA, 19 nt, Artificial Sequence
  Description of Artificial Sequence: Synthetic oligonucleotide
ggaaggcuucuguccgggg

SEQ ID NO: 2743418 - RNA, 19 nt, Artificial Sequence
  Description of Artificial Sequence: Synthetic oligonucleotide
ggagcuccgagaacucugc

SEQ ID NO: 2743419 - RNA, 19 nt, Artificial Sequence
  Description of Artificial Sequence: Synthetic oligonucleotide
ccugcuuauccaggaagcc

SEQ ID NO: 2743420 - RNA, 19 nt, Artificial Sequence
  Description of Artificial Sequence: Synthetic oligonucleotide
gguuccccaugggaggagg

SEQ ID NO: 2743421 - RNA, 19 nt, Artificial Sequence
  Description of Artificial Sequence: Synthetic oligonucleotide
cacucagaaguagacugaa

SEQ ID NO: 2743422 - RNA, 19 nt, Artificial Sequence
  Description of Artificial Sequence: Synthetic oligonucleotide
ugacagcgagccugcuuau

SEQ ID NO: 2743423 - RNA, 19 nt, Artificial Sequence
  Description of Artificial Sequence: Synthetic oligonucleotide
gguccgggcuggcacugcg

SEQ ID NO: 2743424 - RNA, 19 nt, Artificial Sequence
  Description of Artificial Sequence: Synthetic oligonucleotide
gcccacguggugcuggagc

SEQ ID NO: 2743425 - RNA, 19 nt, Artificial Sequence
  Description of Artificial Sequence: Synthetic oligonucleotide
ggguacuuaagcucauagu

SEQ ID NO: 2743426 - RNA, 19 nt, Artificial Sequence
  Description of Artificial Sequence: Synthetic oligonucleotide
cuucuguccggggcccggg

SEQ ID NO: 2743427 - RNA, 19 nt, Artificial Sequence
  Description of Artificial Sequence: Synthetic oligonucleotide
gagaacucugcgugcuggu

SEQ ID NO: 2743428 - RNA, 19 nt, Artificial Sequence
  Description of Artificial Sequence: Synthetic oligonucleotide
ggcggcauagcgacuccgg

SEQ ID NO: 2743429 - RNA, 19 nt, Artificial Sequence
  Description of Artificial Sequence: Synthetic oligonucleotide
agguagugacagcgagccu

SEQ ID NO: 2743430 - RNA, 19 nt, Artificial Sequence
  Description of Artificial Sequence: Synthetic oligonucleotide
gcuuauccaggaagccagg

SEQ ID NO: 2743431 - RNA, 19 nt, Artificial Sequence
  Description of Artificial Sequence: Synthetic oligonucleotide
ggagaagccaccaccgucu

SEQ ID NO: 2743432 - RNA, 19 nt, Artificial Sequence
  Description of Artificial Sequence: Synthetic oligonucleotide
ccgagcugccacgugagcc

SEQ ID NO: 2743433 - RNA, 19 nt, Artificial Sequence
  Description of Artificial Sequence: Synthetic oligonucleotide
acucagaaguagacugaau

SEQ ID NO: 2743434 - RNA, 19 nt, Artificial Sequence
  Description of Artificial Sequence: Synthetic oligonucleotide
auccgcccgcuucuucuca

SEQ ID NO: 2743435 - RNA, 19 nt, Artificial Sequence
  Description of Artificial Sequence: Synthetic oligonucleotide
acacgaucuuccggggccu

SEQ ID NO: 2743436 - RNA, 19 nt, Artificial Sequence
  Description of Artificial Sequence: Synthetic oligonucleotide
uccgcccgcuucuucucaa

SEQ ID NO: 2743437 - RNA, 19 nt, Artificial Sequence
  Description of Artificial Sequence: Synthetic oligonucleotide
cagcgagccugcuuaucca

SEQ ID NO: 2743438 - RNA, 19 nt, Artificial Sequence
  Description of Artificial Sequence: Synthetic oligonucleotide
guuugcccuucagguagug

SEQ ID NO: 2743439 - RNA, 19 nt, Artificial Sequence
  Description of Artificial Sequence: Synthetic oligonucleotide
acccgagcugccacgugag

SEQ ID NO: 2743440 - RNA, 19 nt, Artificial Sequence
  Description of Artificial Sequence: Synthetic oligonucleotide
gacagcgagccugcuuauc

SEQ ID NO: 2743441 - RNA, 19 nt, Artificial Sequence
  Description of Artificial Sequence: Synthetic oligonucleotide
guccccuugaucaucgaau

SEQ ID NO: 2743442 - RNA, 19 nt, Artificial Sequence
  Description of Artificial Sequence: Synthetic oligonucleotide
auuuucggaucugggccuu

SEQ ID NO: 2743443 - RNA, 19 nt, Artificial Sequence
  Description of Artificial Sequence: Synthetic oligonucleotide
cgagaacucugcgugcugg

SEQ ID NO: 2743444 - RNA, 19 nt, Artificial Sequence
  Description of Artificial Sequence: Synthetic oligonucleotide
gcgacuccggucccucgcg

SEQ ID NO: 2743445 - RNA, 19 nt, Artificial Sequence
  Description of Artificial Sequence: Synthetic oligonucleotide
aguuugcccuucagguagu

SEQ ID NO: 2743446 - RNA, 19 nt, Artificial Sequence
  Description of Artificial Sequence: Synthetic oligonucleotide
ggcuaucacuguccccuug

SEQ ID NO: 2743447 - RNA, 19 nt, Artificial Sequence
  Description of Artificial Sequence: Synthetic oligonucleotide
uuccggggccucgugcgga

SEQ ID NO: 2743448 - RNA, 19 nt, Artificial Sequence
  Description of Artificial Sequence: Synthetic oligonucleotide
ccucgcgcugcucacuggc

SEQ ID NO: 2743449 - RNA, 19 nt, Artificial Sequence
  Description of Artificial Sequence: Synthetic oligonucleotide
ugacuucagcagggccucc

SEQ ID NO: 2743450 - RNA, 19 nt, Artificial Sequence
  Description of Artificial Sequence: Synthetic oligonucleotide
caccgucuccaggacacuc

SEQ ID NO: 2743451 - RNA, 19 nt, Artificial Sequence
  Description of Artificial Sequence: Synthetic oligonucleotide
gccaggauccgcccgcuuc

SEQ ID NO: 2743452 - RNA, 19 nt, Artificial Sequence
  Description of Artificial Sequence: Synthetic oligonucleotide
uggccugcgugacgcccac

SEQ ID NO: 2743453 - RNA, 19 nt, Artificial Sequence
  Description of Artificial Sequence: Synthetic oligonucleotide
agguccgggcuggcacugc

SEQ ID NO: 2743454 - RNA, 19 nt, Artificial Sequence
  Description of Artificial Sequence: Synthetic oligonucleotide
gccuccuucuggcuucgug

SEQ ID NO: 2743455 - RNA, 19 nt, Artificial Sequence
  Description of Artificial Sequence: Synthetic oligonucleotide
cuccuucuggcuucguggu

SEQ ID NO: 2743456 - RNA, 19 nt, Artificial Sequence
  Description of Artificial Sequence: Synthetic oligonucleotide
cuggggcggggccccagag

SEQ ID NO: 2743457 - RNA, 19 nt, Artificial Sequence
  Description of Artificial Sequence: Synthetic oligonucleotide
gcgagccugcuuauccagg

SEQ ID NO: 2743458 - RNA, 19 nt, Artificial Sequence
  Description of Artificial Sequence: Synthetic oligonucleotide
cuccggucccucgcgcugc

SEQ ID NO: 2743459 - RNA, 19 nt, Artificial Sequence
  Description of Artificial Sequence: Synthetic oligonucleotide
uggcuaucacuguccccuu

SEQ ID NO: 2743460 - RNA, 19 nt, Artificial Sequence
  Description of Artificial Sequence: Synthetic oligonucleotide
gcgugcugguccuggaaca

SEQ ID NO: 2743461 - RNA, 19 nt, Artificial Sequence
  Description of Artificial Sequence: Synthetic oligonucleotide
ccgucuccaggacacucag

SEQ ID NO: 2743462 - RNA, 19 nt, Artificial Sequence
  Description of Artificial Sequence: Synthetic oligonucleotide
guccgggcuggcacugcgg

SEQ ID NO: 2743463 - RNA, 19 nt, Artificial Sequence
  Description of Artificial Sequence: Synthetic oligonucleotide
ugcucacuggcggguacuu

SEQ ID NO: 2743464 - RNA, 19 nt, Artificial Sequence
  Description of Artificial Sequence: Synthetic oligonucleotide
cccagguccgggcuggcac

SEQ ID NO: 2743465 - RNA, 19 nt, Artificial Sequence
  Description of Artificial Sequence: Synthetic oligonucleotide
uccggucccucgcgcugcu

SEQ ID NO: 2743466 - RNA, 19 nt, Artificial Sequence
  Description of Artificial Sequence: Synthetic oligonucleotide
gacuccggucccucgcgcu

SEQ ID NO: 2743467 - RNA, 19 nt, Artificial Sequence
  Description of Artificial Sequence: Synthetic oligonucleotide
gugccuaauccauguuuau

SEQ ID NO: 2743468 - RNA, 19 nt, Artificial Sequence
  Description of Artificial Sequence: Synthetic oligonucleotide
gugcggagcuccccagguc

SEQ ID NO: 2743469 - RNA, 19 nt, Artificial Sequence
  Description of Artificial Sequence: Synthetic oligonucleotide
gugacgcccacguggugcu

SEQ ID NO: 2743470 - RNA, 19 nt, Artificial Sequence
  Description of Artificial Sequence: Synthetic oligonucleotide
caccaccgucuccaggaca

SEQ ID NO: 2743471 - RNA, 19 nt, Artificial Sequence
  Description of Artificial Sequence: Synthetic oligonucleotide
guuccccaugggaggagga

SEQ ID NO: 2743472 - RNA, 19 nt, Artificial Sequence
  Description of Artificial Sequence: Synthetic oligonucleotide
gcugcucacuggcggguac

SEQ ID NO: 2743473 - RNA, 19 nt, Artificial Sequence
  Description of Artificial Sequence: Synthetic oligonucleotide
acgcccacguggugcugga

SEQ ID NO: 2743474 - RNA, 19 nt, Artificial Sequence
  Description of Artificial Sequence: Synthetic oligonucleotide
cugcuggagcuuggccugc

SEQ ID NO: 2743475 - RNA, 19 nt, Artificial Sequence
  Description of Artificial Sequence: Synthetic oligonucleotide
ggacacucagaaguagacu

SEQ ID NO: 2743476 - RNA, 19 nt, Artificial Sequence
  Description of Artificial Sequence: Synthetic oligonucleotide
gugagccuccuucuggcuu

SEQ ID NO: 2743477 - RNA, 19 nt, Artificial Sequence
  Description of Artificial Sequence: Synthetic oligonucleotide
cacugggcuggggcggggc

SEQ ID NO: 2743478 - RNA, 19 nt, Artificial Sequence
  Description of Artificial Sequence: Synthetic oligonucleotide
gccuagcucgucagcaaac

SEQ ID NO: 2743479 - RNA, 19 nt, Artificial Sequence
  Description of Artificial Sequence: Synthetic oligonucleotide
ccuagcucgucagcaaaca

SEQ ID NO: 2743480 - RNA, 19 nt, Artificial Sequence
  Description of Artificial Sequence: Synthetic oligonucleotide
cugcgugcugguccuggaa

SEQ ID NO: 2743481 - RNA, 19 nt, Artificial Sequence
  Description of Artificial Sequence: Synthetic oligonucleotide
cggcauagcgacuccgguc

SEQ ID NO: 2743482 - RNA, 19 nt, Artificial Sequence
  Description of Artificial Sequence: Synthetic oligonucleotide
ccccagagcuuuggaaggc

SEQ ID NO: 2743483 - RNA, 19 nt, Artificial Sequence
  Description of Artificial Sequence: Synthetic oligonucleotide
cgcgcugcucacuggcggg

SEQ ID NO: 2743484 - RNA, 19 nt, Artificial Sequence
  Description of Artificial Sequence: Synthetic oligonucleotide
ccacgugagccuccuucug

SEQ ID NO: 2743485 - RNA, 19 nt, Artificial Sequence
  Description of Artificial Sequence: Synthetic oligonucleotide
gcggagcuccccagguccg

SEQ ID NO: 2743486 - RNA, 19 nt, Artificial Sequence
  Description of Artificial Sequence: Synthetic oligonucleotide
ugacgcccacguggugcug

SEQ ID NO: 2743487 - RNA, 19 nt, Artificial Sequence
  Description of Artificial Sequence: Synthetic oligonucleotide
gccacgugagccuccuucu

SEQ ID NO: 2743488 - RNA, 19 nt, Artificial Sequence
  Description of Artificial Sequence: Synthetic oligonucleotide
ccccaugggaggaggagaa

SEQ ID NO: 2743489 - RNA, 19 nt, Artificial Sequence
  Description of Artificial Sequence: Synthetic oligonucleotide
cacgaucuuccggggccuc

SEQ ID NO: 2743490 - RNA, 19 nt, Artificial Sequence
  Description of Artificial Sequence: Synthetic oligonucleotide
gggccucgugcggagcucc

SEQ ID NO: 2743491 - RNA, 19 nt, Artificial Sequence
  Description of Artificial Sequence: Synthetic oligonucleotide
cccuugaucaucgaauuuu

SEQ ID NO: 2743492 - RNA, 19 nt, Artificial Sequence
  Description of Artificial Sequence: Synthetic oligonucleotide
ccgagaacucugcgugcug

SEQ ID NO: 2743493 - RNA, 19 nt, Artificial Sequence
  Description of Artificial Sequence: Synthetic oligonucleotide
cuguccccuugaucaucga

SEQ ID NO: 2743494 - RNA, 19 nt, Artificial Sequence
  Description of Artificial Sequence: Synthetic oligonucleotide
ggacccgagcugccacgug

SEQ ID NO: 2743495 - RNA, 19 nt, Artificial Sequence
  Description of Artificial Sequence: Synthetic oligonucleotide
acucugcgugcugguccug

SEQ ID NO: 2743496 - RNA, 19 nt, Artificial Sequence
  Description of Artificial Sequence: Synthetic oligonucleotide
gccugcgugacgcccacgu

SEQ ID NO: 2743497 - RNA, 19 nt, Artificial Sequence
  Description of Artificial Sequence: Synthetic oligonucleotide
ggcuucuguccggggcccg

SEQ ID NO: 2743498 - RNA, 19 nt, Artificial Sequence
  Description of Artificial Sequence: Synthetic oligonucleotide
ccugcgugacgcccacgug

SEQ ID NO: 2743499 - RNA, 19 nt, Artificial Sequence
  Description of Artificial Sequence: Synthetic oligonucleotide
cuggagcuccgagaacucu

SEQ ID NO: 2743500 - RNA, 19 nt, Artificial Sequence
  Description of Artificial Sequence: Synthetic oligonucleotide
gggcgccuagcucgucagc

SEQ ID NO: 2743501 - RNA, 19 nt, Artificial Sequence
  Description of Artificial Sequence: Synthetic oligonucleotide
agccaggauccgcccgcuu

SEQ ID NO: 2743502 - RNA, 19 nt, Artificial Sequence
  Description of Artificial Sequence: Synthetic oligonucleotide
cauagcgacuccggucccu

SEQ ID NO: 2743503 - RNA, 19 nt, Artificial Sequence
  Description of Artificial Sequence: Synthetic oligonucleotide
ccaccaccgucuccaggac

SEQ ID NO: 2743504 - RNA, 19 nt, Artificial Sequence
  Description of Artificial Sequence: Synthetic oligonucleotide
cccucgcgcugcucacugg

SEQ ID NO: 2743505 - RNA, 19 nt, Artificial Sequence
  Description of Artificial Sequence: Synthetic oligonucleotide
ccucgugcggagcucccca

SEQ ID NO: 2743506 - RNA, 19 nt, Artificial Sequence
  Description of Artificial Sequence: Synthetic oligonucleotide
uccccagguccgggcuggc

SEQ ID NO: 2743507 - RNA, 19 nt, Artificial Sequence
  Description of Artificial Sequence: Synthetic oligonucleotide
cccgagcugccacgugagc

SEQ ID NO: 2743508 - RNA, 19 nt, Artificial Sequence
  Description of Artificial Sequence: Synthetic oligonucleotide
gcggcauagcgacuccggu

SEQ ID NO: 2743509 - RNA, 19 nt, Artificial Sequence
  Description of Artificial Sequence: Synthetic oligonucleotide
gcgccuagcucgucagcaa

SEQ ID NO: 2743510 - RNA, 19 nt, Artificial Sequence
  Description of Artificial Sequence: Synthetic oligonucleotide
cuccggacccgagcugcca

SEQ ID NO: 2743511 - RNA, 19 nt, Artificial Sequence
  Description of Artificial Sequence: Synthetic oligonucleotide
cgcccgcuucuucucaaac

SEQ ID NO: 2743512 - RNA, 19 nt, Artificial Sequence
  Description of Artificial Sequence: Synthetic oligonucleotide
cgggcgccuagcucgucag

SEQ ID NO: 2743513 - RNA, 19 nt, Artificial Sequence
  Description of Artificial Sequence: Synthetic oligonucleotide
acacggcggcauagcgacu

SEQ ID NO: 2743514 - RNA, 19 nt, Artificial Sequence
  Description of Artificial Sequence: Synthetic oligonucleotide
gccucgugcggagcucccc

SEQ ID NO: 2743515 - RNA, 19 nt, Artificial Sequence
  Description of Artificial Sequence: Synthetic oligonucleotide
ccaggauccgcccgcuucu

SEQ ID NO: 2743516 - RNA, 19 nt, Artificial Sequence
  Description of Artificial Sequence: Synthetic oligonucleotide
cugcucacuggcggguacu

SEQ ID NO: 2743517 - RNA, 19 nt, Artificial Sequence
  Description of Artificial Sequence: Synthetic oligonucleotide
cgacuccggucccucgcgc

SEQ ID NO: 2743518 - RNA, 19 nt, Artificial Sequence
  Description of Artificial Sequence: Synthetic oligonucleotide
gcgugacgcccacguggug

SEQ ID NO: 2743519 - RNA, 19 nt, Artificial Sequence
  Description of Artificial Sequence: Synthetic oligonucleotide
gggcccgggcgccuagcuc

SEQ ID NO: 2743520 - RNA, 19 nt, Artificial Sequence
  Description of Artificial Sequence: Synthetic oligonucleotide
ggccuugaggugccucagu

SEQ ID NO: 2743521 - RNA, 19 nt, Artificial Sequence
  Description of Artificial Sequence: Synthetic oligonucleotide
gcuggggcggggccccaga

SEQ ID NO: 2743522 - RNA, 19 nt, Artificial Sequence
  Description of Artificial Sequence: Synthetic oligonucleotide
ccuggaacacggcggcaua

SEQ ID NO: 2743523 - RNA, 19 nt, Artificial Sequence
  Description of Artificial Sequence: Synthetic oligonucleotide
ccuugaggugccucaguuu

SEQ ID NO: 2743524 - RNA, 19 nt, Artificial Sequence
  Description of Artificial Sequence: Synthetic oligonucleotide
ggccucgugcggagcuccc

SEQ ID NO: 2743525 - RNA, 19 nt, Artificial Sequence
  Description of Artificial Sequence: Synthetic oligonucleotide
gcacugggcuggggcgggg

SEQ ID NO: 2743526 - RNA, 19 nt, Artificial Sequence
  Description of Artificial Sequence: Synthetic oligonucleotide
ccgggcgccuagcucguca

SEQ ID NO: 2743527 - RNA, 19 nt, Artificial Sequence
  Description of Artificial Sequence: Synthetic oligonucleotide
cggucccucgcgcugcuca

SEQ ID NO: 2743528 - RNA, 19 nt, Artificial Sequence
  Description of Artificial Sequence: Synthetic oligonucleotide
ccacguggugcuggagcuc

SEQ ID NO: 2743529 - RNA, 19 nt, Artificial Sequence
  Description of Artificial Sequence: Synthetic oligonucleotide
ggccugcgugacgcccacg

SEQ ID NO: 2743530 - RNA, 19 nt, Artificial Sequence
  Description of Artificial Sequence: Synthetic oligonucleotide
cggcggcauagcgacuccg

SEQ ID NO: 2743531 - RNA, 19 nt, Artificial Sequence
  Description of Artificial Sequence: Synthetic oligonucleotide
cgccuagcucgucagcaaa

SEQ ID NO: 2743532 - RNA, 19 nt, Artificial Sequence
  Description of Artificial Sequence: Synthetic oligonucleotide
gcggguacuuaagcucaua

SEQ ID NO: 2743533 - RNA, 19 nt, Artificial Sequence
  Description of Artificial Sequence: Synthetic oligonucleotide
gcugccacgugagccuccu

SEQ ID NO: 2743534 - RNA, 19 nt, Artificial Sequence
  Description of Artificial Sequence: Synthetic oligonucleotide
cggagcuccccagguccgg

SEQ ID NO: 2743535 - RNA, 19 nt, Artificial Sequence
  Description of Artificial Sequence: Synthetic oligonucleotide
gucccucgcgcugcucacu

SEQ ID NO: 2743536 - RNA, 19 nt, Artificial Sequence
  Description of Artificial Sequence: Synthetic oligonucleotide
ggggccucgugcggagcuc

SEQ ID NO: 2743537 - RNA, 19 nt, Artificial Sequence
  Description of Artificial Sequence: Synthetic oligonucleotide
gcucacuggcggguacuua

SEQ ID NO: 2743538 - RNA, 19 nt, Artificial Sequence
  Description of Artificial Sequence: Synthetic oligonucleotide
ccagguccgggcuggcacu

SEQ ID NO: 2743539 - RNA, 19 nt, Artificial Sequence
  Description of Artificial Sequence: Synthetic oligonucleotide
ggcuggggcggggccccag

SEQ ID NO: 2743540 - RNA, 19 nt, Artificial Sequence
  Description of Artificial Sequence: Synthetic oligonucleotide
cgucuccaggacacucaga

SEQ ID NO: 2743541 - RNA, 19 nt, Artificial Sequence
  Description of Artificial Sequence: Synthetic oligonucleotide
ggcggggccccagagcuuu

SEQ ID NO: 2743542 - RNA, 19 nt, Artificial Sequence
  Description of Artificial Sequence: Synthetic oligonucleotide
cgugcggagcuccccaggu

SEQ ID NO: 2743543 - RNA, 19 nt, Artificial Sequence
  Description of Artificial Sequence: Synthetic oligonucleotide
ggggcccgggcgccuagcu

SEQ ID NO: 2743544 - RNA, 19 nt, Artificial Sequence
  Description of Artificial Sequence: Synthetic oligonucleotide
ggcggguacuuaagcucau

SEQ ID NO: 2743545 - RNA, 19 nt, Artificial Sequence
  Description of Artificial Sequence: Synthetic oligonucleotide
ccgcccgcuucuucucaaa

SEQ ID NO: 2743546 - RNA, 19 nt, Artificial Sequence
  Description of Artificial Sequence: Synthetic oligonucleotide
ccggggccucgugcggagc

SEQ ID NO: 2743547 - RNA, 19 nt, Artificial Sequence
  Description of Artificial Sequence: Synthetic oligonucleotide
ccggggcccgggcgccuag

SEQ ID NO: 2743548 - RNA, 19 nt, Artificial Sequence
  Description of Artificial Sequence: Synthetic oligonucleotide
gcgcugcucacuggcgggu

SEQ ID NO: 2743549 - RNA, 19 nt, Artificial Sequence
  Description of Artificial Sequence: Synthetic oligonucleotide
caggauccgcccgcuucuu

SEQ ID NO: 2743550 - RNA, 19 nt, Artificial Sequence
  Description of Artificial Sequence: Synthetic oligonucleotide
gcucgucagcaaacacgau

SEQ ID NO: 2743551 - RNA, 19 nt, Artificial Sequence
  Description of Artificial Sequence: Synthetic oligonucleotide
cgcccacguggugcuggag

SEQ ID NO: 2743552 - RNA, 19 nt, Artificial Sequence
  Description of Artificial Sequence: Synthetic oligonucleotide
cgaucuuccggggccucgu

SEQ ID NO: 2743553 - RNA, 19 nt, Artificial Sequence
  Description of Artificial Sequence: Synthetic oligonucleotide
ccccagguccgggcuggca

SEQ ID NO: 2743554 - RNA, 19 nt, Artificial Sequence
  Description of Artificial Sequence: Synthetic oligonucleotide
cugccacgugagccuccuu

SEQ ID NO: 2743555 - RNA, 19 nt, Artificial Sequence
  Description of Artificial Sequence: Synthetic oligonucleotide
ccggucccucgcgcugcuc

SEQ ID NO: 2743556 - RNA, 19 nt, Artificial Sequence
  Description of Artificial Sequence: Synthetic oligonucleotide
cggggcccgggcgccuagc

SEQ ID NO: 2743557 - RNA, 19 nt, Artificial Sequence
  Description of Artificial Sequence: Synthetic oligonucleotide
cggacccgagcugccacgu

SEQ ID NO: 2743558 - RNA, 19 nt, Artificial Sequence
  Description of Artificial Sequence: Synthetic oligonucleotide
cccgggcgccuagcucguc

SEQ ID NO: 2743559 - RNA, 19 nt, Artificial Sequence
  Description of Artificial Sequence: Synthetic oligonucleotide
cgcugcucacuggcgggua

SEQ ID NO: 2743560 - RNA, 19 nt, Artificial Sequence
  Description of Artificial Sequence: Synthetic oligonucleotide
gggcggggccccagagcuu

SEQ ID NO: 2743561 - RNA, 19 nt, Artificial Sequence
  Description of Artificial Sequence: Synthetic oligonucleotide
aauugaaccauucaacagc

SEQ ID NO: 2743562 - RNA, 19 nt, Artificial Sequence
  Description of Artificial Sequence: Synthetic oligonucleotide
uuacaaauguucuaaaugg

SEQ ID NO: 2743563 - RNA, 19 nt, Artificial Sequence
  Description of Artificial Sequence: Synthetic oligonucleotide
agaaaugcacaauugaacc

SEQ ID NO: 2743564 - RNA, 19 nt, Artificial Sequence
  Description of Artificial Sequence: Synthetic oligonucleotide
ucauauuaaacauuuauac

SEQ ID NO: 2743565 - RNA, 19 nt, Artificial Sequence
  Description of Artificial Sequence: Synthetic oligonucleotide
aucauauuaacauacauga

SEQ ID NO: 2743566 - RNA, 19 nt, Artificial Sequence
  Description of Artificial Sequence: Synthetic oligonucleotide
auuuauacagucuuuccac

SEQ ID NO: 2743567 - RNA, 19 nt, Artificial Sequence
  Description of Artificial Sequence: Synthetic oligonucleotide
uccucuaacaucaauaaca

SEQ ID NO: 2743568 - RNA, 19 nt, Artificial Sequence
  Description of Artificial Sequence: Synthetic oligonucleotide
aaauguucuaaaugguuuc

SEQ ID NO: 2743569 - RNA, 19 nt, Artificial Sequence
  Description of Artificial Sequence: Synthetic oligonucleotide
uaauaguucauccagcaga

SEQ ID NO: 2743570 - RNA, 19 nt, Artificial Sequence
  Description of Artificial Sequence: Synthetic oligonucleotide
uuaacuuuacaaauguucu

SEQ ID NO: 2743571 - RNA, 19 nt, Artificial Sequence
  Description of Artificial Sequence: Synthetic oligonucleotide
uuauaaguagaucugggca

SEQ ID NO: 2743572 - RNA, 19 nt, Artificial Sequence
  Description of Artificial Sequence: Synthetic oligonucleotide
uauuucaucauauuaacau

SEQ ID NO: 2743573 - RNA, 19 nt, Artificial Sequence
  Description of Artificial Sequence: Synthetic oligonucleotide
aucaaaaugagaaaugcac

SEQ ID NO: 2743574 - RNA, 19 nt, Artificial Sequence
  Description of Artificial Sequence: Synthetic oligonucleotide
uaacauacaugacacauca

SEQ ID NO: 2743575 - RNA, 19 nt, Artificial Sequence
  Description of Artificial Sequence: Synthetic oligonucleotide
auauuaacauacaugacac

SEQ ID NO: 2743576 - RNA, 19 nt, Artificial Sequence
  Description of Artificial Sequence: Synthetic oligonucleotide
acaaguuacuuacuaauuc

SEQ ID NO: 2743577 - RNA, 19 nt, Artificial Sequence
  Description of Artificial Sequence: Synthetic oligonucleotide
aagaccacuauauucauau

SEQ ID NO: 2743578 - RNA, 19 nt, Artificial Sequence
  Description of Artificial Sequence: Synthetic oligonucleotide
uuucaucauauuaacauac

SEQ ID NO: 2743579 - RNA, 19 nt, Artificial Sequence
  Description of Artificial Sequence: Synthetic oligonucleotide
acaucaaaaugagaaaugc

SEQ ID NO: 2743580 - RNA, 19 nt, Artificial Sequence
  Description of Artificial Sequence: Synthetic oligonucleotide
ucuuggacuaaccacuagg

SEQ ID NO: 2743581 - RNA, 19 nt, Artificial Sequence
  Description of Artificial Sequence: Synthetic oligonucleotide
uacuuacuaauucacaaug

SEQ ID NO: 2743582 - RNA, 19 nt, Artificial Sequence
  Description of Artificial Sequence: Synthetic oligonucleotide
uuuauuucaucauauuaac

SEQ ID NO: 2743583 - RNA, 19 nt, Artificial Sequence
  Description of Artificial Sequence: Synthetic oligonucleotide
uuaaacagguaccaguucu

SEQ ID NO: 2743584 - RNA, 19 nt, Artificial Sequence
  Description of Artificial Sequence: Synthetic oligonucleotide
aaaaugggcuccuagacau

SEQ ID NO: 2743585 - RNA, 19 nt, Artificial Sequence
  Description of Artificial Sequence: Synthetic oligonucleotide
agaaaaugggcuccuagac

SEQ ID NO: 2743586 - RNA, 19 nt, Artificial Sequence
  Description of Artificial Sequence: Synthetic oligonucleotide
aauguucuaaaugguuucc

SEQ ID NO: 2743587 - RNA, 19 nt, Artificial Sequence
  Description of Artificial Sequence: Synthetic oligonucleotide
ugaaccauucaacagcuug

SEQ ID NO: 2743588 - RNA, 19 nt, Artificial Sequence
  Description of Artificial Sequence: Synthetic oligonucleotide
aaccacuagggucuguccc

SEQ ID NO: 2743589 - RNA, 19 nt, Artificial Sequence
  Description of Artificial Sequence: Synthetic oligonucleotide
auucauauuaaacauuuau

SEQ ID NO: 2743590 - RNA, 19 nt, Artificial Sequence
  Description of Artificial Sequence: Synthetic oligonucleotide
cauauuaacauacaugaca

SEQ ID NO: 2743591 - RNA, 19 nt, Artificial Sequence
  Description of Artificial Sequence: Synthetic oligonucleotide
acagagaugaguccuagag

SEQ ID NO: 2743592 - RNA, 19 nt, Artificial Sequence
  Description of Artificial Sequence: Synthetic oligonucleotide
cuuacuaauucacaaugcc

SEQ ID NO: 2743593 - RNA, 19 nt, Artificial Sequence
  Description of Artificial Sequence: Synthetic oligonucleotide
uuuauacagucuuuccacg

SEQ ID NO: 2743594 - RNA, 19 nt, Artificial Sequence
  Description of Artificial Sequence: Synthetic oligonucleotide
aaaugagaaaugcacaauu

SEQ ID NO: 2743595 - RNA, 19 nt, Artificial Sequence
  Description of Artificial Sequence: Synthetic oligonucleotide
caucauauuaacauacaug

SEQ ID NO: 2743596 - RNA, 19 nt, Artificial Sequence
  Description of Artificial Sequence: Synthetic oligonucleotide
cacuauauucauauuaaac

SEQ ID NO: 2743597 - RNA, 19 nt, Artificial Sequence
  Description of Artificial Sequence: Synthetic oligonucleotide
acaauugaaccauucaaca

SEQ ID NO: 2743598 - RNA, 19 nt, Artificial Sequence
  Description of Artificial Sequence: Synthetic oligonucleotide
agagaugaguccuagagau

SEQ ID NO: 2743599 - RNA, 19 nt, Artificial Sequence
  Description of Artificial Sequence: Synthetic oligonucleotide
uacuaauucacaaugccua

SEQ ID NO: 2743600 - RNA, 19 nt, Artificial Sequence
  Description of Artificial Sequence: Synthetic oligonucleotide
ugagaaaugcacaauugaa

SEQ ID NO: 2743601 - RNA, 19 nt, Artificial Sequence
  Description of Artificial Sequence: Synthetic oligonucleotide
uuacuaauucacaaugccu

SEQ ID NO: 2743602 - RNA, 19 nt, Artificial Sequence
  Description of Artificial Sequence: Synthetic oligonucleotide
aaugccuagaaaaugggcu

SEQ ID NO: 2743603 - RNA, 19 nt, Artificial Sequence
  Description of Artificial Sequence: Synthetic oligonucleotide
uuggguuuaugacucagcc

SEQ ID NO: 2743604 - RNA, 19 nt, Artificial Sequence
  Description of Artificial Sequence: Synthetic oligonucleotide
uuuuccucuaacaucaaua

SEQ ID NO: 2743605 - RNA, 19 nt, Artificial Sequence
  Description of Artificial Sequence: Synthetic oligonucleotide
uugguuauaaguagaucug

SEQ ID NO: 2743606 - RNA, 19 nt, Artificial Sequence
  Description of Artificial Sequence: Synthetic oligonucleotide
uacuggauugguuauaagu

SEQ ID NO: 2743607 - RNA, 19 nt, Artificial Sequence
  Description of Artificial Sequence: Synthetic oligonucleotide
cuuggacuaaccacuaggg

SEQ ID NO: 2743608 - RNA, 19 nt, Artificial Sequence
  Description of Artificial Sequence: Synthetic oligonucleotide
aggaucauuucucuuggac

SEQ ID NO: 2743609 - RNA, 19 nt, Artificial Sequence
  Description of Artificial Sequence: Synthetic oligonucleotide
cugcacaugaaaaugggag

SEQ ID NO: 2743610 - RNA, 19 nt, Artificial Sequence
  Description of Artificial Sequence: Synthetic oligonucleotide
uuuuaaacagguaccaguu

SEQ ID NO: 2743611 - RNA, 19 nt, Artificial Sequence
  Description of Artificial Sequence: Synthetic oligonucleotide
uauaaguagaucugggcaa

SEQ ID NO: 2743612 - RNA, 19 nt, Artificial Sequence
  Description of Artificial Sequence: Synthetic oligonucleotide
gacaggaucauuucucuug

SEQ ID NO: 2743613 - RNA, 19 nt, Artificial Sequence
  Description of Artificial Sequence: Synthetic oligonucleotide
uuauuucaucauauuaaca

SEQ ID NO: 2743614 - RNA, 19 nt, Artificial Sequence
  Description of Artificial Sequence: Synthetic oligonucleotide
guuaacuuuacaaauguuc

SEQ ID NO: 2743615 - RNA, 19 nt, Artificial Sequence
  Description of Artificial Sequence: Synthetic oligonucleotide
guuauaaguagaucugggc

SEQ ID NO: 2743616 - RNA, 19 nt, Artificial Sequence
  Description of Artificial Sequence: Synthetic oligonucleotide
ugccuuacucccaagacca

SEQ ID NO: 2743617 - RNA, 19 nt, Artificial Sequence
  Description of Artificial Sequence: Synthetic oligonucleotide
aaccauucaacagcuugcc

SEQ ID NO: 2743618 - RNA, 19 nt, Artificial Sequence
  Description of Artificial Sequence: Synthetic oligonucleotide
aaugagaaaugcacaauug

SEQ ID NO: 2743619 - RNA, 19 nt, Artificial Sequence
  Description of Artificial Sequence: Synthetic oligonucleotide
acauacaugacacaucaaa

SEQ ID NO: 2743620 - RNA, 19 nt, Artificial Sequence
  Description of Artificial Sequence: Synthetic oligonucleotide
uguucuaaaugguuuccag

SEQ ID NO: 2743621 - RNA, 19 nt, Artificial Sequence
  Description of Artificial Sequence: Synthetic oligonucleotide
uggacuaaccacuaggguc

SEQ ID NO: 2743622 - RNA, 19 nt, Artificial Sequence
  Description of Artificial Sequence: Synthetic oligonucleotide
caugacacaucaaaaugag

SEQ ID NO: 2743623 - RNA, 19 nt, Artificial Sequence
  Description of Artificial Sequence: Synthetic oligonucleotide
cacaauugaaccauucaac

SEQ ID NO: 2743624 - RNA, 19 nt, Artificial Sequence
  Description of Artificial Sequence: Synthetic oligonucleotide
auuaacauacaugacacau

SEQ ID NO: 2743625 - RNA, 19 nt, Artificial Sequence
  Description of Artificial Sequence: Synthetic oligonucleotide
uaauucacaaugccuagaa

SEQ ID NO: 2743626 - RNA, 19 nt, Artificial Sequence
  Description of Artificial Sequence: Synthetic oligonucleotide
acuuacuaauucacaaugc

SEQ ID NO: 2743627 - RNA, 19 nt, Artificial Sequence
  Description of Artificial Sequence: Synthetic oligonucleotide
ugggcaaggcuccuaauag

SEQ ID NO: 2743628 - RNA, 19 nt, Artificial Sequence
  Description of Artificial Sequence: Synthetic oligonucleotide
aaugggcuccuagacaugg

SEQ ID NO: 2743629 - RNA, 19 nt, Artificial Sequence
  Description of Artificial Sequence: Synthetic oligonucleotide
cauuucucagucuggaaag

SEQ ID NO: 2743630 - RNA, 19 nt, Artificial Sequence
  Description of Artificial Sequence: Synthetic oligonucleotide
ucaucauauuaacauacau

SEQ ID NO: 2743631 - RNA, 19 nt, Artificial Sequence
  Description of Artificial Sequence: Synthetic oligonucleotide
aaguagaucugggcaaggc

SEQ ID NO: 2743632 - RNA, 19 nt, Artificial Sequence
  Description of Artificial Sequence: Synthetic oligonucleotide
ucagucucagcgcuaagug

SEQ ID NO: 2743633 - RNA, 19 nt, Artificial Sequence
  Description of Artificial Sequence: Synthetic oligonucleotide
ugacaaguuacuuacuaau

SEQ ID NO: 2743634 - RNA, 19 nt, Artificial Sequence
  Description of Artificial Sequence: Synthetic oligonucleotide
aagugcucagggaagggcc

SEQ ID NO: 2743635 - RNA, 19 nt, Artificial Sequence
  Description of Artificial Sequence: Synthetic oligonucleotide
uccacguuaacuuuacaaa

SEQ ID NO: 2743636 - RNA, 19 nt, Artificial Sequence
  Description of Artificial Sequence: Synthetic oligonucleotide
guuacuuacuaauucacaa

SEQ ID NO: 2743637 - RNA, 19 nt, Artificial Sequence
  Description of Artificial Sequence: Synthetic oligonucleotide
uuucucuuggacuaaccac

SEQ ID NO: 2743638 - RNA, 19 nt, Artificial Sequence
  Description of Artificial Sequence: Synthetic oligonucleotide
acaggaucauuucucuugg

SEQ ID NO: 2743639 - RNA, 19 nt, Artificial Sequence
  Description of Artificial Sequence: Synthetic oligonucleotide
caauugaaccauucaacag

SEQ ID NO: 2743640 - RNA, 19 nt, Artificial Sequence
  Description of Artificial Sequence: Synthetic oligonucleotide
augagaaaugcacaauuga

SEQ ID NO: 2743641 - RNA, 19 nt, Artificial Sequence
  Description of Artificial Sequence: Synthetic oligonucleotide
ucaagcuuggguuuaugac

SEQ ID NO: 2743642 - RNA, 19 nt, Artificial Sequence
  Description of Artificial Sequence: Synthetic oligonucleotide
auacaugacacaucaaaau

SEQ ID NO: 2743643 - RNA, 19 nt, Artificial Sequence
  Description of Artificial Sequence: Synthetic oligonucleotide
ugguuauaaguagaucugg

SEQ ID NO: 2743644 - RNA, 19 nt, Artificial Sequence
  Description of Artificial Sequence: Synthetic oligonucleotide
acuaauucacaaugccuag

SEQ ID NO: 2743645 - RNA, 19 nt, Artificial Sequence
  Description of Artificial Sequence: Synthetic oligonucleotide
uuaacauacaugacacauc

SEQ ID NO: 2743646 - RNA, 19 nt, Artificial Sequence
  Description of Artificial Sequence: Synthetic oligonucleotide
uccuagagaucucugcugc

SEQ ID NO: 2743647 - RNA, 19 nt, Artificial Sequence
  Description of Artificial Sequence: Synthetic oligonucleotide
uagaaaaugggcuccuaga

SEQ ID NO: 2743648 - RNA, 19 nt, Artificial Sequence
  Description of Artificial Sequence: Synthetic oligonucleotide
aaaugcacaauugaaccau

SEQ ID NO: 2743649 - RNA, 19 nt, Artificial Sequence
  Description of Artificial Sequence: Synthetic oligonucleotide
cuggauugguuauaaguag

SEQ ID NO: 2743650 - RNA, 19 nt, Artificial Sequence
  Description of Artificial Sequence: Synthetic oligonucleotide
acguuaacuuuacaaaugu

SEQ ID NO: 2743651 - RNA, 19 nt, Artificial Sequence
  Description of Artificial Sequence: Synthetic oligonucleotide
uggauugguuauaaguaga

SEQ ID NO: 2743652 - RNA, 19 nt, Artificial Sequence
  Description of Artificial Sequence: Synthetic oligonucleotide
uucaucauauuaacauaca

SEQ ID NO: 2743653 - RNA, 19 nt, Artificial Sequence
  Description of Artificial Sequence: Synthetic oligonucleotide
ugagguacuggauugguua

SEQ ID NO: 2743654 - RNA, 19 nt, Artificial Sequence
  Description of Artificial Sequence: Synthetic oligonucleotide
uugccuuacucccaagacc

SEQ ID NO: 2743655 - RNA, 19 nt, Artificial Sequence
  Description of Artificial Sequence: Synthetic oligonucleotide
augccuagaaaaugggcuc

SEQ ID NO: 2743656 - RNA, 19 nt, Artificial Sequence
  Description of Artificial Sequence: Synthetic oligonucleotide
aagcuuggguuuaugacuc

SEQ ID NO: 2743657 - RNA, 19 nt, Artificial Sequence
  Description of Artificial Sequence: Synthetic oligonucleotide
auuucucuuggacuaacca

SEQ ID NO: 2743658 - RNA, 19 nt, Artificial Sequence
  Description of Artificial Sequence: Synthetic oligonucleotide
ucauauuaacauacaugac

SEQ ID NO: 2743659 - RNA, 19 nt, Artificial Sequence
  Description of Artificial Sequence: Synthetic oligonucleotide
cuccuaauaguucauccag

SEQ ID NO: 2743660 - RNA, 19 nt, Artificial Sequence
  Description of Artificial Sequence: Synthetic oligonucleotide
guucuaaaugguuuccagc

SEQ ID NO: 2743661 - RNA, 19 nt, Artificial Sequence
  Description of Artificial Sequence: Synthetic oligonucleotide
uaaacagguaccaguucug

SEQ ID NO: 2743662 - RNA, 19 nt, Artificial Sequence
  Description of Artificial Sequence: Synthetic oligonucleotide
uuccaccugacccacagcu

SEQ ID NO: 2743663 - RNA, 19 nt, Artificial Sequence
  Description of Artificial Sequence: Synthetic oligonucleotide
agaugaguccuagagaucu

SEQ ID NO: 2743664 - RNA, 19 nt, Artificial Sequence
  Description of Artificial Sequence: Synthetic oligonucleotide
uuuccagcauuucucaguc

SEQ ID NO: 2743665 - RNA, 19 nt, Artificial Sequence
  Description of Artificial Sequence: Synthetic oligonucleotide
gaaaugcacaauugaacca

SEQ ID NO: 2743666 - RNA, 19 nt, Artificial Sequence
  Description of Artificial Sequence: Synthetic oligonucleotide
uccuaauaguucauccagc

SEQ ID NO: 2743667 - RNA, 19 nt, Artificial Sequence
  Description of Artificial Sequence: Synthetic oligonucleotide
agucuuuccacguuaacuu

SEQ ID NO: 2743668 - RNA, 19 nt, Artificial Sequence
  Description of Artificial Sequence: Synthetic oligonucleotide
uucucagucuggaaaguga

SEQ ID NO: 2743669 - RNA, 19 nt, Artificial Sequence
  Description of Artificial Sequence: Synthetic oligonucleotide
cuaagagggucuuuccacc

SEQ ID NO: 2743670 - RNA, 19 nt, Artificial Sequence
  Description of Artificial Sequence: Synthetic oligonucleotide
auauucauauuaaacauuu

SEQ ID NO: 2743671 - RNA, 19 nt, Artificial Sequence
  Description of Artificial Sequence: Synthetic oligonucleotide
cacguuaacuuuacaaaug

SEQ ID NO: 2743672 - RNA, 19 nt, Artificial Sequence
  Description of Artificial Sequence: Synthetic oligonucleotide
ugucugagguacuggauug

SEQ ID NO: 2743673 - RNA, 19 nt, Artificial Sequence
  Description of Artificial Sequence: Synthetic oligonucleotide
uuauacagucuuuccacgu

SEQ ID NO: 2743674 - RNA, 19 nt, Artificial Sequence
  Description of Artificial Sequence: Synthetic oligonucleotide
uuacuuacuaauucacaau

SEQ ID NO: 2743675 - RNA, 19 nt, Artificial Sequence
  Description of Artificial Sequence: Synthetic oligonucleotide
gaucauuucucuuggacua

SEQ ID NO: 2743676 - RNA, 19 nt, Artificial Sequence
  Description of Artificial Sequence: Synthetic oligonucleotide
cuagaaaaugggcuccuag

SEQ ID NO: 2743677 - RNA, 19 nt, Artificial Sequence
  Description of Artificial Sequence: Synthetic oligonucleotide
auuucaucauauuaacaua

SEQ ID NO: 2743678 - RNA, 19 nt, Artificial Sequence
  Description of Artificial Sequence: Synthetic oligonucleotide
gaaaaugggcuccuagaca

SEQ ID NO: 2743679 - RNA, 19 nt, Artificial Sequence
  Description of Artificial Sequence: Synthetic oligonucleotide
uuuaaacagguaccaguuc

SEQ ID NO: 2743680 - RNA, 19 nt, Artificial Sequence
  Description of Artificial Sequence: Synthetic oligonucleotide
ugucacucaagcuuggguu

SEQ ID NO: 2743681 - RNA, 19 nt, Artificial Sequence
  Description of Artificial Sequence: Synthetic oligonucleotide
gaaccauucaacagcuugc

SEQ ID NO: 2743682 - RNA, 19 nt, Artificial Sequence
  Description of Artificial Sequence: Synthetic oligonucleotide
caaugccuagaaaaugggc

SEQ ID NO: 2743683 - RNA, 19 nt, Artificial Sequence
  Description of Artificial Sequence: Synthetic oligonucleotide
ucccaagaccacuauauuc

SEQ ID NO: 2743684 - RNA, 19 nt, Artificial Sequence
  Description of Artificial Sequence: Synthetic oligonucleotide
gggucugucccuaagaggg

SEQ ID NO: 2743685 - RNA, 19 nt, Artificial Sequence
  Description of Artificial Sequence: Synthetic oligonucleotide
gaccacuauauucauauua

SEQ ID NO: 2743686 - RNA, 19 nt, Artificial Sequence
  Description of Artificial Sequence: Synthetic oligonucleotide
uauuaacauacaugacaca

SEQ ID NO: 2743687 - RNA, 19 nt, Artificial Sequence
  Description of Artificial Sequence: Synthetic oligonucleotide
aguccuagagaucucugcu

SEQ ID NO: 2743688 - RNA, 19 nt, Artificial Sequence
  Description of Artificial Sequence: Synthetic oligonucleotide
acaugacacaucaaaauga

SEQ ID NO: 2743689 - RNA, 19 nt, Artificial Sequence
  Description of Artificial Sequence: Synthetic oligonucleotide
augacucagccuuggacag

SEQ ID NO: 2743690 - RNA, 19 nt, Artificial Sequence
  Description of Artificial Sequence: Synthetic oligonucleotide
augguuuccagcauuucuc

SEQ ID NO: 2743691 - RNA, 19 nt, Artificial Sequence
  Description of Artificial Sequence: Synthetic oligonucleotide
cuaauaguucauccagcag

SEQ ID NO: 2743692 - RNA, 19 nt, Artificial Sequence
  Description of Artificial Sequence: Synthetic oligonucleotide
uaaaugguuuccagcauuu

SEQ ID NO: 2743693 - RNA, 19 nt, Artificial Sequence
  Description of Artificial Sequence: Synthetic oligonucleotide
agaucucugcugcacauga

SEQ ID NO: 2743694 - RNA, 19 nt, Artificial Sequence
  Description of Artificial Sequence: Synthetic oligonucleotide
acacaucaaaaugagaaau

SEQ ID NO: 2743695 - RNA, 19 nt, Artificial Sequence
  Description of Artificial Sequence: Synthetic oligonucleotide
gggucuuuccaccugaccc

SEQ ID NO: 2743696 - RNA, 19 nt, Artificial Sequence
  Description of Artificial Sequence: Synthetic oligonucleotide
cauacaugacacaucaaaa

SEQ ID NO: 2743697 - RNA, 19 nt, Artificial Sequence
  Description of Artificial Sequence: Synthetic oligonucleotide
auaaguagaucugggcaag

SEQ ID NO: 2743698 - RNA, 19 nt, Artificial Sequence
  Description of Artificial Sequence: Synthetic oligonucleotide
ucuaaaugguuuccagcau

SEQ ID NO: 2743699 - RNA, 19 nt, Artificial Sequence
  Description of Artificial Sequence: Synthetic oligonucleotide
uuggacuaaccacuagggu

SEQ ID NO: 2743700 - RNA, 19 nt, Artificial Sequence
  Description of Artificial Sequence: Synthetic oligonucleotide
uugucugagguacuggauu

SEQ ID NO: 2743701 - RNA, 19 nt, Artificial Sequence
  Description of Artificial Sequence: Synthetic oligonucleotide
cuuggguuuaugacucagc

SEQ ID NO: 2743702 - RNA, 19 nt, Artificial Sequence
  Description of Artificial Sequence: Synthetic oligonucleotide
caugguaguggugacggcc

SEQ ID NO: 2743703 - RNA, 19 nt, Artificial Sequence
  Description of Artificial Sequence: Synthetic oligonucleotide
cuugccuuacucccaagac

SEQ ID NO: 2743704 - RNA, 19 nt, Artificial Sequence
  Description of Artificial Sequence: Synthetic oligonucleotide
gguuauaaguagaucuggg

SEQ ID NO: 2743705 - RNA, 19 nt, Artificial Sequence
  Description of Artificial Sequence: Synthetic oligonucleotide
cuuuccaccugacccacag

SEQ ID NO: 2743706 - RNA, 19 nt, Artificial Sequence
  Description of Artificial Sequence: Synthetic oligonucleotide
uuuaugacucagccuugga

SEQ ID NO: 2743707 - RNA, 19 nt, Artificial Sequence
  Description of Artificial Sequence: Synthetic oligonucleotide
auugaaccauucaacagcu

SEQ ID NO: 2743708 - RNA, 19 nt, Artificial Sequence
  Description of Artificial Sequence: Synthetic oligonucleotide
uauacagucuuuccacguu

SEQ ID NO: 2743709 - RNA, 19 nt, Artificial Sequence
  Description of Artificial Sequence: Synthetic oligonucleotide
cuucagcugucacucaagc

SEQ ID NO: 2743710 - RNA, 19 nt, Artificial Sequence
  Description of Artificial Sequence: Synthetic oligonucleotide
ucuuuccacguuaacuuua

SEQ ID NO: 2743711 - RNA, 19 nt, Artificial Sequence
  Description of Artificial Sequence: Synthetic oligonucleotide
cuuuccacguuaacuuuac

SEQ ID NO: 2743712 - RNA, 19 nt, Artificial Sequence
  Description of Artificial Sequence: Synthetic oligonucleotide
uagagaucucugcugcaca

SEQ ID NO: 2743713 - RNA, 19 nt, Artificial Sequence
  Description of Artificial Sequence: Synthetic oligonucleotide
augaaaaugggagggauuu

SEQ ID NO: 2743714 - RNA, 19 nt, Artificial Sequence
  Description of Artificial Sequence: Synthetic oligonucleotide
acaaugccuagaaaauggg

SEQ ID NO: 2743715 - RNA, 19 nt, Artificial Sequence
  Description of Artificial Sequence: Synthetic oligonucleotide
agggccuggacagagauga

SEQ ID NO: 2743716 - RNA, 19 nt, Artificial Sequence
  Description of Artificial Sequence: Synthetic oligonucleotide
cauuucucuuggacuaacc

SEQ ID NO: 2743717 - RNA, 19 nt, Artificial Sequence
  Description of Artificial Sequence: Synthetic oligonucleotide
guuuaugacucagccuugg

SEQ ID NO: 2743718 - RNA, 19 nt, Artificial Sequence
  Description of Artificial Sequence: Synthetic oligonucleotide
acuggauugguuauaagua

SEQ ID NO: 2743719 - RNA, 19 nt, Artificial Sequence
  Description of Artificial Sequence: Synthetic oligonucleotide
augguaguggugacggccc

SEQ ID NO: 2743720 - RNA, 19 nt, Artificial Sequence
  Description of Artificial Sequence: Synthetic oligonucleotide
acagucuuuccacguuaac

SEQ ID NO: 2743721 - RNA, 19 nt, Artificial Sequence
  Description of Artificial Sequence: Synthetic oligonucleotide
uuucucagucuggaaagug

SEQ ID NO: 2743722 - RNA, 19 nt, Artificial Sequence
  Description of Artificial Sequence: Synthetic oligonucleotide
guggugacggccccgaaug

SEQ ID NO: 2743723 - RNA, 19 nt, Artificial Sequence
  Description of Artificial Sequence: Synthetic oligonucleotide
aaacagguaccaguucuga

SEQ ID NO: 2743724 - RNA, 19 nt, Artificial Sequence
  Description of Artificial Sequence: Synthetic oligonucleotide
uaagagggucuuuccaccu

SEQ ID NO: 2743725 - RNA, 19 nt, Artificial Sequence
  Description of Artificial Sequence: Synthetic oligonucleotide
gcacaugaaaaugggaggg

SEQ ID NO: 2743726 - RNA, 19 nt, Artificial Sequence
  Description of Artificial Sequence: Synthetic oligonucleotide
uggguuuaugacucagccu

SEQ ID NO: 2743727 - RNA, 19 nt, Artificial Sequence
  Description of Artificial Sequence: Synthetic oligonucleotide
accacuauauucauauuaa

SEQ ID NO: 2743728 - RNA, 19 nt, Artificial Sequence
  Description of Artificial Sequence: Synthetic oligonucleotide
uaaguagaucugggcaagg

SEQ ID NO: 2743729 - RNA, 19 nt, Artificial Sequence
  Description of Artificial Sequence: Synthetic oligonucleotide
cuuugucugagguacugga

SEQ ID NO: 2743730 - RNA, 19 nt, Artificial Sequence
  Description of Artificial Sequence: Synthetic oligonucleotide
guagaucugggcaaggcuc

SEQ ID NO: 2743731 - RNA, 19 nt, Artificial Sequence
  Description of Artificial Sequence: Synthetic oligonucleotide
aguuacuuacuaauucaca

SEQ ID NO: 2743732 - RNA, 19 nt, Artificial Sequence
  Description of Artificial Sequence: Synthetic oligonucleotide
gauugguuauaaguagauc

SEQ ID NO: 2743733 - RNA, 19 nt, Artificial Sequence
  Description of Artificial Sequence: Synthetic oligonucleotide
acuagggucugucccuaag

SEQ ID NO: 2743734 - RNA, 19 nt, Artificial Sequence
  Description of Artificial Sequence: Synthetic oligonucleotide
cagucucagcgcuaagugc

SEQ ID NO: 2743735 - RNA, 19 nt, Artificial Sequence
  Description of Artificial Sequence: Synthetic oligonucleotide
uaaccacuagggucugucc

SEQ ID NO: 2743736 - RNA, 19 nt, Artificial Sequence
  Description of Artificial Sequence: Synthetic oligonucleotide
acaugguaguggugacggc

SEQ ID NO: 2743737 - RNA, 19 nt, Artificial Sequence
  Description of Artificial Sequence: Synthetic oligonucleotide
ggcuccuaauaguucaucc

SEQ ID NO: 2743738 - RNA, 19 nt, Artificial Sequence
  Description of Artificial Sequence: Synthetic oligonucleotide
ugccuagaaaaugggcucc

SEQ ID NO: 2743739 - RNA, 19 nt, Artificial Sequence
  Description of Artificial Sequence: Synthetic oligonucleotide
acucccaagaccacuauau

SEQ ID NO: 2743740 - RNA, 19 nt, Artificial Sequence
  Description of Artificial Sequence: Synthetic oligonucleotide
cuagagaucucugcugcac

SEQ ID NO: 2743741 - RNA, 19 nt, Artificial Sequence
  Description of Artificial Sequence: Synthetic oligonucleotide
ucugucccuaagagggucu

SEQ ID NO: 2743742 - RNA, 19 nt, Artificial Sequence
  Description of Artificial Sequence: Synthetic oligonucleotide
caagcuuggguuuaugacu

SEQ ID NO: 2743743 - RNA, 19 nt, Artificial Sequence
  Description of Artificial Sequence: Synthetic oligonucleotide
accacuagggucugucccu

SEQ ID NO: 2743744 - RNA, 19 nt, Artificial Sequence
  Description of Artificial Sequence: Synthetic oligonucleotide
ucagcgcuaagugcucagg

SEQ ID NO: 2743745 - RNA, 19 nt, Artificial Sequence
  Description of Artificial Sequence: Synthetic oligonucleotide
cagcgcuaagugcucaggg

SEQ ID NO: 2743746 - RNA, 19 nt, Artificial Sequence
  Description of Artificial Sequence: Synthetic oligonucleotide
agcgcuaagugcucaggga

SEQ ID NO: 2743747 - RNA, 19 nt, Artificial Sequence
  Description of Artificial Sequence: Synthetic oligonucleotide
agacaugguaguggugacg

SEQ ID NO: 2743748 - RNA, 19 nt, Artificial Sequence
  Description of Artificial Sequence: Synthetic oligonucleotide
agagaucucugcugcacau

SEQ ID NO: 2743749 - RNA, 19 nt, Artificial Sequence
  Description of Artificial Sequence: Synthetic oligonucleotide
ucccuaagagggucuuucc

SEQ ID NO: 2743750 - RNA, 19 nt, Artificial Sequence
  Description of Artificial Sequence: Synthetic oligonucleotide
ccaguucugauuuuauuuc

SEQ ID NO: 2743751 - RNA, 19 nt, Artificial Sequence
  Description of Artificial Sequence: Synthetic oligonucleotide
acaugaaaaugggagggau

SEQ ID NO: 2743752 - RNA, 19 nt, Artificial Sequence
  Description of Artificial Sequence: Synthetic oligonucleotide
uagacaugguaguggugac

SEQ ID NO: 2743753 - RNA, 19 nt, Artificial Sequence
  Description of Artificial Sequence: Synthetic oligonucleotide
cuaaccacuagggucuguc

SEQ ID NO: 2743754 - RNA, 19 nt, Artificial Sequence
  Description of Artificial Sequence: Synthetic oligonucleotide
uuuccacguuaacuuuaca

SEQ ID NO: 2743755 - RNA, 19 nt, Artificial Sequence
  Description of Artificial Sequence: Synthetic oligonucleotide
ccuaagagggucuuuccac

SEQ ID NO: 2743756 - RNA, 19 nt, Artificial Sequence
  Description of Artificial Sequence: Synthetic oligonucleotide
augcacaauugaaccauuc

SEQ ID NO: 2743757 - RNA, 19 nt, Artificial Sequence
  Description of Artificial Sequence: Synthetic oligonucleotide
uccaccugacccacagcug

SEQ ID NO: 2743758 - RNA, 19 nt, Artificial Sequence
  Description of Artificial Sequence: Synthetic oligonucleotide
ucugagguacuggauuggu

SEQ ID NO: 2743759 - RNA, 19 nt, Artificial Sequence
  Description of Artificial Sequence: Synthetic oligonucleotide
ucauuucucuuggacuaac

SEQ ID NO: 2743760 - RNA, 19 nt, Artificial Sequence
  Description of Artificial Sequence: Synthetic oligonucleotide
cccaagaccacuauauuca

SEQ ID NO: 2743761 - RNA, 19 nt, Artificial Sequence
  Description of Artificial Sequence: Synthetic oligonucleotide
guuuccagcauuucucagu

SEQ ID NO: 2743762 - RNA, 19 nt, Artificial Sequence
  Description of Artificial Sequence: Synthetic oligonucleotide
uuuccaccugacccacagc

SEQ ID NO: 2743763 - RNA, 19 nt, Artificial Sequence
  Description of Artificial Sequence: Synthetic oligonucleotide
gcuaagugcucagggaagg

SEQ ID NO: 2743764 - RNA, 19 nt, Artificial Sequence
  Description of Artificial Sequence: Synthetic oligonucleotide
augaguccuagagaucucu

SEQ ID NO: 2743765 - RNA, 19 nt, Artificial Sequence
  Description of Artificial Sequence: Synthetic oligonucleotide
gaaugcuuugucugaggua

SEQ ID NO: 2743766 - RNA, 19 nt, Artificial Sequence
  Description of Artificial Sequence: Synthetic oligonucleotide
uaccaguucugauuuuauu

SEQ ID NO: 2743767 - RNA, 19 nt, Artificial Sequence
  Description of Artificial Sequence: Synthetic oligonucleotide
gcauuucucagucuggaaa

SEQ ID NO: 2743768 - RNA, 19 nt, Artificial Sequence
  Description of Artificial Sequence: Synthetic oligonucleotide
cuuacucccaagaccacua

SEQ ID NO: 2743769 - RNA, 19 nt, Artificial Sequence
  Description of Artificial Sequence: Synthetic oligonucleotide
cucagccuuggacaggauc

SEQ ID NO: 2743770 - RNA, 19 nt, Artificial Sequence
  Description of Artificial Sequence: Synthetic oligonucleotide
guacuggauugguuauaag

SEQ ID NO: 2743771 - RNA, 19 nt, Artificial Sequence
  Description of Artificial Sequence: Synthetic oligonucleotide
ggguuuaugacucagccuu

SEQ ID NO: 2743772 - RNA, 19 nt, Artificial Sequence
  Description of Artificial Sequence: Synthetic oligonucleotide
cagagaugaguccuagaga

SEQ ID NO: 2743773 - RNA, 19 nt, Artificial Sequence
  Description of Artificial Sequence: Synthetic oligonucleotide
ggaucauuucucuuggacu

SEQ ID NO: 2743774 - RNA, 19 nt, Artificial Sequence
  Description of Artificial Sequence: Synthetic oligonucleotide
ccaccugacccacagcugg

SEQ ID NO: 2743775 - RNA, 19 nt, Artificial Sequence
  Description of Artificial Sequence: Synthetic oligonucleotide
auuucucagucuggaaagu

SEQ ID NO: 2743776 - RNA, 19 nt, Artificial Sequence
  Description of Artificial Sequence: Synthetic oligonucleotide
gacucagccuuggacagga

SEQ ID NO: 2743777 - RNA, 19 nt, Artificial Sequence
  Description of Artificial Sequence: Synthetic oligonucleotide
uggacagagaugaguccua

SEQ ID NO: 2743778 - RNA, 19 nt, Artificial Sequence
  Description of Artificial Sequence: Synthetic oligonucleotide
gucugagguacuggauugg

SEQ ID NO: 2743779 - RNA, 19 nt, Artificial Sequence
  Description of Artificial Sequence: Synthetic oligonucleotide
ugacccacagcuggcucag

SEQ ID NO: 2743780 - RNA, 19 nt, Artificial Sequence
  Description of Artificial Sequence: Synthetic oligonucleotide
cucuuggacuaaccacuag

SEQ ID NO: 2743781 - RNA, 19 nt, Artificial Sequence
  Description of Artificial Sequence: Synthetic oligonucleotide
uuacucccaagaccacuau

SEQ ID NO: 2743782 - RNA, 19 nt, Artificial Sequence
  Description of Artificial Sequence: Synthetic oligonucleotide
ugacucagccuuggacagg

SEQ ID NO: 2743783 - RNA, 19 nt, Artificial Sequence
  Description of Artificial Sequence: Synthetic oligonucleotide
cuaauucacaaugccuaga

SEQ ID NO: 2743784 - RNA, 19 nt, Artificial Sequence
  Description of Artificial Sequence: Synthetic oligonucleotide
cucagcgcuaagugcucag

SEQ ID NO: 2743785 - RNA, 19 nt, Artificial Sequence
  Description of Artificial Sequence: Synthetic oligonucleotide
aaugcacaauugaaccauu

SEQ ID NO: 2743786 - RNA, 19 nt, Artificial Sequence
  Description of Artificial Sequence: Synthetic oligonucleotide
gagaucucugcugcacaug

SEQ ID NO: 2743787 - RNA, 19 nt, Artificial Sequence
  Description of Artificial Sequence: Synthetic oligonucleotide
gguuuccagcauuucucag

SEQ ID NO: 2743788 - RNA, 19 nt, Artificial Sequence
  Description of Artificial Sequence: Synthetic oligonucleotide
cuagggucugucccuaaga

SEQ ID NO: 2743789 - RNA, 19 nt, Artificial Sequence
  Description of Artificial Sequence: Synthetic oligonucleotide
gcuccuaauaguucaucca

SEQ ID NO: 2743790 - RNA, 19 nt, Artificial Sequence
  Description of Artificial Sequence: Synthetic oligonucleotide
aagugacaaguuacuuacu

SEQ ID NO: 2743791 - RNA, 19 nt, Artificial Sequence
  Description of Artificial Sequence: Synthetic oligonucleotide
ggucuuuccaccugaccca

SEQ ID NO: 2743792 - RNA, 19 nt, Artificial Sequence
  Description of Artificial Sequence: Synthetic oligonucleotide
aaaugggcuccuagacaug

SEQ ID NO: 2743793 - RNA, 19 nt, Artificial Sequence
  Description of Artificial Sequence: Synthetic oligonucleotide
uggugacggccccgaaugc

SEQ ID NO: 2743794 - RNA, 19 nt, Artificial Sequence
  Description of Artificial Sequence: Synthetic oligonucleotide
cauguccuucagcugucac

SEQ ID NO: 2743795 - RNA, 19 nt, Artificial Sequence
  Description of Artificial Sequence: Synthetic oligonucleotide
aggcuccuaauaguucauc

SEQ ID NO: 2743796 - RNA, 19 nt, Artificial Sequence
  Description of Artificial Sequence: Synthetic oligonucleotide
augacacaucaaaaugaga

SEQ ID NO: 2743797 - RNA, 19 nt, Artificial Sequence
  Description of Artificial Sequence: Synthetic oligonucleotide
gucccuaagagggucuuuc

SEQ ID NO: 2743798 - RNA, 19 nt, Artificial Sequence
  Description of Artificial Sequence: Synthetic oligonucleotide
aacauacaugacacaucaa

SEQ ID NO: 2743799 - RNA, 19 nt, Artificial Sequence
  Description of Artificial Sequence: Synthetic oligonucleotide
gaagggccuggacagagau

SEQ ID NO: 2743800 - RNA, 19 nt, Artificial Sequence
  Description of Artificial Sequence: Synthetic oligonucleotide
ugaaaaugggagggauuuu

SEQ ID NO: 2743801 - RNA, 19 nt, Artificial Sequence
  Description of Artificial Sequence: Synthetic oligonucleotide
gacaaguuacuuacuaauu

SEQ ID NO: 2743802 - RNA, 19 nt, Artificial Sequence
  Description of Artificial Sequence: Synthetic oligonucleotide
gccccgaaugcuuugucug

SEQ ID NO: 2743803 - RNA, 19 nt, Artificial Sequence
  Description of Artificial Sequence: Synthetic oligonucleotide
ucuuuccaccugacccaca

SEQ ID NO: 2743804 - RNA, 19 nt, Artificial Sequence
  Description of Artificial Sequence: Synthetic oligonucleotide
cuuggacaggaucauuucu

SEQ ID NO: 2743805 - RNA, 19 nt, Artificial Sequence
  Description of Artificial Sequence: Synthetic oligonucleotide
ucucagcgcuaagugcuca

SEQ ID NO: 2743806 - RNA, 19 nt, Artificial Sequence
  Description of Artificial Sequence: Synthetic oligonucleotide
cuaaaugguuuccagcauu

SEQ ID NO: 2743807 - RNA, 19 nt, Artificial Sequence
  Description of Artificial Sequence: Synthetic oligonucleotide
cugacccacagcuggcuca

SEQ ID NO: 2743808 - RNA, 19 nt, Artificial Sequence
  Description of Artificial Sequence: Synthetic oligonucleotide
cagcagaaugauguccaug

SEQ ID NO: 2743809 - RNA, 19 nt, Artificial Sequence
  Description of Artificial Sequence: Synthetic oligonucleotide
gcuuugucugagguacugg

SEQ ID NO: 2743810 - RNA, 19 nt, Artificial Sequence
  Description of Artificial Sequence: Synthetic oligonucleotide
caccugacccacagcuggc

SEQ ID NO: 2743811 - RNA, 19 nt, Artificial Sequence
  Description of Artificial Sequence: Synthetic oligonucleotide
ccuggacagagaugagucc

SEQ ID NO: 2743812 - RNA, 19 nt, Artificial Sequence
  Description of Artificial Sequence: Synthetic oligonucleotide
gcuggcucagucucagcgc

SEQ ID NO: 2743813 - RNA, 19 nt, Artificial Sequence
  Description of Artificial Sequence: Synthetic oligonucleotide
ggacuaaccacuagggucu

SEQ ID NO: 2743814 - RNA, 19 nt, Artificial Sequence
  Description of Artificial Sequence: Synthetic oligonucleotide
ucacucaagcuuggguuua

SEQ ID NO: 2743815 - RNA, 19 nt, Artificial Sequence
  Description of Artificial Sequence: Synthetic oligonucleotide
gguacuggauugguuauaa

SEQ ID NO: 2743816 - RNA, 19 nt, Artificial Sequence
  Description of Artificial Sequence: Synthetic oligonucleotide
gaugaguccuagagaucuc

SEQ ID NO: 2743817 - RNA, 19 nt, Artificial Sequence
  Description of Artificial Sequence: Synthetic oligonucleotide
uugaaccauucaacagcuu

SEQ ID NO: 2743818 - RNA, 19 nt, Artificial Sequence
  Description of Artificial Sequence: Synthetic oligonucleotide
cagucuuuccacguuaacu

SEQ ID NO: 2743819 - RNA, 19 nt, Artificial Sequence
  Description of Artificial Sequence: Synthetic oligonucleotide
aaggcuccuaauaguucau

SEQ ID NO: 2743820 - RNA, 19 nt, Artificial Sequence
  Description of Artificial Sequence: Synthetic oligonucleotide
acagcuugccuuacuccca

SEQ ID NO: 2743821 - RNA, 19 nt, Artificial Sequence
  Description of Artificial Sequence: Synthetic oligonucleotide
agaccacuauauucauauu

SEQ ID NO: 2743822 - RNA, 19 nt, Artificial Sequence
  Description of Artificial Sequence: Synthetic oligonucleotide
cugggcaaggcuccuaaua

SEQ ID NO: 2743823 - RNA, 19 nt, Artificial Sequence
  Description of Artificial Sequence: Synthetic oligonucleotide
gacggccccgaaugcuuug

SEQ ID NO: 2743824 - RNA, 19 nt, Artificial Sequence
  Description of Artificial Sequence: Synthetic oligonucleotide
gcuuggguuuaugacucag

SEQ ID NO: 2743825 - RNA, 19 nt, Artificial Sequence
  Description of Artificial Sequence: Synthetic oligonucleotide
ggacagagaugaguccuag

SEQ ID NO: 2743826 - RNA, 19 nt, Artificial Sequence
  Description of Artificial Sequence: Synthetic oligonucleotide
agcuuggguuuaugacuca

SEQ ID NO: 2743827 - RNA, 19 nt, Artificial Sequence
  Description of Artificial Sequence: Synthetic oligonucleotide
gcuugccuuacucccaaga

SEQ ID NO: 2743828 - RNA, 19 nt, Artificial Sequence
  Description of Artificial Sequence: Synthetic oligonucleotide
agcugucacucaagcuugg

SEQ ID NO: 2743829 - RNA, 19 nt, Artificial Sequence
  Description of Artificial Sequence: Synthetic oligonucleotide
ucugggcaaggcuccuaau

SEQ ID NO: 2743830 - RNA, 19 nt, Artificial Sequence
  Description of Artificial Sequence: Synthetic oligonucleotide
acucaagcuuggguuuaug

SEQ ID NO: 2743831 - RNA, 19 nt, Artificial Sequence
  Description of Artificial Sequence: Synthetic oligonucleotide
ccgaaugcuuugucugagg

SEQ ID NO: 2743832 - RNA, 19 nt, Artificial Sequence
  Description of Artificial Sequence: Synthetic oligonucleotide
gccuggacagagaugaguc

SEQ ID NO: 2743833 - RNA, 19 nt, Artificial Sequence
  Description of Artificial Sequence: Synthetic oligonucleotide
agcuugccuuacucccaag

SEQ ID NO: 2743834 - RNA, 19 nt, Artificial Sequence
  Description of Artificial Sequence: Synthetic oligonucleotide
gucugucccuaagaggguc

SEQ ID NO: 2743835 - RNA, 19 nt, Artificial Sequence
  Description of Artificial Sequence: Synthetic oligonucleotide
cuggacagagaugaguccu

SEQ ID NO: 2743836 - RNA, 19 nt, Artificial Sequence
  Description of Artificial Sequence: Synthetic oligonucleotide
caagaccacuauauucaua

SEQ ID NO: 2743837 - RNA, 19 nt, Artificial Sequence
  Description of Artificial Sequence: Synthetic oligonucleotide
gacuaaccacuagggucug

SEQ ID NO: 2743838 - RNA, 19 nt, Artificial Sequence
  Description of Artificial Sequence: Synthetic oligonucleotide
ugacggccccgaaugcuuu

SEQ ID NO: 2743839 - RNA, 19 nt, Artificial Sequence
  Description of Artificial Sequence: Synthetic oligonucleotide
gguaguggugacggccccg

SEQ ID NO: 2743840 - RNA, 19 nt, Artificial Sequence
  Description of Artificial Sequence: Synthetic oligonucleotide
gcgcuaagugcucagggaa

SEQ ID NO: 2743841 - RNA, 19 nt, Artificial Sequence
  Description of Artificial Sequence: Synthetic oligonucleotide
gguaccaguucugauuuua

SEQ ID NO: 2743842 - RNA, 19 nt, Artificial Sequence
  Description of Artificial Sequence: Synthetic oligonucleotide
gcuccuagacaugguagug

SEQ ID NO: 2743843 - RNA, 19 nt, Artificial Sequence
  Description of Artificial Sequence: Synthetic oligonucleotide
cagguaccaguucugauuu

SEQ ID NO: 2743844 - RNA, 19 nt, Artificial Sequence
  Description of Artificial Sequence: Synthetic oligonucleotide
guaguggugacggccccga

SEQ ID NO: 2743845 - RNA, 19 nt, Artificial Sequence
  Description of Artificial Sequence: Synthetic oligonucleotide
cugucacucaagcuugggu

SEQ ID NO: 2743846 - RNA, 19 nt, Artificial Sequence
  Description of Artificial Sequence: Synthetic oligonucleotide
gcugucacucaagcuuggg

SEQ ID NO: 2743847 - RNA, 19 nt, Artificial Sequence
  Description of Artificial Sequence: Synthetic oligonucleotide
gagggucuuuccaccugac

SEQ ID NO: 2743848 - RNA, 19 nt, Artificial Sequence
  Description of Artificial Sequence: Synthetic oligonucleotide
gcagaaugauguccauguc

SEQ ID NO: 2743849 - RNA, 19 nt, Artificial Sequence
  Description of Artificial Sequence: Synthetic oligonucleotide
gcugcacaugaaaauggga

SEQ ID NO: 2743850 - RNA, 19 nt, Artificial Sequence
  Description of Artificial Sequence: Synthetic oligonucleotide
cgcuaagugcucagggaag

SEQ ID NO: 2743851 - RNA, 19 nt, Artificial Sequence
  Description of Artificial Sequence: Synthetic oligonucleotide
cuggcucagucucagcgcu

SEQ ID NO: 2743852 - RNA, 19 nt, Artificial Sequence
  Description of Artificial Sequence: Synthetic oligonucleotide
caggaucauuucucuugga

SEQ ID NO: 2743853 - RNA, 19 nt, Artificial Sequence
  Description of Artificial Sequence: Synthetic oligonucleotide
ccacuauauucauauuaaa

SEQ ID NO: 2743854 - RNA, 19 nt, Artificial Sequence
  Description of Artificial Sequence: Synthetic oligonucleotide
gaucucugcugcacaugaa

SEQ ID NO: 2743855 - RNA, 19 nt, Artificial Sequence
  Description of Artificial Sequence: Synthetic oligonucleotide
gucuuuccacguuaacuuu

SEQ ID NO: 2743856 - RNA, 19 nt, Artificial Sequence
  Description of Artificial Sequence: Synthetic oligonucleotide
ccauucaacagcuugccuu

SEQ ID NO: 2743857 - RNA, 19 nt, Artificial Sequence
  Description of Artificial Sequence: Synthetic oligonucleotide
ggcuccuagacaugguagu

SEQ ID NO: 2743858 - RNA, 19 nt, Artificial Sequence
  Description of Artificial Sequence: Synthetic oligonucleotide
ggauugguuauaaguagau

SEQ ID NO: 2743859 - RNA, 19 nt, Artificial Sequence
  Description of Artificial Sequence: Synthetic oligonucleotide
agguacuggauugguuaua

SEQ ID NO: 2743860 - RNA, 19 nt, Artificial Sequence
  Description of Artificial Sequence: Synthetic oligonucleotide
ccacguuaacuuuacaaau

SEQ ID NO: 2743861 - RNA, 19 nt, Artificial Sequence
  Description of Artificial Sequence: Synthetic oligonucleotide
acuaaccacuagggucugu

SEQ ID NO: 2743862 - RNA, 19 nt, Artificial Sequence
  Description of Artificial Sequence: Synthetic oligonucleotide
uggcucagucucagcgcua

SEQ ID NO: 2743863 - RNA, 19 nt, Artificial Sequence
  Description of Artificial Sequence: Synthetic oligonucleotide
uaguggugacggccccgaa

SEQ ID NO: 2743864 - RNA, 19 nt, Artificial Sequence
  Description of Artificial Sequence: Synthetic oligonucleotide
agguaccaguucugauuuu

SEQ ID NO: 2743865 - RNA, 19 nt, Artificial Sequence
  Description of Artificial Sequence: Synthetic oligonucleotide
ugucccuaagagggucuuu

SEQ ID NO: 2743866 - RNA, 19 nt, Artificial Sequence
  Description of Artificial Sequence: Synthetic oligonucleotide
cccgaaugcuuugucugag

SEQ ID NO: 2743867 - RNA, 19 nt, Artificial Sequence
  Description of Artificial Sequence: Synthetic oligonucleotide
cagcuugccuuacucccaa

SEQ ID NO: 2743868 - RNA, 19 nt, Artificial Sequence
  Description of Artificial Sequence: Synthetic oligonucleotide
cccuaagagggucuuucca

SEQ ID NO: 2743869 - RNA, 19 nt, Artificial Sequence
  Description of Artificial Sequence: Synthetic oligonucleotide
gucucagcgcuaagugcuc

SEQ ID NO: 2743870 - RNA, 19 nt, Artificial Sequence
  Description of Artificial Sequence: Synthetic oligonucleotide
acggccccgaaugcuuugu

SEQ ID NO: 2743871 - RNA, 19 nt, Artificial Sequence
  Description of Artificial Sequence: Synthetic oligonucleotide
ggaaagugacaaguuacuu

SEQ ID NO: 2743872 - RNA, 19 nt, Artificial Sequence
  Description of Artificial Sequence: Synthetic oligonucleotide
guaccaguucugauuuuau

SEQ ID NO: 2743873 - RNA, 19 nt, Artificial Sequence
  Description of Artificial Sequence: Synthetic oligonucleotide
augggcuccuagacauggu

SEQ ID NO: 2743874 - RNA, 19 nt, Artificial Sequence
  Description of Artificial Sequence: Synthetic oligonucleotide
gggcaaggcuccuaauagu

SEQ ID NO: 2743875 - RNA, 19 nt, Artificial Sequence
  Description of Artificial Sequence: Synthetic oligonucleotide
ccuagagaucucugcugca

SEQ ID NO: 2743876 - RNA, 19 nt, Artificial Sequence
  Description of Artificial Sequence: Synthetic oligonucleotide
cugagguacuggauugguu

SEQ ID NO: 2743877 - RNA, 19 nt, Artificial Sequence
  Description of Artificial Sequence: Synthetic oligonucleotide
gaucugggcaaggcuccua

SEQ ID NO: 2743878 - RNA, 19 nt, Artificial Sequence
  Description of Artificial Sequence: Synthetic oligonucleotide
gcucagucucagcgcuaag

SEQ ID NO: 2743879 - RNA, 19 nt, Artificial Sequence
  Description of Artificial Sequence: Synthetic oligonucleotide
agccuuggacaggaucauu

SEQ ID NO: 2743880 - RNA, 19 nt, Artificial Sequence
  Description of Artificial Sequence: Synthetic oligonucleotide
ggcucagucucagcgcuaa

SEQ ID NO: 2743881 - RNA, 19 nt, Artificial Sequence
  Description of Artificial Sequence: Synthetic oligonucleotide
ggccccgaaugcuuugucu

SEQ ID NO: 2743882 - RNA, 19 nt, Artificial Sequence
  Description of Artificial Sequence: Synthetic oligonucleotide
cucccaagaccacuauauu

SEQ ID NO: 2743883 - RNA, 19 nt, Artificial Sequence
  Description of Artificial Sequence: Synthetic oligonucleotide
cgaaugcuuugucugaggu

SEQ ID NO: 2743884 - RNA, 19 nt, Artificial Sequence
  Description of Artificial Sequence: Synthetic oligonucleotide
cacuagggucugucccuaa

SEQ ID NO: 2743885 - RNA, 19 nt, Artificial Sequence
  Description of Artificial Sequence: Synthetic oligonucleotide
ggugacggccccgaaugcu

SEQ ID NO: 2743886 - RNA, 19 nt, Artificial Sequence
  Description of Artificial Sequence: Synthetic oligonucleotide
ggccuggacagagaugagu

SEQ ID NO: 2743887 - RNA, 19 nt, Artificial Sequence
  Description of Artificial Sequence: Synthetic oligonucleotide
gccuuggacaggaucauuu

SEQ ID NO: 2743888 - RNA, 19 nt, Artificial Sequence
  Description of Artificial Sequence: Synthetic oligonucleotide
ggacaggaucauuucucuu

SEQ ID NO: 2743889 - RNA, 19 nt, Artificial Sequence
  Description of Artificial Sequence: Synthetic oligonucleotide
gugacggccccgaaugcuu

SEQ ID NO: 2743890 - RNA, 19 nt, Artificial Sequence
  Description of Artificial Sequence: Synthetic oligonucleotide
ccaagaccacuauauucau

SEQ ID NO: 2743891 - RNA, 19 nt, Artificial Sequence
  Description of Artificial Sequence: Synthetic oligonucleotide
gggccuggacagagaugag

SEQ ID NO: 2743892 - RNA, 19 nt, Artificial Sequence
  Description of Artificial Sequence: Synthetic oligonucleotide
gccuagaaaaugggcuccu

SEQ ID NO: 2743893 - RNA, 19 nt, Artificial Sequence
  Description of Artificial Sequence: Synthetic oligonucleotide
cguuaacuuuacaaauguu

SEQ ID NO: 2743894 - RNA, 19 nt, Artificial Sequence
  Description of Artificial Sequence: Synthetic oligonucleotide
ggucugucccuaagagggu

SEQ ID NO: 2743895 - RNA, 19 nt, Artificial Sequence
  Description of Artificial Sequence: Synthetic oligonucleotide
cagccuuggacaggaucau

SEQ ID NO: 2743896 - RNA, 19 nt, Artificial Sequence
  Description of Artificial Sequence: Synthetic oligonucleotide
ccuagaaaaugggcuccua

SEQ ID NO: 2743897 - RNA, 19 nt, Artificial Sequence
  Description of Artificial Sequence: Synthetic oligonucleotide
ccauguccuucagcuguca

SEQ ID NO: 2743898 - RNA, 19 nt, Artificial Sequence
  Description of Artificial Sequence: Synthetic oligonucleotide
cugucccuaagagggucuu

SEQ ID NO: 2743899 - RNA, 19 nt, Artificial Sequence
  Description of Artificial Sequence: Synthetic oligonucleotide
ccacuagggucugucccua

SEQ ID NO: 2743900 - RNA, 19 nt, Artificial Sequence
  Description of Artificial Sequence: Synthetic oligonucleotide
cggccccgaaugcuuuguc

SEQ ID NO: 2743901 - RNA, 19 nt, Artificial Sequence
  Description of Artificial Sequence: Synthetic oligonucleotide
aacacuaggacaaagagcc

SEQ ID NO: 2743902 - RNA, 19 nt, Artificial Sequence
  Description of Artificial Sequence: Synthetic oligonucleotide
auuacaauguacaauaggc

SEQ ID NO: 2743903 - RNA, 19 nt, Artificial Sequence
  Description of Artificial Sequence: Synthetic oligonucleotide
acaaagaugaaacagcagg

SEQ ID NO: 2743904 - RNA, 19 nt, Artificial Sequence
  Description of Artificial Sequence: Synthetic oligonucleotide
aguuguuuaauucaaagug

SEQ ID NO: 2743905 - RNA, 19 nt, Artificial Sequence
  Description of Artificial Sequence: Synthetic oligonucleotide
uuuuguuucugcuugaaag

SEQ ID NO: 2743906 - RNA, 19 nt, Artificial Sequence
  Description of Artificial Sequence: Synthetic oligonucleotide
uuuauuacaauguacaaua

SEQ ID NO: 2743907 - RNA, 19 nt, Artificial Sequence
  Description of Artificial Sequence: Synthetic oligonucleotide
agugauacagaauucagag

SEQ ID NO: 2743908 - RNA, 19 nt, Artificial Sequence
  Description of Artificial Sequence: Synthetic oligonucleotide
aguacaacaaagaugaaac

SEQ ID NO: 2743909 - RNA, 19 nt, Artificial Sequence
  Description of Artificial Sequence: Synthetic oligonucleotide
aauugcugaacacuaggac

SEQ ID NO: 2743910 - RNA, 19 nt, Artificial Sequence
  Description of Artificial Sequence: Synthetic oligonucleotide
uguacaauaggcuucauuc

SEQ ID NO: 2743911 - RNA, 19 nt, Artificial Sequence
  Description of Artificial Sequence: Synthetic oligonucleotide
uauuacaauguacaauagg

SEQ ID NO: 2743912 - RNA, 19 nt, Artificial Sequence
  Description of Artificial Sequence: Synthetic oligonucleotide
aauucaaagugauacagaa

SEQ ID NO: 2743913 - RNA, 19 nt, Artificial Sequence
  Description of Artificial Sequence: Synthetic oligonucleotide
uaggcuucauucaagauag

SEQ ID NO: 2743914 - RNA, 19 nt, Artificial Sequence
  Description of Artificial Sequence: Synthetic oligonucleotide
uuuuacaaaaguuuauuac

SEQ ID NO: 2743915 - RNA, 19 nt, Artificial Sequence
  Description of Artificial Sequence: Synthetic oligonucleotide
aaauucacagcugagguag

SEQ ID NO: 2743916 - RNA, 19 nt, Artificial Sequence
  Description of Artificial Sequence: Synthetic oligonucleotide
agcacuucauucuagcugc

SEQ ID NO: 2743917 - RNA, 19 nt, Artificial Sequence
  Description of Artificial Sequence: Synthetic oligonucleotide
uucaaagugauacagaauu

SEQ ID NO: 2743918 - RNA, 19 nt, Artificial Sequence
  Description of Artificial Sequence: Synthetic oligonucleotide
gauguuuaaauagggaugg

SEQ ID NO: 2743919 - RNA, 19 nt, Artificial Sequence
  Description of Artificial Sequence: Synthetic oligonucleotide
uuuaaauucacagcugagg

SEQ ID NO: 2743920 - RNA, 19 nt, Artificial Sequence
  Description of Artificial Sequence: Synthetic oligonucleotide
gaaagcuuuauccuccucg

SEQ ID NO: 2743921 - RNA, 19 nt, Artificial Sequence
  Description of Artificial Sequence: Synthetic oligonucleotide
aaaguuuauuacaauguac

SEQ ID NO: 2743922 - RNA, 19 nt, Artificial Sequence
  Description of Artificial Sequence: Synthetic oligonucleotide
uuaaauucacagcugaggu

SEQ ID NO: 2743923 - RNA, 19 nt, Artificial Sequence
  Description of Artificial Sequence: Synthetic oligonucleotide
acaaaaguuuauuacaaug

SEQ ID NO: 2743924 - RNA, 19 nt, Artificial Sequence
  Description of Artificial Sequence: Synthetic oligonucleotide
aauccagauguuuaacagg

SEQ ID NO: 2743925 - RNA, 19 nt, Artificial Sequence
  Description of Artificial Sequence: Synthetic oligonucleotide
uauccagauguuuaaauag

SEQ ID NO: 2743926 - RNA, 19 nt, Artificial Sequence
  Description of Artificial Sequence: Synthetic oligonucleotide
aacacuucauccuagcugu

SEQ ID NO: 2743927 - RNA, 19 nt, Artificial Sequence
  Description of Artificial Sequence: Synthetic oligonucleotide
uuuaaauagggauggagga

SEQ ID NO: 2743928 - RNA, 19 nt, Artificial Sequence
  Description of Artificial Sequence: Synthetic oligonucleotide
guauuauucauuuuacuug

SEQ ID NO: 2743929 - RNA, 19 nt, Artificial Sequence
  Description of Artificial Sequence: Synthetic oligonucleotide
guuuaauucaaagugauac

SEQ ID NO: 2743930 - RNA, 19 nt, Artificial Sequence
  Description of Artificial Sequence: Synthetic oligonucleotide
uuaauucaaagugauacag

SEQ ID NO: 2743931 - RNA, 19 nt, Artificial Sequence
  Description of Artificial Sequence: Synthetic oligonucleotide
agcuuuauccuccucgucc

SEQ ID NO: 2743932 - RNA, 19 nt, Artificial Sequence
  Description of Artificial Sequence: Synthetic oligonucleotide
ucagaguacaacaaagaug

SEQ ID NO: 2743933 - RNA, 19 nt, Artificial Sequence
  Description of Artificial Sequence: Synthetic oligonucleotide
cagaguacaacaaagauga

SEQ ID NO: 2743934 - RNA, 19 nt, Artificial Sequence
  Description of Artificial Sequence: Synthetic oligonucleotide
aagaugaaacagcaggcuc

SEQ ID NO: 2743935 - RNA, 19 nt, Artificial Sequence
  Description of Artificial Sequence: Synthetic oligonucleotide
cuuaauuccaccuguggcc

SEQ ID NO: 2743936 - RNA, 19 nt, Artificial Sequence
  Description of Artificial Sequence: Synthetic oligonucleotide
uacaacaaagaugaaacag

SEQ ID NO: 2743937 - RNA, 19 nt, Artificial Sequence
  Description of Artificial Sequence: Synthetic oligonucleotide
ugaguuguuuaauucaaag

SEQ ID NO: 2743938 - RNA, 19 nt, Artificial Sequence
  Description of Artificial Sequence: Synthetic oligonucleotide
acaacaaagaugaaacagc

SEQ ID NO: 2743939 - RNA, 19 nt, Artificial Sequence
  Description of Artificial Sequence: Synthetic oligonucleotide
ucuuaauuccaccuguggc

SEQ ID NO: 2743940 - RNA, 19 nt, Artificial Sequence
  Description of Artificial Sequence: Synthetic oligonucleotide
uauuauucauuuuacuugu

SEQ ID NO: 2743941 - RNA, 19 nt, Artificial Sequence
  Description of Artificial Sequence: Synthetic oligonucleotide
aauucagaguacaacaaag

SEQ ID NO: 2743942 - RNA, 19 nt, Artificial Sequence
  Description of Artificial Sequence: Synthetic oligonucleotide
uguauuauucauuuuacuu

SEQ ID NO: 2743943 - RNA, 19 nt, Artificial Sequence
  Description of Artificial Sequence: Synthetic oligonucleotide
acuggguuuaaauucacag

SEQ ID NO: 2743944 - RNA, 19 nt, Artificial Sequence
  Description of Artificial Sequence: Synthetic oligonucleotide
aaguuuauuacaauguaca

SEQ ID NO: 2743945 - RNA, 19 nt, Artificial Sequence
  Description of Artificial Sequence: Synthetic oligonucleotide
uaaauagggauggaggagg

SEQ ID NO: 2743946 - RNA, 19 nt, Artificial Sequence
  Description of Artificial Sequence: Synthetic oligonucleotide
guuuaaauagggauggagg

SEQ ID NO: 2743947 - RNA, 19 nt, Artificial Sequence
  Description of Artificial Sequence: Synthetic oligonucleotide
uccagauguuuaaauaggg

SEQ ID NO: 2743948 - RNA, 19 nt, Artificial Sequence
  Description of Artificial Sequence: Synthetic oligonucleotide
uaguagggaauccagaugu

SEQ ID NO: 2743949 - RNA, 19 nt, Artificial Sequence
  Description of Artificial Sequence: Synthetic oligonucleotide
gaauccagauguuuaacag

SEQ ID NO: 2743950 - RNA, 19 nt, Artificial Sequence
  Description of Artificial Sequence: Synthetic oligonucleotide
uuacaaaaguuuauuacaa

SEQ ID NO: 2743951 - RNA, 19 nt, Artificial Sequence
  Description of Artificial Sequence: Synthetic oligonucleotide
uuuguuucugcuugaaagc

SEQ ID NO: 2743952 - RNA, 19 nt, Artificial Sequence
  Description of Artificial Sequence: Synthetic oligonucleotide
uaaugaguuguuuaauuca

SEQ ID NO: 2743953 - RNA, 19 nt, Artificial Sequence
  Description of Artificial Sequence: Synthetic oligonucleotide
ucauucuagcugcaggugg

SEQ ID NO: 2743954 - RNA, 19 nt, Artificial Sequence
  Description of Artificial Sequence: Synthetic oligonucleotide
uaacacuucauccuagcug

SEQ ID NO: 2743955 - RNA, 19 nt, Artificial Sequence
  Description of Artificial Sequence: Synthetic oligonucleotide
caucauggaagauaagagg

SEQ ID NO: 2743956 - RNA, 19 nt, Artificial Sequence
  Description of Artificial Sequence: Synthetic oligonucleotide
uuuaauucaaagugauaca

SEQ ID NO: 2743957 - RNA, 19 nt, Artificial Sequence
  Description of Artificial Sequence: Synthetic oligonucleotide
cugcuugaaagcuuuaucc

SEQ ID NO: 2743958 - RNA, 19 nt, Artificial Sequence
  Description of Artificial Sequence: Synthetic oligonucleotide
uuaaugaguuguuuaauuc

SEQ ID NO: 2743959 - RNA, 19 nt, Artificial Sequence
  Description of Artificial Sequence: Synthetic oligonucleotide
cuugaaagcuuuauccucc

SEQ ID NO: 2743960 - RNA, 19 nt, Artificial Sequence
  Description of Artificial Sequence: Synthetic oligonucleotide
ucauccuagcuguaggugg

SEQ ID NO: 2743961 - RNA, 19 nt, Artificial Sequence
  Description of Artificial Sequence: Synthetic oligonucleotide
aaagauguuauaguaggga

SEQ ID NO: 2743962 - RNA, 19 nt, Artificial Sequence
  Description of Artificial Sequence: Synthetic oligonucleotide
uucuuaauuccaccugugg

SEQ ID NO: 2743963 - RNA, 19 nt, Artificial Sequence
  Description of Artificial Sequence: Synthetic oligonucleotide
auuguauuauucauuuuac

SEQ ID NO: 2743964 - RNA, 19 nt, Artificial Sequence
  Description of Artificial Sequence: Synthetic oligonucleotide
caaagaugaaacagcaggc

SEQ ID NO: 2743965 - RNA, 19 nt, Artificial Sequence
  Description of Artificial Sequence: Synthetic oligonucleotide
auugcugaacacuaggaca

SEQ ID NO: 2743966 - RNA, 19 nt, Artificial Sequence
  Description of Artificial Sequence: Synthetic oligonucleotide
auccagauguuuaacaggc

SEQ ID NO: 2743967 - RNA, 19 nt, Artificial Sequence
  Description of Artificial Sequence: Synthetic oligonucleotide
aagauguuauaguagggaa

SEQ ID NO: 2743968 - RNA, 19 nt, Artificial Sequence
  Description of Artificial Sequence: Synthetic oligonucleotide
uguuuaacaggcuccagga

SEQ ID NO: 2743969 - RNA, 19 nt, Artificial Sequence
  Description of Artificial Sequence: Synthetic oligonucleotide
gcaaagauguuauaguagg

SEQ ID NO: 2743970 - RNA, 19 nt, Artificial Sequence
  Description of Artificial Sequence: Synthetic oligonucleotide
ucaagauagcacuucauuc

SEQ ID NO: 2743971 - RNA, 19 nt, Artificial Sequence
  Description of Artificial Sequence: Synthetic oligonucleotide
uguuuaaauagggauggag

SEQ ID NO: 2743972 - RNA, 19 nt, Artificial Sequence
  Description of Artificial Sequence: Synthetic oligonucleotide
uuacaauguacaauaggcu

SEQ ID NO: 2743973 - RNA, 19 nt, Artificial Sequence
  Description of Artificial Sequence: Synthetic oligonucleotide
  modified_base (5)..(5): a, c, u, g, unknown or other
aaagnuguauggcagggua

SEQ ID NO: 2743974 - RNA, 19 nt, Artificial Sequence
  Description of Artificial Sequence: Synthetic oligonucleotide
uuauuacaauguacaauag

SEQ ID NO: 2743975 - RNA, 19 nt, Artificial Sequence
  Description of Artificial Sequence: Synthetic oligonucleotide
uuuaacaggcuccaggaua

SEQ ID NO: 2743976 - RNA, 19 nt, Artificial Sequence
  Description of Artificial Sequence: Synthetic oligonucleotide
acagaauucagaguacaac

SEQ ID NO: 2743977 - RNA, 19 nt, Artificial Sequence
  Description of Artificial Sequence: Synthetic oligonucleotide
uucgcggccagacauggcg

SEQ ID NO: 2743978 - RNA, 19 nt, Artificial Sequence
  Description of Artificial Sequence: Synthetic oligonucleotide
aaagcuuuauccuccucgu

SEQ ID NO: 2743979 - RNA, 19 nt, Artificial Sequence
  Description of Artificial Sequence: Synthetic oligonucleotide
uuuaaugaguuguuuaauu

SEQ ID NO: 2743980 - RNA, 19 nt, Artificial Sequence
  Description of Artificial Sequence: Synthetic oligonucleotide
uauaguagggaauccagau

SEQ ID NO: 2743981 - RNA, 19 nt, Artificial Sequence
  Description of Artificial Sequence: Synthetic oligonucleotide
gauuucuuaauuccaccug

SEQ ID NO: 2743982 - RNA, 19 nt, Artificial Sequence
  Description of Artificial Sequence: Synthetic oligonucleotide
auuucuuaauuccaccugu

SEQ ID NO: 2743983 - RNA, 19 nt, Artificial Sequence
  Description of Artificial Sequence: Synthetic oligonucleotide
uauucauuuuacuuguuua

SEQ ID NO: 2743984 - RNA, 19 nt, Artificial Sequence
  Description of Artificial Sequence: Synthetic oligonucleotide
aagaggaacagcuuacuuu

SEQ ID NO: 2743985 - RNA, 19 nt, Artificial Sequence
  Description of Artificial Sequence: Synthetic oligonucleotide
uucagaguacaacaaagau

SEQ ID NO: 2743986 - RNA, 19 nt, Artificial Sequence
  Description of Artificial Sequence: Synthetic oligonucleotide
gauagcacuucauucuagc

SEQ ID NO: 2743987 - RNA, 19 nt, Artificial Sequence
  Description of Artificial Sequence: Synthetic oligonucleotide
uuguuuaauucaaagugau

SEQ ID NO: 2743988 - RNA, 19 nt, Artificial Sequence
  Description of Artificial Sequence: Synthetic oligonucleotide
aaagugauacagaauucag

SEQ ID NO: 2743989 - RNA, 19 nt, Artificial Sequence
  Description of Artificial Sequence: Synthetic oligonucleotide
uuaaauagggauggaggag

SEQ ID NO: 2743990 - RNA, 19 nt, Artificial Sequence
  Description of Artificial Sequence: Synthetic oligonucleotide
gauguuauaguagggaauc

SEQ ID NO: 2743991 - RNA, 19 nt, Artificial Sequence
  Description of Artificial Sequence: Synthetic oligonucleotide
aggagggucaccaucaugg

SEQ ID NO: 2743992 - RNA, 19 nt, Artificial Sequence
  Description of Artificial Sequence: Synthetic oligonucleotide
uuaacaggcuccaggauaa

SEQ ID NO: 2743993 - RNA, 19 nt, Artificial Sequence
  Description of Artificial Sequence: Synthetic oligonucleotide
uuauaguagggaauccaga

SEQ ID NO: 2743994 - RNA, 19 nt, Artificial Sequence
  Description of Artificial Sequence: Synthetic oligonucleotide
agauuucuuaauuccaccu

SEQ ID NO: 2743995 - RNA, 19 nt, Artificial Sequence
  Description of Artificial Sequence: Synthetic oligonucleotide
gaagauaagaggaacagcu

SEQ ID NO: 2743996 - RNA, 19 nt, Artificial Sequence
  Description of Artificial Sequence: Synthetic oligonucleotide
uacaauaggcuucauucaa

SEQ ID NO: 2743997 - RNA, 19 nt, Artificial Sequence
  Description of Artificial Sequence: Synthetic oligonucleotide
aaagaugaaacagcaggcu

SEQ ID NO: 2743998 - RNA, 19 nt, Artificial Sequence
  Description of Artificial Sequence: Synthetic oligonucleotide
  modified_base (9)..(9): a, c, u, g, unknown or other
uggcaaagnuguauggcag

SEQ ID NO: 2743999 - RNA, 19 nt, Artificial Sequence
  Description of Artificial Sequence: Synthetic oligonucleotide
uccaggauaacacuucauc

SEQ ID NO: 2744000 - RNA, 19 nt, Artificial Sequence
  Description of Artificial Sequence: Synthetic oligonucleotide
ucugguaggauuccagacu

SEQ ID NO: 2744001 - RNA, 19 nt, Artificial Sequence
  Description of Artificial Sequence: Synthetic oligonucleotide
agagccauuguauuauuca

SEQ ID NO: 2744002 - RNA, 19 nt, Artificial Sequence
  Description of Artificial Sequence: Synthetic oligonucleotide
acuucauccuagcuguagg

SEQ ID NO: 2744003 - RNA, 19 nt, Artificial Sequence
  Description of Artificial Sequence: Synthetic oligonucleotide
gauaacacuucauccuagc

SEQ ID NO: 2744004 - RNA, 19 nt, Artificial Sequence
  Description of Artificial Sequence: Synthetic oligonucleotide
caaagauguuauaguaggg

SEQ ID NO: 2744005 - RNA, 19 nt, Artificial Sequence
  Description of Artificial Sequence: Synthetic oligonucleotide
ugaaacagcaggcucuggu

SEQ ID NO: 2744006 - RNA, 19 nt, Artificial Sequence
  Description of Artificial Sequence: Synthetic oligonucleotide
cagauguuuaacaggcucc

SEQ ID NO: 2744007 - RNA, 19 nt, Artificial Sequence
  Description of Artificial Sequence: Synthetic oligonucleotide
uguauggcaggguauccag

SEQ ID NO: 2744008 - RNA, 19 nt, Artificial Sequence
  Description of Artificial Sequence: Synthetic oligonucleotide
cuggguuuaaauucacagc

SEQ ID NO: 2744009 - RNA, 19 nt, Artificial Sequence
  Description of Artificial Sequence: Synthetic oligonucleotide
uugcugaacacuaggacaa

SEQ ID NO: 2744010 - RNA, 19 nt, Artificial Sequence
  Description of Artificial Sequence: Synthetic oligonucleotide
auaggcuucauucaagaua

SEQ ID NO: 2744011 - RNA, 19 nt, Artificial Sequence
  Description of Artificial Sequence: Synthetic oligonucleotide
auucauuuuacuuguuuau

SEQ ID NO: 2744012 - RNA, 19 nt, Artificial Sequence
  Description of Artificial Sequence: Synthetic oligonucleotide
uuauucauuuuacuuguuu

SEQ ID NO: 2744013 - RNA, 19 nt, Artificial Sequence
  Description of Artificial Sequence: Synthetic oligonucleotide
uucaagauagcacuucauu

SEQ ID NO: 2744014 - RNA, 19 nt, Artificial Sequence
  Description of Artificial Sequence: Synthetic oligonucleotide
cagaauucagaguacaaca

SEQ ID NO: 2744015 - RNA, 19 nt, Artificial Sequence
  Description of Artificial Sequence: Synthetic oligonucleotide
uuugccagauuucuuaauu

SEQ ID NO: 2744016 - RNA, 19 nt, Artificial Sequence
  Description of Artificial Sequence: Synthetic oligonucleotide
aucauggaagauaagagga

SEQ ID NO: 2744017 - RNA, 19 nt, Artificial Sequence
  Description of Artificial Sequence: Synthetic oligonucleotide
acaauguacaauaggcuuc

SEQ ID NO: 2744018 - RNA, 19 nt, Artificial Sequence
  Description of Artificial Sequence: Synthetic oligonucleotide
uaggauuccagacuggguu

SEQ ID NO: 2744019 - RNA, 19 nt, Artificial Sequence
  Description of Artificial Sequence: Synthetic oligonucleotide
agauguuuaaauagggaug

SEQ ID NO: 2744020 - RNA, 19 nt, Artificial Sequence
  Description of Artificial Sequence: Synthetic oligonucleotide
uuucuuaauuccaccugug

SEQ ID NO: 2744021 - RNA, 19 nt, Artificial Sequence
  Description of Artificial Sequence: Synthetic oligonucleotide
auagggauggaggaggguc

SEQ ID NO: 2744022 - RNA, 19 nt, Artificial Sequence
  Description of Artificial Sequence: Synthetic oligonucleotide
agaggaacagcuuacuuuu

SEQ ID NO: 2744023 - RNA, 19 nt, Artificial Sequence
  Description of Artificial Sequence: Synthetic oligonucleotide
uuguauuauucauuuuacu

SEQ ID NO: 2744024 - RNA, 19 nt, Artificial Sequence
  Description of Artificial Sequence: Synthetic oligonucleotide
uguuauaguagggaaucca

SEQ ID NO: 2744025 - RNA, 19 nt, Artificial Sequence
  Description of Artificial Sequence: Synthetic oligonucleotide
guuauaguagggaauccag

SEQ ID NO: 2744026 - RNA, 19 nt, Artificial Sequence
  Description of Artificial Sequence: Synthetic oligonucleotide
  modified_base (13)..(13): a, c, u, g, unknown or other
uagguggcaaagnuguaug

SEQ ID NO: 2744027 - RNA, 19 nt, Artificial Sequence
  Description of Artificial Sequence: Synthetic oligonucleotide
ugcuugaaagcuuuauccu

SEQ ID NO: 2744028 - RNA, 19 nt, Artificial Sequence
  Description of Artificial Sequence: Synthetic oligonucleotide
cauuguauuauucauuuua

SEQ ID NO: 2744029 - RNA, 19 nt, Artificial Sequence
  Description of Artificial Sequence: Synthetic oligonucleotide
aaugaguuguuuaauucaa

SEQ ID NO: 2744030 - RNA, 19 nt, Artificial Sequence
  Description of Artificial Sequence: Synthetic oligonucleotide
ucaaagugauacagaauuc

SEQ ID NO: 2744031 - RNA, 19 nt, Artificial Sequence
  Description of Artificial Sequence: Synthetic oligonucleotide
ucugcuugaaagcuuuauc

SEQ ID NO: 2744032 - RNA, 19 nt, Artificial Sequence
  Description of Artificial Sequence: Synthetic oligonucleotide
gaacacuaggacaaagagc

SEQ ID NO: 2744033 - RNA, 19 nt, Artificial Sequence
  Description of Artificial Sequence: Synthetic oligonucleotide
agauaagaggaacagcuua

SEQ ID NO: 2744034 - RNA, 19 nt, Artificial Sequence
  Description of Artificial Sequence: Synthetic oligonucleotide
uccucguccaucuccuugg

SEQ ID NO: 2744035 - RNA, 19 nt, Artificial Sequence
  Description of Artificial Sequence: Synthetic oligonucleotide
gauaagaggaacagcuuac

SEQ ID NO: 2744036 - RNA, 19 nt, Artificial Sequence
  Description of Artificial Sequence: Synthetic oligonucleotide
ggaauugcugaacacuagg

SEQ ID NO: 2744037 - RNA, 19 nt, Artificial Sequence
  Description of Artificial Sequence: Synthetic oligonucleotide
uaggaauugcugaacacua

SEQ ID NO: 2744038 - RNA, 19 nt, Artificial Sequence
  Description of Artificial Sequence: Synthetic oligonucleotide
accaucauggaagauaaga

SEQ ID NO: 2744039 - RNA, 19 nt, Artificial Sequence
  Description of Artificial Sequence: Synthetic oligonucleotide
  modified_base (10)..(10): a, c, u, g, unknown or other
guggcaaagnuguauggca

SEQ ID NO: 2744040 - RNA, 19 nt, Artificial Sequence
  Description of Artificial Sequence: Synthetic oligonucleotide
auaguagggaauccagaug

SEQ ID NO: 2744041 - RNA, 19 nt, Artificial Sequence
  Description of Artificial Sequence: Synthetic oligonucleotide
cagauuucuuaauuccacc

SEQ ID NO: 2744042 - RNA, 19 nt, Artificial Sequence
  Description of Artificial Sequence: Synthetic oligonucleotide
aguuuauuacaauguacaa

SEQ ID NO: 2744043 - RNA, 19 nt, Artificial Sequence
  Description of Artificial Sequence: Synthetic oligonucleotide
cuuuuaaugaguuguuuaa

SEQ ID NO: 2744044 - RNA, 19 nt, Artificial Sequence
  Description of Artificial Sequence: Synthetic oligonucleotide
  modified_base (3)..(3): a, c, u, g, unknown or other
agnuguauggcaggguauc

SEQ ID NO: 2744045 - RNA, 19 nt, Artificial Sequence
  Description of Artificial Sequence: Synthetic oligonucleotide
aauaggcuucauucaagau

SEQ ID NO: 2744046 - RNA, 19 nt, Artificial Sequence
  Description of Artificial Sequence: Synthetic oligonucleotide
caacaaagaugaaacagca

SEQ ID NO: 2744047 - RNA, 19 nt, Artificial Sequence
  Description of Artificial Sequence: Synthetic oligonucleotide
aggacaaagagccauugua

SEQ ID NO: 2744048 - RNA, 19 nt, Artificial Sequence
  Description of Artificial Sequence: Synthetic oligonucleotide
aacaaagaugaaacagcag

SEQ ID NO: 2744049 - RNA, 19 nt, Artificial Sequence
  Description of Artificial Sequence: Synthetic oligonucleotide
guuguuuaauucaaaguga

SEQ ID NO: 2744050 - RNA, 19 nt, Artificial Sequence
  Description of Artificial Sequence: Synthetic oligonucleotide
aaauagggauggaggaggg

SEQ ID NO: 2744051 - RNA, 19 nt, Artificial Sequence
  Description of Artificial Sequence: Synthetic oligonucleotide
uggaggagggucaccauca

SEQ ID NO: 2744052 - RNA, 19 nt, Artificial Sequence
  Description of Artificial Sequence: Synthetic oligonucleotide
aagauagcacuucauucua

SEQ ID NO: 2744053 - RNA, 19 nt, Artificial Sequence
  Description of Artificial Sequence: Synthetic oligonucleotide
ucauggaagauaagaggaa

SEQ ID NO: 2744054 - RNA, 19 nt, Artificial Sequence
  Description of Artificial Sequence: Synthetic oligonucleotide
acaggcuccaggauaacac

SEQ ID NO: 2744055 - RNA, 19 nt, Artificial Sequence
  Description of Artificial Sequence: Synthetic oligonucleotide
aagugauacagaauucaga

SEQ ID NO: 2744056 - RNA, 19 nt, Artificial Sequence
  Description of Artificial Sequence: Synthetic oligonucleotide
agggucaccaucauggaag

SEQ ID NO: 2744057 - RNA, 19 nt, Artificial Sequence
  Description of Artificial Sequence: Synthetic oligonucleotide
uuggcuuuuagcuccucga

SEQ ID NO: 2744058 - RNA, 19 nt, Artificial Sequence
  Description of Artificial Sequence: Synthetic oligonucleotide
auccagauguuuaaauagg

SEQ ID NO: 2744059 - RNA, 19 nt, Artificial Sequence
  Description of Artificial Sequence: Synthetic oligonucleotide
uggcaaagauguuauagua

SEQ ID NO: 2744060 - RNA, 19 nt, Artificial Sequence
  Description of Artificial Sequence: Synthetic oligonucleotide
uggcuuuuagcuccucgag

SEQ ID NO: 2744061 - RNA, 19 nt, Artificial Sequence
  Description of Artificial Sequence: Synthetic oligonucleotide
cauucuagcugcagguggc

SEQ ID NO: 2744062 - RNA, 19 nt, Artificial Sequence
  Description of Artificial Sequence: Synthetic oligonucleotide
ucuugggcuguuucagggg

SEQ ID NO: 2744063 - RNA, 19 nt, Artificial Sequence
  Description of Artificial Sequence: Synthetic oligonucleotide
uacaaaaguuuauuacaau

SEQ ID NO: 2744064 - RNA, 19 nt, Artificial Sequence
  Description of Artificial Sequence: Synthetic oligonucleotide
ugagguaggaauugcugaa

SEQ ID NO: 2744065 - RNA, 19 nt, Artificial Sequence
  Description of Artificial Sequence: Synthetic oligonucleotide
cuucauucaagauagcacu

SEQ ID NO: 2744066 - RNA, 19 nt, Artificial Sequence
  Description of Artificial Sequence: Synthetic oligonucleotide
aagcuuuauccuccucguc

SEQ ID NO: 2744067 - RNA, 19 nt, Artificial Sequence
  Description of Artificial Sequence: Synthetic oligonucleotide
auaacacuucauccuagcu

SEQ ID NO: 2744068 - RNA, 19 nt, Artificial Sequence
  Description of Artificial Sequence: Synthetic oligonucleotide
auguuauaguagggaaucc

SEQ ID NO: 2744069 - RNA, 19 nt, Artificial Sequence
  Description of Artificial Sequence: Synthetic oligonucleotide
cugguaggauuccagacug

SEQ ID NO: 2744070 - RNA, 19 nt, Artificial Sequence
  Description of Artificial Sequence: Synthetic oligonucleotide
gaauucagaguacaacaaa

SEQ ID NO: 2744071 - RNA, 19 nt, Artificial Sequence
  Description of Artificial Sequence: Synthetic oligonucleotide
agcuccucgaguuucuucu

SEQ ID NO: 2744072 - RNA, 19 nt, Artificial Sequence
  Description of Artificial Sequence: Synthetic oligonucleotide
uagggaauccagauguuua

SEQ ID NO: 2744073 - RNA, 19 nt, Artificial Sequence
  Description of Artificial Sequence: Synthetic oligonucleotide
gguggcaaagauguuauag

SEQ ID NO: 2744074 - RNA, 19 nt, Artificial Sequence
  Description of Artificial Sequence: Synthetic oligonucleotide
uguuuaauucaaagugaua

SEQ ID NO: 2744075 - RNA, 19 nt, Artificial Sequence
  Description of Artificial Sequence: Synthetic oligonucleotide
  modified_base (12)..(12): a, c, u, g, unknown or other
agguggcaaagnuguaugg

SEQ ID NO: 2744076 - RNA, 19 nt, Artificial Sequence
  Description of Artificial Sequence: Synthetic oligonucleotide
uacagaauucagaguacaa

SEQ ID NO: 2744077 - RNA, 19 nt, Artificial Sequence
  Description of Artificial Sequence: Synthetic oligonucleotide
cauggaagauaagaggaac

SEQ ID NO: 2744078 - RNA, 19 nt, Artificial Sequence
  Description of Artificial Sequence: Synthetic oligonucleotide
cuuggcuuuuagcuccucg

SEQ ID NO: 2744079 - RNA, 19 nt, Artificial Sequence
  Description of Artificial Sequence: Synthetic oligonucleotide
gguuuaaauucacagcuga

SEQ ID NO: 2744080 - RNA, 19 nt, Artificial Sequence
  Description of Artificial Sequence: Synthetic oligonucleotide
acaaagagccauuguauua

SEQ ID NO: 2744081 - RNA, 19 nt, Artificial Sequence
  Description of Artificial Sequence: Synthetic oligonucleotide
uauggcaggguauccagau

SEQ ID NO: 2744082 - RNA, 19 nt, Artificial Sequence
  Description of Artificial Sequence: Synthetic oligonucleotide
cuugggcuguuucaggggc

SEQ ID NO: 2744083 - RNA, 19 nt, Artificial Sequence
  Description of Artificial Sequence: Synthetic oligonucleotide
uuguuucugcuugaaagcu

SEQ ID NO: 2744084 - RNA, 19 nt, Artificial Sequence
  Description of Artificial Sequence: Synthetic oligonucleotide
ccaggauaacacuucaucc

SEQ ID NO: 2744085 - RNA, 19 nt, Artificial Sequence
  Description of Artificial Sequence: Synthetic oligonucleotide
auagcacuucauucuagcu

SEQ ID NO: 2744086 - RNA, 19 nt, Artificial Sequence
  Description of Artificial Sequence: Synthetic oligonucleotide
  modified_base (16)..(16): a, c, u, g, unknown or other
cuguagguggcaaagnugu

SEQ ID NO: 2744087 - RNA, 19 nt, Artificial Sequence
  Description of Artificial Sequence: Synthetic oligonucleotide
guuuaaauucacagcugag

SEQ ID NO: 2744088 - RNA, 19 nt, Artificial Sequence
  Description of Artificial Sequence: Synthetic oligonucleotide
gaguuguuuaauucaaagu

SEQ ID NO: 2744089 - RNA, 19 nt, Artificial Sequence
  Description of Artificial Sequence: Synthetic oligonucleotide
uugccagauuucuuaauuc

SEQ ID NO: 2744090 - RNA, 19 nt, Artificial Sequence
  Description of Artificial Sequence: Synthetic oligonucleotide
uccaccuguggccaggggu

SEQ ID NO: 2744091 - RNA, 19 nt, Artificial Sequence
  Description of Artificial Sequence: Synthetic oligonucleotide
gaguacaacaaagaugaaa

SEQ ID NO: 2744092 - RNA, 19 nt, Artificial Sequence
  Description of Artificial Sequence: Synthetic oligonucleotide
caaagugauacagaauuca

SEQ ID NO: 2744093 - RNA, 19 nt, Artificial Sequence
  Description of Artificial Sequence: Synthetic oligonucleotide
agaugaaacagcaggcucu

SEQ ID NO: 2744094 - RNA, 19 nt, Artificial Sequence
  Description of Artificial Sequence: Synthetic oligonucleotide
uguuucaggggcuucuuuu

SEQ ID NO: 2744095 - RNA, 19 nt, Artificial Sequence
  Description of Artificial Sequence: Synthetic oligonucleotide
ccaucauggaagauaagag

SEQ ID NO: 2744096 - RNA, 19 nt, Artificial Sequence
  Description of Artificial Sequence: Synthetic oligonucleotide
agguaggaauugcugaaca

SEQ ID NO: 2744097 - RNA, 19 nt, Artificial Sequence
  Description of Artificial Sequence: Synthetic oligonucleotide
cuagcuguagguggcaaag

SEQ ID NO: 2744098 - RNA, 19 nt, Artificial Sequence
  Description of Artificial Sequence: Synthetic oligonucleotide
uaagaggaacagcuuacuu

SEQ ID NO: 2744099 - RNA, 19 nt, Artificial Sequence
  Description of Artificial Sequence: Synthetic oligonucleotide
uuuagcuccucgaguuucu

SEQ ID NO: 2744100 - RNA, 19 nt, Artificial Sequence
  Description of Artificial Sequence: Synthetic oligonucleotide
guacaauaggcuucauuca

SEQ ID NO: 2744101 - RNA, 19 nt, Artificial Sequence
  Description of Artificial Sequence: Synthetic oligonucleotide
cucugguaggauuccagac

SEQ ID NO: 2744102 - RNA, 19 nt, Artificial Sequence
  Description of Artificial Sequence: Synthetic oligonucleotide
gaugaaacagcaggcucug

SEQ ID NO: 2744103 - RNA, 19 nt, Artificial Sequence
  Description of Artificial Sequence: Synthetic oligonucleotide
uccagacuggguuuaaauu

SEQ ID NO: 2744104 - RNA, 19 nt, Artificial Sequence
  Description of Artificial Sequence: Synthetic oligonucleotide
gaauugcugaacacuagga

SEQ ID NO: 2744105 - RNA, 19 nt, Artificial Sequence
  Description of Artificial Sequence: Synthetic oligonucleotide
uagggauggaggaggguca

SEQ ID NO: 2744106 - RNA, 19 nt, Artificial Sequence
  Description of Artificial Sequence: Synthetic oligonucleotide
auucagaguacaacaaaga

SEQ ID NO: 2744107 - RNA, 19 nt, Artificial Sequence
  Description of Artificial Sequence: Synthetic oligonucleotide
caagauagcacuucauucu

SEQ ID NO: 2744108 - RNA, 19 nt, Artificial Sequence
  Description of Artificial Sequence: Synthetic oligonucleotide
aggauaacacuucauccua

SEQ ID NO: 2744109 - RNA, 19 nt, Artificial Sequence
  Description of Artificial Sequence: Synthetic oligonucleotide
auacagaauucagaguaca

SEQ ID NO: 2744110 - RNA, 19 nt, Artificial Sequence
  Description of Artificial Sequence: Synthetic oligonucleotide
cuucuugggcuguuucagg

SEQ ID NO: 2744111 - RNA, 19 nt, Artificial Sequence
  Description of Artificial Sequence: Synthetic oligonucleotide
guauccagauguuuaaaua

SEQ ID NO: 2744112 - RNA, 19 nt, Artificial Sequence
  Description of Artificial Sequence: Synthetic oligonucleotide
uucauccuagcuguaggug

SEQ ID NO: 2744113 - RNA, 19 nt, Artificial Sequence
  Description of Artificial Sequence: Synthetic oligonucleotide
  modified_base (7)..(7): a, c, u, g, unknown or other
gcaaagnuguauggcaggg

SEQ ID NO: 2744114 - RNA, 19 nt, Artificial Sequence
  Description of Artificial Sequence: Synthetic oligonucleotide
uucauuuuacuuguuuauu

SEQ ID NO: 2744115 - RNA, 19 nt, Artificial Sequence
  Description of Artificial Sequence: Synthetic oligonucleotide
caauaggcuucauucaaga

SEQ ID NO: 2744116 - RNA, 19 nt, Artificial Sequence
  Description of Artificial Sequence: Synthetic oligonucleotide
ucauucaagauagcacuuc

SEQ ID NO: 2744117 - RNA, 19 nt, Artificial Sequence
  Description of Artificial Sequence: Synthetic oligonucleotide
  modified_base (2)..(2): a, c, u, g, unknown or other
gnuguauggcaggguaucc

SEQ ID NO: 2744118 - RNA, 19 nt, Artificial Sequence
  Description of Artificial Sequence: Synthetic oligonucleotide
uuccagacuggguuuaaau

SEQ ID NO: 2744119 - RNA, 19 nt, Artificial Sequence
  Description of Artificial Sequence: Synthetic oligonucleotide
uaggacaaagagccauugu

SEQ ID NO: 2744120 - RNA, 19 nt, Artificial Sequence
  Description of Artificial Sequence: Synthetic oligonucleotide
acaauaggcuucauucaag

SEQ ID NO: 2744121 - RNA, 19 nt, Artificial Sequence
  Description of Artificial Sequence: Synthetic oligonucleotide
ugguaggauuccagacugg

SEQ ID NO: 2744122 - RNA, 19 nt, Artificial Sequence
  Description of Artificial Sequence: Synthetic oligonucleotide
  modified_base (8)..(8): a, c, u, g, unknown or other
ggcaaagnuguauggcagg

SEQ ID NO: 2744123 - RNA, 19 nt, Artificial Sequence
  Description of Artificial Sequence: Synthetic oligonucleotide
cugaacacuaggacaaaga

SEQ ID NO: 2744124 - RNA, 19 nt, Artificial Sequence
  Description of Artificial Sequence: Synthetic oligonucleotide
ccagacuggguuuaaauuc

SEQ ID NO: 2744125 - RNA, 19 nt, Artificial Sequence
  Description of Artificial Sequence: Synthetic oligonucleotide
ggcaaagauguuauaguag

SEQ ID NO: 2744126 - RNA, 19 nt, Artificial Sequence
  Description of Artificial Sequence: Synthetic oligonucleotide
cagauguuuaaauagggau

SEQ ID NO: 2744127 - RNA, 19 nt, Artificial Sequence
  Description of Artificial Sequence: Synthetic oligonucleotide
cauucaagauagcacuuca

SEQ ID NO: 2744128 - RNA, 19 nt, Artificial Sequence
  Description of Artificial Sequence: Synthetic oligonucleotide
gguaggauuccagacuggg

SEQ ID NO: 2744129 - RNA, 19 nt, Artificial Sequence
  Description of Artificial Sequence: Synthetic oligonucleotide
agauguuuaacaggcucca

SEQ ID NO: 2744130 - RNA, 19 nt, Artificial Sequence
  Description of Artificial Sequence: Synthetic oligonucleotide
aaagagccauuguauuauu

SEQ ID NO: 2744131 - RNA, 19 nt, Artificial Sequence
  Description of Artificial Sequence: Synthetic oligonucleotide
uuugccaccuucgcggcca

SEQ ID NO: 2744132 - RNA, 19 nt, Artificial Sequence
  Description of Artificial Sequence: Synthetic oligonucleotide
uugaaagcuuuauccuccu

SEQ ID NO: 2744133 - RNA, 19 nt, Artificial Sequence
  Description of Artificial Sequence: Synthetic oligonucleotide
agaauucagaguacaacaa

SEQ ID NO: 2744134 - RNA, 19 nt, Artificial Sequence
  Description of Artificial Sequence: Synthetic oligonucleotide
ggaauccagauguuuaaca

SEQ ID NO: 2744135 - RNA, 19 nt, Artificial Sequence
  Description of Artificial Sequence: Synthetic oligonucleotide
aauucacagcugagguagg

SEQ ID NO: 2744136 - RNA, 19 nt, Artificial Sequence
  Description of Artificial Sequence: Synthetic oligonucleotide
aacaggcuccaggauaaca

SEQ ID NO: 2744137 - RNA, 19 nt, Artificial Sequence
  Description of Artificial Sequence: Synthetic oligonucleotide
cagacuggguuuaaauuca

SEQ ID NO: 2744138 - RNA, 19 nt, Artificial Sequence
  Description of Artificial Sequence: Synthetic oligonucleotide
ucuagcugcagguggcaaa

SEQ ID NO: 2744139 - RNA, 19 nt, Artificial Sequence
  Description of Artificial Sequence: Synthetic oligonucleotide
agggaauccagauguuuaa

SEQ ID NO: 2744140 - RNA, 19 nt, Artificial Sequence
  Description of Artificial Sequence: Synthetic oligonucleotide
auggaagauaagaggaaca

SEQ ID NO: 2744141 - RNA, 19 nt, Artificial Sequence
  Description of Artificial Sequence: Synthetic oligonucleotide
auaagaggaacagcuuacu

SEQ ID NO: 2744142 - RNA, 19 nt, Artificial Sequence
  Description of Artificial Sequence: Synthetic oligonucleotide
uuuugccagauuucuuaau

SEQ ID NO: 2744143 - RNA, 19 nt, Artificial Sequence
  Description of Artificial Sequence: Synthetic oligonucleotide
cuagcugcagguggcaaag

SEQ ID NO: 2744144 - RNA, 19 nt, Artificial Sequence
  Description of Artificial Sequence: Synthetic oligonucleotide
  modified_base (4)..(4): a, c, u, g, unknown or other
aagnuguauggcaggguau

SEQ ID NO: 2744145 - RNA, 19 nt, Artificial Sequence
  Description of Artificial Sequence: Synthetic oligonucleotide
gauguuuaacaggcuccag

SEQ ID NO: 2744146 - RNA, 19 nt, Artificial Sequence
  Description of Artificial Sequence: Synthetic oligonucleotide
ccagauuucuuaauuccac

SEQ ID NO: 2744147 - RNA, 19 nt, Artificial Sequence
  Description of Artificial Sequence: Synthetic oligonucleotide
uccagauguuuaacaggcu

SEQ ID NO: 2744148 - RNA, 19 nt, Artificial Sequence
  Description of Artificial Sequence: Synthetic oligonucleotide
uccucgaguuucuucugcu

SEQ ID NO: 2744149 - RNA, 19 nt, Artificial Sequence
  Description of Artificial Sequence: Synthetic oligonucleotide
agauguuauaguagggaau

SEQ ID NO: 2744150 - RNA, 19 nt, Artificial Sequence
  Description of Artificial Sequence: Synthetic oligonucleotide
aggguauccagauguuuaa

SEQ ID NO: 2744151 - RNA, 19 nt, Artificial Sequence
  Description of Artificial Sequence: Synthetic oligonucleotide
auguacaauaggcuucauu

SEQ ID NO: 2744152 - RNA, 19 nt, Artificial Sequence
  Description of Artificial Sequence: Synthetic oligonucleotide
guuuauuacaauguacaau

SEQ ID NO: 2744153 - RNA, 19 nt, Artificial Sequence
  Description of Artificial Sequence: Synthetic oligonucleotide
aagauaagaggaacagcuu

SEQ ID NO: 2744154 - RNA, 19 nt, Artificial Sequence
  Description of Artificial Sequence: Synthetic oligonucleotide
cuaggacaaagagccauug

SEQ ID NO: 2744155 - RNA, 19 nt, Artificial Sequence
  Description of Artificial Sequence: Synthetic oligonucleotide
gcuugaaagcuuuauccuc

SEQ ID NO: 2744156 - RNA, 19 nt, Artificial Sequence
  Description of Artificial Sequence: Synthetic oligonucleotide
ggaagauaagaggaacagc

SEQ ID NO: 2744157 - RNA, 19 nt, Artificial Sequence
  Description of Artificial Sequence: Synthetic oligonucleotide
caggauaacacuucauccu

SEQ ID NO: 2744158 - RNA, 19 nt, Artificial Sequence
  Description of Artificial Sequence: Synthetic oligonucleotide
gguaggaauugcugaacac

SEQ ID NO: 2744159 - RNA, 19 nt, Artificial Sequence
  Description of Artificial Sequence: Synthetic oligonucleotide
aauagggauggaggagggu

SEQ ID NO: 2744160 - RNA, 19 nt, Artificial Sequence
  Description of Artificial Sequence: Synthetic oligonucleotide
agauagcacuucauucuag

SEQ ID NO: 2744161 - RNA, 19 nt, Artificial Sequence
  Description of Artificial Sequence: Synthetic oligonucleotide
  modified_base (11)..(11): a, c, u, g, unknown or other
gguggcaaagnuguauggc

SEQ ID NO: 2744162 - RNA, 19 nt, Artificial Sequence
  Description of Artificial Sequence: Synthetic oligonucleotide
caauguacaauaggcuuca

SEQ ID NO: 2744163 - RNA, 19 nt, Artificial Sequence
  Description of Artificial Sequence: Synthetic oligonucleotide
gacaaagagccauuguauu

SEQ ID NO: 2744164 - RNA, 19 nt, Artificial Sequence
  Description of Artificial Sequence: Synthetic oligonucleotide
guaggaauugcugaacacu

SEQ ID NO: 2744165 - RNA, 19 nt, Artificial Sequence
  Description of Artificial Sequence: Synthetic oligonucleotide
gucaccaucauggaagaua

SEQ ID NO: 2744166 - RNA, 19 nt, Artificial Sequence
  Description of Artificial Sequence: Synthetic oligonucleotide
aggaauugcugaacacuag

SEQ ID NO: 2744167 - RNA, 19 nt, Artificial Sequence
  Description of Artificial Sequence: Synthetic oligonucleotide
cuccucgaguuucuucugc

SEQ ID NO: 2744168 - RNA, 19 nt, Artificial Sequence
  Description of Artificial Sequence: Synthetic oligonucleotide
ccagauguuuaacaggcuc

SEQ ID NO: 2744169 - RNA, 19 nt, Artificial Sequence
  Description of Artificial Sequence: Synthetic oligonucleotide
gagguaggaauugcugaac

SEQ ID NO: 2744170 - RNA, 19 nt, Artificial Sequence
  Description of Artificial Sequence: Synthetic oligonucleotide
uuuauccuccucguccauc

SEQ ID NO: 2744171 - RNA, 19 nt, Artificial Sequence
  Description of Artificial Sequence: Synthetic oligonucleotide
cacuucauccuagcuguag

SEQ ID NO: 2744172 - RNA, 19 nt, Artificial Sequence
  Description of Artificial Sequence: Synthetic oligonucleotide
agacuggguuuaaauucac

SEQ ID NO: 2744173 - RNA, 19 nt, Artificial Sequence
  Description of Artificial Sequence: Synthetic oligonucleotide
agcugcagguggcaaagau

SEQ ID NO: 2744174 - RNA, 19 nt, Artificial Sequence
  Description of Artificial Sequence: Synthetic oligonucleotide
aggauuccagacuggguuu

SEQ ID NO: 2744175 - RNA, 19 nt, Artificial Sequence
  Description of Artificial Sequence: Synthetic oligonucleotide
auucaaagugauacagaau

SEQ ID NO: 2744176 - RNA, 19 nt, Artificial Sequence
  Description of Artificial Sequence: Synthetic oligonucleotide
uucacagcugagguaggaa

SEQ ID NO: 2744177 - RNA, 19 nt, Artificial Sequence
  Description of Artificial Sequence: Synthetic oligonucleotide
caggguauccagauguuua

SEQ ID NO: 2744178 - RNA, 19 nt, Artificial Sequence
  Description of Artificial Sequence: Synthetic oligonucleotide
  modified_base (15)..(15): a, c, u, g, unknown or other
uguagguggcaaagnugua

SEQ ID NO: 2744179 - RNA, 19 nt, Artificial Sequence
  Description of Artificial Sequence: Synthetic oligonucleotide
cauuuuacuuguuuauuuu

SEQ ID NO: 2744180 - RNA, 19 nt, Artificial Sequence
  Description of Artificial Sequence: Synthetic oligonucleotide
gagccauuguauuauucau

SEQ ID NO: 2744181 - RNA, 19 nt, Artificial Sequence
  Description of Artificial Sequence: Synthetic oligonucleotide
uggccugcuucuugggcug

SEQ ID NO: 2744182 - RNA, 19 nt, Artificial Sequence
  Description of Artificial Sequence: Synthetic oligonucleotide
ggauaacacuucauccuag

SEQ ID NO: 2744183 - RNA, 19 nt, Artificial Sequence
  Description of Artificial Sequence: Synthetic oligonucleotide
cuccucguccaucuccuug

SEQ ID NO: 2744184 - RNA, 19 nt, Artificial Sequence
  Description of Artificial Sequence: Synthetic oligonucleotide
uuccccgcggccuuggcuu

SEQ ID NO: 2744185 - RNA, 19 nt, Artificial Sequence
  Description of Artificial Sequence: Synthetic oligonucleotide
agggauggaggagggucac

SEQ ID NO: 2744186 - RNA, 19 nt, Artificial Sequence
  Description of Artificial Sequence: Synthetic oligonucleotide
ggcuucauucaagauagca

SEQ ID NO: 2744187 - RNA, 19 nt, Artificial Sequence
  Description of Artificial Sequence: Synthetic oligonucleotide
auucacagcugagguagga

SEQ ID NO: 2744188 - RNA, 19 nt, Artificial Sequence
  Description of Artificial Sequence: Synthetic oligonucleotide
guggccaggggucccuucc

SEQ ID NO: 2744189 - RNA, 19 nt, Artificial Sequence
  Description of Artificial Sequence: Synthetic oligonucleotide
gcugagguaggaauugcug

SEQ ID NO: 2744190 - RNA, 19 nt, Artificial Sequence
  Description of Artificial Sequence: Synthetic oligonucleotide
gagggucaccaucauggaa

SEQ ID NO: 2744191 - RNA, 19 nt, Artificial Sequence
  Description of Artificial Sequence: Synthetic oligonucleotide
  modified_base (14)..(14): a, c, u, g, unknown or other
guagguggcaaagnuguau

SEQ ID NO: 2744192 - RNA, 19 nt, Artificial Sequence
  Description of Artificial Sequence: Synthetic oligonucleotide
gcuuuauccuccucgucca

SEQ ID NO: 2744193 - RNA, 19 nt, Artificial Sequence
  Description of Artificial Sequence: Synthetic oligonucleotide
auucaagauagcacuucau

SEQ ID NO: 2744194 - RNA, 19 nt, Artificial Sequence
  Description of Artificial Sequence: Synthetic oligonucleotide
uuccaccuguggccagggg

SEQ ID NO: 2744195 - RNA, 19 nt, Artificial Sequence
  Description of Artificial Sequence: Synthetic oligonucleotide
gacuggguuuaaauucaca

SEQ ID NO: 2744196 - RNA, 19 nt, Artificial Sequence
  Description of Artificial Sequence: Synthetic oligonucleotide
  modified_base (19)..(19): a, c, u, g, unknown or other
uagcuguagguggcaaagn

SEQ ID NO: 2744197 - RNA, 19 nt, Artificial Sequence
  Description of Artificial Sequence: Synthetic oligonucleotide
cacuucauucuagcugcag

SEQ ID NO: 2744198 - RNA, 19 nt, Artificial Sequence
  Description of Artificial Sequence: Synthetic oligonucleotide
gcugaacacuaggacaaag

SEQ ID NO: 2744199 - RNA, 19 nt, Artificial Sequence
  Description of Artificial Sequence: Synthetic oligonucleotide
cucguccaucuccuuggcc

SEQ ID NO: 2744200 - RNA, 19 nt, Artificial Sequence
  Description of Artificial Sequence: Synthetic oligonucleotide
agcaggcucugguaggauu

SEQ ID NO: 2744201 - RNA, 19 nt, Artificial Sequence
  Description of Artificial Sequence: Synthetic oligonucleotide
ggguuuaaauucacagcug

SEQ ID NO: 2744202 - RNA, 19 nt, Artificial Sequence
  Description of Artificial Sequence: Synthetic oligonucleotide
ccagauguuuaaauaggga

SEQ ID NO: 2744203 - RNA, 19 nt, Artificial Sequence
  Description of Artificial Sequence: Synthetic oligonucleotide
augaaacagcaggcucugg

SEQ ID NO: 2744204 - RNA, 19 nt, Artificial Sequence
  Description of Artificial Sequence: Synthetic oligonucleotide
acagcaggcucugguagga

SEQ ID NO: 2744205 - RNA, 19 nt, Artificial Sequence
  Description of Artificial Sequence: Synthetic oligonucleotide
gguauccagauguuuaaau

SEQ ID NO: 2744206 - RNA, 19 nt, Artificial Sequence
  Description of Artificial Sequence: Synthetic oligonucleotide
augaguuguuuaauucaaa

SEQ ID NO: 2744207 - RNA, 19 nt, Artificial Sequence
  Description of Artificial Sequence: Synthetic oligonucleotide
auguuuaaauagggaugga

SEQ ID NO: 2744208 - RNA, 19 nt, Artificial Sequence
  Description of Artificial Sequence: Synthetic oligonucleotide
agcugagguaggaauugcu

SEQ ID NO: 2744209 - RNA, 19 nt, Artificial Sequence
  Description of Artificial Sequence: Synthetic oligonucleotide
caaagagccauuguauuau

SEQ ID NO: 2744210 - RNA, 19 nt, Artificial Sequence
  Description of Artificial Sequence: Synthetic oligonucleotide
gccauuguauuauucauuu

SEQ ID NO: 2744211 - RNA, 19 nt, Artificial Sequence
  Description of Artificial Sequence: Synthetic oligonucleotide
cuucauccuagcuguaggu

SEQ ID NO: 2744212 - RNA, 19 nt, Artificial Sequence
  Description of Artificial Sequence: Synthetic oligonucleotide
auucuagcugcagguggca

SEQ ID NO: 2744213 - RNA, 19 nt, Artificial Sequence
  Description of Artificial Sequence: Synthetic oligonucleotide
aauguacaauaggcuucau

SEQ ID NO: 2744214 - RNA, 19 nt, Artificial Sequence
  Description of Artificial Sequence: Synthetic oligonucleotide
aggggucccuuccccgcgg

SEQ ID NO: 2744215 - RNA, 19 nt, Artificial Sequence
  Description of Artificial Sequence: Synthetic oligonucleotide
acuaggacaaagagccauu

SEQ ID NO: 2744216 - RNA, 19 nt, Artificial Sequence
  Description of Artificial Sequence: Synthetic oligonucleotide
gcugcagguggcaaagaug

SEQ ID NO: 2744217 - RNA, 19 nt, Artificial Sequence
  Description of Artificial Sequence: Synthetic oligonucleotide
uucuagcugcagguggcaa

SEQ ID NO: 2744218 - RNA, 19 nt, Artificial Sequence
  Description of Artificial Sequence: Synthetic oligonucleotide
gcggccuuggcuuuuagcu

SEQ ID NO: 2744219 - RNA, 19 nt, Artificial Sequence
  Description of Artificial Sequence: Synthetic oligonucleotide
gcuuuuagcuccucgaguu

SEQ ID NO: 2744220 - RNA, 19 nt, Artificial Sequence
  Description of Artificial Sequence: Synthetic oligonucleotide
caggggucccuuccccgcg

SEQ ID NO: 2744221 - RNA, 19 nt, Artificial Sequence
  Description of Artificial Sequence: Synthetic oligonucleotide
auuauucauuuuacuuguu

SEQ ID NO: 2744222 - RNA, 19 nt, Artificial Sequence
  Description of Artificial Sequence: Synthetic oligonucleotide
caccaucauggaagauaag

SEQ ID NO: 2744223 - RNA, 19 nt, Artificial Sequence
  Description of Artificial Sequence: Synthetic oligonucleotide
guuucugcuugaaagcuuu

SEQ ID NO: 2744224 - RNA, 19 nt, Artificial Sequence
  Description of Artificial Sequence: Synthetic oligonucleotide
gcucugguaggauuccaga

SEQ ID NO: 2744225 - RNA, 19 nt, Artificial Sequence
  Description of Artificial Sequence: Synthetic oligonucleotide
ggcucugguaggauuccag

SEQ ID NO: 2744226 - RNA, 19 nt, Artificial Sequence
  Description of Artificial Sequence: Synthetic oligonucleotide
cagguggcaaagauguuau

SEQ ID NO: 2744227 - RNA, 19 nt, Artificial Sequence
  Description of Artificial Sequence: Synthetic oligonucleotide
aggcuucauucaagauagc

SEQ ID NO: 2744228 - RNA, 19 nt, Artificial Sequence
  Description of Artificial Sequence: Synthetic oligonucleotide
guuuaacaggcuccaggau

SEQ ID NO: 2744229 - RNA, 19 nt, Artificial Sequence
  Description of Artificial Sequence: Synthetic oligonucleotide
ugcugaacacuaggacaaa

SEQ ID NO: 2744230 - RNA, 19 nt, Artificial Sequence
  Description of Artificial Sequence: Synthetic oligonucleotide
cuucgcggccagacauggc

SEQ ID NO: 2744231 - RNA, 19 nt, Artificial Sequence
  Description of Artificial Sequence: Synthetic oligonucleotide
auuccagacuggguuuaaa

SEQ ID NO: 2744232 - RNA, 19 nt, Artificial Sequence
  Description of Artificial Sequence: Synthetic oligonucleotide
guauggcaggguauccaga

SEQ ID NO: 2744233 - RNA, 19 nt, Artificial Sequence
  Description of Artificial Sequence: Synthetic oligonucleotide
ccaccuguggccagggguc

SEQ ID NO: 2744234 - RNA, 19 nt, Artificial Sequence
  Description of Artificial Sequence: Synthetic oligonucleotide
uugccaccuucgcggccag

SEQ ID NO: 2744235 - RNA, 19 nt, Artificial Sequence
  Description of Artificial Sequence: Synthetic oligonucleotide
ggacaaagagccauuguau

SEQ ID NO: 2744236 - RNA, 19 nt, Artificial Sequence
  Description of Artificial Sequence: Synthetic oligonucleotide
gccaggggucccuuccccg

SEQ ID NO: 2744237 - RNA, 19 nt, Artificial Sequence
  Description of Artificial Sequence: Synthetic oligonucleotide
uguggccaggggucccuuc

SEQ ID NO: 2744238 - RNA, 19 nt, Artificial Sequence
  Description of Artificial Sequence: Synthetic oligonucleotide
gggucaccaucauggaaga

SEQ ID NO: 2744239 - RNA, 19 nt, Artificial Sequence
  Description of Artificial Sequence: Synthetic oligonucleotide
uuagcuccucgaguuucuu

SEQ ID NO: 2744240 - RNA, 19 nt, Artificial Sequence
  Description of Artificial Sequence: Synthetic oligonucleotide
gauuccagacuggguuuaa

SEQ ID NO: 2744241 - RNA, 19 nt, Artificial Sequence
  Description of Artificial Sequence: Synthetic oligonucleotide
ccuucgcggccagacaugg

SEQ ID NO: 2744242 - RNA, 19 nt, Artificial Sequence
  Description of Artificial Sequence: Synthetic oligonucleotide
uaacaggcuccaggauaac

SEQ ID NO: 2744243 - RNA, 19 nt, Artificial Sequence
  Description of Artificial Sequence: Synthetic oligonucleotide
cacuaggacaaagagccau

SEQ ID NO: 2744244 - RNA, 19 nt, Artificial Sequence
  Description of Artificial Sequence: Synthetic oligonucleotide
ggcuuuuagcuccucgagu

SEQ ID NO: 2744245 - RNA, 19 nt, Artificial Sequence
  Description of Artificial Sequence: Synthetic oligonucleotide
aguagggaauccagauguu

SEQ ID NO: 2744246 - RNA, 19 nt, Artificial Sequence
  Description of Artificial Sequence: Synthetic oligonucleotide
ggcuccaggauaacacuuc

SEQ ID NO: 2744247 - RNA, 19 nt, Artificial Sequence
  Description of Artificial Sequence: Synthetic oligonucleotide
aggcuccaggauaacacuu

SEQ ID NO: 2744248 - RNA, 19 nt, Artificial Sequence
  Description of Artificial Sequence: Synthetic oligonucleotide
ggagggucaccaucaugga

SEQ ID NO: 2744249 - RNA, 19 nt, Artificial Sequence
  Description of Artificial Sequence: Synthetic oligonucleotide
caggcuccaggauaacacu

SEQ ID NO: 2744250 - RNA, 19 nt, Artificial Sequence
  Description of Artificial Sequence: Synthetic oligonucleotide
acacuaggacaaagagcca

SEQ ID NO: 2744251 - RNA, 19 nt, Artificial Sequence
  Description of Artificial Sequence: Synthetic oligonucleotide
guagggaauccagauguuu

SEQ ID NO: 2744252 - RNA, 19 nt, Artificial Sequence
  Description of Artificial Sequence: Synthetic oligonucleotide
caccuguggccaggggucc

SEQ ID NO: 2744253 - RNA, 19 nt, Artificial Sequence
  Description of Artificial Sequence: Synthetic oligonucleotide
cacagcugagguaggaauu

SEQ ID NO: 2744254 - RNA, 19 nt, Artificial Sequence
  Description of Artificial Sequence: Synthetic oligonucleotide
agguggcaaagauguuaua

SEQ ID NO: 2744255 - RNA, 19 nt, Artificial Sequence
  Description of Artificial Sequence: Synthetic oligonucleotide
guaggauuccagacugggu

SEQ ID NO: 2744256 - RNA, 19 nt, Artificial Sequence
  Description of Artificial Sequence: Synthetic oligonucleotide
ccuuggccugcuucuuggg

SEQ ID NO: 2744257 - RNA, 19 nt, Artificial Sequence
  Description of Artificial Sequence: Synthetic oligonucleotide
uagcugcagguggcaaaga

SEQ ID NO: 2744258 - RNA, 19 nt, Artificial Sequence
  Description of Artificial Sequence: Synthetic oligonucleotide
  modified_base (6)..(6): a, c, u, g, unknown or other
caaagnuguauggcagggu

SEQ ID NO: 2744259 - RNA, 19 nt, Artificial Sequence
  Description of Artificial Sequence: Synthetic oligonucleotide
accuucgcggccagacaug

SEQ ID NO: 2744260 - RNA, 19 nt, Artificial Sequence
  Description of Artificial Sequence: Synthetic oligonucleotide
gcuccucgaguuucuucug

SEQ ID NO: 2744261 - RNA, 19 nt, Artificial Sequence
  Description of Artificial Sequence: Synthetic oligonucleotide
ccaggggucccuuccccgc

SEQ ID NO: 2744262 - RNA, 19 nt, Artificial Sequence
  Description of Artificial Sequence: Synthetic oligonucleotide
agaguacaacaaagaugaa

SEQ ID NO: 2744263 - RNA, 19 nt, Artificial Sequence
  Description of Artificial Sequence: Synthetic oligonucleotide
gccaccuucgcggccagac

SEQ ID NO: 2744264 - RNA, 19 nt, Artificial Sequence
  Description of Artificial Sequence: Synthetic oligonucleotide
aggcucugguaggauucca

SEQ ID NO: 2744265 - RNA, 19 nt, Artificial Sequence
  Description of Artificial Sequence: Synthetic oligonucleotide
caccuucgcggccagacau

SEQ ID NO: 2744266 - RNA, 19 nt, Artificial Sequence
  Description of Artificial Sequence: Synthetic oligonucleotide
cuuuuagcuccucgaguuu

SEQ ID NO: 2744267 - RNA, 19 nt, Artificial Sequence
  Description of Artificial Sequence: Synthetic oligonucleotide
ggguauccagauguuuaaa

SEQ ID NO: 2744268 - RNA, 19 nt, Artificial Sequence
  Description of Artificial Sequence: Synthetic oligonucleotide
cuccaggauaacacuucau

SEQ ID NO: 2744269 - RNA, 19 nt, Artificial Sequence
  Description of Artificial Sequence: Synthetic oligonucleotide
ggauuccagacuggguuua

SEQ ID NO: 2744270 - RNA, 19 nt, Artificial Sequence
  Description of Artificial Sequence: Synthetic oligonucleotide
ccucguccaucuccuuggc

SEQ ID NO: 2744271 - RNA, 19 nt, Artificial Sequence
  Description of Artificial Sequence: Synthetic oligonucleotide
ccuagcuguagguggcaaa

SEQ ID NO: 2744272 - RNA, 19 nt, Artificial Sequence
  Description of Artificial Sequence: Synthetic oligonucleotide
gggauggaggagggucacc

SEQ ID NO: 2744273 - RNA, 19 nt, Artificial Sequence
  Description of Artificial Sequence: Synthetic oligonucleotide
ucccuuccccgcggccuug

SEQ ID NO: 2744274 - RNA, 19 nt, Artificial Sequence
  Description of Artificial Sequence: Synthetic oligonucleotide
cgcggccuuggcuuuuagc

SEQ ID NO: 2744275 - RNA, 19 nt, Artificial Sequence
  Description of Artificial Sequence: Synthetic oligonucleotide
cuuuauccuccucguccau

SEQ ID NO: 2744276 - RNA, 19 nt, Artificial Sequence
  Description of Artificial Sequence: Synthetic oligonucleotide
cgcggccagacauggcgcc

SEQ ID NO: 2744277 - RNA, 19 nt, Artificial Sequence
  Description of Artificial Sequence: Synthetic oligonucleotide
uccccgcggccuuggcuuu

SEQ ID NO: 2744278 - RNA, 19 nt, Artificial Sequence
  Description of Artificial Sequence: Synthetic oligonucleotide
ggcuguuucaggggcuucu

SEQ ID NO: 2744279 - RNA, 19 nt, Artificial Sequence
  Description of Artificial Sequence: Synthetic oligonucleotide
acacuucauccuagcugua

SEQ ID NO: 2744280 - RNA, 19 nt, Artificial Sequence
  Description of Artificial Sequence: Synthetic oligonucleotide
gggucccuuccccgcggcc

SEQ ID NO: 2744281 - RNA, 19 nt, Artificial Sequence
  Description of Artificial Sequence: Synthetic oligonucleotide
cuguuucaggggcuucuuu

SEQ ID NO: 2744282 - RNA, 19 nt, Artificial Sequence
  Description of Artificial Sequence: Synthetic oligonucleotide
ugccaccuucgcggccaga

SEQ ID NO: 2744283 - RNA, 19 nt, Artificial Sequence
  Description of Artificial Sequence: Synthetic oligonucleotide
ggucccuuccccgcggccu

SEQ ID NO: 2744284 - RNA, 19 nt, Artificial Sequence
  Description of Artificial Sequence: Synthetic oligonucleotide
gcacuucauucuagcugca

SEQ ID NO: 2744285 - RNA, 19 nt, Artificial Sequence
  Description of Artificial Sequence: Synthetic oligonucleotide
ccauuguauuauucauuuu

SEQ ID NO: 2744286 - RNA, 19 nt, Artificial Sequence
  Description of Artificial Sequence: Synthetic oligonucleotide
gcaggguauccagauguuu

SEQ ID NO: 2744287 - RNA, 19 nt, Artificial Sequence
  Description of Artificial Sequence: Synthetic oligonucleotide
ggaggagggucaccaucau

SEQ ID NO: 2744288 - RNA, 19 nt, Artificial Sequence
  Description of Artificial Sequence: Synthetic oligonucleotide
ccaccuucgcggccagaca

SEQ ID NO: 2744289 - RNA, 19 nt, Artificial Sequence
  Description of Artificial Sequence: Synthetic oligonucleotide
gucccuuccccgcggccuu

SEQ ID NO: 2744290 - RNA, 19 nt, Artificial Sequence
  Description of Artificial Sequence: Synthetic oligonucleotide
cccuuccccgcggccuugg

SEQ ID NO: 2744291 - RNA, 19 nt, Artificial Sequence
  Description of Artificial Sequence: Synthetic oligonucleotide
ccuuggcuuuuagcuccuc

SEQ ID NO: 2744292 - RNA, 19 nt, Artificial Sequence
  Description of Artificial Sequence: Synthetic oligonucleotide
gcuguuucaggggcuucuu

SEQ ID NO: 2744293 - RNA, 19 nt, Artificial Sequence
  Description of Artificial Sequence: Synthetic oligonucleotide
ggcaggguauccagauguu

SEQ ID NO: 2744294 - RNA, 19 nt, Artificial Sequence
  Description of Artificial Sequence: Synthetic oligonucleotide
ccgcggccuuggcuuuuag

SEQ ID NO: 2744295 - RNA, 19 nt, Artificial Sequence
  Description of Artificial Sequence: Synthetic oligonucleotide
cagcaggcucugguaggau

SEQ ID NO: 2744296 - RNA, 19 nt, Artificial Sequence
  Description of Artificial Sequence: Synthetic oligonucleotide
ccuguggccaggggucccu

SEQ ID NO: 2744297 - RNA, 19 nt, Artificial Sequence
  Description of Artificial Sequence: Synthetic oligonucleotide
ccugcuucuugggcuguuu

SEQ ID NO: 2744298 - RNA, 19 nt, Artificial Sequence
  Description of Artificial Sequence: Synthetic oligonucleotide
cccgcggccuuggcuuuua

SEQ ID NO: 2744299 - RNA, 19 nt, Artificial Sequence
  Description of Artificial Sequence: Synthetic oligonucleotide
ccccgcggccuuggcuuuu

SEQ ID NO: 2744300 - RNA, 19 nt, Artificial Sequence
  Description of Artificial Sequence: Synthetic oligonucleotide
  modified_base (1)..(1): a, c, u, g, unknown or other
nuguauggcaggguaucca

SEQ ID NO: 2744301 - RNA, 19 nt, Artificial Sequence
  Description of Artificial Sequence: Synthetic oligonucleotide
uaauccaacaacuuuaucc

SEQ ID NO: 2744302 - RNA, 19 nt, Artificial Sequence
  Description of Artificial Sequence: Synthetic oligonucleotide
acaaauacaugccauaaac

SEQ ID NO: 2744303 - RNA, 19 nt, Artificial Sequence
  Description of Artificial Sequence: Synthetic oligonucleotide
aauccuuauaccuguaaac

SEQ ID NO: 2744304 - RNA, 19 nt, Artificial Sequence
  Description of Artificial Sequence: Synthetic oligonucleotide
aaugaaucacuacugaaug

SEQ ID NO: 2744305 - RNA, 19 nt, Artificial Sequence
  Description of Artificial Sequence: Synthetic oligonucleotide
uuuacaacuaccacaagug

SEQ ID NO: 2744306 - RNA, 19 nt, Artificial Sequence
  Description of Artificial Sequence: Synthetic oligonucleotide
uuucaaagaauccuuauac

SEQ ID NO: 2744307 - RNA, 19 nt, Artificial Sequence
  Description of Artificial Sequence: Synthetic oligonucleotide
aagauguccuucuuugugc

SEQ ID NO: 2744308 - RNA, 19 nt, Artificial Sequence
  Description of Artificial Sequence: Synthetic oligonucleotide
aacuuauuuugauuuaauc

SEQ ID NO: 2744309 - RNA, 19 nt, Artificial Sequence
  Description of Artificial Sequence: Synthetic oligonucleotide
aauccauugacuguaacag

SEQ ID NO: 2744310 - RNA, 19 nt, Artificial Sequence
  Description of Artificial Sequence: Synthetic oligonucleotide
aauccaacaacuuuaucca

SEQ ID NO: 2744311 - RNA, 19 nt, Artificial Sequence
  Description of Artificial Sequence: Synthetic oligonucleotide
uacugaaugauucagggac

SEQ ID NO: 2744312 - RNA, 19 nt, Artificial Sequence
  Description of Artificial Sequence: Synthetic oligonucleotide
guaaccaagacucuugagg

SEQ ID NO: 2744313 - RNA, 19 nt, Artificial Sequence
  Description of Artificial Sequence: Synthetic oligonucleotide
uucauuuacaacuaccaca

SEQ ID NO: 2744314 - RNA, 19 nt, Artificial Sequence
  Description of Artificial Sequence: Synthetic oligonucleotide
ugugccucuaccaauuugg

SEQ ID NO: 2744315 - RNA, 19 nt, Artificial Sequence
  Description of Artificial Sequence: Synthetic oligonucleotide
uugauaaauccauugacug

SEQ ID NO: 2744316 - RNA, 19 nt, Artificial Sequence
  Description of Artificial Sequence: Synthetic oligonucleotide
acuacugaaugauucaggg

SEQ ID NO: 2744317 - RNA, 19 nt, Artificial Sequence
  Description of Artificial Sequence: Synthetic oligonucleotide
uaaacauccagagugaaug

SEQ ID NO: 2744318 - RNA, 19 nt, Artificial Sequence
  Description of Artificial Sequence: Synthetic oligonucleotide
uacaauagaaaagaugucc

SEQ ID NO: 2744319 - RNA, 19 nt, Artificial Sequence
  Description of Artificial Sequence: Synthetic oligonucleotide
ucgguuguaaccaagacuc

SEQ ID NO: 2744320 - RNA, 19 nt, Artificial Sequence
  Description of Artificial Sequence: Synthetic oligonucleotide
uuagcgaccacacaggcga

SEQ ID NO: 2744321 - RNA, 19 nt, Artificial Sequence
  Description of Artificial Sequence: Synthetic oligonucleotide
gaaaagauguccuucuuug

SEQ ID NO: 2744322 - RNA, 19 nt, Artificial Sequence
  Description of Artificial Sequence: Synthetic oligonucleotide
uguucuacaaauacaugcc

SEQ ID NO: 2744323 - RNA, 19 nt, Artificial Sequence
  Description of Artificial Sequence: Synthetic oligonucleotide
acuguaacagcccaggaag

SEQ ID NO: 2744324 - RNA, 19 nt, Artificial Sequence
  Description of Artificial Sequence: Synthetic oligonucleotide
auuuaaucacauuucauga

SEQ ID NO: 2744325 - RNA, 19 nt, Artificial Sequence
  Description of Artificial Sequence: Synthetic oligonucleotide
acaaacgcgcuuuucaucg

SEQ ID NO: 2744326 - RNA, 19 nt, Artificial Sequence
  Description of Artificial Sequence: Synthetic oligonucleotide
aaagauguccuucuuugug

SEQ ID NO: 2744327 - RNA, 19 nt, Artificial Sequence
  Description of Artificial Sequence: Synthetic oligonucleotide
uuaaucacauuucaugaac

SEQ ID NO: 2744328 - RNA, 19 nt, Artificial Sequence
  Description of Artificial Sequence: Synthetic oligonucleotide
uccauugacuguaacagcc

SEQ ID NO: 2744329 - RNA, 19 nt, Artificial Sequence
  Description of Artificial Sequence: Synthetic oligonucleotide
cuuauaccuguaaacaucc

SEQ ID NO: 2744330 - RNA, 19 nt, Artificial Sequence
  Description of Artificial Sequence: Synthetic oligonucleotide
uuagggguauuuuaaagug

SEQ ID NO: 2744331 - RNA, 19 nt, Artificial Sequence
  Description of Artificial Sequence: Synthetic oligonucleotide
ugccaauucgaauugauga

SEQ ID NO: 2744332 - RNA, 19 nt, Artificial Sequence
  Description of Artificial Sequence: Synthetic oligonucleotide
aauuuggaggacaagucgg

SEQ ID NO: 2744333 - RNA, 19 nt, Artificial Sequence
  Description of Artificial Sequence: Synthetic oligonucleotide
ugaugauuguucauuaacu

SEQ ID NO: 2744334 - RNA, 19 nt, Artificial Sequence
  Description of Artificial Sequence: Synthetic oligonucleotide
uuauuuugauuuaaucaca

SEQ ID NO: 2744335 - RNA, 19 nt, Artificial Sequence
  Description of Artificial Sequence: Synthetic oligonucleotide
uuacaacuaccacaagugg

SEQ ID NO: 2744336 - RNA, 19 nt, Artificial Sequence
  Description of Artificial Sequence: Synthetic oligonucleotide
uuaacuuuucauuuacaac

SEQ ID NO: 2744337 - RNA, 19 nt, Artificial Sequence
  Description of Artificial Sequence: Synthetic oligonucleotide
augaacuggauuuaggggu

SEQ ID NO: 2744338 - RNA, 19 nt, Artificial Sequence
  Description of Artificial Sequence: Synthetic oligonucleotide
ugaaggucuucuuucaaag

SEQ ID NO: 2744339 - RNA, 19 nt, Artificial Sequence
  Description of Artificial Sequence: Synthetic oligonucleotide
uacaacuaccacaaguggc

SEQ ID NO: 2744340 - RNA, 19 nt, Artificial Sequence
  Description of Artificial Sequence: Synthetic oligonucleotide
agacucuccaaacagcuuc

SEQ ID NO: 2744341 - RNA, 19 nt, Artificial Sequence
  Description of Artificial Sequence: Synthetic oligonucleotide
auuaacuuuucauuuacaa

SEQ ID NO: 2744342 - RNA, 19 nt, Artificial Sequence
  Description of Artificial Sequence: Synthetic oligonucleotide
auuuagggguauuuuaaag

SEQ ID NO: 2744343 - RNA, 19 nt, Artificial Sequence
  Description of Artificial Sequence: Synthetic oligonucleotide
uaaccaagacucuugagga

SEQ ID NO: 2744344 - RNA, 19 nt, Artificial Sequence
  Description of Artificial Sequence: Synthetic oligonucleotide
gaugacaagaucugcuugc

SEQ ID NO: 2744345 - RNA, 19 nt, Artificial Sequence
  Description of Artificial Sequence: Synthetic oligonucleotide
uucaguguugauaaaucca

SEQ ID NO: 2744346 - RNA, 19 nt, Artificial Sequence
  Description of Artificial Sequence: Synthetic oligonucleotide
uuucaguguugauaaaucc

SEQ ID NO: 2744347 - RNA, 19 nt, Artificial Sequence
  Description of Artificial Sequence: Synthetic oligonucleotide
ucauuaacuuuucauuuac

SEQ ID NO: 2744348 - RNA, 19 nt, Artificial Sequence
  Description of Artificial Sequence: Synthetic oligonucleotide
ugcagguacaauagaaaag

SEQ ID NO: 2744349 - RNA, 19 nt, Artificial Sequence
  Description of Artificial Sequence: Synthetic oligonucleotide
uucgaauugaugauuguuc

SEQ ID NO: 2744350 - RNA, 19 nt, Artificial Sequence
  Description of Artificial Sequence: Synthetic oligonucleotide
acucuugaggaucuggagg

SEQ ID NO: 2744351 - RNA, 19 nt, Artificial Sequence
  Description of Artificial Sequence: Synthetic oligonucleotide
aguguuaagaguuuauuuu

SEQ ID NO: 2744352 - RNA, 19 nt, Artificial Sequence
  Description of Artificial Sequence: Synthetic oligonucleotide
augccauaaacuuauuuug

SEQ ID NO: 2744353 - RNA, 19 nt, Artificial Sequence
  Description of Artificial Sequence: Synthetic oligonucleotide
uuuguaauccaacaacuuu

SEQ ID NO: 2744354 - RNA, 19 nt, Artificial Sequence
  Description of Artificial Sequence: Synthetic oligonucleotide
agcucgucgaaacuggugg

SEQ ID NO: 2744355 - RNA, 19 nt, Artificial Sequence
  Description of Artificial Sequence: Synthetic oligonucleotide
uuguaauccaacaacuuua

SEQ ID NO: 2744356 - RNA, 19 nt, Artificial Sequence
  Description of Artificial Sequence: Synthetic oligonucleotide
uucaugaacuggauuuagg

SEQ ID NO: 2744357 - RNA, 19 nt, Artificial Sequence
  Description of Artificial Sequence: Synthetic oligonucleotide
caauuuggaggacaagucg

SEQ ID NO: 2744358 - RNA, 19 nt, Artificial Sequence
  Description of Artificial Sequence: Synthetic oligonucleotide
aaguguuaagaguuuauuu

SEQ ID NO: 2744359 - RNA, 19 nt, Artificial Sequence
  Description of Artificial Sequence: Synthetic oligonucleotide
gucguuagcgaccacacag

SEQ ID NO: 2744360 - RNA, 19 nt, Artificial Sequence
  Description of Artificial Sequence: Synthetic oligonucleotide
aaacugguggucccaacag

SEQ ID NO: 2744361 - RNA, 19 nt, Artificial Sequence
  Description of Artificial Sequence: Synthetic oligonucleotide
aauugaugauuguucauua

SEQ ID NO: 2744362 - RNA, 19 nt, Artificial Sequence
  Description of Artificial Sequence: Synthetic oligonucleotide
ucaguguugauaaauccau

SEQ ID NO: 2744363 - RNA, 19 nt, Artificial Sequence
  Description of Artificial Sequence: Synthetic oligonucleotide
uuucauuuacaacuaccac

SEQ ID NO: 2744364 - RNA, 19 nt, Artificial Sequence
  Description of Artificial Sequence: Synthetic oligonucleotide
gacaagaucugcuugcuga

SEQ ID NO: 2744365 - RNA, 19 nt, Artificial Sequence
  Description of Artificial Sequence: Synthetic oligonucleotide
ucgaauugaugauuguuca

SEQ ID NO: 2744366 - RNA, 19 nt, Artificial Sequence
  Description of Artificial Sequence: Synthetic oligonucleotide
agagugaaugaaucacuac

SEQ ID NO: 2744367 - RNA, 19 nt, Artificial Sequence
  Description of Artificial Sequence: Synthetic oligonucleotide
uuuaaucacauuucaugaa

SEQ ID NO: 2744368 - RNA, 19 nt, Artificial Sequence
  Description of Artificial Sequence: Synthetic oligonucleotide
aggaggauaacauuucagu

SEQ ID NO: 2744369 - RNA, 19 nt, Artificial Sequence
  Description of Artificial Sequence: Synthetic oligonucleotide
uuccagacucuccaaacag

SEQ ID NO: 2744370 - RNA, 19 nt, Artificial Sequence
  Description of Artificial Sequence: Synthetic oligonucleotide
ugauucagggaccacugug

SEQ ID NO: 2744371 - RNA, 19 nt, Artificial Sequence
  Description of Artificial Sequence: Synthetic oligonucleotide
uaccuguaaacauccagag

SEQ ID NO: 2744372 - RNA, 19 nt, Artificial Sequence
  Description of Artificial Sequence: Synthetic oligonucleotide
auucagggaccacugugcc

SEQ ID NO: 2744373 - RNA, 19 nt, Artificial Sequence
  Description of Artificial Sequence: Synthetic oligonucleotide
caauucgaauugaugauug

SEQ ID NO: 2744374 - RNA, 19 nt, Artificial Sequence
  Description of Artificial Sequence: Synthetic oligonucleotide
aaacgcgcuuuucaucgcg

SEQ ID NO: 2744375 - RNA, 19 nt, Artificial Sequence
  Description of Artificial Sequence: Synthetic oligonucleotide
aaaagauguccuucuuugu

SEQ ID NO: 2744376 - RNA, 19 nt, Artificial Sequence
  Description of Artificial Sequence: Synthetic oligonucleotide
ugaugacaagaucugcuug

SEQ ID NO: 2744377 - RNA, 19 nt, Artificial Sequence
  Description of Artificial Sequence: Synthetic oligonucleotide
ugccauaaacuuauuuuga

SEQ ID NO: 2744378 - RNA, 19 nt, Artificial Sequence
  Description of Artificial Sequence: Synthetic oligonucleotide
uuguucauuaacuuuucau

SEQ ID NO: 2744379 - RNA, 19 nt, Artificial Sequence
  Description of Artificial Sequence: Synthetic oligonucleotide
acuaccacaaguggcuugc

SEQ ID NO: 2744380 - RNA, 19 nt, Artificial Sequence
  Description of Artificial Sequence: Synthetic oligonucleotide
ugaaugaaucacuacugaa

SEQ ID NO: 2744381 - RNA, 19 nt, Artificial Sequence
  Description of Artificial Sequence: Synthetic oligonucleotide
auuucaguguugauaaauc

SEQ ID NO: 2744382 - RNA, 19 nt, Artificial Sequence
  Description of Artificial Sequence: Synthetic oligonucleotide
auccauugacuguaacagc

SEQ ID NO: 2744383 - RNA, 19 nt, Artificial Sequence
  Description of Artificial Sequence: Synthetic oligonucleotide
aaugauucagggaccacug

SEQ ID NO: 2744384 - RNA, 19 nt, Artificial Sequence
  Description of Artificial Sequence: Synthetic oligonucleotide
uugacuguaacagcccagg

SEQ ID NO: 2744385 - RNA, 19 nt, Artificial Sequence
  Description of Artificial Sequence: Synthetic oligonucleotide
uguaacagcccaggaagcg

SEQ ID NO: 2744386 - RNA, 19 nt, Artificial Sequence
  Description of Artificial Sequence: Synthetic oligonucleotide
ugauuuaaucacauuucau

SEQ ID NO: 2744387 - RNA, 19 nt, Artificial Sequence
  Description of Artificial Sequence: Synthetic oligonucleotide
gguacaauagaaaagaugu

SEQ ID NO: 2744388 - RNA, 19 nt, Artificial Sequence
  Description of Artificial Sequence: Synthetic oligonucleotide
uuuccagacucuccaaaca

SEQ ID NO: 2744389 - RNA, 19 nt, Artificial Sequence
  Description of Artificial Sequence: Synthetic oligonucleotide
ucguuagcgaccacacagg

SEQ ID NO: 2744390 - RNA, 19 nt, Artificial Sequence
  Description of Artificial Sequence: Synthetic oligonucleotide
uguaauccaacaacuuuau

SEQ ID NO: 2744391 - RNA, 19 nt, Artificial Sequence
  Description of Artificial Sequence: Synthetic oligonucleotide
ugaaucacuacugaaugau

SEQ ID NO: 2744392 - RNA, 19 nt, Artificial Sequence
  Description of Artificial Sequence: Synthetic oligonucleotide
gauaaauccauugacugua

SEQ ID NO: 2744393 - RNA, 19 nt, Artificial Sequence
  Description of Artificial Sequence: Synthetic oligonucleotide
uaaacuuauuuugauuuaa

SEQ ID NO: 2744394 - RNA, 19 nt, Artificial Sequence
  Description of Artificial Sequence: Synthetic oligonucleotide
ugcuuugccaauucgaauu

SEQ ID NO: 2744395 - RNA, 19 nt, Artificial Sequence
  Description of Artificial Sequence: Synthetic oligonucleotide
aauucgaauugaugauugu

SEQ ID NO: 2744396 - RNA, 19 nt, Artificial Sequence
  Description of Artificial Sequence: Synthetic oligonucleotide
ccaacagucacaaacgcgc

SEQ ID NO: 2744397 - RNA, 19 nt, Artificial Sequence
  Description of Artificial Sequence: Synthetic oligonucleotide
uuuuguaauccaacaacuu

SEQ ID NO: 2744398 - RNA, 19 nt, Artificial Sequence
  Description of Artificial Sequence: Synthetic oligonucleotide
uuuaaaguguuaagaguuu

SEQ ID NO: 2744399 - RNA, 19 nt, Artificial Sequence
  Description of Artificial Sequence: Synthetic oligonucleotide
ucuacaaauacaugccaua

SEQ ID NO: 2744400 - RNA, 19 nt, Artificial Sequence
  Description of Artificial Sequence: Synthetic oligonucleotide
agugaaugaaucacuacug

SEQ ID NO: 2744401 - RNA, 19 nt, Artificial Sequence
  Description of Artificial Sequence: Synthetic oligonucleotide
aggacaagucgguuguaac

SEQ ID NO: 2744402 - RNA, 19 nt, Artificial Sequence
  Description of Artificial Sequence: Synthetic oligonucleotide
uaacauuucaguguugaua

SEQ ID NO: 2744403 - RNA, 19 nt, Artificial Sequence
  Description of Artificial Sequence: Synthetic oligonucleotide
ucuuugugcaacugcuuug

SEQ ID NO: 2744404 - RNA, 19 nt, Artificial Sequence
  Description of Artificial Sequence: Synthetic oligonucleotide
agucgguuguaaccaagac

SEQ ID NO: 2744405 - RNA, 19 nt, Artificial Sequence
  Description of Artificial Sequence: Synthetic oligonucleotide
uccaacaacuuuauccaaa

SEQ ID NO: 2744406 - RNA, 19 nt, Artificial Sequence
  Description of Artificial Sequence: Synthetic oligonucleotide
uccuucuuugugcaacugc

SEQ ID NO: 2744407 - RNA, 19 nt, Artificial Sequence
  Description of Artificial Sequence: Synthetic oligonucleotide
uuguaaccaagacucuuga

SEQ ID NO: 2744408 - RNA, 19 nt, Artificial Sequence
  Description of Artificial Sequence: Synthetic oligonucleotide
uuggaggacaagucgguug

SEQ ID NO: 2744409 - RNA, 19 nt, Artificial Sequence
  Description of Artificial Sequence: Synthetic oligonucleotide
uugccaauucgaauugaug

SEQ ID NO: 2744410 - RNA, 19 nt, Artificial Sequence
  Description of Artificial Sequence: Synthetic oligonucleotide
accaauuuggaggacaagu

SEQ ID NO: 2744411 - RNA, 19 nt, Artificial Sequence
  Description of Artificial Sequence: Synthetic oligonucleotide
ucuaccaauuuggaggaca

SEQ ID NO: 2744412 - RNA, 19 nt, Artificial Sequence
  Description of Artificial Sequence: Synthetic oligonucleotide
cacuacugaaugauucagg

SEQ ID NO: 2744413 - RNA, 19 nt, Artificial Sequence
  Description of Artificial Sequence: Synthetic oligonucleotide
acugaaugauucagggacc

SEQ ID NO: 2744414 - RNA, 19 nt, Artificial Sequence
  Description of Artificial Sequence: Synthetic oligonucleotide
aggauaacauuucaguguu

SEQ ID NO: 2744415 - RNA, 19 nt, Artificial Sequence
  Description of Artificial Sequence: Synthetic oligonucleotide
acaauagaaaagauguccu

SEQ ID NO: 2744416 - RNA, 19 nt, Artificial Sequence
  Description of Artificial Sequence: Synthetic oligonucleotide
uccagagugaaugaaucac

SEQ ID NO: 2744417 - RNA, 19 nt, Artificial Sequence
  Description of Artificial Sequence: Synthetic oligonucleotide
aucacuacugaaugauuca

SEQ ID NO: 2744418 - RNA, 19 nt, Artificial Sequence
  Description of Artificial Sequence: Synthetic oligonucleotide
ucacuacugaaugauucag

SEQ ID NO: 2744419 - RNA, 19 nt, Artificial Sequence
  Description of Artificial Sequence: Synthetic oligonucleotide
ggucccaacagucacaaac

SEQ ID NO: 2744420 - RNA, 19 nt, Artificial Sequence
  Description of Artificial Sequence: Synthetic oligonucleotide
ugcugcagguacaauagaa

SEQ ID NO: 2744421 - RNA, 19 nt, Artificial Sequence
  Description of Artificial Sequence: Synthetic oligonucleotide
uuugccaauucgaauugau

SEQ ID NO: 2744422 - RNA, 19 nt, Artificial Sequence
  Description of Artificial Sequence: Synthetic oligonucleotide
uggaggacaagucgguugu

SEQ ID NO: 2744423 - RNA, 19 nt, Artificial Sequence
  Description of Artificial Sequence: Synthetic oligonucleotide
ggaggauaacauuucagug

SEQ ID NO: 2744424 - RNA, 19 nt, Artificial Sequence
  Description of Artificial Sequence: Synthetic oligonucleotide
augauuguucauuaacuuu

SEQ ID NO: 2744425 - RNA, 19 nt, Artificial Sequence
  Description of Artificial Sequence: Synthetic oligonucleotide
cauccagagugaaugaauc

SEQ ID NO: 2744426 - RNA, 19 nt, Artificial Sequence
  Description of Artificial Sequence: Synthetic oligonucleotide
auccuuauaccuguaaaca

SEQ ID NO: 2744427 - RNA, 19 nt, Artificial Sequence
  Description of Artificial Sequence: Synthetic oligonucleotide
uccuuauaccuguaaacau

SEQ ID NO: 2744428 - RNA, 19 nt, Artificial Sequence
  Description of Artificial Sequence: Synthetic oligonucleotide
gaauccuuauaccuguaaa

SEQ ID NO: 2744429 - RNA, 19 nt, Artificial Sequence
  Description of Artificial Sequence: Synthetic oligonucleotide
aacuaccacaaguggcuug

SEQ ID NO: 2744430 - RNA, 19 nt, Artificial Sequence
  Description of Artificial Sequence: Synthetic oligonucleotide
uggauuuagggguauuuua

SEQ ID NO: 2744431 - RNA, 19 nt, Artificial Sequence
  Description of Artificial Sequence: Synthetic oligonucleotide
accaagacucuugaggauc

SEQ ID NO: 2744432 - RNA, 19 nt, Artificial Sequence
  Description of Artificial Sequence: Synthetic oligonucleotide
uucuuugugcaacugcuuu

SEQ ID NO: 2744433 - RNA, 19 nt, Artificial Sequence
  Description of Artificial Sequence: Synthetic oligonucleotide
gacucuugaggaucuggag

SEQ ID NO: 2744434 - RNA, 19 nt, Artificial Sequence
  Description of Artificial Sequence: Synthetic oligonucleotide
uagggguauuuuaaagugu

SEQ ID NO: 2744435 - RNA, 19 nt, Artificial Sequence
  Description of Artificial Sequence: Synthetic oligonucleotide
uaacagcccaggaagcgug

SEQ ID NO: 2744436 - RNA, 19 nt, Artificial Sequence
  Description of Artificial Sequence: Synthetic oligonucleotide
auaaacuuauuuugauuua

SEQ ID NO: 2744437 - RNA, 19 nt, Artificial Sequence
  Description of Artificial Sequence: Synthetic oligonucleotide
agaaaagauguccuucuuu

SEQ ID NO: 2744438 - RNA, 19 nt, Artificial Sequence
  Description of Artificial Sequence: Synthetic oligonucleotide
auguccuucuuugugcaac

SEQ ID NO: 2744439 - RNA, 19 nt, Artificial Sequence
  Description of Artificial Sequence: Synthetic oligonucleotide
cuuugugcaacugcuuugc

SEQ ID NO: 2744440 - RNA, 19 nt, Artificial Sequence
  Description of Artificial Sequence: Synthetic oligonucleotide
agguacaauagaaaagaug

SEQ ID NO: 2744441 - RNA, 19 nt, Artificial Sequence
  Description of Artificial Sequence: Synthetic oligonucleotide
acaggcgacgagcucgucg

SEQ ID NO: 2744442 - RNA, 19 nt, Artificial Sequence
  Description of Artificial Sequence: Synthetic oligonucleotide
augaaucacuacugaauga

SEQ ID NO: 2744443 - RNA, 19 nt, Artificial Sequence
  Description of Artificial Sequence: Synthetic oligonucleotide
ucccaacagucacaaacgc

SEQ ID NO: 2744444 - RNA, 19 nt, Artificial Sequence
  Description of Artificial Sequence: Synthetic oligonucleotide
guuguaaccaagacucuug

SEQ ID NO: 2744445 - RNA, 19 nt, Artificial Sequence
  Description of Artificial Sequence: Synthetic oligonucleotide
cacacaggcgacgagcucg

SEQ ID NO: 2744446 - RNA, 19 nt, Artificial Sequence
  Description of Artificial Sequence: Synthetic oligonucleotide
gacaagucgguuguaacca

SEQ ID NO: 2744447 - RNA, 19 nt, Artificial Sequence
  Description of Artificial Sequence: Synthetic oligonucleotide
gauuuagggguauuuuaaa

SEQ ID NO: 2744448 - RNA, 19 nt, Artificial Sequence
  Description of Artificial Sequence: Synthetic oligonucleotide
caggaggauaacauuucag

SEQ ID NO: 2744449 - RNA, 19 nt, Artificial Sequence
  Description of Artificial Sequence: Synthetic oligonucleotide
auaccuguaaacauccaga

SEQ ID NO: 2744450 - RNA, 19 nt, Artificial Sequence
  Description of Artificial Sequence: Synthetic oligonucleotide
uuaaaguguuaagaguuua

SEQ ID NO: 2744451 - RNA, 19 nt, Artificial Sequence
  Description of Artificial Sequence: Synthetic oligonucleotide
gucacaaacgcgcuuuuca

SEQ ID NO: 2744452 - RNA, 19 nt, Artificial Sequence
  Description of Artificial Sequence: Synthetic oligonucleotide
auacaugccauaaacuuau

SEQ ID NO: 2744453 - RNA, 19 nt, Artificial Sequence
  Description of Artificial Sequence: Synthetic oligonucleotide
aacugcuuugccaauucga

SEQ ID NO: 2744454 - RNA, 19 nt, Artificial Sequence
  Description of Artificial Sequence: Synthetic oligonucleotide
ugaacuggauuuaggggua

SEQ ID NO: 2744455 - RNA, 19 nt, Artificial Sequence
  Description of Artificial Sequence: Synthetic oligonucleotide
uuuucuggcuggccaggag

SEQ ID NO: 2744456 - RNA, 19 nt, Artificial Sequence
  Description of Artificial Sequence: Synthetic oligonucleotide
aacugguggucccaacagu

SEQ ID NO: 2744457 - RNA, 19 nt, Artificial Sequence
  Description of Artificial Sequence: Synthetic oligonucleotide
agauguccuucuuugugca

SEQ ID NO: 2744458 - RNA, 19 nt, Artificial Sequence
  Description of Artificial Sequence: Synthetic oligonucleotide
aacgcgcuuuucaucgcgc

SEQ ID NO: 2744459 - RNA, 19 nt, Artificial Sequence
  Description of Artificial Sequence: Synthetic oligonucleotide
gugaaugaaucacuacuga

SEQ ID NO: 2744460 - RNA, 19 nt, Artificial Sequence
  Description of Artificial Sequence: Synthetic oligonucleotide
ggacaagucgguuguaacc

SEQ ID NO: 2744461 - RNA, 19 nt, Artificial Sequence
  Description of Artificial Sequence: Synthetic oligonucleotide
uuauaccuguaaacaucca

SEQ ID NO: 2744462 - RNA, 19 nt, Artificial Sequence
  Description of Artificial Sequence: Synthetic oligonucleotide
gaugauuguucauuaacuu

SEQ ID NO: 2744463 - RNA, 19 nt, Artificial Sequence
  Description of Artificial Sequence: Synthetic oligonucleotide
gacuguaacagcccaggaa

SEQ ID NO: 2744464 - RNA, 19 nt, Artificial Sequence
  Description of Artificial Sequence: Synthetic oligonucleotide
gcagguacaauagaaaaga

SEQ ID NO: 2744465 - RNA, 19 nt, Artificial Sequence
  Description of Artificial Sequence: Synthetic oligonucleotide
cuguaacagcccaggaagc

SEQ ID NO: 2744466 - RNA, 19 nt, Artificial Sequence
  Description of Artificial Sequence: Synthetic oligonucleotide
gaaugaaucacuacugaau

SEQ ID NO: 2744467 - RNA, 19 nt, Artificial Sequence
  Description of Artificial Sequence: Synthetic oligonucleotide
gacgagcucgucgaaacug

SEQ ID NO: 2744468 - RNA, 19 nt, Artificial Sequence
  Description of Artificial Sequence: Synthetic oligonucleotide
uguaaacauccagagugaa

SEQ ID NO: 2744469 - RNA, 19 nt, Artificial Sequence
  Description of Artificial Sequence: Synthetic oligonucleotide
agaauccuuauaccuguaa

SEQ ID NO: 2744470 - RNA, 19 nt, Artificial Sequence
  Description of Artificial Sequence: Synthetic oligonucleotide
ugguggucccaacagucac

SEQ ID NO: 2744471 - RNA, 19 nt, Artificial Sequence
  Description of Artificial Sequence: Synthetic oligonucleotide
caagucgguuguaaccaag

SEQ ID NO: 2744472 - RNA, 19 nt, Artificial Sequence
  Description of Artificial Sequence: Synthetic oligonucleotide
cugucguuagcgaccacac

SEQ ID NO: 2744473 - RNA, 19 nt, Artificial Sequence
  Description of Artificial Sequence: Synthetic oligonucleotide
aaccaagacucuugaggau

SEQ ID NO: 2744474 - RNA, 19 nt, Artificial Sequence
  Description of Artificial Sequence: Synthetic oligonucleotide
aggaucuggaggcugucgu

SEQ ID NO: 2744475 - RNA, 19 nt, Artificial Sequence
  Description of Artificial Sequence: Synthetic oligonucleotide
ucgucgaaacugguggucc

SEQ ID NO: 2744476 - RNA, 19 nt, Artificial Sequence
  Description of Artificial Sequence: Synthetic oligonucleotide
ccuuauaccuguaaacauc

SEQ ID NO: 2744477 - RNA, 19 nt, Artificial Sequence
  Description of Artificial Sequence: Synthetic oligonucleotide
caugccauaaacuuauuuu

SEQ ID NO: 2744478 - RNA, 19 nt, Artificial Sequence
  Description of Artificial Sequence: Synthetic oligonucleotide
cugcagguacaauagaaaa

SEQ ID NO: 2744479 - RNA, 19 nt, Artificial Sequence
  Description of Artificial Sequence: Synthetic oligonucleotide
guuagcgaccacacaggcg

SEQ ID NO: 2744480 - RNA, 19 nt, Artificial Sequence
  Description of Artificial Sequence: Synthetic oligonucleotide
ugcguggcugaugacaaga

SEQ ID NO: 2744481 - RNA, 19 nt, Artificial Sequence
  Description of Artificial Sequence: Synthetic oligonucleotide
ugacuguaacagcccagga

SEQ ID NO: 2744482 - RNA, 19 nt, Artificial Sequence
  Description of Artificial Sequence: Synthetic oligonucleotide
aagucgguuguaaccaaga

SEQ ID NO: 2744483 - RNA, 19 nt, Artificial Sequence
  Description of Artificial Sequence: Synthetic oligonucleotide
aacagcccaggaagcgugc

SEQ ID NO: 2744484 - RNA, 19 nt, Artificial Sequence
  Description of Artificial Sequence: Synthetic oligonucleotide
aacagucacaaacgcgcuu

SEQ ID NO: 2744485 - RNA, 19 nt, Artificial Sequence
  Description of Artificial Sequence: Synthetic oligonucleotide
auucgaauugaugauuguu

SEQ ID NO: 2744486 - RNA, 19 nt, Artificial Sequence
  Description of Artificial Sequence: Synthetic oligonucleotide
accacaaguggcuugccuu

SEQ ID NO: 2744487 - RNA, 19 nt, Artificial Sequence
  Description of Artificial Sequence: Synthetic oligonucleotide
caacugcuuugccaauucg

SEQ ID NO: 2744488 - RNA, 19 nt, Artificial Sequence
  Description of Artificial Sequence: Synthetic oligonucleotide
gaccacacaggcgacgagc

SEQ ID NO: 2744489 - RNA, 19 nt, Artificial Sequence
  Description of Artificial Sequence: Synthetic oligonucleotide
accuguaaacauccagagu

SEQ ID NO: 2744490 - RNA, 19 nt, Artificial Sequence
  Description of Artificial Sequence: Synthetic oligonucleotide
uagaaaagauguccuucuu

SEQ ID NO: 2744491 - RNA, 19 nt, Artificial Sequence
  Description of Artificial Sequence: Synthetic oligonucleotide
gcuuccugcaccugcgugg

SEQ ID NO: 2744492 - RNA, 19 nt, Artificial Sequence
  Description of Artificial Sequence: Synthetic oligonucleotide
acaagaucugcuugcugaa

SEQ ID NO: 2744493 - RNA, 19 nt, Artificial Sequence
  Description of Artificial Sequence: Synthetic oligonucleotide
cauuaacuuuucauuuaca

SEQ ID NO: 2744494 - RNA, 19 nt, Artificial Sequence
  Description of Artificial Sequence: Synthetic oligonucleotide
uaccacaaguggcuugccu

SEQ ID NO: 2744495 - RNA, 19 nt, Artificial Sequence
  Description of Artificial Sequence: Synthetic oligonucleotide
cacaaacgcgcuuuucauc

SEQ ID NO: 2744496 - RNA, 19 nt, Artificial Sequence
  Description of Artificial Sequence: Synthetic oligonucleotide
aucuggaggcugucguuag

SEQ ID NO: 2744497 - RNA, 19 nt, Artificial Sequence
  Description of Artificial Sequence: Synthetic oligonucleotide
auugacuguaacagcccag

SEQ ID NO: 2744498 - RNA, 19 nt, Artificial Sequence
  Description of Artificial Sequence: Synthetic oligonucleotide
gaaugauucagggaccacu

SEQ ID NO: 2744499 - RNA, 19 nt, Artificial Sequence
  Description of Artificial Sequence: Synthetic oligonucleotide
ugucguuagcgaccacaca

SEQ ID NO: 2744500 - RNA, 19 nt, Artificial Sequence
  Description of Artificial Sequence: Synthetic oligonucleotide
gacucuccaaacagcuucc

SEQ ID NO: 2744501 - RNA, 19 nt, Artificial Sequence
  Description of Artificial Sequence: Synthetic oligonucleotide
ggaagcgugcugcagguac

SEQ ID NO: 2744502 - RNA, 19 nt, Artificial Sequence
  Description of Artificial Sequence: Synthetic oligonucleotide
cuacugaaugauucaggga

SEQ ID NO: 2744503 - RNA, 19 nt, Artificial Sequence
  Description of Artificial Sequence: Synthetic oligonucleotide
gaggaucuggaggcugucg

SEQ ID NO: 2744504 - RNA, 19 nt, Artificial Sequence
  Description of Artificial Sequence: Synthetic oligonucleotide
cauugacuguaacagccca

SEQ ID NO: 2744505 - RNA, 19 nt, Artificial Sequence
  Description of Artificial Sequence: Synthetic oligonucleotide
acgcgcuuuucaucgcgcg

SEQ ID NO: 2744506 - RNA, 19 nt, Artificial Sequence
  Description of Artificial Sequence: Synthetic oligonucleotide
ccaauuuggaggacaaguc

SEQ ID NO: 2744507 - RNA, 19 nt, Artificial Sequence
  Description of Artificial Sequence: Synthetic oligonucleotide
acugcuuugccaauucgaa

SEQ ID NO: 2744508 - RNA, 19 nt, Artificial Sequence
  Description of Artificial Sequence: Synthetic oligonucleotide
auuucaugaacuggauuua

SEQ ID NO: 2744509 - RNA, 19 nt, Artificial Sequence
  Description of Artificial Sequence: Synthetic oligonucleotide
acgagcucgucgaaacugg

SEQ ID NO: 2744510 - RNA, 19 nt, Artificial Sequence
  Description of Artificial Sequence: Synthetic oligonucleotide
agucacaaacgcgcuuuuc

SEQ ID NO: 2744511 - RNA, 19 nt, Artificial Sequence
  Description of Artificial Sequence: Synthetic oligonucleotide
gaccacugugccucuacca

SEQ ID NO: 2744512 - RNA, 19 nt, Artificial Sequence
  Description of Artificial Sequence: Synthetic oligonucleotide
cccaacagucacaaacgcg

SEQ ID NO: 2744513 - RNA, 19 nt, Artificial Sequence
  Description of Artificial Sequence: Synthetic oligonucleotide
auuuggaggacaagucggu

SEQ ID NO: 2744514 - RNA, 19 nt, Artificial Sequence
  Description of Artificial Sequence: Synthetic oligonucleotide
agggguauuuuaaaguguu

SEQ ID NO: 2744515 - RNA, 19 nt, Artificial Sequence
  Description of Artificial Sequence: Synthetic oligonucleotide
gucgguuguaaccaagacu

SEQ ID NO: 2744516 - RNA, 19 nt, Artificial Sequence
  Description of Artificial Sequence: Synthetic oligonucleotide
augauucagggaccacugu

SEQ ID NO: 2744517 - RNA, 19 nt, Artificial Sequence
  Description of Artificial Sequence: Synthetic oligonucleotide
guaauccaacaacuuuauc

SEQ ID NO: 2744518 - RNA, 19 nt, Artificial Sequence
  Description of Artificial Sequence: Synthetic oligonucleotide
cuugaggaucuggaggcug

SEQ ID NO: 2744519 - RNA, 19 nt, Artificial Sequence
  Description of Artificial Sequence: Synthetic oligonucleotide
agacucuugaggaucugga

SEQ ID NO: 2744520 - RNA, 19 nt, Artificial Sequence
  Description of Artificial Sequence: Synthetic oligonucleotide
cagagugaaugaaucacua

SEQ ID NO: 2744521 - RNA, 19 nt, Artificial Sequence
  Description of Artificial Sequence: Synthetic oligonucleotide
cuaccaauuuggaggacaa

SEQ ID NO: 2744522 - RNA, 19 nt, Artificial Sequence
  Description of Artificial Sequence: Synthetic oligonucleotide
gcuuugccaauucgaauug

SEQ ID NO: 2744523 - RNA, 19 nt, Artificial Sequence
  Description of Artificial Sequence: Synthetic oligonucleotide
acauccagagugaaugaau

SEQ ID NO: 2744524 - RNA, 19 nt, Artificial Sequence
  Description of Artificial Sequence: Synthetic oligonucleotide
auccaacaacuuuauccaa

SEQ ID NO: 2744525 - RNA, 19 nt, Artificial Sequence
  Description of Artificial Sequence: Synthetic oligonucleotide
cgugcugcagguacaauag

SEQ ID NO: 2744526 - RNA, 19 nt, Artificial Sequence
  Description of Artificial Sequence: Synthetic oligonucleotide
cugugccucuaccaauuug

SEQ ID NO: 2744527 - RNA, 19 nt, Artificial Sequence
  Description of Artificial Sequence: Synthetic oligonucleotide
ccaggaagcgugcugcagg

SEQ ID NO: 2744528 - RNA, 19 nt, Artificial Sequence
  Description of Artificial Sequence: Synthetic oligonucleotide
accugcguggcugaugaca

SEQ ID NO: 2744529 - RNA, 19 nt, Artificial Sequence
  Description of Artificial Sequence: Synthetic oligonucleotide
ggauuuagggguauuuuaa

SEQ ID NO: 2744530 - RNA, 19 nt, Artificial Sequence
  Description of Artificial Sequence: Synthetic oligonucleotide
cuuccugcaccugcguggc

SEQ ID NO: 2744531 - RNA, 19 nt, Artificial Sequence
  Description of Artificial Sequence: Synthetic oligonucleotide
acaagucgguuguaaccaa

SEQ ID NO: 2744532 - RNA, 19 nt, Artificial Sequence
  Description of Artificial Sequence: Synthetic oligonucleotide
ugaaugauucagggaccac

SEQ ID NO: 2744533 - RNA, 19 nt, Artificial Sequence
  Description of Artificial Sequence: Synthetic oligonucleotide
ccauugacuguaacagccc

SEQ ID NO: 2744534 - RNA, 19 nt, Artificial Sequence
  Description of Artificial Sequence: Synthetic oligonucleotide
cugaaugauucagggacca

SEQ ID NO: 2744535 - RNA, 19 nt, Artificial Sequence
  Description of Artificial Sequence: Synthetic oligonucleotide
caggcgacgagcucgucga

SEQ ID NO: 2744536 - RNA, 19 nt, Artificial Sequence
  Description of Artificial Sequence: Synthetic oligonucleotide
gagcucgucgaaacuggug

SEQ ID NO: 2744537 - RNA, 19 nt, Artificial Sequence
  Description of Artificial Sequence: Synthetic oligonucleotide
ggaggcugucguuagcgac

SEQ ID NO: 2744538 - RNA, 19 nt, Artificial Sequence
  Description of Artificial Sequence: Synthetic oligonucleotide
uuuggaggacaagucgguu

SEQ ID NO: 2744539 - RNA, 19 nt, Artificial Sequence
  Description of Artificial Sequence: Synthetic oligonucleotide
acauuucaguguugauaaa

SEQ ID NO: 2744540 - RNA, 19 nt, Artificial Sequence
  Description of Artificial Sequence: Synthetic oligonucleotide
gaggacaagucgguuguaa

SEQ ID NO: 2744541 - RNA, 19 nt, Artificial Sequence
  Description of Artificial Sequence: Synthetic oligonucleotide
gaucuggaggcugucguua

SEQ ID NO: 2744542 - RNA, 19 nt, Artificial Sequence
  Description of Artificial Sequence: Synthetic oligonucleotide
auaaauccauugacuguaa

SEQ ID NO: 2744543 - RNA, 19 nt, Artificial Sequence
  Description of Artificial Sequence: Synthetic oligonucleotide
agcgaccacacaggcgacg

SEQ ID NO: 2744544 - RNA, 19 nt, Artificial Sequence
  Description of Artificial Sequence: Synthetic oligonucleotide
cugguggucccaacaguca

SEQ ID NO: 2744545 - RNA, 19 nt, Artificial Sequence
  Description of Artificial Sequence: Synthetic oligonucleotide
accacacaggcgacgagcu

SEQ ID NO: 2744546 - RNA, 19 nt, Artificial Sequence
  Description of Artificial Sequence: Synthetic oligonucleotide
gaagcgugcugcagguaca

SEQ ID NO: 2744547 - RNA, 19 nt, Artificial Sequence
  Description of Artificial Sequence: Synthetic oligonucleotide
ucgaaacugguggucccaa

SEQ ID NO: 2744548 - RNA, 19 nt, Artificial Sequence
  Description of Artificial Sequence: Synthetic oligonucleotide
cucgucgaaacuggugguc

SEQ ID NO: 2744549 - RNA, 19 nt, Artificial Sequence
  Description of Artificial Sequence: Synthetic oligonucleotide
gcgacgagcucgucgaaac

SEQ ID NO: 2744550 - RNA, 19 nt, Artificial Sequence
  Description of Artificial Sequence: Synthetic oligonucleotide
aagcgugcugcagguacaa

SEQ ID NO: 2744551 - RNA, 19 nt, Artificial Sequence
  Description of Artificial Sequence: Synthetic oligonucleotide
ccaacaacuuuauccaaaa

SEQ ID NO: 2744552 - RNA, 19 nt, Artificial Sequence
  Description of Artificial Sequence: Synthetic oligonucleotide
caauagaaaagauguccuu

SEQ ID NO: 2744553 - RNA, 19 nt, Artificial Sequence
  Description of Artificial Sequence: Synthetic oligonucleotide
aagaauccuuauaccugua

SEQ ID NO: 2744554 - RNA, 19 nt, Artificial Sequence
  Description of Artificial Sequence: Synthetic oligonucleotide
uacaugccauaaacuuauu

SEQ ID NO: 2744555 - RNA, 19 nt, Artificial Sequence
  Description of Artificial Sequence: Synthetic oligonucleotide
ugcaccugcguggcugaug

SEQ ID NO: 2744556 - RNA, 19 nt, Artificial Sequence
  Description of Artificial Sequence: Synthetic oligonucleotide
gcaccugcguggcugauga

SEQ ID NO: 2744557 - RNA, 19 nt, Artificial Sequence
  Description of Artificial Sequence: Synthetic oligonucleotide
ccucuaccaauuuggagga

SEQ ID NO: 2744558 - RNA, 19 nt, Artificial Sequence
  Description of Artificial Sequence: Synthetic oligonucleotide
cuuugccaauucgaauuga

SEQ ID NO: 2744559 - RNA, 19 nt, Artificial Sequence
  Description of Artificial Sequence: Synthetic oligonucleotide
gcugucguuagcgaccaca

SEQ ID NO: 2744560 - RNA, 19 nt, Artificial Sequence
  Description of Artificial Sequence: Synthetic oligonucleotide
aggcugucguuagcgacca

SEQ ID NO: 2744561 - RNA, 19 nt, Artificial Sequence
  Description of Artificial Sequence: Synthetic oligonucleotide
gccauaaacuuauuuugau

SEQ ID NO: 2744562 - RNA, 19 nt, Artificial Sequence
  Description of Artificial Sequence: Synthetic oligonucleotide
uagcgaccacacaggcgac

SEQ ID NO: 2744563 - RNA, 19 nt, Artificial Sequence
  Description of Artificial Sequence: Synthetic oligonucleotide
guaacagcccaggaagcgu

SEQ ID NO: 2744564 - RNA, 19 nt, Artificial Sequence
  Description of Artificial Sequence: Synthetic oligonucleotide
cguuagcgaccacacaggc

SEQ ID NO: 2744565 - RNA, 19 nt, Artificial Sequence
  Description of Artificial Sequence: Synthetic oligonucleotide
guaaacauccagagugaau

SEQ ID NO: 2744566 - RNA, 19 nt, Artificial Sequence
  Description of Artificial Sequence: Synthetic oligonucleotide
gaaucacuacugaaugauu

SEQ ID NO: 2744567 - RNA, 19 nt, Artificial Sequence
  Description of Artificial Sequence: Synthetic oligonucleotide
guccuucuuugugcaacug

SEQ ID NO: 2744568 - RNA, 19 nt, Artificial Sequence
  Description of Artificial Sequence: Synthetic oligonucleotide
gucgaaacuggugguccca

SEQ ID NO: 2744569 - RNA, 19 nt, Artificial Sequence
  Description of Artificial Sequence: Synthetic oligonucleotide
ggauaacauuucaguguug

SEQ ID NO: 2744570 - RNA, 19 nt, Artificial Sequence
  Description of Artificial Sequence: Synthetic oligonucleotide
gccaauucgaauugaugau

SEQ ID NO: 2744571 - RNA, 19 nt, Artificial Sequence
  Description of Artificial Sequence: Synthetic oligonucleotide
cuaccacaaguggcuugcc

SEQ ID NO: 2744572 - RNA, 19 nt, Artificial Sequence
  Description of Artificial Sequence: Synthetic oligonucleotide
caagacucuugaggaucug

SEQ ID NO: 2744573 - RNA, 19 nt, Artificial Sequence
  Description of Artificial Sequence: Synthetic oligonucleotide
cagguacaauagaaaagau

SEQ ID NO: 2744574 - RNA, 19 nt, Artificial Sequence
  Description of Artificial Sequence: Synthetic oligonucleotide
caacagucacaaacgcgcu

SEQ ID NO: 2744575 - RNA, 19 nt, Artificial Sequence
  Description of Artificial Sequence: Synthetic oligonucleotide
gugccucuaccaauuugga

SEQ ID NO: 2744576 - RNA, 19 nt, Artificial Sequence
  Description of Artificial Sequence: Synthetic oligonucleotide
ccaggaggauaacauuuca

SEQ ID NO: 2744577 - RNA, 19 nt, Artificial Sequence
  Description of Artificial Sequence: Synthetic oligonucleotide
cucuaccaauuuggaggac

SEQ ID NO: 2744578 - RNA, 19 nt, Artificial Sequence
  Description of Artificial Sequence: Synthetic oligonucleotide
ccagagugaaugaaucacu

SEQ ID NO: 2744579 - RNA, 19 nt, Artificial Sequence
  Description of Artificial Sequence: Synthetic oligonucleotide
caggaagcgugcugcaggu

SEQ ID NO: 2744580 - RNA, 19 nt, Artificial Sequence
  Description of Artificial Sequence: Synthetic oligonucleotide
cugcuuugccaauucgaau

SEQ ID NO: 2744581 - RNA, 19 nt, Artificial Sequence
  Description of Artificial Sequence: Synthetic oligonucleotide
cuucuuugugcaacugcuu

SEQ ID NO: 2744582 - RNA, 19 nt, Artificial Sequence
  Description of Artificial Sequence: Synthetic oligonucleotide
ccauaaacuuauuuugauu

SEQ ID NO: 2744583 - RNA, 19 nt, Artificial Sequence
  Description of Artificial Sequence: Synthetic oligonucleotide
cgucgaaacuggugguccc

SEQ ID NO: 2744584 - RNA, 19 nt, Artificial Sequence
  Description of Artificial Sequence: Synthetic oligonucleotide
ccugcguggcugaugacaa

SEQ ID NO: 2744585 - RNA, 19 nt, Artificial Sequence
  Description of Artificial Sequence: Synthetic oligonucleotide
gguggucccaacagucaca

SEQ ID NO: 2744586 - RNA, 19 nt, Artificial Sequence
  Description of Artificial Sequence: Synthetic oligonucleotide
cuggauuuagggguauuuu

SEQ ID NO: 2744587 - RNA, 19 nt, Artificial Sequence
  Description of Artificial Sequence: Synthetic oligonucleotide
gguuguaaccaagacucuu

SEQ ID NO: 2744588 - RNA, 19 nt, Artificial Sequence
  Description of Artificial Sequence: Synthetic oligonucleotide
cgcgcuuuucaucgcgcgg

SEQ ID NO: 2744589 - RNA, 19 nt, Artificial Sequence
  Description of Artificial Sequence: Synthetic oligonucleotide
cguggcugaugacaagauc

SEQ ID NO: 2744590 - RNA, 19 nt, Artificial Sequence
  Description of Artificial Sequence: Synthetic oligonucleotide
ccaagacucuugaggaucu

SEQ ID NO: 2744591 - RNA, 19 nt, Artificial Sequence
  Description of Artificial Sequence: Synthetic oligonucleotide
cuggcuggccaggaggaua

SEQ ID NO: 2744592 - RNA, 19 nt, Artificial Sequence
  Description of Artificial Sequence: Synthetic oligonucleotide
ggccaggaggauaacauuu

SEQ ID NO: 2744593 - RNA, 19 nt, Artificial Sequence
  Description of Artificial Sequence: Synthetic oligonucleotide
gaacuggauuuagggguau

SEQ ID NO: 2744594 - RNA, 19 nt, Artificial Sequence
  Description of Artificial Sequence: Synthetic oligonucleotide
gcgaccacacaggcgacga

SEQ ID NO: 2744595 - RNA, 19 nt, Artificial Sequence
  Description of Artificial Sequence: Synthetic oligonucleotide
gggguauuuuaaaguguua

SEQ ID NO: 2744596 - RNA, 19 nt, Artificial Sequence
  Description of Artificial Sequence: Synthetic oligonucleotide
cgaaacugguggucccaac

SEQ ID NO: 2744597 - RNA, 19 nt, Artificial Sequence
  Description of Artificial Sequence: Synthetic oligonucleotide
caccugcguggcugaugac

SEQ ID NO: 2744598 - RNA, 19 nt, Artificial Sequence
  Description of Artificial Sequence: Synthetic oligonucleotide
aggcgacgagcucgucgaa

SEQ ID NO: 2744599 - RNA, 19 nt, Artificial Sequence
  Description of Artificial Sequence: Synthetic oligonucleotide
cccaggaagcgugcugcag

SEQ ID NO: 2744600 - RNA, 19 nt, Artificial Sequence
  Description of Artificial Sequence: Synthetic oligonucleotide
agcgugcugcagguacaau

SEQ ID NO: 2744601 - RNA, 19 nt, Artificial Sequence
  Description of Artificial Sequence: Synthetic oligonucleotide
gcucgucgaaacugguggu

SEQ ID NO: 2744602 - RNA, 19 nt, Artificial Sequence
  Description of Artificial Sequence: Synthetic oligonucleotide
aggaagcgugcugcaggua

SEQ ID NO: 2744603 - RNA, 19 nt, Artificial Sequence
  Description of Artificial Sequence: Synthetic oligonucleotide
ccaauucgaauugaugauu

SEQ ID NO: 2744604 - RNA, 19 nt, Artificial Sequence
  Description of Artificial Sequence: Synthetic oligonucleotide
ggaucuggaggcugucguu

SEQ ID NO: 2744605 - RNA, 19 nt, Artificial Sequence
  Description of Artificial Sequence: Synthetic oligonucleotide
ggcgacgagcucgucgaaa

SEQ ID NO: 2744606 - RNA, 19 nt, Artificial Sequence
  Description of Artificial Sequence: Synthetic oligonucleotide
gugcaacugcuuugccaau

SEQ ID NO: 2744607 - RNA, 19 nt, Artificial Sequence
  Description of Artificial Sequence: Synthetic oligonucleotide
ccacacaggcgacgagcuc

SEQ ID NO: 2744608 - RNA, 19 nt, Artificial Sequence
  Description of Artificial Sequence: Synthetic oligonucleotide
gcccaggaagcgugcugca

SEQ ID NO: 2744609 - RNA, 19 nt, Artificial Sequence
  Description of Artificial Sequence: Synthetic oligonucleotide
cgaauugaugauuguucau

SEQ ID NO: 2744610 - RNA, 19 nt, Artificial Sequence
  Description of Artificial Sequence: Synthetic oligonucleotide
caacuaccacaaguggcuu

SEQ ID NO: 2744611 - RNA, 19 nt, Artificial Sequence
  Description of Artificial Sequence: Synthetic oligonucleotide
cgaccacacaggcgacgag

SEQ ID NO: 2744612 - RNA, 19 nt, Artificial Sequence
  Description of Artificial Sequence: Synthetic oligonucleotide
cacaggcgacgagcucguc

SEQ ID NO: 2744613 - RNA, 19 nt, Artificial Sequence
  Description of Artificial Sequence: Synthetic oligonucleotide
cacaaguggcuugccuuuu

SEQ ID NO: 2744614 - RNA, 19 nt, Artificial Sequence
  Description of Artificial Sequence: Synthetic oligonucleotide
ggcugucguuagcgaccac

SEQ ID NO: 2744615 - RNA, 19 nt, Artificial Sequence
  Description of Artificial Sequence: Synthetic oligonucleotide
gcguggcugaugacaagau

SEQ ID NO: 2744616 - RNA, 19 nt, Artificial Sequence
  Description of Artificial Sequence: Synthetic oligonucleotide
cgguuguaaccaagacucu

SEQ ID NO: 2744617 - RNA, 19 nt, Artificial Sequence
  Description of Artificial Sequence: Synthetic oligonucleotide
cgagcucgucgaaacuggu

SEQ ID NO: 2744618 - RNA, 19 nt, Artificial Sequence
  Description of Artificial Sequence: Synthetic oligonucleotide
cgacgagcucgucgaaacu

SEQ ID NO: 2744619 - RNA, 19 nt, Artificial Sequence
  Description of Artificial Sequence: Synthetic oligonucleotide
cugcaccugcguggcugau

SEQ ID NO: 2744620 - RNA, 19 nt, Artificial Sequence
  Description of Artificial Sequence: Synthetic oligonucleotide
aaauauaccaccaaagucc

SEQ ID NO: 2744621 - RNA, 19 nt, Artificial Sequence
  Description of Artificial Sequence: Synthetic oligonucleotide
augagauguccuuauaggc

SEQ ID NO: 2744622 - RNA, 19 nt, Artificial Sequence
  Description of Artificial Sequence: Synthetic oligonucleotide
ugaaauauaccaccaaagu

SEQ ID NO: 2744623 - RNA, 19 nt, Artificial Sequence
  Description of Artificial Sequence: Synthetic oligonucleotide
gaaguauaaguagucaugg

SEQ ID NO: 2744624 - RNA, 19 nt, Artificial Sequence
  Description of Artificial Sequence: Synthetic oligonucleotide
ucuaccagaaaguccaggg

SEQ ID NO: 2744625 - RNA, 19 nt, Artificial Sequence
  Description of Artificial Sequence: Synthetic oligonucleotide
auacuggugacauugacug

SEQ ID NO: 2744626 - RNA, 19 nt, Artificial Sequence
  Description of Artificial Sequence: Synthetic oligonucleotide
aauauuagguuuccucuug

SEQ ID NO: 2744627 - RNA, 19 nt, Artificial Sequence
  Description of Artificial Sequence: Synthetic oligonucleotide
ugaaucugcucauaccucg

SEQ ID NO: 2744628 - RNA, 19 nt, Artificial Sequence
  Description of Artificial Sequence: Synthetic oligonucleotide
uuagguuuccucuugccag

SEQ ID NO: 2744629 - RNA, 19 nt, Artificial Sequence
  Description of Artificial Sequence: Synthetic oligonucleotide
agaauauuagguuuccucu

SEQ ID NO: 2744630 - RNA, 19 nt, Artificial Sequence
  Description of Artificial Sequence: Synthetic oligonucleotide
aaggugaaucugcucauac

SEQ ID NO: 2744631 - RNA, 19 nt, Artificial Sequence
  Description of Artificial Sequence: Synthetic oligonucleotide
uauaaguagucauggaugu

SEQ ID NO: 2744632 - RNA, 19 nt, Artificial Sequence
  Description of Artificial Sequence: Synthetic oligonucleotide
cuuauaggcccuaaggaag

SEQ ID NO: 2744633 - RNA, 19 nt, Artificial Sequence
  Description of Artificial Sequence: Synthetic oligonucleotide
caugagauguccuuauagg

SEQ ID NO: 2744634 - RNA, 19 nt, Artificial Sequence
  Description of Artificial Sequence: Synthetic oligonucleotide
uugacugggauagagauga

SEQ ID NO: 2744635 - RNA, 19 nt, Artificial Sequence
  Description of Artificial Sequence: Synthetic oligonucleotide
uuauaggcccuaaggaagg

SEQ ID NO: 2744636 - RNA, 19 nt, Artificial Sequence
  Description of Artificial Sequence: Synthetic oligonucleotide
uaccagaaaguccagggag

SEQ ID NO: 2744637 - RNA, 19 nt, Artificial Sequence
  Description of Artificial Sequence: Synthetic oligonucleotide
ugugaaauauaccaccaaa

SEQ ID NO: 2744638 - RNA, 19 nt, Artificial Sequence
  Description of Artificial Sequence: Synthetic oligonucleotide
acugggauagagaugaugg

SEQ ID NO: 2744639 - RNA, 19 nt, Artificial Sequence
  Description of Artificial Sequence: Synthetic oligonucleotide
aguauaaguagucauggau

SEQ ID NO: 2744640 - RNA, 19 nt, Artificial Sequence
  Description of Artificial Sequence: Synthetic oligonucleotide
ugugaagauguaucgaaug

SEQ ID NO: 2744641 - RNA, 19 nt, Artificial Sequence
  Description of Artificial Sequence: Synthetic oligonucleotide
ugcagcagcucaaagguag

SEQ ID NO: 2744642 - RNA, 19 nt, Artificial Sequence
  Description of Artificial Sequence: Synthetic oligonucleotide
cuaaggaagggaaagccag

SEQ ID NO: 2744643 - RNA, 19 nt, Artificial Sequence
  Description of Artificial Sequence: Synthetic oligonucleotide
aagguagggauacugguga

SEQ ID NO: 2744644 - RNA, 19 nt, Artificial Sequence
  Description of Artificial Sequence: Synthetic oligonucleotide
agcacuuggaaguauaagu

SEQ ID NO: 2744645 - RNA, 19 nt, Artificial Sequence
  Description of Artificial Sequence: Synthetic oligonucleotide
uguagcuggaacuuggggu

SEQ ID NO: 2744646 - RNA, 19 nt, Artificial Sequence
  Description of Artificial Sequence: Synthetic oligonucleotide
cucuccaaacuccaaaugg

SEQ ID NO: 2744647 - RNA, 19 nt, Artificial Sequence
  Description of Artificial Sequence: Synthetic oligonucleotide
ucuccaaacuccaaauggc

SEQ ID NO: 2744648 - RNA, 19 nt, Artificial Sequence
  Description of Artificial Sequence: Synthetic oligonucleotide
auauuagguuuccucuugc

SEQ ID NO: 2744649 - RNA, 19 nt, Artificial Sequence
  Description of Artificial Sequence: Synthetic oligonucleotide
uauaccaccaaaguccuug

SEQ ID NO: 2744650 - RNA, 19 nt, Artificial Sequence
  Description of Artificial Sequence: Synthetic oligonucleotide
gaagccguuacugaguucc

SEQ ID NO: 2744651 - RNA, 19 nt, Artificial Sequence
  Description of Artificial Sequence: Synthetic oligonucleotide
uccuuauaggcccuaagga

SEQ ID NO: 2744652 - RNA, 19 nt, Artificial Sequence
  Description of Artificial Sequence: Synthetic oligonucleotide
aagauguaucgaauguccc

SEQ ID NO: 2744653 - RNA, 19 nt, Artificial Sequence
  Description of Artificial Sequence: Synthetic oligonucleotide
ucgugugaaauauaccacc

SEQ ID NO: 2744654 - RNA, 19 nt, Artificial Sequence
  Description of Artificial Sequence: Synthetic oligonucleotide
aaucaccuguagcuggaac

SEQ ID NO: 2744655 - RNA, 19 nt, Artificial Sequence
  Description of Artificial Sequence: Synthetic oligonucleotide
cuuuucuaccagaaagucc

SEQ ID NO: 2744656 - RNA, 19 nt, Artificial Sequence
  Description of Artificial Sequence: Synthetic oligonucleotide
uacugaguuccccacaggc

SEQ ID NO: 2744657 - RNA, 19 nt, Artificial Sequence
  Description of Artificial Sequence: Synthetic oligonucleotide
agagcgucggaucauguag

SEQ ID NO: 2744658 - RNA, 19 nt, Artificial Sequence
  Description of Artificial Sequence: Synthetic oligonucleotide
agcaggaacaaggugaauc

SEQ ID NO: 2744659 - RNA, 19 nt, Artificial Sequence
  Description of Artificial Sequence: Synthetic oligonucleotide
ucauggaugugcaagccgu

SEQ ID NO: 2744660 - RNA, 19 nt, Artificial Sequence
  Description of Artificial Sequence: Synthetic oligonucleotide
guccuuauaggcccuaagg

SEQ ID NO: 2744661 - RNA, 19 nt, Artificial Sequence
  Description of Artificial Sequence: Synthetic oligonucleotide
acuggugacauugacuggg

SEQ ID NO: 2744662 - RNA, 19 nt, Artificial Sequence
  Description of Artificial Sequence: Synthetic oligonucleotide
cagaauauuagguuuccuc

SEQ ID NO: 2744663 - RNA, 19 nt, Artificial Sequence
  Description of Artificial Sequence: Synthetic oligonucleotide
agaaaguccagggagguug

SEQ ID NO: 2744664 - RNA, 19 nt, Artificial Sequence
  Description of Artificial Sequence: Synthetic oligonucleotide
cagagcacgagacagcacc

SEQ ID NO: 2744665 - RNA, 19 nt, Artificial Sequence
  Description of Artificial Sequence: Synthetic oligonucleotide
guuacugaguuccccacag

SEQ ID NO: 2744666 - RNA, 19 nt, Artificial Sequence
  Description of Artificial Sequence: Synthetic oligonucleotide
aauauaccaccaaaguccu

SEQ ID NO: 2744667 - RNA, 19 nt, Artificial Sequence
  Description of Artificial Sequence: Synthetic oligonucleotide
agcucaaagguagggauac

SEQ ID NO: 2744668 - RNA, 19 nt, Artificial Sequence
  Description of Artificial Sequence: Synthetic oligonucleotide
auuagguuuccucuugcca

SEQ ID NO: 2744669 - RNA, 19 nt, Artificial Sequence
  Description of Artificial Sequence: Synthetic oligonucleotide
guagucauggaugugcaag

SEQ ID NO: 2744670 - RNA, 19 nt, Artificial Sequence
  Description of Artificial Sequence: Synthetic oligonucleotide
cuuggaaguauaaguaguc

SEQ ID NO: 2744671 - RNA, 19 nt, Artificial Sequence
  Description of Artificial Sequence: Synthetic oligonucleotide
uggaccgcgacgcacgcgg

SEQ ID NO: 2744672 - RNA, 19 nt, Artificial Sequence
  Description of Artificial Sequence: Synthetic oligonucleotide
uguaucgaauguccccagg

SEQ ID NO: 2744673 - RNA, 19 nt, Artificial Sequence
  Description of Artificial Sequence: Synthetic oligonucleotide
aaguauaaguagucaugga

SEQ ID NO: 2744674 - RNA, 19 nt, Artificial Sequence
  Description of Artificial Sequence: Synthetic oligonucleotide
aagccguggaccgcgacgc

SEQ ID NO: 2744675 - RNA, 19 nt, Artificial Sequence
  Description of Artificial Sequence: Synthetic oligonucleotide
uaccucgugugaaauauac

SEQ ID NO: 2744676 - RNA, 19 nt, Artificial Sequence
  Description of Artificial Sequence: Synthetic oligonucleotide
uggaaguauaaguagucau

SEQ ID NO: 2744677 - RNA, 19 nt, Artificial Sequence
  Description of Artificial Sequence: Synthetic oligonucleotide
uccaaauggcagaauauua

SEQ ID NO: 2744678 - RNA, 19 nt, Artificial Sequence
  Description of Artificial Sequence: Synthetic oligonucleotide
uggaugaagaagccguuac

SEQ ID NO: 2744679 - RNA, 19 nt, Artificial Sequence
  Description of Artificial Sequence: Synthetic oligonucleotide
agggauacuggugacauug

SEQ ID NO: 2744680 - RNA, 19 nt, Artificial Sequence
  Description of Artificial Sequence: Synthetic oligonucleotide
gacauugacugggauagag

SEQ ID NO: 2744681 - RNA, 19 nt, Artificial Sequence
  Description of Artificial Sequence: Synthetic oligonucleotide
ucgaauguccccaggacuc

SEQ ID NO: 2744682 - RNA, 19 nt, Artificial Sequence
  Description of Artificial Sequence: Synthetic oligonucleotide
uauuagguuuccucuugcc

SEQ ID NO: 2744683 - RNA, 19 nt, Artificial Sequence
  Description of Artificial Sequence: Synthetic oligonucleotide
aaagguagggauacuggug

SEQ ID NO: 2744684 - RNA, 19 nt, Artificial Sequence
  Description of Artificial Sequence: Synthetic oligonucleotide
agguucagcaggaacaagg

SEQ ID NO: 2744685 - RNA, 19 nt, Artificial Sequence
  Description of Artificial Sequence: Synthetic oligonucleotide
cauguagccccuuuccacc

SEQ ID NO: 2744686 - RNA, 19 nt, Artificial Sequence
  Description of Artificial Sequence: Synthetic oligonucleotide
aucaccuguagcuggaacu

SEQ ID NO: 2744687 - RNA, 19 nt, Artificial Sequence
  Description of Artificial Sequence: Synthetic oligonucleotide
uagucauggaugugcaagc

SEQ ID NO: 2744688 - RNA, 19 nt, Artificial Sequence
  Description of Artificial Sequence: Synthetic oligonucleotide
agcacgagacagcaccagc

SEQ ID NO: 2744689 - RNA, 19 nt, Artificial Sequence
  Description of Artificial Sequence: Synthetic oligonucleotide
ucauguagccccuuuccac

SEQ ID NO: 2744690 - RNA, 19 nt, Artificial Sequence
  Description of Artificial Sequence: Synthetic oligonucleotide
ucugcucauaccucgugug

SEQ ID NO: 2744691 - RNA, 19 nt, Artificial Sequence
  Description of Artificial Sequence: Synthetic oligonucleotide
aagccagugguguggcuuc

SEQ ID NO: 2744692 - RNA, 19 nt, Artificial Sequence
  Description of Artificial Sequence: Synthetic oligonucleotide
gaugauggcccaugguagc

SEQ ID NO: 2744693 - RNA, 19 nt, Artificial Sequence
  Description of Artificial Sequence: Synthetic oligonucleotide
uaucgaauguccccaggac

SEQ ID NO: 2744694 - RNA, 19 nt, Artificial Sequence
  Description of Artificial Sequence: Synthetic oligonucleotide
augugcaagccguggaccg

SEQ ID NO: 2744695 - RNA, 19 nt, Artificial Sequence
  Description of Artificial Sequence: Synthetic oligonucleotide
gauguaucgaaugucccca

SEQ ID NO: 2744696 - RNA, 19 nt, Artificial Sequence
  Description of Artificial Sequence: Synthetic oligonucleotide
aaucugcucauaccucgug

SEQ ID NO: 2744697 - RNA, 19 nt, Artificial Sequence
  Description of Artificial Sequence: Synthetic oligonucleotide
uccagagagcgucggauca

SEQ ID NO: 2744698 - RNA, 19 nt, Artificial Sequence
  Description of Artificial Sequence: Synthetic oligonucleotide
gagaugauggcccauggua

SEQ ID NO: 2744699 - RNA, 19 nt, Artificial Sequence
  Description of Artificial Sequence: Synthetic oligonucleotide
acggcucaucuccagggcc

SEQ ID NO: 2744700 - RNA, 19 nt, Artificial Sequence
  Description of Artificial Sequence: Synthetic oligonucleotide
aggacucagcacuuggaag

SEQ ID NO: 2744701 - RNA, 19 nt, Artificial Sequence
  Description of Artificial Sequence: Synthetic oligonucleotide
auggcagaauauuagguuu

SEQ ID NO: 2744702 - RNA, 19 nt, Artificial Sequence
  Description of Artificial Sequence: Synthetic oligonucleotide
caccagagcgaucuggucc

SEQ ID NO: 2744703 - RNA, 19 nt, Artificial Sequence
  Description of Artificial Sequence: Synthetic oligonucleotide
agcgucggaucauguagcc

SEQ ID NO: 2744704 - RNA, 19 nt, Artificial Sequence
  Description of Artificial Sequence: Synthetic oligonucleotide
aucgaauguccccaggacu

SEQ ID NO: 2744705 - RNA, 19 nt, Artificial Sequence
  Description of Artificial Sequence: Synthetic oligonucleotide
augaagaagccguuacuga

SEQ ID NO: 2744706 - RNA, 19 nt, Artificial Sequence
  Description of Artificial Sequence: Synthetic oligonucleotide
uuggaaguauaaguaguca

SEQ ID NO: 2744707 - RNA, 19 nt, Artificial Sequence
  Description of Artificial Sequence: Synthetic oligonucleotide
acugaguuccccacaggcc

SEQ ID NO: 2744708 - RNA, 19 nt, Artificial Sequence
  Description of Artificial Sequence: Synthetic oligonucleotide
ucucucuccaaacuccaaa

SEQ ID NO: 2744709 - RNA, 19 nt, Artificial Sequence
  Description of Artificial Sequence: Synthetic oligonucleotide
uguccuuauaggcccuaag

SEQ ID NO: 2744710 - RNA, 19 nt, Artificial Sequence
  Description of Artificial Sequence: Synthetic oligonucleotide
aagaagccguuacugaguu

SEQ ID NO: 2744711 - RNA, 19 nt, Artificial Sequence
  Description of Artificial Sequence: Synthetic oligonucleotide
cucgugugaaauauaccac

SEQ ID NO: 2744712 - RNA, 19 nt, Artificial Sequence
  Description of Artificial Sequence: Synthetic oligonucleotide
gucauggaugugcaagccg

SEQ ID NO: 2744713 - RNA, 19 nt, Artificial Sequence
  Description of Artificial Sequence: Synthetic oligonucleotide
agcgaucugguccuggaug

SEQ ID NO: 2744714 - RNA, 19 nt, Artificial Sequence
  Description of Artificial Sequence: Synthetic oligonucleotide
uuggggucagcuuuucuac

SEQ ID NO: 2744715 - RNA, 19 nt, Artificial Sequence
  Description of Artificial Sequence: Synthetic oligonucleotide
uuacugaguuccccacagg

SEQ ID NO: 2744716 - RNA, 19 nt, Artificial Sequence
  Description of Artificial Sequence: Synthetic oligonucleotide
guagcuggaacuugggguc

SEQ ID NO: 2744717 - RNA, 19 nt, Artificial Sequence
  Description of Artificial Sequence: Synthetic oligonucleotide
aaguccuuggcaggcgugg

SEQ ID NO: 2744718 - RNA, 19 nt, Artificial Sequence
  Description of Artificial Sequence: Synthetic oligonucleotide
ugguagcccaugcuguucc

SEQ ID NO: 2744719 - RNA, 19 nt, Artificial Sequence
  Description of Artificial Sequence: Synthetic oligonucleotide
agaugauggcccaugguag

SEQ ID NO: 2744720 - RNA, 19 nt, Artificial Sequence
  Description of Artificial Sequence: Synthetic oligonucleotide
aauguccccaggacucagc

SEQ ID NO: 2744721 - RNA, 19 nt, Artificial Sequence
  Description of Artificial Sequence: Synthetic oligonucleotide
uggcagaauauuagguuuc

SEQ ID NO: 2744722 - RNA, 19 nt, Artificial Sequence
  Description of Artificial Sequence: Synthetic oligonucleotide
acuuggaaguauaaguagu

SEQ ID NO: 2744723 - RNA, 19 nt, Artificial Sequence
  Description of Artificial Sequence: Synthetic oligonucleotide
agugaaucaccuguagcug

SEQ ID NO: 2744724 - RNA, 19 nt, Artificial Sequence
  Description of Artificial Sequence: Synthetic oligonucleotide
cucaaagguagggauacug

SEQ ID NO: 2744725 - RNA, 19 nt, Artificial Sequence
  Description of Artificial Sequence: Synthetic oligonucleotide
uaggcccuaaggaagggaa

SEQ ID NO: 2744726 - RNA, 19 nt, Artificial Sequence
  Description of Artificial Sequence: Synthetic oligonucleotide
acgagacagcaccagcccg

SEQ ID NO: 2744727 - RNA, 19 nt, Artificial Sequence
  Description of Artificial Sequence: Synthetic oligonucleotide
ucagcuuuucuaccagaaa

SEQ ID NO: 2744728 - RNA, 19 nt, Artificial Sequence
  Description of Artificial Sequence: Synthetic oligonucleotide
gaugugcaagccguggacc

SEQ ID NO: 2744729 - RNA, 19 nt, Artificial Sequence
  Description of Artificial Sequence: Synthetic oligonucleotide
ucuugccagugaaucaccu

SEQ ID NO: 2744730 - RNA, 19 nt, Artificial Sequence
  Description of Artificial Sequence: Synthetic oligonucleotide
uccaccagagcgaucuggu

SEQ ID NO: 2744731 - RNA, 19 nt, Artificial Sequence
  Description of Artificial Sequence: Synthetic oligonucleotide
cugggauagagaugauggc

SEQ ID NO: 2744732 - RNA, 19 nt, Artificial Sequence
  Description of Artificial Sequence: Synthetic oligonucleotide
uggaugugcaagccgugga

SEQ ID NO: 2744733 - RNA, 19 nt, Artificial Sequence
  Description of Artificial Sequence: Synthetic oligonucleotide
accagaaaguccagggagg

SEQ ID NO: 2744734 - RNA, 19 nt, Artificial Sequence
  Description of Artificial Sequence: Synthetic oligonucleotide
guaucgaauguccccagga

SEQ ID NO: 2744735 - RNA, 19 nt, Artificial Sequence
  Description of Artificial Sequence: Synthetic oligonucleotide
auagagaugauggcccaug

SEQ ID NO: 2744736 - RNA, 19 nt, Artificial Sequence
  Description of Artificial Sequence: Synthetic oligonucleotide
accagagcgaucugguccu

SEQ ID NO: 2744737 - RNA, 19 nt, Artificial Sequence
  Description of Artificial Sequence: Synthetic oligonucleotide
uccucuugccagugaauca

SEQ ID NO: 2744738 - RNA, 19 nt, Artificial Sequence
  Description of Artificial Sequence: Synthetic oligonucleotide
aaagccagugguguggcuu

SEQ ID NO: 2744739 - RNA, 19 nt, Artificial Sequence
  Description of Artificial Sequence: Synthetic oligonucleotide
uauaggcccuaaggaaggg

SEQ ID NO: 2744740 - RNA, 19 nt, Artificial Sequence
  Description of Artificial Sequence: Synthetic oligonucleotide
agguagggauacuggugac

SEQ ID NO: 2744741 - RNA, 19 nt, Artificial Sequence
  Description of Artificial Sequence: Synthetic oligonucleotide
ccucgugugaaauauacca

SEQ ID NO: 2744742 - RNA, 19 nt, Artificial Sequence
  Description of Artificial Sequence: Synthetic oligonucleotide
aucugcucauaccucgugu

SEQ ID NO: 2744743 - RNA, 19 nt, Artificial Sequence
  Description of Artificial Sequence: Synthetic oligonucleotide
cagugaaucaccuguagcu

SEQ ID NO: 2744744 - RNA, 19 nt, Artificial Sequence
  Description of Artificial Sequence: Synthetic oligonucleotide
ggugaaucugcucauaccu

SEQ ID NO: 2744745 - RNA, 19 nt, Artificial Sequence
  Description of Artificial Sequence: Synthetic oligonucleotide
accucgugugaaauauacc

SEQ ID NO: 2744746 - RNA, 19 nt, Artificial Sequence
  Description of Artificial Sequence: Synthetic oligonucleotide
gaucugguccuggaugaag

SEQ ID NO: 2744747 - RNA, 19 nt, Artificial Sequence
  Description of Artificial Sequence: Synthetic oligonucleotide
auggaugugcaagccgugg

SEQ ID NO: 2744748 - RNA, 19 nt, Artificial Sequence
  Description of Artificial Sequence: Synthetic oligonucleotide
caagccguggaccgcgacg

SEQ ID NO: 2744749 - RNA, 19 nt, Artificial Sequence
  Description of Artificial Sequence: Synthetic oligonucleotide
gggauagagaugauggccc

SEQ ID NO: 2744750 - RNA, 19 nt, Artificial Sequence
  Description of Artificial Sequence: Synthetic oligonucleotide
cacgagacagcaccagccc

SEQ ID NO: 2744751 - RNA, 19 nt, Artificial Sequence
  Description of Artificial Sequence: Synthetic oligonucleotide
gacugggauagagaugaug

SEQ ID NO: 2744752 - RNA, 19 nt, Artificial Sequence
  Description of Artificial Sequence: Synthetic oligonucleotide
agagaugauggcccauggu

SEQ ID NO: 2744753 - RNA, 19 nt, Artificial Sequence
  Description of Artificial Sequence: Synthetic oligonucleotide
aucuccagggcccgucccg

SEQ ID NO: 2744754 - RNA, 19 nt, Artificial Sequence
  Description of Artificial Sequence: Synthetic oligonucleotide
cuccaaacuccaaauggca

SEQ ID NO: 2744755 - RNA, 19 nt, Artificial Sequence
  Description of Artificial Sequence: Synthetic oligonucleotide
uagguuuccucuugccagu

SEQ ID NO: 2744756 - RNA, 19 nt, Artificial Sequence
  Description of Artificial Sequence: Synthetic oligonucleotide
gauacuggugacauugacu

SEQ ID NO: 2744757 - RNA, 19 nt, Artificial Sequence
  Description of Artificial Sequence: Synthetic oligonucleotide
auguaucgaauguccccag

SEQ ID NO: 2744758 - RNA, 19 nt, Artificial Sequence
  Description of Artificial Sequence: Synthetic oligonucleotide
agccccuuuccaccagagc

SEQ ID NO: 2744759 - RNA, 19 nt, Artificial Sequence
  Description of Artificial Sequence: Synthetic oligonucleotide
uguuccagagagcgucgga

SEQ ID NO: 2744760 - RNA, 19 nt, Artificial Sequence
  Description of Artificial Sequence: Synthetic oligonucleotide
ugguguggcuucccugucc

SEQ ID NO: 2744761 - RNA, 19 nt, Artificial Sequence
  Description of Artificial Sequence: Synthetic oligonucleotide
cacgcgggcagccagagca

SEQ ID NO: 2744762 - RNA, 19 nt, Artificial Sequence
  Description of Artificial Sequence: Synthetic oligonucleotide
gugaagauguaucgaaugu

SEQ ID NO: 2744763 - RNA, 19 nt, Artificial Sequence
  Description of Artificial Sequence: Synthetic oligonucleotide
acaaggugaaucugcucau

SEQ ID NO: 2744764 - RNA, 19 nt, Artificial Sequence
  Description of Artificial Sequence: Synthetic oligonucleotide
cauugacugggauagagau

SEQ ID NO: 2744765 - RNA, 19 nt, Artificial Sequence
  Description of Artificial Sequence: Synthetic oligonucleotide
uguagccccuuuccaccag

SEQ ID NO: 2744766 - RNA, 19 nt, Artificial Sequence
  Description of Artificial Sequence: Synthetic oligonucleotide
gaacaaggugaaucugcuc

SEQ ID NO: 2744767 - RNA, 19 nt, Artificial Sequence
  Description of Artificial Sequence: Synthetic oligonucleotide
agccguuacugaguucccc

SEQ ID NO: 2744768 - RNA, 19 nt, Artificial Sequence
  Description of Artificial Sequence: Synthetic oligonucleotide
ggcgccacggcucaucucc

SEQ ID NO: 2744769 - RNA, 19 nt, Artificial Sequence
  Description of Artificial Sequence: Synthetic oligonucleotide
auaaguagucauggaugug

SEQ ID NO: 2744770 - RNA, 19 nt, Artificial Sequence
  Description of Artificial Sequence: Synthetic oligonucleotide
aagccguuacugaguuccc

SEQ ID NO: 2744771 - RNA, 19 nt, Artificial Sequence
  Description of Artificial Sequence: Synthetic oligonucleotide
uaccaccaaaguccuuggc

SEQ ID NO: 2744772 - RNA, 19 nt, Artificial Sequence
  Description of Artificial Sequence: Synthetic oligonucleotide
gaauauuagguuuccucuu

SEQ ID NO: 2744773 - RNA, 19 nt, Artificial Sequence
  Description of Artificial Sequence: Synthetic oligonucleotide
cgucggaucauguagcccc

SEQ ID NO: 2744774 - RNA, 19 nt, Artificial Sequence
  Description of Artificial Sequence: Synthetic oligonucleotide
auugacugggauagagaug

SEQ ID NO: 2744775 - RNA, 19 nt, Artificial Sequence
  Description of Artificial Sequence: Synthetic oligonucleotide
uuuccucuugccagugaau

SEQ ID NO: 2744776 - RNA, 19 nt, Artificial Sequence
  Description of Artificial Sequence: Synthetic oligonucleotide
auguccccaggacucagca

SEQ ID NO: 2744777 - RNA, 19 nt, Artificial Sequence
  Description of Artificial Sequence: Synthetic oligonucleotide
agagcgaucugguccugga

SEQ ID NO: 2744778 - RNA, 19 nt, Artificial Sequence
  Description of Artificial Sequence: Synthetic oligonucleotide
ucauaccucgugugaaaua

SEQ ID NO: 2744779 - RNA, 19 nt, Artificial Sequence
  Description of Artificial Sequence: Synthetic oligonucleotide
uuccagagagcgucggauc

SEQ ID NO: 2744780 - RNA, 19 nt, Artificial Sequence
  Description of Artificial Sequence: Synthetic oligonucleotide
ugcucauaccucgugugaa

SEQ ID NO: 2744781 - RNA, 19 nt, Artificial Sequence
  Description of Artificial Sequence: Synthetic oligonucleotide
agaagccguuacugaguuc

SEQ ID NO: 2744782 - RNA, 19 nt, Artificial Sequence
  Description of Artificial Sequence: Synthetic oligonucleotide
gagcgucggaucauguagc

SEQ ID NO: 2744783 - RNA, 19 nt, Artificial Sequence
  Description of Artificial Sequence: Synthetic oligonucleotide
aaaguccuuggcaggcgug

SEQ ID NO: 2744784 - RNA, 19 nt, Artificial Sequence
  Description of Artificial Sequence: Synthetic oligonucleotide
agguugcagcagcucaaag

SEQ ID NO: 2744785 - RNA, 19 nt, Artificial Sequence
  Description of Artificial Sequence: Synthetic oligonucleotide
gggaaagccaguggugugg

SEQ ID NO: 2744786 - RNA, 19 nt, Artificial Sequence
  Description of Artificial Sequence: Synthetic oligonucleotide
cauggaugugcaagccgug

SEQ ID NO: 2744787 - RNA, 19 nt, Artificial Sequence
  Description of Artificial Sequence: Synthetic oligonucleotide
gacgcacgcgggcagccag

SEQ ID NO: 2744788 - RNA, 19 nt, Artificial Sequence
  Description of Artificial Sequence: Synthetic oligonucleotide
acauugacugggauagaga

SEQ ID NO: 2744789 - RNA, 19 nt, Artificial Sequence
  Description of Artificial Sequence: Synthetic oligonucleotide
auguagccccuuuccacca

SEQ ID NO: 2744790 - RNA, 19 nt, Artificial Sequence
  Description of Artificial Sequence: Synthetic oligonucleotide
gaauguccccaggacucag

SEQ ID NO: 2744791 - RNA, 19 nt, Artificial Sequence
  Description of Artificial Sequence: Synthetic oligonucleotide
ccagugaaucaccuguagc

SEQ ID NO: 2744792 - RNA, 19 nt, Artificial Sequence
  Description of Artificial Sequence: Synthetic oligonucleotide
agccagagcacgagacagc

SEQ ID NO: 2744793 - RNA, 19 nt, Artificial Sequence
  Description of Artificial Sequence: Synthetic oligonucleotide
ggaagggaaagccaguggu

SEQ ID NO: 2744794 - RNA, 19 nt, Artificial Sequence
  Description of Artificial Sequence: Synthetic oligonucleotide
ugaguuccccacaggccuc

SEQ ID NO: 2744795 - RNA, 19 nt, Artificial Sequence
  Description of Artificial Sequence: Synthetic oligonucleotide
gugugaaauauaccaccaa

SEQ ID NO: 2744796 - RNA, 19 nt, Artificial Sequence
  Description of Artificial Sequence: Synthetic oligonucleotide
ugugcaagccguggaccgc

SEQ ID NO: 2744797 - RNA, 19 nt, Artificial Sequence
  Description of Artificial Sequence: Synthetic oligonucleotide
ggugacauugacugggaua

SEQ ID NO: 2744798 - RNA, 19 nt, Artificial Sequence
  Description of Artificial Sequence: Synthetic oligonucleotide
ggacucagcacuuggaagu

SEQ ID NO: 2744799 - RNA, 19 nt, Artificial Sequence
  Description of Artificial Sequence: Synthetic oligonucleotide
ugccagugaaucaccugua

SEQ ID NO: 2744800 - RNA, 19 nt, Artificial Sequence
  Description of Artificial Sequence: Synthetic oligonucleotide
gaagaagccguuacugagu

SEQ ID NO: 2744801 - RNA, 19 nt, Artificial Sequence
  Description of Artificial Sequence: Synthetic oligonucleotide
cagcagcucaaagguaggg

SEQ ID NO: 2744802 - RNA, 19 nt, Artificial Sequence
  Description of Artificial Sequence: Synthetic oligonucleotide
ccuccggagguucagcagg

SEQ ID NO: 2744803 - RNA, 19 nt, Artificial Sequence
  Description of Artificial Sequence: Synthetic oligonucleotide
ggaugugcaagccguggac

SEQ ID NO: 2744804 - RNA, 19 nt, Artificial Sequence
  Description of Artificial Sequence: Synthetic oligonucleotide
ccuuauaggcccuaaggaa

SEQ ID NO: 2744805 - RNA, 19 nt, Artificial Sequence
  Description of Artificial Sequence: Synthetic oligonucleotide
gugcaagccguggaccgcg

SEQ ID NO: 2744806 - RNA, 19 nt, Artificial Sequence
  Description of Artificial Sequence: Synthetic oligonucleotide
uggugacauugacugggau

SEQ ID NO: 2744807 - RNA, 19 nt, Artificial Sequence
  Description of Artificial Sequence: Synthetic oligonucleotide
cccuaaggaagggaaagcc

SEQ ID NO: 2744808 - RNA, 19 nt, Artificial Sequence
  Description of Artificial Sequence: Synthetic oligonucleotide
gcuuuucuaccagaaaguc

SEQ ID NO: 2744809 - RNA, 19 nt, Artificial Sequence
  Description of Artificial Sequence: Synthetic oligonucleotide
uccccacaggccuccggag

SEQ ID NO: 2744810 - RNA, 19 nt, Artificial Sequence
  Description of Artificial Sequence: Synthetic oligonucleotide
gagguucagcaggaacaag

SEQ ID NO: 2744811 - RNA, 19 nt, Artificial Sequence
  Description of Artificial Sequence: Synthetic oligonucleotide
ggcagaauauuagguuucc

SEQ ID NO: 2744812 - RNA, 19 nt, Artificial Sequence
  Description of Artificial Sequence: Synthetic oligonucleotide
cccaugguagcccaugcug

SEQ ID NO: 2744813 - RNA, 19 nt, Artificial Sequence
  Description of Artificial Sequence: Synthetic oligonucleotide
gagcacgagacagcaccag

SEQ ID NO: 2744814 - RNA, 19 nt, Artificial Sequence
  Description of Artificial Sequence: Synthetic oligonucleotide
gugaaucugcucauaccuc

SEQ ID NO: 2744815 - RNA, 19 nt, Artificial Sequence
  Description of Artificial Sequence: Synthetic oligonucleotide
cauaccucgugugaaauau

SEQ ID NO: 2744816 - RNA, 19 nt, Artificial Sequence
  Description of Artificial Sequence: Synthetic oligonucleotide
ucccuguccccucccuggc

SEQ ID NO: 2744817 - RNA, 19 nt, Artificial Sequence
  Description of Artificial Sequence: Synthetic oligonucleotide
ccacggcucaucuccaggg

SEQ ID NO: 2744818 - RNA, 19 nt, Artificial Sequence
  Description of Artificial Sequence: Synthetic oligonucleotide
cagugguguggcuucccug

SEQ ID NO: 2744819 - RNA, 19 nt, Artificial Sequence
  Description of Artificial Sequence: Synthetic oligonucleotide
agggagguugcagcagcuc

SEQ ID NO: 2744820 - RNA, 19 nt, Artificial Sequence
  Description of Artificial Sequence: Synthetic oligonucleotide
guagcccaugcuguuccag

SEQ ID NO: 2744821 - RNA, 19 nt, Artificial Sequence
  Description of Artificial Sequence: Synthetic oligonucleotide
gagagcgucggaucaugua

SEQ ID NO: 2744822 - RNA, 19 nt, Artificial Sequence
  Description of Artificial Sequence: Synthetic oligonucleotide
gcacgagacagcaccagcc

SEQ ID NO: 2744823 - RNA, 19 nt, Artificial Sequence
  Description of Artificial Sequence: Synthetic oligonucleotide
gggucagcuuuucuaccag

SEQ ID NO: 2744824 - RNA, 19 nt, Artificial Sequence
  Description of Artificial Sequence: Synthetic oligonucleotide
gcaggcguggcugugaaga

SEQ ID NO: 2744825 - RNA, 19 nt, Artificial Sequence
  Description of Artificial Sequence: Synthetic oligonucleotide
ccuaaggaagggaaagcca

SEQ ID NO: 2744826 - RNA, 19 nt, Artificial Sequence
  Description of Artificial Sequence: Synthetic oligonucleotide
guuccccacaggccuccgg

SEQ ID NO: 2744827 - RNA, 19 nt, Artificial Sequence
  Description of Artificial Sequence: Synthetic oligonucleotide
ggggucagcuuuucuacca

SEQ ID NO: 2744828 - RNA, 19 nt, Artificial Sequence
  Description of Artificial Sequence: Synthetic oligonucleotide
guagggauacuggugacau

SEQ ID NO: 2744829 - RNA, 19 nt, Artificial Sequence
  Description of Artificial Sequence: Synthetic oligonucleotide
uagcuggaacuugggguca

SEQ ID NO: 2744830 - RNA, 19 nt, Artificial Sequence
  Description of Artificial Sequence: Synthetic oligonucleotide
gcgaucugguccuggauga

SEQ ID NO: 2744831 - RNA, 19 nt, Artificial Sequence
  Description of Artificial Sequence: Synthetic oligonucleotide
uggcccaugguagcccaug

SEQ ID NO: 2744832 - RNA, 19 nt, Artificial Sequence
  Description of Artificial Sequence: Synthetic oligonucleotide
cugcucauaccucguguga

SEQ ID NO: 2744833 - RNA, 19 nt, Artificial Sequence
  Description of Artificial Sequence: Synthetic oligonucleotide
ccucuugccagugaaucac

SEQ ID NO: 2744834 - RNA, 19 nt, Artificial Sequence
  Description of Artificial Sequence: Synthetic oligonucleotide
agccagugguguggcuucc

SEQ ID NO: 2744835 - RNA, 19 nt, Artificial Sequence
  Description of Artificial Sequence: Synthetic oligonucleotide
cagagagcgucggaucaug

SEQ ID NO: 2744836 - RNA, 19 nt, Artificial Sequence
  Description of Artificial Sequence: Synthetic oligonucleotide
agagcacgagacagcacca

SEQ ID NO: 2744837 - RNA, 19 nt, Artificial Sequence
  Description of Artificial Sequence: Synthetic oligonucleotide
uggcaggcguggcugugaa

SEQ ID NO: 2744838 - RNA, 19 nt, Artificial Sequence
  Description of Artificial Sequence: Synthetic oligonucleotide
gaccgcgacgcacgcgggc

SEQ ID NO: 2744839 - RNA, 19 nt, Artificial Sequence
  Description of Artificial Sequence: Synthetic oligonucleotide
ggaaagccagugguguggc

SEQ ID NO: 2744840 - RNA, 19 nt, Artificial Sequence
  Description of Artificial Sequence: Synthetic oligonucleotide
uuggcaggcguggcuguga

SEQ ID NO: 2744841 - RNA, 19 nt, Artificial Sequence
  Description of Artificial Sequence: Synthetic oligonucleotide
cagagcgaucugguccugg

SEQ ID NO: 2744842 - RNA, 19 nt, Artificial Sequence
  Description of Artificial Sequence: Synthetic oligonucleotide
cucucuccaaacuccaaau

SEQ ID NO: 2744843 - RNA, 19 nt, Artificial Sequence
  Description of Artificial Sequence: Synthetic oligonucleotide
gccacggcucaucuccagg

SEQ ID NO: 2744844 - RNA, 19 nt, Artificial Sequence
  Description of Artificial Sequence: Synthetic oligonucleotide
ugacauugacugggauaga

SEQ ID NO: 2744845 - RNA, 19 nt, Artificial Sequence
  Description of Artificial Sequence: Synthetic oligonucleotide
aggccuccggagguucagc

SEQ ID NO: 2744846 - RNA, 19 nt, Artificial Sequence
  Description of Artificial Sequence: Synthetic oligonucleotide
cuguccccucccuggcucc

SEQ ID NO: 2744847 - RNA, 19 nt, Artificial Sequence
  Description of Artificial Sequence: Synthetic oligonucleotide
agcccguggcgccacggcu

SEQ ID NO: 2744848 - RNA, 19 nt, Artificial Sequence
  Description of Artificial Sequence: Synthetic oligonucleotide
gccguuacugaguucccca

SEQ ID NO: 2744849 - RNA, 19 nt, Artificial Sequence
  Description of Artificial Sequence: Synthetic oligonucleotide
aggcguggcugugaagaug

SEQ ID NO: 2744850 - RNA, 19 nt, Artificial Sequence
  Description of Artificial Sequence: Synthetic oligonucleotide
guagccccuuuccaccaga

SEQ ID NO: 2744851 - RNA, 19 nt, Artificial Sequence
  Description of Artificial Sequence: Synthetic oligonucleotide
agcuggaacuuggggucag

SEQ ID NO: 2744852 - RNA, 19 nt, Artificial Sequence
  Description of Artificial Sequence: Synthetic oligonucleotide
cgugugaaauauaccacca

SEQ ID NO: 2744853 - RNA, 19 nt, Artificial Sequence
  Description of Artificial Sequence: Synthetic oligonucleotide
ggucagcuuuucuaccaga

SEQ ID NO: 2744854 - RNA, 19 nt, Artificial Sequence
  Description of Artificial Sequence: Synthetic oligonucleotide
ggcagccagagcacgagac

SEQ ID NO: 2744855 - RNA, 19 nt, Artificial Sequence
  Description of Artificial Sequence: Synthetic oligonucleotide
gcuguuccagagagcgucg

SEQ ID NO: 2744856 - RNA, 19 nt, Artificial Sequence
  Description of Artificial Sequence: Synthetic oligonucleotide
ggaugaagaagccguuacu

SEQ ID NO: 2744857 - RNA, 19 nt, Artificial Sequence
  Description of Artificial Sequence: Synthetic oligonucleotide
cggagguucagcaggaaca

SEQ ID NO: 2744858 - RNA, 19 nt, Artificial Sequence
  Description of Artificial Sequence: Synthetic oligonucleotide
agagagcgucggaucaugu

SEQ ID NO: 2744859 - RNA, 19 nt, Artificial Sequence
  Description of Artificial Sequence: Synthetic oligonucleotide
gguagggauacuggugaca

SEQ ID NO: 2744860 - RNA, 19 nt, Artificial Sequence
  Description of Artificial Sequence: Synthetic oligonucleotide
uagggauacuggugacauu

SEQ ID NO: 2744861 - RNA, 19 nt, Artificial Sequence
  Description of Artificial Sequence: Synthetic oligonucleotide
gaaucugcucauaccucgu

SEQ ID NO: 2744862 - RNA, 19 nt, Artificial Sequence
  Description of Artificial Sequence: Synthetic oligonucleotide
gacucagcacuuggaagua

SEQ ID NO: 2744863 - RNA, 19 nt, Artificial Sequence
  Description of Artificial Sequence: Synthetic oligonucleotide
caccuguagcuggaacuug

SEQ ID NO: 2744864 - RNA, 19 nt, Artificial Sequence
  Description of Artificial Sequence: Synthetic oligonucleotide
ugacugggauagagaugau

SEQ ID NO: 2744865 - RNA, 19 nt, Artificial Sequence
  Description of Artificial Sequence: Synthetic oligonucleotide
cuccggagguucagcagga

SEQ ID NO: 2744866 - RNA, 19 nt, Artificial Sequence
  Description of Artificial Sequence: Synthetic oligonucleotide
ccguggaccgcgacgcacg

SEQ ID NO: 2744867 - RNA, 19 nt, Artificial Sequence
  Description of Artificial Sequence: Synthetic oligonucleotide
ggcccaugguagcccaugc

SEQ ID NO: 2744868 - RNA, 19 nt, Artificial Sequence
  Description of Artificial Sequence: Synthetic oligonucleotide
gaaucaccuguagcuggaa

SEQ ID NO: 2744869 - RNA, 19 nt, Artificial Sequence
  Description of Artificial Sequence: Synthetic oligonucleotide
ggagguucagcaggaacaa

SEQ ID NO: 2744870 - RNA, 19 nt, Artificial Sequence
  Description of Artificial Sequence: Synthetic oligonucleotide
ccaaaguccuuggcaggcg

SEQ ID NO: 2744871 - RNA, 19 nt, Artificial Sequence
  Description of Artificial Sequence: Synthetic oligonucleotide
ggcugugaagauguaucga

SEQ ID NO: 2744872 - RNA, 19 nt, Artificial Sequence
  Description of Artificial Sequence: Synthetic oligonucleotide
caaaguccuuggcaggcgu

SEQ ID NO: 2744873 - RNA, 19 nt, Artificial Sequence
  Description of Artificial Sequence: Synthetic oligonucleotide
acucagcacuuggaaguau

SEQ ID NO: 2744874 - RNA, 19 nt, Artificial Sequence
  Description of Artificial Sequence: Synthetic oligonucleotide
gauagagaugauggcccau

SEQ ID NO: 2744875 - RNA, 19 nt, Artificial Sequence
  Description of Artificial Sequence: Synthetic oligonucleotide
ccguuacugaguuccccac

SEQ ID NO: 2744876 - RNA, 19 nt, Artificial Sequence
  Description of Artificial Sequence: Synthetic oligonucleotide
gcucauaccucgugugaaa

SEQ ID NO: 2744877 - RNA, 19 nt, Artificial Sequence
  Description of Artificial Sequence: Synthetic oligonucleotide
ccggagguucagcaggaac

SEQ ID NO: 2744878 - RNA, 19 nt, Artificial Sequence
  Description of Artificial Sequence: Synthetic oligonucleotide
aguuccccacaggccuccg

SEQ ID NO: 2744879 - RNA, 19 nt, Artificial Sequence
  Description of Artificial Sequence: Synthetic oligonucleotide
gccuccggagguucagcag

SEQ ID NO: 2744880 - RNA, 19 nt, Artificial Sequence
  Description of Artificial Sequence: Synthetic oligonucleotide
cuccacuuguccucagagu

SEQ ID NO: 2744881 - RNA, 19 nt, Artificial Sequence
  Description of Artificial Sequence: Synthetic oligonucleotide
ggcucaucuccagggcccg

SEQ ID NO: 2744882 - RNA, 19 nt, Artificial Sequence
  Description of Artificial Sequence: Synthetic oligonucleotide
gugguguggcuucccuguc

SEQ ID NO: 2744883 - RNA, 19 nt, Artificial Sequence
  Description of Artificial Sequence: Synthetic oligonucleotide
cagcccguggcgccacggc

SEQ ID NO: 2744884 - RNA, 19 nt, Artificial Sequence
  Description of Artificial Sequence: Synthetic oligonucleotide
acgcgggcagccagagcac

SEQ ID NO: 2744885 - RNA, 19 nt, Artificial Sequence
  Description of Artificial Sequence: Synthetic oligonucleotide
ggcguggcugugaagaugu

SEQ ID NO: 2744886 - RNA, 19 nt, Artificial Sequence
  Description of Artificial Sequence: Synthetic oligonucleotide
cacaggccuccggagguuc

SEQ ID NO: 2744887 - RNA, 19 nt, Artificial Sequence
  Description of Artificial Sequence: Synthetic oligonucleotide
auaccucgugugaaauaua

SEQ ID NO: 2744888 - RNA, 19 nt, Artificial Sequence
  Description of Artificial Sequence: Synthetic oligonucleotide
guggaccgcgacgcacgcg

SEQ ID NO: 2744889 - RNA, 19 nt, Artificial Sequence
  Description of Artificial Sequence: Synthetic oligonucleotide
caggccuccggagguucag

SEQ ID NO: 2744890 - RNA, 19 nt, Artificial Sequence
  Description of Artificial Sequence: Synthetic oligonucleotide
accagcccguggcgccacg

SEQ ID NO: 2744891 - RNA, 19 nt, Artificial Sequence
  Description of Artificial Sequence: Synthetic oligonucleotide
ggccuccggagguucagca

SEQ ID NO: 2744892 - RNA, 19 nt, Artificial Sequence
  Description of Artificial Sequence: Synthetic oligonucleotide
cucauaccucgugugaaau

SEQ ID NO: 2744893 - RNA, 19 nt, Artificial Sequence
  Description of Artificial Sequence: Synthetic oligonucleotide
uccggagguucagcaggaa

SEQ ID NO: 2744894 - RNA, 19 nt, Artificial Sequence
  Description of Artificial Sequence: Synthetic oligonucleotide
augcuguuccagagagcgu

SEQ ID NO: 2744895 - RNA, 19 nt, Artificial Sequence
  Description of Artificial Sequence: Synthetic oligonucleotide
caugguagcccaugcuguu

SEQ ID NO: 2744896 - RNA, 19 nt, Artificial Sequence
  Description of Artificial Sequence: Synthetic oligonucleotide
caaggugaaucugcucaua

SEQ ID NO: 2744897 - RNA, 19 nt, Artificial Sequence
  Description of Artificial Sequence: Synthetic oligonucleotide
ccccuuuccaccagagcga

SEQ ID NO: 2744898 - RNA, 19 nt, Artificial Sequence
  Description of Artificial Sequence: Synthetic oligonucleotide
gagcgaucugguccuggau

SEQ ID NO: 2744899 - RNA, 19 nt, Artificial Sequence
  Description of Artificial Sequence: Synthetic oligonucleotide
ccaugguagcccaugcugu

SEQ ID NO: 2744900 - RNA, 19 nt, Artificial Sequence
  Description of Artificial Sequence: Synthetic oligonucleotide
auauaccaccaaaguccuu

SEQ ID NO: 2744901 - RNA, 19 nt, Artificial Sequence
  Description of Artificial Sequence: Synthetic oligonucleotide
gggauacuggugacauuga

SEQ ID NO: 2744902 - RNA, 19 nt, Artificial Sequence
  Description of Artificial Sequence: Synthetic oligonucleotide
gucucucuccaaacuccaa

SEQ ID NO: 2744903 - RNA, 19 nt, Artificial Sequence
  Description of Artificial Sequence: Synthetic oligonucleotide
acaggccuccggagguuca

SEQ ID NO: 2744904 - RNA, 19 nt, Artificial Sequence
  Description of Artificial Sequence: Synthetic oligonucleotide
gcgucggaucauguagccc

SEQ ID NO: 2744905 - RNA, 19 nt, Artificial Sequence
  Description of Artificial Sequence: Synthetic oligonucleotide
ggcaggcguggcugugaag

SEQ ID NO: 2744906 - RNA, 19 nt, Artificial Sequence
  Description of Artificial Sequence: Synthetic oligonucleotide
ccagagcacgagacagcac

SEQ ID NO: 2744907 - RNA, 19 nt, Artificial Sequence
  Description of Artificial Sequence: Synthetic oligonucleotide
agccguggaccgcgacgca

SEQ ID NO: 2744908 - RNA, 19 nt, Artificial Sequence
  Description of Artificial Sequence: Synthetic oligonucleotide
uggcgccacggcucaucuc

SEQ ID NO: 2744909 - RNA, 19 nt, Artificial Sequence
  Description of Artificial Sequence: Synthetic oligonucleotide
guccuuggcaggcguggcu

SEQ ID NO: 2744910 - RNA, 19 nt, Artificial Sequence
  Description of Artificial Sequence: Synthetic oligonucleotide
ccaccagagcgaucugguc

SEQ ID NO: 2744911 - RNA, 19 nt, Artificial Sequence
  Description of Artificial Sequence: Synthetic oligonucleotide
ucggaucauguagccccuu

SEQ ID NO: 2744912 - RNA, 19 nt, Artificial Sequence
  Description of Artificial Sequence: Synthetic oligonucleotide
cagggagguugcagcagcu

SEQ ID NO: 2744913 - RNA, 19 nt, Artificial Sequence
  Description of Artificial Sequence: Synthetic oligonucleotide
gcagaauauuagguuuccu

SEQ ID NO: 2744914 - RNA, 19 nt, Artificial Sequence
  Description of Artificial Sequence: Synthetic oligonucleotide
gcaagccguggaccgcgac

SEQ ID NO: 2744915 - RNA, 19 nt, Artificial Sequence
  Description of Artificial Sequence: Synthetic oligonucleotide
cguuacugaguuccccaca

SEQ ID NO: 2744916 - RNA, 19 nt, Artificial Sequence
  Description of Artificial Sequence: Synthetic oligonucleotide
gggcagccagagcacgaga

SEQ ID NO: 2744917 - RNA, 19 nt, Artificial Sequence
  Description of Artificial Sequence: Synthetic oligonucleotide
gucggaucauguagccccu

SEQ ID NO: 2744918 - RNA, 19 nt, Artificial Sequence
  Description of Artificial Sequence: Synthetic oligonucleotide
cccucccuggcuccacuug

SEQ ID NO: 2744919 - RNA, 19 nt, Artificial Sequence
  Description of Artificial Sequence: Synthetic oligonucleotide
gccguggaccgcgacgcac

SEQ ID NO: 2744920 - RNA, 19 nt, Artificial Sequence
  Description of Artificial Sequence: Synthetic oligonucleotide
ggaccgcgacgcacgcggg

SEQ ID NO: 2744921 - RNA, 19 nt, Artificial Sequence
  Description of Artificial Sequence: Synthetic oligonucleotide
ccagaaaguccagggaggu

SEQ ID NO: 2744922 - RNA, 19 nt, Artificial Sequence
  Description of Artificial Sequence: Synthetic oligonucleotide
ccuuuccaccagagcgauc

SEQ ID NO: 2744923 - RNA, 19 nt, Artificial Sequence
  Description of Artificial Sequence: Synthetic oligonucleotide
cguggaccgcgacgcacgc

SEQ ID NO: 2744924 - RNA, 19 nt, Artificial Sequence
  Description of Artificial Sequence: Synthetic oligonucleotide
caggcguggcugugaagau

SEQ ID NO: 2744925 - RNA, 19 nt, Artificial Sequence
  Description of Artificial Sequence: Synthetic oligonucleotide
gcgacgcacgcgggcagcc

SEQ ID NO: 2744926 - RNA, 19 nt, Artificial Sequence
  Description of Artificial Sequence: Synthetic oligonucleotide
caccagcccguggcgccac

SEQ ID NO: 2744927 - RNA, 19 nt, Artificial Sequence
  Description of Artificial Sequence: Synthetic oligonucleotide
ccagcccguggcgccacgg

SEQ ID NO: 2744928 - RNA, 19 nt, Artificial Sequence
  Description of Artificial Sequence: Synthetic oligonucleotide
gcccaugguagcccaugcu

SEQ ID NO: 2744929 - RNA, 19 nt, Artificial Sequence
  Description of Artificial Sequence: Synthetic oligonucleotide
gcacgcgggcagccagagc

SEQ ID NO: 2744930 - RNA, 19 nt, Artificial Sequence
  Description of Artificial Sequence: Synthetic oligonucleotide
guccccucccuggcuccac

SEQ ID NO: 2744931 - RNA, 19 nt, Artificial Sequence
  Description of Artificial Sequence: Synthetic oligonucleotide
gcccguggcgccacggcuc

SEQ ID NO: 2744932 - RNA, 19 nt, Artificial Sequence
  Description of Artificial Sequence: Synthetic oligonucleotide
cagaaaguccagggagguu

SEQ ID NO: 2744933 - RNA, 19 nt, Artificial Sequence
  Description of Artificial Sequence: Synthetic oligonucleotide
cgccacggcucaucuccag

SEQ ID NO: 2744934 - RNA, 19 nt, Artificial Sequence
  Description of Artificial Sequence: Synthetic oligonucleotide
ccucccuggcuccacuugu

SEQ ID NO: 2744935 - RNA, 19 nt, Artificial Sequence
  Description of Artificial Sequence: Synthetic oligonucleotide
ccgcgacgcacgcgggcag

SEQ ID NO: 2744936 - RNA, 19 nt, Artificial Sequence
  Description of Artificial Sequence: Synthetic oligonucleotide
cgaauguccccaggacuca

SEQ ID NO: 2744937 - RNA, 19 nt, Artificial Sequence
  Description of Artificial Sequence: Synthetic oligonucleotide
gcgggcagccagagcacga

SEQ ID NO: 2744938 - RNA, 19 nt, Artificial Sequence
  Description of Artificial Sequence: Synthetic oligonucleotide
cccguggcgccacggcuca

SEQ ID NO: 2744939 - RNA, 19 nt, Artificial Sequence
  Description of Artificial Sequence: Synthetic oligonucleotide
cgcacgcgggcagccagag

SEQ ID NO: 2744940 - RNA, 19 nt, Artificial Sequence
  Description of Artificial Sequence: Synthetic oligonucleotide
gcaccagcccguggcgcca

SEQ ID NO: 2744941 - RNA, 19 nt, Artificial Sequence
  Description of Artificial Sequence: Synthetic oligonucleotide
ccagagcgaucugguccug

SEQ ID NO: 2744942 - RNA, 19 nt, Artificial Sequence
  Description of Artificial Sequence: Synthetic oligonucleotide
cguggcgccacggcucauc

SEQ ID NO: 2744943 - RNA, 19 nt, Artificial Sequence
  Description of Artificial Sequence: Synthetic oligonucleotide
ccuuggcaggcguggcugu

SEQ ID NO: 2744944 - RNA, 19 nt, Artificial Sequence
  Description of Artificial Sequence: Synthetic oligonucleotide
cgcgacgcacgcgggcagc

SEQ ID NO: 2744945 - RNA, 19 nt, Artificial Sequence
  Description of Artificial Sequence: Synthetic oligonucleotide
gcgccacggcucaucucca

SEQ ID NO: 2744946 - RNA, 19 nt, Artificial Sequence
  Description of Artificial Sequence: Synthetic oligonucleotide
cguggcugugaagauguau

SEQ ID NO: 2744947 - RNA, 19 nt, Artificial Sequence
  Description of Artificial Sequence: Synthetic oligonucleotide
cagcaggaacaaggugaau

SEQ ID NO: 2744948 - RNA, 19 nt, Artificial Sequence
  Description of Artificial Sequence: Synthetic oligonucleotide
cccuuuccaccagagcgau

SEQ ID NO: 2744949 - RNA, 19 nt, Artificial Sequence
  Description of Artificial Sequence: Synthetic oligonucleotide
ccagagagcgucggaucau

SEQ ID NO: 2744950 - RNA, 19 nt, Artificial Sequence
  Description of Artificial Sequence: Synthetic oligonucleotide
cggaucauguagccccuuu

SEQ ID NO: 2744951 - RNA, 19 nt, Artificial Sequence
  Description of Artificial Sequence: Synthetic oligonucleotide
cccuguccccucccuggcu

SEQ ID NO: 2744952 - RNA, 19 nt, Artificial Sequence
  Description of Artificial Sequence: Synthetic oligonucleotide
gcguggcugugaagaugua

SEQ ID NO: 2744953 - RNA, 19 nt, Artificial Sequence
  Description of Artificial Sequence: Synthetic oligonucleotide
cgacgcacgcgggcagcca

SEQ ID NO: 2744954 - RNA, 19 nt, Artificial Sequence
  Description of Artificial Sequence: Synthetic oligonucleotide
ccccucccuggcuccacuu

SEQ ID NO: 2744955 - RNA, 19 nt, Artificial Sequence
  Description of Artificial Sequence: Synthetic oligonucleotide
ccacaggccuccggagguu

SEQ ID NO: 2744956 - RNA, 19 nt, Artificial Sequence
  Description of Artificial Sequence: Synthetic oligonucleotide
ccguggcgccacggcucau

SEQ ID NO: 2744957 - RNA, 19 nt, Artificial Sequence
  Description of Artificial Sequence: Synthetic oligonucleotide
aauuauaauucccacaccu

SEQ ID NO: 2744958 - RNA, 19 nt, Artificial Sequence
  Description of Artificial Sequence: Synthetic oligonucleotide
aauacuaauguguugcaag

SEQ ID NO: 2744959 - RNA, 19 nt, Artificial Sequence
  Description of Artificial Sequence: Synthetic oligonucleotide
acaaauacuaauguguugc

SEQ ID NO: 2744960 - RNA, 19 nt, Artificial Sequence
  Description of Artificial Sequence: Synthetic oligonucleotide
acaaaaguaagcaaauucc

SEQ ID NO: 2744961 - RNA, 19 nt, Artificial Sequence
  Description of Artificial Sequence: Synthetic oligonucleotide
uuaaggagaauacauggcc

SEQ ID NO: 2744962 - RNA, 19 nt, Artificial Sequence
  Description of Artificial Sequence: Synthetic oligonucleotide
cuaauuauaauucccacac

SEQ ID NO: 2744963 - RNA, 19 nt, Artificial Sequence
  Description of Artificial Sequence: Synthetic oligonucleotide
auggauacauuucaaacac

SEQ ID NO: 2744964 - RNA, 19 nt, Artificial Sequence
  Description of Artificial Sequence: Synthetic oligonucleotide
cauuaaggagaauacaugg

SEQ ID NO: 2744965 - RNA, 19 nt, Artificial Sequence
  Description of Artificial Sequence: Synthetic oligonucleotide
agucaaagaaaucaaguuc

SEQ ID NO: 2744966 - RNA, 19 nt, Artificial Sequence
  Description of Artificial Sequence: Synthetic oligonucleotide
aauggcuaccuauggauac

SEQ ID NO: 2744967 - RNA, 19 nt, Artificial Sequence
  Description of Artificial Sequence: Synthetic oligonucleotide
uucaaacacugauagaagg

SEQ ID NO: 2744968 - RNA, 19 nt, Artificial Sequence
  Description of Artificial Sequence: Synthetic oligonucleotide
aauacauggccuaucuucc

SEQ ID NO: 2744969 - RNA, 19 nt, Artificial Sequence
  Description of Artificial Sequence: Synthetic oligonucleotide
ucaaacacugauagaaggg

SEQ ID NO: 2744970 - RNA, 19 nt, Artificial Sequence
  Description of Artificial Sequence: Synthetic oligonucleotide
aggaccacaaaagagaucg

SEQ ID NO: 2744971 - RNA, 19 nt, Artificial Sequence
  Description of Artificial Sequence: Synthetic oligonucleotide
auacuaauguguugcaagc

SEQ ID NO: 2744972 - RNA, 19 nt, Artificial Sequence
  Description of Artificial Sequence: Synthetic oligonucleotide
uauggauacauuucaaaca

SEQ ID NO: 2744973 - RNA, 19 nt, Artificial Sequence
  Description of Artificial Sequence: Synthetic oligonucleotide
aagacaguugcagaagagc

SEQ ID NO: 2744974 - RNA, 19 nt, Artificial Sequence
  Description of Artificial Sequence: Synthetic oligonucleotide
aagacacaagcucagagga

SEQ ID NO: 2744975 - RNA, 19 nt, Artificial Sequence
  Description of Artificial Sequence: Synthetic oligonucleotide
ucugcagucaaagaaauca

SEQ ID NO: 2744976 - RNA, 19 nt, Artificial Sequence
  Description of Artificial Sequence: Synthetic oligonucleotide
aaaucaaguucuuggagga

SEQ ID NO: 2744977 - RNA, 19 nt, Artificial Sequence
  Description of Artificial Sequence: Synthetic oligonucleotide
gaauacauggccuaucuuc

SEQ ID NO: 2744978 - RNA, 19 nt, Artificial Sequence
  Description of Artificial Sequence: Synthetic oligonucleotide
auuucaaacacugauagaa

SEQ ID NO: 2744979 - RNA, 19 nt, Artificial Sequence
  Description of Artificial Sequence: Synthetic oligonucleotide
auuauuaauucucucugca

SEQ ID NO: 2744980 - RNA, 19 nt, Artificial Sequence
  Description of Artificial Sequence: Synthetic oligonucleotide
cuauggauacauuucaaac

SEQ ID NO: 2744981 - RNA, 19 nt, Artificial Sequence
  Description of Artificial Sequence: Synthetic oligonucleotide
ucugcucaccaccugauag

SEQ ID NO: 2744982 - RNA, 19 nt, Artificial Sequence
  Description of Artificial Sequence: Synthetic oligonucleotide
aacaaauacuaauguguug

SEQ ID NO: 2744983 - RNA, 19 nt, Artificial Sequence
  Description of Artificial Sequence: Synthetic oligonucleotide
uuauuaauucucucugcag

SEQ ID NO: 2744984 - RNA, 19 nt, Artificial Sequence
  Description of Artificial Sequence: Synthetic oligonucleotide
ugggaaaccauuauuaauu

SEQ ID NO: 2744985 - RNA, 19 nt, Artificial Sequence
  Description of Artificial Sequence: Synthetic oligonucleotide
uuucaaacacugauagaag

SEQ ID NO: 2744986 - RNA, 19 nt, Artificial Sequence
  Description of Artificial Sequence: Synthetic oligonucleotide
ucuuggaggagucaagaca

SEQ ID NO: 2744987 - RNA, 19 nt, Artificial Sequence
  Description of Artificial Sequence: Synthetic oligonucleotide
aaagcauuucggaggaagc

SEQ ID NO: 2744988 - RNA, 19 nt, Artificial Sequence
  Description of Artificial Sequence: Synthetic oligonucleotide
ugaugcacugccauguugc

SEQ ID NO: 2744989 - RNA, 19 nt, Artificial Sequence
  Description of Artificial Sequence: Synthetic oligonucleotide
aacauuaaggagaauacau

SEQ ID NO: 2744990 - RNA, 19 nt, Artificial Sequence
  Description of Artificial Sequence: Synthetic oligonucleotide
accauuauuaauucucucu

SEQ ID NO: 2744991 - RNA, 19 nt, Artificial Sequence
  Description of Artificial Sequence: Synthetic oligonucleotide
ugauccuaauuauaauucc

SEQ ID NO: 2744992 - RNA, 19 nt, Artificial Sequence
  Description of Artificial Sequence: Synthetic oligonucleotide
auuaaggagaauacauggc

SEQ ID NO: 2744993 - RNA, 19 nt, Artificial Sequence
  Description of Artificial Sequence: Synthetic oligonucleotide
aaccauuauuaauucucuc

SEQ ID NO: 2744994 - RNA, 19 nt, Artificial Sequence
  Description of Artificial Sequence: Synthetic oligonucleotide
agaaaucaaguucuuggag

SEQ ID NO: 2744995 - RNA, 19 nt, Artificial Sequence
  Description of Artificial Sequence: Synthetic oligonucleotide
aauucccacaccuuuuacu

SEQ ID NO: 2744996 - RNA, 19 nt, Artificial Sequence
  Description of Artificial Sequence: Synthetic oligonucleotide
ugauagggauucaagguca

SEQ ID NO: 2744997 - RNA, 19 nt, Artificial Sequence
  Description of Artificial Sequence: Synthetic oligonucleotide
ggagaaagcauuucggagg

SEQ ID NO: 2744998 - RNA, 19 nt, Artificial Sequence
  Description of Artificial Sequence: Synthetic oligonucleotide
acaggauacaaaaguaagc

SEQ ID NO: 2744999 - RNA, 19 nt, Artificial Sequence
  Description of Artificial Sequence: Synthetic oligonucleotide
aagcaaauuccugggaaac

SEQ ID NO: 2745000 - RNA, 19 nt, Artificial Sequence
  Description of Artificial Sequence: Synthetic oligonucleotide
augauccuaauuauaauuc

SEQ ID NO: 2745001 - RNA, 19 nt, Artificial Sequence
  Description of Artificial Sequence: Synthetic oligonucleotide
uuauaauucccacaccuuu

SEQ ID NO: 2745002 - RNA, 19 nt, Artificial Sequence
  Description of Artificial Sequence: Synthetic oligonucleotide
cacaggauacaaaaguaag

SEQ ID NO: 2745003 - RNA, 19 nt, Artificial Sequence
  Description of Artificial Sequence: Synthetic oligonucleotide
aaaucaauggcuaccuaug

SEQ ID NO: 2745004 - RNA, 19 nt, Artificial Sequence
  Description of Artificial Sequence: Synthetic oligonucleotide
uaugugaaaucaauggcua

SEQ ID NO: 2745005 - RNA, 19 nt, Artificial Sequence
  Description of Artificial Sequence: Synthetic oligonucleotide
cauuauuaauucucucugc

SEQ ID NO: 2745006 - RNA, 19 nt, Artificial Sequence
  Description of Artificial Sequence: Synthetic oligonucleotide
uaaggagaauacauggccu

SEQ ID NO: 2745007 - RNA, 19 nt, Artificial Sequence
  Description of Artificial Sequence: Synthetic oligonucleotide
uugcaagccaccuuugcag

SEQ ID NO: 2745008 - RNA, 19 nt, Artificial Sequence
  Description of Artificial Sequence: Synthetic oligonucleotide
cugaaggaccacaaaagag

SEQ ID NO: 2745009 - RNA, 19 nt, Artificial Sequence
  Description of Artificial Sequence: Synthetic oligonucleotide
aggagaaagcauuucggag

SEQ ID NO: 2745010 - RNA, 19 nt, Artificial Sequence
  Description of Artificial Sequence: Synthetic oligonucleotide
ucaauggcuaccuauggau

SEQ ID NO: 2745011 - RNA, 19 nt, Artificial Sequence
  Description of Artificial Sequence: Synthetic oligonucleotide
caggcaacaaauacuaaug

SEQ ID NO: 2745012 - RNA, 19 nt, Artificial Sequence
  Description of Artificial Sequence: Synthetic oligonucleotide
uaauuauaauucccacacc

SEQ ID NO: 2745013 - RNA, 19 nt, Artificial Sequence
  Description of Artificial Sequence: Synthetic oligonucleotide
ucaagacaguugcagaaga

SEQ ID NO: 2745014 - RNA, 19 nt, Artificial Sequence
  Description of Artificial Sequence: Synthetic oligonucleotide
gauccuaauuauaauuccc

SEQ ID NO: 2745015 - RNA, 19 nt, Artificial Sequence
  Description of Artificial Sequence: Synthetic oligonucleotide
uaaucccaaugcuagaaac

SEQ ID NO: 2745016 - RNA, 19 nt, Artificial Sequence
  Description of Artificial Sequence: Synthetic oligonucleotide
uuucggaggaagcugccag

SEQ ID NO: 2745017 - RNA, 19 nt, Artificial Sequence
  Description of Artificial Sequence: Synthetic oligonucleotide
aaacauuaaggagaauaca

SEQ ID NO: 2745018 - RNA, 19 nt, Artificial Sequence
  Description of Artificial Sequence: Synthetic oligonucleotide
agggcuggggaccacagac

SEQ ID NO: 2745019 - RNA, 19 nt, Artificial Sequence
  Description of Artificial Sequence: Synthetic oligonucleotide
ugcacugccauguugccug

SEQ ID NO: 2745020 - RNA, 19 nt, Artificial Sequence
  Description of Artificial Sequence: Synthetic oligonucleotide
agugucagcagaggaaccc

SEQ ID NO: 2745021 - RNA, 19 nt, Artificial Sequence
  Description of Artificial Sequence: Synthetic oligonucleotide
aucccaaugcuagaaacac

SEQ ID NO: 2745022 - RNA, 19 nt, Artificial Sequence
  Description of Artificial Sequence: Synthetic oligonucleotide
uguguugcaagccaccuuu

SEQ ID NO: 2745023 - RNA, 19 nt, Artificial Sequence
  Description of Artificial Sequence: Synthetic oligonucleotide
acaguugcagaagagcagg

SEQ ID NO: 2745024 - RNA, 19 nt, Artificial Sequence
  Description of Artificial Sequence: Synthetic oligonucleotide
acaagcucagaggagaaag

SEQ ID NO: 2745025 - RNA, 19 nt, Artificial Sequence
  Description of Artificial Sequence: Synthetic oligonucleotide
ugcggagaggacaccaagg

SEQ ID NO: 2745026 - RNA, 19 nt, Artificial Sequence
  Description of Artificial Sequence: Synthetic oligonucleotide
caaacacugauagaagggc

SEQ ID NO: 2745027 - RNA, 19 nt, Artificial Sequence
  Description of Artificial Sequence: Synthetic oligonucleotide
ucuccuaugugaaaucaau

SEQ ID NO: 2745028 - RNA, 19 nt, Artificial Sequence
  Description of Artificial Sequence: Synthetic oligonucleotide
augugaaaucaauggcuac

SEQ ID NO: 2745029 - RNA, 19 nt, Artificial Sequence
  Description of Artificial Sequence: Synthetic oligonucleotide
aaaccauuauuaauucucu

SEQ ID NO: 2745030 - RNA, 19 nt, Artificial Sequence
  Description of Artificial Sequence: Synthetic oligonucleotide
uccugggaaaccauuauua

SEQ ID NO: 2745031 - RNA, 19 nt, Artificial Sequence
  Description of Artificial Sequence: Synthetic oligonucleotide
agggguucuguguugggac

SEQ ID NO: 2745032 - RNA, 19 nt, Artificial Sequence
  Description of Artificial Sequence: Synthetic oligonucleotide
aaggaagcugccugaagga

SEQ ID NO: 2745033 - RNA, 19 nt, Artificial Sequence
  Description of Artificial Sequence: Synthetic oligonucleotide
uccuaauuauaauucccac

SEQ ID NO: 2745034 - RNA, 19 nt, Artificial Sequence
  Description of Artificial Sequence: Synthetic oligonucleotide
ugauagaagggcuggggac

SEQ ID NO: 2745035 - RNA, 19 nt, Artificial Sequence
  Description of Artificial Sequence: Synthetic oligonucleotide
gauagaagggcuggggacc

SEQ ID NO: 2745036 - RNA, 19 nt, Artificial Sequence
  Description of Artificial Sequence: Synthetic oligonucleotide
uagggauucaaggucacca

SEQ ID NO: 2745037 - RNA, 19 nt, Artificial Sequence
  Description of Artificial Sequence: Synthetic oligonucleotide
uauaauucccacaccuuuu

SEQ ID NO: 2745038 - RNA, 19 nt, Artificial Sequence
  Description of Artificial Sequence: Synthetic oligonucleotide
ugccugaaggaccacaaaa

SEQ ID NO: 2745039 - RNA, 19 nt, Artificial Sequence
  Description of Artificial Sequence: Synthetic oligonucleotide
agcaaauuccugggaaacc

SEQ ID NO: 2745040 - RNA, 19 nt, Artificial Sequence
  Description of Artificial Sequence: Synthetic oligonucleotide
cuaccuauggauacauuuc

SEQ ID NO: 2745041 - RNA, 19 nt, Artificial Sequence
  Description of Artificial Sequence: Synthetic oligonucleotide
cuaauguguugcaagccac

SEQ ID NO: 2745042 - RNA, 19 nt, Artificial Sequence
  Description of Artificial Sequence: Synthetic oligonucleotide
uuucccaccccucaacagu

SEQ ID NO: 2745043 - RNA, 19 nt, Artificial Sequence
  Description of Artificial Sequence: Synthetic oligonucleotide
uaagcaaauuccugggaaa

SEQ ID NO: 2745044 - RNA, 19 nt, Artificial Sequence
  Description of Artificial Sequence: Synthetic oligonucleotide
aacacugauagaagggcug

SEQ ID NO: 2745045 - RNA, 19 nt, Artificial Sequence
  Description of Artificial Sequence: Synthetic oligonucleotide
caucaggugaugcacugcc

SEQ ID NO: 2745046 - RNA, 19 nt, Artificial Sequence
  Description of Artificial Sequence: Synthetic oligonucleotide
ugcaguuacaggccugccc

SEQ ID NO: 2745047 - RNA, 19 nt, Artificial Sequence
  Description of Artificial Sequence: Synthetic oligonucleotide
aggacaccaaggaagcugc

SEQ ID NO: 2745048 - RNA, 19 nt, Artificial Sequence
  Description of Artificial Sequence: Synthetic oligonucleotide
aaggagaauacauggccua

SEQ ID NO: 2745049 - RNA, 19 nt, Artificial Sequence
  Description of Artificial Sequence: Synthetic oligonucleotide
uggccuaucuuccuuuugu

SEQ ID NO: 2745050 - RNA, 19 nt, Artificial Sequence
  Description of Artificial Sequence: Synthetic oligonucleotide
agucaagacaguugcagaa

SEQ ID NO: 2745051 - RNA, 19 nt, Artificial Sequence
  Description of Artificial Sequence: Synthetic oligonucleotide
cacaugauccuaauuauaa

SEQ ID NO: 2745052 - RNA, 19 nt, Artificial Sequence
  Description of Artificial Sequence: Synthetic oligonucleotide
aaucccaaugcuagaaaca

SEQ ID NO: 2745053 - RNA, 19 nt, Artificial Sequence
  Description of Artificial Sequence: Synthetic oligonucleotide
acauuaaggagaauacaug

SEQ ID NO: 2745054 - RNA, 19 nt, Artificial Sequence
  Description of Artificial Sequence: Synthetic oligonucleotide
aauguguugcaagccaccu

SEQ ID NO: 2745055 - RNA, 19 nt, Artificial Sequence
  Description of Artificial Sequence: Synthetic oligonucleotide
acaccaaggaagcugccug

SEQ ID NO: 2745056 - RNA, 19 nt, Artificial Sequence
  Description of Artificial Sequence: Synthetic oligonucleotide
ggauacauuucaaacacug

SEQ ID NO: 2745057 - RNA, 19 nt, Artificial Sequence
  Description of Artificial Sequence: Synthetic oligonucleotide
uguugcaagccaccuuugc

SEQ ID NO: 2745058 - RNA, 19 nt, Artificial Sequence
  Description of Artificial Sequence: Synthetic oligonucleotide
caggauacaaaaguaagca

SEQ ID NO: 2745059 - RNA, 19 nt, Artificial Sequence
  Description of Artificial Sequence: Synthetic oligonucleotide
gagaaagcauuucggagga

SEQ ID NO: 2745060 - RNA, 19 nt, Artificial Sequence
  Description of Artificial Sequence: Synthetic oligonucleotide
aggcaacaaauacuaaugu

SEQ ID NO: 2745061 - RNA, 19 nt, Artificial Sequence
  Description of Artificial Sequence: Synthetic oligonucleotide
auucccacaccuuuuacua

SEQ ID NO: 2745062 - RNA, 19 nt, Artificial Sequence
  Description of Artificial Sequence: Synthetic oligonucleotide
gaacccucugcucaccacc

SEQ ID NO: 2745063 - RNA, 19 nt, Artificial Sequence
  Description of Artificial Sequence: Synthetic oligonucleotide
agaggaacccucugcucac

SEQ ID NO: 2745064 - RNA, 19 nt, Artificial Sequence
  Description of Artificial Sequence: Synthetic oligonucleotide
cccaaugcuagaaacacag

SEQ ID NO: 2745065 - RNA, 19 nt, Artificial Sequence
  Description of Artificial Sequence: Synthetic oligonucleotide
ucuuucccaccccucaaca

SEQ ID NO: 2745066 - RNA, 19 nt, Artificial Sequence
  Description of Artificial Sequence: Synthetic oligonucleotide
ucaaguucuuggaggaguc

SEQ ID NO: 2745067 - RNA, 19 nt, Artificial Sequence
  Description of Artificial Sequence: Synthetic oligonucleotide
aacacaggauacaaaagua

SEQ ID NO: 2745068 - RNA, 19 nt, Artificial Sequence
  Description of Artificial Sequence: Synthetic oligonucleotide
cuaugugaaaucaauggcu

SEQ ID NO: 2745069 - RNA, 19 nt, Artificial Sequence
  Description of Artificial Sequence: Synthetic oligonucleotide
gaaaucaauggcuaccuau

SEQ ID NO: 2745070 - RNA, 19 nt, Artificial Sequence
  Description of Artificial Sequence: Synthetic oligonucleotide
aaauacuaauguguugcaa

SEQ ID NO: 2745071 - RNA, 19 nt, Artificial Sequence
  Description of Artificial Sequence: Synthetic oligonucleotide
aguaagcaaauuccuggga

SEQ ID NO: 2745072 - RNA, 19 nt, Artificial Sequence
  Description of Artificial Sequence: Synthetic oligonucleotide
gucaaagaaaucaaguucu

SEQ ID NO: 2745073 - RNA, 19 nt, Artificial Sequence
  Description of Artificial Sequence: Synthetic oligonucleotide
ggcaacaaauacuaaugug

SEQ ID NO: 2745074 - RNA, 19 nt, Artificial Sequence
  Description of Artificial Sequence: Synthetic oligonucleotide
aaacacugauagaagggcu

SEQ ID NO: 2745075 - RNA, 19 nt, Artificial Sequence
  Description of Artificial Sequence: Synthetic oligonucleotide
uacuaauguguugcaagcc

SEQ ID NO: 2745076 - RNA, 19 nt, Artificial Sequence
  Description of Artificial Sequence: Synthetic oligonucleotide
ucucugcagucaaagaaau

SEQ ID NO: 2745077 - RNA, 19 nt, Artificial Sequence
  Description of Artificial Sequence: Synthetic oligonucleotide
ugcucaccaccugauaggg

SEQ ID NO: 2745078 - RNA, 19 nt, Artificial Sequence
  Description of Artificial Sequence: Synthetic oligonucleotide
cuccuaugugaaaucaaug

SEQ ID NO: 2745079 - RNA, 19 nt, Artificial Sequence
  Description of Artificial Sequence: Synthetic oligonucleotide
gagggcaccacccaucauc

SEQ ID NO: 2745080 - RNA, 19 nt, Artificial Sequence
  Description of Artificial Sequence: Synthetic oligonucleotide
aucaauggcuaccuaugga

SEQ ID NO: 2745081 - RNA, 19 nt, Artificial Sequence
  Description of Artificial Sequence: Synthetic oligonucleotide
gaccacaaaagagaucgug

SEQ ID NO: 2745082 - RNA, 19 nt, Artificial Sequence
  Description of Artificial Sequence: Synthetic oligonucleotide
gaggacaccaaggaagcug

SEQ ID NO: 2745083 - RNA, 19 nt, Artificial Sequence
  Description of Artificial Sequence: Synthetic oligonucleotide
agcagaggaacccucugcu

SEQ ID NO: 2745084 - RNA, 19 nt, Artificial Sequence
  Description of Artificial Sequence: Synthetic oligonucleotide
aucaucaggugaugcacug

SEQ ID NO: 2745085 - RNA, 19 nt, Artificial Sequence
  Description of Artificial Sequence: Synthetic oligonucleotide
aagcauuucggaggaagcu

SEQ ID NO: 2745086 - RNA, 19 nt, Artificial Sequence
  Description of Artificial Sequence: Synthetic oligonucleotide
aaucaaguucuuggaggag

SEQ ID NO: 2745087 - RNA, 19 nt, Artificial Sequence
  Description of Artificial Sequence: Synthetic oligonucleotide
aggauacaaaaguaagcaa

SEQ ID NO: 2745088 - RNA, 19 nt, Artificial Sequence
  Description of Artificial Sequence: Synthetic oligonucleotide
gacaguugcagaagagcag

SEQ ID NO: 2745089 - RNA, 19 nt, Artificial Sequence
  Description of Artificial Sequence: Synthetic oligonucleotide
agacaguugcagaagagca

SEQ ID NO: 2745090 - RNA, 19 nt, Artificial Sequence
  Description of Artificial Sequence: Synthetic oligonucleotide
uugccugcaguuacaggcc

SEQ ID NO: 2745091 - RNA, 19 nt, Artificial Sequence
  Description of Artificial Sequence: Synthetic oligonucleotide
ggauucaaggucaccaggg

SEQ ID NO: 2745092 - RNA, 19 nt, Artificial Sequence
  Description of Artificial Sequence: Synthetic oligonucleotide
uucccaccccucaacagug

SEQ ID NO: 2745093 - RNA, 19 nt, Artificial Sequence
  Description of Artificial Sequence: Synthetic oligonucleotide
aguuacaggccugcccugc

SEQ ID NO: 2745094 - RNA, 19 nt, Artificial Sequence
  Description of Artificial Sequence: Synthetic oligonucleotide
auccuaauuauaauuccca

SEQ ID NO: 2745095 - RNA, 19 nt, Artificial Sequence
  Description of Artificial Sequence: Synthetic oligonucleotide
ggacacaugauccuaauua

SEQ ID NO: 2745096 - RNA, 19 nt, Artificial Sequence
  Description of Artificial Sequence: Synthetic oligonucleotide
ccauuauuaauucucucug

SEQ ID NO: 2745097 - RNA, 19 nt, Artificial Sequence
  Description of Artificial Sequence: Synthetic oligonucleotide
uguugggacacaugauccu

SEQ ID NO: 2745098 - RNA, 19 nt, Artificial Sequence
  Description of Artificial Sequence: Synthetic oligonucleotide
ugucuccuaugugaaauca

SEQ ID NO: 2745099 - RNA, 19 nt, Artificial Sequence
  Description of Artificial Sequence: Synthetic oligonucleotide
agagcaggcaacaaauacu

SEQ ID NO: 2745100 - RNA, 19 nt, Artificial Sequence
  Description of Artificial Sequence: Synthetic oligonucleotide
aucaaguucuuggaggagu

SEQ ID NO: 2745101 - RNA, 19 nt, Artificial Sequence
  Description of Artificial Sequence: Synthetic oligonucleotide
uggauacauuucaaacacu

SEQ ID NO: 2745102 - RNA, 19 nt, Artificial Sequence
  Description of Artificial Sequence: Synthetic oligonucleotide
acaugauccuaauuauaau

SEQ ID NO: 2745103 - RNA, 19 nt, Artificial Sequence
  Description of Artificial Sequence: Synthetic oligonucleotide
uaauucccacaccuuuuac

SEQ ID NO: 2745104 - RNA, 19 nt, Artificial Sequence
  Description of Artificial Sequence: Synthetic oligonucleotide
auucaaggucaccagggaa

SEQ ID NO: 2745105 - RNA, 19 nt, Artificial Sequence
  Description of Artificial Sequence: Synthetic oligonucleotide
aaguucuuggaggagucaa

SEQ ID NO: 2745106 - RNA, 19 nt, Artificial Sequence
  Description of Artificial Sequence: Synthetic oligonucleotide
ggagucaagacaguugcag

SEQ ID NO: 2745107 - RNA, 19 nt, Artificial Sequence
  Description of Artificial Sequence: Synthetic oligonucleotide
auagggauucaaggucacc

SEQ ID NO: 2745108 - RNA, 19 nt, Artificial Sequence
  Description of Artificial Sequence: Synthetic oligonucleotide
gagucaagacaguugcaga

SEQ ID NO: 2745109 - RNA, 19 nt, Artificial Sequence
  Description of Artificial Sequence: Synthetic oligonucleotide
acugccauguugccugcag

SEQ ID NO: 2745110 - RNA, 19 nt, Artificial Sequence
  Description of Artificial Sequence: Synthetic oligonucleotide
gagaauacauggccuaucu

SEQ ID NO: 2745111 - RNA, 19 nt, Artificial Sequence
  Description of Artificial Sequence: Synthetic oligonucleotide
accacaaaagagaucguga

SEQ ID NO: 2745112 - RNA, 19 nt, Artificial Sequence
  Description of Artificial Sequence: Synthetic oligonucleotide
gaugcacugccauguugcc

SEQ ID NO: 2745113 - RNA, 19 nt, Artificial Sequence
  Description of Artificial Sequence: Synthetic oligonucleotide
acaggugcggagaggacac

SEQ ID NO: 2745114 - RNA, 19 nt, Artificial Sequence
  Description of Artificial Sequence: Synthetic oligonucleotide
ucccaaugcuagaaacaca

SEQ ID NO: 2745115 - RNA, 19 nt, Artificial Sequence
  Description of Artificial Sequence: Synthetic oligonucleotide
cuuucccaccccucaacag

SEQ ID NO: 2745116 - RNA, 19 nt, Artificial Sequence
  Description of Artificial Sequence: Synthetic oligonucleotide
gucaagacaguugcagaag

SEQ ID NO: 2745117 - RNA, 19 nt, Artificial Sequence
  Description of Artificial Sequence: Synthetic oligonucleotide
uucucucugcagucaaaga

SEQ ID NO: 2745118 - RNA, 19 nt, Artificial Sequence
  Description of Artificial Sequence: Synthetic oligonucleotide
gggauucaaggucaccagg

SEQ ID NO: 2745119 - RNA, 19 nt, Artificial Sequence
  Description of Artificial Sequence: Synthetic oligonucleotide
acccaucaucaggugaugc

SEQ ID NO: 2745120 - RNA, 19 nt, Artificial Sequence
  Description of Artificial Sequence: Synthetic oligonucleotide
uucuguguugggacacaug

SEQ ID NO: 2745121 - RNA, 19 nt, Artificial Sequence
  Description of Artificial Sequence: Synthetic oligonucleotide
gacacaugauccuaauuau

SEQ ID NO: 2745122 - RNA, 19 nt, Artificial Sequence
  Description of Artificial Sequence: Synthetic oligonucleotide
auuccugggaaaccauuau

SEQ ID NO: 2745123 - RNA, 19 nt, Artificial Sequence
  Description of Artificial Sequence: Synthetic oligonucleotide
gaagcugccugaaggacca

SEQ ID NO: 2745124 - RNA, 19 nt, Artificial Sequence
  Description of Artificial Sequence: Synthetic oligonucleotide
ccuaucuuccuuuugucuc

SEQ ID NO: 2745125 - RNA, 19 nt, Artificial Sequence
  Description of Artificial Sequence: Synthetic oligonucleotide
gaagggguucuguguuggg

SEQ ID NO: 2745126 - RNA, 19 nt, Artificial Sequence
  Description of Artificial Sequence: Synthetic oligonucleotide
caugauccuaauuauaauu

SEQ ID NO: 2745127 - RNA, 19 nt, Artificial Sequence
  Description of Artificial Sequence: Synthetic oligonucleotide
caaauacuaauguguugca

SEQ ID NO: 2745128 - RNA, 19 nt, Artificial Sequence
  Description of Artificial Sequence: Synthetic oligonucleotide
uuacaggccugcccugccc

SEQ ID NO: 2745129 - RNA, 19 nt, Artificial Sequence
  Description of Artificial Sequence: Synthetic oligonucleotide
cucucugcagucaaagaaa

SEQ ID NO: 2745130 - RNA, 19 nt, Artificial Sequence
  Description of Artificial Sequence: Synthetic oligonucleotide
ugaaaucaauggcuaccua

SEQ ID NO: 2745131 - RNA, 19 nt, Artificial Sequence
  Description of Artificial Sequence: Synthetic oligonucleotide
uuccugggaaaccauuauu

SEQ ID NO: 2745132 - RNA, 19 nt, Artificial Sequence
  Description of Artificial Sequence: Synthetic oligonucleotide
ugccggaguacugaagaca

SEQ ID NO: 2745133 - RNA, 19 nt, Artificial Sequence
  Description of Artificial Sequence: Synthetic oligonucleotide
cagaggaacccucugcuca

SEQ ID NO: 2745134 - RNA, 19 nt, Artificial Sequence
  Description of Artificial Sequence: Synthetic oligonucleotide
acacaggauacaaaaguaa

SEQ ID NO: 2745135 - RNA, 19 nt, Artificial Sequence
  Description of Artificial Sequence: Synthetic oligonucleotide
accacccaucaucagguga

SEQ ID NO: 2745136 - RNA, 19 nt, Artificial Sequence
  Description of Artificial Sequence: Synthetic oligonucleotide
uugucuccuaugugaaauc

SEQ ID NO: 2745137 - RNA, 19 nt, Artificial Sequence
  Description of Artificial Sequence: Synthetic oligonucleotide
ccuaauuauaauucccaca

SEQ ID NO: 2745138 - RNA, 19 nt, Artificial Sequence
  Description of Artificial Sequence: Synthetic oligonucleotide
uacauggccuaucuuccuu

SEQ ID NO: 2745139 - RNA, 19 nt, Artificial Sequence
  Description of Artificial Sequence: Synthetic oligonucleotide
gugaugcacugccauguug

SEQ ID NO: 2745140 - RNA, 19 nt, Artificial Sequence
  Description of Artificial Sequence: Synthetic oligonucleotide
auacauggccuaucuuccu

SEQ ID NO: 2745141 - RNA, 19 nt, Artificial Sequence
  Description of Artificial Sequence: Synthetic oligonucleotide
gggaaaccauuauuaauuc

SEQ ID NO: 2745142 - RNA, 19 nt, Artificial Sequence
  Description of Artificial Sequence: Synthetic oligonucleotide
aaauuccugggaaaccauu

SEQ ID NO: 2745143 - RNA, 19 nt, Artificial Sequence
  Description of Artificial Sequence: Synthetic oligonucleotide
uucccacaccuuuuacuac

SEQ ID NO: 2745144 - RNA, 19 nt, Artificial Sequence
  Description of Artificial Sequence: Synthetic oligonucleotide
cauuucaaacacugauaga

SEQ ID NO: 2745145 - RNA, 19 nt, Artificial Sequence
  Description of Artificial Sequence: Synthetic oligonucleotide
ucaucaggugaugcacugc

SEQ ID NO: 2745146 - RNA, 19 nt, Artificial Sequence
  Description of Artificial Sequence: Synthetic oligonucleotide
caguugcagaagagcaggc

SEQ ID NO: 2745147 - RNA, 19 nt, Artificial Sequence
  Description of Artificial Sequence: Synthetic oligonucleotide
aguugcagaagagcaggca

SEQ ID NO: 2745148 - RNA, 19 nt, Artificial Sequence
  Description of Artificial Sequence: Synthetic oligonucleotide
gauagggauucaaggucac

SEQ ID NO: 2745149 - RNA, 19 nt, Artificial Sequence
  Description of Artificial Sequence: Synthetic oligonucleotide
agaauacauggccuaucuu

SEQ ID NO: 2745150 - RNA, 19 nt, Artificial Sequence
  Description of Artificial Sequence: Synthetic oligonucleotide
guucuuggaggagucaaga

SEQ ID NO: 2745151 - RNA, 19 nt, Artificial Sequence
  Description of Artificial Sequence: Synthetic oligonucleotide
gccugaaggaccacaaaag

SEQ ID NO: 2745152 - RNA, 19 nt, Artificial Sequence
  Description of Artificial Sequence: Synthetic oligonucleotide
cagugucagcagaggaacc

SEQ ID NO: 2745153 - RNA, 19 nt, Artificial Sequence
  Description of Artificial Sequence: Synthetic oligonucleotide
gugcggagaggacaccaag

SEQ ID NO: 2745154 - RNA, 19 nt, Artificial Sequence
  Description of Artificial Sequence: Synthetic oligonucleotide
auggccuaucuuccuuuug

SEQ ID NO: 2745155 - RNA, 19 nt, Artificial Sequence
  Description of Artificial Sequence: Synthetic oligonucleotide
cucuuucccaccccucaac

SEQ ID NO: 2745156 - RNA, 19 nt, Artificial Sequence
  Description of Artificial Sequence: Synthetic oligonucleotide
guuacaggccugcccugcc

SEQ ID NO: 2745157 - RNA, 19 nt, Artificial Sequence
  Description of Artificial Sequence: Synthetic oligonucleotide
ggaagcugccugaaggacc

SEQ ID NO: 2745158 - RNA, 19 nt, Artificial Sequence
  Description of Artificial Sequence: Synthetic oligonucleotide
caggugaugcacugccaug

SEQ ID NO: 2745159 - RNA, 19 nt, Artificial Sequence
  Description of Artificial Sequence: Synthetic oligonucleotide
aagggcuggggaccacaga

SEQ ID NO: 2745160 - RNA, 19 nt, Artificial Sequence
  Description of Artificial Sequence: Synthetic oligonucleotide
cucugcagucaaagaaauc

SEQ ID NO: 2745161 - RNA, 19 nt, Artificial Sequence
  Description of Artificial Sequence: Synthetic oligonucleotide
aauucucucugcagucaaa

SEQ ID NO: 2745162 - RNA, 19 nt, Artificial Sequence
  Description of Artificial Sequence: Synthetic oligonucleotide
uggaggagucaagacaguu

SEQ ID NO: 2745163 - RNA, 19 nt, Artificial Sequence
  Description of Artificial Sequence: Synthetic oligonucleotide
gcugccggaguacugaaga

SEQ ID NO: 2745164 - RNA, 19 nt, Artificial Sequence
  Description of Artificial Sequence: Synthetic oligonucleotide
cacugauagaagggcuggg

SEQ ID NO: 2745165 - RNA, 19 nt, Artificial Sequence
  Description of Artificial Sequence: Synthetic oligonucleotide
gcauuucggaggaagcugc

SEQ ID NO: 2745166 - RNA, 19 nt, Artificial Sequence
  Description of Artificial Sequence: Synthetic oligonucleotide
auuucggaggaagcugcca

SEQ ID NO: 2745167 - RNA, 19 nt, Artificial Sequence
  Description of Artificial Sequence: Synthetic oligonucleotide
cauguugccugcaguuaca

SEQ ID NO: 2745168 - RNA, 19 nt, Artificial Sequence
  Description of Artificial Sequence: Synthetic oligonucleotide
ccaaugcuagaaacacagg

SEQ ID NO: 2745169 - RNA, 19 nt, Artificial Sequence
  Description of Artificial Sequence: Synthetic oligonucleotide
acaggccugcccugcccac

SEQ ID NO: 2745170 - RNA, 19 nt, Artificial Sequence
  Description of Artificial Sequence: Synthetic oligonucleotide
aggaacccucugcucacca

SEQ ID NO: 2745171 - RNA, 19 nt, Artificial Sequence
  Description of Artificial Sequence: Synthetic oligonucleotide
cugccggaguacugaagac

SEQ ID NO: 2745172 - RNA, 19 nt, Artificial Sequence
  Description of Artificial Sequence: Synthetic oligonucleotide
auggcuaccuauggauaca

SEQ ID NO: 2745173 - RNA, 19 nt, Artificial Sequence
  Description of Artificial Sequence: Synthetic oligonucleotide
ucaccagggaagggguucu

SEQ ID NO: 2745174 - RNA, 19 nt, Artificial Sequence
  Description of Artificial Sequence: Synthetic oligonucleotide
gcuaccuauggauacauuu

SEQ ID NO: 2745175 - RNA, 19 nt, Artificial Sequence
  Description of Artificial Sequence: Synthetic oligonucleotide
caauggcuaccuauggaua

SEQ ID NO: 2745176 - RNA, 19 nt, Artificial Sequence
  Description of Artificial Sequence: Synthetic oligonucleotide
cugggaaaccauuauuaau

SEQ ID NO: 2745177 - RNA, 19 nt, Artificial Sequence
  Description of Artificial Sequence: Synthetic oligonucleotide
acacaugauccuaauuaua

SEQ ID NO: 2745178 - RNA, 19 nt, Artificial Sequence
  Description of Artificial Sequence: Synthetic oligonucleotide
aggagaauacauggccuau

SEQ ID NO: 2745179 - RNA, 19 nt, Artificial Sequence
  Description of Artificial Sequence: Synthetic oligonucleotide
ccugaaggaccacaaaaga

SEQ ID NO: 2745180 - RNA, 19 nt, Artificial Sequence
  Description of Artificial Sequence: Synthetic oligonucleotide
accccucaacagugucagc

SEQ ID NO: 2745181 - RNA, 19 nt, Artificial Sequence
  Description of Artificial Sequence: Synthetic oligonucleotide
auguguugcaagccaccuu

SEQ ID NO: 2745182 - RNA, 19 nt, Artificial Sequence
  Description of Artificial Sequence: Synthetic oligonucleotide
gcaguuacaggccugcccu

SEQ ID NO: 2745183 - RNA, 19 nt, Artificial Sequence
  Description of Artificial Sequence: Synthetic oligonucleotide
gcaggcaacaaauacuaau

SEQ ID NO: 2745184 - RNA, 19 nt, Artificial Sequence
  Description of Artificial Sequence: Synthetic oligonucleotide
ccuauggauacauuucaaa

SEQ ID NO: 2745185 - RNA, 19 nt, Artificial Sequence
  Description of Artificial Sequence: Synthetic oligonucleotide
uggcuaccuauggauacau

SEQ ID NO: 2745186 - RNA, 19 nt, Artificial Sequence
  Description of Artificial Sequence: Synthetic oligonucleotide
ggaguacugaagacacaag

SEQ ID NO: 2745187 - RNA, 19 nt, Artificial Sequence
  Description of Artificial Sequence: Synthetic oligonucleotide
gcagucaaagaaaucaagu

SEQ ID NO: 2745188 - RNA, 19 nt, Artificial Sequence
  Description of Artificial Sequence: Synthetic oligonucleotide
aggaagcugccaggcagag

SEQ ID NO: 2745189 - RNA, 19 nt, Artificial Sequence
  Description of Artificial Sequence: Synthetic oligonucleotide
ucaccaccugauagggauu

SEQ ID NO: 2745190 - RNA, 19 nt, Artificial Sequence
  Description of Artificial Sequence: Synthetic oligonucleotide
ggaaaccauuauuaauucu

SEQ ID NO: 2745191 - RNA, 19 nt, Artificial Sequence
  Description of Artificial Sequence: Synthetic oligonucleotide
gccggaguacugaagacac

SEQ ID NO: 2745192 - RNA, 19 nt, Artificial Sequence
  Description of Artificial Sequence: Synthetic oligonucleotide
gcggagaggacaccaagga

SEQ ID NO: 2745193 - RNA, 19 nt, Artificial Sequence
  Description of Artificial Sequence: Synthetic oligonucleotide
ccacaaaagagaucgugaa

SEQ ID NO: 2745194 - RNA, 19 nt, Artificial Sequence
  Description of Artificial Sequence: Synthetic oligonucleotide
accuauggauacauuucaa

SEQ ID NO: 2745195 - RNA, 19 nt, Artificial Sequence
  Description of Artificial Sequence: Synthetic oligonucleotide
aggugcggagaggacacca

SEQ ID NO: 2745196 - RNA, 19 nt, Artificial Sequence
  Description of Artificial Sequence: Synthetic oligonucleotide
ugcaggcugccggaguacu

SEQ ID NO: 2745197 - RNA, 19 nt, Artificial Sequence
  Description of Artificial Sequence: Synthetic oligonucleotide
ggcuggggaccacagacuc

SEQ ID NO: 2745198 - RNA, 19 nt, Artificial Sequence
  Description of Artificial Sequence: Synthetic oligonucleotide
caguuacaggccugcccug

SEQ ID NO: 2745199 - RNA, 19 nt, Artificial Sequence
  Description of Artificial Sequence: Synthetic oligonucleotide
gcaagccaccuuugcaggc

SEQ ID NO: 2745200 - RNA, 19 nt, Artificial Sequence
  Description of Artificial Sequence: Synthetic oligonucleotide
caccaaggaagcugccuga

SEQ ID NO: 2745201 - RNA, 19 nt, Artificial Sequence
  Description of Artificial Sequence: Synthetic oligonucleotide
caucaucaggugaugcacu

SEQ ID NO: 2745202 - RNA, 19 nt, Artificial Sequence
  Description of Artificial Sequence: Synthetic oligonucleotide
gaggaacccucugcucacc

SEQ ID NO: 2745203 - RNA, 19 nt, Artificial Sequence
  Description of Artificial Sequence: Synthetic oligonucleotide
gacaccaaggaagcugccu

SEQ ID NO: 2745204 - RNA, 19 nt, Artificial Sequence
  Description of Artificial Sequence: Synthetic oligonucleotide
ccagggaagggguucugug

SEQ ID NO: 2745205 - RNA, 19 nt, Artificial Sequence
  Description of Artificial Sequence: Synthetic oligonucleotide
agaggacaccaaggaagcu

SEQ ID NO: 2745206 - RNA, 19 nt, Artificial Sequence
  Description of Artificial Sequence: Synthetic oligonucleotide
ggagaauacauggccuauc

SEQ ID NO: 2745207 - RNA, 19 nt, Artificial Sequence
  Description of Artificial Sequence: Synthetic oligonucleotide
ucccaccccucaacagugu

SEQ ID NO: 2745208 - RNA, 19 nt, Artificial Sequence
  Description of Artificial Sequence: Synthetic oligonucleotide
gggaagggguucuguguug

SEQ ID NO: 2745209 - RNA, 19 nt, Artificial Sequence
  Description of Artificial Sequence: Synthetic oligonucleotide
ccugcaguuacaggccugc

SEQ ID NO: 2745210 - RNA, 19 nt, Artificial Sequence
  Description of Artificial Sequence: Synthetic oligonucleotide
aucaggugaugcacugcca

SEQ ID NO: 2745211 - RNA, 19 nt, Artificial Sequence
  Description of Artificial Sequence: Synthetic oligonucleotide
accaaggaagcugccugaa

SEQ ID NO: 2745212 - RNA, 19 nt, Artificial Sequence
  Description of Artificial Sequence: Synthetic oligonucleotide
gucuccuaugugaaaucaa

SEQ ID NO: 2745213 - RNA, 19 nt, Artificial Sequence
  Description of Artificial Sequence: Synthetic oligonucleotide
guguugcaagccaccuuug

SEQ ID NO: 2745214 - RNA, 19 nt, Artificial Sequence
  Description of Artificial Sequence: Synthetic oligonucleotide
ccugggaaaccauuauuaa

SEQ ID NO: 2745215 - RNA, 19 nt, Artificial Sequence
  Description of Artificial Sequence: Synthetic oligonucleotide
cugaagacacaagcucaga

SEQ ID NO: 2745216 - RNA, 19 nt, Artificial Sequence
  Description of Artificial Sequence: Synthetic oligonucleotide
ccaaggaagcugccugaag

SEQ ID NO: 2745217 - RNA, 19 nt, Artificial Sequence
  Description of Artificial Sequence: Synthetic oligonucleotide
cagggaagggguucugugu

SEQ ID NO: 2745218 - RNA, 19 nt, Artificial Sequence
  Description of Artificial Sequence: Synthetic oligonucleotide
ggaacccucugcucaccac

SEQ ID NO: 2745219 - RNA, 19 nt, Artificial Sequence
  Description of Artificial Sequence: Synthetic oligonucleotide
caaguucuuggaggaguca

SEQ ID NO: 2745220 - RNA, 19 nt, Artificial Sequence
  Description of Artificial Sequence: Synthetic oligonucleotide
caccacccaucaucaggug

SEQ ID NO: 2745221 - RNA, 19 nt, Artificial Sequence
  Description of Artificial Sequence: Synthetic oligonucleotide
caggcugccggaguacuga

SEQ ID NO: 2745222 - RNA, 19 nt, Artificial Sequence
  Description of Artificial Sequence: Synthetic oligonucleotide
cugcaguuacaggccugcc

SEQ ID NO: 2745223 - RNA, 19 nt, Artificial Sequence
  Description of Artificial Sequence: Synthetic oligonucleotide
cacccaucaucaggugaug

SEQ ID NO: 2745224 - RNA, 19 nt, Artificial Sequence
  Description of Artificial Sequence: Synthetic oligonucleotide
aggcugccggaguacugaa

SEQ ID NO: 2745225 - RNA, 19 nt, Artificial Sequence
  Description of Artificial Sequence: Synthetic oligonucleotide
ggguucuguguugggacac

SEQ ID NO: 2745226 - RNA, 19 nt, Artificial Sequence
  Description of Artificial Sequence: Synthetic oligonucleotide
agaaagcauuucggaggaa

SEQ ID NO: 2745227 - RNA, 19 nt, Artificial Sequence
  Description of Artificial Sequence: Synthetic oligonucleotide
cacaagcucagaggagaaa

SEQ ID NO: 2745228 - RNA, 19 nt, Artificial Sequence
  Description of Artificial Sequence: Synthetic oligonucleotide
cuguguugggacacaugau

SEQ ID NO: 2745229 - RNA, 19 nt, Artificial Sequence
  Description of Artificial Sequence: Synthetic oligonucleotide
ccaccuuugcaggcugccg

SEQ ID NO: 2745230 - RNA, 19 nt, Artificial Sequence
  Description of Artificial Sequence: Synthetic oligonucleotide
gccaccuuugcaggcugcc

SEQ ID NO: 2745231 - RNA, 19 nt, Artificial Sequence
  Description of Artificial Sequence: Synthetic oligonucleotide
gcucagaggagaaagcauu

SEQ ID NO: 2745232 - RNA, 19 nt, Artificial Sequence
  Description of Artificial Sequence: Synthetic oligonucleotide
gcugccugaaggaccacaa

SEQ ID NO: 2745233 - RNA, 19 nt, Artificial Sequence
  Description of Artificial Sequence: Synthetic oligonucleotide
uggggaccacagacucuuu

SEQ ID NO: 2745234 - RNA, 19 nt, Artificial Sequence
  Description of Artificial Sequence: Synthetic oligonucleotide
gcagagggcaccacccauc

SEQ ID NO: 2745235 - RNA, 19 nt, Artificial Sequence
  Description of Artificial Sequence: Synthetic oligonucleotide
cggaguacugaagacacaa

SEQ ID NO: 2745236 - RNA, 19 nt, Artificial Sequence
  Description of Artificial Sequence: Synthetic oligonucleotide
gguucuguguugggacaca

SEQ ID NO: 2745237 - RNA, 19 nt, Artificial Sequence
  Description of Artificial Sequence: Synthetic oligonucleotide
caggugcggagaggacacc

SEQ ID NO: 2745238 - RNA, 19 nt, Artificial Sequence
  Description of Artificial Sequence: Synthetic oligonucleotide
cucugcucaccaccugaua

SEQ ID NO: 2745239 - RNA, 19 nt, Artificial Sequence
  Description of Artificial Sequence: Synthetic oligonucleotide
cuggggaccacagacucuu

SEQ ID NO: 2745240 - RNA, 19 nt, Artificial Sequence
  Description of Artificial Sequence: Synthetic oligonucleotide
ggcugccggaguacugaag

SEQ ID NO: 2745241 - RNA, 19 nt, Artificial Sequence
  Description of Artificial Sequence: Synthetic oligonucleotide
ccaccccucaacaguguca

SEQ ID NO: 2745242 - RNA, 19 nt, Artificial Sequence
  Description of Artificial Sequence: Synthetic oligonucleotide
cugccauguugccugcagu

SEQ ID NO: 2745243 - RNA, 19 nt, Artificial Sequence
  Description of Artificial Sequence: Synthetic oligonucleotide
guucuguguugggacacau

SEQ ID NO: 2745244 - RNA, 19 nt, Artificial Sequence
  Description of Artificial Sequence: Synthetic oligonucleotide
ggacaccaaggaagcugcc

SEQ ID NO: 2745245 - RNA, 19 nt, Artificial Sequence
  Description of Artificial Sequence: Synthetic oligonucleotide
gggcaccacccaucaucag

SEQ ID NO: 2745246 - RNA, 19 nt, Artificial Sequence
  Description of Artificial Sequence: Synthetic oligonucleotide
ccacccaucaucaggugau

SEQ ID NO: 2745247 - RNA, 19 nt, Artificial Sequence
  Description of Artificial Sequence: Synthetic oligonucleotide
cauggccuaucuuccuuuu

SEQ ID NO: 2745248 - RNA, 19 nt, Artificial Sequence
  Description of Artificial Sequence: Synthetic oligonucleotide
caccagggaagggguucug

SEQ ID NO: 2745249 - RNA, 19 nt, Artificial Sequence
  Description of Artificial Sequence: Synthetic oligonucleotide
ccuuugcaggcugccggag

SEQ ID NO: 2745250 - RNA, 19 nt, Artificial Sequence
  Description of Artificial Sequence: Synthetic oligonucleotide
ggugcggagaggacaccaa

SEQ ID NO: 2745251 - RNA, 19 nt, Artificial Sequence
  Description of Artificial Sequence: Synthetic oligonucleotide
ccacaggugcggagaggac

SEQ ID NO: 2745252 - RNA, 19 nt, Artificial Sequence
  Description of Artificial Sequence: Synthetic oligonucleotide
gcaggcugccggaguacug

SEQ ID NO: 2745253 - RNA, 19 nt, Artificial Sequence
  Description of Artificial Sequence: Synthetic oligonucleotide
ccaccugauagggauucaa

SEQ ID NO: 2745254 - RNA, 19 nt, Artificial Sequence
  Description of Artificial Sequence: Synthetic oligonucleotide
ggugaugcacugccauguu

SEQ ID NO: 2745255 - RNA, 19 nt, Artificial Sequence
  Description of Artificial Sequence: Synthetic oligonucleotide
cggagaggacaccaaggaa

SEQ ID NO: 2745256 - RNA, 19 nt, Artificial Sequence
  Description of Artificial Sequence: Synthetic oligonucleotide
cacugccauguugccugca

SEQ ID NO: 2745257 - RNA, 19 nt, Artificial Sequence
  Description of Artificial Sequence: Synthetic oligonucleotide
ggaccacaaaagagaucgu

SEQ ID NO: 2745258 - RNA, 19 nt, Artificial Sequence
  Description of Artificial Sequence: Synthetic oligonucleotide
ccucugcucaccaccugau

SEQ ID NO: 2745259 - RNA, 19 nt, Artificial Sequence
  Description of Artificial Sequence: Synthetic oligonucleotide
ggcuaccuauggauacauu

SEQ ID NO: 2745260 - RNA, 19 nt, Artificial Sequence
  Description of Artificial Sequence: Synthetic oligonucleotide
aggaagugcacuuugaagg

SEQ ID NO: 2745261 - RNA, 19 nt, Artificial Sequence
  Description of Artificial Sequence: Synthetic oligonucleotide
aguagagaaaagcaggguc

SEQ ID NO: 2745262 - RNA, 19 nt, Artificial Sequence
  Description of Artificial Sequence: Synthetic oligonucleotide
agagcaaguagagaaaagc

SEQ ID NO: 2745263 - RNA, 19 nt, Artificial Sequence
  Description of Artificial Sequence: Synthetic oligonucleotide
ugagagaccccauaggaag

SEQ ID NO: 2745264 - RNA, 19 nt, Artificial Sequence
  Description of Artificial Sequence: Synthetic oligonucleotide
cuguauagcaaacagacuc

SEQ ID NO: 2745265 - RNA, 19 nt, Artificial Sequence
  Description of Artificial Sequence: Synthetic oligonucleotide
ugagaguugaggaagugca

SEQ ID NO: 2745266 - RNA, 19 nt, Artificial Sequence
  Description of Artificial Sequence: Synthetic oligonucleotide
aaacugaccgccccuggcc

SEQ ID NO: 2745267 - RNA, 19 nt, Artificial Sequence
  Description of Artificial Sequence: Synthetic oligonucleotide
auagcaaacagacuccaag

SEQ ID NO: 2745268 - RNA, 19 nt, Artificial Sequence
  Description of Artificial Sequence: Synthetic oligonucleotide
uguauagcaaacagacucc

SEQ ID NO: 2745269 - RNA, 19 nt, Artificial Sequence
  Description of Artificial Sequence: Synthetic oligonucleotide
uaauuucccauccaucuug

SEQ ID NO: 2745270 - RNA, 19 nt, Artificial Sequence
  Description of Artificial Sequence: Synthetic oligonucleotide
uucguucaggcacacauag

SEQ ID NO: 2745271 - RNA, 19 nt, Artificial Sequence
  Description of Artificial Sequence: Synthetic oligonucleotide
acuuugaagguuccaggcc

SEQ ID NO: 2745272 - RNA, 19 nt, Artificial Sequence
  Description of Artificial Sequence: Synthetic oligonucleotide
aaaaccgaacucugagaac

SEQ ID NO: 2745273 - RNA, 19 nt, Artificial Sequence
  Description of Artificial Sequence: Synthetic oligonucleotide
aacaccuguuccuggaggg

SEQ ID NO: 2745274 - RNA, 19 nt, Artificial Sequence
  Description of Artificial Sequence: Synthetic oligonucleotide
auaggcaccguccaaugac

SEQ ID NO: 2745275 - RNA, 19 nt, Artificial Sequence
  Description of Artificial Sequence: Synthetic oligonucleotide
caaguagagaaaagcaggg

SEQ ID NO: 2745276 - RNA, 19 nt, Artificial Sequence
  Description of Artificial Sequence: Synthetic oligonucleotide
uuucccauccaucuuggag

SEQ ID NO: 2745277 - RNA, 19 nt, Artificial Sequence
  Description of Artificial Sequence: Synthetic oligonucleotide
aaaccgaacucugagaaca

SEQ ID NO: 2745278 - RNA, 19 nt, Artificial Sequence
  Description of Artificial Sequence: Synthetic oligonucleotide
auucuaaacugaccgcccc

SEQ ID NO: 2745279 - RNA, 19 nt, Artificial Sequence
  Description of Artificial Sequence: Synthetic oligonucleotide
agcaaacagacuccaaggg

SEQ ID NO: 2745280 - RNA, 19 nt, Artificial Sequence
  Description of Artificial Sequence: Synthetic oligonucleotide
cuuugaagguuccaggccc

SEQ ID NO: 2745281 - RNA, 19 nt, Artificial Sequence
  Description of Artificial Sequence: Synthetic oligonucleotide
gaggacuauguccugaagc

SEQ ID NO: 2745282 - RNA, 19 nt, Artificial Sequence
  Description of Artificial Sequence: Synthetic oligonucleotide
uucccauccaucuuggaga

SEQ ID NO: 2745283 - RNA, 19 nt, Artificial Sequence
  Description of Artificial Sequence: Synthetic oligonucleotide
gaaaaccgaacucugagaa

SEQ ID NO: 2745284 - RNA, 19 nt, Artificial Sequence
  Description of Artificial Sequence: Synthetic oligonucleotide
aacugaccgccccuggccc

SEQ ID NO: 2745285 - RNA, 19 nt, Artificial Sequence
  Description of Artificial Sequence: Synthetic oligonucleotide
ggccauucuaaacugaccg

SEQ ID NO: 2745286 - RNA, 19 nt, Artificial Sequence
  Description of Artificial Sequence: Synthetic oligonucleotide
gaggaagugcacuuugaag

SEQ ID NO: 2745287 - RNA, 19 nt, Artificial Sequence
  Description of Artificial Sequence: Synthetic oligonucleotide
aggacuauguccugaagcu

SEQ ID NO: 2745288 - RNA, 19 nt, Artificial Sequence
  Description of Artificial Sequence: Synthetic oligonucleotide
ucugagaacaccuguuccu

SEQ ID NO: 2745289 - RNA, 19 nt, Artificial Sequence
  Description of Artificial Sequence: Synthetic oligonucleotide
ugagacaugggcagagccc

SEQ ID NO: 2745290 - RNA, 19 nt, Artificial Sequence
  Description of Artificial Sequence: Synthetic oligonucleotide
guagagaaaagcagggucc

SEQ ID NO: 2745291 - RNA, 19 nt, Artificial Sequence
  Description of Artificial Sequence: Synthetic oligonucleotide
auguccugaagcuucucgg

SEQ ID NO: 2745292 - RNA, 19 nt, Artificial Sequence
  Description of Artificial Sequence: Synthetic oligonucleotide
gauggaucugcagugagac

SEQ ID NO: 2745293 - RNA, 19 nt, Artificial Sequence
  Description of Artificial Sequence: Synthetic oligonucleotide
caaggcuucguucaggcac

SEQ ID NO: 2745294 - RNA, 19 nt, Artificial Sequence
  Description of Artificial Sequence: Synthetic oligonucleotide
aggguccccaucuugagag

SEQ ID NO: 2745295 - RNA, 19 nt, Artificial Sequence
  Description of Artificial Sequence: Synthetic oligonucleotide
ugcacuuugaagguuccag

SEQ ID NO: 2745296 - RNA, 19 nt, Artificial Sequence
  Description of Artificial Sequence: Synthetic oligonucleotide
aucuuggagaguugaggac

SEQ ID NO: 2745297 - RNA, 19 nt, Artificial Sequence
  Description of Artificial Sequence: Synthetic oligonucleotide
cacuuugaagguuccaggc

SEQ ID NO: 2745298 - RNA, 19 nt, Artificial Sequence
  Description of Artificial Sequence: Synthetic oligonucleotide
aagugcacuuugaagguuc

SEQ ID NO: 2745299 - RNA, 19 nt, Artificial Sequence
  Description of Artificial Sequence: Synthetic oligonucleotide
agcaaguagagaaaagcag

SEQ ID NO: 2745300 - RNA, 19 nt, Artificial Sequence
  Description of Artificial Sequence: Synthetic oligonucleotide
uggagguugaagcucgugu

SEQ ID NO: 2745301 - RNA, 19 nt, Artificial Sequence
  Description of Artificial Sequence: Synthetic oligonucleotide
gaacaccuguuccuggagg

SEQ ID NO: 2745302 - RNA, 19 nt, Artificial Sequence
  Description of Artificial Sequence: Synthetic oligonucleotide
gcaaguagagaaaagcagg

SEQ ID NO: 2745303 - RNA, 19 nt, Artificial Sequence
  Description of Artificial Sequence: Synthetic oligonucleotide
aauuucccauccaucuugg

SEQ ID NO: 2745304 - RNA, 19 nt, Artificial Sequence
  Description of Artificial Sequence: Synthetic oligonucleotide
uugguuagggccucggacu

SEQ ID NO: 2745305 - RNA, 19 nt, Artificial Sequence
  Description of Artificial Sequence: Synthetic oligonucleotide
ucuuggagaguugaggacu

SEQ ID NO: 2745306 - RNA, 19 nt, Artificial Sequence
  Description of Artificial Sequence: Synthetic oligonucleotide
ugugcuuccugagaguuga

SEQ ID NO: 2745307 - RNA, 19 nt, Artificial Sequence
  Description of Artificial Sequence: Synthetic oligonucleotide
ugagaacaccuguuccugg

SEQ ID NO: 2745308 - RNA, 19 nt, Artificial Sequence
  Description of Artificial Sequence: Synthetic oligonucleotide
ugcagcauccguagcugcg

SEQ ID NO: 2745309 - RNA, 19 nt, Artificial Sequence
  Description of Artificial Sequence: Synthetic oligonucleotide
uuccugagaguugaggaag

SEQ ID NO: 2745310 - RNA, 19 nt, Artificial Sequence
  Description of Artificial Sequence: Synthetic oligonucleotide
cauucuaaacugaccgccc

SEQ ID NO: 2745311 - RNA, 19 nt, Artificial Sequence
  Description of Artificial Sequence: Synthetic oligonucleotide
aaugacccagcgcugcaca

SEQ ID NO: 2745312 - RNA, 19 nt, Artificial Sequence
  Description of Artificial Sequence: Synthetic oligonucleotide
uaaacugaccgccccuggc

SEQ ID NO: 2745313 - RNA, 19 nt, Artificial Sequence
  Description of Artificial Sequence: Synthetic oligonucleotide
cuugagagaccccauagga

SEQ ID NO: 2745314 - RNA, 19 nt, Artificial Sequence
  Description of Artificial Sequence: Synthetic oligonucleotide
uggagggcugcaauggagc

SEQ ID NO: 2745315 - RNA, 19 nt, Artificial Sequence
  Description of Artificial Sequence: Synthetic oligonucleotide
agaggucucaccgcggcgc

SEQ ID NO: 2745316 - RNA, 19 nt, Artificial Sequence
  Description of Artificial Sequence: Synthetic oligonucleotide
ggaaguagggucugcagcc

SEQ ID NO: 2745317 - RNA, 19 nt, Artificial Sequence
  Description of Artificial Sequence: Synthetic oligonucleotide
agcgcugcacagcuggugg

SEQ ID NO: 2745318 - RNA, 19 nt, Artificial Sequence
  Description of Artificial Sequence: Synthetic oligonucleotide
aggguccgcgcucagcugc

SEQ ID NO: 2745319 - RNA, 19 nt, Artificial Sequence
  Description of Artificial Sequence: Synthetic oligonucleotide
cucugagaacaccuguucc

SEQ ID NO: 2745320 - RNA, 19 nt, Artificial Sequence
  Description of Artificial Sequence: Synthetic oligonucleotide
uggauggaucugcagugag

SEQ ID NO: 2745321 - RNA, 19 nt, Artificial Sequence
  Description of Artificial Sequence: Synthetic oligonucleotide
guugguuagggccucggac

SEQ ID NO: 2745322 - RNA, 19 nt, Artificial Sequence
  Description of Artificial Sequence: Synthetic oligonucleotide
ucccgguggagguugaagc

SEQ ID NO: 2745323 - RNA, 19 nt, Artificial Sequence
  Description of Artificial Sequence: Synthetic oligonucleotide
aagcucguguugguuaggg

SEQ ID NO: 2745324 - RNA, 19 nt, Artificial Sequence
  Description of Artificial Sequence: Synthetic oligonucleotide
gaagguuccaggcccuccc

SEQ ID NO: 2745325 - RNA, 19 nt, Artificial Sequence
  Description of Artificial Sequence: Synthetic oligonucleotide
gggaaaaccgaacucugag

SEQ ID NO: 2745326 - RNA, 19 nt, Artificial Sequence
  Description of Artificial Sequence: Synthetic oligonucleotide
uagagaaaagcaggguccc

SEQ ID NO: 2745327 - RNA, 19 nt, Artificial Sequence
  Description of Artificial Sequence: Synthetic oligonucleotide
caauggagcaguguggaug

SEQ ID NO: 2745328 - RNA, 19 nt, Artificial Sequence
  Description of Artificial Sequence: Synthetic oligonucleotide
gcugagagcaaguagagaa

SEQ ID NO: 2745329 - RNA, 19 nt, Artificial Sequence
  Description of Artificial Sequence: Synthetic oligonucleotide
ugagagcaaguagagaaaa

SEQ ID NO: 2745330 - RNA, 19 nt, Artificial Sequence
  Description of Artificial Sequence: Synthetic oligonucleotide
gagcaaguagagaaaagca

SEQ ID NO: 2745331 - RNA, 19 nt, Artificial Sequence
  Description of Artificial Sequence: Synthetic oligonucleotide
gaccccauaggaagcaagg

SEQ ID NO: 2745332 - RNA, 19 nt, Artificial Sequence
  Description of Artificial Sequence: Synthetic oligonucleotide
caucuuggagaguugagga

SEQ ID NO: 2745333 - RNA, 19 nt, Artificial Sequence
  Description of Artificial Sequence: Synthetic oligonucleotide
ugcaauggagcagugugga

SEQ ID NO: 2745334 - RNA, 19 nt, Artificial Sequence
  Description of Artificial Sequence: Synthetic oligonucleotide
gaagcaaggcuucguucag

SEQ ID NO: 2745335 - RNA, 19 nt, Artificial Sequence
  Description of Artificial Sequence: Synthetic oligonucleotide
gcugcaauggagcagugug

SEQ ID NO: 2745336 - RNA, 19 nt, Artificial Sequence
  Description of Artificial Sequence: Synthetic oligonucleotide
aaguagagaaaagcagggu

SEQ ID NO: 2745337 - RNA, 19 nt, Artificial Sequence
  Description of Artificial Sequence: Synthetic oligonucleotide
cugcaauggagcagugugg

SEQ ID NO: 2745338 - RNA, 19 nt, Artificial Sequence
  Description of Artificial Sequence: Synthetic oligonucleotide
uaggcaccguccaaugacc

SEQ ID NO: 2745339 - RNA, 19 nt, Artificial Sequence
  Description of Artificial Sequence: Synthetic oligonucleotide
gacuauguccugaagcuuc

SEQ ID NO: 2745340 - RNA, 19 nt, Artificial Sequence
  Description of Artificial Sequence: Synthetic oligonucleotide
uccuggagggcugcaaugg

SEQ ID NO: 2745341 - RNA, 19 nt, Artificial Sequence
  Description of Artificial Sequence: Synthetic oligonucleotide
ucucggggagcugagagca

SEQ ID NO: 2745342 - RNA, 19 nt, Artificial Sequence
  Description of Artificial Sequence: Synthetic oligonucleotide
agggccucggacuguauag

SEQ ID NO: 2745343 - RNA, 19 nt, Artificial Sequence
  Description of Artificial Sequence: Synthetic oligonucleotide
cuucucggggagcugagag

SEQ ID NO: 2745344 - RNA, 19 nt, Artificial Sequence
  Description of Artificial Sequence: Synthetic oligonucleotide
uuugaagguuccaggcccu

SEQ ID NO: 2745345 - RNA, 19 nt, Artificial Sequence
  Description of Artificial Sequence: Synthetic oligonucleotide
ugggaaaaccgaacucuga

SEQ ID NO: 2745346 - RNA, 19 nt, Artificial Sequence
  Description of Artificial Sequence: Synthetic oligonucleotide
uugaagcucguguugguua

SEQ ID NO: 2745347 - RNA, 19 nt, Artificial Sequence
  Description of Artificial Sequence: Synthetic oligonucleotide
ucccauccaucuuggagag

SEQ ID NO: 2745348 - RNA, 19 nt, Artificial Sequence
  Description of Artificial Sequence: Synthetic oligonucleotide
ucuaaacugaccgccccug

SEQ ID NO: 2745349 - RNA, 19 nt, Artificial Sequence
  Description of Artificial Sequence: Synthetic oligonucleotide
ucguucaggcacacauagg

SEQ ID NO: 2745350 - RNA, 19 nt, Artificial Sequence
  Description of Artificial Sequence: Synthetic oligonucleotide
ugaggacuauguccugaag

SEQ ID NO: 2745351 - RNA, 19 nt, Artificial Sequence
  Description of Artificial Sequence: Synthetic oligonucleotide
cucggugucgugcccagcg

SEQ ID NO: 2745352 - RNA, 19 nt, Artificial Sequence
  Description of Artificial Sequence: Synthetic oligonucleotide
gcucguguugguuagggcc

SEQ ID NO: 2745353 - RNA, 19 nt, Artificial Sequence
  Description of Artificial Sequence: Synthetic oligonucleotide
gagaguugaggacuauguc

SEQ ID NO: 2745354 - RNA, 19 nt, Artificial Sequence
  Description of Artificial Sequence: Synthetic oligonucleotide
uauagcaaacagacuccaa

SEQ ID NO: 2745355 - RNA, 19 nt, Artificial Sequence
  Description of Artificial Sequence: Synthetic oligonucleotide
agcucguguugguuagggc

SEQ ID NO: 2745356 - RNA, 19 nt, Artificial Sequence
  Description of Artificial Sequence: Synthetic oligonucleotide
agaguugaggaagugcacu

SEQ ID NO: 2745357 - RNA, 19 nt, Artificial Sequence
  Description of Artificial Sequence: Synthetic oligonucleotide
caagggccauucuaaacug

SEQ ID NO: 2745358 - RNA, 19 nt, Artificial Sequence
  Description of Artificial Sequence: Synthetic oligonucleotide
ugguuagggccucggacug

SEQ ID NO: 2745359 - RNA, 19 nt, Artificial Sequence
  Description of Artificial Sequence: Synthetic oligonucleotide
aguguggauggaucugcag

SEQ ID NO: 2745360 - RNA, 19 nt, Artificial Sequence
  Description of Artificial Sequence: Synthetic oligonucleotide
agaacaccuguuccuggag

SEQ ID NO: 2745361 - RNA, 19 nt, Artificial Sequence
  Description of Artificial Sequence: Synthetic oligonucleotide
cugagaguugaggaagugc

SEQ ID NO: 2745362 - RNA, 19 nt, Artificial Sequence
  Description of Artificial Sequence: Synthetic oligonucleotide
gcaaacagacuccaagggc

SEQ ID NO: 2745363 - RNA, 19 nt, Artificial Sequence
  Description of Artificial Sequence: Synthetic oligonucleotide
agggccauucuaaacugac

SEQ ID NO: 2745364 - RNA, 19 nt, Artificial Sequence
  Description of Artificial Sequence: Synthetic oligonucleotide
agagaaaagcagggucccc

SEQ ID NO: 2745365 - RNA, 19 nt, Artificial Sequence
  Description of Artificial Sequence: Synthetic oligonucleotide
cugcugugcuuccugagag

SEQ ID NO: 2745366 - RNA, 19 nt, Artificial Sequence
  Description of Artificial Sequence: Synthetic oligonucleotide
accccauaggaagcaaggc

SEQ ID NO: 2745367 - RNA, 19 nt, Artificial Sequence
  Description of Artificial Sequence: Synthetic oligonucleotide
aagcaaggcuucguucagg

SEQ ID NO: 2745368 - RNA, 19 nt, Artificial Sequence
  Description of Artificial Sequence: Synthetic oligonucleotide
agaagcaccgcaggggaag

SEQ ID NO: 2745369 - RNA, 19 nt, Artificial Sequence
  Description of Artificial Sequence: Synthetic oligonucleotide
gaaguagggucugcagccg

SEQ ID NO: 2745370 - RNA, 19 nt, Artificial Sequence
  Description of Artificial Sequence: Synthetic oligonucleotide
acauaggcaccguccaaug

SEQ ID NO: 2745371 - RNA, 19 nt, Artificial Sequence
  Description of Artificial Sequence: Synthetic oligonucleotide
cuaaacugaccgccccugg

SEQ ID NO: 2745372 - RNA, 19 nt, Artificial Sequence
  Description of Artificial Sequence: Synthetic oligonucleotide
agugagacaugggcagagc

SEQ ID NO: 2745373 - RNA, 19 nt, Artificial Sequence
  Description of Artificial Sequence: Synthetic oligonucleotide
accgaacucugagaacacc

SEQ ID NO: 2745374 - RNA, 19 nt, Artificial Sequence
  Description of Artificial Sequence: Synthetic oligonucleotide
uccaaugacccagcgcugc

SEQ ID NO: 2745375 - RNA, 19 nt, Artificial Sequence
  Description of Artificial Sequence: Synthetic oligonucleotide
agugcacuuugaagguucc

SEQ ID NO: 2745376 - RNA, 19 nt, Artificial Sequence
  Description of Artificial Sequence: Synthetic oligonucleotide
aaccgaacucugagaacac

SEQ ID NO: 2745377 - RNA, 19 nt, Artificial Sequence
  Description of Artificial Sequence: Synthetic oligonucleotide
uggugggaaaaccgaacuc

SEQ ID NO: 2745378 - RNA, 19 nt, Artificial Sequence
  Description of Artificial Sequence: Synthetic oligonucleotide
gagacaugggcagagccca

SEQ ID NO: 2745379 - RNA, 19 nt, Artificial Sequence
  Description of Artificial Sequence: Synthetic oligonucleotide
gagaacaccuguuccugga

SEQ ID NO: 2745380 - RNA, 19 nt, Artificial Sequence
  Description of Artificial Sequence: Synthetic oligonucleotide
uguugguuagggccucgga

SEQ ID NO: 2745381 - RNA, 19 nt, Artificial Sequence
  Description of Artificial Sequence: Synthetic oligonucleotide
gccggaagcgcccaggccg

SEQ ID NO: 2745382 - RNA, 19 nt, Artificial Sequence
  Description of Artificial Sequence: Synthetic oligonucleotide
uugaggacuauguccugaa

SEQ ID NO: 2745383 - RNA, 19 nt, Artificial Sequence
  Description of Artificial Sequence: Synthetic oligonucleotide
cauaggaagcaaggcuucg

SEQ ID NO: 2745384 - RNA, 19 nt, Artificial Sequence
  Description of Artificial Sequence: Synthetic oligonucleotide
uccugagaguugaggaagu

SEQ ID NO: 2745385 - RNA, 19 nt, Artificial Sequence
  Description of Artificial Sequence: Synthetic oligonucleotide
uucucggggagcugagagc

SEQ ID NO: 2745386 - RNA, 19 nt, Artificial Sequence
  Description of Artificial Sequence: Synthetic oligonucleotide
uaggaagcaaggcuucguu

SEQ ID NO: 2745387 - RNA, 19 nt, Artificial Sequence
  Description of Artificial Sequence: Synthetic oligonucleotide
aaacagacuccaagggcca

SEQ ID NO: 2745388 - RNA, 19 nt, Artificial Sequence
  Description of Artificial Sequence: Synthetic oligonucleotide
uggagaguugaggacuaug

SEQ ID NO: 2745389 - RNA, 19 nt, Artificial Sequence
  Description of Artificial Sequence: Synthetic oligonucleotide
gaguugaggacuauguccu

SEQ ID NO: 2745390 - RNA, 19 nt, Artificial Sequence
  Description of Artificial Sequence: Synthetic oligonucleotide
uuccuggagggcugcaaug

SEQ ID NO: 2745391 - RNA, 19 nt, Artificial Sequence
  Description of Artificial Sequence: Synthetic oligonucleotide
ggagcugagagcaaguaga

SEQ ID NO: 2745392 - RNA, 19 nt, Artificial Sequence
  Description of Artificial Sequence: Synthetic oligonucleotide
uccgcgcucagcugcagca

SEQ ID NO: 2745393 - RNA, 19 nt, Artificial Sequence
  Description of Artificial Sequence: Synthetic oligonucleotide
ucggacuguauagcaaaca

SEQ ID NO: 2745394 - RNA, 19 nt, Artificial Sequence
  Description of Artificial Sequence: Synthetic oligonucleotide
gagagaccccauaggaagc

SEQ ID NO: 2745395 - RNA, 19 nt, Artificial Sequence
  Description of Artificial Sequence: Synthetic oligonucleotide
ccauucuaaacugaccgcc

SEQ ID NO: 2745396 - RNA, 19 nt, Artificial Sequence
  Description of Artificial Sequence: Synthetic oligonucleotide
ggcgcgcacagccagaagc

SEQ ID NO: 2745397 - RNA, 19 nt, Artificial Sequence
  Description of Artificial Sequence: Synthetic oligonucleotide
aacucugagaacaccuguu

SEQ ID NO: 2745398 - RNA, 19 nt, Artificial Sequence
  Description of Artificial Sequence: Synthetic oligonucleotide
aaggcuucguucaggcaca

SEQ ID NO: 2745399 - RNA, 19 nt, Artificial Sequence
  Description of Artificial Sequence: Synthetic oligonucleotide
gacuccaagggccauucua

SEQ ID NO: 2745400 - RNA, 19 nt, Artificial Sequence
  Description of Artificial Sequence: Synthetic oligonucleotide
acaugggcagagcccacug

SEQ ID NO: 2745401 - RNA, 19 nt, Artificial Sequence
  Description of Artificial Sequence: Synthetic oligonucleotide
agcgcccagaggucucacc

SEQ ID NO: 2745402 - RNA, 19 nt, Artificial Sequence
  Description of Artificial Sequence: Synthetic oligonucleotide
agccggaagcgcccaggcc

SEQ ID NO: 2745403 - RNA, 19 nt, Artificial Sequence
  Description of Artificial Sequence: Synthetic oligonucleotide
agggcugcaauggagcagu

SEQ ID NO: 2745404 - RNA, 19 nt, Artificial Sequence
  Description of Artificial Sequence: Synthetic oligonucleotide
guauagcaaacagacucca

SEQ ID NO: 2745405 - RNA, 19 nt, Artificial Sequence
  Description of Artificial Sequence: Synthetic oligonucleotide
ucggggagcugagagcaag

SEQ ID NO: 2745406 - RNA, 19 nt, Artificial Sequence
  Description of Artificial Sequence: Synthetic oligonucleotide
ugcgccucggugucgugcc

SEQ ID NO: 2745407 - RNA, 19 nt, Artificial Sequence
  Description of Artificial Sequence: Synthetic oligonucleotide
gaggucucaccgcggcgcg

SEQ ID NO: 2745408 - RNA, 19 nt, Artificial Sequence
  Description of Artificial Sequence: Synthetic oligonucleotide
gaacucugagaacaccugu

SEQ ID NO: 2745409 - RNA, 19 nt, Artificial Sequence
  Description of Artificial Sequence: Synthetic oligonucleotide
cucggacuguauagcaaac

SEQ ID NO: 2745410 - RNA, 19 nt, Artificial Sequence
  Description of Artificial Sequence: Synthetic oligonucleotide
ggaaaaccgaacucugaga

SEQ ID NO: 2745411 - RNA, 19 nt, Artificial Sequence
  Description of Artificial Sequence: Synthetic oligonucleotide
accguccaaugacccagcg

SEQ ID NO: 2745412 - RNA, 19 nt, Artificial Sequence
  Description of Artificial Sequence: Synthetic oligonucleotide
agcaccgcaggggaaguag

SEQ ID NO: 2745413 - RNA, 19 nt, Artificial Sequence
  Description of Artificial Sequence: Synthetic oligonucleotide
ugcacagcuggugggaaaa

SEQ ID NO: 2745414 - RNA, 19 nt, Artificial Sequence
  Description of Artificial Sequence: Synthetic oligonucleotide
gggagcugagagcaaguag

SEQ ID NO: 2745415 - RNA, 19 nt, Artificial Sequence
  Description of Artificial Sequence: Synthetic oligonucleotide
cuuccugagaguugaggaa

SEQ ID NO: 2745416 - RNA, 19 nt, Artificial Sequence
  Description of Artificial Sequence: Synthetic oligonucleotide
gugggaaaaccgaacucug

SEQ ID NO: 2745417 - RNA, 19 nt, Artificial Sequence
  Description of Artificial Sequence: Synthetic oligonucleotide
acuguauagcaaacagacu

SEQ ID NO: 2745418 - RNA, 19 nt, Artificial Sequence
  Description of Artificial Sequence: Synthetic oligonucleotide
auaggaagcaaggcuucgu

SEQ ID NO: 2745419 - RNA, 19 nt, Artificial Sequence
  Description of Artificial Sequence: Synthetic oligonucleotide
gagaguugaggaagugcac

SEQ ID NO: 2745420 - RNA, 19 nt, Artificial Sequence
  Description of Artificial Sequence: Synthetic oligonucleotide
acugaccgccccuggcccg

SEQ ID NO: 2745421 - RNA, 19 nt, Artificial Sequence
  Description of Artificial Sequence: Synthetic oligonucleotide
guguggauggaucugcagu

SEQ ID NO: 2745422 - RNA, 19 nt, Artificial Sequence
  Description of Artificial Sequence: Synthetic oligonucleotide
caggcacacauaggcaccg

SEQ ID NO: 2745423 - RNA, 19 nt, Artificial Sequence
  Description of Artificial Sequence: Synthetic oligonucleotide
aggcaccguccaaugaccc

SEQ ID NO: 2745424 - RNA, 19 nt, Artificial Sequence
  Description of Artificial Sequence: Synthetic oligonucleotide
gaagcucguguugguuagg

SEQ ID NO: 2745425 - RNA, 19 nt, Artificial Sequence
  Description of Artificial Sequence: Synthetic oligonucleotide
guugaggacuauguccuga

SEQ ID NO: 2745426 - RNA, 19 nt, Artificial Sequence
  Description of Artificial Sequence: Synthetic oligonucleotide
ccuaauuucccauccaucu

SEQ ID NO: 2745427 - RNA, 19 nt, Artificial Sequence
  Description of Artificial Sequence: Synthetic oligonucleotide
uggcccggugcccaacagc

SEQ ID NO: 2745428 - RNA, 19 nt, Artificial Sequence
  Description of Artificial Sequence: Synthetic oligonucleotide
gcgcccagaggucucaccg

SEQ ID NO: 2745429 - RNA, 19 nt, Artificial Sequence
  Description of Artificial Sequence: Synthetic oligonucleotide
accgccccuggcccggugc

SEQ ID NO: 2745430 - RNA, 19 nt, Artificial Sequence
  Description of Artificial Sequence: Synthetic oligonucleotide
cagugagacaugggcagag

SEQ ID NO: 2745431 - RNA, 19 nt, Artificial Sequence
  Description of Artificial Sequence: Synthetic oligonucleotide
cugagagcaaguagagaaa

SEQ ID NO: 2745432 - RNA, 19 nt, Artificial Sequence
  Description of Artificial Sequence: Synthetic oligonucleotide
gagggcugcaauggagcag

SEQ ID NO: 2745433 - RNA, 19 nt, Artificial Sequence
  Description of Artificial Sequence: Synthetic oligonucleotide
ucggugucgugcccagcgc

SEQ ID NO: 2745434 - RNA, 19 nt, Artificial Sequence
  Description of Artificial Sequence: Synthetic oligonucleotide
agcaguguggauggaucug

SEQ ID NO: 2745435 - RNA, 19 nt, Artificial Sequence
  Description of Artificial Sequence: Synthetic oligonucleotide
cugcagcauccguagcugc

SEQ ID NO: 2745436 - RNA, 19 nt, Artificial Sequence
  Description of Artificial Sequence: Synthetic oligonucleotide
aagggccauucuaaacuga

SEQ ID NO: 2745437 - RNA, 19 nt, Artificial Sequence
  Description of Artificial Sequence: Synthetic oligonucleotide
gagcccacugcugugcuuc

SEQ ID NO: 2745438 - RNA, 19 nt, Artificial Sequence
  Description of Artificial Sequence: Synthetic oligonucleotide
gugcccagcgcccagaggu

SEQ ID NO: 2745439 - RNA, 19 nt, Artificial Sequence
  Description of Artificial Sequence: Synthetic oligonucleotide
uagggccucggacuguaua

SEQ ID NO: 2745440 - RNA, 19 nt, Artificial Sequence
  Description of Artificial Sequence: Synthetic oligonucleotide
guagcugcgccucgguguc

SEQ ID NO: 2745441 - RNA, 19 nt, Artificial Sequence
  Description of Artificial Sequence: Synthetic oligonucleotide
agaccccauaggaagcaag

SEQ ID NO: 2745442 - RNA, 19 nt, Artificial Sequence
  Description of Artificial Sequence: Synthetic oligonucleotide
cucaccgcggcgcgcacag

SEQ ID NO: 2745443 - RNA, 19 nt, Artificial Sequence
  Description of Artificial Sequence: Synthetic oligonucleotide
ugacccagcgcugcacagc

SEQ ID NO: 2745444 - RNA, 19 nt, Artificial Sequence
  Description of Artificial Sequence: Synthetic oligonucleotide
caccgcggcgcgcacagcc

SEQ ID NO: 2745445 - RNA, 19 nt, Artificial Sequence
  Description of Artificial Sequence: Synthetic oligonucleotide
ucgugcccagcgcccagag

SEQ ID NO: 2745446 - RNA, 19 nt, Artificial Sequence
  Description of Artificial Sequence: Synthetic oligonucleotide
cugugcuuccugagaguug

SEQ ID NO: 2745447 - RNA, 19 nt, Artificial Sequence
  Description of Artificial Sequence: Synthetic oligonucleotide
acuauguccugaagcuucu

SEQ ID NO: 2745448 - RNA, 19 nt, Artificial Sequence
  Description of Artificial Sequence: Synthetic oligonucleotide
gaagcgcccaggccgcuca

SEQ ID NO: 2745449 - RNA, 19 nt, Artificial Sequence
  Description of Artificial Sequence: Synthetic oligonucleotide
ugucgugcccagcgcccag

SEQ ID NO: 2745450 - RNA, 19 nt, Artificial Sequence
  Description of Artificial Sequence: Synthetic oligonucleotide
cagaggucucaccgcggcg

SEQ ID NO: 2745451 - RNA, 19 nt, Artificial Sequence
  Description of Artificial Sequence: Synthetic oligonucleotide
gcccagaggucucaccgcg

SEQ ID NO: 2745452 - RNA, 19 nt, Artificial Sequence
  Description of Artificial Sequence: Synthetic oligonucleotide
cuuggagaguugaggacua

SEQ ID NO: 2745453 - RNA, 19 nt, Artificial Sequence
  Description of Artificial Sequence: Synthetic oligonucleotide
uggagcaguguggauggau

SEQ ID NO: 2745454 - RNA, 19 nt, Artificial Sequence
  Description of Artificial Sequence: Synthetic oligonucleotide
acacauaggcaccguccaa

SEQ ID NO: 2745455 - RNA, 19 nt, Artificial Sequence
  Description of Artificial Sequence: Synthetic oligonucleotide
ggugggaaaaccgaacucu

SEQ ID NO: 2745456 - RNA, 19 nt, Artificial Sequence
  Description of Artificial Sequence: Synthetic oligonucleotide
cauaggcaccguccaauga

SEQ ID NO: 2745457 - RNA, 19 nt, Artificial Sequence
  Description of Artificial Sequence: Synthetic oligonucleotide
cauccguagcugcgccucg

SEQ ID NO: 2745458 - RNA, 19 nt, Artificial Sequence
  Description of Artificial Sequence: Synthetic oligonucleotide
gcaguguggauggaucugc

SEQ ID NO: 2745459 - RNA, 19 nt, Artificial Sequence
  Description of Artificial Sequence: Synthetic oligonucleotide
gcuucguucaggcacacau

SEQ ID NO: 2745460 - RNA, 19 nt, Artificial Sequence
  Description of Artificial Sequence: Synthetic oligonucleotide
cagcauccguagcugcgcc

SEQ ID NO: 2745461 - RNA, 19 nt, Artificial Sequence
  Description of Artificial Sequence: Synthetic oligonucleotide
ggacuguauagcaaacaga

SEQ ID NO: 2745462 - RNA, 19 nt, Artificial Sequence
  Description of Artificial Sequence: Synthetic oligonucleotide
agccgcugcggucccgccg

SEQ ID NO: 2745463 - RNA, 19 nt, Artificial Sequence
  Description of Artificial Sequence: Synthetic oligonucleotide
cagacuccaagggccauuc

SEQ ID NO: 2745464 - RNA, 19 nt, Artificial Sequence
  Description of Artificial Sequence: Synthetic oligonucleotide
aggggaaguagggucugca

SEQ ID NO: 2745465 - RNA, 19 nt, Artificial Sequence
  Description of Artificial Sequence: Synthetic oligonucleotide
guguugguuagggccucgg

SEQ ID NO: 2745466 - RNA, 19 nt, Artificial Sequence
  Description of Artificial Sequence: Synthetic oligonucleotide
aguugaggaagugcacuuu

SEQ ID NO: 2745467 - RNA, 19 nt, Artificial Sequence
  Description of Artificial Sequence: Synthetic oligonucleotide
ggaagugcacuuugaaggu

SEQ ID NO: 2745468 - RNA, 19 nt, Artificial Sequence
  Description of Artificial Sequence: Synthetic oligonucleotide
gaguugaggaagugcacuu

SEQ ID NO: 2745469 - RNA, 19 nt, Artificial Sequence
  Description of Artificial Sequence: Synthetic oligonucleotide
cagcuggugggaaaaccga

SEQ ID NO: 2745470 - RNA, 19 nt, Artificial Sequence
  Description of Artificial Sequence: Synthetic oligonucleotide
cuggugggaaaaccgaacu

SEQ ID NO: 2745471 - RNA, 19 nt, Artificial Sequence
  Description of Artificial Sequence: Synthetic oligonucleotide
agcauccguagcugcgccu

SEQ ID NO: 2745472 - RNA, 19 nt, Artificial Sequence
  Description of Artificial Sequence: Synthetic oligonucleotide
aacagacuccaagggccau

SEQ ID NO: 2745473 - RNA, 19 nt, Artificial Sequence
  Description of Artificial Sequence: Synthetic oligonucleotide
cucguguugguuagggccu

SEQ ID NO: 2745474 - RNA, 19 nt, Artificial Sequence
  Description of Artificial Sequence: Synthetic oligonucleotide
caaugacccagcgcugcac

SEQ ID NO: 2745475 - RNA, 19 nt, Artificial Sequence
  Description of Artificial Sequence: Synthetic oligonucleotide
ccauaggaagcaaggcuuc

SEQ ID NO: 2745476 - RNA, 19 nt, Artificial Sequence
  Description of Artificial Sequence: Synthetic oligonucleotide
gacccagcgcugcacagcu

SEQ ID NO: 2745477 - RNA, 19 nt, Artificial Sequence
  Description of Artificial Sequence: Synthetic oligonucleotide
ggagcaguguggauggauc

SEQ ID NO: 2745478 - RNA, 19 nt, Artificial Sequence
  Description of Artificial Sequence: Synthetic oligonucleotide
ggagaguugaggacuaugu

SEQ ID NO: 2745479 - RNA, 19 nt, Artificial Sequence
  Description of Artificial Sequence: Synthetic oligonucleotide
auccguagcugcgccucgg

SEQ ID NO: 2745480 - RNA, 19 nt, Artificial Sequence
  Description of Artificial Sequence: Synthetic oligonucleotide
ggcccggugcccaacagcc

SEQ ID NO: 2745481 - RNA, 19 nt, Artificial Sequence
  Description of Artificial Sequence: Synthetic oligonucleotide
caccguccaaugacccagc

SEQ ID NO: 2745482 - RNA, 19 nt, Artificial Sequence
  Description of Artificial Sequence: Synthetic oligonucleotide
uccaggcccucccggugga

SEQ ID NO: 2745483 - RNA, 19 nt, Artificial Sequence
  Description of Artificial Sequence: Synthetic oligonucleotide
cucccgguggagguugaag

SEQ ID NO: 2745484 - RNA, 19 nt, Artificial Sequence
  Description of Artificial Sequence: Synthetic oligonucleotide
accgcaggggaaguagggu

SEQ ID NO: 2745485 - RNA, 19 nt, Artificial Sequence
  Description of Artificial Sequence: Synthetic oligonucleotide
cuucguucaggcacacaua

SEQ ID NO: 2745486 - RNA, 19 nt, Artificial Sequence
  Description of Artificial Sequence: Synthetic oligonucleotide
ccaagggccauucuaaacu

SEQ ID NO: 2745487 - RNA, 19 nt, Artificial Sequence
  Description of Artificial Sequence: Synthetic oligonucleotide
caucuugagagaccccaua

SEQ ID NO: 2745488 - RNA, 19 nt, Artificial Sequence
  Description of Artificial Sequence: Synthetic oligonucleotide
guagggucugcagccgcug

SEQ ID NO: 2745489 - RNA, 19 nt, Artificial Sequence
  Description of Artificial Sequence: Synthetic oligonucleotide
cgguggagguugaagcucg

SEQ ID NO: 2745490 - RNA, 19 nt, Artificial Sequence
  Description of Artificial Sequence: Synthetic oligonucleotide
gcccaacagccccagccgg

SEQ ID NO: 2745491 - RNA, 19 nt, Artificial Sequence
  Description of Artificial Sequence: Synthetic oligonucleotide
agacaugggcagagcccac

SEQ ID NO: 2745492 - RNA, 19 nt, Artificial Sequence
  Description of Artificial Sequence: Synthetic oligonucleotide
aagcgcccaggccgcucag

SEQ ID NO: 2745493 - RNA, 19 nt, Artificial Sequence
  Description of Artificial Sequence: Synthetic oligonucleotide
cgaacucugagaacaccug

SEQ ID NO: 2745494 - RNA, 19 nt, Artificial Sequence
  Description of Artificial Sequence: Synthetic oligonucleotide
ggagggcugcaauggagca

SEQ ID NO: 2745495 - RNA, 19 nt, Artificial Sequence
  Description of Artificial Sequence: Synthetic oligonucleotide
gccgcugcggucccgccgg

SEQ ID NO: 2745496 - RNA, 19 nt, Artificial Sequence
  Description of Artificial Sequence: Synthetic oligonucleotide
guggauggaucugcaguga

SEQ ID NO: 2745497 - RNA, 19 nt, Artificial Sequence
  Description of Artificial Sequence: Synthetic oligonucleotide
cccggugcccaacagcccc

SEQ ID NO: 2745498 - RNA, 19 nt, Artificial Sequence
  Description of Artificial Sequence: Synthetic oligonucleotide
guggagguugaagcucgug

SEQ ID NO: 2745499 - RNA, 19 nt, Artificial Sequence
  Description of Artificial Sequence: Synthetic oligonucleotide
gcuggugggaaaaccgaac

SEQ ID NO: 2745500 - RNA, 19 nt, Artificial Sequence
  Description of Artificial Sequence: Synthetic oligonucleotide
caguguggauggaucugca

SEQ ID NO: 2745501 - RNA, 19 nt, Artificial Sequence
  Description of Artificial Sequence: Synthetic oligonucleotide
uugaagguuccaggcccuc

SEQ ID NO: 2745502 - RNA, 19 nt, Artificial Sequence
  Description of Artificial Sequence: Synthetic oligonucleotide
cuaauuucccauccaucuu

SEQ ID NO: 2745503 - RNA, 19 nt, Artificial Sequence
  Description of Artificial Sequence: Synthetic oligonucleotide
cguccaaugacccagcgcu

SEQ ID NO: 2745504 - RNA, 19 nt, Artificial Sequence
  Description of Artificial Sequence: Synthetic oligonucleotide
gggccauucuaaacugacc

SEQ ID NO: 2745505 - RNA, 19 nt, Artificial Sequence
  Description of Artificial Sequence: Synthetic oligonucleotide
cucaggguccgcgcucagc

SEQ ID NO: 2745506 - RNA, 19 nt, Artificial Sequence
  Description of Artificial Sequence: Synthetic oligonucleotide
gguccccaucuugagagac

SEQ ID NO: 2745507 - RNA, 19 nt, Artificial Sequence
  Description of Artificial Sequence: Synthetic oligonucleotide
aggucucaccgcggcgcgc

SEQ ID NO: 2745508 - RNA, 19 nt, Artificial Sequence
  Description of Artificial Sequence: Synthetic oligonucleotide
cugcgccucggugucgugc

SEQ ID NO: 2745509 - RNA, 19 nt, Artificial Sequence
  Description of Artificial Sequence: Synthetic oligonucleotide
gcgcccaggccgcucaggg

SEQ ID NO: 2745510 - RNA, 19 nt, Artificial Sequence
  Description of Artificial Sequence: Synthetic oligonucleotide
guccaaugacccagcgcug

SEQ ID NO: 2745511 - RNA, 19 nt, Artificial Sequence
  Description of Artificial Sequence: Synthetic oligonucleotide
uuagggccucggacuguau

SEQ ID NO: 2745512 - RNA, 19 nt, Artificial Sequence
  Description of Artificial Sequence: Synthetic oligonucleotide
ggccucggacuguauagca

SEQ ID NO: 2745513 - RNA, 19 nt, Artificial Sequence
  Description of Artificial Sequence: Synthetic oligonucleotide
ggaucugcagugagacaug

SEQ ID NO: 2745514 - RNA, 19 nt, Artificial Sequence
  Description of Artificial Sequence: Synthetic oligonucleotide
gcagcauccguagcugcgc

SEQ ID NO: 2745515 - RNA, 19 nt, Artificial Sequence
  Description of Artificial Sequence: Synthetic oligonucleotide
ggugucgugcccagcgccc

SEQ ID NO: 2745516 - RNA, 19 nt, Artificial Sequence
  Description of Artificial Sequence: Synthetic oligonucleotide
ggauggaucugcagugaga

SEQ ID NO: 2745517 - RNA, 19 nt, Artificial Sequence
  Description of Artificial Sequence: Synthetic oligonucleotide
ccucggacuguauagcaaa

SEQ ID NO: 2745518 - RNA, 19 nt, Artificial Sequence
  Description of Artificial Sequence: Synthetic oligonucleotide
ucguguugguuagggccuc

SEQ ID NO: 2745519 - RNA, 19 nt, Artificial Sequence
  Description of Artificial Sequence: Synthetic oligonucleotide
gcagagcccacugcugugc

SEQ ID NO: 2745520 - RNA, 19 nt, Artificial Sequence
  Description of Artificial Sequence: Synthetic oligonucleotide
guccgcgcucagcugcagc

SEQ ID NO: 2745521 - RNA, 19 nt, Artificial Sequence
  Description of Artificial Sequence: Synthetic oligonucleotide
caggguccccaucuugaga

SEQ ID NO: 2745522 - RNA, 19 nt, Artificial Sequence
  Description of Artificial Sequence: Synthetic oligonucleotide
uuggagaguugaggacuau

SEQ ID NO: 2745523 - RNA, 19 nt, Artificial Sequence
  Description of Artificial Sequence: Synthetic oligonucleotide
cuauguccugaagcuucuc

SEQ ID NO: 2745524 - RNA, 19 nt, Artificial Sequence
  Description of Artificial Sequence: Synthetic oligonucleotide
cugaccgccccuggcccgg

SEQ ID NO: 2745525 - RNA, 19 nt, Artificial Sequence
  Description of Artificial Sequence: Synthetic oligonucleotide
acagacuccaagggccauu

SEQ ID NO: 2745526 - RNA, 19 nt, Artificial Sequence
  Description of Artificial Sequence: Synthetic oligonucleotide
cuggcccggugcccaacag

SEQ ID NO: 2745527 - RNA, 19 nt, Artificial Sequence
  Description of Artificial Sequence: Synthetic oligonucleotide
guuagggccucggacugua

SEQ ID NO: 2745528 - RNA, 19 nt, Artificial Sequence
  Description of Artificial Sequence: Synthetic oligonucleotide
ucucaccgcggcgcgcaca

SEQ ID NO: 2745529 - RNA, 19 nt, Artificial Sequence
  Description of Artificial Sequence: Synthetic oligonucleotide
gcgcugcacagcugguggg

SEQ ID NO: 2745530 - RNA, 19 nt, Artificial Sequence
  Description of Artificial Sequence: Synthetic oligonucleotide
gcaccgcaggggaaguagg

SEQ ID NO: 2745531 - RNA, 19 nt, Artificial Sequence
  Description of Artificial Sequence: Synthetic oligonucleotide
uagcugcgccucggugucg

SEQ ID NO: 2745532 - RNA, 19 nt, Artificial Sequence
  Description of Artificial Sequence: Synthetic oligonucleotide
agcugcgccucggugucgu

SEQ ID NO: 2745533 - RNA, 19 nt, Artificial Sequence
  Description of Artificial Sequence: Synthetic oligonucleotide
agagcccacugcugugcuu

SEQ ID NO: 2745534 - RNA, 19 nt, Artificial Sequence
  Description of Artificial Sequence: Synthetic oligonucleotide
gcgcacagccagaagcacc

SEQ ID NO: 2745535 - RNA, 19 nt, Artificial Sequence
  Description of Artificial Sequence: Synthetic oligonucleotide
ggcaccguccaaugaccca

SEQ ID NO: 2745536 - RNA, 19 nt, Artificial Sequence
  Description of Artificial Sequence: Synthetic oligonucleotide
agcgcccaggccgcucagg

SEQ ID NO: 2745537 - RNA, 19 nt, Artificial Sequence
  Description of Artificial Sequence: Synthetic oligonucleotide
gagaccccauaggaagcaa

SEQ ID NO: 2745538 - RNA, 19 nt, Artificial Sequence
  Description of Artificial Sequence: Synthetic oligonucleotide
ugcggucccgccggcgggc

SEQ ID NO: 2745539 - RNA, 19 nt, Artificial Sequence
  Description of Artificial Sequence: Synthetic oligonucleotide
cccacugcugugcuuccug

SEQ ID NO: 2745540 - RNA, 19 nt, Artificial Sequence
  Description of Artificial Sequence: Synthetic oligonucleotide
ccgaacucugagaacaccu

SEQ ID NO: 2745541 - RNA, 19 nt, Artificial Sequence
  Description of Artificial Sequence: Synthetic oligonucleotide
cccagaggucucaccgcgg

SEQ ID NO: 2745542 - RNA, 19 nt, Artificial Sequence
  Description of Artificial Sequence: Synthetic oligonucleotide
cccauaggaagcaaggcuu

SEQ ID NO: 2745543 - RNA, 19 nt, Artificial Sequence
  Description of Artificial Sequence: Synthetic oligonucleotide
cagaagcaccgcaggggaa

SEQ ID NO: 2745544 - RNA, 19 nt, Artificial Sequence
  Description of Artificial Sequence: Synthetic oligonucleotide
gcauccguagcugcgccuc

SEQ ID NO: 2745545 - RNA, 19 nt, Artificial Sequence
  Description of Artificial Sequence: Synthetic oligonucleotide
guugaagcucguguugguu

SEQ ID NO: 2745546 - RNA, 19 nt, Artificial Sequence
  Description of Artificial Sequence: Synthetic oligonucleotide
aagcaccgcaggggaagua

SEQ ID NO: 2745547 - RNA, 19 nt, Artificial Sequence
  Description of Artificial Sequence: Synthetic oligonucleotide
ccugagaguugaggaagug

SEQ ID NO: 2745548 - RNA, 19 nt, Artificial Sequence
  Description of Artificial Sequence: Synthetic oligonucleotide
gugcacuuugaagguucca

SEQ ID NO: 2745549 - RNA, 19 nt, Artificial Sequence
  Description of Artificial Sequence: Synthetic oligonucleotide
cugcacagcuggugggaaa

SEQ ID NO: 2745550 - RNA, 19 nt, Artificial Sequence
  Description of Artificial Sequence: Synthetic oligonucleotide
gcaaggcuucguucaggca

SEQ ID NO: 2745551 - RNA, 19 nt, Artificial Sequence
  Description of Artificial Sequence: Synthetic oligonucleotide
ccggaagcgcccaggccgc

SEQ ID NO: 2745552 - RNA, 19 nt, Artificial Sequence
  Description of Artificial Sequence: Synthetic oligonucleotide
gaagcaccgcaggggaagu

SEQ ID NO: 2745553 - RNA, 19 nt, Artificial Sequence
  Description of Artificial Sequence: Synthetic oligonucleotide
ccccauaggaagcaaggcu

SEQ ID NO: 2745554 - RNA, 19 nt, Artificial Sequence
  Description of Artificial Sequence: Synthetic oligonucleotide
aggcacacauaggcaccgu

SEQ ID NO: 2745555 - RNA, 19 nt, Artificial Sequence
  Description of Artificial Sequence: Synthetic oligonucleotide
gccucggugucgugcccag

SEQ ID NO: 2745556 - RNA, 19 nt, Artificial Sequence
  Description of Artificial Sequence: Synthetic oligonucleotide
ggucucaccgcggcgcgca

SEQ ID NO: 2745557 - RNA, 19 nt, Artificial Sequence
  Description of Artificial Sequence: Synthetic oligonucleotide
cggugucgugcccagcgcc

SEQ ID NO: 2745558 - RNA, 19 nt, Artificial Sequence
  Description of Artificial Sequence: Synthetic oligonucleotide
gugucgugcccagcgccca

SEQ ID NO: 2745559 - RNA, 19 nt, Artificial Sequence
  Description of Artificial Sequence: Synthetic oligonucleotide
cccaggccgcucagggucc

SEQ ID NO: 2745560 - RNA, 19 nt, Artificial Sequence
  Description of Artificial Sequence: Synthetic oligonucleotide
ccgguggagguugaagcuc

SEQ ID NO: 2745561 - RNA, 19 nt, Artificial Sequence
  Description of Artificial Sequence: Synthetic oligonucleotide
cugcagccgcugcgguccc

SEQ ID NO: 2745562 - RNA, 19 nt, Artificial Sequence
  Description of Artificial Sequence: Synthetic oligonucleotide
gcgcgcacagccagaagca

SEQ ID NO: 2745563 - RNA, 19 nt, Artificial Sequence
  Description of Artificial Sequence: Synthetic oligonucleotide
ccaaugacccagcgcugca

SEQ ID NO: 2745564 - RNA, 19 nt, Artificial Sequence
  Description of Artificial Sequence: Synthetic oligonucleotide
gucucaccgcggcgcgcac

SEQ ID NO: 2745565 - RNA, 19 nt, Artificial Sequence
  Description of Artificial Sequence: Synthetic oligonucleotide
cgcccagaggucucaccgc

SEQ ID NO: 2745566 - RNA, 19 nt, Artificial Sequence
  Description of Artificial Sequence: Synthetic oligonucleotide
cguagcugcgccucggugu

SEQ ID NO: 2745567 - RNA, 19 nt, Artificial Sequence
  Description of Artificial Sequence: Synthetic oligonucleotide
ggguccccaucuugagaga

SEQ ID NO: 2745568 - RNA, 19 nt, Artificial Sequence
  Description of Artificial Sequence: Synthetic oligonucleotide
gaccgccccuggcccggug

SEQ ID NO: 2745569 - RNA, 19 nt, Artificial Sequence
  Description of Artificial Sequence: Synthetic oligonucleotide
gucgugcccagcgcccaga

SEQ ID NO: 2745570 - RNA, 19 nt, Artificial Sequence
  Description of Artificial Sequence: Synthetic oligonucleotide
cucggggagcugagagcaa

SEQ ID NO: 2745571 - RNA, 19 nt, Artificial Sequence
  Description of Artificial Sequence: Synthetic oligonucleotide
gccucggacuguauagcaa

SEQ ID NO: 2745572 - RNA, 19 nt, Artificial Sequence
  Description of Artificial Sequence: Synthetic oligonucleotide
ggucccgccggcgggcggc

SEQ ID NO: 2745573 - RNA, 19 nt, Artificial Sequence
  Description of Artificial Sequence: Synthetic oligonucleotide
gcacagcuggugggaaaac

SEQ ID NO: 2745574 - RNA, 19 nt, Artificial Sequence
  Description of Artificial Sequence: Synthetic oligonucleotide
cagagcccacugcugugcu

SEQ ID NO: 2745575 - RNA, 19 nt, Artificial Sequence
  Description of Artificial Sequence: Synthetic oligonucleotide
gcccucccgguggagguug

SEQ ID NO: 2745576 - RNA, 19 nt, Artificial Sequence
  Description of Artificial Sequence: Synthetic oligonucleotide
cguguugguuagggccucg

SEQ ID NO: 2745577 - RNA, 19 nt, Artificial Sequence
  Description of Artificial Sequence: Synthetic oligonucleotide
cagcgcccagaggucucac

SEQ ID NO: 2745578 - RNA, 19 nt, Artificial Sequence
  Description of Artificial Sequence: Synthetic oligonucleotide
gcaauggagcaguguggau

SEQ ID NO: 2745579 - RNA, 19 nt, Artificial Sequence
  Description of Artificial Sequence: Synthetic oligonucleotide
ggacuauguccugaagcuu

SEQ ID NO: 2745580 - RNA, 19 nt, Artificial Sequence
  Description of Artificial Sequence: Synthetic oligonucleotide
cccgguggagguugaagcu

SEQ ID NO: 2745581 - RNA, 19 nt, Artificial Sequence
  Description of Artificial Sequence: Synthetic oligonucleotide
gccccagccggaagcgccc

SEQ ID NO: 2745582 - RNA, 19 nt, Artificial Sequence
  Description of Artificial Sequence: Synthetic oligonucleotide
gcuucucggggagcugaga

SEQ ID NO: 2745583 - RNA, 19 nt, Artificial Sequence
  Description of Artificial Sequence: Synthetic oligonucleotide
ccgcggcgcgcacagccag

SEQ ID NO: 2745584 - RNA, 19 nt, Artificial Sequence
  Description of Artificial Sequence: Synthetic oligonucleotide
ggaagcgcccaggccgcuc

SEQ ID NO: 2745585 - RNA, 19 nt, Artificial Sequence
  Description of Artificial Sequence: Synthetic oligonucleotide
gguccgcgcucagcugcag

SEQ ID NO: 2745586 - RNA, 19 nt, Artificial Sequence
  Description of Artificial Sequence: Synthetic oligonucleotide
ugaccgccccuggcccggu

SEQ ID NO: 2745587 - RNA, 19 nt, Artificial Sequence
  Description of Artificial Sequence: Synthetic oligonucleotide
ccgccccuggcccggugcc

SEQ ID NO: 2745588 - RNA, 19 nt, Artificial Sequence
  Description of Artificial Sequence: Synthetic oligonucleotide
cgcaggggaaguagggucu

SEQ ID NO: 2745589 - RNA, 19 nt, Artificial Sequence
  Description of Artificial Sequence: Synthetic oligonucleotide
gcugcgccucggugucgug

SEQ ID NO: 2745590 - RNA, 19 nt, Artificial Sequence
  Description of Artificial Sequence: Synthetic oligonucleotide
ccuggcccggugcccaaca

SEQ ID NO: 2745591 - RNA, 19 nt, Artificial Sequence
  Description of Artificial Sequence: Synthetic oligonucleotide
ccgcucaggguccgcgcuc

SEQ ID NO: 2745592 - RNA, 19 nt, Artificial Sequence
  Description of Artificial Sequence: Synthetic oligonucleotide
gcgccucggugucgugccc

SEQ ID NO: 2745593 - RNA, 19 nt, Artificial Sequence
  Description of Artificial Sequence: Synthetic oligonucleotide
gccgcucaggguccgcgcu

SEQ ID NO: 2745594 - RNA, 19 nt, Artificial Sequence
  Description of Artificial Sequence: Synthetic oligonucleotide
cgcgcacagccagaagcac

SEQ ID NO: 2745595 - RNA, 19 nt, Artificial Sequence
  Description of Artificial Sequence: Synthetic oligonucleotide
gguuagggccucggacugu

SEQ ID NO: 2745596 - RNA, 19 nt, Artificial Sequence
  Description of Artificial Sequence: Synthetic oligonucleotide
cccagccggaagcgcccag

SEQ ID NO: 2745597 - RNA, 19 nt, Artificial Sequence
  Description of Artificial Sequence: Synthetic oligonucleotide
ggguccgcgcucagcugca

SEQ ID NO: 2745598 - RNA, 19 nt, Artificial Sequence
  Description of Artificial Sequence: Synthetic oligonucleotide
gcggucccgccggcgggcg

SEQ ID NO: 2745599 - RNA, 19 nt, Artificial Sequence
  Description of Artificial Sequence: Synthetic oligonucleotide
ccucggugucgugcccagc

SEQ ID NO: 2745600 - RNA, 19 nt, Artificial Sequence
  Description of Artificial Sequence: Synthetic oligonucleotide
gcggcgcgcacagccagaa

SEQ ID NO: 2745601 - RNA, 19 nt, Artificial Sequence
  Description of Artificial Sequence: Synthetic oligonucleotide
gguggagguugaagcucgu

SEQ ID NO: 2745602 - RNA, 19 nt, Artificial Sequence
  Description of Artificial Sequence: Synthetic oligonucleotide
ccagcgcccagaggucuca

SEQ ID NO: 2745603 - RNA, 19 nt, Artificial Sequence
  Description of Artificial Sequence: Synthetic oligonucleotide
cgcugcggucccgccggcg

SEQ ID NO: 2745604 - RNA, 19 nt, Artificial Sequence
  Description of Artificial Sequence: Synthetic oligonucleotide
cggcgcgcacagccagaag

SEQ ID NO: 2745605 - RNA, 19 nt, Artificial Sequence
  Description of Artificial Sequence: Synthetic oligonucleotide
cggggagcugagagcaagu

SEQ ID NO: 2745606 - RNA, 19 nt, Artificial Sequence
  Description of Artificial Sequence: Synthetic oligonucleotide
cccuggcccggugcccaac

SEQ ID NO: 2745607 - RNA, 19 nt, Artificial Sequence
  Description of Artificial Sequence: Synthetic oligonucleotide
cccucccgguggagguuga

SEQ ID NO: 2745608 - RNA, 19 nt, Artificial Sequence
  Description of Artificial Sequence: Synthetic oligonucleotide
ccgcugcggucccgccggc

SEQ ID NO: 2745609 - RNA, 19 nt, Artificial Sequence
  Description of Artificial Sequence: Synthetic oligonucleotide
cgccccuggcccggugccc

SEQ ID NO: 2745610 - RNA, 19 nt, Artificial Sequence
  Description of Artificial Sequence: Synthetic oligonucleotide
ccccagccggaagcgccca

SEQ ID NO: 2745611 - RNA, 19 nt, Artificial Sequence
  Description of Artificial Sequence: Synthetic oligonucleotide
ccucccgguggagguugaa

SEQ ID NO: 2745612 - RNA, 19 nt, Artificial Sequence
  Description of Artificial Sequence: Synthetic oligonucleotide
ggcccucccgguggagguu

SEQ ID NO: 2745613 - RNA, 19 nt, Artificial Sequence
  Description of Artificial Sequence: Synthetic oligonucleotide
ccgcgcucagcugcagcau

SEQ ID NO: 2745614 - RNA, 19 nt, Artificial Sequence
  Description of Artificial Sequence: Synthetic oligonucleotide
cggaagcgcccaggccgcu

SEQ ID NO: 2745615 - RNA, 19 nt, Artificial Sequence
  Description of Artificial Sequence: Synthetic oligonucleotide
auugcaucguaguaaaggg

SEQ ID NO: 2745616 - RNA, 19 nt, Artificial Sequence
  Description of Artificial Sequence: Synthetic oligonucleotide
cuuacugaggauugcaucg

SEQ ID NO: 2745617 - RNA, 19 nt, Artificial Sequence
  Description of Artificial Sequence: Synthetic oligonucleotide
uguugauagagaauggaga

SEQ ID NO: 2745618 - RNA, 19 nt, Artificial Sequence
  Description of Artificial Sequence: Synthetic oligonucleotide
aauucgggacuccacaauc

SEQ ID NO: 2745619 - RNA, 19 nt, Artificial Sequence
  Description of Artificial Sequence: Synthetic oligonucleotide
uucacagucaucuugaguu

SEQ ID NO: 2745620 - RNA, 19 nt, Artificial Sequence
  Description of Artificial Sequence: Synthetic oligonucleotide
gauugcaucguaguaaagg

SEQ ID NO: 2745621 - RNA, 19 nt, Artificial Sequence
  Description of Artificial Sequence: Synthetic oligonucleotide
augagcagaaucuucacag

SEQ ID NO: 2745622 - RNA, 19 nt, Artificial Sequence
  Description of Artificial Sequence: Synthetic oligonucleotide
guuauaguugaccaggcgc

SEQ ID NO: 2745623 - RNA, 19 nt, Artificial Sequence
  Description of Artificial Sequence: Synthetic oligonucleotide
cagagcauccuccagaugg

SEQ ID NO: 2745624 - RNA, 19 nt, Artificial Sequence
  Description of Artificial Sequence: Synthetic oligonucleotide
ugugacaaguagcacagcc

SEQ ID NO: 2745625 - RNA, 19 nt, Artificial Sequence
  Description of Artificial Sequence: Synthetic oligonucleotide
uuguugauagagaauggag

SEQ ID NO: 2745626 - RNA, 19 nt, Artificial Sequence
  Description of Artificial Sequence: Synthetic oligonucleotide
cuuguuauaguugaccagg

SEQ ID NO: 2745627 - RNA, 19 nt, Artificial Sequence
  Description of Artificial Sequence: Synthetic oligonucleotide
agaaauuccagguguggcg

SEQ ID NO: 2745628 - RNA, 19 nt, Artificial Sequence
  Description of Artificial Sequence: Synthetic oligonucleotide
auggagaggauccacacag

SEQ ID NO: 2745629 - RNA, 19 nt, Artificial Sequence
  Description of Artificial Sequence: Synthetic oligonucleotide
ugacaaguagcacagcccc

SEQ ID NO: 2745630 - RNA, 19 nt, Artificial Sequence
  Description of Artificial Sequence: Synthetic oligonucleotide
uucgugaggagauaaggag

SEQ ID NO: 2745631 - RNA, 19 nt, Artificial Sequence
  Description of Artificial Sequence: Synthetic oligonucleotide
ugauagagaauggagagga

SEQ ID NO: 2745632 - RNA, 19 nt, Artificial Sequence
  Description of Artificial Sequence: Synthetic oligonucleotide
ucugaaugggacccaaucc

SEQ ID NO: 2745633 - RNA, 19 nt, Artificial Sequence
  Description of Artificial Sequence: Synthetic oligonucleotide
uccuuguugauagagaaug

SEQ ID NO: 2745634 - RNA, 19 nt, Artificial Sequence
  Description of Artificial Sequence: Synthetic oligonucleotide
agguaugucuccaagaagg

SEQ ID NO: 2745635 - RNA, 19 nt, Artificial Sequence
  Description of Artificial Sequence: Synthetic oligonucleotide
aggcgcacaaauuucaccg

SEQ ID NO: 2745636 - RNA, 19 nt, Artificial Sequence
  Description of Artificial Sequence: Synthetic oligonucleotide
uccacaauccugcgaaugg

SEQ ID NO: 2745637 - RNA, 19 nt, Artificial Sequence
  Description of Artificial Sequence: Synthetic oligonucleotide
aauccugcgaauggggucg

SEQ ID NO: 2745638 - RNA, 19 nt, Artificial Sequence
  Description of Artificial Sequence: Synthetic oligonucleotide
uguuauaguugaccaggcg

SEQ ID NO: 2745639 - RNA, 19 nt, Artificial Sequence
  Description of Artificial Sequence: Synthetic oligonucleotide
aauagcuucugaugaccag

SEQ ID NO: 2745640 - RNA, 19 nt, Artificial Sequence
  Description of Artificial Sequence: Synthetic oligonucleotide
cacacuuucuccccaaugg

SEQ ID NO: 2745641 - RNA, 19 nt, Artificial Sequence
  Description of Artificial Sequence: Synthetic oligonucleotide
cugaaugggacccaauccc

SEQ ID NO: 2745642 - RNA, 19 nt, Artificial Sequence
  Description of Artificial Sequence: Synthetic oligonucleotide
aucuuguuauaguugacca

SEQ ID NO: 2745643 - RNA, 19 nt, Artificial Sequence
  Description of Artificial Sequence: Synthetic oligonucleotide
gagauaaggagcgugcugc

SEQ ID NO: 2745644 - RNA, 19 nt, Artificial Sequence
  Description of Artificial Sequence: Synthetic oligonucleotide
ucuuguuauaguugaccag

SEQ ID NO: 2745645 - RNA, 19 nt, Artificial Sequence
  Description of Artificial Sequence: Synthetic oligonucleotide
ucgugaggagauaaggagc

SEQ ID NO: 2745646 - RNA, 19 nt, Artificial Sequence
  Description of Artificial Sequence: Synthetic oligonucleotide
ucuugaguuucucagcaaa

SEQ ID NO: 2745647 - RNA, 19 nt, Artificial Sequence
  Description of Artificial Sequence: Synthetic oligonucleotide
ugcugagugugacaaguag

SEQ ID NO: 2745648 - RNA, 19 nt, Artificial Sequence
  Description of Artificial Sequence: Synthetic oligonucleotide
aaaauucgggacuccacaa

SEQ ID NO: 2745649 - RNA, 19 nt, Artificial Sequence
  Description of Artificial Sequence: Synthetic oligonucleotide
ucuccuuguugauagagaa

SEQ ID NO: 2745650 - RNA, 19 nt, Artificial Sequence
  Description of Artificial Sequence: Synthetic oligonucleotide
ugaguuucucagcaaaguc

SEQ ID NO: 2745651 - RNA, 19 nt, Artificial Sequence
  Description of Artificial Sequence: Synthetic oligonucleotide
ugaaugggacccaaucccc

SEQ ID NO: 2745652 - RNA, 19 nt, Artificial Sequence
  Description of Artificial Sequence: Synthetic oligonucleotide
uugauagagaauggagagg

SEQ ID NO: 2745653 - RNA, 19 nt, Artificial Sequence
  Description of Artificial Sequence: Synthetic oligonucleotide
ugcaccucaggaucggagg

SEQ ID NO: 2745654 - RNA, 19 nt, Artificial Sequence
  Description of Artificial Sequence: Synthetic oligonucleotide
agccaauagcuucugauga

SEQ ID NO: 2745655 - RNA, 19 nt, Artificial Sequence
  Description of Artificial Sequence: Synthetic oligonucleotide
agaugcauguccaugagca

SEQ ID NO: 2745656 - RNA, 19 nt, Artificial Sequence
  Description of Artificial Sequence: Synthetic oligonucleotide
agacgcaagguaugucucc

SEQ ID NO: 2745657 - RNA, 19 nt, Artificial Sequence
  Description of Artificial Sequence: Synthetic oligonucleotide
ucaucuugaguuucucagc

SEQ ID NO: 2745658 - RNA, 19 nt, Artificial Sequence
  Description of Artificial Sequence: Synthetic oligonucleotide
aauggagaggauccacaca

SEQ ID NO: 2745659 - RNA, 19 nt, Artificial Sequence
  Description of Artificial Sequence: Synthetic oligonucleotide
uucugaaugggacccaauc

SEQ ID NO: 2745660 - RNA, 19 nt, Artificial Sequence
  Description of Artificial Sequence: Synthetic oligonucleotide
uagccaauagcuucugaug

SEQ ID NO: 2745661 - RNA, 19 nt, Artificial Sequence
  Description of Artificial Sequence: Synthetic oligonucleotide
uuucaccgcaacuucuucc

SEQ ID NO: 2745662 - RNA, 19 nt, Artificial Sequence
  Description of Artificial Sequence: Synthetic oligonucleotide
uuguuauaguugaccaggc

SEQ ID NO: 2745663 - RNA, 19 nt, Artificial Sequence
  Description of Artificial Sequence: Synthetic oligonucleotide
aauggggucgucaggacug

SEQ ID NO: 2745664 - RNA, 19 nt, Artificial Sequence
  Description of Artificial Sequence: Synthetic oligonucleotide
acagcugugcaccucagga

SEQ ID NO: 2745665 - RNA, 19 nt, Artificial Sequence
  Description of Artificial Sequence: Synthetic oligonucleotide
ucugaugaccagacgcaag

SEQ ID NO: 2745666 - RNA, 19 nt, Artificial Sequence
  Description of Artificial Sequence: Synthetic oligonucleotide
caucuuguuauaguugacc

SEQ ID NO: 2745667 - RNA, 19 nt, Artificial Sequence
  Description of Artificial Sequence: Synthetic oligonucleotide
acaaauuucaccgcaacuu

SEQ ID NO: 2745668 - RNA, 19 nt, Artificial Sequence
  Description of Artificial Sequence: Synthetic oligonucleotide
uccuccagauggaaggaag

SEQ ID NO: 2745669 - RNA, 19 nt, Artificial Sequence
  Description of Artificial Sequence: Synthetic oligonucleotide
gcuucugaugaccagacgc

SEQ ID NO: 2745670 - RNA, 19 nt, Artificial Sequence
  Description of Artificial Sequence: Synthetic oligonucleotide
uaguaaagggcagaacacc

SEQ ID NO: 2745671 - RNA, 19 nt, Artificial Sequence
  Description of Artificial Sequence: Synthetic oligonucleotide
gaaauuccagguguggcgc

SEQ ID NO: 2745672 - RNA, 19 nt, Artificial Sequence
  Description of Artificial Sequence: Synthetic oligonucleotide
gaauggagaggauccacac

SEQ ID NO: 2745673 - RNA, 19 nt, Artificial Sequence
  Description of Artificial Sequence: Synthetic oligonucleotide
aggagcgugcugcagacag

SEQ ID NO: 2745674 - RNA, 19 nt, Artificial Sequence
  Description of Artificial Sequence: Synthetic oligonucleotide
uugcaucguaguaaagggc

SEQ ID NO: 2745675 - RNA, 19 nt, Artificial Sequence
  Description of Artificial Sequence: Synthetic oligonucleotide
uucaccgcaacuucuucca

SEQ ID NO: 2745676 - RNA, 19 nt, Artificial Sequence
  Description of Artificial Sequence: Synthetic oligonucleotide
caaauuucaccgcaacuuc

SEQ ID NO: 2745677 - RNA, 19 nt, Artificial Sequence
  Description of Artificial Sequence: Synthetic oligonucleotide
gauccacacagggagaggc

SEQ ID NO: 2745678 - RNA, 19 nt, Artificial Sequence
  Description of Artificial Sequence: Synthetic oligonucleotide
aggaggagcuuacugagga

SEQ ID NO: 2745679 - RNA, 19 nt, Artificial Sequence
  Description of Artificial Sequence: Synthetic oligonucleotide
ucccuagcuggccugggcg

SEQ ID NO: 2745680 - RNA, 19 nt, Artificial Sequence
  Description of Artificial Sequence: Synthetic oligonucleotide
uucucagcaaagucagccc

SEQ ID NO: 2745681 - RNA, 19 nt, Artificial Sequence
  Description of Artificial Sequence: Synthetic oligonucleotide
auaaggagcgugcugcaga

SEQ ID NO: 2745682 - RNA, 19 nt, Artificial Sequence
  Description of Artificial Sequence: Synthetic oligonucleotide
cacaauccugcgaaugggg

SEQ ID NO: 2745683 - RNA, 19 nt, Artificial Sequence
  Description of Artificial Sequence: Synthetic oligonucleotide
ugaccaggcgcacaaauuu

SEQ ID NO: 2745684 - RNA, 19 nt, Artificial Sequence
  Description of Artificial Sequence: Synthetic oligonucleotide
cugagugugacaaguagca

SEQ ID NO: 2745685 - RNA, 19 nt, Artificial Sequence
  Description of Artificial Sequence: Synthetic oligonucleotide
aaauucgggacuccacaau

SEQ ID NO: 2745686 - RNA, 19 nt, Artificial Sequence
  Description of Artificial Sequence: Synthetic oligonucleotide
gcauccuccagauggaagg

SEQ ID NO: 2745687 - RNA, 19 nt, Artificial Sequence
  Description of Artificial Sequence: Synthetic oligonucleotide
auuucaccgcaacuucuuc

SEQ ID NO: 2745688 - RNA, 19 nt, Artificial Sequence
  Description of Artificial Sequence: Synthetic oligonucleotide
agucagagcauccuccaga

SEQ ID NO: 2745689 - RNA, 19 nt, Artificial Sequence
  Description of Artificial Sequence: Synthetic oligonucleotide
aaauuucaccgcaacuucu

SEQ ID NO: 2745690 - RNA, 19 nt, Artificial Sequence
  Description of Artificial Sequence: Synthetic oligonucleotide
ugaggagauaaggagcgug

SEQ ID NO: 2745691 - RNA, 19 nt, Artificial Sequence
  Description of Artificial Sequence: Synthetic oligonucleotide
gacuccacaauccugcgaa

SEQ ID NO: 2745692 - RNA, 19 nt, Artificial Sequence
  Description of Artificial Sequence: Synthetic oligonucleotide
ucaggaucggaggaggagc

SEQ ID NO: 2745693 - RNA, 19 nt, Artificial Sequence
  Description of Artificial Sequence: Synthetic oligonucleotide
auucgggacuccacaaucc

SEQ ID NO: 2745694 - RNA, 19 nt, Artificial Sequence
  Description of Artificial Sequence: Synthetic oligonucleotide
gagcagaaucuucacaguc

SEQ ID NO: 2745695 - RNA, 19 nt, Artificial Sequence
  Description of Artificial Sequence: Synthetic oligonucleotide
aagucagagcauccuccag

SEQ ID NO: 2745696 - RNA, 19 nt, Artificial Sequence
  Description of Artificial Sequence: Synthetic oligonucleotide
ugcauguccaugagcagaa

SEQ ID NO: 2745697 - RNA, 19 nt, Artificial Sequence
  Description of Artificial Sequence: Synthetic oligonucleotide
ucggaggaggagcuuacug

SEQ ID NO: 2745698 - RNA, 19 nt, Artificial Sequence
  Description of Artificial Sequence: Synthetic oligonucleotide
ugaggauugcaucguagua

SEQ ID NO: 2745699 - RNA, 19 nt, Artificial Sequence
  Description of Artificial Sequence: Synthetic oligonucleotide
aaagggcagaacaccaucu

SEQ ID NO: 2745700 - RNA, 19 nt, Artificial Sequence
  Description of Artificial Sequence: Synthetic oligonucleotide
gaugcauguccaugagcag

SEQ ID NO: 2745701 - RNA, 19 nt, Artificial Sequence
  Description of Artificial Sequence: Synthetic oligonucleotide
acuuucuccccaauggaag

SEQ ID NO: 2745702 - RNA, 19 nt, Artificial Sequence
  Description of Artificial Sequence: Synthetic oligonucleotide
uggcacuguagccaauagc

SEQ ID NO: 2745703 - RNA, 19 nt, Artificial Sequence
  Description of Artificial Sequence: Synthetic oligonucleotide
aggauugcaucguaguaaa

SEQ ID NO: 2745704 - RNA, 19 nt, Artificial Sequence
  Description of Artificial Sequence: Synthetic oligonucleotide
ugaccagacgcaagguaug

SEQ ID NO: 2745705 - RNA, 19 nt, Artificial Sequence
  Description of Artificial Sequence: Synthetic oligonucleotide
aguaaagggcagaacacca

SEQ ID NO: 2745706 - RNA, 19 nt, Artificial Sequence
  Description of Artificial Sequence: Synthetic oligonucleotide
uccagauggaaggaaggca

SEQ ID NO: 2745707 - RNA, 19 nt, Artificial Sequence
  Description of Artificial Sequence: Synthetic oligonucleotide
gaggagauaaggagcgugc

SEQ ID NO: 2745708 - RNA, 19 nt, Artificial Sequence
  Description of Artificial Sequence: Synthetic oligonucleotide
uggagaggauccacacagg

SEQ ID NO: 2745709 - RNA, 19 nt, Artificial Sequence
  Description of Artificial Sequence: Synthetic oligonucleotide
accgcaacuucuuccagcu

SEQ ID NO: 2745710 - RNA, 19 nt, Artificial Sequence
  Description of Artificial Sequence: Synthetic oligonucleotide
aaucuggcccuugagcaca

SEQ ID NO: 2745711 - RNA, 19 nt, Artificial Sequence
  Description of Artificial Sequence: Synthetic oligonucleotide
cagaaauuccagguguggc

SEQ ID NO: 2745712 - RNA, 19 nt, Artificial Sequence
  Description of Artificial Sequence: Synthetic oligonucleotide
auagcuucugaugaccaga

SEQ ID NO: 2745713 - RNA, 19 nt, Artificial Sequence
  Description of Artificial Sequence: Synthetic oligonucleotide
uagcuucugaugaccagac

SEQ ID NO: 2745714 - RNA, 19 nt, Artificial Sequence
  Description of Artificial Sequence: Synthetic oligonucleotide
gaagucagagcauccucca

SEQ ID NO: 2745715 - RNA, 19 nt, Artificial Sequence
  Description of Artificial Sequence: Synthetic oligonucleotide
gguucgugaggagauaagg

SEQ ID NO: 2745716 - RNA, 19 nt, Artificial Sequence
  Description of Artificial Sequence: Synthetic oligonucleotide
uaaggagcgugcugcagac

SEQ ID NO: 2745717 - RNA, 19 nt, Artificial Sequence
  Description of Artificial Sequence: Synthetic oligonucleotide
uguaucccuagcuggccug

SEQ ID NO: 2745718 - RNA, 19 nt, Artificial Sequence
  Description of Artificial Sequence: Synthetic oligonucleotide
agucuccuuguugauagag

SEQ ID NO: 2745719 - RNA, 19 nt, Artificial Sequence
  Description of Artificial Sequence: Synthetic oligonucleotide
uaguugaccaggcgcacaa

SEQ ID NO: 2745720 - RNA, 19 nt, Artificial Sequence
  Description of Artificial Sequence: Synthetic oligonucleotide
ucuucacagucaucuugag

SEQ ID NO: 2745721 - RNA, 19 nt, Artificial Sequence
  Description of Artificial Sequence: Synthetic oligonucleotide
ccagauggaaggaaggcag

SEQ ID NO: 2745722 - RNA, 19 nt, Artificial Sequence
  Description of Artificial Sequence: Synthetic oligonucleotide
uucgggacuccacaauccu

SEQ ID NO: 2745723 - RNA, 19 nt, Artificial Sequence
  Description of Artificial Sequence: Synthetic oligonucleotide
aaauuccagguguggcgcu

SEQ ID NO: 2745724 - RNA, 19 nt, Artificial Sequence
  Description of Artificial Sequence: Synthetic oligonucleotide
caagguaugucuccaagaa

SEQ ID NO: 2745725 - RNA, 19 nt, Artificial Sequence
  Description of Artificial Sequence: Synthetic oligonucleotide
caccaucuuguuauaguug

SEQ ID NO: 2745726 - RNA, 19 nt, Artificial Sequence
  Description of Artificial Sequence: Synthetic oligonucleotide
cuucugaugaccagacgca

SEQ ID NO: 2745727 - RNA, 19 nt, Artificial Sequence
  Description of Artificial Sequence: Synthetic oligonucleotide
gaaucuggcccuugagcac

SEQ ID NO: 2745728 - RNA, 19 nt, Artificial Sequence
  Description of Artificial Sequence: Synthetic oligonucleotide
cagaacaccaucuuguuau

SEQ ID NO: 2745729 - RNA, 19 nt, Artificial Sequence
  Description of Artificial Sequence: Synthetic oligonucleotide
gaggauugcaucguaguaa

SEQ ID NO: 2745730 - RNA, 19 nt, Artificial Sequence
  Description of Artificial Sequence: Synthetic oligonucleotide
gaacaccaucuuguuauag

SEQ ID NO: 2745731 - RNA, 19 nt, Artificial Sequence
  Description of Artificial Sequence: Synthetic oligonucleotide
gauggcuagcugcuccagc

SEQ ID NO: 2745732 - RNA, 19 nt, Artificial Sequence
  Description of Artificial Sequence: Synthetic oligonucleotide
uguagccaauagcuucuga

SEQ ID NO: 2745733 - RNA, 19 nt, Artificial Sequence
  Description of Artificial Sequence: Synthetic oligonucleotide
agucagcccggccagaaau

SEQ ID NO: 2745734 - RNA, 19 nt, Artificial Sequence
  Description of Artificial Sequence: Synthetic oligonucleotide
cccaauggaagucagagca

SEQ ID NO: 2745735 - RNA, 19 nt, Artificial Sequence
  Description of Artificial Sequence: Synthetic oligonucleotide
caggcgcacaaauuucacc

SEQ ID NO: 2745736 - RNA, 19 nt, Artificial Sequence
  Description of Artificial Sequence: Synthetic oligonucleotide
cuuguugauagagaaugga

SEQ ID NO: 2745737 - RNA, 19 nt, Artificial Sequence
  Description of Artificial Sequence: Synthetic oligonucleotide
cgugaggagauaaggagcg

SEQ ID NO: 2745738 - RNA, 19 nt, Artificial Sequence
  Description of Artificial Sequence: Synthetic oligonucleotide
aauuucaccgcaacuucuu

SEQ ID NO: 2745739 - RNA, 19 nt, Artificial Sequence
  Description of Artificial Sequence: Synthetic oligonucleotide
aucuucacagucaucuuga

SEQ ID NO: 2745740 - RNA, 19 nt, Artificial Sequence
  Description of Artificial Sequence: Synthetic oligonucleotide
ugggcgaggagcggguucg

SEQ ID NO: 2745741 - RNA, 19 nt, Artificial Sequence
  Description of Artificial Sequence: Synthetic oligonucleotide
agcagaaucuucacaguca

SEQ ID NO: 2745742 - RNA, 19 nt, Artificial Sequence
  Description of Artificial Sequence: Synthetic oligonucleotide
ggaaggcagaugcaugucc

SEQ ID NO: 2745743 - RNA, 19 nt, Artificial Sequence
  Description of Artificial Sequence: Synthetic oligonucleotide
caauggaagucagagcauc

SEQ ID NO: 2745744 - RNA, 19 nt, Artificial Sequence
  Description of Artificial Sequence: Synthetic oligonucleotide
cuccaggcacacuuucucc

SEQ ID NO: 2745745 - RNA, 19 nt, Artificial Sequence
  Description of Artificial Sequence: Synthetic oligonucleotide
cagaugcauguccaugagc

SEQ ID NO: 2745746 - RNA, 19 nt, Artificial Sequence
  Description of Artificial Sequence: Synthetic oligonucleotide
aagggcagaacaccaucuu

SEQ ID NO: 2745747 - RNA, 19 nt, Artificial Sequence
  Description of Artificial Sequence: Synthetic oligonucleotide
ucgggacuccacaauccug

SEQ ID NO: 2745748 - RNA, 19 nt, Artificial Sequence
  Description of Artificial Sequence: Synthetic oligonucleotide
agcuucugaugaccagacg

SEQ ID NO: 2745749 - RNA, 19 nt, Artificial Sequence
  Description of Artificial Sequence: Synthetic oligonucleotide
acuguagccaauagcuucu

SEQ ID NO: 2745750 - RNA, 19 nt, Artificial Sequence
  Description of Artificial Sequence: Synthetic oligonucleotide
caauccugcgaaugggguc

SEQ ID NO: 2745751 - RNA, 19 nt, Artificial Sequence
  Description of Artificial Sequence: Synthetic oligonucleotide
caauagcuucugaugacca

SEQ ID NO: 2745752 - RNA, 19 nt, Artificial Sequence
  Description of Artificial Sequence: Synthetic oligonucleotide
aauuccagguguggcgcug

SEQ ID NO: 2745753 - RNA, 19 nt, Artificial Sequence
  Description of Artificial Sequence: Synthetic oligonucleotide
gaugaccagacgcaaggua

SEQ ID NO: 2745754 - RNA, 19 nt, Artificial Sequence
  Description of Artificial Sequence: Synthetic oligonucleotide
uugaccaggcgcacaaauu

SEQ ID NO: 2745755 - RNA, 19 nt, Artificial Sequence
  Description of Artificial Sequence: Synthetic oligonucleotide
augcauguccaugagcaga

SEQ ID NO: 2745756 - RNA, 19 nt, Artificial Sequence
  Description of Artificial Sequence: Synthetic oligonucleotide
cuccagauggaaggaaggc

SEQ ID NO: 2745757 - RNA, 19 nt, Artificial Sequence
  Description of Artificial Sequence: Synthetic oligonucleotide
caccgcaacuucuuccagc

SEQ ID NO: 2745758 - RNA, 19 nt, Artificial Sequence
  Description of Artificial Sequence: Synthetic oligonucleotide
uuacugaggauugcaucgu

SEQ ID NO: 2745759 - RNA, 19 nt, Artificial Sequence
  Description of Artificial Sequence: Synthetic oligonucleotide
augaccagacgcaagguau

SEQ ID NO: 2745760 - RNA, 19 nt, Artificial Sequence
  Description of Artificial Sequence: Synthetic oligonucleotide
ggaagucagagcauccucc

SEQ ID NO: 2745761 - RNA, 19 nt, Artificial Sequence
  Description of Artificial Sequence: Synthetic oligonucleotide
cugcgaauggggucgucag

SEQ ID NO: 2745762 - RNA, 19 nt, Artificial Sequence
  Description of Artificial Sequence: Synthetic oligonucleotide
gaggaggagcuuacugagg

SEQ ID NO: 2745763 - RNA, 19 nt, Artificial Sequence
  Description of Artificial Sequence: Synthetic oligonucleotide
ucaccgcaacuucuuccag

SEQ ID NO: 2745764 - RNA, 19 nt, Artificial Sequence
  Description of Artificial Sequence: Synthetic oligonucleotide
guucgugaggagauaagga

SEQ ID NO: 2745765 - RNA, 19 nt, Artificial Sequence
  Description of Artificial Sequence: Synthetic oligonucleotide
agggagaggcagcugcuca

SEQ ID NO: 2745766 - RNA, 19 nt, Artificial Sequence
  Description of Artificial Sequence: Synthetic oligonucleotide
aaagucagcccggccagaa

SEQ ID NO: 2745767 - RNA, 19 nt, Artificial Sequence
  Description of Artificial Sequence: Synthetic oligonucleotide
ggagauaaggagcgugcug

SEQ ID NO: 2745768 - RNA, 19 nt, Artificial Sequence
  Description of Artificial Sequence: Synthetic oligonucleotide
agggccugaaucuggcccu

SEQ ID NO: 2745769 - RNA, 19 nt, Artificial Sequence
  Description of Artificial Sequence: Synthetic oligonucleotide
guagccaauagcuucugau

SEQ ID NO: 2745770 - RNA, 19 nt, Artificial Sequence
  Description of Artificial Sequence: Synthetic oligonucleotide
ugagugugacaaguagcac

SEQ ID NO: 2745771 - RNA, 19 nt, Artificial Sequence
  Description of Artificial Sequence: Synthetic oligonucleotide
aggagcuuacugaggauug

SEQ ID NO: 2745772 - RNA, 19 nt, Artificial Sequence
  Description of Artificial Sequence: Synthetic oligonucleotide
cagacgcaagguaugucuc

SEQ ID NO: 2745773 - RNA, 19 nt, Artificial Sequence
  Description of Artificial Sequence: Synthetic oligonucleotide
gguguggcgcugcugagug

SEQ ID NO: 2745774 - RNA, 19 nt, Artificial Sequence
  Description of Artificial Sequence: Synthetic oligonucleotide
ggcacuguagccaauagcu

SEQ ID NO: 2745775 - RNA, 19 nt, Artificial Sequence
  Description of Artificial Sequence: Synthetic oligonucleotide
uucugaugaccagacgcaa

SEQ ID NO: 2745776 - RNA, 19 nt, Artificial Sequence
  Description of Artificial Sequence: Synthetic oligonucleotide
gcaaagucagcccggccag

SEQ ID NO: 2745777 - RNA, 19 nt, Artificial Sequence
  Description of Artificial Sequence: Synthetic oligonucleotide
gcugagugugacaaguagc

SEQ ID NO: 2745778 - RNA, 19 nt, Artificial Sequence
  Description of Artificial Sequence: Synthetic oligonucleotide
aucguaguaaagggcagaa

SEQ ID NO: 2745779 - RNA, 19 nt, Artificial Sequence
  Description of Artificial Sequence: Synthetic oligonucleotide
ucacagucaucuugaguuu

SEQ ID NO: 2745780 - RNA, 19 nt, Artificial Sequence
  Description of Artificial Sequence: Synthetic oligonucleotide
gcuuacugaggauugcauc

SEQ ID NO: 2745781 - RNA, 19 nt, Artificial Sequence
  Description of Artificial Sequence: Synthetic oligonucleotide
gagaggauccacacaggga

SEQ ID NO: 2745782 - RNA, 19 nt, Artificial Sequence
  Description of Artificial Sequence: Synthetic oligonucleotide
ugaugaccagacgcaaggu

SEQ ID NO: 2745783 - RNA, 19 nt, Artificial Sequence
  Description of Artificial Sequence: Synthetic oligonucleotide
cucaggaucggaggaggag

SEQ ID NO: 2745784 - RNA, 19 nt, Artificial Sequence
  Description of Artificial Sequence: Synthetic oligonucleotide
cuggcacuguagccaauag

SEQ ID NO: 2745785 - RNA, 19 nt, Artificial Sequence
  Description of Artificial Sequence: Synthetic oligonucleotide
aggauggcuagcugcucca

SEQ ID NO: 2745786 - RNA, 19 nt, Artificial Sequence
  Description of Artificial Sequence: Synthetic oligonucleotide
acaauccugcgaauggggu

SEQ ID NO: 2745787 - RNA, 19 nt, Artificial Sequence
  Description of Artificial Sequence: Synthetic oligonucleotide
ccuccagauggaaggaagg

SEQ ID NO: 2745788 - RNA, 19 nt, Artificial Sequence
  Description of Artificial Sequence: Synthetic oligonucleotide
uuucuccccaauggaaguc

SEQ ID NO: 2745789 - RNA, 19 nt, Artificial Sequence
  Description of Artificial Sequence: Synthetic oligonucleotide
gagcuuacugaggauugca

SEQ ID NO: 2745790 - RNA, 19 nt, Artificial Sequence
  Description of Artificial Sequence: Synthetic oligonucleotide
ccaauagcuucugaugacc

SEQ ID NO: 2745791 - RNA, 19 nt, Artificial Sequence
  Description of Artificial Sequence: Synthetic oligonucleotide
agcauccuccagauggaag

SEQ ID NO: 2745792 - RNA, 19 nt, Artificial Sequence
  Description of Artificial Sequence: Synthetic oligonucleotide
gacgcaagguaugucucca

SEQ ID NO: 2745793 - RNA, 19 nt, Artificial Sequence
  Description of Artificial Sequence: Synthetic oligonucleotide
aucuugaguuucucagcaa

SEQ ID NO: 2745794 - RNA, 19 nt, Artificial Sequence
  Description of Artificial Sequence: Synthetic oligonucleotide
gaggagcggguucgugagg

SEQ ID NO: 2745795 - RNA, 19 nt, Artificial Sequence
  Description of Artificial Sequence: Synthetic oligonucleotide
aggagauaaggagcgugcu

SEQ ID NO: 2745796 - RNA, 19 nt, Artificial Sequence
  Description of Artificial Sequence: Synthetic oligonucleotide
gaauggggucgucaggacu

SEQ ID NO: 2745797 - RNA, 19 nt, Artificial Sequence
  Description of Artificial Sequence: Synthetic oligonucleotide
ucguaguaaagggcagaac

SEQ ID NO: 2745798 - RNA, 19 nt, Artificial Sequence
  Description of Artificial Sequence: Synthetic oligonucleotide
gcaagguaugucuccaaga

SEQ ID NO: 2745799 - RNA, 19 nt, Artificial Sequence
  Description of Artificial Sequence: Synthetic oligonucleotide
aggagcggguucgugagga

SEQ ID NO: 2745800 - RNA, 19 nt, Artificial Sequence
  Description of Artificial Sequence: Synthetic oligonucleotide
auaguugaccaggcgcaca

SEQ ID NO: 2745801 - RNA, 19 nt, Artificial Sequence
  Description of Artificial Sequence: Synthetic oligonucleotide
ucagcccggccagaaauuc

SEQ ID NO: 2745802 - RNA, 19 nt, Artificial Sequence
  Description of Artificial Sequence: Synthetic oligonucleotide
accagacgcaagguauguc

SEQ ID NO: 2745803 - RNA, 19 nt, Artificial Sequence
  Description of Artificial Sequence: Synthetic oligonucleotide
accaggcgcacaaauuuca

SEQ ID NO: 2745804 - RNA, 19 nt, Artificial Sequence
  Description of Artificial Sequence: Synthetic oligonucleotide
uaucccuagcuggccuggg

SEQ ID NO: 2745805 - RNA, 19 nt, Artificial Sequence
  Description of Artificial Sequence: Synthetic oligonucleotide
agaacaccaucuuguuaua

SEQ ID NO: 2745806 - RNA, 19 nt, Artificial Sequence
  Description of Artificial Sequence: Synthetic oligonucleotide
aagucagcccggccagaaa

SEQ ID NO: 2745807 - RNA, 19 nt, Artificial Sequence
  Description of Artificial Sequence: Synthetic oligonucleotide
gaucggaggaggagcuuac

SEQ ID NO: 2745808 - RNA, 19 nt, Artificial Sequence
  Description of Artificial Sequence: Synthetic oligonucleotide
cugaggauugcaucguagu

SEQ ID NO: 2745809 - RNA, 19 nt, Artificial Sequence
  Description of Artificial Sequence: Synthetic oligonucleotide
gaccaggcgcacaaauuuc

SEQ ID NO: 2745810 - RNA, 19 nt, Artificial Sequence
  Description of Artificial Sequence: Synthetic oligonucleotide
cacaaauuucaccgcaacu

SEQ ID NO: 2745811 - RNA, 19 nt, Artificial Sequence
  Description of Artificial Sequence: Synthetic oligonucleotide
gccaauagcuucugaugac

SEQ ID NO: 2745812 - RNA, 19 nt, Artificial Sequence
  Description of Artificial Sequence: Synthetic oligonucleotide
cgggacuccacaauccugc

SEQ ID NO: 2745813 - RNA, 19 nt, Artificial Sequence
  Description of Artificial Sequence: Synthetic oligonucleotide
gcugugcaccucaggaucg

SEQ ID NO: 2745814 - RNA, 19 nt, Artificial Sequence
  Description of Artificial Sequence: Synthetic oligonucleotide
ggcgcacaaauuucaccgc

SEQ ID NO: 2745815 - RNA, 19 nt, Artificial Sequence
  Description of Artificial Sequence: Synthetic oligonucleotide
cuuucuccccaauggaagu

SEQ ID NO: 2745816 - RNA, 19 nt, Artificial Sequence
  Description of Artificial Sequence: Synthetic oligonucleotide
cagauggaaggaaggcaga

SEQ ID NO: 2745817 - RNA, 19 nt, Artificial Sequence
  Description of Artificial Sequence: Synthetic oligonucleotide
agagcauccuccagaugga

SEQ ID NO: 2745818 - RNA, 19 nt, Artificial Sequence
  Description of Artificial Sequence: Synthetic oligonucleotide
ggcccuugagcacagucuc

SEQ ID NO: 2745819 - RNA, 19 nt, Artificial Sequence
  Description of Artificial Sequence: Synthetic oligonucleotide
gggacuccacaauccugcg

SEQ ID NO: 2745820 - RNA, 19 nt, Artificial Sequence
  Description of Artificial Sequence: Synthetic oligonucleotide
gcacacuuucuccccaaug

SEQ ID NO: 2745821 - RNA, 19 nt, Artificial Sequence
  Description of Artificial Sequence: Synthetic oligonucleotide
agcuuacugaggauugcau

SEQ ID NO: 2745822 - RNA, 19 nt, Artificial Sequence
  Description of Artificial Sequence: Synthetic oligonucleotide
caucguaguaaagggcaga

SEQ ID NO: 2745823 - RNA, 19 nt, Artificial Sequence
  Description of Artificial Sequence: Synthetic oligonucleotide
guccaugagcagaaucuuc

SEQ ID NO: 2745824 - RNA, 19 nt, Artificial Sequence
  Description of Artificial Sequence: Synthetic oligonucleotide
agcccggccagaaauucca

SEQ ID NO: 2745825 - RNA, 19 nt, Artificial Sequence
  Description of Artificial Sequence: Synthetic oligonucleotide
cagcucuuucugaauggga

SEQ ID NO: 2745826 - RNA, 19 nt, Artificial Sequence
  Description of Artificial Sequence: Synthetic oligonucleotide
ugugcaccucaggaucgga

SEQ ID NO: 2745827 - RNA, 19 nt, Artificial Sequence
  Description of Artificial Sequence: Synthetic oligonucleotide
gucagagcauccuccagau

SEQ ID NO: 2745828 - RNA, 19 nt, Artificial Sequence
  Description of Artificial Sequence: Synthetic oligonucleotide
ggccagaaauuccaggugu

SEQ ID NO: 2745829 - RNA, 19 nt, Artificial Sequence
  Description of Artificial Sequence: Synthetic oligonucleotide
cugugcaccucaggaucgg

SEQ ID NO: 2745830 - RNA, 19 nt, Artificial Sequence
  Description of Artificial Sequence: Synthetic oligonucleotide
ccugaaucuggcccuugag

SEQ ID NO: 2745831 - RNA, 19 nt, Artificial Sequence
  Description of Artificial Sequence: Synthetic oligonucleotide
gggucgucaggacuggcca

SEQ ID NO: 2745832 - RNA, 19 nt, Artificial Sequence
  Description of Artificial Sequence: Synthetic oligonucleotide
auggggucgucaggacugg

SEQ ID NO: 2745833 - RNA, 19 nt, Artificial Sequence
  Description of Artificial Sequence: Synthetic oligonucleotide
ggucgucaggacuggccag

SEQ ID NO: 2745834 - RNA, 19 nt, Artificial Sequence
  Description of Artificial Sequence: Synthetic oligonucleotide
guaugucuccaagaaggua

SEQ ID NO: 2745835 - RNA, 19 nt, Artificial Sequence
  Description of Artificial Sequence: Synthetic oligonucleotide
agcggguucgugaggagau

SEQ ID NO: 2745836 - RNA, 19 nt, Artificial Sequence
  Description of Artificial Sequence: Synthetic oligonucleotide
gagcgugcugcagacagcu

SEQ ID NO: 2745837 - RNA, 19 nt, Artificial Sequence
  Description of Artificial Sequence: Synthetic oligonucleotide
gcaucguaguaaagggcag

SEQ ID NO: 2745838 - RNA, 19 nt, Artificial Sequence
  Description of Artificial Sequence: Synthetic oligonucleotide
caccuccaggcacacuuuc

SEQ ID NO: 2745839 - RNA, 19 nt, Artificial Sequence
  Description of Artificial Sequence: Synthetic oligonucleotide
cuagcuggccugggcgagg

SEQ ID NO: 2745840 - RNA, 19 nt, Artificial Sequence
  Description of Artificial Sequence: Synthetic oligonucleotide
gaggagcuuacugaggauu

SEQ ID NO: 2745841 - RNA, 19 nt, Artificial Sequence
  Description of Artificial Sequence: Synthetic oligonucleotide
ggagcuuacugaggauugc

SEQ ID NO: 2745842 - RNA, 19 nt, Artificial Sequence
  Description of Artificial Sequence: Synthetic oligonucleotide
acuccacaauccugcgaau

SEQ ID NO: 2745843 - RNA, 19 nt, Artificial Sequence
  Description of Artificial Sequence: Synthetic oligonucleotide
gagcggguucgugaggaga

SEQ ID NO: 2745844 - RNA, 19 nt, Artificial Sequence
  Description of Artificial Sequence: Synthetic oligonucleotide
cugcucaccuccaggcaca

SEQ ID NO: 2745845 - RNA, 19 nt, Artificial Sequence
  Description of Artificial Sequence: Synthetic oligonucleotide
aaggagcgugcugcagaca

SEQ ID NO: 2745846 - RNA, 19 nt, Artificial Sequence
  Description of Artificial Sequence: Synthetic oligonucleotide
gcgaauggggucgucagga

SEQ ID NO: 2745847 - RNA, 19 nt, Artificial Sequence
  Description of Artificial Sequence: Synthetic oligonucleotide
uccagguguggcgcugcug

SEQ ID NO: 2745848 - RNA, 19 nt, Artificial Sequence
  Description of Artificial Sequence: Synthetic oligonucleotide
ccccaauggaagucagagc

SEQ ID NO: 2745849 - RNA, 19 nt, Artificial Sequence
  Description of Artificial Sequence: Synthetic oligonucleotide
cccggccagaaauuccagg

SEQ ID NO: 2745850 - RNA, 19 nt, Artificial Sequence
  Description of Artificial Sequence: Synthetic oligonucleotide
gcgcacaaauuucaccgca

SEQ ID NO: 2745851 - RNA, 19 nt, Artificial Sequence
  Description of Artificial Sequence: Synthetic oligonucleotide
gccagaaauuccaggugug

SEQ ID NO: 2745852 - RNA, 19 nt, Artificial Sequence
  Description of Artificial Sequence: Synthetic oligonucleotide
ccaucuuguuauaguugac

SEQ ID NO: 2745853 - RNA, 19 nt, Artificial Sequence
  Description of Artificial Sequence: Synthetic oligonucleotide
ggauccacacagggagagg

SEQ ID NO: 2745854 - RNA, 19 nt, Artificial Sequence
  Description of Artificial Sequence: Synthetic oligonucleotide
aggcacacuuucuccccaa

SEQ ID NO: 2745855 - RNA, 19 nt, Artificial Sequence
  Description of Artificial Sequence: Synthetic oligonucleotide
acgcaagguaugucuccaa

SEQ ID NO: 2745856 - RNA, 19 nt, Artificial Sequence
  Description of Artificial Sequence: Synthetic oligonucleotide
cuguagccaauagcuucug

SEQ ID NO: 2745857 - RNA, 19 nt, Artificial Sequence
  Description of Artificial Sequence: Synthetic oligonucleotide
agguguggcgcugcugagu

SEQ ID NO: 2745858 - RNA, 19 nt, Artificial Sequence
  Description of Artificial Sequence: Synthetic oligonucleotide
ggauugcaucguaguaaag

SEQ ID NO: 2745859 - RNA, 19 nt, Artificial Sequence
  Description of Artificial Sequence: Synthetic oligonucleotide
cugggcgaggagcggguuc

SEQ ID NO: 2745860 - RNA, 19 nt, Artificial Sequence
  Description of Artificial Sequence: Synthetic oligonucleotide
cgcaagguaugucuccaag

SEQ ID NO: 2745861 - RNA, 19 nt, Artificial Sequence
  Description of Artificial Sequence: Synthetic oligonucleotide
guguaucccuagcuggccu

SEQ ID NO: 2745862 - RNA, 19 nt, Artificial Sequence
  Description of Artificial Sequence: Synthetic oligonucleotide
gcaccucaggaucggagga

SEQ ID NO: 2745863 - RNA, 19 nt, Artificial Sequence
  Description of Artificial Sequence: Synthetic oligonucleotide
gcgaggagcggguucguga

SEQ ID NO: 2745864 - RNA, 19 nt, Artificial Sequence
  Description of Artificial Sequence: Synthetic oligonucleotide
cgaggagcggguucgugag

SEQ ID NO: 2745865 - RNA, 19 nt, Artificial Sequence
  Description of Artificial Sequence: Synthetic oligonucleotide
ccaggcgcacaaauuucac

SEQ ID NO: 2745866 - RNA, 19 nt, Artificial Sequence
  Description of Artificial Sequence: Synthetic oligonucleotide
ggaaggaaggcagaugcau

SEQ ID NO: 2745867 - RNA, 19 nt, Artificial Sequence
  Description of Artificial Sequence: Synthetic oligonucleotide
ccagacgcaagguaugucu

SEQ ID NO: 2745868 - RNA, 19 nt, Artificial Sequence
  Description of Artificial Sequence: Synthetic oligonucleotide
ggggucgucaggacuggcc

SEQ ID NO: 2745869 - RNA, 19 nt, Artificial Sequence
  Description of Artificial Sequence: Synthetic oligonucleotide
ggguucgugaggagauaag

SEQ ID NO: 2745870 - RNA, 19 nt, Artificial Sequence
  Description of Artificial Sequence: Synthetic oligonucleotide
gcugcugagugugacaagu

SEQ ID NO: 2745871 - RNA, 19 nt, Artificial Sequence
  Description of Artificial Sequence: Synthetic oligonucleotide
caggcacacuuucucccca

SEQ ID NO: 2745872 - RNA, 19 nt, Artificial Sequence
  Description of Artificial Sequence: Synthetic oligonucleotide
aucggaggaggagcuuacu

SEQ ID NO: 2745873 - RNA, 19 nt, Artificial Sequence
  Description of Artificial Sequence: Synthetic oligonucleotide
caggaucggaggaggagcu

SEQ ID NO: 2745874 - RNA, 19 nt, Artificial Sequence
  Description of Artificial Sequence: Synthetic oligonucleotide
cuccccaauggaagucaga

SEQ ID NO: 2745875 - RNA, 19 nt, Artificial Sequence
  Description of Artificial Sequence: Synthetic oligonucleotide
gugugacaaguagcacagc

SEQ ID NO: 2745876 - RNA, 19 nt, Artificial Sequence
  Description of Artificial Sequence: Synthetic oligonucleotide
gaccagacgcaagguaugu

SEQ ID NO: 2745877 - RNA, 19 nt, Artificial Sequence
  Description of Artificial Sequence: Synthetic oligonucleotide
ggacuccacaauccugcga

SEQ ID NO: 2745878 - RNA, 19 nt, Artificial Sequence
  Description of Artificial Sequence: Synthetic oligonucleotide
gagcauccuccagauggaa

SEQ ID NO: 2745879 - RNA, 19 nt, Artificial Sequence
  Description of Artificial Sequence: Synthetic oligonucleotide
cugcugagugugacaagua

SEQ ID NO: 2745880 - RNA, 19 nt, Artificial Sequence
  Description of Artificial Sequence: Synthetic oligonucleotide
ggagcggguucgugaggag

SEQ ID NO: 2745881 - RNA, 19 nt, Artificial Sequence
  Description of Artificial Sequence: Synthetic oligonucleotide
uggggucgucaggacuggc

SEQ ID NO: 2745882 - RNA, 19 nt, Artificial Sequence
  Description of Artificial Sequence: Synthetic oligonucleotide
gguaugucuccaagaaggu

SEQ ID NO: 2745883 - RNA, 19 nt, Artificial Sequence
  Description of Artificial Sequence: Synthetic oligonucleotide
aucuggcccuugagcacag

SEQ ID NO: 2745884 - RNA, 19 nt, Artificial Sequence
  Description of Artificial Sequence: Synthetic oligonucleotide
cacacagggagaggcagcu

SEQ ID NO: 2745885 - RNA, 19 nt, Artificial Sequence
  Description of Artificial Sequence: Synthetic oligonucleotide
ggaucggaggaggagcuua

SEQ ID NO: 2745886 - RNA, 19 nt, Artificial Sequence
  Description of Artificial Sequence: Synthetic oligonucleotide
gccugaaucuggcccuuga

SEQ ID NO: 2745887 - RNA, 19 nt, Artificial Sequence
  Description of Artificial Sequence: Synthetic oligonucleotide
caggacuggccagggccug

SEQ ID NO: 2745888 - RNA, 19 nt, Artificial Sequence
  Description of Artificial Sequence: Synthetic oligonucleotide
ccggccagaaauuccaggu

SEQ ID NO: 2745889 - RNA, 19 nt, Artificial Sequence
  Description of Artificial Sequence: Synthetic oligonucleotide
ggagcgugcugcagacagc

SEQ ID NO: 2745890 - RNA, 19 nt, Artificial Sequence
  Description of Artificial Sequence: Synthetic oligonucleotide
cagcugugcaccucaggau

SEQ ID NO: 2745891 - RNA, 19 nt, Artificial Sequence
  Description of Artificial Sequence: Synthetic oligonucleotide
cggccagaaauuccaggug

SEQ ID NO: 2745892 - RNA, 19 nt, Artificial Sequence
  Description of Artificial Sequence: Synthetic oligonucleotide
caaagucagcccggccaga

SEQ ID NO: 2745893 - RNA, 19 nt, Artificial Sequence
  Description of Artificial Sequence: Synthetic oligonucleotide
ggcagaacaccaucuuguu

SEQ ID NO: 2745894 - RNA, 19 nt, Artificial Sequence
  Description of Artificial Sequence: Synthetic oligonucleotide
cgaauggggucgucaggac

SEQ ID NO: 2745895 - RNA, 19 nt, Artificial Sequence
  Description of Artificial Sequence: Synthetic oligonucleotide
agcgugcugcagacagcug

SEQ ID NO: 2745896 - RNA, 19 nt, Artificial Sequence
  Description of Artificial Sequence: Synthetic oligonucleotide
gcccuugagcacagucucc

SEQ ID NO: 2745897 - RNA, 19 nt, Artificial Sequence
  Description of Artificial Sequence: Synthetic oligonucleotide
ccugcgaauggggucguca

SEQ ID NO: 2745898 - RNA, 19 nt, Artificial Sequence
  Description of Artificial Sequence: Synthetic oligonucleotide
aggaucggaggaggagcuu

SEQ ID NO: 2745899 - RNA, 19 nt, Artificial Sequence
  Description of Artificial Sequence: Synthetic oligonucleotide
auccugcgaauggggucgu

SEQ ID NO: 2745900 - RNA, 19 nt, Artificial Sequence
  Description of Artificial Sequence: Synthetic oligonucleotide
gugaggagauaaggagcgu

SEQ ID NO: 2745901 - RNA, 19 nt, Artificial Sequence
  Description of Artificial Sequence: Synthetic oligonucleotide
ccucaggaucggaggagga

SEQ ID NO: 2745902 - RNA, 19 nt, Artificial Sequence
  Description of Artificial Sequence: Synthetic oligonucleotide
cgcacaaauuucaccgcaa

SEQ ID NO: 2745903 - RNA, 19 nt, Artificial Sequence
  Description of Artificial Sequence: Synthetic oligonucleotide
ggaggagcuuacugaggau

SEQ ID NO: 2745904 - RNA, 19 nt, Artificial Sequence
  Description of Artificial Sequence: Synthetic oligonucleotide
uccugcgaauggggucguc

SEQ ID NO: 2745905 - RNA, 19 nt, Artificial Sequence
  Description of Artificial Sequence: Synthetic oligonucleotide
ccaauggaagucagagcau

SEQ ID NO: 2745906 - RNA, 19 nt, Artificial Sequence
  Description of Artificial Sequence: Synthetic oligonucleotide
gcccggccagaaauuccag

SEQ ID NO: 2745907 - RNA, 19 nt, Artificial Sequence
  Description of Artificial Sequence: Synthetic oligonucleotide
cgucaggacuggccagggc

SEQ ID NO: 2745908 - RNA, 19 nt, Artificial Sequence
  Description of Artificial Sequence: Synthetic oligonucleotide
cgcugcugagugugacaag

SEQ ID NO: 2745909 - RNA, 19 nt, Artificial Sequence
  Description of Artificial Sequence: Synthetic oligonucleotide
gucagcccggccagaaauu

SEQ ID NO: 2745910 - RNA, 19 nt, Artificial Sequence
  Description of Artificial Sequence: Synthetic oligonucleotide
cccuugagcacagucuccu

SEQ ID NO: 2745911 - RNA, 19 nt, Artificial Sequence
  Description of Artificial Sequence: Synthetic oligonucleotide
guguggcgcugcugagugu

SEQ ID NO: 2745912 - RNA, 19 nt, Artificial Sequence
  Description of Artificial Sequence: Synthetic oligonucleotide
ggcacacuuucuccccaau

SEQ ID NO: 2745913 - RNA, 19 nt, Artificial Sequence
  Description of Artificial Sequence: Synthetic oligonucleotide
ccccuggcacuguagccaa

SEQ ID NO: 2745914 - RNA, 19 nt, Artificial Sequence
  Description of Artificial Sequence: Synthetic oligonucleotide
ccgcaacuucuuccagcuc

SEQ ID NO: 2745915 - RNA, 19 nt, Artificial Sequence
  Description of Artificial Sequence: Synthetic oligonucleotide
cggguucgugaggagauaa

SEQ ID NO: 2745916 - RNA, 19 nt, Artificial Sequence
  Description of Artificial Sequence: Synthetic oligonucleotide
gcggguucgugaggagaua

SEQ ID NO: 2745917 - RNA, 19 nt, Artificial Sequence
  Description of Artificial Sequence: Synthetic oligonucleotide
gccugggcgaggagcgggu

SEQ ID NO: 2745918 - RNA, 19 nt, Artificial Sequence
  Description of Artificial Sequence: Synthetic oligonucleotide
gggcgaggagcggguucgu

SEQ ID NO: 2745919 - RNA, 19 nt, Artificial Sequence
  Description of Artificial Sequence: Synthetic oligonucleotide
ugagaauaaacaaagacgc

SEQ ID NO: 2745920 - RNA, 19 nt, Artificial Sequence
  Description of Artificial Sequence: Synthetic oligonucleotide
aauauauuuagcaugcucg

SEQ ID NO: 2745921 - RNA, 19 nt, Artificial Sequence
  Description of Artificial Sequence: Synthetic oligonucleotide
uaaugcauaaaucauaaug

SEQ ID NO: 2745922 - RNA, 19 nt, Artificial Sequence
  Description of Artificial Sequence: Synthetic oligonucleotide
ucugauaaugcauaaauca

SEQ ID NO: 2745923 - RNA, 19 nt, Artificial Sequence
  Description of Artificial Sequence: Synthetic oligonucleotide
aaauauauuuagcaugcuc

SEQ ID NO: 2745924 - RNA, 19 nt, Artificial Sequence
  Description of Artificial Sequence: Synthetic oligonucleotide
aaucuguuaagacauguag

SEQ ID NO: 2745925 - RNA, 19 nt, Artificial Sequence
  Description of Artificial Sequence: Synthetic oligonucleotide
cugagaauaaacaaagacg

SEQ ID NO: 2745926 - RNA, 19 nt, Artificial Sequence
  Description of Artificial Sequence: Synthetic oligonucleotide
aaggaagagguauauaaag

SEQ ID NO: 2745927 - RNA, 19 nt, Artificial Sequence
  Description of Artificial Sequence: Synthetic oligonucleotide
aaugcauaaaucauaaugu

SEQ ID NO: 2745928 - RNA, 19 nt, Artificial Sequence
  Description of Artificial Sequence: Synthetic oligonucleotide
aaaaggaaauccugcuacc

SEQ ID NO: 2745929 - RNA, 19 nt, Artificial Sequence
  Description of Artificial Sequence: Synthetic oligonucleotide
uuaguguucaaauaacucu

SEQ ID NO: 2745930 - RNA, 19 nt, Artificial Sequence
  Description of Artificial Sequence: Synthetic oligonucleotide
ugugcaaacaucuggaacu

SEQ ID NO: 2745931 - RNA, 19 nt, Artificial Sequence
  Description of Artificial Sequence: Synthetic oligonucleotide
ucauaaugugcaaacaucu

SEQ ID NO: 2745932 - RNA, 19 nt, Artificial Sequence
  Description of Artificial Sequence: Synthetic oligonucleotide
agaaacgugaacuugcgug

SEQ ID NO: 2745933 - RNA, 19 nt, Artificial Sequence
  Description of Artificial Sequence: Synthetic oligonucleotide
agcaugcucgucuuaaucc

SEQ ID NO: 2745934 - RNA, 19 nt, Artificial Sequence
  Description of Artificial Sequence: Synthetic oligonucleotide
uaaaucauaaugugcaaac

SEQ ID NO: 2745935 - RNA, 19 nt, Artificial Sequence
  Description of Artificial Sequence: Synthetic oligonucleotide
ugcauaaaucauaaugugc

SEQ ID NO: 2745936 - RNA, 19 nt, Artificial Sequence
  Description of Artificial Sequence: Synthetic oligonucleotide
aaucauaaugugcaaacau

SEQ ID NO: 2745937 - RNA, 19 nt, Artificial Sequence
  Description of Artificial Sequence: Synthetic oligonucleotide
ucugcuagggccuucaccc

SEQ ID NO: 2745938 - RNA, 19 nt, Artificial Sequence
  Description of Artificial Sequence: Synthetic oligonucleotide
gaaaaggaaauccugcuac

SEQ ID NO: 2745939 - RNA, 19 nt, Artificial Sequence
  Description of Artificial Sequence: Synthetic oligonucleotide
gauuggaggauucagcggc

SEQ ID NO: 2745940 - RNA, 19 nt, Artificial Sequence
  Description of Artificial Sequence: Synthetic oligonucleotide
aggaaauccugcuaccugc

SEQ ID NO: 2745941 - RNA, 19 nt, Artificial Sequence
  Description of Artificial Sequence: Synthetic oligonucleotide
ugaacuugcgugacuaagg

SEQ ID NO: 2745942 - RNA, 19 nt, Artificial Sequence
  Description of Artificial Sequence: Synthetic oligonucleotide
aacaucuggaacuugcaga

SEQ ID NO: 2745943 - RNA, 19 nt, Artificial Sequence
  Description of Artificial Sequence: Synthetic oligonucleotide
uauaaagccguccucacuc

SEQ ID NO: 2745944 - RNA, 19 nt, Artificial Sequence
  Description of Artificial Sequence: Synthetic oligonucleotide
ucuguuaagacauguaguc

SEQ ID NO: 2745945 - RNA, 19 nt, Artificial Sequence
  Description of Artificial Sequence: Synthetic oligonucleotide
ucuuaauccauuuccugcc

SEQ ID NO: 2745946 - RNA, 19 nt, Artificial Sequence
  Description of Artificial Sequence: Synthetic oligonucleotide
uuucauucaaggcagcagu

SEQ ID NO: 2745947 - RNA, 19 nt, Artificial Sequence
  Description of Artificial Sequence: Synthetic oligonucleotide
aauacaguuccgaacgcac

SEQ ID NO: 2745948 - RNA, 19 nt, Artificial Sequence
  Description of Artificial Sequence: Synthetic oligonucleotide
auauuuagcaugcucgucu

SEQ ID NO: 2745949 - RNA, 19 nt, Artificial Sequence
  Description of Artificial Sequence: Synthetic oligonucleotide
gaagagguauauaaagccg

SEQ ID NO: 2745950 - RNA, 19 nt, Artificial Sequence
  Description of Artificial Sequence: Synthetic oligonucleotide
aaacaucuggaacuugcag

SEQ ID NO: 2745951 - RNA, 19 nt, Artificial Sequence
  Description of Artificial Sequence: Synthetic oligonucleotide
agaaguguugccaucacac

SEQ ID NO: 2745952 - RNA, 19 nt, Artificial Sequence
  Description of Artificial Sequence: Synthetic oligonucleotide
aagacauguagucuucucu

SEQ ID NO: 2745953 - RNA, 19 nt, Artificial Sequence
  Description of Artificial Sequence: Synthetic oligonucleotide
acuaguaaagcuuuugcaa

SEQ ID NO: 2745954 - RNA, 19 nt, Artificial Sequence
  Description of Artificial Sequence: Synthetic oligonucleotide
agaauaaacaaagacgccu

SEQ ID NO: 2745955 - RNA, 19 nt, Artificial Sequence
  Description of Artificial Sequence: Synthetic oligonucleotide
aaacaaagacgccugcucu

SEQ ID NO: 2745956 - RNA, 19 nt, Artificial Sequence
  Description of Artificial Sequence: Synthetic oligonucleotide
aaaacuaguaaagcuuuug

SEQ ID NO: 2745957 - RNA, 19 nt, Artificial Sequence
  Description of Artificial Sequence: Synthetic oligonucleotide
accugcggaauacaguucc

SEQ ID NO: 2745958 - RNA, 19 nt, Artificial Sequence
  Description of Artificial Sequence: Synthetic oligonucleotide
cucgucuuaauccauuucc

SEQ ID NO: 2745959 - RNA, 19 nt, Artificial Sequence
  Description of Artificial Sequence: Synthetic oligonucleotide
aguaacuucugauaaugca

SEQ ID NO: 2745960 - RNA, 19 nt, Artificial Sequence
  Description of Artificial Sequence: Synthetic oligonucleotide
ucuuaguguucaaauaacu

SEQ ID NO: 2745961 - RNA, 19 nt, Artificial Sequence
  Description of Artificial Sequence: Synthetic oligonucleotide
aaagcagggcuauaugugu

SEQ ID NO: 2745962 - RNA, 19 nt, Artificial Sequence
  Description of Artificial Sequence: Synthetic oligonucleotide
auaacucuuuuccaaagca

SEQ ID NO: 2745963 - RNA, 19 nt, Artificial Sequence
  Description of Artificial Sequence: Synthetic oligonucleotide
ugauaaugcauaaaucaua

SEQ ID NO: 2745964 - RNA, 19 nt, Artificial Sequence
  Description of Artificial Sequence: Synthetic oligonucleotide
aggaagagguauauaaagc

SEQ ID NO: 2745965 - RNA, 19 nt, Artificial Sequence
  Description of Artificial Sequence: Synthetic oligonucleotide
ggaagagguauauaaagcc

SEQ ID NO: 2745966 - RNA, 19 nt, Artificial Sequence
  Description of Artificial Sequence: Synthetic oligonucleotide
cuuaguguucaaauaacuc

SEQ ID NO: 2745967 - RNA, 19 nt, Artificial Sequence
  Description of Artificial Sequence: Synthetic oligonucleotide
cuaaggaagagguauauaa

SEQ ID NO: 2745968 - RNA, 19 nt, Artificial Sequence
  Description of Artificial Sequence: Synthetic oligonucleotide
aaagguccugagaauaaac

SEQ ID NO: 2745969 - RNA, 19 nt, Artificial Sequence
  Description of Artificial Sequence: Synthetic oligonucleotide
uuacaaaauuucacaauaa

SEQ ID NO: 2745970 - RNA, 19 nt, Artificial Sequence
  Description of Artificial Sequence: Synthetic oligonucleotide
cagaauguagcccuguuac

SEQ ID NO: 2745971 - RNA, 19 nt, Artificial Sequence
  Description of Artificial Sequence: Synthetic oligonucleotide
uguuaagacauguagucuu

SEQ ID NO: 2745972 - RNA, 19 nt, Artificial Sequence
  Description of Artificial Sequence: Synthetic oligonucleotide
gucuuaauccauuuccugc

SEQ ID NO: 2745973 - RNA, 19 nt, Artificial Sequence
  Description of Artificial Sequence: Synthetic oligonucleotide
aaggaaauccugcuaccug

SEQ ID NO: 2745974 - RNA, 19 nt, Artificial Sequence
  Description of Artificial Sequence: Synthetic oligonucleotide
augcauaaaucauaaugug

SEQ ID NO: 2745975 - RNA, 19 nt, Artificial Sequence
  Description of Artificial Sequence: Synthetic oligonucleotide
gaauaaacaaagacgccug

SEQ ID NO: 2745976 - RNA, 19 nt, Artificial Sequence
  Description of Artificial Sequence: Synthetic oligonucleotide
uucucuugugagcaguuug

SEQ ID NO: 2745977 - RNA, 19 nt, Artificial Sequence
  Description of Artificial Sequence: Synthetic oligonucleotide
uucuuaguguucaaauaac

SEQ ID NO: 2745978 - RNA, 19 nt, Artificial Sequence
  Description of Artificial Sequence: Synthetic oligonucleotide
ucucuugugagcaguuugc

SEQ ID NO: 2745979 - RNA, 19 nt, Artificial Sequence
  Description of Artificial Sequence: Synthetic oligonucleotide
uuuucauucaaggcagcag

SEQ ID NO: 2745980 - RNA, 19 nt, Artificial Sequence
  Description of Artificial Sequence: Synthetic oligonucleotide
aaauccugcuaccugcgga

SEQ ID NO: 2745981 - RNA, 19 nt, Artificial Sequence
  Description of Artificial Sequence: Synthetic oligonucleotide
uguguuuccugugccaacg

SEQ ID NO: 2745982 - RNA, 19 nt, Artificial Sequence
  Description of Artificial Sequence: Synthetic oligonucleotide
uucugauaaugcauaaauc

SEQ ID NO: 2745983 - RNA, 19 nt, Artificial Sequence
  Description of Artificial Sequence: Synthetic oligonucleotide
uaaggaagagguauauaaa

SEQ ID NO: 2745984 - RNA, 19 nt, Artificial Sequence
  Description of Artificial Sequence: Synthetic oligonucleotide
aacuugcagaaguguugcc

SEQ ID NO: 2745985 - RNA, 19 nt, Artificial Sequence
  Description of Artificial Sequence: Synthetic oligonucleotide
agguauauaaagccguccu

SEQ ID NO: 2745986 - RNA, 19 nt, Artificial Sequence
  Description of Artificial Sequence: Synthetic oligonucleotide
aagagguauauaaagccgu

SEQ ID NO: 2745987 - RNA, 19 nt, Artificial Sequence
  Description of Artificial Sequence: Synthetic oligonucleotide
auuuccugccuuuacaaaa

SEQ ID NO: 2745988 - RNA, 19 nt, Artificial Sequence
  Description of Artificial Sequence: Synthetic oligonucleotide
aaaucauaaugugcaaaca

SEQ ID NO: 2745989 - RNA, 19 nt, Artificial Sequence
  Description of Artificial Sequence: Synthetic oligonucleotide
uaguguucaaauaacucuu

SEQ ID NO: 2745990 - RNA, 19 nt, Artificial Sequence
  Description of Artificial Sequence: Synthetic oligonucleotide
aguuugcagaauguagccc

SEQ ID NO: 2745991 - RNA, 19 nt, Artificial Sequence
  Description of Artificial Sequence: Synthetic oligonucleotide
gaaacgugaacuugcguga

SEQ ID NO: 2745992 - RNA, 19 nt, Artificial Sequence
  Description of Artificial Sequence: Synthetic oligonucleotide
uaacuucugauaaugcaua

SEQ ID NO: 2745993 - RNA, 19 nt, Artificial Sequence
  Description of Artificial Sequence: Synthetic oligonucleotide
cuugugagcaguuugcaga

SEQ ID NO: 2745994 - RNA, 19 nt, Artificial Sequence
  Description of Artificial Sequence: Synthetic oligonucleotide
aaaauuucacagaacguuu

SEQ ID NO: 2745995 - RNA, 19 nt, Artificial Sequence
  Description of Artificial Sequence: Synthetic oligonucleotide
caaagcagggcuauaugug

SEQ ID NO: 2745996 - RNA, 19 nt, Artificial Sequence
  Description of Artificial Sequence: Synthetic oligonucleotide
uauauaaagccguccucac

SEQ ID NO: 2745997 - RNA, 19 nt, Artificial Sequence
  Description of Artificial Sequence: Synthetic oligonucleotide
uccauuuccugccuuuaca

SEQ ID NO: 2745998 - RNA, 19 nt, Artificial Sequence
  Description of Artificial Sequence: Synthetic oligonucleotide
uuuccugugccaacgcagc

SEQ ID NO: 2745999 - RNA, 19 nt, Artificial Sequence
  Description of Artificial Sequence: Synthetic oligonucleotide
uucaccccaccacagaaac

SEQ ID NO: 2746000 - RNA, 19 nt, Artificial Sequence
  Description of Artificial Sequence: Synthetic oligonucleotide
uacaguuccgaacgcacac

SEQ ID NO: 2746001 - RNA, 19 nt, Artificial Sequence
  Description of Artificial Sequence: Synthetic oligonucleotide
aaaggaaauccugcuaccu

SEQ ID NO: 2746002 - RNA, 19 nt, Artificial Sequence
  Description of Artificial Sequence: Synthetic oligonucleotide
uucggaaccucugcuaggg

SEQ ID NO: 2746003 - RNA, 19 nt, Artificial Sequence
  Description of Artificial Sequence: Synthetic oligonucleotide
ugaaucuguuaagacaugu

SEQ ID NO: 2746004 - RNA, 19 nt, Artificial Sequence
  Description of Artificial Sequence: Synthetic oligonucleotide
cauaaugugcaaacaucug

SEQ ID NO: 2746005 - RNA, 19 nt, Artificial Sequence
  Description of Artificial Sequence: Synthetic oligonucleotide
gcugccaucgcuaaaacag

SEQ ID NO: 2746006 - RNA, 19 nt, Artificial Sequence
  Description of Artificial Sequence: Synthetic oligonucleotide
cuucuuaguguucaaauaa

SEQ ID NO: 2746007 - RNA, 19 nt, Artificial Sequence
  Description of Artificial Sequence: Synthetic oligonucleotide
ugcgugacuaaggaagagg

SEQ ID NO: 2746008 - RNA, 19 nt, Artificial Sequence
  Description of Artificial Sequence: Synthetic oligonucleotide
caguuugcagaauguagcc

SEQ ID NO: 2746009 - RNA, 19 nt, Artificial Sequence
  Description of Artificial Sequence: Synthetic oligonucleotide
ucuucuuaguguucaaaua

SEQ ID NO: 2746010 - RNA, 19 nt, Artificial Sequence
  Description of Artificial Sequence: Synthetic oligonucleotide
ccugagaauaaacaaagac

SEQ ID NO: 2746011 - RNA, 19 nt, Artificial Sequence
  Description of Artificial Sequence: Synthetic oligonucleotide
acaucuggaacuugcagaa

SEQ ID NO: 2746012 - RNA, 19 nt, Artificial Sequence
  Description of Artificial Sequence: Synthetic oligonucleotide
caucgcuaaaacaggcccg

SEQ ID NO: 2746013 - RNA, 19 nt, Artificial Sequence
  Description of Artificial Sequence: Synthetic oligonucleotide
aauguagcccuguuacaaa

SEQ ID NO: 2746014 - RNA, 19 nt, Artificial Sequence
  Description of Artificial Sequence: Synthetic oligonucleotide
aacgcacacgcuguguggg

SEQ ID NO: 2746015 - RNA, 19 nt, Artificial Sequence
  Description of Artificial Sequence: Synthetic oligonucleotide
uguguucccaucucugcug

SEQ ID NO: 2746016 - RNA, 19 nt, Artificial Sequence
  Description of Artificial Sequence: Synthetic oligonucleotide
aaacgugaacuugcgugac

SEQ ID NO: 2746017 - RNA, 19 nt, Artificial Sequence
  Description of Artificial Sequence: Synthetic oligonucleotide
guauauaaagccguccuca

SEQ ID NO: 2746018 - RNA, 19 nt, Artificial Sequence
  Description of Artificial Sequence: Synthetic oligonucleotide
aauccugcuaccugcggaa

SEQ ID NO: 2746019 - RNA, 19 nt, Artificial Sequence
  Description of Artificial Sequence: Synthetic oligonucleotide
gauucagcggcugaaucug

SEQ ID NO: 2746020 - RNA, 19 nt, Artificial Sequence
  Description of Artificial Sequence: Synthetic oligonucleotide
gcauaaaucauaaugugca

SEQ ID NO: 2746021 - RNA, 19 nt, Artificial Sequence
  Description of Artificial Sequence: Synthetic oligonucleotide
aggauucagcggcugaauc

SEQ ID NO: 2746022 - RNA, 19 nt, Artificial Sequence
  Description of Artificial Sequence: Synthetic oligonucleotide
aagguccugagaauaaaca

SEQ ID NO: 2746023 - RNA, 19 nt, Artificial Sequence
  Description of Artificial Sequence: Synthetic oligonucleotide
acagcaaacgggaaaagga

SEQ ID NO: 2746024 - RNA, 19 nt, Artificial Sequence
  Description of Artificial Sequence: Synthetic oligonucleotide
gacauguagucuucucuug

SEQ ID NO: 2746025 - RNA, 19 nt, Artificial Sequence
  Description of Artificial Sequence: Synthetic oligonucleotide
uaaaacaggcccggauugg

SEQ ID NO: 2746026 - RNA, 19 nt, Artificial Sequence
  Description of Artificial Sequence: Synthetic oligonucleotide
uuuagcaugcucgucuuaa

SEQ ID NO: 2746027 - RNA, 19 nt, Artificial Sequence
  Description of Artificial Sequence: Synthetic oligonucleotide
cauucaaggcagcaguaac

SEQ ID NO: 2746028 - RNA, 19 nt, Artificial Sequence
  Description of Artificial Sequence: Synthetic oligonucleotide
cuaguaaagcuuuugcaaa

SEQ ID NO: 2746029 - RNA, 19 nt, Artificial Sequence
  Description of Artificial Sequence: Synthetic oligonucleotide
guuccgaacgcacacgcug

SEQ ID NO: 2746030 - RNA, 19 nt, Artificial Sequence
  Description of Artificial Sequence: Synthetic oligonucleotide
gagaauaaacaaagacgcc

SEQ ID NO: 2746031 - RNA, 19 nt, Artificial Sequence
  Description of Artificial Sequence: Synthetic oligonucleotide
aacuucugauaaugcauaa

SEQ ID NO: 2746032 - RNA, 19 nt, Artificial Sequence
  Description of Artificial Sequence: Synthetic oligonucleotide
auaaaucauaaugugcaaa

SEQ ID NO: 2746033 - RNA, 19 nt, Artificial Sequence
  Description of Artificial Sequence: Synthetic oligonucleotide
ugcuaccugcggaauacag

SEQ ID NO: 2746034 - RNA, 19 nt, Artificial Sequence
  Description of Artificial Sequence: Synthetic oligonucleotide
ugccaucgcuaaaacaggc

SEQ ID NO: 2746035 - RNA, 19 nt, Artificial Sequence
  Description of Artificial Sequence: Synthetic oligonucleotide
gaacuugcgugacuaagga

SEQ ID NO: 2746036 - RNA, 19 nt, Artificial Sequence
  Description of Artificial Sequence: Synthetic oligonucleotide
caguaacuucugauaaugc

SEQ ID NO: 2746037 - RNA, 19 nt, Artificial Sequence
  Description of Artificial Sequence: Synthetic oligonucleotide
acauguagucuucucuugu

SEQ ID NO: 2746038 - RNA, 19 nt, Artificial Sequence
  Description of Artificial Sequence: Synthetic oligonucleotide
gaacgcacacgcugugugg

SEQ ID NO: 2746039 - RNA, 19 nt, Artificial Sequence
  Description of Artificial Sequence: Synthetic oligonucleotide
uuugcagaauguagcccug

SEQ ID NO: 2746040 - RNA, 19 nt, Artificial Sequence
  Description of Artificial Sequence: Synthetic oligonucleotide
agugucacagcaaacggga

SEQ ID NO: 2746041 - RNA, 19 nt, Artificial Sequence
  Description of Artificial Sequence: Synthetic oligonucleotide
agguccugagaauaaacaa

SEQ ID NO: 2746042 - RNA, 19 nt, Artificial Sequence
  Description of Artificial Sequence: Synthetic oligonucleotide
agcagggcuauauguguuc

SEQ ID NO: 2746043 - RNA, 19 nt, Artificial Sequence
  Description of Artificial Sequence: Synthetic oligonucleotide
aucgcuaaaacaggcccgg

SEQ ID NO: 2746044 - RNA, 19 nt, Artificial Sequence
  Description of Artificial Sequence: Synthetic oligonucleotide
aacaaagacgccugcucuu

SEQ ID NO: 2746045 - RNA, 19 nt, Artificial Sequence
  Description of Artificial Sequence: Synthetic oligonucleotide
cauguagucuucucuugug

SEQ ID NO: 2746046 - RNA, 19 nt, Artificial Sequence
  Description of Artificial Sequence: Synthetic oligonucleotide
uguuuccugugccaacgca

SEQ ID NO: 2746047 - RNA, 19 nt, Artificial Sequence
  Description of Artificial Sequence: Synthetic oligonucleotide
auauaaagccguccucacu

SEQ ID NO: 2746048 - RNA, 19 nt, Artificial Sequence
  Description of Artificial Sequence: Synthetic oligonucleotide
gagguauauaaagccgucc

SEQ ID NO: 2746049 - RNA, 19 nt, Artificial Sequence
  Description of Artificial Sequence: Synthetic oligonucleotide
uguggguucggaaccucug

SEQ ID NO: 2746050 - RNA, 19 nt, Artificial Sequence
  Description of Artificial Sequence: Synthetic oligonucleotide
cacagcaaacgggaaaagg

SEQ ID NO: 2746051 - RNA, 19 nt, Artificial Sequence
  Description of Artificial Sequence: Synthetic oligonucleotide
agacauguagucuucucuu

SEQ ID NO: 2746052 - RNA, 19 nt, Artificial Sequence
  Description of Artificial Sequence: Synthetic oligonucleotide
gaauguagcccuguuacaa

SEQ ID NO: 2746053 - RNA, 19 nt, Artificial Sequence
  Description of Artificial Sequence: Synthetic oligonucleotide
auguagucuucucuuguga

SEQ ID NO: 2746054 - RNA, 19 nt, Artificial Sequence
  Description of Artificial Sequence: Synthetic oligonucleotide
aagccguccucacucucag

SEQ ID NO: 2746055 - RNA, 19 nt, Artificial Sequence
  Description of Artificial Sequence: Synthetic oligonucleotide
uaagacauguagucuucuc

SEQ ID NO: 2746056 - RNA, 19 nt, Artificial Sequence
  Description of Artificial Sequence: Synthetic oligonucleotide
aaaacaggcccggauugga

SEQ ID NO: 2746057 - RNA, 19 nt, Artificial Sequence
  Description of Artificial Sequence: Synthetic oligonucleotide
cugccaucgcuaaaacagg

SEQ ID NO: 2746058 - RNA, 19 nt, Artificial Sequence
  Description of Artificial Sequence: Synthetic oligonucleotide
cggaauacaguuccgaacg

SEQ ID NO: 2746059 - RNA, 19 nt, Artificial Sequence
  Description of Artificial Sequence: Synthetic oligonucleotide
guuuccugugccaacgcag

SEQ ID NO: 2746060 - RNA, 19 nt, Artificial Sequence
  Description of Artificial Sequence: Synthetic oligonucleotide
aaauuucacagaacguuuu

SEQ ID NO: 2746061 - RNA, 19 nt, Artificial Sequence
  Description of Artificial Sequence: Synthetic oligonucleotide
acagaaacgugaacuugcg

SEQ ID NO: 2746062 - RNA, 19 nt, Artificial Sequence
  Description of Artificial Sequence: Synthetic oligonucleotide
guuugcagaauguagcccu

SEQ ID NO: 2746063 - RNA, 19 nt, Artificial Sequence
  Description of Artificial Sequence: Synthetic oligonucleotide
agagguauauaaagccguc

SEQ ID NO: 2746064 - RNA, 19 nt, Artificial Sequence
  Description of Artificial Sequence: Synthetic oligonucleotide
uagcaugcucgucuuaauc

SEQ ID NO: 2746065 - RNA, 19 nt, Artificial Sequence
  Description of Artificial Sequence: Synthetic oligonucleotide
uauauuuagcaugcucguc

SEQ ID NO: 2746066 - RNA, 19 nt, Artificial Sequence
  Description of Artificial Sequence: Synthetic oligonucleotide
acaaagacgccugcucuuc

SEQ ID NO: 2746067 - RNA, 19 nt, Artificial Sequence
  Description of Artificial Sequence: Synthetic oligonucleotide
agaauguagcccuguuaca

SEQ ID NO: 2746068 - RNA, 19 nt, Artificial Sequence
  Description of Artificial Sequence: Synthetic oligonucleotide
acuugcagaaguguugcca

SEQ ID NO: 2746069 - RNA, 19 nt, Artificial Sequence
  Description of Artificial Sequence: Synthetic oligonucleotide
uucauucaaggcagcagua

SEQ ID NO: 2746070 - RNA, 19 nt, Artificial Sequence
  Description of Artificial Sequence: Synthetic oligonucleotide
ugacuaaggaagagguaua

SEQ ID NO: 2746071 - RNA, 19 nt, Artificial Sequence
  Description of Artificial Sequence: Synthetic oligonucleotide
gaaguguugccaucacaca

SEQ ID NO: 2746072 - RNA, 19 nt, Artificial Sequence
  Description of Artificial Sequence: Synthetic oligonucleotide
cuucugauaaugcauaaau

SEQ ID NO: 2746073 - RNA, 19 nt, Artificial Sequence
  Description of Artificial Sequence: Synthetic oligonucleotide
aacgugaacuugcgugacu

SEQ ID NO: 2746074 - RNA, 19 nt, Artificial Sequence
  Description of Artificial Sequence: Synthetic oligonucleotide
aacuugcgugacuaaggaa

SEQ ID NO: 2746075 - RNA, 19 nt, Artificial Sequence
  Description of Artificial Sequence: Synthetic oligonucleotide
ucaccccaccacagaaacg

SEQ ID NO: 2746076 - RNA, 19 nt, Artificial Sequence
  Description of Artificial Sequence: Synthetic oligonucleotide
gugaacuugcgugacuaag

SEQ ID NO: 2746077 - RNA, 19 nt, Artificial Sequence
  Description of Artificial Sequence: Synthetic oligonucleotide
uuaagacauguagucuucu

SEQ ID NO: 2746078 - RNA, 19 nt, Artificial Sequence
  Description of Artificial Sequence: Synthetic oligonucleotide
gguucggaaccucugcuag

SEQ ID NO: 2746079 - RNA, 19 nt, Artificial Sequence
  Description of Artificial Sequence: Synthetic oligonucleotide
cuauauguguucccaucuc

SEQ ID NO: 2746080 - RNA, 19 nt, Artificial Sequence
  Description of Artificial Sequence: Synthetic oligonucleotide
ugcggaauacaguuccgaa

SEQ ID NO: 2746081 - RNA, 19 nt, Artificial Sequence
  Description of Artificial Sequence: Synthetic oligonucleotide
uauuuagcaugcucgucuu

SEQ ID NO: 2746082 - RNA, 19 nt, Artificial Sequence
  Description of Artificial Sequence: Synthetic oligonucleotide
ggauuggaggauucagcgg

SEQ ID NO: 2746083 - RNA, 19 nt, Artificial Sequence
  Description of Artificial Sequence: Synthetic oligonucleotide
gcaguaacuucugauaaug

SEQ ID NO: 2746084 - RNA, 19 nt, Artificial Sequence
  Description of Artificial Sequence: Synthetic oligonucleotide
uucaaggcagcaguaacuu

SEQ ID NO: 2746085 - RNA, 19 nt, Artificial Sequence
  Description of Artificial Sequence: Synthetic oligonucleotide
auaaugcauaaaucauaau

SEQ ID NO: 2746086 - RNA, 19 nt, Artificial Sequence
  Description of Artificial Sequence: Synthetic oligonucleotide
auauguguucccaucucug

SEQ ID NO: 2746087 - RNA, 19 nt, Artificial Sequence
  Description of Artificial Sequence: Synthetic oligonucleotide
gaauacaguuccgaacgca

SEQ ID NO: 2746088 - RNA, 19 nt, Artificial Sequence
  Description of Artificial Sequence: Synthetic oligonucleotide
uuccgaacgcacacgcugu

SEQ ID NO: 2746089 - RNA, 19 nt, Artificial Sequence
  Description of Artificial Sequence: Synthetic oligonucleotide
accacagaaacgugaacuu

SEQ ID NO: 2746090 - RNA, 19 nt, Artificial Sequence
  Description of Artificial Sequence: Synthetic oligonucleotide
uaauccauuuccugccuuu

SEQ ID NO: 2746091 - RNA, 19 nt, Artificial Sequence
  Description of Artificial Sequence: Synthetic oligonucleotide
uggguucggaaccucugcu

SEQ ID NO: 2746092 - RNA, 19 nt, Artificial Sequence
  Description of Artificial Sequence: Synthetic oligonucleotide
caguuccgaacgcacacgc

SEQ ID NO: 2746093 - RNA, 19 nt, Artificial Sequence
  Description of Artificial Sequence: Synthetic oligonucleotide
ucauucaaggcagcaguaa

SEQ ID NO: 2746094 - RNA, 19 nt, Artificial Sequence
  Description of Artificial Sequence: Synthetic oligonucleotide
uuaauccauuuccugccuu

SEQ ID NO: 2746095 - RNA, 19 nt, Artificial Sequence
  Description of Artificial Sequence: Synthetic oligonucleotide
guucggaaccucugcuagg

SEQ ID NO: 2746096 - RNA, 19 nt, Artificial Sequence
  Description of Artificial Sequence: Synthetic oligonucleotide
auguagcccuguuacaaaa

SEQ ID NO: 2746097 - RNA, 19 nt, Artificial Sequence
  Description of Artificial Sequence: Synthetic oligonucleotide
ccaucgcuaaaacaggccc

SEQ ID NO: 2746098 - RNA, 19 nt, Artificial Sequence
  Description of Artificial Sequence: Synthetic oligonucleotide
auaaagccguccucacucu

SEQ ID NO: 2746099 - RNA, 19 nt, Artificial Sequence
  Description of Artificial Sequence: Synthetic oligonucleotide
cauaaaucauaaugugcaa

SEQ ID NO: 2746100 - RNA, 19 nt, Artificial Sequence
  Description of Artificial Sequence: Synthetic oligonucleotide
agcggcugaaucuguuaag

SEQ ID NO: 2746101 - RNA, 19 nt, Artificial Sequence
  Description of Artificial Sequence: Synthetic oligonucleotide
cucugcuagggccuucacc

SEQ ID NO: 2746102 - RNA, 19 nt, Artificial Sequence
  Description of Artificial Sequence: Synthetic oligonucleotide
ugcuagggccuucacccca

SEQ ID NO: 2746103 - RNA, 19 nt, Artificial Sequence
  Description of Artificial Sequence: Synthetic oligonucleotide
aaagccguccucacucuca

SEQ ID NO: 2746104 - RNA, 19 nt, Artificial Sequence
  Description of Artificial Sequence: Synthetic oligonucleotide
aaacaggcccggauuggag

SEQ ID NO: 2746105 - RNA, 19 nt, Artificial Sequence
  Description of Artificial Sequence: Synthetic oligonucleotide
acgccugcucuucuuagug

SEQ ID NO: 2746106 - RNA, 19 nt, Artificial Sequence
  Description of Artificial Sequence: Synthetic oligonucleotide
uugccaucacacacagugu

SEQ ID NO: 2746107 - RNA, 19 nt, Artificial Sequence
  Description of Artificial Sequence: Synthetic oligonucleotide
uccugccuuuacaaaauuu

SEQ ID NO: 2746108 - RNA, 19 nt, Artificial Sequence
  Description of Artificial Sequence: Synthetic oligonucleotide
aaagacgccugcucuucuu

SEQ ID NO: 2746109 - RNA, 19 nt, Artificial Sequence
  Description of Artificial Sequence: Synthetic oligonucleotide
cugauaaugcauaaaucau

SEQ ID NO: 2746110 - RNA, 19 nt, Artificial Sequence
  Description of Artificial Sequence: Synthetic oligonucleotide
acgggaaaaggaaauccug

SEQ ID NO: 2746111 - RNA, 19 nt, Artificial Sequence
  Description of Artificial Sequence: Synthetic oligonucleotide
caaacaucuggaacuugca

SEQ ID NO: 2746112 - RNA, 19 nt, Artificial Sequence
  Description of Artificial Sequence: Synthetic oligonucleotide
acaguuccgaacgcacacg

SEQ ID NO: 2746113 - RNA, 19 nt, Artificial Sequence
  Description of Artificial Sequence: Synthetic oligonucleotide
gguauauaaagccguccuc

SEQ ID NO: 2746114 - RNA, 19 nt, Artificial Sequence
  Description of Artificial Sequence: Synthetic oligonucleotide
uuccaaagcagggcuauau

SEQ ID NO: 2746115 - RNA, 19 nt, Artificial Sequence
  Description of Artificial Sequence: Synthetic oligonucleotide
guuaagacauguagucuuc

SEQ ID NO: 2746116 - RNA, 19 nt, Artificial Sequence
  Description of Artificial Sequence: Synthetic oligonucleotide
cuugcgugacuaaggaaga

SEQ ID NO: 2746117 - RNA, 19 nt, Artificial Sequence
  Description of Artificial Sequence: Synthetic oligonucleotide
agggcuauauguguuccca

SEQ ID NO: 2746118 - RNA, 19 nt, Artificial Sequence
  Description of Artificial Sequence: Synthetic oligonucleotide
cggauuggaggauucagcg

SEQ ID NO: 2746119 - RNA, 19 nt, Artificial Sequence
  Description of Artificial Sequence: Synthetic oligonucleotide
caaacgggaaaaggaaauc

SEQ ID NO: 2746120 - RNA, 19 nt, Artificial Sequence
  Description of Artificial Sequence: Synthetic oligonucleotide
agacgccugcucuucuuag

SEQ ID NO: 2746121 - RNA, 19 nt, Artificial Sequence
  Description of Artificial Sequence: Synthetic oligonucleotide
cacucucaggccuggcugc

SEQ ID NO: 2746122 - RNA, 19 nt, Artificial Sequence
  Description of Artificial Sequence: Synthetic oligonucleotide
aagacgccugcucuucuua

SEQ ID NO: 2746123 - RNA, 19 nt, Artificial Sequence
  Description of Artificial Sequence: Synthetic oligonucleotide
gugacuaaggaagagguau

SEQ ID NO: 2746124 - RNA, 19 nt, Artificial Sequence
  Description of Artificial Sequence: Synthetic oligonucleotide
guaacuucugauaaugcau

SEQ ID NO: 2746125 - RNA, 19 nt, Artificial Sequence
  Description of Artificial Sequence: Synthetic oligonucleotide
ucuucucuugugagcaguu

SEQ ID NO: 2746126 - RNA, 19 nt, Artificial Sequence
  Description of Artificial Sequence: Synthetic oligonucleotide
uuagcaugcucgucuuaau

SEQ ID NO: 2746127 - RNA, 19 nt, Artificial Sequence
  Description of Artificial Sequence: Synthetic oligonucleotide
cacacacagugucacagca

SEQ ID NO: 2746128 - RNA, 19 nt, Artificial Sequence
  Description of Artificial Sequence: Synthetic oligonucleotide
cugaaucuguuaagacaug

SEQ ID NO: 2746129 - RNA, 19 nt, Artificial Sequence
  Description of Artificial Sequence: Synthetic oligonucleotide
acaggcccggauuggagga

SEQ ID NO: 2746130 - RNA, 19 nt, Artificial Sequence
  Description of Artificial Sequence: Synthetic oligonucleotide
agucuucucuugugagcag

SEQ ID NO: 2746131 - RNA, 19 nt, Artificial Sequence
  Description of Artificial Sequence: Synthetic oligonucleotide
guggguucggaaccucugc

SEQ ID NO: 2746132 - RNA, 19 nt, Artificial Sequence
  Description of Artificial Sequence: Synthetic oligonucleotide
cagcaaacgggaaaaggaa

SEQ ID NO: 2746133 - RNA, 19 nt, Artificial Sequence
  Description of Artificial Sequence: Synthetic oligonucleotide
uaaagccguccucacucuc

SEQ ID NO: 2746134 - RNA, 19 nt, Artificial Sequence
  Description of Artificial Sequence: Synthetic oligonucleotide
ucacagcaaacgggaaaag

SEQ ID NO: 2746135 - RNA, 19 nt, Artificial Sequence
  Description of Artificial Sequence: Synthetic oligonucleotide
cagcaguaacuucugauaa

SEQ ID NO: 2746136 - RNA, 19 nt, Artificial Sequence
  Description of Artificial Sequence: Synthetic oligonucleotide
gccguccucacucucaggc

SEQ ID NO: 2746137 - RNA, 19 nt, Artificial Sequence
  Description of Artificial Sequence: Synthetic oligonucleotide
uugcgugacuaaggaagag

SEQ ID NO: 2746138 - RNA, 19 nt, Artificial Sequence
  Description of Artificial Sequence: Synthetic oligonucleotide
aauccauuuccugccuuua

SEQ ID NO: 2746139 - RNA, 19 nt, Artificial Sequence
  Description of Artificial Sequence: Synthetic oligonucleotide
uccgaacgcacacgcugug

SEQ ID NO: 2746140 - RNA, 19 nt, Artificial Sequence
  Description of Artificial Sequence: Synthetic oligonucleotide
gaaucuguuaagacaugua

SEQ ID NO: 2746141 - RNA, 19 nt, Artificial Sequence
  Description of Artificial Sequence: Synthetic oligonucleotide
ggaauacaguuccgaacgc

SEQ ID NO: 2746142 - RNA, 19 nt, Artificial Sequence
  Description of Artificial Sequence: Synthetic oligonucleotide
acuucugauaaugcauaaa

SEQ ID NO: 2746143 - RNA, 19 nt, Artificial Sequence
  Description of Artificial Sequence: Synthetic oligonucleotide
ggaaauccugcuaccugcg

SEQ ID NO: 2746144 - RNA, 19 nt, Artificial Sequence
  Description of Artificial Sequence: Synthetic oligonucleotide
ugcucgucuuaauccauuu

SEQ ID NO: 2746145 - RNA, 19 nt, Artificial Sequence
  Description of Artificial Sequence: Synthetic oligonucleotide
ucagcggcugaaucuguua

SEQ ID NO: 2746146 - RNA, 19 nt, Artificial Sequence
  Description of Artificial Sequence: Synthetic oligonucleotide
cagggcuauauguguuccc

SEQ ID NO: 2746147 - RNA, 19 nt, Artificial Sequence
  Description of Artificial Sequence: Synthetic oligonucleotide
agcaaacgggaaaaggaaa

SEQ ID NO: 2746148 - RNA, 19 nt, Artificial Sequence
  Description of Artificial Sequence: Synthetic oligonucleotide
gcggaauacaguuccgaac

SEQ ID NO: 2746149 - RNA, 19 nt, Artificial Sequence
  Description of Artificial Sequence: Synthetic oligonucleotide
acucucaggccuggcugcc

SEQ ID NO: 2746150 - RNA, 19 nt, Artificial Sequence
  Description of Artificial Sequence: Synthetic oligonucleotide
ggcuauauguguucccauc

SEQ ID NO: 2746151 - RNA, 19 nt, Artificial Sequence
  Description of Artificial Sequence: Synthetic oligonucleotide
ucggaaccucugcuagggc

SEQ ID NO: 2746152 - RNA, 19 nt, Artificial Sequence
  Description of Artificial Sequence: Synthetic oligonucleotide
cuguguuuccugugccaac

SEQ ID NO: 2746153 - RNA, 19 nt, Artificial Sequence
  Description of Artificial Sequence: Synthetic oligonucleotide
cuaccugcggaauacaguu

SEQ ID NO: 2746154 - RNA, 19 nt, Artificial Sequence
  Description of Artificial Sequence: Synthetic oligonucleotide
auacaguuccgaacgcaca

SEQ ID NO: 2746155 - RNA, 19 nt, Artificial Sequence
  Description of Artificial Sequence: Synthetic oligonucleotide
gguccugagaauaaacaaa

SEQ ID NO: 2746156 - RNA, 19 nt, Artificial Sequence
  Description of Artificial Sequence: Synthetic oligonucleotide
uaccugcggaauacaguuc

SEQ ID NO: 2746157 - RNA, 19 nt, Artificial Sequence
  Description of Artificial Sequence: Synthetic oligonucleotide
uugcagaaguguugccauc

SEQ ID NO: 2746158 - RNA, 19 nt, Artificial Sequence
  Description of Artificial Sequence: Synthetic oligonucleotide
uuccugccuuuacaaaauu

SEQ ID NO: 2746159 - RNA, 19 nt, Artificial Sequence
  Description of Artificial Sequence: Synthetic oligonucleotide
gcugaaucuguuaagacau

SEQ ID NO: 2746160 - RNA, 19 nt, Artificial Sequence
  Description of Artificial Sequence: Synthetic oligonucleotide
cauuuccugccuuuacaaa

SEQ ID NO: 2746161 - RNA, 19 nt, Artificial Sequence
  Description of Artificial Sequence: Synthetic oligonucleotide
uagggccuucaccccacca

SEQ ID NO: 2746162 - RNA, 19 nt, Artificial Sequence
  Description of Artificial Sequence: Synthetic oligonucleotide
gcagcaguaacuucugaua

SEQ ID NO: 2746163 - RNA, 19 nt, Artificial Sequence
  Description of Artificial Sequence: Synthetic oligonucleotide
caccacagaaacgugaacu

SEQ ID NO: 2746164 - RNA, 19 nt, Artificial Sequence
  Description of Artificial Sequence: Synthetic oligonucleotide
ccggauuggaggauucagc

SEQ ID NO: 2746165 - RNA, 19 nt, Artificial Sequence
  Description of Artificial Sequence: Synthetic oligonucleotide
acuaaggaagagguauaua

SEQ ID NO: 2746166 - RNA, 19 nt, Artificial Sequence
  Description of Artificial Sequence: Synthetic oligonucleotide
acgugaacuugcgugacua

SEQ ID NO: 2746167 - RNA, 19 nt, Artificial Sequence
  Description of Artificial Sequence: Synthetic oligonucleotide
gcuauauguguucccaucu

SEQ ID NO: 2746168 - RNA, 19 nt, Artificial Sequence
  Description of Artificial Sequence: Synthetic oligonucleotide
cuugcagaaguguugccau

SEQ ID NO: 2746169 - RNA, 19 nt, Artificial Sequence
  Description of Artificial Sequence: Synthetic oligonucleotide
uguucccaucucugcugug

SEQ ID NO: 2746170 - RNA, 19 nt, Artificial Sequence
  Description of Artificial Sequence: Synthetic oligonucleotide
cagaaguguugccaucaca

SEQ ID NO: 2746171 - RNA, 19 nt, Artificial Sequence
  Description of Artificial Sequence: Synthetic oligonucleotide
auuuagcaugcucgucuua

SEQ ID NO: 2746172 - RNA, 19 nt, Artificial Sequence
  Description of Artificial Sequence: Synthetic oligonucleotide
uugcagaauguagcccugu

SEQ ID NO: 2746173 - RNA, 19 nt, Artificial Sequence
  Description of Artificial Sequence: Synthetic oligonucleotide
cugcuagggccuucacccc

SEQ ID NO: 2746174 - RNA, 19 nt, Artificial Sequence
  Description of Artificial Sequence: Synthetic oligonucleotide
cuuuuccaaagcagggcua

SEQ ID NO: 2746175 - RNA, 19 nt, Artificial Sequence
  Description of Artificial Sequence: Synthetic oligonucleotide
aagcagggcuauauguguu

SEQ ID NO: 2746176 - RNA, 19 nt, Artificial Sequence
  Description of Artificial Sequence: Synthetic oligonucleotide
ggauucagcggcugaaucu

SEQ ID NO: 2746177 - RNA, 19 nt, Artificial Sequence
  Description of Artificial Sequence: Synthetic oligonucleotide
cacacgcuguguggguucg

SEQ ID NO: 2746178 - RNA, 19 nt, Artificial Sequence
  Description of Artificial Sequence: Synthetic oligonucleotide
auuggaggauucagcggcu

SEQ ID NO: 2746179 - RNA, 19 nt, Artificial Sequence
  Description of Artificial Sequence: Synthetic oligonucleotide
cgucuuaauccauuuccug

SEQ ID NO: 2746180 - RNA, 19 nt, Artificial Sequence
  Description of Artificial Sequence: Synthetic oligonucleotide
cggaaccucugcuagggcc

SEQ ID NO: 2746181 - RNA, 19 nt, Artificial Sequence
  Description of Artificial Sequence: Synthetic oligonucleotide
gagcaguuugcagaaugua

SEQ ID NO: 2746182 - RNA, 19 nt, Artificial Sequence
  Description of Artificial Sequence: Synthetic oligonucleotide
cuucaccccaccacagaaa

SEQ ID NO: 2746183 - RNA, 19 nt, Artificial Sequence
  Description of Artificial Sequence: Synthetic oligonucleotide
caucacacacagugucaca

SEQ ID NO: 2746184 - RNA, 19 nt, Artificial Sequence
  Description of Artificial Sequence: Synthetic oligonucleotide
cucuugugagcaguuugca

SEQ ID NO: 2746185 - RNA, 19 nt, Artificial Sequence
  Description of Artificial Sequence: Synthetic oligonucleotide
agccguccucacucucagg

SEQ ID NO: 2746186 - RNA, 19 nt, Artificial Sequence
  Description of Artificial Sequence: Synthetic oligonucleotide
ccugcuaccugcggaauac

SEQ ID NO: 2746187 - RNA, 19 nt, Artificial Sequence
  Description of Artificial Sequence: Synthetic oligonucleotide
cuguuaagacauguagucu

SEQ ID NO: 2746188 - RNA, 19 nt, Artificial Sequence
  Description of Artificial Sequence: Synthetic oligonucleotide
uguguggguucggaaccuc

SEQ ID NO: 2746189 - RNA, 19 nt, Artificial Sequence
  Description of Artificial Sequence: Synthetic oligonucleotide
ccugcggaauacaguuccg

SEQ ID NO: 2746190 - RNA, 19 nt, Artificial Sequence
  Description of Artificial Sequence: Synthetic oligonucleotide
gccaucgcuaaaacaggcc

SEQ ID NO: 2746191 - RNA, 19 nt, Artificial Sequence
  Description of Artificial Sequence: Synthetic oligonucleotide
cagcggcugaaucuguuaa

SEQ ID NO: 2746192 - RNA, 19 nt, Artificial Sequence
  Description of Artificial Sequence: Synthetic oligonucleotide
gcagggcuauauguguucc

SEQ ID NO: 2746193 - RNA, 19 nt, Artificial Sequence
  Description of Artificial Sequence: Synthetic oligonucleotide
ucccaucucugcuguguuu

SEQ ID NO: 2746194 - RNA, 19 nt, Artificial Sequence
  Description of Artificial Sequence: Synthetic oligonucleotide
gcuaaaacaggcccggauu

SEQ ID NO: 2746195 - RNA, 19 nt, Artificial Sequence
  Description of Artificial Sequence: Synthetic oligonucleotide
ccaaagcagggcuauaugu

SEQ ID NO: 2746196 - RNA, 19 nt, Artificial Sequence
  Description of Artificial Sequence: Synthetic oligonucleotide
aguuccgaacgcacacgcu

SEQ ID NO: 2746197 - RNA, 19 nt, Artificial Sequence
  Description of Artificial Sequence: Synthetic oligonucleotide
ugugagcaguuugcagaau

SEQ ID NO: 2746198 - RNA, 19 nt, Artificial Sequence
  Description of Artificial Sequence: Synthetic oligonucleotide
cugcggaauacaguuccga

SEQ ID NO: 2746199 - RNA, 19 nt, Artificial Sequence
  Description of Artificial Sequence: Synthetic oligonucleotide
cuagggccuucaccccacc

SEQ ID NO: 2746200 - RNA, 19 nt, Artificial Sequence
  Description of Artificial Sequence: Synthetic oligonucleotide
acgcacacgcugugugggu

SEQ ID NO: 2746201 - RNA, 19 nt, Artificial Sequence
  Description of Artificial Sequence: Synthetic oligonucleotide
gcucgucuuaauccauuuc

SEQ ID NO: 2746202 - RNA, 19 nt, Artificial Sequence
  Description of Artificial Sequence: Synthetic oligonucleotide
gcggcugaaucuguuaaga

SEQ ID NO: 2746203 - RNA, 19 nt, Artificial Sequence
  Description of Artificial Sequence: Synthetic oligonucleotide
gacgccugcucuucuuagu

SEQ ID NO: 2746204 - RNA, 19 nt, Artificial Sequence
  Description of Artificial Sequence: Synthetic oligonucleotide
ucgcuaaaacaggcccgga

SEQ ID NO: 2746205 - RNA, 19 nt, Artificial Sequence
  Description of Artificial Sequence: Synthetic oligonucleotide
gcagaaguguugccaucac

SEQ ID NO: 2746206 - RNA, 19 nt, Artificial Sequence
  Description of Artificial Sequence: Synthetic oligonucleotide
acacacagugucacagcaa

SEQ ID NO: 2746207 - RNA, 19 nt, Artificial Sequence
  Description of Artificial Sequence: Synthetic oligonucleotide
ggcagcaguaacuucugau

SEQ ID NO: 2746208 - RNA, 19 nt, Artificial Sequence
  Description of Artificial Sequence: Synthetic oligonucleotide
ggcugccaucgcuaaaaca

SEQ ID NO: 2746209 - RNA, 19 nt, Artificial Sequence
  Description of Artificial Sequence: Synthetic oligonucleotide
cgcuguguggguucggaac

SEQ ID NO: 2746210 - RNA, 19 nt, Artificial Sequence
  Description of Artificial Sequence: Synthetic oligonucleotide
ccaucucugcuguguuucc

SEQ ID NO: 2746211 - RNA, 19 nt, Artificial Sequence
  Description of Artificial Sequence: Synthetic oligonucleotide
acgcuguguggguucggaa

SEQ ID NO: 2746212 - RNA, 19 nt, Artificial Sequence
  Description of Artificial Sequence: Synthetic oligonucleotide
auucagcggcugaaucugu

SEQ ID NO: 2746213 - RNA, 19 nt, Artificial Sequence
  Description of Artificial Sequence: Synthetic oligonucleotide
guguucccaucucugcugu

SEQ ID NO: 2746214 - RNA, 19 nt, Artificial Sequence
  Description of Artificial Sequence: Synthetic oligonucleotide
cgaacgcacacgcugugug

SEQ ID NO: 2746215 - RNA, 19 nt, Artificial Sequence
  Description of Artificial Sequence: Synthetic oligonucleotide
gcaaacgggaaaaggaaau

SEQ ID NO: 2746216 - RNA, 19 nt, Artificial Sequence
  Description of Artificial Sequence: Synthetic oligonucleotide
cccggauuggaggauucag

SEQ ID NO: 2746217 - RNA, 19 nt, Artificial Sequence
  Description of Artificial Sequence: Synthetic oligonucleotide
ccguccucacucucaggcc

SEQ ID NO: 2746218 - RNA, 19 nt, Artificial Sequence
  Description of Artificial Sequence: Synthetic oligonucleotide
gcgugacuaaggaagaggu

SEQ ID NO: 2746219 - RNA, 19 nt, Artificial Sequence
  Description of Artificial Sequence: Synthetic oligonucleotide
ggaggauucagcggcugaa

SEQ ID NO: 2746220 - RNA, 19 nt, Artificial Sequence
  Description of Artificial Sequence: Synthetic oligonucleotide
augcucgucuuaauccauu

SEQ ID NO: 2746221 - RNA, 19 nt, Artificial Sequence
  Description of Artificial Sequence: Synthetic oligonucleotide
cagaaacgugaacuugcgu

SEQ ID NO: 2746222 - RNA, 19 nt, Artificial Sequence
  Description of Artificial Sequence: Synthetic oligonucleotide
caugcucgucuuaauccau

SEQ ID NO: 2746223 - RNA, 19 nt, Artificial Sequence
  Description of Artificial Sequence: Synthetic oligonucleotide
cggcugaaucuguuaagac

SEQ ID NO: 2746224 - RNA, 19 nt, Artificial Sequence
  Description of Artificial Sequence: Synthetic oligonucleotide
acacgcuguguggguucgg

SEQ ID NO: 2746225 - RNA, 19 nt, Artificial Sequence
  Description of Artificial Sequence: Synthetic oligonucleotide
gaggauucagcggcugaau

SEQ ID NO: 2746226 - RNA, 19 nt, Artificial Sequence
  Description of Artificial Sequence: Synthetic oligonucleotide
cacgcuguguggguucgga

SEQ ID NO: 2746227 - RNA, 19 nt, Artificial Sequence
  Description of Artificial Sequence: Synthetic oligonucleotide
ggguucggaaccucugcua

SEQ ID NO: 2746228 - RNA, 19 nt, Artificial Sequence
  Description of Artificial Sequence: Synthetic oligonucleotide
gcacacgcuguguggguuc

SEQ ID NO: 2746229 - RNA, 19 nt, Artificial Sequence
  Description of Artificial Sequence: Synthetic oligonucleotide
caaagacgccugcucuucu

SEQ ID NO: 2746230 - RNA, 19 nt, Artificial Sequence
  Description of Artificial Sequence: Synthetic oligonucleotide
gugucacagcaaacgggaa

SEQ ID NO: 2746231 - RNA, 19 nt, Artificial Sequence
  Description of Artificial Sequence: Synthetic oligonucleotide
auccugcuaccugcggaau

SEQ ID NO: 2746232 - RNA, 19 nt, Artificial Sequence
  Description of Artificial Sequence: Synthetic oligonucleotide
gcuaccugcggaauacagu

SEQ ID NO: 2746233 - RNA, 19 nt, Artificial Sequence
  Description of Artificial Sequence: Synthetic oligonucleotide
gugcaaacaucuggaacuu

SEQ ID NO: 2746234 - RNA, 19 nt, Artificial Sequence
  Description of Artificial Sequence: Synthetic oligonucleotide
gccuucaccccaccacaga

SEQ ID NO: 2746235 - RNA, 19 nt, Artificial Sequence
  Description of Artificial Sequence: Synthetic oligonucleotide
guguggguucggaaccucu

SEQ ID NO: 2746236 - RNA, 19 nt, Artificial Sequence
  Description of Artificial Sequence: Synthetic oligonucleotide
cugcuaccugcggaauaca

SEQ ID NO: 2746237 - RNA, 19 nt, Artificial Sequence
  Description of Artificial Sequence: Synthetic oligonucleotide
aggcccggauuggaggauu

SEQ ID NO: 2746238 - RNA, 19 nt, Artificial Sequence
  Description of Artificial Sequence: Synthetic oligonucleotide
gggcuauauguguucccau

SEQ ID NO: 2746239 - RNA, 19 nt, Artificial Sequence
  Description of Artificial Sequence: Synthetic oligonucleotide
cuguguggguucggaaccu

SEQ ID NO: 2746240 - RNA, 19 nt, Artificial Sequence
  Description of Artificial Sequence: Synthetic oligonucleotide
cgugacuaaggaagaggua

SEQ ID NO: 2746241 - RNA, 19 nt, Artificial Sequence
  Description of Artificial Sequence: Synthetic oligonucleotide
ggcccggauuggaggauuc

SEQ ID NO: 2746242 - RNA, 19 nt, Artificial Sequence
  Description of Artificial Sequence: Synthetic oligonucleotide
gccuggcugccaucgcuaa

SEQ ID NO: 2746243 - RNA, 19 nt, Artificial Sequence
  Description of Artificial Sequence: Synthetic oligonucleotide
cgugaacuugcgugacuaa

SEQ ID NO: 2746244 - RNA, 19 nt, Artificial Sequence
  Description of Artificial Sequence: Synthetic oligonucleotide
gcccggauuggaggauuca

SEQ ID NO: 2746245 - RNA, 19 nt, Artificial Sequence
  Description of Artificial Sequence: Synthetic oligonucleotide
cgcuaaaacaggcccggau

SEQ ID NO: 2746246 - RNA, 19 nt, Artificial Sequence
  Description of Artificial Sequence: Synthetic oligonucleotide
cgccugcucuucuuagugu

SEQ ID NO: 2746247 - RNA, 19 nt, Artificial Sequence
  Description of Artificial Sequence: Synthetic oligonucleotide
caggcccggauuggaggau

SEQ ID NO: 2746248 - RNA, 19 nt, Artificial Sequence
  Description of Artificial Sequence: Synthetic oligonucleotide
ccgaacgcacacgcugugu

SEQ ID NO: 2746249 - RNA, 19 nt, Artificial Sequence
  Description of Artificial Sequence: Synthetic oligonucleotide
cgcacacgcuguguggguu

SEQ ID NO: 2746250 - RNA, 19 nt, Artificial Sequence
  Description of Artificial Sequence: Synthetic oligonucleotide
uuuauugcagcucuggugu

SEQ ID NO: 2746251 - RNA, 19 nt, Artificial Sequence
  Description of Artificial Sequence: Synthetic oligonucleotide
cuugggaagagcaaacucg

SEQ ID NO: 2746252 - RNA, 19 nt, Artificial Sequence
  Description of Artificial Sequence: Synthetic oligonucleotide
cuaauuuauaguccgauuc

SEQ ID NO: 2746253 - RNA, 19 nt, Artificial Sequence
  Description of Artificial Sequence: Synthetic oligonucleotide
agaacauuguccccgacuc

SEQ ID NO: 2746254 - RNA, 19 nt, Artificial Sequence
  Description of Artificial Sequence: Synthetic oligonucleotide
aaacucgacuccuuccagc

SEQ ID NO: 2746255 - RNA, 19 nt, Artificial Sequence
  Description of Artificial Sequence: Synthetic oligonucleotide
aauuuauaguccgauucuc

SEQ ID NO: 2746256 - RNA, 19 nt, Artificial Sequence
  Description of Artificial Sequence: Synthetic oligonucleotide
uuuuauugcagcucuggug

SEQ ID NO: 2746257 - RNA, 19 nt, Artificial Sequence
  Description of Artificial Sequence: Synthetic oligonucleotide
acacccaagauggagaccc

SEQ ID NO: 2746258 - RNA, 19 nt, Artificial Sequence
  Description of Artificial Sequence: Synthetic oligonucleotide
aucccuaauuuauaguccg

SEQ ID NO: 2746259 - RNA, 19 nt, Artificial Sequence
  Description of Artificial Sequence: Synthetic oligonucleotide
aguucaguggcccugguug

SEQ ID NO: 2746260 - RNA, 19 nt, Artificial Sequence
  Description of Artificial Sequence: Synthetic oligonucleotide
ucuggucucacacagugcu

SEQ ID NO: 2746261 - RNA, 19 nt, Artificial Sequence
  Description of Artificial Sequence: Synthetic oligonucleotide
uccacguagaaguuccugg

SEQ ID NO: 2746262 - RNA, 19 nt, Artificial Sequence
  Description of Artificial Sequence: Synthetic oligonucleotide
auuuauaguccgauucucc

SEQ ID NO: 2746263 - RNA, 19 nt, Artificial Sequence
  Description of Artificial Sequence: Synthetic oligonucleotide
uccacgaagaccacguuga

SEQ ID NO: 2746264 - RNA, 19 nt, Artificial Sequence
  Description of Artificial Sequence: Synthetic oligonucleotide
accgucacacccaagaugg

SEQ ID NO: 2746265 - RNA, 19 nt, Artificial Sequence
  Description of Artificial Sequence: Synthetic oligonucleotide
gacucugccccucacgggg

SEQ ID NO: 2746266 - RNA, 19 nt, Artificial Sequence
  Description of Artificial Sequence: Synthetic oligonucleotide
ggauccgccgaccagagcg

SEQ ID NO: 2746267 - RNA, 19 nt, Artificial Sequence
  Description of Artificial Sequence: Synthetic oligonucleotide
uugggaagagcaaacucga

SEQ ID NO: 2746268 - RNA, 19 nt, Artificial Sequence
  Description of Artificial Sequence: Synthetic oligonucleotide
aacauuguccccgacucug

SEQ ID NO: 2746269 - RNA, 19 nt, Artificial Sequence
  Description of Artificial Sequence: Synthetic oligonucleotide
caucccuaauuuauagucc

SEQ ID NO: 2746270 - RNA, 19 nt, Artificial Sequence
  Description of Artificial Sequence: Synthetic oligonucleotide
aacucgacuccuuccagcu

SEQ ID NO: 2746271 - RNA, 19 nt, Artificial Sequence
  Description of Artificial Sequence: Synthetic oligonucleotide
agugcuuccagcuucucau

SEQ ID NO: 2746272 - RNA, 19 nt, Artificial Sequence
  Description of Artificial Sequence: Synthetic oligonucleotide
guccgauucucccuggugg

SEQ ID NO: 2746273 - RNA, 19 nt, Artificial Sequence
  Description of Artificial Sequence: Synthetic oligonucleotide
gauucucccugguggaccg

SEQ ID NO: 2746274 - RNA, 19 nt, Artificial Sequence
  Description of Artificial Sequence: Synthetic oligonucleotide
ugugaguccaucccuaauu

SEQ ID NO: 2746275 - RNA, 19 nt, Artificial Sequence
  Description of Artificial Sequence: Synthetic oligonucleotide
uuccuggugaccuugggaa

SEQ ID NO: 2746276 - RNA, 19 nt, Artificial Sequence
  Description of Artificial Sequence: Synthetic oligonucleotide
agcacaaucuggcagccca

SEQ ID NO: 2746277 - RNA, 19 nt, Artificial Sequence
  Description of Artificial Sequence: Synthetic oligonucleotide
auuguccccgacucugccc

SEQ ID NO: 2746278 - RNA, 19 nt, Artificial Sequence
  Description of Artificial Sequence: Synthetic oligonucleotide
uuauaguccgauucucccu

SEQ ID NO: 2746279 - RNA, 19 nt, Artificial Sequence
  Description of Artificial Sequence: Synthetic oligonucleotide
agagcgguccacgaagacc

SEQ ID NO: 2746280 - RNA, 19 nt, Artificial Sequence
  Description of Artificial Sequence: Synthetic oligonucleotide
aacaugucguccucccucu

SEQ ID NO: 2746281 - RNA, 19 nt, Artificial Sequence
  Description of Artificial Sequence: Synthetic oligonucleotide
gucagcacaaucuggcagc

SEQ ID NO: 2746282 - RNA, 19 nt, Artificial Sequence
  Description of Artificial Sequence: Synthetic oligonucleotide
gguggaacaugccagggag

SEQ ID NO: 2746283 - RNA, 19 nt, Artificial Sequence
  Description of Artificial Sequence: Synthetic oligonucleotide
uagaaguuccuggugaccu

SEQ ID NO: 2746284 - RNA, 19 nt, Artificial Sequence
  Description of Artificial Sequence: Synthetic oligonucleotide
auuccuggccagucugugc

SEQ ID NO: 2746285 - RNA, 19 nt, Artificial Sequence
  Description of Artificial Sequence: Synthetic oligonucleotide
acguagaaguuccugguga

SEQ ID NO: 2746286 - RNA, 19 nt, Artificial Sequence
  Description of Artificial Sequence: Synthetic oligonucleotide
accagagcgguccacgaag

SEQ ID NO: 2746287 - RNA, 19 nt, Artificial Sequence
  Description of Artificial Sequence: Synthetic oligonucleotide
gaagagcaaacucgacucc

SEQ ID NO: 2746288 - RNA, 19 nt, Artificial Sequence
  Description of Artificial Sequence: Synthetic oligonucleotide
uggaacaugccagggaggc

SEQ ID NO: 2746289 - RNA, 19 nt, Artificial Sequence
  Description of Artificial Sequence: Synthetic oligonucleotide
uuguccccgacucugcccc

SEQ ID NO: 2746290 - RNA, 19 nt, Artificial Sequence
  Description of Artificial Sequence: Synthetic oligonucleotide
guccaucccuaauuuauag

SEQ ID NO: 2746291 - RNA, 19 nt, Artificial Sequence
  Description of Artificial Sequence: Synthetic oligonucleotide
uucgcaggccccuuccagg

SEQ ID NO: 2746292 - RNA, 19 nt, Artificial Sequence
  Description of Artificial Sequence: Synthetic oligonucleotide
uuccuggccagucugugcu

SEQ ID NO: 2746293 - RNA, 19 nt, Artificial Sequence
  Description of Artificial Sequence: Synthetic oligonucleotide
ucuggggccgggagcaugg

SEQ ID NO: 2746294 - RNA, 19 nt, Artificial Sequence
  Description of Artificial Sequence: Synthetic oligonucleotide
auguccaacaugucguccu

SEQ ID NO: 2746295 - RNA, 19 nt, Artificial Sequence
  Description of Artificial Sequence: Synthetic oligonucleotide
uccaacaugucguccuccc

SEQ ID NO: 2746296 - RNA, 19 nt, Artificial Sequence
  Description of Artificial Sequence: Synthetic oligonucleotide
gaccgucacacccaagaug

SEQ ID NO: 2746297 - RNA, 19 nt, Artificial Sequence
  Description of Artificial Sequence: Synthetic oligonucleotide
acaaucuggcagcccaguc

SEQ ID NO: 2746298 - RNA, 19 nt, Artificial Sequence
  Description of Artificial Sequence: Synthetic oligonucleotide
cucucaguggggcuugggg

SEQ ID NO: 2746299 - RNA, 19 nt, Artificial Sequence
  Description of Artificial Sequence: Synthetic oligonucleotide
ucacacccaagauggagac

SEQ ID NO: 2746300 - RNA, 19 nt, Artificial Sequence
  Description of Artificial Sequence: Synthetic oligonucleotide
uccaucccuaauuuauagu

SEQ ID NO: 2746301 - RNA, 19 nt, Artificial Sequence
  Description of Artificial Sequence: Synthetic oligonucleotide
agacccaccccuccaggac

SEQ ID NO: 2746302 - RNA, 19 nt, Artificial Sequence
  Description of Artificial Sequence: Synthetic oligonucleotide
agcuucucauuccuggcca

SEQ ID NO: 2746303 - RNA, 19 nt, Artificial Sequence
  Description of Artificial Sequence: Synthetic oligonucleotide
guucaguggcccugguugg

SEQ ID NO: 2746304 - RNA, 19 nt, Artificial Sequence
  Description of Artificial Sequence: Synthetic oligonucleotide
cagucugugcucuggggcc

SEQ ID NO: 2746305 - RNA, 19 nt, Artificial Sequence
  Description of Artificial Sequence: Synthetic oligonucleotide
ccaucccuaauuuauaguc

SEQ ID NO: 2746306 - RNA, 19 nt, Artificial Sequence
  Description of Artificial Sequence: Synthetic oligonucleotide
caagauggagacccacccc

SEQ ID NO: 2746307 - RNA, 19 nt, Artificial Sequence
  Description of Artificial Sequence: Synthetic oligonucleotide
caacaugucguccucccuc

SEQ ID NO: 2746308 - RNA, 19 nt, Artificial Sequence
  Description of Artificial Sequence: Synthetic oligonucleotide
cucgaguucuccuggagca

SEQ ID NO: 2746309 - RNA, 19 nt, Artificial Sequence
  Description of Artificial Sequence: Synthetic oligonucleotide
uccaggacccggacacugg

SEQ ID NO: 2746310 - RNA, 19 nt, Artificial Sequence
  Description of Artificial Sequence: Synthetic oligonucleotide
gagcgguccacgaagacca

SEQ ID NO: 2746311 - RNA, 19 nt, Artificial Sequence
  Description of Artificial Sequence: Synthetic oligonucleotide
guccacgaagaccacguug

SEQ ID NO: 2746312 - RNA, 19 nt, Artificial Sequence
  Description of Artificial Sequence: Synthetic oligonucleotide
gugggccucgcucacauac

SEQ ID NO: 2746313 - RNA, 19 nt, Artificial Sequence
  Description of Artificial Sequence: Synthetic oligonucleotide
ggucagcacaaucuggcag

SEQ ID NO: 2746314 - RNA, 19 nt, Artificial Sequence
  Description of Artificial Sequence: Synthetic oligonucleotide
gaaguuccuggugaccuug

SEQ ID NO: 2746315 - RNA, 19 nt, Artificial Sequence
  Description of Artificial Sequence: Synthetic oligonucleotide
aguuccuggugaccuuggg

SEQ ID NO: 2746316 - RNA, 19 nt, Artificial Sequence
  Description of Artificial Sequence: Synthetic oligonucleotide
uggagacccaccccuccag

SEQ ID NO: 2746317 - RNA, 19 nt, Artificial Sequence
  Description of Artificial Sequence: Synthetic oligonucleotide
ucccuaauuuauaguccga

SEQ ID NO: 2746318 - RNA, 19 nt, Artificial Sequence
  Description of Artificial Sequence: Synthetic oligonucleotide
ugaccuugggaagagcaaa

SEQ ID NO: 2746319 - RNA, 19 nt, Artificial Sequence
  Description of Artificial Sequence: Synthetic oligonucleotide
caugucguccucccucucc

SEQ ID NO: 2746320 - RNA, 19 nt, Artificial Sequence
  Description of Artificial Sequence: Synthetic oligonucleotide
ccauccacguagaaguucc

SEQ ID NO: 2746321 - RNA, 19 nt, Artificial Sequence
  Description of Artificial Sequence: Synthetic oligonucleotide
uccgauucucccuggugga

SEQ ID NO: 2746322 - RNA, 19 nt, Artificial Sequence
  Description of Artificial Sequence: Synthetic oligonucleotide
auaguccgauucucccugg

SEQ ID NO: 2746323 - RNA, 19 nt, Artificial Sequence
  Description of Artificial Sequence: Synthetic oligonucleotide
uuauugcagcucuggugug

SEQ ID NO: 2746324 - RNA, 19 nt, Artificial Sequence
  Description of Artificial Sequence: Synthetic oligonucleotide
cagucucgaguucuccugg

SEQ ID NO: 2746325 - RNA, 19 nt, Artificial Sequence
  Description of Artificial Sequence: Synthetic oligonucleotide
caaacucgacuccuuccag

SEQ ID NO: 2746326 - RNA, 19 nt, Artificial Sequence
  Description of Artificial Sequence: Synthetic oligonucleotide
gcucacauacacauggcag

SEQ ID NO: 2746327 - RNA, 19 nt, Artificial Sequence
  Description of Artificial Sequence: Synthetic oligonucleotide
uccgguggccuccucucag

SEQ ID NO: 2746328 - RNA, 19 nt, Artificial Sequence
  Description of Artificial Sequence: Synthetic oligonucleotide
aguccgauucucccuggug

SEQ ID NO: 2746329 - RNA, 19 nt, Artificial Sequence
  Description of Artificial Sequence: Synthetic oligonucleotide
ucauuccuggccagucugu

SEQ ID NO: 2746330 - RNA, 19 nt, Artificial Sequence
  Description of Artificial Sequence: Synthetic oligonucleotide
uggucucacacagugcuuc

SEQ ID NO: 2746331 - RNA, 19 nt, Artificial Sequence
  Description of Artificial Sequence: Synthetic oligonucleotide
uacacauggcagguggaac

SEQ ID NO: 2746332 - RNA, 19 nt, Artificial Sequence
  Description of Artificial Sequence: Synthetic oligonucleotide
uauugcagcucugguguga

SEQ ID NO: 2746333 - RNA, 19 nt, Artificial Sequence
  Description of Artificial Sequence: Synthetic oligonucleotide
ccaagauggagacccaccc

SEQ ID NO: 2746334 - RNA, 19 nt, Artificial Sequence
  Description of Artificial Sequence: Synthetic oligonucleotide
ugguggaccgucacaccca

SEQ ID NO: 2746335 - RNA, 19 nt, Artificial Sequence
  Description of Artificial Sequence: Synthetic oligonucleotide
auugcagcucuggugugag

SEQ ID NO: 2746336 - RNA, 19 nt, Artificial Sequence
  Description of Artificial Sequence: Synthetic oligonucleotide
gcucuggucucacacagug

SEQ ID NO: 2746337 - RNA, 19 nt, Artificial Sequence
  Description of Artificial Sequence: Synthetic oligonucleotide
acauuguccccgacucugc

SEQ ID NO: 2746338 - RNA, 19 nt, Artificial Sequence
  Description of Artificial Sequence: Synthetic oligonucleotide
ggccaggugaagaacauug

SEQ ID NO: 2746339 - RNA, 19 nt, Artificial Sequence
  Description of Artificial Sequence: Synthetic oligonucleotide
cacgaagaccacguugacc

SEQ ID NO: 2746340 - RNA, 19 nt, Artificial Sequence
  Description of Artificial Sequence: Synthetic oligonucleotide
cacguagaaguuccuggug

SEQ ID NO: 2746341 - RNA, 19 nt, Artificial Sequence
  Description of Artificial Sequence: Synthetic oligonucleotide
gagcaaacucgacuccuuc

SEQ ID NO: 2746342 - RNA, 19 nt, Artificial Sequence
  Description of Artificial Sequence: Synthetic oligonucleotide
uguccaacaugucguccuc

SEQ ID NO: 2746343 - RNA, 19 nt, Artificial Sequence
  Description of Artificial Sequence: Synthetic oligonucleotide
aguggcccugguugguccg

SEQ ID NO: 2746344 - RNA, 19 nt, Artificial Sequence
  Description of Artificial Sequence: Synthetic oligonucleotide
agguggaacaugccaggga

SEQ ID NO: 2746345 - RNA, 19 nt, Artificial Sequence
  Description of Artificial Sequence: Synthetic oligonucleotide
ugggaagagcaaacucgac

SEQ ID NO: 2746346 - RNA, 19 nt, Artificial Sequence
  Description of Artificial Sequence: Synthetic oligonucleotide
aaguuccuggugaccuugg

SEQ ID NO: 2746347 - RNA, 19 nt, Artificial Sequence
  Description of Artificial Sequence: Synthetic oligonucleotide
cauuguccccgacucugcc

SEQ ID NO: 2746348 - RNA, 19 nt, Artificial Sequence
  Description of Artificial Sequence: Synthetic oligonucleotide
guagaaguuccuggugacc

SEQ ID NO: 2746349 - RNA, 19 nt, Artificial Sequence
  Description of Artificial Sequence: Synthetic oligonucleotide
cauguccaacaugucgucc

SEQ ID NO: 2746350 - RNA, 19 nt, Artificial Sequence
  Description of Artificial Sequence: Synthetic oligonucleotide
caggggucagcacaaucug

SEQ ID NO: 2746351 - RNA, 19 nt, Artificial Sequence
  Description of Artificial Sequence: Synthetic oligonucleotide
gcagguggaacaugccagg

SEQ ID NO: 2746352 - RNA, 19 nt, Artificial Sequence
  Description of Artificial Sequence: Synthetic oligonucleotide
cuucgcaggccccuuccag

SEQ ID NO: 2746353 - RNA, 19 nt, Artificial Sequence
  Description of Artificial Sequence: Synthetic oligonucleotide
uggugugaguccaucccua

SEQ ID NO: 2746354 - RNA, 19 nt, Artificial Sequence
  Description of Artificial Sequence: Synthetic oligonucleotide
cucuggucucacacagugc

SEQ ID NO: 2746355 - RNA, 19 nt, Artificial Sequence
  Description of Artificial Sequence: Synthetic oligonucleotide
ucuccagcaguggcucugg

SEQ ID NO: 2746356 - RNA, 19 nt, Artificial Sequence
  Description of Artificial Sequence: Synthetic oligonucleotide
guuccuggugaccuuggga

SEQ ID NO: 2746357 - RNA, 19 nt, Artificial Sequence
  Description of Artificial Sequence: Synthetic oligonucleotide
ggcagguggaacaugccag

SEQ ID NO: 2746358 - RNA, 19 nt, Artificial Sequence
  Description of Artificial Sequence: Synthetic oligonucleotide
gucucgaguucuccuggag

SEQ ID NO: 2746359 - RNA, 19 nt, Artificial Sequence
  Description of Artificial Sequence: Synthetic oligonucleotide
cuuggggauguggccaucc

SEQ ID NO: 2746360 - RNA, 19 nt, Artificial Sequence
  Description of Artificial Sequence: Synthetic oligonucleotide
gauccgccgaccagagcgg

SEQ ID NO: 2746361 - RNA, 19 nt, Artificial Sequence
  Description of Artificial Sequence: Synthetic oligonucleotide
gucacacccaagauggaga

SEQ ID NO: 2746362 - RNA, 19 nt, Artificial Sequence
  Description of Artificial Sequence: Synthetic oligonucleotide
gaagaacauuguccccgac

SEQ ID NO: 2746363 - RNA, 19 nt, Artificial Sequence
  Description of Artificial Sequence: Synthetic oligonucleotide
gaccuugggaagagcaaac

SEQ ID NO: 2746364 - RNA, 19 nt, Artificial Sequence
  Description of Artificial Sequence: Synthetic oligonucleotide
ucgacuccuuccagcucag

SEQ ID NO: 2746365 - RNA, 19 nt, Artificial Sequence
  Description of Artificial Sequence: Synthetic oligonucleotide
gcaaacucgacuccuucca

SEQ ID NO: 2746366 - RNA, 19 nt, Artificial Sequence
  Description of Artificial Sequence: Synthetic oligonucleotide
ucgaguucuccuggagcag

SEQ ID NO: 2746367 - RNA, 19 nt, Artificial Sequence
  Description of Artificial Sequence: Synthetic oligonucleotide
gaguccaucccuaauuuau

SEQ ID NO: 2746368 - RNA, 19 nt, Artificial Sequence
  Description of Artificial Sequence: Synthetic oligonucleotide
guggaacaugccagggagg

SEQ ID NO: 2746369 - RNA, 19 nt, Artificial Sequence
  Description of Artificial Sequence: Synthetic oligonucleotide
ccagucugugcucuggggc

SEQ ID NO: 2746370 - RNA, 19 nt, Artificial Sequence
  Description of Artificial Sequence: Synthetic oligonucleotide
cagguggaacaugccaggg

SEQ ID NO: 2746371 - RNA, 19 nt, Artificial Sequence
  Description of Artificial Sequence: Synthetic oligonucleotide
ugguccgguggccuccucu

SEQ ID NO: 2746372 - RNA, 19 nt, Artificial Sequence
  Description of Artificial Sequence: Synthetic oligonucleotide
auacacauggcagguggaa

SEQ ID NO: 2746373 - RNA, 19 nt, Artificial Sequence
  Description of Artificial Sequence: Synthetic oligonucleotide
gagacccaccccuccagga

SEQ ID NO: 2746374 - RNA, 19 nt, Artificial Sequence
  Description of Artificial Sequence: Synthetic oligonucleotide
ugggccucgcucacauaca

SEQ ID NO: 2746375 - RNA, 19 nt, Artificial Sequence
  Description of Artificial Sequence: Synthetic oligonucleotide
ugggccaggugaagaacau

SEQ ID NO: 2746376 - RNA, 19 nt, Artificial Sequence
  Description of Artificial Sequence: Synthetic oligonucleotide
ucgcaggccccuuccaggu

SEQ ID NO: 2746377 - RNA, 19 nt, Artificial Sequence
  Description of Artificial Sequence: Synthetic oligonucleotide
agucucgaguucuccugga

SEQ ID NO: 2746378 - RNA, 19 nt, Artificial Sequence
  Description of Artificial Sequence: Synthetic oligonucleotide
uaguccgauucucccuggu

SEQ ID NO: 2746379 - RNA, 19 nt, Artificial Sequence
  Description of Artificial Sequence: Synthetic oligonucleotide
guggcgcugggccagguga

SEQ ID NO: 2746380 - RNA, 19 nt, Artificial Sequence
  Description of Artificial Sequence: Synthetic oligonucleotide
cauacacauggcaggugga

SEQ ID NO: 2746381 - RNA, 19 nt, Artificial Sequence
  Description of Artificial Sequence: Synthetic oligonucleotide
gguggccuccucucagugg

SEQ ID NO: 2746382 - RNA, 19 nt, Artificial Sequence
  Description of Artificial Sequence: Synthetic oligonucleotide
agauggagacccaccccuc

SEQ ID NO: 2746383 - RNA, 19 nt, Artificial Sequence
  Description of Artificial Sequence: Synthetic oligonucleotide
ggugaccuugggaagagca

SEQ ID NO: 2746384 - RNA, 19 nt, Artificial Sequence
  Description of Artificial Sequence: Synthetic oligonucleotide
ccgacucugccccucacgg

SEQ ID NO: 2746385 - RNA, 19 nt, Artificial Sequence
  Description of Artificial Sequence: Synthetic oligonucleotide
accuugggaagagcaaacu

SEQ ID NO: 2746386 - RNA, 19 nt, Artificial Sequence
  Description of Artificial Sequence: Synthetic oligonucleotide
cagcucaggggucagcaca

SEQ ID NO: 2746387 - RNA, 19 nt, Artificial Sequence
  Description of Artificial Sequence: Synthetic oligonucleotide
cccaagauggagacccacc

SEQ ID NO: 2746388 - RNA, 19 nt, Artificial Sequence
  Description of Artificial Sequence: Synthetic oligonucleotide
uggagcagcggggccaugu

SEQ ID NO: 2746389 - RNA, 19 nt, Artificial Sequence
  Description of Artificial Sequence: Synthetic oligonucleotide
cauuccuggccagucugug

SEQ ID NO: 2746390 - RNA, 19 nt, Artificial Sequence
  Description of Artificial Sequence: Synthetic oligonucleotide
uccucaggaggaggcagga

SEQ ID NO: 2746391 - RNA, 19 nt, Artificial Sequence
  Description of Artificial Sequence: Synthetic oligonucleotide
cucacggggauccgccgac

SEQ ID NO: 2746392 - RNA, 19 nt, Artificial Sequence
  Description of Artificial Sequence: Synthetic oligonucleotide
cuggugaccuugggaagag

SEQ ID NO: 2746393 - RNA, 19 nt, Artificial Sequence
  Description of Artificial Sequence: Synthetic oligonucleotide
agcagcggggccaugucca

SEQ ID NO: 2746394 - RNA, 19 nt, Artificial Sequence
  Description of Artificial Sequence: Synthetic oligonucleotide
gaacaugccagggaggcuu

SEQ ID NO: 2746395 - RNA, 19 nt, Artificial Sequence
  Description of Artificial Sequence: Synthetic oligonucleotide
uggcugucuccagcagugg

SEQ ID NO: 2746396 - RNA, 19 nt, Artificial Sequence
  Description of Artificial Sequence: Synthetic oligonucleotide
cacauacacauggcaggug

SEQ ID NO: 2746397 - RNA, 19 nt, Artificial Sequence
  Description of Artificial Sequence: Synthetic oligonucleotide
ccagucucgaguucuccug

SEQ ID NO: 2746398 - RNA, 19 nt, Artificial Sequence
  Description of Artificial Sequence: Synthetic oligonucleotide
caugccagggaggcuucgc

SEQ ID NO: 2746399 - RNA, 19 nt, Artificial Sequence
  Description of Artificial Sequence: Synthetic oligonucleotide
uucaguggcccugguuggu

SEQ ID NO: 2746400 - RNA, 19 nt, Artificial Sequence
  Description of Artificial Sequence: Synthetic oligonucleotide
cuccaggacccggacacug

SEQ ID NO: 2746401 - RNA, 19 nt, Artificial Sequence
  Description of Artificial Sequence: Synthetic oligonucleotide
aggcuucgcaggccccuuc

SEQ ID NO: 2746402 - RNA, 19 nt, Artificial Sequence
  Description of Artificial Sequence: Synthetic oligonucleotide
aguccaucccuaauuuaua

SEQ ID NO: 2746403 - RNA, 19 nt, Artificial Sequence
  Description of Artificial Sequence: Synthetic oligonucleotide
ggggccauguccaacaugu

SEQ ID NO: 2746404 - RNA, 19 nt, Artificial Sequence
  Description of Artificial Sequence: Synthetic oligonucleotide
cagagcgguccacgaagac

SEQ ID NO: 2746405 - RNA, 19 nt, Artificial Sequence
  Description of Artificial Sequence: Synthetic oligonucleotide
cacacccaagauggagacc

SEQ ID NO: 2746406 - RNA, 19 nt, Artificial Sequence
  Description of Artificial Sequence: Synthetic oligonucleotide
cguagaaguuccuggugac

SEQ ID NO: 2746407 - RNA, 19 nt, Artificial Sequence
  Description of Artificial Sequence: Synthetic oligonucleotide
cuuccagcuucucauuccu

SEQ ID NO: 2746408 - RNA, 19 nt, Artificial Sequence
  Description of Artificial Sequence: Synthetic oligonucleotide
gaccagagcgguccacgaa

SEQ ID NO: 2746409 - RNA, 19 nt, Artificial Sequence
  Description of Artificial Sequence: Synthetic oligonucleotide
acauggcagguggaacaug

SEQ ID NO: 2746410 - RNA, 19 nt, Artificial Sequence
  Description of Artificial Sequence: Synthetic oligonucleotide
ugguugguccgguggccuc

SEQ ID NO: 2746411 - RNA, 19 nt, Artificial Sequence
  Description of Artificial Sequence: Synthetic oligonucleotide
uccaccccguggcgcuggg

SEQ ID NO: 2746412 - RNA, 19 nt, Artificial Sequence
  Description of Artificial Sequence: Synthetic oligonucleotide
uccccgacucugccccuca

SEQ ID NO: 2746413 - RNA, 19 nt, Artificial Sequence
  Description of Artificial Sequence: Synthetic oligonucleotide
cuuccagguccaccccgug

SEQ ID NO: 2746414 - RNA, 19 nt, Artificial Sequence
  Description of Artificial Sequence: Synthetic oligonucleotide
cuccuuccagcucaggggu

SEQ ID NO: 2746415 - RNA, 19 nt, Artificial Sequence
  Description of Artificial Sequence: Synthetic oligonucleotide
cagguccaccccguggcgc

SEQ ID NO: 2746416 - RNA, 19 nt, Artificial Sequence
  Description of Artificial Sequence: Synthetic oligonucleotide
uccucucaguggggcuugg

SEQ ID NO: 2746417 - RNA, 19 nt, Artificial Sequence
  Description of Artificial Sequence: Synthetic oligonucleotide
ggcuucgcaggccccuucc

SEQ ID NO: 2746418 - RNA, 19 nt, Artificial Sequence
  Description of Artificial Sequence: Synthetic oligonucleotide
gugaccuugggaagagcaa

SEQ ID NO: 2746419 - RNA, 19 nt, Artificial Sequence
  Description of Artificial Sequence: Synthetic oligonucleotide
cuggugugaguccaucccu

SEQ ID NO: 2746420 - RNA, 19 nt, Artificial Sequence
  Description of Artificial Sequence: Synthetic oligonucleotide
ucacggggauccgccgacc

SEQ ID NO: 2746421 - RNA, 19 nt, Artificial Sequence
  Description of Artificial Sequence: Synthetic oligonucleotide
ccggacacuggcugucucc

SEQ ID NO: 2746422 - RNA, 19 nt, Artificial Sequence
  Description of Artificial Sequence: Synthetic oligonucleotide
cucaguggggcuuggggau

SEQ ID NO: 2746423 - RNA, 19 nt, Artificial Sequence
  Description of Artificial Sequence: Synthetic oligonucleotide
gccauguccaacaugucgu

SEQ ID NO: 2746424 - RNA, 19 nt, Artificial Sequence
  Description of Artificial Sequence: Synthetic oligonucleotide
agcccagucucgaguucuc

SEQ ID NO: 2746425 - RNA, 19 nt, Artificial Sequence
  Description of Artificial Sequence: Synthetic oligonucleotide
uccuggccagucugugcuc

SEQ ID NO: 2746426 - RNA, 19 nt, Artificial Sequence
  Description of Artificial Sequence: Synthetic oligonucleotide
ggugugaguccaucccuaa

SEQ ID NO: 2746427 - RNA, 19 nt, Artificial Sequence
  Description of Artificial Sequence: Synthetic oligonucleotide
ccauguccaacaugucguc

SEQ ID NO: 2746428 - RNA, 19 nt, Artificial Sequence
  Description of Artificial Sequence: Synthetic oligonucleotide
gacccggacacuggcuguc

SEQ ID NO: 2746429 - RNA, 19 nt, Artificial Sequence
  Description of Artificial Sequence: Synthetic oligonucleotide
uccgccgaccagagcgguc

SEQ ID NO: 2746430 - RNA, 19 nt, Artificial Sequence
  Description of Artificial Sequence: Synthetic oligonucleotide
cccugguggaccgucacac

SEQ ID NO: 2746431 - RNA, 19 nt, Artificial Sequence
  Description of Artificial Sequence: Synthetic oligonucleotide
gguugguccgguggccucc

SEQ ID NO: 2746432 - RNA, 19 nt, Artificial Sequence
  Description of Artificial Sequence: Synthetic oligonucleotide
gguccgguggccuccucuc

SEQ ID NO: 2746433 - RNA, 19 nt, Artificial Sequence
  Description of Artificial Sequence: Synthetic oligonucleotide
cgucacacccaagauggag

SEQ ID NO: 2746434 - RNA, 19 nt, Artificial Sequence
  Description of Artificial Sequence: Synthetic oligonucleotide
cagcacaaucuggcagccc

SEQ ID NO: 2746435 - RNA, 19 nt, Artificial Sequence
  Description of Artificial Sequence: Synthetic oligonucleotide
cuccucucaguggggcuug

SEQ ID NO: 2746436 - RNA, 19 nt, Artificial Sequence
  Description of Artificial Sequence: Synthetic oligonucleotide
ccugguggaccgucacacc

SEQ ID NO: 2746437 - RNA, 19 nt, Artificial Sequence
  Description of Artificial Sequence: Synthetic oligonucleotide
ccgaccagagcgguccacg

SEQ ID NO: 2746438 - RNA, 19 nt, Artificial Sequence
  Description of Artificial Sequence: Synthetic oligonucleotide
cucuggggccgggagcaug

SEQ ID NO: 2746439 - RNA, 19 nt, Artificial Sequence
  Description of Artificial Sequence: Synthetic oligonucleotide
agcgguccacgaagaccac

SEQ ID NO: 2746440 - RNA, 19 nt, Artificial Sequence
  Description of Artificial Sequence: Synthetic oligonucleotide
gcgguccacgaagaccacg

SEQ ID NO: 2746441 - RNA, 19 nt, Artificial Sequence
  Description of Artificial Sequence: Synthetic oligonucleotide
cagcucuggugugagucca

SEQ ID NO: 2746442 - RNA, 19 nt, Artificial Sequence
  Description of Artificial Sequence: Synthetic oligonucleotide
uguccccgacucugccccu

SEQ ID NO: 2746443 - RNA, 19 nt, Artificial Sequence
  Description of Artificial Sequence: Synthetic oligonucleotide
ccccucacggggauccgcc

SEQ ID NO: 2746444 - RNA, 19 nt, Artificial Sequence
  Description of Artificial Sequence: Synthetic oligonucleotide
cacggggauccgccgacca

SEQ ID NO: 2746445 - RNA, 19 nt, Artificial Sequence
  Description of Artificial Sequence: Synthetic oligonucleotide
cgauucucccugguggacc

SEQ ID NO: 2746446 - RNA, 19 nt, Artificial Sequence
  Description of Artificial Sequence: Synthetic oligonucleotide
gccauccacguagaaguuc

SEQ ID NO: 2746447 - RNA, 19 nt, Artificial Sequence
  Description of Artificial Sequence: Synthetic oligonucleotide
ugccccucacggggauccg

SEQ ID NO: 2746448 - RNA, 19 nt, Artificial Sequence
  Description of Artificial Sequence: Synthetic oligonucleotide
gguggaccgucacacccaa

SEQ ID NO: 2746449 - RNA, 19 nt, Artificial Sequence
  Description of Artificial Sequence: Synthetic oligonucleotide
ccgccgaccagagcggucc

SEQ ID NO: 2746450 - RNA, 19 nt, Artificial Sequence
  Description of Artificial Sequence: Synthetic oligonucleotide
ggaggaggcaggaggucca

SEQ ID NO: 2746451 - RNA, 19 nt, Artificial Sequence
  Description of Artificial Sequence: Synthetic oligonucleotide
ggggauccgccgaccagag

SEQ ID NO: 2746452 - RNA, 19 nt, Artificial Sequence
  Description of Artificial Sequence: Synthetic oligonucleotide
ucugccccucacggggauc

SEQ ID NO: 2746453 - RNA, 19 nt, Artificial Sequence
  Description of Artificial Sequence: Synthetic oligonucleotide
ggagcagcggggccauguc

SEQ ID NO: 2746454 - RNA, 19 nt, Artificial Sequence
  Description of Artificial Sequence: Synthetic oligonucleotide
cacccaagauggagaccca

SEQ ID NO: 2746455 - RNA, 19 nt, Artificial Sequence
  Description of Artificial Sequence: Synthetic oligonucleotide
gugugaguccaucccuaau

SEQ ID NO: 2746456 - RNA, 19 nt, Artificial Sequence
  Description of Artificial Sequence: Synthetic oligonucleotide
guccgguggccuccucuca

SEQ ID NO: 2746457 - RNA, 19 nt, Artificial Sequence
  Description of Artificial Sequence: Synthetic oligonucleotide
auccgccgaccagagcggu

SEQ ID NO: 2746458 - RNA, 19 nt, Artificial Sequence
  Description of Artificial Sequence: Synthetic oligonucleotide
ccacgaagaccacguugac

SEQ ID NO: 2746459 - RNA, 19 nt, Artificial Sequence
  Description of Artificial Sequence: Synthetic oligonucleotide
uggcccugguugguccggu

SEQ ID NO: 2746460 - RNA, 19 nt, Artificial Sequence
  Description of Artificial Sequence: Synthetic oligonucleotide
cccucacggggauccgccg

SEQ ID NO: 2746461 - RNA, 19 nt, Artificial Sequence
  Description of Artificial Sequence: Synthetic oligonucleotide
cccucuccucaggaggagg

SEQ ID NO: 2746462 - RNA, 19 nt, Artificial Sequence
  Description of Artificial Sequence: Synthetic oligonucleotide
cgacucugccccucacggg

SEQ ID NO: 2746463 - RNA, 19 nt, Artificial Sequence
  Description of Artificial Sequence: Synthetic oligonucleotide
ccacguagaaguuccuggu

SEQ ID NO: 2746464 - RNA, 19 nt, Artificial Sequence
  Description of Artificial Sequence: Synthetic oligonucleotide
ggauguggccauccacgua

SEQ ID NO: 2746465 - RNA, 19 nt, Artificial Sequence
  Description of Artificial Sequence: Synthetic oligonucleotide
guggaccgucacacccaag

SEQ ID NO: 2746466 - RNA, 19 nt, Artificial Sequence
  Description of Artificial Sequence: Synthetic oligonucleotide
uugguccgguggccuccuc

SEQ ID NO: 2746467 - RNA, 19 nt, Artificial Sequence
  Description of Artificial Sequence: Synthetic oligonucleotide
cuucucauuccuggccagu

SEQ ID NO: 2746468 - RNA, 19 nt, Artificial Sequence
  Description of Artificial Sequence: Synthetic oligonucleotide
gcuucgcaggccccuucca

SEQ ID NO: 2746469 - RNA, 19 nt, Artificial Sequence
  Description of Artificial Sequence: Synthetic oligonucleotide
gcccagucucgaguucucc

SEQ ID NO: 2746470 - RNA, 19 nt, Artificial Sequence
  Description of Artificial Sequence: Synthetic oligonucleotide
ggaccgucacacccaagau

SEQ ID NO: 2746471 - RNA, 19 nt, Artificial Sequence
  Description of Artificial Sequence: Synthetic oligonucleotide
caguggcucuggucucaca

SEQ ID NO: 2746472 - RNA, 19 nt, Artificial Sequence
  Description of Artificial Sequence: Synthetic oligonucleotide
agcucuggugugaguccau

SEQ ID NO: 2746473 - RNA, 19 nt, Artificial Sequence
  Description of Artificial Sequence: Synthetic oligonucleotide
cacauggcagguggaacau

SEQ ID NO: 2746474 - RNA, 19 nt, Artificial Sequence
  Description of Artificial Sequence: Synthetic oligonucleotide
ccaggugggccucgcucac

SEQ ID NO: 2746475 - RNA, 19 nt, Artificial Sequence
  Description of Artificial Sequence: Synthetic oligonucleotide
cguccucccucuccucagg

SEQ ID NO: 2746476 - RNA, 19 nt, Artificial Sequence
  Description of Artificial Sequence: Synthetic oligonucleotide
caggacccggacacuggcu

SEQ ID NO: 2746477 - RNA, 19 nt, Artificial Sequence
  Description of Artificial Sequence: Synthetic oligonucleotide
ggcccugguugguccggug

SEQ ID NO: 2746478 - RNA, 19 nt, Artificial Sequence
  Description of Artificial Sequence: Synthetic oligonucleotide
ccgauucucccugguggac

SEQ ID NO: 2746479 - RNA, 19 nt, Artificial Sequence
  Description of Artificial Sequence: Synthetic oligonucleotide
cugguugguccgguggccu

SEQ ID NO: 2746480 - RNA, 19 nt, Artificial Sequence
  Description of Artificial Sequence: Synthetic oligonucleotide
ccucaggaggaggcaggag

SEQ ID NO: 2746481 - RNA, 19 nt, Artificial Sequence
  Description of Artificial Sequence: Synthetic oligonucleotide
cccuaauuuauaguccgau

SEQ ID NO: 2746482 - RNA, 19 nt, Artificial Sequence
  Description of Artificial Sequence: Synthetic oligonucleotide
gccaggugaagaacauugu

SEQ ID NO: 2746483 - RNA, 19 nt, Artificial Sequence
  Description of Artificial Sequence: Synthetic oligonucleotide
cuggucucacacagugcuu

SEQ ID NO: 2746484 - RNA, 19 nt, Artificial Sequence
  Description of Artificial Sequence: Synthetic oligonucleotide
guccccgacucugccccuc

SEQ ID NO: 2746485 - RNA, 19 nt, Artificial Sequence
  Description of Artificial Sequence: Synthetic oligonucleotide
ccucacggggauccgccga

SEQ ID NO: 2746486 - RNA, 19 nt, Artificial Sequence
  Description of Artificial Sequence: Synthetic oligonucleotide
cccagucucgaguucuccu

SEQ ID NO: 2746487 - RNA, 19 nt, Artificial Sequence
  Description of Artificial Sequence: Synthetic oligonucleotide
ggacccggacacuggcugu

SEQ ID NO: 2746488 - RNA, 19 nt, Artificial Sequence
  Description of Artificial Sequence: Synthetic oligonucleotide
ccaccccuccaggacccgg

SEQ ID NO: 2746489 - RNA, 19 nt, Artificial Sequence
  Description of Artificial Sequence: Synthetic oligonucleotide
ggaacaugccagggaggcu

SEQ ID NO: 2746490 - RNA, 19 nt, Artificial Sequence
  Description of Artificial Sequence: Synthetic oligonucleotide
gccccucacggggauccgc

SEQ ID NO: 2746491 - RNA, 19 nt, Artificial Sequence
  Description of Artificial Sequence: Synthetic oligonucleotide
caggugggccucgcucaca

SEQ ID NO: 2746492 - RNA, 19 nt, Artificial Sequence
  Description of Artificial Sequence: Synthetic oligonucleotide
ggaggcuucgcaggccccu

SEQ ID NO: 2746493 - RNA, 19 nt, Artificial Sequence
  Description of Artificial Sequence: Synthetic oligonucleotide
gggccauguccaacauguc

SEQ ID NO: 2746494 - RNA, 19 nt, Artificial Sequence
  Description of Artificial Sequence: Synthetic oligonucleotide
cgaccagagcgguccacga

SEQ ID NO: 2746495 - RNA, 19 nt, Artificial Sequence
  Description of Artificial Sequence: Synthetic oligonucleotide
gguccaccccguggcgcug

SEQ ID NO: 2746496 - RNA, 19 nt, Artificial Sequence
  Description of Artificial Sequence: Synthetic oligonucleotide
ccccguggcgcugggccag

SEQ ID NO: 2746497 - RNA, 19 nt, Artificial Sequence
  Description of Artificial Sequence: Synthetic oligonucleotide
cggggauccgccgaccaga

SEQ ID NO: 2746498 - RNA, 19 nt, Artificial Sequence
  Description of Artificial Sequence: Synthetic oligonucleotide
gaggcuucgcaggccccuu

SEQ ID NO: 2746499 - RNA, 19 nt, Artificial Sequence
  Description of Artificial Sequence: Synthetic oligonucleotide
cguggcgcugggccaggug

SEQ ID NO: 2746500 - RNA, 19 nt, Artificial Sequence
  Description of Artificial Sequence: Synthetic oligonucleotide
gguccacgaagaccacguu

SEQ ID NO: 2746501 - RNA, 19 nt, Artificial Sequence
  Description of Artificial Sequence: Synthetic oligonucleotide
ccgucacacccaagaugga

SEQ ID NO: 2746502 - RNA, 19 nt, Artificial Sequence
  Description of Artificial Sequence: Synthetic oligonucleotide
cucugccccucacggggau

SEQ ID NO: 2746503 - RNA, 19 nt, Artificial Sequence
  Description of Artificial Sequence: Synthetic oligonucleotide
gggccgggagcauggcuuu

SEQ ID NO: 2746504 - RNA, 19 nt, Artificial Sequence
  Description of Artificial Sequence: Synthetic oligonucleotide
cgcaggccccuuccagguc

SEQ ID NO: 2746505 - RNA, 19 nt, Artificial Sequence
  Description of Artificial Sequence: Synthetic oligonucleotide
cccguggcgcugggccagg

SEQ ID NO: 2746506 - RNA, 19 nt, Artificial Sequence
  Description of Artificial Sequence: Synthetic oligonucleotide
gggccaggugaagaacauu

SEQ ID NO: 2746507 - RNA, 19 nt, Artificial Sequence
  Description of Artificial Sequence: Synthetic oligonucleotide
ccaccccguggcgcugggc

SEQ ID NO: 2746508 - RNA, 19 nt, Artificial Sequence
  Description of Artificial Sequence: Synthetic oligonucleotide
ccgguggccuccucucagu

SEQ ID NO: 2746509 - RNA, 19 nt, Artificial Sequence
  Description of Artificial Sequence: Synthetic oligonucleotide
cgccgaccagagcggucca

SEQ ID NO: 2746510 - RNA, 19 nt, Artificial Sequence
  Description of Artificial Sequence: Synthetic oligonucleotide
ggccgggagcauggcuuuu

SEQ ID NO: 2746511 - RNA, 19 nt, Artificial Sequence
  Description of Artificial Sequence: Synthetic oligonucleotide
gaguguacaagauugaugg

SEQ ID NO: 2746512 - RNA, 19 nt, Artificial Sequence
  Description of Artificial Sequence: Synthetic oligonucleotide
gaaggcacaauccugaggg

SEQ ID NO: 2746513 - RNA, 19 nt, Artificial Sequence
  Description of Artificial Sequence: Synthetic oligonucleotide
acggucaucucauagagcg

SEQ ID NO: 2746514 - RNA, 19 nt, Artificial Sequence
  Description of Artificial Sequence: Synthetic oligonucleotide
ucuggauucggucauaaug

SEQ ID NO: 2746515 - RNA, 19 nt, Artificial Sequence
  Description of Artificial Sequence: Synthetic oligonucleotide
aguguagagguucaugggc

SEQ ID NO: 2746516 - RNA, 19 nt, Artificial Sequence
  Description of Artificial Sequence: Synthetic oligonucleotide
gauucggucauaaugcacg

SEQ ID NO: 2746517 - RNA, 19 nt, Artificial Sequence
  Description of Artificial Sequence: Synthetic oligonucleotide
ucauaaugcacgaagcugu

SEQ ID NO: 2746518 - RNA, 19 nt, Artificial Sequence
  Description of Artificial Sequence: Synthetic oligonucleotide
aagagcccugcauagggcc

SEQ ID NO: 2746519 - RNA, 19 nt, Artificial Sequence
  Description of Artificial Sequence: Synthetic oligonucleotide
ucucauagagcguaggcag

SEQ ID NO: 2746520 - RNA, 19 nt, Artificial Sequence
  Description of Artificial Sequence: Synthetic oligonucleotide
cuggauucggucauaaugc

SEQ ID NO: 2746521 - RNA, 19 nt, Artificial Sequence
  Description of Artificial Sequence: Synthetic oligonucleotide
uugccugcaaggcugaagg

SEQ ID NO: 2746522 - RNA, 19 nt, Artificial Sequence
  Description of Artificial Sequence: Synthetic oligonucleotide
uguaugugcugcuuguggg

SEQ ID NO: 2746523 - RNA, 19 nt, Artificial Sequence
  Description of Artificial Sequence: Synthetic oligonucleotide
aaagcgacgguccugggga

SEQ ID NO: 2746524 - RNA, 19 nt, Artificial Sequence
  Description of Artificial Sequence: Synthetic oligonucleotide
ucggucauaaugcacgaag

SEQ ID NO: 2746525 - RNA, 19 nt, Artificial Sequence
  Description of Artificial Sequence: Synthetic oligonucleotide
aaggcugaaggcacaaucc

SEQ ID NO: 2746526 - RNA, 19 nt, Artificial Sequence
  Description of Artificial Sequence: Synthetic oligonucleotide
uaaugcacgaagcuguaug

SEQ ID NO: 2746527 - RNA, 19 nt, Artificial Sequence
  Description of Artificial Sequence: Synthetic oligonucleotide
aaagucggaguguacaaga

SEQ ID NO: 2746528 - RNA, 19 nt, Artificial Sequence
  Description of Artificial Sequence: Synthetic oligonucleotide
uuggcugugagcaugcucu

SEQ ID NO: 2746529 - RNA, 19 nt, Artificial Sequence
  Description of Artificial Sequence: Synthetic oligonucleotide
uagugucuccuucaggugg

SEQ ID NO: 2746530 - RNA, 19 nt, Artificial Sequence
  Description of Artificial Sequence: Synthetic oligonucleotide
agugucucugagaagaggc

SEQ ID NO: 2746531 - RNA, 19 nt, Artificial Sequence
  Description of Artificial Sequence: Synthetic oligonucleotide
uguacaagauugauggccu

SEQ ID NO: 2746532 - RNA, 19 nt, Artificial Sequence
  Description of Artificial Sequence: Synthetic oligonucleotide
aauccugaggguuugggaa

SEQ ID NO: 2746533 - RNA, 19 nt, Artificial Sequence
  Description of Artificial Sequence: Synthetic oligonucleotide
guagaggcauuccugacgg

SEQ ID NO: 2746534 - RNA, 19 nt, Artificial Sequence
  Description of Artificial Sequence: Synthetic oligonucleotide
ucugagaagaggcuccuca

SEQ ID NO: 2746535 - RNA, 19 nt, Artificial Sequence
  Description of Artificial Sequence: Synthetic oligonucleotide
ugaggguuugggaagccgg

SEQ ID NO: 2746536 - RNA, 19 nt, Artificial Sequence
  Description of Artificial Sequence: Synthetic oligonucleotide
acagggauagcaccagccc

SEQ ID NO: 2746537 - RNA, 19 nt, Artificial Sequence
  Description of Artificial Sequence: Synthetic oligonucleotide
aaugcacgaagcuguaugu

SEQ ID NO: 2746538 - RNA, 19 nt, Artificial Sequence
  Description of Artificial Sequence: Synthetic oligonucleotide
acuuccagcccguucaggg

SEQ ID NO: 2746539 - RNA, 19 nt, Artificial Sequence
  Description of Artificial Sequence: Synthetic oligonucleotide
agcccauugacacugugag

SEQ ID NO: 2746540 - RNA, 19 nt, Artificial Sequence
  Description of Artificial Sequence: Synthetic oligonucleotide
uggacuuccagcccguuca

SEQ ID NO: 2746541 - RNA, 19 nt, Artificial Sequence
  Description of Artificial Sequence: Synthetic oligonucleotide
auagcaccagcccauugac

SEQ ID NO: 2746542 - RNA, 19 nt, Artificial Sequence
  Description of Artificial Sequence: Synthetic oligonucleotide
gagaagaggcuccucaccc

SEQ ID NO: 2746543 - RNA, 19 nt, Artificial Sequence
  Description of Artificial Sequence: Synthetic oligonucleotide
aaguaggucuccugggcag

SEQ ID NO: 2746544 - RNA, 19 nt, Artificial Sequence
  Description of Artificial Sequence: Synthetic oligonucleotide
agccaauucugucugcagg

SEQ ID NO: 2746545 - RNA, 19 nt, Artificial Sequence
  Description of Artificial Sequence: Synthetic oligonucleotide
aguguacaagauugauggc

SEQ ID NO: 2746546 - RNA, 19 nt, Artificial Sequence
  Description of Artificial Sequence: Synthetic oligonucleotide
guguacaagauugauggcc

SEQ ID NO: 2746547 - RNA, 19 nt, Artificial Sequence
  Description of Artificial Sequence: Synthetic oligonucleotide
cuggaaguaggucuccugg

SEQ ID NO: 2746548 - RNA, 19 nt, Artificial Sequence
  Description of Artificial Sequence: Synthetic oligonucleotide
acugugaguguagagguuc

SEQ ID NO: 2746549 - RNA, 19 nt, Artificial Sequence
  Description of Artificial Sequence: Synthetic oligonucleotide
auuccugacggucaucuca

SEQ ID NO: 2746550 - RNA, 19 nt, Artificial Sequence
  Description of Artificial Sequence: Synthetic oligonucleotide
cuggggauggcgcaaagcc

SEQ ID NO: 2746551 - RNA, 19 nt, Artificial Sequence
  Description of Artificial Sequence: Synthetic oligonucleotide
uucacuccaugcuucagca

SEQ ID NO: 2746552 - RNA, 19 nt, Artificial Sequence
  Description of Artificial Sequence: Synthetic oligonucleotide
auagagcguaggcagcugg

SEQ ID NO: 2746553 - RNA, 19 nt, Artificial Sequence
  Description of Artificial Sequence: Synthetic oligonucleotide
gaaagcgacgguccugggg

SEQ ID NO: 2746554 - RNA, 19 nt, Artificial Sequence
  Description of Artificial Sequence: Synthetic oligonucleotide
gucggaguguacaagauug

SEQ ID NO: 2746555 - RNA, 19 nt, Artificial Sequence
  Description of Artificial Sequence: Synthetic oligonucleotide
gauagcaccagcccauuga

SEQ ID NO: 2746556 - RNA, 19 nt, Artificial Sequence
  Description of Artificial Sequence: Synthetic oligonucleotide
cacuccaugcuucagcagc

SEQ ID NO: 2746557 - RNA, 19 nt, Artificial Sequence
  Description of Artificial Sequence: Synthetic oligonucleotide
gacagguuggcugugagca

SEQ ID NO: 2746558 - RNA, 19 nt, Artificial Sequence
  Description of Artificial Sequence: Synthetic oligonucleotide
uacaccuccucgauggcug

SEQ ID NO: 2746559 - RNA, 19 nt, Artificial Sequence
  Description of Artificial Sequence: Synthetic oligonucleotide
uugcagcaggcauacacag

SEQ ID NO: 2746560 - RNA, 19 nt, Artificial Sequence
  Description of Artificial Sequence: Synthetic oligonucleotide
guaugugcugcuugugggg

SEQ ID NO: 2746561 - RNA, 19 nt, Artificial Sequence
  Description of Artificial Sequence: Synthetic oligonucleotide
agacagguuggcugugagc

SEQ ID NO: 2746562 - RNA, 19 nt, Artificial Sequence
  Description of Artificial Sequence: Synthetic oligonucleotide
aaagccaauucugucugca

SEQ ID NO: 2746563 - RNA, 19 nt, Artificial Sequence
  Description of Artificial Sequence: Synthetic oligonucleotide
uuugggaagccggagcugc

SEQ ID NO: 2746564 - RNA, 19 nt, Artificial Sequence
  Description of Artificial Sequence: Synthetic oligonucleotide
aagccaauucugucugcag

SEQ ID NO: 2746565 - RNA, 19 nt, Artificial Sequence
  Description of Artificial Sequence: Synthetic oligonucleotide
uggcgcaaagccaauucug

SEQ ID NO: 2746566 - RNA, 19 nt, Artificial Sequence
  Description of Artificial Sequence: Synthetic oligonucleotide
uagagcguaggcagcuggg

SEQ ID NO: 2746567 - RNA, 19 nt, Artificial Sequence
  Description of Artificial Sequence: Synthetic oligonucleotide
cucacagcagguucacucc

SEQ ID NO: 2746568 - RNA, 19 nt, Artificial Sequence
  Description of Artificial Sequence: Synthetic oligonucleotide
uggggagcggccacuagag

SEQ ID NO: 2746569 - RNA, 19 nt, Artificial Sequence
  Description of Artificial Sequence: Synthetic oligonucleotide
uuggcuuugccugcaaggc

SEQ ID NO: 2746570 - RNA, 19 nt, Artificial Sequence
  Description of Artificial Sequence: Synthetic oligonucleotide
gauggcgcaaagccaauuc

SEQ ID NO: 2746571 - RNA, 19 nt, Artificial Sequence
  Description of Artificial Sequence: Synthetic oligonucleotide
gugagcaugcucuggauuc

SEQ ID NO: 2746572 - RNA, 19 nt, Artificial Sequence
  Description of Artificial Sequence: Synthetic oligonucleotide
agcagguucacuccaugcu

SEQ ID NO: 2746573 - RNA, 19 nt, Artificial Sequence
  Description of Artificial Sequence: Synthetic oligonucleotide
uacaagauugauggccugc

SEQ ID NO: 2746574 - RNA, 19 nt, Artificial Sequence
  Description of Artificial Sequence: Synthetic oligonucleotide
acgaagcuguaugugcugc

SEQ ID NO: 2746575 - RNA, 19 nt, Artificial Sequence
  Description of Artificial Sequence: Synthetic oligonucleotide
cugcagaaagcgacggucc

SEQ ID NO: 2746576 - RNA, 19 nt, Artificial Sequence
  Description of Artificial Sequence: Synthetic oligonucleotide
aggcuccucacccaacagg

SEQ ID NO: 2746577 - RNA, 19 nt, Artificial Sequence
  Description of Artificial Sequence: Synthetic oligonucleotide
gccaauucugucugcaggg

SEQ ID NO: 2746578 - RNA, 19 nt, Artificial Sequence
  Description of Artificial Sequence: Synthetic oligonucleotide
cagaaagcgacgguccugg

SEQ ID NO: 2746579 - RNA, 19 nt, Artificial Sequence
  Description of Artificial Sequence: Synthetic oligonucleotide
gaaguaggucuccugggca

SEQ ID NO: 2746580 - RNA, 19 nt, Artificial Sequence
  Description of Artificial Sequence: Synthetic oligonucleotide
uggauucggucauaaugca

SEQ ID NO: 2746581 - RNA, 19 nt, Artificial Sequence
  Description of Artificial Sequence: Synthetic oligonucleotide
agcaggcauacacagcugu

SEQ ID NO: 2746582 - RNA, 19 nt, Artificial Sequence
  Description of Artificial Sequence: Synthetic oligonucleotide
aucucauagagcguaggca

SEQ ID NO: 2746583 - RNA, 19 nt, Artificial Sequence
  Description of Artificial Sequence: Synthetic oligonucleotide
uaggcagcugggcaaaguc

SEQ ID NO: 2746584 - RNA, 19 nt, Artificial Sequence
  Description of Artificial Sequence: Synthetic oligonucleotide
cagguggacuuccagcccg

SEQ ID NO: 2746585 - RNA, 19 nt, Artificial Sequence
  Description of Artificial Sequence: Synthetic oligonucleotide
ugugguacaccuccucgau

SEQ ID NO: 2746586 - RNA, 19 nt, Artificial Sequence
  Description of Artificial Sequence: Synthetic oligonucleotide
caugcucuggauucgguca

SEQ ID NO: 2746587 - RNA, 19 nt, Artificial Sequence
  Description of Artificial Sequence: Synthetic oligonucleotide
ucuggguagugucuccuuc

SEQ ID NO: 2746588 - RNA, 19 nt, Artificial Sequence
  Description of Artificial Sequence: Synthetic oligonucleotide
agagcguaggcagcugggc

SEQ ID NO: 2746589 - RNA, 19 nt, Artificial Sequence
  Description of Artificial Sequence: Synthetic oligonucleotide
ucagguggacuuccagccc

SEQ ID NO: 2746590 - RNA, 19 nt, Artificial Sequence
  Description of Artificial Sequence: Synthetic oligonucleotide
acaauccugaggguuuggg

SEQ ID NO: 2746591 - RNA, 19 nt, Artificial Sequence
  Description of Artificial Sequence: Synthetic oligonucleotide
aggguugcagcaggcauac

SEQ ID NO: 2746592 - RNA, 19 nt, Artificial Sequence
  Description of Artificial Sequence: Synthetic oligonucleotide
cugcauagggcccggcugg

SEQ ID NO: 2746593 - RNA, 19 nt, Artificial Sequence
  Description of Artificial Sequence: Synthetic oligonucleotide
ucacagcagguucacucca

SEQ ID NO: 2746594 - RNA, 19 nt, Artificial Sequence
  Description of Artificial Sequence: Synthetic oligonucleotide
ucauagagcguaggcagcu

SEQ ID NO: 2746595 - RNA, 19 nt, Artificial Sequence
  Description of Artificial Sequence: Synthetic oligonucleotide
gagacagguuggcugugag

SEQ ID NO: 2746596 - RNA, 19 nt, Artificial Sequence
  Description of Artificial Sequence: Synthetic oligonucleotide
ggccacuagagacagguug

SEQ ID NO: 2746597 - RNA, 19 nt, Artificial Sequence
  Description of Artificial Sequence: Synthetic oligonucleotide
cccauugacacugugagug

SEQ ID NO: 2746598 - RNA, 19 nt, Artificial Sequence
  Description of Artificial Sequence: Synthetic oligonucleotide
ugugagcaugcucuggauu

SEQ ID NO: 2746599 - RNA, 19 nt, Artificial Sequence
  Description of Artificial Sequence: Synthetic oligonucleotide
uggggauggcgcaaagcca

SEQ ID NO: 2746600 - RNA, 19 nt, Artificial Sequence
  Description of Artificial Sequence: Synthetic oligonucleotide
ucggaguguacaagauuga

SEQ ID NO: 2746601 - RNA, 19 nt, Artificial Sequence
  Description of Artificial Sequence: Synthetic oligonucleotide
auggcgcaaagccaauucu

SEQ ID NO: 2746602 - RNA, 19 nt, Artificial Sequence
  Description of Artificial Sequence: Synthetic oligonucleotide
agcuguaugugcugcuugu

SEQ ID NO: 2746603 - RNA, 19 nt, Artificial Sequence
  Description of Artificial Sequence: Synthetic oligonucleotide
ggcauacacagcuguagag

SEQ ID NO: 2746604 - RNA, 19 nt, Artificial Sequence
  Description of Artificial Sequence: Synthetic oligonucleotide
ugcagcaggcauacacagc

SEQ ID NO: 2746605 - RNA, 19 nt, Artificial Sequence
  Description of Artificial Sequence: Synthetic oligonucleotide
gguagugucuccuucaggu

SEQ ID NO: 2746606 - RNA, 19 nt, Artificial Sequence
  Description of Artificial Sequence: Synthetic oligonucleotide
aggcauacacagcuguaga

SEQ ID NO: 2746607 - RNA, 19 nt, Artificial Sequence
  Description of Artificial Sequence: Synthetic oligonucleotide
auugacacugugaguguag

SEQ ID NO: 2746608 - RNA, 19 nt, Artificial Sequence
  Description of Artificial Sequence: Synthetic oligonucleotide
uuccugacggucaucucau

SEQ ID NO: 2746609 - RNA, 19 nt, Artificial Sequence
  Description of Artificial Sequence: Synthetic oligonucleotide
auucggucauaaugcacga

SEQ ID NO: 2746610 - RNA, 19 nt, Artificial Sequence
  Description of Artificial Sequence: Synthetic oligonucleotide
uucaugggcaagagcccug

SEQ ID NO: 2746611 - RNA, 19 nt, Artificial Sequence
  Description of Artificial Sequence: Synthetic oligonucleotide
agaggcuccucacccaaca

SEQ ID NO: 2746612 - RNA, 19 nt, Artificial Sequence
  Description of Artificial Sequence: Synthetic oligonucleotide
cugagaagaggcuccucac

SEQ ID NO: 2746613 - RNA, 19 nt, Artificial Sequence
  Description of Artificial Sequence: Synthetic oligonucleotide
ugcuaggcugcugugguac

SEQ ID NO: 2746614 - RNA, 19 nt, Artificial Sequence
  Description of Artificial Sequence: Synthetic oligonucleotide
ugucucugagaagaggcuc

SEQ ID NO: 2746615 - RNA, 19 nt, Artificial Sequence
  Description of Artificial Sequence: Synthetic oligonucleotide
caggcauacacagcuguag

SEQ ID NO: 2746616 - RNA, 19 nt, Artificial Sequence
  Description of Artificial Sequence: Synthetic oligonucleotide
caaagucggaguguacaag

SEQ ID NO: 2746617 - RNA, 19 nt, Artificial Sequence
  Description of Artificial Sequence: Synthetic oligonucleotide
guagugucuccuucaggug

SEQ ID NO: 2746618 - RNA, 19 nt, Artificial Sequence
  Description of Artificial Sequence: Synthetic oligonucleotide
ggaaguaggucuccugggc

SEQ ID NO: 2746619 - RNA, 19 nt, Artificial Sequence
  Description of Artificial Sequence: Synthetic oligonucleotide
caagagcccugcauagggc

SEQ ID NO: 2746620 - RNA, 19 nt, Artificial Sequence
  Description of Artificial Sequence: Synthetic oligonucleotide
gguggugggugucagcugc

SEQ ID NO: 2746621 - RNA, 19 nt, Artificial Sequence
  Description of Artificial Sequence: Synthetic oligonucleotide
acaagauugauggccugca

SEQ ID NO: 2746622 - RNA, 19 nt, Artificial Sequence
  Description of Artificial Sequence: Synthetic oligonucleotide
cucgucucuggguaguguc

SEQ ID NO: 2746623 - RNA, 19 nt, Artificial Sequence
  Description of Artificial Sequence: Synthetic oligonucleotide
acagcagguucacuccaug

SEQ ID NO: 2746624 - RNA, 19 nt, Artificial Sequence
  Description of Artificial Sequence: Synthetic oligonucleotide
ucgucucuggguagugucu

SEQ ID NO: 2746625 - RNA, 19 nt, Artificial Sequence
  Description of Artificial Sequence: Synthetic oligonucleotide
ggaguguacaagauugaug

SEQ ID NO: 2746626 - RNA, 19 nt, Artificial Sequence
  Description of Artificial Sequence: Synthetic oligonucleotide
gaugcuaggcugcuguggu

SEQ ID NO: 2746627 - RNA, 19 nt, Artificial Sequence
  Description of Artificial Sequence: Synthetic oligonucleotide
cugacggucaucucauaga

SEQ ID NO: 2746628 - RNA, 19 nt, Artificial Sequence
  Description of Artificial Sequence: Synthetic oligonucleotide
caagauugauggccugcag

SEQ ID NO: 2746629 - RNA, 19 nt, Artificial Sequence
  Description of Artificial Sequence: Synthetic oligonucleotide
cugaaggcacaauccugag

SEQ ID NO: 2746630 - RNA, 19 nt, Artificial Sequence
  Description of Artificial Sequence: Synthetic oligonucleotide
uccucgauggcugcagugu

SEQ ID NO: 2746631 - RNA, 19 nt, Artificial Sequence
  Description of Artificial Sequence: Synthetic oligonucleotide
agagguucaugggcaagag

SEQ ID NO: 2746632 - RNA, 19 nt, Artificial Sequence
  Description of Artificial Sequence: Synthetic oligonucleotide
caaagccaauucugucugc

SEQ ID NO: 2746633 - RNA, 19 nt, Artificial Sequence
  Description of Artificial Sequence: Synthetic oligonucleotide
gccacuagagacagguugg

SEQ ID NO: 2746634 - RNA, 19 nt, Artificial Sequence
  Description of Artificial Sequence: Synthetic oligonucleotide
agcugggcaaagucggagu

SEQ ID NO: 2746635 - RNA, 19 nt, Artificial Sequence
  Description of Artificial Sequence: Synthetic oligonucleotide
agagcccugcauagggccc

SEQ ID NO: 2746636 - RNA, 19 nt, Artificial Sequence
  Description of Artificial Sequence: Synthetic oligonucleotide
gaagaggcuccucacccaa

SEQ ID NO: 2746637 - RNA, 19 nt, Artificial Sequence
  Description of Artificial Sequence: Synthetic oligonucleotide
guacaagauugauggccug

SEQ ID NO: 2746638 - RNA, 19 nt, Artificial Sequence
  Description of Artificial Sequence: Synthetic oligonucleotide
gggagcggccacuagagac

SEQ ID NO: 2746639 - RNA, 19 nt, Artificial Sequence
  Description of Artificial Sequence: Synthetic oligonucleotide
ucaugggcaagagcccugc

SEQ ID NO: 2746640 - RNA, 19 nt, Artificial Sequence
  Description of Artificial Sequence: Synthetic oligonucleotide
guugcagcaggcauacaca

SEQ ID NO: 2746641 - RNA, 19 nt, Artificial Sequence
  Description of Artificial Sequence: Synthetic oligonucleotide
agucggaguguacaagauu

SEQ ID NO: 2746642 - RNA, 19 nt, Artificial Sequence
  Description of Artificial Sequence: Synthetic oligonucleotide
agguuggcugugagcaugc

SEQ ID NO: 2746643 - RNA, 19 nt, Artificial Sequence
  Description of Artificial Sequence: Synthetic oligonucleotide
guguagagguucaugggca

SEQ ID NO: 2746644 - RNA, 19 nt, Artificial Sequence
  Description of Artificial Sequence: Synthetic oligonucleotide
aagaggcuccucacccaac

SEQ ID NO: 2746645 - RNA, 19 nt, Artificial Sequence
  Description of Artificial Sequence: Synthetic oligonucleotide
gaggcuccucacccaacag

SEQ ID NO: 2746646 - RNA, 19 nt, Artificial Sequence
  Description of Artificial Sequence: Synthetic oligonucleotide
agcguaggcagcugggcaa

SEQ ID NO: 2746647 - RNA, 19 nt, Artificial Sequence
  Description of Artificial Sequence: Synthetic oligonucleotide
uccucacccaacagggaua

SEQ ID NO: 2746648 - RNA, 19 nt, Artificial Sequence
  Description of Artificial Sequence: Synthetic oligonucleotide
aagcgacgguccuggggag

SEQ ID NO: 2746649 - RNA, 19 nt, Artificial Sequence
  Description of Artificial Sequence: Synthetic oligonucleotide
gcuguagaggcauuccuga

SEQ ID NO: 2746650 - RNA, 19 nt, Artificial Sequence
  Description of Artificial Sequence: Synthetic oligonucleotide
uagcaccagcccauugaca

SEQ ID NO: 2746651 - RNA, 19 nt, Artificial Sequence
  Description of Artificial Sequence: Synthetic oligonucleotide
cacgaagcuguaugugcug

SEQ ID NO: 2746652 - RNA, 19 nt, Artificial Sequence
  Description of Artificial Sequence: Synthetic oligonucleotide
caacagggauagcaccagc

SEQ ID NO: 2746653 - RNA, 19 nt, Artificial Sequence
  Description of Artificial Sequence: Synthetic oligonucleotide
gagcaugcucuggauucgg

SEQ ID NO: 2746654 - RNA, 19 nt, Artificial Sequence
  Description of Artificial Sequence: Synthetic oligonucleotide
gaggcauuccugacgguca

SEQ ID NO: 2746655 - RNA, 19 nt, Artificial Sequence
  Description of Artificial Sequence: Synthetic oligonucleotide
agaaagcgacgguccuggg

SEQ ID NO: 2746656 - RNA, 19 nt, Artificial Sequence
  Description of Artificial Sequence: Synthetic oligonucleotide
ugcugugguacaccuccuc

SEQ ID NO: 2746657 - RNA, 19 nt, Artificial Sequence
  Description of Artificial Sequence: Synthetic oligonucleotide
ugggcaaagucggagugua

SEQ ID NO: 2746658 - RNA, 19 nt, Artificial Sequence
  Description of Artificial Sequence: Synthetic oligonucleotide
cugaggguuugggaagccg

SEQ ID NO: 2746659 - RNA, 19 nt, Artificial Sequence
  Description of Artificial Sequence: Synthetic oligonucleotide
agguucacuccaugcuuca

SEQ ID NO: 2746660 - RNA, 19 nt, Artificial Sequence
  Description of Artificial Sequence: Synthetic oligonucleotide
aagucggaguguacaagau

SEQ ID NO: 2746661 - RNA, 19 nt, Artificial Sequence
  Description of Artificial Sequence: Synthetic oligonucleotide
gugggugucagcugcugga

SEQ ID NO: 2746662 - RNA, 19 nt, Artificial Sequence
  Description of Artificial Sequence: Synthetic oligonucleotide
guagagguucaugggcaag

SEQ ID NO: 2746663 - RNA, 19 nt, Artificial Sequence
  Description of Artificial Sequence: Synthetic oligonucleotide
caccagcccauugacacug

SEQ ID NO: 2746664 - RNA, 19 nt, Artificial Sequence
  Description of Artificial Sequence: Synthetic oligonucleotide
gacggucaucucauagagc

SEQ ID NO: 2746665 - RNA, 19 nt, Artificial Sequence
  Description of Artificial Sequence: Synthetic oligonucleotide
ggaugcuaggcugcugugg

SEQ ID NO: 2746666 - RNA, 19 nt, Artificial Sequence
  Description of Artificial Sequence: Synthetic oligonucleotide
gagcccugcauagggcccg

SEQ ID NO: 2746667 - RNA, 19 nt, Artificial Sequence
  Description of Artificial Sequence: Synthetic oligonucleotide
ccugacggucaucucauag

SEQ ID NO: 2746668 - RNA, 19 nt, Artificial Sequence
  Description of Artificial Sequence: Synthetic oligonucleotide
ugccugcaaggcugaaggc

SEQ ID NO: 2746669 - RNA, 19 nt, Artificial Sequence
  Description of Artificial Sequence: Synthetic oligonucleotide
augcacgaagcuguaugug

SEQ ID NO: 2746670 - RNA, 19 nt, Artificial Sequence
  Description of Artificial Sequence: Synthetic oligonucleotide
ggcuuugccugcaaggcug

SEQ ID NO: 2746671 - RNA, 19 nt, Artificial Sequence
  Description of Artificial Sequence: Synthetic oligonucleotide
cuggguagugucuccuuca

SEQ ID NO: 2746672 - RNA, 19 nt, Artificial Sequence
  Description of Artificial Sequence: Synthetic oligonucleotide
ucucugagaagaggcuccu

SEQ ID NO: 2746673 - RNA, 19 nt, Artificial Sequence
  Description of Artificial Sequence: Synthetic oligonucleotide
cugugguacaccuccucga

SEQ ID NO: 2746674 - RNA, 19 nt, Artificial Sequence
  Description of Artificial Sequence: Synthetic oligonucleotide
gagcggccacuagagacag

SEQ ID NO: 2746675 - RNA, 19 nt, Artificial Sequence
  Description of Artificial Sequence: Synthetic oligonucleotide
ggcaaagucggaguguaca

SEQ ID NO: 2746676 - RNA, 19 nt, Artificial Sequence
  Description of Artificial Sequence: Synthetic oligonucleotide
ugcauagggcccggcuggg

SEQ ID NO: 2746677 - RNA, 19 nt, Artificial Sequence
  Description of Artificial Sequence: Synthetic oligonucleotide
gcugaaggcacaauccuga

SEQ ID NO: 2746678 - RNA, 19 nt, Artificial Sequence
  Description of Artificial Sequence: Synthetic oligonucleotide
guaggucuccugggcaggg

SEQ ID NO: 2746679 - RNA, 19 nt, Artificial Sequence
  Description of Artificial Sequence: Synthetic oligonucleotide
ggguuugggaagccggagc

SEQ ID NO: 2746680 - RNA, 19 nt, Artificial Sequence
  Description of Artificial Sequence: Synthetic oligonucleotide
gucucuggguagugucucc

SEQ ID NO: 2746681 - RNA, 19 nt, Artificial Sequence
  Description of Artificial Sequence: Synthetic oligonucleotide
ugucugcaggggugcuggg

SEQ ID NO: 2746682 - RNA, 19 nt, Artificial Sequence
  Description of Artificial Sequence: Synthetic oligonucleotide
ggucauaaugcacgaagcu

SEQ ID NO: 2746683 - RNA, 19 nt, Artificial Sequence
  Description of Artificial Sequence: Synthetic oligonucleotide
ugcuuguggggcaggccuc

SEQ ID NO: 2746684 - RNA, 19 nt, Artificial Sequence
  Description of Artificial Sequence: Synthetic oligonucleotide
ggguagugucuccuucagg

SEQ ID NO: 2746685 - RNA, 19 nt, Artificial Sequence
  Description of Artificial Sequence: Synthetic oligonucleotide
ugcaaggcugaaggcacaa

SEQ ID NO: 2746686 - RNA, 19 nt, Artificial Sequence
  Description of Artificial Sequence: Synthetic oligonucleotide
cagcccauugacacuguga

SEQ ID NO: 2746687 - RNA, 19 nt, Artificial Sequence
  Description of Artificial Sequence: Synthetic oligonucleotide
gucugcaggggugcugggg

SEQ ID NO: 2746688 - RNA, 19 nt, Artificial Sequence
  Description of Artificial Sequence: Synthetic oligonucleotide
augugcugcuuguggggca

SEQ ID NO: 2746689 - RNA, 19 nt, Artificial Sequence
  Description of Artificial Sequence: Synthetic oligonucleotide
agcgacgguccuggggagc

SEQ ID NO: 2746690 - RNA, 19 nt, Artificial Sequence
  Description of Artificial Sequence: Synthetic oligonucleotide
auaaugcacgaagcuguau

SEQ ID NO: 2746691 - RNA, 19 nt, Artificial Sequence
  Description of Artificial Sequence: Synthetic oligonucleotide
cacagcuguagaggcauuc

SEQ ID NO: 2746692 - RNA, 19 nt, Artificial Sequence
  Description of Artificial Sequence: Synthetic oligonucleotide
cauaaugcacgaagcugua

SEQ ID NO: 2746693 - RNA, 19 nt, Artificial Sequence
  Description of Artificial Sequence: Synthetic oligonucleotide
auacacagcuguagaggca

SEQ ID NO: 2746694 - RNA, 19 nt, Artificial Sequence
  Description of Artificial Sequence: Synthetic oligonucleotide
agggauagcaccagcccau

SEQ ID NO: 2746695 - RNA, 19 nt, Artificial Sequence
  Description of Artificial Sequence: Synthetic oligonucleotide
cggucauaaugcacgaagc

SEQ ID NO: 2746696 - RNA, 19 nt, Artificial Sequence
  Description of Artificial Sequence: Synthetic oligonucleotide
cugugaguguagagguuca

SEQ ID NO: 2746697 - RNA, 19 nt, Artificial Sequence
  Description of Artificial Sequence: Synthetic oligonucleotide
ugugaguguagagguucau

SEQ ID NO: 2746698 - RNA, 19 nt, Artificial Sequence
  Description of Artificial Sequence: Synthetic oligonucleotide
cagcugggcaaagucggag

SEQ ID NO: 2746699 - RNA, 19 nt, Artificial Sequence
  Description of Artificial Sequence: Synthetic oligonucleotide
cauagggcccggcugggga

SEQ ID NO: 2746700 - RNA, 19 nt, Artificial Sequence
  Description of Artificial Sequence: Synthetic oligonucleotide
cuaggcugcugugguacac

SEQ ID NO: 2746701 - RNA, 19 nt, Artificial Sequence
  Description of Artificial Sequence: Synthetic oligonucleotide
gauugauggccugcagaaa

SEQ ID NO: 2746702 - RNA, 19 nt, Artificial Sequence
  Description of Artificial Sequence: Synthetic oligonucleotide
guuugggaagccggagcug

SEQ ID NO: 2746703 - RNA, 19 nt, Artificial Sequence
  Description of Artificial Sequence: Synthetic oligonucleotide
cuuccagcccguucaggga

SEQ ID NO: 2746704 - RNA, 19 nt, Artificial Sequence
  Description of Artificial Sequence: Synthetic oligonucleotide
agagacagguuggcuguga

SEQ ID NO: 2746705 - RNA, 19 nt, Artificial Sequence
  Description of Artificial Sequence: Synthetic oligonucleotide
uagagacagguuggcugug

SEQ ID NO: 2746706 - RNA, 19 nt, Artificial Sequence
  Description of Artificial Sequence: Synthetic oligonucleotide
ccugcagaaagcgacgguc

SEQ ID NO: 2746707 - RNA, 19 nt, Artificial Sequence
  Description of Artificial Sequence: Synthetic oligonucleotide
uucggucauaaugcacgaa

SEQ ID NO: 2746708 - RNA, 19 nt, Artificial Sequence
  Description of Artificial Sequence: Synthetic oligonucleotide
cugcagugucucugagaag

SEQ ID NO: 2746709 - RNA, 19 nt, Artificial Sequence
  Description of Artificial Sequence: Synthetic oligonucleotide
cuggggagcggccacuaga

SEQ ID NO: 2746710 - RNA, 19 nt, Artificial Sequence
  Description of Artificial Sequence: Synthetic oligonucleotide
cauagagcguaggcagcug

SEQ ID NO: 2746711 - RNA, 19 nt, Artificial Sequence
  Description of Artificial Sequence: Synthetic oligonucleotide
gcaaagucggaguguacaa

SEQ ID NO: 2746712 - RNA, 19 nt, Artificial Sequence
  Description of Artificial Sequence: Synthetic oligonucleotide
cacaauccugaggguuugg

SEQ ID NO: 2746713 - RNA, 19 nt, Artificial Sequence
  Description of Artificial Sequence: Synthetic oligonucleotide
auagggcccggcuggggau

SEQ ID NO: 2746714 - RNA, 19 nt, Artificial Sequence
  Description of Artificial Sequence: Synthetic oligonucleotide
cauuccugacggucaucuc

SEQ ID NO: 2746715 - RNA, 19 nt, Artificial Sequence
  Description of Artificial Sequence: Synthetic oligonucleotide
gguuugggaagccggagcu

SEQ ID NO: 2746716 - RNA, 19 nt, Artificial Sequence
  Description of Artificial Sequence: Synthetic oligonucleotide
guggacuuccagcccguuc

SEQ ID NO: 2746717 - RNA, 19 nt, Artificial Sequence
  Description of Artificial Sequence: Synthetic oligonucleotide
acagguuggcugugagcau

SEQ ID NO: 2746718 - RNA, 19 nt, Artificial Sequence
  Description of Artificial Sequence: Synthetic oligonucleotide
ggcaagagcccugcauagg

SEQ ID NO: 2746719 - RNA, 19 nt, Artificial Sequence
  Description of Artificial Sequence: Synthetic oligonucleotide
gacgguccuggggagcggc

SEQ ID NO: 2746720 - RNA, 19 nt, Artificial Sequence
  Description of Artificial Sequence: Synthetic oligonucleotide
ggucaucucauagagcgua

SEQ ID NO: 2746721 - RNA, 19 nt, Artificial Sequence
  Description of Artificial Sequence: Synthetic oligonucleotide
ggauucggucauaaugcac

SEQ ID NO: 2746722 - RNA, 19 nt, Artificial Sequence
  Description of Artificial Sequence: Synthetic oligonucleotide
aggucuccugggcaggguu

SEQ ID NO: 2746723 - RNA, 19 nt, Artificial Sequence
  Description of Artificial Sequence: Synthetic oligonucleotide
uuguggggcaggccucguc

SEQ ID NO: 2746724 - RNA, 19 nt, Artificial Sequence
  Description of Artificial Sequence: Synthetic oligonucleotide
ggugucagcugcuggaagu

SEQ ID NO: 2746725 - RNA, 19 nt, Artificial Sequence
  Description of Artificial Sequence: Synthetic oligonucleotide
ccugcauagggcccggcug

SEQ ID NO: 2746726 - RNA, 19 nt, Artificial Sequence
  Description of Artificial Sequence: Synthetic oligonucleotide
ccaauucugucugcagggg

SEQ ID NO: 2746727 - RNA, 19 nt, Artificial Sequence
  Description of Artificial Sequence: Synthetic oligonucleotide
caauucugucugcaggggu

SEQ ID NO: 2746728 - RNA, 19 nt, Artificial Sequence
  Description of Artificial Sequence: Synthetic oligonucleotide
caggguugcagcaggcaua

SEQ ID NO: 2746729 - RNA, 19 nt, Artificial Sequence
  Description of Artificial Sequence: Synthetic oligonucleotide
guucaugggcaagagcccu

SEQ ID NO: 2746730 - RNA, 19 nt, Artificial Sequence
  Description of Artificial Sequence: Synthetic oligonucleotide
agcccguucagggaugcua

SEQ ID NO: 2746731 - RNA, 19 nt, Artificial Sequence
  Description of Artificial Sequence: Synthetic oligonucleotide
caggccucgucucugggua

SEQ ID NO: 2746732 - RNA, 19 nt, Artificial Sequence
  Description of Artificial Sequence: Synthetic oligonucleotide
cugcuggaaguaggucucc

SEQ ID NO: 2746733 - RNA, 19 nt, Artificial Sequence
  Description of Artificial Sequence: Synthetic oligonucleotide
ccucacccaacagggauag

SEQ ID NO: 2746734 - RNA, 19 nt, Artificial Sequence
  Description of Artificial Sequence: Synthetic oligonucleotide
gcccguucagggaugcuag

SEQ ID NO: 2746735 - RNA, 19 nt, Artificial Sequence
  Description of Artificial Sequence: Synthetic oligonucleotide
ggacuuccagcccguucag

SEQ ID NO: 2746736 - RNA, 19 nt, Artificial Sequence
  Description of Artificial Sequence: Synthetic oligonucleotide
ggggauggcgcaaagccaa

SEQ ID NO: 2746737 - RNA, 19 nt, Artificial Sequence
  Description of Artificial Sequence: Synthetic oligonucleotide
ggagcggccacuagagaca

SEQ ID NO: 2746738 - RNA, 19 nt, Artificial Sequence
  Description of Artificial Sequence: Synthetic oligonucleotide
gcgcaaagccaauucuguc

SEQ ID NO: 2746739 - RNA, 19 nt, Artificial Sequence
  Description of Artificial Sequence: Synthetic oligonucleotide
cauugacacugugagugua

SEQ ID NO: 2746740 - RNA, 19 nt, Artificial Sequence
  Description of Artificial Sequence: Synthetic oligonucleotide
gcuuguggggcaggccucg

SEQ ID NO: 2746741 - RNA, 19 nt, Artificial Sequence
  Description of Artificial Sequence: Synthetic oligonucleotide
gcagaaagcgacgguccug

SEQ ID NO: 2746742 - RNA, 19 nt, Artificial Sequence
  Description of Artificial Sequence: Synthetic oligonucleotide
gcuguaugugcugcuugug

SEQ ID NO: 2746743 - RNA, 19 nt, Artificial Sequence
  Description of Artificial Sequence: Synthetic oligonucleotide
cuccucacccaacagggau

SEQ ID NO: 2746744 - RNA, 19 nt, Artificial Sequence
  Description of Artificial Sequence: Synthetic oligonucleotide
gcgacgguccuggggagcg

SEQ ID NO: 2746745 - RNA, 19 nt, Artificial Sequence
  Description of Artificial Sequence: Synthetic oligonucleotide
ccguucagggaugcuaggc

SEQ ID NO: 2746746 - RNA, 19 nt, Artificial Sequence
  Description of Artificial Sequence: Synthetic oligonucleotide
uagggcccggcuggggaug

SEQ ID NO: 2746747 - RNA, 19 nt, Artificial Sequence
  Description of Artificial Sequence: Synthetic oligonucleotide
ggcaggccucgucucuggg

SEQ ID NO: 2746748 - RNA, 19 nt, Artificial Sequence
  Description of Artificial Sequence: Synthetic oligonucleotide
uaggucuccugggcagggu

SEQ ID NO: 2746749 - RNA, 19 nt, Artificial Sequence
  Description of Artificial Sequence: Synthetic oligonucleotide
augcuaggcugcuguggua

SEQ ID NO: 2746750 - RNA, 19 nt, Artificial Sequence
  Description of Artificial Sequence: Synthetic oligonucleotide
gggcaggccucgucucugg

SEQ ID NO: 2746751 - RNA, 19 nt, Artificial Sequence
  Description of Artificial Sequence: Synthetic oligonucleotide
ccacuagagacagguuggc

SEQ ID NO: 2746752 - RNA, 19 nt, Artificial Sequence
  Description of Artificial Sequence: Synthetic oligonucleotide
ucuccugggcaggguugca

SEQ ID NO: 2746753 - RNA, 19 nt, Artificial Sequence
  Description of Artificial Sequence: Synthetic oligonucleotide
ggucuccugggcaggguug

SEQ ID NO: 2746754 - RNA, 19 nt, Artificial Sequence
  Description of Artificial Sequence: Synthetic oligonucleotide
gcauuccugacggucaucu

SEQ ID NO: 2746755 - RNA, 19 nt, Artificial Sequence
  Description of Artificial Sequence: Synthetic oligonucleotide
uccugacggucaucucaua

SEQ ID NO: 2746756 - RNA, 19 nt, Artificial Sequence
  Description of Artificial Sequence: Synthetic oligonucleotide
agggcccggcuggggaugg

SEQ ID NO: 2746757 - RNA, 19 nt, Artificial Sequence
  Description of Artificial Sequence: Synthetic oligonucleotide
cccguucagggaugcuagg

SEQ ID NO: 2746758 - RNA, 19 nt, Artificial Sequence
  Description of Artificial Sequence: Synthetic oligonucleotide
ggcgcaaagccaauucugu

SEQ ID NO: 2746759 - RNA, 19 nt, Artificial Sequence
  Description of Artificial Sequence: Synthetic oligonucleotide
guacaccuccucgauggcu

SEQ ID NO: 2746760 - RNA, 19 nt, Artificial Sequence
  Description of Artificial Sequence: Synthetic oligonucleotide
ccucgauggcugcaguguc

SEQ ID NO: 2746761 - RNA, 19 nt, Artificial Sequence
  Description of Artificial Sequence: Synthetic oligonucleotide
ugcucuggauucggucaua

SEQ ID NO: 2746762 - RNA, 19 nt, Artificial Sequence
  Description of Artificial Sequence: Synthetic oligonucleotide
agcccugcauagggcccgg

SEQ ID NO: 2746763 - RNA, 19 nt, Artificial Sequence
  Description of Artificial Sequence: Synthetic oligonucleotide
cgcaaagccaauucugucu

SEQ ID NO: 2746764 - RNA, 19 nt, Artificial Sequence
  Description of Artificial Sequence: Synthetic oligonucleotide
gcggccacuagagacaggu

SEQ ID NO: 2746765 - RNA, 19 nt, Artificial Sequence
  Description of Artificial Sequence: Synthetic oligonucleotide
gcagguucacuccaugcuu

SEQ ID NO: 2746766 - RNA, 19 nt, Artificial Sequence
  Description of Artificial Sequence: Synthetic oligonucleotide
ggcuggggauggcgcaaag

SEQ ID NO: 2746767 - RNA, 19 nt, Artificial Sequence
  Description of Artificial Sequence: Synthetic oligonucleotide
uccuggggagcggccacua

SEQ ID NO: 2746768 - RNA, 19 nt, Artificial Sequence
  Description of Artificial Sequence: Synthetic oligonucleotide
agguggacuuccagcccgu

SEQ ID NO: 2746769 - RNA, 19 nt, Artificial Sequence
  Description of Artificial Sequence: Synthetic oligonucleotide
cucacccaacagggauagc

SEQ ID NO: 2746770 - RNA, 19 nt, Artificial Sequence
  Description of Artificial Sequence: Synthetic oligonucleotide
gcacgaagcuguaugugcu

SEQ ID NO: 2746771 - RNA, 19 nt, Artificial Sequence
  Description of Artificial Sequence: Synthetic oligonucleotide
guaggcagcugggcaaagu

SEQ ID NO: 2746772 - RNA, 19 nt, Artificial Sequence
  Description of Artificial Sequence: Synthetic oligonucleotide
ggcccggcuggggauggcg

SEQ ID NO: 2746773 - RNA, 19 nt, Artificial Sequence
  Description of Artificial Sequence: Synthetic oligonucleotide
gcauagggcccggcugggg

SEQ ID NO: 2746774 - RNA, 19 nt, Artificial Sequence
  Description of Artificial Sequence: Synthetic oligonucleotide
cacuagagacagguuggcu

SEQ ID NO: 2746775 - RNA, 19 nt, Artificial Sequence
  Description of Artificial Sequence: Synthetic oligonucleotide
gugucuccuucagguggac

SEQ ID NO: 2746776 - RNA, 19 nt, Artificial Sequence
  Description of Artificial Sequence: Synthetic oligonucleotide
cugugagcaugcucuggau

SEQ ID NO: 2746777 - RNA, 19 nt, Artificial Sequence
  Description of Artificial Sequence: Synthetic oligonucleotide
ggcaggguugcagcaggca

SEQ ID NO: 2746778 - RNA, 19 nt, Artificial Sequence
  Description of Artificial Sequence: Synthetic oligonucleotide
agcggccacuagagacagg

SEQ ID NO: 2746779 - RNA, 19 nt, Artificial Sequence
  Description of Artificial Sequence: Synthetic oligonucleotide
ccugaggguuugggaagcc

SEQ ID NO: 2746780 - RNA, 19 nt, Artificial Sequence
  Description of Artificial Sequence: Synthetic oligonucleotide
gcucuggauucggucauaa

SEQ ID NO: 2746781 - RNA, 19 nt, Artificial Sequence
  Description of Artificial Sequence: Synthetic oligonucleotide
ggggcaggccucgucucug

SEQ ID NO: 2746782 - RNA, 19 nt, Artificial Sequence
  Description of Artificial Sequence: Synthetic oligonucleotide
ggcacaauccugaggguuu

SEQ ID NO: 2746783 - RNA, 19 nt, Artificial Sequence
  Description of Artificial Sequence: Synthetic oligonucleotide
cucuggauucggucauaau

SEQ ID NO: 2746784 - RNA, 19 nt, Artificial Sequence
  Description of Artificial Sequence: Synthetic oligonucleotide
cacugugaguguagagguu

SEQ ID NO: 2746785 - RNA, 19 nt, Artificial Sequence
  Description of Artificial Sequence: Synthetic oligonucleotide
ccagcccguucagggaugc

SEQ ID NO: 2746786 - RNA, 19 nt, Artificial Sequence
  Description of Artificial Sequence: Synthetic oligonucleotide
cagcagcuuccucuuggcu

SEQ ID NO: 2746787 - RNA, 19 nt, Artificial Sequence
  Description of Artificial Sequence: Synthetic oligonucleotide
ggggagcggccacuagaga

SEQ ID NO: 2746788 - RNA, 19 nt, Artificial Sequence
  Description of Artificial Sequence: Synthetic oligonucleotide
gggcaaagucggaguguac

SEQ ID NO: 2746789 - RNA, 19 nt, Artificial Sequence
  Description of Artificial Sequence: Synthetic oligonucleotide
ccuggggagcggccacuag

SEQ ID NO: 2746790 - RNA, 19 nt, Artificial Sequence
  Description of Artificial Sequence: Synthetic oligonucleotide
gcaggcauacacagcugua

SEQ ID NO: 2746791 - RNA, 19 nt, Artificial Sequence
  Description of Artificial Sequence: Synthetic oligonucleotide
acacagcuguagaggcauu

SEQ ID NO: 2746792 - RNA, 19 nt, Artificial Sequence
  Description of Artificial Sequence: Synthetic oligonucleotide
cugcugugguacaccuccu

SEQ ID NO: 2746793 - RNA, 19 nt, Artificial Sequence
  Description of Artificial Sequence: Synthetic oligonucleotide
cugcgggugguggguguca

SEQ ID NO: 2746794 - RNA, 19 nt, Artificial Sequence
  Description of Artificial Sequence: Synthetic oligonucleotide
gcccauugacacugugagu

SEQ ID NO: 2746795 - RNA, 19 nt, Artificial Sequence
  Description of Artificial Sequence: Synthetic oligonucleotide
gccucgucucuggguagug

SEQ ID NO: 2746796 - RNA, 19 nt, Artificial Sequence
  Description of Artificial Sequence: Synthetic oligonucleotide
gcaccagcccauugacacu

SEQ ID NO: 2746797 - RNA, 19 nt, Artificial Sequence
  Description of Artificial Sequence: Synthetic oligonucleotide
gcccggcuggggauggcgc

SEQ ID NO: 2746798 - RNA, 19 nt, Artificial Sequence
  Description of Artificial Sequence: Synthetic oligonucleotide
gccugcagaaagcgacggu

SEQ ID NO: 2746799 - RNA, 19 nt, Artificial Sequence
  Description of Artificial Sequence: Synthetic oligonucleotide
gcugcgggugguggguguc

SEQ ID NO: 2746800 - RNA, 19 nt, Artificial Sequence
  Description of Artificial Sequence: Synthetic oligonucleotide
gcguaggcagcugggcaaa

SEQ ID NO: 2746801 - RNA, 19 nt, Artificial Sequence
  Description of Artificial Sequence: Synthetic oligonucleotide
cccggcuggggauggcgca

SEQ ID NO: 2746802 - RNA, 19 nt, Artificial Sequence
  Description of Artificial Sequence: Synthetic oligonucleotide
ggauggcgcaaagccaauu

SEQ ID NO: 2746803 - RNA, 19 nt, Artificial Sequence
  Description of Artificial Sequence: Synthetic oligonucleotide
guccuggggagcggccacu

SEQ ID NO: 2746804 - RNA, 19 nt, Artificial Sequence
  Description of Artificial Sequence: Synthetic oligonucleotide
cuuguggggcaggccucgu

SEQ ID NO: 2746805 - RNA, 19 nt, Artificial Sequence
  Description of Artificial Sequence: Synthetic oligonucleotide
ggccucgucucuggguagu

SEQ ID NO: 2746806 - RNA, 19 nt, Artificial Sequence
  Description of Artificial Sequence: Synthetic oligonucleotide
gguuggcugugagcaugcu

SEQ ID NO: 2746807 - RNA, 19 nt, Artificial Sequence
  Description of Artificial Sequence: Synthetic oligonucleotide
gcaaggcugaaggcacaau

SEQ ID NO: 2746808 - RNA, 19 nt, Artificial Sequence
  Description of Artificial Sequence: Synthetic oligonucleotide
cggaguguacaagauugau

SEQ ID NO: 2746809 - RNA, 19 nt, Artificial Sequence
  Description of Artificial Sequence: Synthetic oligonucleotide
gggauagcaccagcccauu

SEQ ID NO: 2746810 - RNA, 19 nt, Artificial Sequence
  Description of Artificial Sequence: Synthetic oligonucleotide
cgacgguccuggggagcgg

SEQ ID NO: 2746811 - RNA, 19 nt, Artificial Sequence
  Description of Artificial Sequence: Synthetic oligonucleotide
gggauggcgcaaagccaau

SEQ ID NO: 2746812 - RNA, 19 nt, Artificial Sequence
  Description of Artificial Sequence: Synthetic oligonucleotide
cggucaucucauagagcgu

SEQ ID NO: 2746813 - RNA, 19 nt, Artificial Sequence
  Description of Artificial Sequence: Synthetic oligonucleotide
ccucgucucuggguagugu

SEQ ID NO: 2746814 - RNA, 19 nt, Artificial Sequence
  Description of Artificial Sequence: Synthetic oligonucleotide
ccggcuggggauggcgcaa

SEQ ID NO: 2746815 - RNA, 19 nt, Artificial Sequence
  Description of Artificial Sequence: Synthetic oligonucleotide
gguggacuuccagcccguu

SEQ ID NO: 2746816 - RNA, 19 nt, Artificial Sequence
  Description of Artificial Sequence: Synthetic oligonucleotide
cagcccguucagggaugcu

SEQ ID NO: 2746817 - RNA, 19 nt, Artificial Sequence
  Description of Artificial Sequence: Synthetic oligonucleotide
cggcuggggauggcgcaaa

SEQ ID NO: 2746818 - RNA, 19 nt, Artificial Sequence
  Description of Artificial Sequence: Synthetic oligonucleotide
cggccacuagagacagguu

SEQ ID NO: 2746819 - RNA, 19 nt, Artificial Sequence
  Description of Artificial Sequence: Synthetic oligonucleotide
aaagaauggaacccggacc

SEQ ID NO: 2746820 - RNA, 19 nt, Artificial Sequence
  Description of Artificial Sequence: Synthetic oligonucleotide
aaaagaauggaacccggac

SEQ ID NO: 2746821 - RNA, 19 nt, Artificial Sequence
  Description of Artificial Sequence: Synthetic oligonucleotide
aagaauggaacccggaccg

SEQ ID NO: 2746822 - RNA, 19 nt, Artificial Sequence
  Description of Artificial Sequence: Synthetic oligonucleotide
uuugcucacaguuuugcgg

SEQ ID NO: 2746823 - RNA, 19 nt, Artificial Sequence
  Description of Artificial Sequence: Synthetic oligonucleotide
agggauuaggucuugggac

SEQ ID NO: 2746824 - RNA, 19 nt, Artificial Sequence
  Description of Artificial Sequence: Synthetic oligonucleotide
aagcagaaagaguccaugg

SEQ ID NO: 2746825 - RNA, 19 nt, Artificial Sequence
  Description of Artificial Sequence: Synthetic oligonucleotide
ugaaaagaauggaacccgg

SEQ ID NO: 2746826 - RNA, 19 nt, Artificial Sequence
  Description of Artificial Sequence: Synthetic oligonucleotide
  modified_base (3)..(3): a, c, u, g, unknown or other
uunuuugagaggagggcag

SEQ ID NO: 2746827 - RNA, 19 nt, Artificial Sequence
  Description of Artificial Sequence: Synthetic oligonucleotide
aaagaguccauggggaggg

SEQ ID NO: 2746828 - RNA, 19 nt, Artificial Sequence
  Description of Artificial Sequence: Synthetic oligonucleotide
  modified_base (4)..(4): a, c, u, g, unknown or other
uuunuuugagaggagggca

SEQ ID NO: 2746829 - RNA, 19 nt, Artificial Sequence
  Description of Artificial Sequence: Synthetic oligonucleotide
ugcuacauugucaagcaga

SEQ ID NO: 2746830 - RNA, 19 nt, Artificial Sequence
  Description of Artificial Sequence: Synthetic oligonucleotide
uggugaaaagaauggaacc

SEQ ID NO: 2746831 - RNA, 19 nt, Artificial Sequence
  Description of Artificial Sequence: Synthetic oligonucleotide
uaugagggcaucuccuugg

SEQ ID NO: 2746832 - RNA, 19 nt, Artificial Sequence
  Description of Artificial Sequence: Synthetic oligonucleotide
  modified_base (5)..(5): a, c, u, g, unknown or other
uuuunuuugagaggagggc

SEQ ID NO: 2746833 - RNA, 19 nt, Artificial Sequence
  Description of Artificial Sequence: Synthetic oligonucleotide
gagggcaucuccuuggucc

SEQ ID NO: 2746834 - RNA, 19 nt, Artificial Sequence
  Description of Artificial Sequence: Synthetic oligonucleotide
aucuccuugguccccaccc

SEQ ID NO: 2746835 - RNA, 19 nt, Artificial Sequence
  Description of Artificial Sequence: Synthetic oligonucleotide
acccaagugccugagaugc

SEQ ID NO: 2746836 - RNA, 19 nt, Artificial Sequence
  Description of Artificial Sequence: Synthetic oligonucleotide
uaggucuugggacugggag

SEQ ID NO: 2746837 - RNA, 19 nt, Artificial Sequence
  Description of Artificial Sequence: Synthetic oligonucleotide
agcagaaagaguccauggg

SEQ ID NO: 2746838 - RNA, 19 nt, Artificial Sequence
  Description of Artificial Sequence: Synthetic oligonucleotide
cuggugaaaagaauggaac

SEQ ID NO: 2746839 - RNA, 19 nt, Artificial Sequence
  Description of Artificial Sequence: Synthetic oligonucleotide
uuuugcucacaguuuugcg

SEQ ID NO: 2746840 - RNA, 19 nt, Artificial Sequence
  Description of Artificial Sequence: Synthetic oligonucleotide
uuugcggaaggcgaggcgg

SEQ ID NO: 2746841 - RNA, 19 nt, Artificial Sequence
  Description of Artificial Sequence: Synthetic oligonucleotide
cacagaaaccacagaaggg

SEQ ID NO: 2746842 - RNA, 19 nt, Artificial Sequence
  Description of Artificial Sequence: Synthetic oligonucleotide
gacugcagacggcaaaugg

SEQ ID NO: 2746843 - RNA, 19 nt, Artificial Sequence
  Description of Artificial Sequence: Synthetic oligonucleotide
acagaaaccacagaaggga

SEQ ID NO: 2746844 - RNA, 19 nt, Artificial Sequence
  Description of Artificial Sequence: Synthetic oligonucleotide
gugaaaagaauggaacccg

SEQ ID NO: 2746845 - RNA, 19 nt, Artificial Sequence
  Description of Artificial Sequence: Synthetic oligonucleotide
ugaguggugcaguggaggg

SEQ ID NO: 2746846 - RNA, 19 nt, Artificial Sequence
  Description of Artificial Sequence: Synthetic oligonucleotide
uagggauggggcauggugc

SEQ ID NO: 2746847 - RNA, 19 nt, Artificial Sequence
  Description of Artificial Sequence: Synthetic oligonucleotide
aaugguguggggcggggug

SEQ ID NO: 2746848 - RNA, 19 nt, Artificial Sequence
  Description of Artificial Sequence: Synthetic oligonucleotide
agaaagaguccauggggag

SEQ ID NO: 2746849 - RNA, 19 nt, Artificial Sequence
  Description of Artificial Sequence: Synthetic oligonucleotide
ugucaagcagaaagagucc

SEQ ID NO: 2746850 - RNA, 19 nt, Artificial Sequence
  Description of Artificial Sequence: Synthetic oligonucleotide
gaaagaguccauggggagg

SEQ ID NO: 2746851 - RNA, 19 nt, Artificial Sequence
  Description of Artificial Sequence: Synthetic oligonucleotide
uugcucacaguuuugcgga

SEQ ID NO: 2746852 - RNA, 19 nt, Artificial Sequence
  Description of Artificial Sequence: Synthetic oligonucleotide
acggcaaaugguguggggc

SEQ ID NO: 2746853 - RNA, 19 nt, Artificial Sequence
  Description of Artificial Sequence: Synthetic oligonucleotide
uugaguggugcaguggagg

SEQ ID NO: 2746854 - RNA, 19 nt, Artificial Sequence
  Description of Artificial Sequence: Synthetic oligonucleotide
ggcacagugagguugcagg

SEQ ID NO: 2746855 - RNA, 19 nt, Artificial Sequence
  Description of Artificial Sequence: Synthetic oligonucleotide
  modified_base (2)..(2): a, c, u, g, unknown or other
unuuugagaggagggcagg

SEQ ID NO: 2746856 - RNA, 19 nt, Artificial Sequence
  Description of Artificial Sequence: Synthetic oligonucleotide
agggaagggucuaugaggg

SEQ ID NO: 2746857 - RNA, 19 nt, Artificial Sequence
  Description of Artificial Sequence: Synthetic oligonucleotide
uuuugcggaaggcgaggcg

SEQ ID NO: 2746858 - RNA, 19 nt, Artificial Sequence
  Description of Artificial Sequence: Synthetic oligonucleotide
cauugucaagcagaaagag

SEQ ID NO: 2746859 - RNA, 19 nt, Artificial Sequence
  Description of Artificial Sequence: Synthetic oligonucleotide
aaccacagaagggacaggu

SEQ ID NO: 2746860 - RNA, 19 nt, Artificial Sequence
  Description of Artificial Sequence: Synthetic oligonucleotide
uuugagaggagggcagggg

SEQ ID NO: 2746861 - RNA, 19 nt, Artificial Sequence
  Description of Artificial Sequence: Synthetic oligonucleotide
ugaccacacagaaaccaca

SEQ ID NO: 2746862 - RNA, 19 nt, Artificial Sequence
  Description of Artificial Sequence: Synthetic oligonucleotide
aggucuugggacugggagg

SEQ ID NO: 2746863 - RNA, 19 nt, Artificial Sequence
  Description of Artificial Sequence: Synthetic oligonucleotide
ggugaaaagaauggaaccc

SEQ ID NO: 2746864 - RNA, 19 nt, Artificial Sequence
  Description of Artificial Sequence: Synthetic oligonucleotide
cacaguuuugcggaaggcg

SEQ ID NO: 2746865 - RNA, 19 nt, Artificial Sequence
  Description of Artificial Sequence: Synthetic oligonucleotide
guugcuacauugucaagca

SEQ ID NO: 2746866 - RNA, 19 nt, Artificial Sequence
  Description of Artificial Sequence: Synthetic oligonucleotide
cucacaguuuugcggaagg

SEQ ID NO: 2746867 - RNA, 19 nt, Artificial Sequence
  Description of Artificial Sequence: Synthetic oligonucleotide
aagaaggcaagggaagggu

SEQ ID NO: 2746868 - RNA, 19 nt, Artificial Sequence
  Description of Artificial Sequence: Synthetic oligonucleotide
uugagaggagggcaggggu

SEQ ID NO: 2746869 - RNA, 19 nt, Artificial Sequence
  Description of Artificial Sequence: Synthetic oligonucleotide
caagggaagggucuaugag

SEQ ID NO: 2746870 - RNA, 19 nt, Artificial Sequence
  Description of Artificial Sequence: Synthetic oligonucleotide
aagggcugaccacacagaa

SEQ ID NO: 2746871 - RNA, 19 nt, Artificial Sequence
  Description of Artificial Sequence: Synthetic oligonucleotide
agggcaucuccuugguccc

SEQ ID NO: 2746872 - RNA, 19 nt, Artificial Sequence
  Description of Artificial Sequence: Synthetic oligonucleotide
cuagggauggggcauggug

SEQ ID NO: 2746873 - RNA, 19 nt, Artificial Sequence
  Description of Artificial Sequence: Synthetic oligonucleotide
aauggaacccggaccgggg

SEQ ID NO: 2746874 - RNA, 19 nt, Artificial Sequence
  Description of Artificial Sequence: Synthetic oligonucleotide
agggauggggcauggugcg

SEQ ID NO: 2746875 - RNA, 19 nt, Artificial Sequence
  Description of Artificial Sequence: Synthetic oligonucleotide
gggcugaccacacagaaac

SEQ ID NO: 2746876 - RNA, 19 nt, Artificial Sequence
  Description of Artificial Sequence: Synthetic oligonucleotide
uggggcauggugcggggcg

SEQ ID NO: 2746877 - RNA, 19 nt, Artificial Sequence
  Description of Artificial Sequence: Synthetic oligonucleotide
cugcagacggcaaauggug

SEQ ID NO: 2746878 - RNA, 19 nt, Artificial Sequence
  Description of Artificial Sequence: Synthetic oligonucleotide
gguugcuacauugucaagc

SEQ ID NO: 2746879 - RNA, 19 nt, Artificial Sequence
  Description of Artificial Sequence: Synthetic oligonucleotide
ugcaguggaggggucaggg

SEQ ID NO: 2746880 - RNA, 19 nt, Artificial Sequence
  Description of Artificial Sequence: Synthetic oligonucleotide
gaauggaacccggaccggg

SEQ ID NO: 2746881 - RNA, 19 nt, Artificial Sequence
  Description of Artificial Sequence: Synthetic oligonucleotide
accggacaccccuugcccc

SEQ ID NO: 2746882 - RNA, 19 nt, Artificial Sequence
  Description of Artificial Sequence: Synthetic oligonucleotide
ggaagggcugaccacacag

SEQ ID NO: 2746883 - RNA, 19 nt, Artificial Sequence
  Description of Artificial Sequence: Synthetic oligonucleotide
guugcaggcgguaaaacca

SEQ ID NO: 2746884 - RNA, 19 nt, Artificial Sequence
  Description of Artificial Sequence: Synthetic oligonucleotide
gaccacacagaaaccacag

SEQ ID NO: 2746885 - RNA, 19 nt, Artificial Sequence
  Description of Artificial Sequence: Synthetic oligonucleotide
cagaaagaguccaugggga

SEQ ID NO: 2746886 - RNA, 19 nt, Artificial Sequence
  Description of Artificial Sequence: Synthetic oligonucleotide
gaugggugcuggugaaaag

SEQ ID NO: 2746887 - RNA, 19 nt, Artificial Sequence
  Description of Artificial Sequence: Synthetic oligonucleotide
uggaccuagggauggggca

SEQ ID NO: 2746888 - RNA, 19 nt, Artificial Sequence
  Description of Artificial Sequence: Synthetic oligonucleotide
acaguuuugcggaaggcga

SEQ ID NO: 2746889 - RNA, 19 nt, Artificial Sequence
  Description of Artificial Sequence: Synthetic oligonucleotide
gguugcaggcgguaaaacc

SEQ ID NO: 2746890 - RNA, 19 nt, Artificial Sequence
  Description of Artificial Sequence: Synthetic oligonucleotide
cagaaaccacagaagggac

SEQ ID NO: 2746891 - RNA, 19 nt, Artificial Sequence
  Description of Artificial Sequence: Synthetic oligonucleotide
ucaagcagaaagaguccau

SEQ ID NO: 2746892 - RNA, 19 nt, Artificial Sequence
  Description of Artificial Sequence: Synthetic oligonucleotide
auuaggucuugggacuggg

SEQ ID NO: 2746893 - RNA, 19 nt, Artificial Sequence
  Description of Artificial Sequence: Synthetic oligonucleotide
aguuuugcggaaggcgagg

SEQ ID NO: 2746894 - RNA, 19 nt, Artificial Sequence
  Description of Artificial Sequence: Synthetic oligonucleotide
cuugguaccccuugggcga

SEQ ID NO: 2746895 - RNA, 19 nt, Artificial Sequence
  Description of Artificial Sequence: Synthetic oligonucleotide
ugagguugcaggcgguaaa

SEQ ID NO: 2746896 - RNA, 19 nt, Artificial Sequence
  Description of Artificial Sequence: Synthetic oligonucleotide
ugcagacggcaaauggugu

SEQ ID NO: 2746897 - RNA, 19 nt, Artificial Sequence
  Description of Artificial Sequence: Synthetic oligonucleotide
caagcagaaagaguccaug

SEQ ID NO: 2746898 - RNA, 19 nt, Artificial Sequence
  Description of Artificial Sequence: Synthetic oligonucleotide
acauugucaagcagaaaga

SEQ ID NO: 2746899 - RNA, 19 nt, Artificial Sequence
  Description of Artificial Sequence: Synthetic oligonucleotide
gacggcaaauggugugggg

SEQ ID NO: 2746900 - RNA, 19 nt, Artificial Sequence
  Description of Artificial Sequence: Synthetic oligonucleotide
gaaaagaauggaacccgga

SEQ ID NO: 2746901 - RNA, 19 nt, Artificial Sequence
  Description of Artificial Sequence: Synthetic oligonucleotide
ucuaugagggcaucuccuu

SEQ ID NO: 2746902 - RNA, 19 nt, Artificial Sequence
  Description of Artificial Sequence: Synthetic oligonucleotide
gauuaggucuugggacugg

SEQ ID NO: 2746903 - RNA, 19 nt, Artificial Sequence
  Description of Artificial Sequence: Synthetic oligonucleotide
ggaagaaggcaagggaagg

SEQ ID NO: 2746904 - RNA, 19 nt, Artificial Sequence
  Description of Artificial Sequence: Synthetic oligonucleotide
aggaggcagggauuagguc

SEQ ID NO: 2746905 - RNA, 19 nt, Artificial Sequence
  Description of Artificial Sequence: Synthetic oligonucleotide
acagaagggacagguuggg

SEQ ID NO: 2746906 - RNA, 19 nt, Artificial Sequence
  Description of Artificial Sequence: Synthetic oligonucleotide
ugcuggugaaaagaaugga

SEQ ID NO: 2746907 - RNA, 19 nt, Artificial Sequence
  Description of Artificial Sequence: Synthetic oligonucleotide
ccuugguaccccuugggcg

SEQ ID NO: 2746908 - RNA, 19 nt, Artificial Sequence
  Description of Artificial Sequence: Synthetic oligonucleotide
ggucuugggacugggaggg

SEQ ID NO: 2746909 - RNA, 19 nt, Artificial Sequence
  Description of Artificial Sequence: Synthetic oligonucleotide
agaaggcaagggaaggguc

SEQ ID NO: 2746910 - RNA, 19 nt, Artificial Sequence
  Description of Artificial Sequence: Synthetic oligonucleotide
gaggggucaggggaggagg

SEQ ID NO: 2746911 - RNA, 19 nt, Artificial Sequence
  Description of Artificial Sequence: Synthetic oligonucleotide
cuggaccuagggauggggc

SEQ ID NO: 2746912 - RNA, 19 nt, Artificial Sequence
  Description of Artificial Sequence: Synthetic oligonucleotide
cuaugagggcaucuccuug

SEQ ID NO: 2746913 - RNA, 19 nt, Artificial Sequence
  Description of Artificial Sequence: Synthetic oligonucleotide
caguuuugcggaaggcgag

SEQ ID NO: 2746914 - RNA, 19 nt, Artificial Sequence
  Description of Artificial Sequence: Synthetic oligonucleotide
uguggggcggggugggccg

SEQ ID NO: 2746915 - RNA, 19 nt, Artificial Sequence
  Description of Artificial Sequence: Synthetic oligonucleotide
ggaggggagggccaguggg

SEQ ID NO: 2746916 - RNA, 19 nt, Artificial Sequence
  Description of Artificial Sequence: Synthetic oligonucleotide
uccuugguccccacccaag

SEQ ID NO: 2746917 - RNA, 19 nt, Artificial Sequence
  Description of Artificial Sequence: Synthetic oligonucleotide
aguggugcaguggaggggu

SEQ ID NO: 2746918 - RNA, 19 nt, Artificial Sequence
  Description of Artificial Sequence: Synthetic oligonucleotide
cuugaguggugcaguggag

SEQ ID NO: 2746919 - RNA, 19 nt, Artificial Sequence
  Description of Artificial Sequence: Synthetic oligonucleotide
uuaggucuugggacuggga

SEQ ID NO: 2746920 - RNA, 19 nt, Artificial Sequence
  Description of Artificial Sequence: Synthetic oligonucleotide
ggaccggggaggaagaagg

SEQ ID NO: 2746921 - RNA, 19 nt, Artificial Sequence
  Description of Artificial Sequence: Synthetic oligonucleotide
cacgccccggccuugagug

SEQ ID NO: 2746922 - RNA, 19 nt, Artificial Sequence
  Description of Artificial Sequence: Synthetic oligonucleotide
gaccggacaccccuugccc

SEQ ID NO: 2746923 - RNA, 19 nt, Artificial Sequence
  Description of Artificial Sequence: Synthetic oligonucleotide
uugcaggcgguaaaaccaa

SEQ ID NO: 2746924 - RNA, 19 nt, Artificial Sequence
  Description of Artificial Sequence: Synthetic oligonucleotide
acugcagacggcaaauggu

SEQ ID NO: 2746925 - RNA, 19 nt, Artificial Sequence
  Description of Artificial Sequence: Synthetic oligonucleotide
cagacggcaaauggugugg

SEQ ID NO: 2746926 - RNA, 19 nt, Artificial Sequence
  Description of Artificial Sequence: Synthetic oligonucleotide
aaaccacagaagggacagg

SEQ ID NO: 2746927 - RNA, 19 nt, Artificial Sequence
  Description of Artificial Sequence: Synthetic oligonucleotide
uggaacccggaccggggag

SEQ ID NO: 2746928 - RNA, 19 nt, Artificial Sequence
  Description of Artificial Sequence: Synthetic oligonucleotide
gauggggcauggugcgggg

SEQ ID NO: 2746929 - RNA, 19 nt, Artificial Sequence
  Description of Artificial Sequence: Synthetic oligonucleotide
ggaggaagaaggcaaggga

SEQ ID NO: 2746930 - RNA, 19 nt, Artificial Sequence
  Description of Artificial Sequence: Synthetic oligonucleotide
acuggaccuagggaugggg

SEQ ID NO: 2746931 - RNA, 19 nt, Artificial Sequence
  Description of Artificial Sequence: Synthetic oligonucleotide
caagugccugagaugcccc

SEQ ID NO: 2746932 - RNA, 19 nt, Artificial Sequence
  Description of Artificial Sequence: Synthetic oligonucleotide
gcagggauuaggucuuggg

SEQ ID NO: 2746933 - RNA, 19 nt, Artificial Sequence
  Description of Artificial Sequence: Synthetic oligonucleotide
ucuccuugguccccaccca

SEQ ID NO: 2746934 - RNA, 19 nt, Artificial Sequence
  Description of Artificial Sequence: Synthetic oligonucleotide
ggucuaugagggcaucucc

SEQ ID NO: 2746935 - RNA, 19 nt, Artificial Sequence
  Description of Artificial Sequence: Synthetic oligonucleotide
agaaaccacagaagggaca

SEQ ID NO: 2746936 - RNA, 19 nt, Artificial Sequence
  Description of Artificial Sequence: Synthetic oligonucleotide
cagggauuaggucuuggga

SEQ ID NO: 2746937 - RNA, 19 nt, Artificial Sequence
  Description of Artificial Sequence: Synthetic oligonucleotide
ccacagaagggacagguug

SEQ ID NO: 2746938 - RNA, 19 nt, Artificial Sequence
  Description of Artificial Sequence: Synthetic oligonucleotide
gggaggaagaaggcaaggg

SEQ ID NO: 2746939 - RNA, 19 nt, Artificial Sequence
  Description of Artificial Sequence: Synthetic oligonucleotide
gucaagcagaaagagucca

SEQ ID NO: 2746940 - RNA, 19 nt, Artificial Sequence
  Description of Artificial Sequence: Synthetic oligonucleotide
uuggaccggacaccccuug

SEQ ID NO: 2746941 - RNA, 19 nt, Artificial Sequence
  Description of Artificial Sequence: Synthetic oligonucleotide
gagaggagggcagggguug

SEQ ID NO: 2746942 - RNA, 19 nt, Artificial Sequence
  Description of Artificial Sequence: Synthetic oligonucleotide
ggaggcagggauuaggucu

SEQ ID NO: 2746943 - RNA, 19 nt, Artificial Sequence
  Description of Artificial Sequence: Synthetic oligonucleotide
gaguggugcaguggagggg

SEQ ID NO: 2746944 - RNA, 19 nt, Artificial Sequence
  Description of Artificial Sequence: Synthetic oligonucleotide
cuugguccccacccaagug

SEQ ID NO: 2746945 - RNA, 19 nt, Artificial Sequence
  Description of Artificial Sequence: Synthetic oligonucleotide
agguugcaggcgguaaaac

SEQ ID NO: 2746946 - RNA, 19 nt, Artificial Sequence
  Description of Artificial Sequence: Synthetic oligonucleotide
ggcagggguugcuacauug

SEQ ID NO: 2746947 - RNA, 19 nt, Artificial Sequence
  Description of Artificial Sequence: Synthetic oligonucleotide
aagggucuaugagggcauc

SEQ ID NO: 2746948 - RNA, 19 nt, Artificial Sequence
  Description of Artificial Sequence: Synthetic oligonucleotide
accacacagaaaccacaga

SEQ ID NO: 2746949 - RNA, 19 nt, Artificial Sequence
  Description of Artificial Sequence: Synthetic oligonucleotide
aguccauggggaggggagg

SEQ ID NO: 2746950 - RNA, 19 nt, Artificial Sequence
  Description of Artificial Sequence: Synthetic oligonucleotide
agacggcaaaugguguggg

SEQ ID NO: 2746951 - RNA, 19 nt, Artificial Sequence
  Description of Artificial Sequence: Synthetic oligonucleotide
agaauggaacccggaccgg

SEQ ID NO: 2746952 - RNA, 19 nt, Artificial Sequence
  Description of Artificial Sequence: Synthetic oligonucleotide
guuuugcggaaggcgaggc

SEQ ID NO: 2746953 - RNA, 19 nt, Artificial Sequence
  Description of Artificial Sequence: Synthetic oligonucleotide
gaggggagggccagugggg

SEQ ID NO: 2746954 - RNA, 19 nt, Artificial Sequence
  Description of Artificial Sequence: Synthetic oligonucleotide
uggaccggacaccccuugc

SEQ ID NO: 2746955 - RNA, 19 nt, Artificial Sequence
  Description of Artificial Sequence: Synthetic oligonucleotide
aguggaggggucaggggag

SEQ ID NO: 2746956 - RNA, 19 nt, Artificial Sequence
  Description of Artificial Sequence: Synthetic oligonucleotide
ggcggggugggcuuggacc

SEQ ID NO: 2746957 - RNA, 19 nt, Artificial Sequence
  Description of Artificial Sequence: Synthetic oligonucleotide
ggaagggucuaugagggca

SEQ ID NO: 2746958 - RNA, 19 nt, Artificial Sequence
  Description of Artificial Sequence: Synthetic oligonucleotide
ccugcgaugggcccgacug

SEQ ID NO: 2746959 - RNA, 19 nt, Artificial Sequence
  Description of Artificial Sequence: Synthetic oligonucleotide
agggguugcuacauuguca

SEQ ID NO: 2746960 - RNA, 19 nt, Artificial Sequence
  Description of Artificial Sequence: Synthetic oligonucleotide
cagggguugcuacauuguc

SEQ ID NO: 2746961 - RNA, 19 nt, Artificial Sequence
  Description of Artificial Sequence: Synthetic oligonucleotide
ggaggaggcagggauuagg

SEQ ID NO: 2746962 - RNA, 19 nt, Artificial Sequence
  Description of Artificial Sequence: Synthetic oligonucleotide
gaaggcgaggcgggguggg

SEQ ID NO: 2746963 - RNA, 19 nt, Artificial Sequence
  Description of Artificial Sequence: Synthetic oligonucleotide
aaggcgaggcggggugggc

SEQ ID NO: 2746964 - RNA, 19 nt, Artificial Sequence
  Description of Artificial Sequence: Synthetic oligonucleotide
gggguugcuacauugucaa

SEQ ID NO: 2746965 - RNA, 19 nt, Artificial Sequence
  Description of Artificial Sequence: Synthetic oligonucleotide
uggaagggcugaccacaca

SEQ ID NO: 2746966 - RNA, 19 nt, Artificial Sequence
  Description of Artificial Sequence: Synthetic oligonucleotide
aaaugguguggggcggggu

SEQ ID NO: 2746967 - RNA, 19 nt, Artificial Sequence
  Description of Artificial Sequence: Synthetic oligonucleotide
augguguggggcggggugg

SEQ ID NO: 2746968 - RNA, 19 nt, Artificial Sequence
  Description of Artificial Sequence: Synthetic oligonucleotide
gcagacggcaaauggugug

SEQ ID NO: 2746969 - RNA, 19 nt, Artificial Sequence
  Description of Artificial Sequence: Synthetic oligonucleotide
cuggaagggcugaccacac

SEQ ID NO: 2746970 - RNA, 19 nt, Artificial Sequence
  Description of Artificial Sequence: Synthetic oligonucleotide
cacccaagugccugagaug

SEQ ID NO: 2746971 - RNA, 19 nt, Artificial Sequence
  Description of Artificial Sequence: Synthetic oligonucleotide
gaaggcaagggaagggucu

SEQ ID NO: 2746972 - RNA, 19 nt, Artificial Sequence
  Description of Artificial Sequence: Synthetic oligonucleotide
auggaacccggaccgggga

SEQ ID NO: 2746973 - RNA, 19 nt, Artificial Sequence
  Description of Artificial Sequence: Synthetic oligonucleotide
guccauggggaggggaggg

SEQ ID NO: 2746974 - RNA, 19 nt, Artificial Sequence
  Description of Artificial Sequence: Synthetic oligonucleotide
aagaguccauggggagggg

SEQ ID NO: 2746975 - RNA, 19 nt, Artificial Sequence
  Description of Artificial Sequence: Synthetic oligonucleotide
ugcggggcgggcacaguga

SEQ ID NO: 2746976 - RNA, 19 nt, Artificial Sequence
  Description of Artificial Sequence: Synthetic oligonucleotide
gcggggugggcuuggaccg

SEQ ID NO: 2746977 - RNA, 19 nt, Artificial Sequence
  Description of Artificial Sequence: Synthetic oligonucleotide
ugagggcaucuccuugguc

SEQ ID NO: 2746978 - RNA, 19 nt, Artificial Sequence
  Description of Artificial Sequence: Synthetic oligonucleotide
caaaugguguggggcgggg

SEQ ID NO: 2746979 - RNA, 19 nt, Artificial Sequence
  Description of Artificial Sequence: Synthetic oligonucleotide
aaggcaagggaagggucua

SEQ ID NO: 2746980 - RNA, 19 nt, Artificial Sequence
  Description of Artificial Sequence: Synthetic oligonucleotide
ugcaggcgguaaaaccaaa

SEQ ID NO: 2746981 - RNA, 19 nt, Artificial Sequence
  Description of Artificial Sequence: Synthetic oligonucleotide
ggauggggcauggugcggg

SEQ ID NO: 2746982 - RNA, 19 nt, Artificial Sequence
  Description of Artificial Sequence: Synthetic oligonucleotide
gaagggcugaccacacaga

SEQ ID NO: 2746983 - RNA, 19 nt, Artificial Sequence
  Description of Artificial Sequence: Synthetic oligonucleotide
cauggugcggggcgggcac

SEQ ID NO: 2746984 - RNA, 19 nt, Artificial Sequence
  Description of Artificial Sequence: Synthetic oligonucleotide
uccccaucccgggucggcg

SEQ ID NO: 2746985 - RNA, 19 nt, Artificial Sequence
  Description of Artificial Sequence: Synthetic oligonucleotide
gucaggggaggaggcaggg

SEQ ID NO: 2746986 - RNA, 19 nt, Artificial Sequence
  Description of Artificial Sequence: Synthetic oligonucleotide
ucacgccccggccuugagu

SEQ ID NO: 2746987 - RNA, 19 nt, Artificial Sequence
  Description of Artificial Sequence: Synthetic oligonucleotide
cugcgaugggcccgacugg

SEQ ID NO: 2746988 - RNA, 19 nt, Artificial Sequence
  Description of Artificial Sequence: Synthetic oligonucleotide
gagggcagggguugcuaca

SEQ ID NO: 2746989 - RNA, 19 nt, Artificial Sequence
  Description of Artificial Sequence: Synthetic oligonucleotide
ggcccgacuggaccuaggg

SEQ ID NO: 2746990 - RNA, 19 nt, Artificial Sequence
  Description of Artificial Sequence: Synthetic oligonucleotide
acccggaccggggaggaag

SEQ ID NO: 2746991 - RNA, 19 nt, Artificial Sequence
  Description of Artificial Sequence: Synthetic oligonucleotide
accccuugggcgaugggug

SEQ ID NO: 2746992 - RNA, 19 nt, Artificial Sequence
  Description of Artificial Sequence: Synthetic oligonucleotide
gcuggugaaaagaauggaa

SEQ ID NO: 2746993 - RNA, 19 nt, Artificial Sequence
  Description of Artificial Sequence: Synthetic oligonucleotide
ggggcgaggcuucuauugc

SEQ ID NO: 2746994 - RNA, 19 nt, Artificial Sequence
  Description of Artificial Sequence: Synthetic oligonucleotide
ggcaaaugguguggggcgg

SEQ ID NO: 2746995 - RNA, 19 nt, Artificial Sequence
  Description of Artificial Sequence: Synthetic oligonucleotide
ugcggaaggcgaggcgggg

SEQ ID NO: 2746996 - RNA, 19 nt, Artificial Sequence
  Description of Artificial Sequence: Synthetic oligonucleotide
gcaagggaagggucuauga

SEQ ID NO: 2746997 - RNA, 19 nt, Artificial Sequence
  Description of Artificial Sequence: Synthetic oligonucleotide
caucuccuugguccccacc

SEQ ID NO: 2746998 - RNA, 19 nt, Artificial Sequence
  Description of Artificial Sequence: Synthetic oligonucleotide
gcuacauugucaagcagaa

SEQ ID NO: 2746999 - RNA, 19 nt, Artificial Sequence
  Description of Artificial Sequence: Synthetic oligonucleotide
ccaagugccugagaugccc

SEQ ID NO: 2747000 - RNA, 19 nt, Artificial Sequence
  Description of Artificial Sequence: Synthetic oligonucleotide
agacugcagacggcaaaug

SEQ ID NO: 2747001 - RNA, 19 nt, Artificial Sequence
  Description of Artificial Sequence: Synthetic oligonucleotide
uggugcaguggagggguca

SEQ ID NO: 2747002 - RNA, 19 nt, Artificial Sequence
  Description of Artificial Sequence: Synthetic oligonucleotide
ugcucacaguuuugcggaa

SEQ ID NO: 2747003 - RNA, 19 nt, Artificial Sequence
  Description of Artificial Sequence: Synthetic oligonucleotide
gagguugcaggcgguaaaa

SEQ ID NO: 2747004 - RNA, 19 nt, Artificial Sequence
  Description of Artificial Sequence: Synthetic oligonucleotide
accggggaggaagaaggca

SEQ ID NO: 2747005 - RNA, 19 nt, Artificial Sequence
  Description of Artificial Sequence: Synthetic oligonucleotide
gcaggcgguaaaaccaaag

SEQ ID NO: 2747006 - RNA, 19 nt, Artificial Sequence
  Description of Artificial Sequence: Synthetic oligonucleotide
agaguccauggggagggga

SEQ ID NO: 2747007 - RNA, 19 nt, Artificial Sequence
  Description of Artificial Sequence: Synthetic oligonucleotide
aggcggggugggcuuggac

SEQ ID NO: 2747008 - RNA, 19 nt, Artificial Sequence
  Description of Artificial Sequence: Synthetic oligonucleotide
gugcggggcgggcacagug

SEQ ID NO: 2747009 - RNA, 19 nt, Artificial Sequence
  Description of Artificial Sequence: Synthetic oligonucleotide
gggauuaggucuugggacu

SEQ ID NO: 2747010 - RNA, 19 nt, Artificial Sequence
  Description of Artificial Sequence: Synthetic oligonucleotide
ggauuaggucuugggacug

SEQ ID NO: 2747011 - RNA, 19 nt, Artificial Sequence
  Description of Artificial Sequence: Synthetic oligonucleotide
accuagggauggggcaugg

SEQ ID NO: 2747012 - RNA, 19 nt, Artificial Sequence
  Description of Artificial Sequence: Synthetic oligonucleotide
gaggaggcagggauuaggu

SEQ ID NO: 2747013 - RNA, 19 nt, Artificial Sequence
  Description of Artificial Sequence: Synthetic oligonucleotide
cuugggcgaugggugcugg

SEQ ID NO: 2747014 - RNA, 19 nt, Artificial Sequence
  Description of Artificial Sequence: Synthetic oligonucleotide
uccauggggaggggagggc

SEQ ID NO: 2747015 - RNA, 19 nt, Artificial Sequence
  Description of Artificial Sequence: Synthetic oligonucleotide
cggcaaaugguguggggcg

SEQ ID NO: 2747016 - RNA, 19 nt, Artificial Sequence
  Description of Artificial Sequence: Synthetic oligonucleotide
gaccggggaggaagaaggc

SEQ ID NO: 2747017 - RNA, 19 nt, Artificial Sequence
  Description of Artificial Sequence: Synthetic oligonucleotide
ggaacccggaccggggagg

SEQ ID NO: 2747018 - RNA, 19 nt, Artificial Sequence
  Description of Artificial Sequence: Synthetic oligonucleotide
ccuugaguggugcagugga

SEQ ID NO: 2747019 - RNA, 19 nt, Artificial Sequence
  Description of Artificial Sequence: Synthetic oligonucleotide
guccccacccaagugccug

SEQ ID NO: 2747020 - RNA, 19 nt, Artificial Sequence
  Description of Artificial Sequence: Synthetic oligonucleotide
uccccacccaagugccuga

SEQ ID NO: 2747021 - RNA, 19 nt, Artificial Sequence
  Description of Artificial Sequence: Synthetic oligonucleotide
gaccuagggauggggcaug

SEQ ID NO: 2747022 - RNA, 19 nt, Artificial Sequence
  Description of Artificial Sequence: Synthetic oligonucleotide
agggucuaugagggcaucu

SEQ ID NO: 2747023 - RNA, 19 nt, Artificial Sequence
  Description of Artificial Sequence: Synthetic oligonucleotide
gucuaugagggcaucuccu

SEQ ID NO: 2747024 - RNA, 19 nt, Artificial Sequence
  Description of Artificial Sequence: Synthetic oligonucleotide
gcuggaagggcugaccaca

SEQ ID NO: 2747025 - RNA, 19 nt, Artificial Sequence
  Description of Artificial Sequence: Synthetic oligonucleotide
ggcgggcacagugagguug

SEQ ID NO: 2747026 - RNA, 19 nt, Artificial Sequence
  Description of Artificial Sequence: Synthetic oligonucleotide
gcaaaugguguggggcggg

SEQ ID NO: 2747027 - RNA, 19 nt, Artificial Sequence
  Description of Artificial Sequence: Synthetic oligonucleotide
cccuugguaccccuugggc

SEQ ID NO: 2747028 - RNA, 19 nt, Artificial Sequence
  Description of Artificial Sequence: Synthetic oligonucleotide
ggugcaguggaggggucag

SEQ ID NO: 2747029 - RNA, 19 nt, Artificial Sequence
  Description of Artificial Sequence: Synthetic oligonucleotide
ucaggggaggaggcaggga

SEQ ID NO: 2747030 - RNA, 19 nt, Artificial Sequence
  Description of Artificial Sequence: Synthetic oligonucleotide
gguaccccuugggcgaugg

SEQ ID NO: 2747031 - RNA, 19 nt, Artificial Sequence
  Description of Artificial Sequence: Synthetic oligonucleotide
gggucaggggaggaggcag

SEQ ID NO: 2747032 - RNA, 19 nt, Artificial Sequence
  Description of Artificial Sequence: Synthetic oligonucleotide
ggagacugcagacggcaaa

SEQ ID NO: 2747033 - RNA, 19 nt, Artificial Sequence
  Description of Artificial Sequence: Synthetic oligonucleotide
gagacugcagacggcaaau

SEQ ID NO: 2747034 - RNA, 19 nt, Artificial Sequence
  Description of Artificial Sequence: Synthetic oligonucleotide
cauggggaggggagggcca

SEQ ID NO: 2747035 - RNA, 19 nt, Artificial Sequence
  Description of Artificial Sequence: Synthetic oligonucleotide
auggggaggggagggccag

SEQ ID NO: 2747036 - RNA, 19 nt, Artificial Sequence
  Description of Artificial Sequence: Synthetic oligonucleotide
guaccccuugggcgauggg

SEQ ID NO: 2747037 - RNA, 19 nt, Artificial Sequence
  Description of Artificial Sequence: Synthetic oligonucleotide
agggcagggguugcuacau

SEQ ID NO: 2747038 - RNA, 19 nt, Artificial Sequence
  Description of Artificial Sequence: Synthetic oligonucleotide
ggucaggggaggaggcagg

SEQ ID NO: 2747039 - RNA, 19 nt, Artificial Sequence
  Description of Artificial Sequence: Synthetic oligonucleotide
ggcaagggaagggucuaug

SEQ ID NO: 2747040 - RNA, 19 nt, Artificial Sequence
  Description of Artificial Sequence: Synthetic oligonucleotide
agugagguugcaggcggua

SEQ ID NO: 2747041 - RNA, 19 nt, Artificial Sequence
  Description of Artificial Sequence: Synthetic oligonucleotide
uugggcgaugggugcuggu

SEQ ID NO: 2747042 - RNA, 19 nt, Artificial Sequence
  Description of Artificial Sequence: Synthetic oligonucleotide
ggggccgguccccaucccg

SEQ ID NO: 2747043 - RNA, 19 nt, Artificial Sequence
  Description of Artificial Sequence: Synthetic oligonucleotide
ggggagacugcagacggca

SEQ ID NO: 2747044 - RNA, 19 nt, Artificial Sequence
  Description of Artificial Sequence: Synthetic oligonucleotide
gcucacaguuuugcggaag

SEQ ID NO: 2747045 - RNA, 19 nt, Artificial Sequence
  Description of Artificial Sequence: Synthetic oligonucleotide
ggcagggauuaggucuugg

SEQ ID NO: 2747046 - RNA, 19 nt, Artificial Sequence
  Description of Artificial Sequence: Synthetic oligonucleotide
ccgacuggaccuagggaug

SEQ ID NO: 2747047 - RNA, 19 nt, Artificial Sequence
  Description of Artificial Sequence: Synthetic oligonucleotide
ggccuugaguggugcagug

SEQ ID NO: 2747048 - RNA, 19 nt, Artificial Sequence
  Description of Artificial Sequence: Synthetic oligonucleotide
gccuugaguggugcagugg

SEQ ID NO: 2747049 - RNA, 19 nt, Artificial Sequence
  Description of Artificial Sequence: Synthetic oligonucleotide
uggugcggggcgggcacag

SEQ ID NO: 2747050 - RNA, 19 nt, Artificial Sequence
  Description of Artificial Sequence: Synthetic oligonucleotide
guguggggcggggugggcc

SEQ ID NO: 2747051 - RNA, 19 nt, Artificial Sequence
  Description of Artificial Sequence: Synthetic oligonucleotide
gggaggggagggccagugg

SEQ ID NO: 2747052 - RNA, 19 nt, Artificial Sequence
  Description of Artificial Sequence: Synthetic oligonucleotide
ggguugcuacauugucaag

SEQ ID NO: 2747053 - RNA, 19 nt, Artificial Sequence
  Description of Artificial Sequence: Synthetic oligonucleotide
acgccccggccuugagugg

SEQ ID NO: 2747054 - RNA, 19 nt, Artificial Sequence
  Description of Artificial Sequence: Synthetic oligonucleotide
uggaggggucaggggagga

SEQ ID NO: 2747055 - RNA, 19 nt, Artificial Sequence
  Description of Artificial Sequence: Synthetic oligonucleotide
gaagggucuaugagggcau

SEQ ID NO: 2747056 - RNA, 19 nt, Artificial Sequence
  Description of Artificial Sequence: Synthetic oligonucleotide
caucccgggucggcgcugg

SEQ ID NO: 2747057 - RNA, 19 nt, Artificial Sequence
  Description of Artificial Sequence: Synthetic oligonucleotide
ucggcgcuggaagggcuga

SEQ ID NO: 2747058 - RNA, 19 nt, Artificial Sequence
  Description of Artificial Sequence: Synthetic oligonucleotide
gggucuaugagggcaucuc

SEQ ID NO: 2747059 - RNA, 19 nt, Artificial Sequence
  Description of Artificial Sequence: Synthetic oligonucleotide
gugcaguggaggggucagg

SEQ ID NO: 2747060 - RNA, 19 nt, Artificial Sequence
  Description of Artificial Sequence: Synthetic oligonucleotide
ggaggggucaggggaggag

SEQ ID NO: 2747061 - RNA, 19 nt, Artificial Sequence
  Description of Artificial Sequence: Synthetic oligonucleotide
ggaaggcgaggcggggugg

SEQ ID NO: 2747062 - RNA, 19 nt, Artificial Sequence
  Description of Artificial Sequence: Synthetic oligonucleotide
agggcugaccacacagaaa

SEQ ID NO: 2747063 - RNA, 19 nt, Artificial Sequence
  Description of Artificial Sequence: Synthetic oligonucleotide
gcuuggaccggacaccccu

SEQ ID NO: 2747064 - RNA, 19 nt, Artificial Sequence
  Description of Artificial Sequence: Synthetic oligonucleotide
ugggcccgacuggaccuag

SEQ ID NO: 2747065 - RNA, 19 nt, Artificial Sequence
  Description of Artificial Sequence: Synthetic oligonucleotide
gaacccggaccggggagga

SEQ ID NO: 2747066 - RNA, 19 nt, Artificial Sequence
  Description of Artificial Sequence: Synthetic oligonucleotide
ccccuugguaccccuuggg

SEQ ID NO: 2747067 - RNA, 19 nt, Artificial Sequence
  Description of Artificial Sequence: Synthetic oligonucleotide
gugagguugcaggcgguaa

SEQ ID NO: 2747068 - RNA, 19 nt, Artificial Sequence
  Description of Artificial Sequence: Synthetic oligonucleotide
cgaugggcccgacuggacc

SEQ ID NO: 2747069 - RNA, 19 nt, Artificial Sequence
  Description of Artificial Sequence: Synthetic oligonucleotide
gcgcuggaagggcugacca

SEQ ID NO: 2747070 - RNA, 19 nt, Artificial Sequence
  Description of Artificial Sequence: Synthetic oligonucleotide
gucggcgcuggaagggcug

SEQ ID NO: 2747071 - RNA, 19 nt, Artificial Sequence
  Description of Artificial Sequence: Synthetic oligonucleotide
cccgggucggcgcuggaag

SEQ ID NO: 2747072 - RNA, 19 nt, Artificial Sequence
  Description of Artificial Sequence: Synthetic oligonucleotide
gucuugggacugggagggg

SEQ ID NO: 2747073 - RNA, 19 nt, Artificial Sequence
  Description of Artificial Sequence: Synthetic oligonucleotide
accacagaagggacagguu

SEQ ID NO: 2747074 - RNA, 19 nt, Artificial Sequence
  Description of Artificial Sequence: Synthetic oligonucleotide
ccauggggaggggagggcc

SEQ ID NO: 2747075 - RNA, 19 nt, Artificial Sequence
  Description of Artificial Sequence: Synthetic oligonucleotide
ccggggaggaagaaggcaa

SEQ ID NO: 2747076 - RNA, 19 nt, Artificial Sequence
  Description of Artificial Sequence: Synthetic oligonucleotide
uugguaccccuugggcgau

SEQ ID NO: 2747077 - RNA, 19 nt, Artificial Sequence
  Description of Artificial Sequence: Synthetic oligonucleotide
ggcugaccacacagaaacc

SEQ ID NO: 2747078 - RNA, 19 nt, Artificial Sequence
  Description of Artificial Sequence: Synthetic oligonucleotide
gggccgguccccaucccgg

SEQ ID NO: 2747079 - RNA, 19 nt, Artificial Sequence
  Description of Artificial Sequence: Synthetic oligonucleotide
cuacauugucaagcagaaa

SEQ ID NO: 2747080 - RNA, 19 nt, Artificial Sequence
  Description of Artificial Sequence: Synthetic oligonucleotide
ggccgguccccaucccggg

SEQ ID NO: 2747081 - RNA, 19 nt, Artificial Sequence
  Description of Artificial Sequence: Synthetic oligonucleotide
aggcgaggcggggugggcu

SEQ ID NO: 2747082 - RNA, 19 nt, Artificial Sequence
  Description of Artificial Sequence: Synthetic oligonucleotide
gucacgccccggccuugag

SEQ ID NO: 2747083 - RNA, 19 nt, Artificial Sequence
  Description of Artificial Sequence: Synthetic oligonucleotide
gggcacagugagguugcag

SEQ ID NO: 2747084 - RNA, 19 nt, Artificial Sequence
  Description of Artificial Sequence: Synthetic oligonucleotide
gaggcagggauuaggucuu

SEQ ID NO: 2747085 - RNA, 19 nt, Artificial Sequence
  Description of Artificial Sequence: Synthetic oligonucleotide
gcggggcgggcacagugag

SEQ ID NO: 2747086 - RNA, 19 nt, Artificial Sequence
  Description of Artificial Sequence: Synthetic oligonucleotide
cccgacuggaccuagggau

SEQ ID NO: 2747087 - RNA, 19 nt, Artificial Sequence
  Description of Artificial Sequence: Synthetic oligonucleotide
ggcgcuggaagggcugacc

SEQ ID NO: 2747088 - RNA, 19 nt, Artificial Sequence
  Description of Artificial Sequence: Synthetic oligonucleotide
ggggcauggugcggggcgg

SEQ ID NO: 2747089 - RNA, 19 nt, Artificial Sequence
  Description of Artificial Sequence: Synthetic oligonucleotide
ccgggucggcgcuggaagg

SEQ ID NO: 2747090 - RNA, 19 nt, Artificial Sequence
  Description of Artificial Sequence: Synthetic oligonucleotide
ggggcgggcacagugaggu

SEQ ID NO: 2747091 - RNA, 19 nt, Artificial Sequence
  Description of Artificial Sequence: Synthetic oligonucleotide
ccccuugggcgaugggugc

SEQ ID NO: 2747092 - RNA, 19 nt, Artificial Sequence
  Description of Artificial Sequence: Synthetic oligonucleotide
cgacuggaccuagggaugg

SEQ ID NO: 2747093 - RNA, 19 nt, Artificial Sequence
  Description of Artificial Sequence: Synthetic oligonucleotide
gcgggcacagugagguugc

SEQ ID NO: 2747094 - RNA, 19 nt, Artificial Sequence
  Description of Artificial Sequence: Synthetic oligonucleotide
gggauggggcauggugcgg

SEQ ID NO: 2747095 - RNA, 19 nt, Artificial Sequence
  Description of Artificial Sequence: Synthetic oligonucleotide
ucccgggucggcgcuggaa

SEQ ID NO: 2747096 - RNA, 19 nt, Artificial Sequence
  Description of Artificial Sequence: Synthetic oligonucleotide
ggcgaugggugcuggugaa

SEQ ID NO: 2747097 - RNA, 19 nt, Artificial Sequence
  Description of Artificial Sequence: Synthetic oligonucleotide
guccccaucccgggucggc

SEQ ID NO: 2747098 - RNA, 19 nt, Artificial Sequence
  Description of Artificial Sequence: Synthetic oligonucleotide
aggcaagggaagggucuau

SEQ ID NO: 2747099 - RNA, 19 nt, Artificial Sequence
  Description of Artificial Sequence: Synthetic oligonucleotide
ccggccuugaguggugcag

SEQ ID NO: 2747100 - RNA, 19 nt, Artificial Sequence
  Description of Artificial Sequence: Synthetic oligonucleotide
aggcagggauuaggucuug

SEQ ID NO: 2747101 - RNA, 19 nt, Artificial Sequence
  Description of Artificial Sequence: Synthetic oligonucleotide
ugguaccccuugggcgaug

SEQ ID NO: 2747102 - RNA, 19 nt, Artificial Sequence
  Description of Artificial Sequence: Synthetic oligonucleotide
ggcaucuccuuggucccca

SEQ ID NO: 2747103 - RNA, 19 nt, Artificial Sequence
  Description of Artificial Sequence: Synthetic oligonucleotide
ggggaggaggcagggauua

SEQ ID NO: 2747104 - RNA, 19 nt, Artificial Sequence
  Description of Artificial Sequence: Synthetic oligonucleotide
gggucggcgcuggaagggc

SEQ ID NO: 2747105 - RNA, 19 nt, Artificial Sequence
  Description of Artificial Sequence: Synthetic oligonucleotide
gcccgacuggaccuaggga

SEQ ID NO: 2747106 - RNA, 19 nt, Artificial Sequence
  Description of Artificial Sequence: Synthetic oligonucleotide
ccacccaagugccugagau

SEQ ID NO: 2747107 - RNA, 19 nt, Artificial Sequence
  Description of Artificial Sequence: Synthetic oligonucleotide
gggaggaggcagggauuag

SEQ ID NO: 2747108 - RNA, 19 nt, Artificial Sequence
  Description of Artificial Sequence: Synthetic oligonucleotide
gggcgaggcuucuauugcu

SEQ ID NO: 2747109 - RNA, 19 nt, Artificial Sequence
  Description of Artificial Sequence: Synthetic oligonucleotide
aacccggaccggggaggaa

SEQ ID NO: 2747110 - RNA, 19 nt, Artificial Sequence
  Description of Artificial Sequence: Synthetic oligonucleotide
ccccaucccgggucggcgc

SEQ ID NO: 2747111 - RNA, 19 nt, Artificial Sequence
  Description of Artificial Sequence: Synthetic oligonucleotide
guggggcggggugggccgg

SEQ ID NO: 2747112 - RNA, 19 nt, Artificial Sequence
  Description of Artificial Sequence: Synthetic oligonucleotide
cggaaggcgaggcggggug

SEQ ID NO: 2747113 - RNA, 19 nt, Artificial Sequence
  Description of Artificial Sequence: Synthetic oligonucleotide
auggugcggggcgggcaca

SEQ ID NO: 2747114 - RNA, 19 nt, Artificial Sequence
  Description of Artificial Sequence: Synthetic oligonucleotide
gcaucuccuugguccccac

SEQ ID NO: 2747115 - RNA, 19 nt, Artificial Sequence
  Description of Artificial Sequence: Synthetic oligonucleotide
cgcuggaagggcugaccac

SEQ ID NO: 2747116 - RNA, 19 nt, Artificial Sequence
  Description of Artificial Sequence: Synthetic oligonucleotide
ccgguccccaucccggguc

SEQ ID NO: 2747117 - RNA, 19 nt, Artificial Sequence
  Description of Artificial Sequence: Synthetic oligonucleotide
gaggagggcagggguugcu

SEQ ID NO: 2747118 - RNA, 19 nt, Artificial Sequence
  Description of Artificial Sequence: Synthetic oligonucleotide
ggcuuggaccggacacccc

SEQ ID NO: 2747119 - RNA, 19 nt, Artificial Sequence
  Description of Artificial Sequence: Synthetic oligonucleotide
gguccccaucccgggucgg

SEQ ID NO: 2747120 - RNA, 19 nt, Artificial Sequence
  Description of Artificial Sequence: Synthetic oligonucleotide
cuuggaccggacaccccuu

SEQ ID NO: 2747121 - RNA, 19 nt, Artificial Sequence
  Description of Artificial Sequence: Synthetic oligonucleotide
ggaccuagggauggggcau

SEQ ID NO: 2747122 - RNA, 19 nt, Artificial Sequence
  Description of Artificial Sequence: Synthetic oligonucleotide
ggcauggugcggggcgggc

SEQ ID NO: 2747123 - RNA, 19 nt, Artificial Sequence
  Description of Artificial Sequence: Synthetic oligonucleotide
gcagggguugcuacauugu

SEQ ID NO: 2747124 - RNA, 19 nt, Artificial Sequence
  Description of Artificial Sequence: Synthetic oligonucleotide
ccuugggcgaugggugcug

SEQ ID NO: 2747125 - RNA, 19 nt, Artificial Sequence
  Description of Artificial Sequence: Synthetic oligonucleotide
augggcccgacuggaccua

SEQ ID NO: 2747126 - RNA, 19 nt, Artificial Sequence
  Description of Artificial Sequence: Synthetic oligonucleotide
cggaccggggaggaagaag

SEQ ID NO: 2747127 - RNA, 19 nt, Artificial Sequence
  Description of Artificial Sequence: Synthetic oligonucleotide
cgggucggcgcuggaaggg

SEQ ID NO: 2747128 - RNA, 19 nt, Artificial Sequence
  Description of Artificial Sequence: Synthetic oligonucleotide
guggugcaguggagggguc

SEQ ID NO: 2747129 - RNA, 19 nt, Artificial Sequence
  Description of Artificial Sequence: Synthetic oligonucleotide
ggggucaggggaggaggca

SEQ ID NO: 2747130 - RNA, 19 nt, Artificial Sequence
  Description of Artificial Sequence: Synthetic oligonucleotide
cgguccccaucccgggucg

SEQ ID NO: 2747131 - RNA, 19 nt, Artificial Sequence
  Description of Artificial Sequence: Synthetic oligonucleotide
gggcccgacuggaccuagg

SEQ ID NO: 2747132 - RNA, 19 nt, Artificial Sequence
  Description of Artificial Sequence: Synthetic oligonucleotide
aucccgggucggcgcugga

SEQ ID NO: 2747133 - RNA, 19 nt, Artificial Sequence
  Description of Artificial Sequence: Synthetic oligonucleotide
gcauggugcggggcgggca

SEQ ID NO: 2747134 - RNA, 19 nt, Artificial Sequence
  Description of Artificial Sequence: Synthetic oligonucleotide
ccuugguccccacccaagu

SEQ ID NO: 2747135 - RNA, 19 nt, Artificial Sequence
  Description of Artificial Sequence: Synthetic oligonucleotide
cgaugggugcuggugaaaa

SEQ ID NO: 2747136 - RNA, 19 nt, Artificial Sequence
  Description of Artificial Sequence: Synthetic oligonucleotide
gaggcggggugggcuugga

SEQ ID NO: 2747137 - RNA, 19 nt, Artificial Sequence
  Description of Artificial Sequence: Synthetic oligonucleotide
gggagacugcagacggcaa

SEQ ID NO: 2747138 - RNA, 19 nt, Artificial Sequence
  Description of Artificial Sequence: Synthetic oligonucleotide
gcgaggcuucuauugcuuu

SEQ ID NO: 2747139 - RNA, 19 nt, Artificial Sequence
  Description of Artificial Sequence: Synthetic oligonucleotide
gcgaugggcccgacuggac

SEQ ID NO: 2747140 - RNA, 19 nt, Artificial Sequence
  Description of Artificial Sequence: Synthetic oligonucleotide
gggugcuggugaaaagaau

SEQ ID NO: 2747141 - RNA, 19 nt, Artificial Sequence
  Description of Artificial Sequence: Synthetic oligonucleotide
ggggugggcuuggaccgga

SEQ ID NO: 2747142 - RNA, 19 nt, Artificial Sequence
  Description of Artificial Sequence: Synthetic oligonucleotide
cccggaccggggaggaaga

SEQ ID NO: 2747143 - RNA, 19 nt, Artificial Sequence
  Description of Artificial Sequence: Synthetic oligonucleotide
ggucacgccccggccuuga

SEQ ID NO: 2747144 - RNA, 19 nt, Artificial Sequence
  Description of Artificial Sequence: Synthetic oligonucleotide
ggcgaggcuucuauugcuu

SEQ ID NO: 2747145 - RNA, 19 nt, Artificial Sequence
  Description of Artificial Sequence: Synthetic oligonucleotide
ccccacccaagugccugag

SEQ ID NO: 2747146 - RNA, 19 nt, Artificial Sequence
  Description of Artificial Sequence: Synthetic oligonucleotide
gcgaugggugcuggugaaa

SEQ ID NO: 2747147 - RNA, 19 nt, Artificial Sequence
  Description of Artificial Sequence: Synthetic oligonucleotide
gcgaggcggggugggcuug

SEQ ID NO: 2747148 - RNA, 19 nt, Artificial Sequence
  Description of Artificial Sequence: Synthetic oligonucleotide
gggucacgccccggccuug

SEQ ID NO: 2747149 - RNA, 19 nt, Artificial Sequence
  Description of Artificial Sequence: Synthetic oligonucleotide
ccccggccuugaguggugc

SEQ ID NO: 2747150 - RNA, 19 nt, Artificial Sequence
  Description of Artificial Sequence: Synthetic oligonucleotide
gggugggcuuggaccggac

SEQ ID NO: 2747151 - RNA, 19 nt, Artificial Sequence
  Description of Artificial Sequence: Synthetic oligonucleotide
cccacccaagugccugaga

SEQ ID NO: 2747152 - RNA, 19 nt, Artificial Sequence
  Description of Artificial Sequence: Synthetic oligonucleotide
ggucggcgcuggaagggcu

SEQ ID NO: 2747153 - RNA, 19 nt, Artificial Sequence
  Description of Artificial Sequence: Synthetic oligonucleotide
ggggucacgccccggccuu

SEQ ID NO: 2747154 - RNA, 19 nt, Artificial Sequence
  Description of Artificial Sequence: Synthetic oligonucleotide
cgaggcggggugggcuugg

SEQ ID NO: 2747155 - RNA, 19 nt, Artificial Sequence
  Description of Artificial Sequence: Synthetic oligonucleotide
cccggccuugaguggugca

SEQ ID NO: 2747156 - RNA, 19 nt, Artificial Sequence
  Description of Artificial Sequence: Synthetic oligonucleotide
ggcgaggcggggugggcuu

SEQ ID NO: 2747157 - RNA, 19 nt, Artificial Sequence
  Description of Artificial Sequence: Synthetic oligonucleotide
gccccggccuugaguggug

SEQ ID NO: 2747158 - RNA, 19 nt, Artificial Sequence
  Description of Artificial Sequence: Synthetic oligonucleotide
cgaggcuucuauugcuuuu

SEQ ID NO: 2747159 - RNA, 19 nt, Artificial Sequence
  Description of Artificial Sequence: Synthetic oligonucleotide
ccaucccgggucggcgcug

SEQ ID NO: 2747160 - RNA, 19 nt, Artificial Sequence
  Description of Artificial Sequence: Synthetic oligonucleotide
gcggaaggcgaggcggggu

SEQ ID NO: 2747161 - RNA, 19 nt, Artificial Sequence
  Description of Artificial Sequence: Synthetic oligonucleotide
cggggugggcuuggaccgg

SEQ ID NO: 2747162 - RNA, 19 nt, Artificial Sequence
  Description of Artificial Sequence: Synthetic oligonucleotide
gccgguccccaucccgggu

SEQ ID NO: 2747163 - RNA, 19 nt, Artificial Sequence
  Description of Artificial Sequence: Synthetic oligonucleotide
gguccccacccaagugccu

SEQ ID NO: 2747164 - RNA, 19 nt, Artificial Sequence
  Description of Artificial Sequence: Synthetic oligonucleotide
gggcagggguugcuacauu

SEQ ID NO: 2747165 - RNA, 19 nt, Artificial Sequence
  Description of Artificial Sequence: Synthetic oligonucleotide
cccaucccgggucggcgcu

SEQ ID NO: 2747166 - RNA, 19 nt, Artificial Sequence
  Description of Artificial Sequence: Synthetic oligonucleotide
cccuugggcgaugggugcu

SEQ ID NO: 2747167 - RNA, 19 nt, Artificial Sequence
  Description of Artificial Sequence: Synthetic oligonucleotide
ccuagggauggggcauggu

SEQ ID NO: 2747168 - RNA, 19 nt, Artificial Sequence
  Description of Artificial Sequence: Synthetic oligonucleotide
ggugcggggcgggcacagu

SEQ ID NO: 2747169 - RNA, 19 nt, Artificial Sequence
  Description of Artificial Sequence: Synthetic oligonucleotide
cggcgcuggaagggcugac

SEQ ID NO: 2747170 - RNA, 19 nt, Artificial Sequence
  Description of Artificial Sequence: Synthetic oligonucleotide
cggccuugaguggugcagu

SEQ ID NO: 2747171 - RNA, 19 nt, Artificial Sequence
  Description of Artificial Sequence: Synthetic oligonucleotide
ccggaccggggaggaagaa

SEQ ID NO: 2747172 - RNA, 19 nt, Artificial Sequence
  Description of Artificial Sequence: Synthetic oligonucleotide
cccugcgaugggcccgacu

SEQ ID NO: 2747173 - RNA, 19 nt, Artificial Sequence
  Description of Artificial Sequence: Synthetic oligonucleotide
gggcgggcacagugagguu

SEQ ID NO: 2747174 - RNA, 19 nt, Artificial Sequence
  Description of Artificial Sequence: Synthetic oligonucleotide
cgccccggccuugaguggu

SEQ ID NO: 2747175 - RNA, 19 nt, Artificial Sequence
  Description of Artificial Sequence: Synthetic oligonucleotide
cgggcacagugagguugca

SEQ ID NO: 2747176 - RNA, 19 nt, Artificial Sequence
  Description of Artificial Sequence: Synthetic oligonucleotide
ccccugcgaugggcccgac

SEQ ID NO: 2747177 - RNA, 19 nt, Artificial Sequence
  Description of Artificial Sequence: Synthetic oligonucleotide
  modified_base (1)..(1): a, c, u, g, unknown or other
nuuugagaggagggcaggg

SEQ ID NO: 2747178 - RNA, 19 nt, Artificial Sequence
  Description of Artificial Sequence: Synthetic oligonucleotide
agguaguucagauaggucc

SEQ ID NO: 2747179 - RNA, 19 nt, Artificial Sequence
  Description of Artificial Sequence: Synthetic oligonucleotide
uaaguuuucugaauggagg

SEQ ID NO: 2747180 - RNA, 19 nt, Artificial Sequence
  Description of Artificial Sequence: Synthetic oligonucleotide
aaugcugcccagcaggccc

SEQ ID NO: 2747181 - RNA, 19 nt, Artificial Sequence
  Description of Artificial Sequence: Synthetic oligonucleotide
aaguuuucugaauggaggg

SEQ ID NO: 2747182 - RNA, 19 nt, Artificial Sequence
  Description of Artificial Sequence: Synthetic oligonucleotide
auugaagucaggcucauug

SEQ ID NO: 2747183 - RNA, 19 nt, Artificial Sequence
  Description of Artificial Sequence: Synthetic oligonucleotide
uccugugcgauuaagagcu

SEQ ID NO: 2747184 - RNA, 19 nt, Artificial Sequence
  Description of Artificial Sequence: Synthetic oligonucleotide
cacacuuccaaguugacag

SEQ ID NO: 2747185 - RNA, 19 nt, Artificial Sequence
  Description of Artificial Sequence: Synthetic oligonucleotide
auaguucugggucagccgc

SEQ ID NO: 2747186 - RNA, 19 nt, Artificial Sequence
  Description of Artificial Sequence: Synthetic oligonucleotide
gaagucauccaucuucugg

SEQ ID NO: 2747187 - RNA, 19 nt, Artificial Sequence
  Description of Artificial Sequence: Synthetic oligonucleotide
ugcuguggcagcuugacgg

SEQ ID NO: 2747188 - RNA, 19 nt, Artificial Sequence
  Description of Artificial Sequence: Synthetic oligonucleotide
ucauaaguuuucugaaugg

SEQ ID NO: 2747189 - RNA, 19 nt, Artificial Sequence
  Description of Artificial Sequence: Synthetic oligonucleotide
acagaaaugggccaggcug

SEQ ID NO: 2747190 - RNA, 19 nt, Artificial Sequence
  Description of Artificial Sequence: Synthetic oligonucleotide
acugguacagaaaugggcc

SEQ ID NO: 2747191 - RNA, 19 nt, Artificial Sequence
  Description of Artificial Sequence: Synthetic oligonucleotide
gagacugguacagaaaugg

SEQ ID NO: 2747192 - RNA, 19 nt, Artificial Sequence
  Description of Artificial Sequence: Synthetic oligonucleotide
  modified_base (14)..(14): a, c, u, g, unknown or other
uccuucagcagccngaagu

SEQ ID NO: 2747193 - RNA, 19 nt, Artificial Sequence
  Description of Artificial Sequence: Synthetic oligonucleotide
acgcaaguaacacaggagg

SEQ ID NO: 2747194 - RNA, 19 nt, Artificial Sequence
  Description of Artificial Sequence: Synthetic oligonucleotide
cauaggcaagcuaacaucc

SEQ ID NO: 2747195 - RNA, 19 nt, Artificial Sequence
  Description of Artificial Sequence: Synthetic oligonucleotide
aagucauccaucuucugga

SEQ ID NO: 2747196 - RNA, 19 nt, Artificial Sequence
  Description of Artificial Sequence: Synthetic oligonucleotide
aaaugggccaggcugcguc

SEQ ID NO: 2747197 - RNA, 19 nt, Artificial Sequence
  Description of Artificial Sequence: Synthetic oligonucleotide
aagucaggcucauuggaag

SEQ ID NO: 2747198 - RNA, 19 nt, Artificial Sequence
  Description of Artificial Sequence: Synthetic oligonucleotide
uaagagcuggcacugcagg

SEQ ID NO: 2747199 - RNA, 19 nt, Artificial Sequence
  Description of Artificial Sequence: Synthetic oligonucleotide
ucuccugugcgauuaagag

SEQ ID NO: 2747200 - RNA, 19 nt, Artificial Sequence
  Description of Artificial Sequence: Synthetic oligonucleotide
gucauaaguuuucugaaug

SEQ ID NO: 2747201 - RNA, 19 nt, Artificial Sequence
  Description of Artificial Sequence: Synthetic oligonucleotide
uggaggaagucacuguggg

SEQ ID NO: 2747202 - RNA, 19 nt, Artificial Sequence
  Description of Artificial Sequence: Synthetic oligonucleotide
ugaacgcacagccaggucu

SEQ ID NO: 2747203 - RNA, 19 nt, Artificial Sequence
  Description of Artificial Sequence: Synthetic oligonucleotide
ucauccaucuucuggagga

SEQ ID NO: 2747204 - RNA, 19 nt, Artificial Sequence
  Description of Artificial Sequence: Synthetic oligonucleotide
gaggucauaaguuuucuga

SEQ ID NO: 2747205 - RNA, 19 nt, Artificial Sequence
  Description of Artificial Sequence: Synthetic oligonucleotide
uugucauugaggcuucgcc

SEQ ID NO: 2747206 - RNA, 19 nt, Artificial Sequence
  Description of Artificial Sequence: Synthetic oligonucleotide
cuuggcugaacgcacagcc

SEQ ID NO: 2747207 - RNA, 19 nt, Artificial Sequence
  Description of Artificial Sequence: Synthetic oligonucleotide
ucuggaggaagucacugug

SEQ ID NO: 2747208 - RNA, 19 nt, Artificial Sequence
  Description of Artificial Sequence: Synthetic oligonucleotide
ucagauaggucccagccaa

SEQ ID NO: 2747209 - RNA, 19 nt, Artificial Sequence
  Description of Artificial Sequence: Synthetic oligonucleotide
uugaagucaggcucauugg

SEQ ID NO: 2747210 - RNA, 19 nt, Artificial Sequence
  Description of Artificial Sequence: Synthetic oligonucleotide
gaauggaggggccaggccc

SEQ ID NO: 2747211 - RNA, 19 nt, Artificial Sequence
  Description of Artificial Sequence: Synthetic oligonucleotide
agggaggugccacagcacc

SEQ ID NO: 2747212 - RNA, 19 nt, Artificial Sequence
  Description of Artificial Sequence: Synthetic oligonucleotide
aaccgaggaggauugaagu

SEQ ID NO: 2747213 - RNA, 19 nt, Artificial Sequence
  Description of Artificial Sequence: Synthetic oligonucleotide
guggcuguaggccucauag

SEQ ID NO: 2747214 - RNA, 19 nt, Artificial Sequence
  Description of Artificial Sequence: Synthetic oligonucleotide
caagcugcggaguuggugc

SEQ ID NO: 2747215 - RNA, 19 nt, Artificial Sequence
  Description of Artificial Sequence: Synthetic oligonucleotide
aguucagauaggucccagc

SEQ ID NO: 2747216 - RNA, 19 nt, Artificial Sequence
  Description of Artificial Sequence: Synthetic oligonucleotide
uccaaguugacagucggcc

SEQ ID NO: 2747217 - RNA, 19 nt, Artificial Sequence
  Description of Artificial Sequence: Synthetic oligonucleotide
ugaagucaggcucauugga

SEQ ID NO: 2747218 - RNA, 19 nt, Artificial Sequence
  Description of Artificial Sequence: Synthetic oligonucleotide
guucagauaggucccagcc

SEQ ID NO: 2747219 - RNA, 19 nt, Artificial Sequence
  Description of Artificial Sequence: Synthetic oligonucleotide
uggugcuccagguagcggg

SEQ ID NO: 2747220 - RNA, 19 nt, Artificial Sequence
  Description of Artificial Sequence: Synthetic oligonucleotide
caaguaacacaggaggugg

SEQ ID NO: 2747221 - RNA, 19 nt, Artificial Sequence
  Description of Artificial Sequence: Synthetic oligonucleotide
ugcgauuaagagcuggcac

SEQ ID NO: 2747222 - RNA, 19 nt, Artificial Sequence
  Description of Artificial Sequence: Synthetic oligonucleotide
uuaagagcuggcacugcag

SEQ ID NO: 2747223 - RNA, 19 nt, Artificial Sequence
  Description of Artificial Sequence: Synthetic oligonucleotide
uggagacugguacagaaau

SEQ ID NO: 2747224 - RNA, 19 nt, Artificial Sequence
  Description of Artificial Sequence: Synthetic oligonucleotide
uggcugaacgcacagccag

SEQ ID NO: 2747225 - RNA, 19 nt, Artificial Sequence
  Description of Artificial Sequence: Synthetic oligonucleotide
ugucauugaggcuucgcca

SEQ ID NO: 2747226 - RNA, 19 nt, Artificial Sequence
  Description of Artificial Sequence: Synthetic oligonucleotide
auaaguuuucugaauggag

SEQ ID NO: 2747227 - RNA, 19 nt, Artificial Sequence
  Description of Artificial Sequence: Synthetic oligonucleotide
uuuucugaauggaggggcc

SEQ ID NO: 2747228 - RNA, 19 nt, Artificial Sequence
  Description of Artificial Sequence: Synthetic oligonucleotide
uaggcaagcuaacaucccc

SEQ ID NO: 2747229 - RNA, 19 nt, Artificial Sequence
  Description of Artificial Sequence: Synthetic oligonucleotide
ugugcgauuaagagcuggc

SEQ ID NO: 2747230 - RNA, 19 nt, Artificial Sequence
  Description of Artificial Sequence: Synthetic oligonucleotide
ugcauaggcaagcuaacau

SEQ ID NO: 2747231 - RNA, 19 nt, Artificial Sequence
  Description of Artificial Sequence: Synthetic oligonucleotide
ugccaugacaccugcaaug

SEQ ID NO: 2747232 - RNA, 19 nt, Artificial Sequence
  Description of Artificial Sequence: Synthetic oligonucleotide
cacagcaccgugcauaggc

SEQ ID NO: 2747233 - RNA, 19 nt, Artificial Sequence
  Description of Artificial Sequence: Synthetic oligonucleotide
ugacagucggcccugggca

SEQ ID NO: 2747234 - RNA, 19 nt, Artificial Sequence
  Description of Artificial Sequence: Synthetic oligonucleotide
cuuccaaguugacagucgg

SEQ ID NO: 2747235 - RNA, 19 nt, Artificial Sequence
  Description of Artificial Sequence: Synthetic oligonucleotide
acaggagguggcuguaggc

SEQ ID NO: 2747236 - RNA, 19 nt, Artificial Sequence
  Description of Artificial Sequence: Synthetic oligonucleotide
auuaagagcuggcacugca

SEQ ID NO: 2747237 - RNA, 19 nt, Artificial Sequence
  Description of Artificial Sequence: Synthetic oligonucleotide
gaggaagucacugugggca

SEQ ID NO: 2747238 - RNA, 19 nt, Artificial Sequence
  Description of Artificial Sequence: Synthetic oligonucleotide
ugcgucguaguucugcugu

SEQ ID NO: 2747239 - RNA, 19 nt, Artificial Sequence
  Description of Artificial Sequence: Synthetic oligonucleotide
auaggucccagccaagcug

SEQ ID NO: 2747240 - RNA, 19 nt, Artificial Sequence
  Description of Artificial Sequence: Synthetic oligonucleotide
agucaggcucauuggaagg

SEQ ID NO: 2747241 - RNA, 19 nt, Artificial Sequence
  Description of Artificial Sequence: Synthetic oligonucleotide
guaaccaagagcugccaug

SEQ ID NO: 2747242 - RNA, 19 nt, Artificial Sequence
  Description of Artificial Sequence: Synthetic oligonucleotide
gaggcuucgccacacuucc

SEQ ID NO: 2747243 - RNA, 19 nt, Artificial Sequence
  Description of Artificial Sequence: Synthetic oligonucleotide
ucauaguucugggucagcc

SEQ ID NO: 2747244 - RNA, 19 nt, Artificial Sequence
  Description of Artificial Sequence: Synthetic oligonucleotide
cauaguucugggucagccg

SEQ ID NO: 2747245 - RNA, 19 nt, Artificial Sequence
  Description of Artificial Sequence: Synthetic oligonucleotide
uugacagucggcccugggc

SEQ ID NO: 2747246 - RNA, 19 nt, Artificial Sequence
  Description of Artificial Sequence: Synthetic oligonucleotide
guuuucugaauggaggggc

SEQ ID NO: 2747247 - RNA, 19 nt, Artificial Sequence
  Description of Artificial Sequence: Synthetic oligonucleotide
aaugggccaggcugcgucg

SEQ ID NO: 2747248 - RNA, 19 nt, Artificial Sequence
  Description of Artificial Sequence: Synthetic oligonucleotide
agauaggucccagccaagc

SEQ ID NO: 2747249 - RNA, 19 nt, Artificial Sequence
  Description of Artificial Sequence: Synthetic oligonucleotide
uucagauaggucccagcca

SEQ ID NO: 2747250 - RNA, 19 nt, Artificial Sequence
  Description of Artificial Sequence: Synthetic oligonucleotide
aggcccuggagacugguac

SEQ ID NO: 2747251 - RNA, 19 nt, Artificial Sequence
  Description of Artificial Sequence: Synthetic oligonucleotide
aaguaacacaggagguggc

SEQ ID NO: 2747252 - RNA, 19 nt, Artificial Sequence
  Description of Artificial Sequence: Synthetic oligonucleotide
uaggucccagccaagcugc

SEQ ID NO: 2747253 - RNA, 19 nt, Artificial Sequence
  Description of Artificial Sequence: Synthetic oligonucleotide
uggguaaccaagagcugcc

SEQ ID NO: 2747254 - RNA, 19 nt, Artificial Sequence
  Description of Artificial Sequence: Synthetic oligonucleotide
aguuuucugaauggagggg

SEQ ID NO: 2747255 - RNA, 19 nt, Artificial Sequence
  Description of Artificial Sequence: Synthetic oligonucleotide
uaaccaagagcugccauga

SEQ ID NO: 2747256 - RNA, 19 nt, Artificial Sequence
  Description of Artificial Sequence: Synthetic oligonucleotide
cagaaaugggccaggcugc

SEQ ID NO: 2747257 - RNA, 19 nt, Artificial Sequence
  Description of Artificial Sequence: Synthetic oligonucleotide
accgaggaggauugaaguc

SEQ ID NO: 2747258 - RNA, 19 nt, Artificial Sequence
  Description of Artificial Sequence: Synthetic oligonucleotide
aucuucuggaggaagucac

SEQ ID NO: 2747259 - RNA, 19 nt, Artificial Sequence
  Description of Artificial Sequence: Synthetic oligonucleotide
aagagcugccaugacaccu

SEQ ID NO: 2747260 - RNA, 19 nt, Artificial Sequence
  Description of Artificial Sequence: Synthetic oligonucleotide
uccaucuucuggaggaagu

SEQ ID NO: 2747261 - RNA, 19 nt, Artificial Sequence
  Description of Artificial Sequence: Synthetic oligonucleotide
cuccugugcgauuaagagc

SEQ ID NO: 2747262 - RNA, 19 nt, Artificial Sequence
  Description of Artificial Sequence: Synthetic oligonucleotide
cacgcaaguaacacaggag

SEQ ID NO: 2747263 - RNA, 19 nt, Artificial Sequence
  Description of Artificial Sequence: Synthetic oligonucleotide
uaggccucauaguucuggg

SEQ ID NO: 2747264 - RNA, 19 nt, Artificial Sequence
  Description of Artificial Sequence: Synthetic oligonucleotide
caaccgaggaggauugaag

SEQ ID NO: 2747265 - RNA, 19 nt, Artificial Sequence
  Description of Artificial Sequence: Synthetic oligonucleotide
accaagagcugccaugaca

SEQ ID NO: 2747266 - RNA, 19 nt, Artificial Sequence
  Description of Artificial Sequence: Synthetic oligonucleotide
uguggcagcuugacgguug

SEQ ID NO: 2747267 - RNA, 19 nt, Artificial Sequence
  Description of Artificial Sequence: Synthetic oligonucleotide
gucauugaggcuucgccac

SEQ ID NO: 2747268 - RNA, 19 nt, Artificial Sequence
  Description of Artificial Sequence: Synthetic oligonucleotide
cuggaggaagucacugugg

SEQ ID NO: 2747269 - RNA, 19 nt, Artificial Sequence
  Description of Artificial Sequence: Synthetic oligonucleotide
  modified_base (11)..(11): a, c, u, g, unknown or other
uucagcagccngaagucau

SEQ ID NO: 2747270 - RNA, 19 nt, Artificial Sequence
  Description of Artificial Sequence: Synthetic oligonucleotide
  modified_base (5)..(5): a, c, u, g, unknown or other
agccngaagucauccaucu

SEQ ID NO: 2747271 - RNA, 19 nt, Artificial Sequence
  Description of Artificial Sequence: Synthetic oligonucleotide
aggucauaaguuuucugaa

SEQ ID NO: 2747272 - RNA, 19 nt, Artificial Sequence
  Description of Artificial Sequence: Synthetic oligonucleotide
uaacacaggagguggcugu

SEQ ID NO: 2747273 - RNA, 19 nt, Artificial Sequence
  Description of Artificial Sequence: Synthetic oligonucleotide
acaccugcaaugcugccca

SEQ ID NO: 2747274 - RNA, 19 nt, Artificial Sequence
  Description of Artificial Sequence: Synthetic oligonucleotide
gaagucacugugggcaggg

SEQ ID NO: 2747275 - RNA, 19 nt, Artificial Sequence
  Description of Artificial Sequence: Synthetic oligonucleotide
caguggguaaccaagagcu

SEQ ID NO: 2747276 - RNA, 19 nt, Artificial Sequence
  Description of Artificial Sequence: Synthetic oligonucleotide
auaggcaagcuaacauccc

SEQ ID NO: 2747277 - RNA, 19 nt, Artificial Sequence
  Description of Artificial Sequence: Synthetic oligonucleotide
cucagucccuggcagaggc

SEQ ID NO: 2747278 - RNA, 19 nt, Artificial Sequence
  Description of Artificial Sequence: Synthetic oligonucleotide
ugaauggaggggccaggcc

SEQ ID NO: 2747279 - RNA, 19 nt, Artificial Sequence
  Description of Artificial Sequence: Synthetic oligonucleotide
agcgggugaggucauaagu

SEQ ID NO: 2747280 - RNA, 19 nt, Artificial Sequence
  Description of Artificial Sequence: Synthetic oligonucleotide
cgcaguuugucauugaggc

SEQ ID NO: 2747281 - RNA, 19 nt, Artificial Sequence
  Description of Artificial Sequence: Synthetic oligonucleotide
ucaggcucauuggaagggg

SEQ ID NO: 2747282 - RNA, 19 nt, Artificial Sequence
  Description of Artificial Sequence: Synthetic oligonucleotide
gucauccaucuucuggagg

SEQ ID NO: 2747283 - RNA, 19 nt, Artificial Sequence
  Description of Artificial Sequence: Synthetic oligonucleotide
uacagaaaugggccaggcu

SEQ ID NO: 2747284 - RNA, 19 nt, Artificial Sequence
  Description of Artificial Sequence: Synthetic oligonucleotide
guggguaaccaagagcugc

SEQ ID NO: 2747285 - RNA, 19 nt, Artificial Sequence
  Description of Artificial Sequence: Synthetic oligonucleotide
guugaggccacgcaaguaa

SEQ ID NO: 2747286 - RNA, 19 nt, Artificial Sequence
  Description of Artificial Sequence: Synthetic oligonucleotide
ugguacagaaaugggccag

SEQ ID NO: 2747287 - RNA, 19 nt, Artificial Sequence
  Description of Artificial Sequence: Synthetic oligonucleotide
uuccaaguugacagucggc

SEQ ID NO: 2747288 - RNA, 19 nt, Artificial Sequence
  Description of Artificial Sequence: Synthetic oligonucleotide
guaggccucauaguucugg

SEQ ID NO: 2747289 - RNA, 19 nt, Artificial Sequence
  Description of Artificial Sequence: Synthetic oligonucleotide
  modified_base (3)..(3): a, c, u, g, unknown or other
ccngaagucauccaucuuc

SEQ ID NO: 2747290 - RNA, 19 nt, Artificial Sequence
  Description of Artificial Sequence: Synthetic oligonucleotide
agucauccaucuucuggag

SEQ ID NO: 2747291 - RNA, 19 nt, Artificial Sequence
  Description of Artificial Sequence: Synthetic oligonucleotide
ccaagagcugccaugacac

SEQ ID NO: 2747292 - RNA, 19 nt, Artificial Sequence
  Description of Artificial Sequence: Synthetic oligonucleotide
  modified_base (10)..(10): a, c, u, g, unknown or other
ucagcagccngaagucauc

SEQ ID NO: 2747293 - RNA, 19 nt, Artificial Sequence
  Description of Artificial Sequence: Synthetic oligonucleotide
ugggcaggguuucucgacc

SEQ ID NO: 2747294 - RNA, 19 nt, Artificial Sequence
  Description of Artificial Sequence: Synthetic oligonucleotide
uuugucauugaggcuucgc

SEQ ID NO: 2747295 - RNA, 19 nt, Artificial Sequence
  Description of Artificial Sequence: Synthetic oligonucleotide
agcuugacgguugaggcca

SEQ ID NO: 2747296 - RNA, 19 nt, Artificial Sequence
  Description of Artificial Sequence: Synthetic oligonucleotide
ucuucuggaggaagucacu

SEQ ID NO: 2747297 - RNA, 19 nt, Artificial Sequence
  Description of Artificial Sequence: Synthetic oligonucleotide
acuuccaaguugacagucg

SEQ ID NO: 2747298 - RNA, 19 nt, Artificial Sequence
  Description of Artificial Sequence: Synthetic oligonucleotide
ucugaauggaggggccagg

SEQ ID NO: 2747299 - RNA, 19 nt, Artificial Sequence
  Description of Artificial Sequence: Synthetic oligonucleotide
cauaaguuuucugaaugga

SEQ ID NO: 2747300 - RNA, 19 nt, Artificial Sequence
  Description of Artificial Sequence: Synthetic oligonucleotide
uucuggaggaagucacugu

SEQ ID NO: 2747301 - RNA, 19 nt, Artificial Sequence
  Description of Artificial Sequence: Synthetic oligonucleotide
ugaggccacgcaaguaaca

SEQ ID NO: 2747302 - RNA, 19 nt, Artificial Sequence
  Description of Artificial Sequence: Synthetic oligonucleotide
uucugaauggaggggccag

SEQ ID NO: 2747303 - RNA, 19 nt, Artificial Sequence
  Description of Artificial Sequence: Synthetic oligonucleotide
gacaccugcaaugcugccc

SEQ ID NO: 2747304 - RNA, 19 nt, Artificial Sequence
  Description of Artificial Sequence: Synthetic oligonucleotide
gcagcuugacgguugaggc

SEQ ID NO: 2747305 - RNA, 19 nt, Artificial Sequence
  Description of Artificial Sequence: Synthetic oligonucleotide
uugaggccacgcaaguaac

SEQ ID NO: 2747306 - RNA, 19 nt, Artificial Sequence
  Description of Artificial Sequence: Synthetic oligonucleotide
ccccagguaguucagauag

SEQ ID NO: 2747307 - RNA, 19 nt, Artificial Sequence
  Description of Artificial Sequence: Synthetic oligonucleotide
aggaagucacugugggcag

SEQ ID NO: 2747308 - RNA, 19 nt, Artificial Sequence
  Description of Artificial Sequence: Synthetic oligonucleotide
gucaggcucauuggaaggg

SEQ ID NO: 2747309 - RNA, 19 nt, Artificial Sequence
  Description of Artificial Sequence: Synthetic oligonucleotide
gguaguucagauagguccc

SEQ ID NO: 2747310 - RNA, 19 nt, Artificial Sequence
  Description of Artificial Sequence: Synthetic oligonucleotide
ucguaguucugcuguggca

SEQ ID NO: 2747311 - RNA, 19 nt, Artificial Sequence
  Description of Artificial Sequence: Synthetic oligonucleotide
uucgccacacuuccaaguu

SEQ ID NO: 2747312 - RNA, 19 nt, Artificial Sequence
  Description of Artificial Sequence: Synthetic oligonucleotide
cacaggagguggcuguagg

SEQ ID NO: 2747313 - RNA, 19 nt, Artificial Sequence
  Description of Artificial Sequence: Synthetic oligonucleotide
uggcacugcagggaggugc

SEQ ID NO: 2747314 - RNA, 19 nt, Artificial Sequence
  Description of Artificial Sequence: Synthetic oligonucleotide
gucguaguucugcuguggc

SEQ ID NO: 2747315 - RNA, 19 nt, Artificial Sequence
  Description of Artificial Sequence: Synthetic oligonucleotide
agacugguacagaaauggg

SEQ ID NO: 2747316 - RNA, 19 nt, Artificial Sequence
  Description of Artificial Sequence: Synthetic oligonucleotide
ucgccacacuuccaaguug

SEQ ID NO: 2747317 - RNA, 19 nt, Artificial Sequence
  Description of Artificial Sequence: Synthetic oligonucleotide
aguaacacaggagguggcu

SEQ ID NO: 2747318 - RNA, 19 nt, Artificial Sequence
  Description of Artificial Sequence: Synthetic oligonucleotide
guuggugcuccagguagcg

SEQ ID NO: 2747319 - RNA, 19 nt, Artificial Sequence
  Description of Artificial Sequence: Synthetic oligonucleotide
agccaagcugcggaguugg

SEQ ID NO: 2747320 - RNA, 19 nt, Artificial Sequence
  Description of Artificial Sequence: Synthetic oligonucleotide
gagcuggcacugcagggag

SEQ ID NO: 2747321 - RNA, 19 nt, Artificial Sequence
  Description of Artificial Sequence: Synthetic oligonucleotide
ugacgguugaggccacgca

SEQ ID NO: 2747322 - RNA, 19 nt, Artificial Sequence
  Description of Artificial Sequence: Synthetic oligonucleotide
ucugcuguggcagcuugac

SEQ ID NO: 2747323 - RNA, 19 nt, Artificial Sequence
  Description of Artificial Sequence: Synthetic oligonucleotide
uuucugaauggaggggcca

SEQ ID NO: 2747324 - RNA, 19 nt, Artificial Sequence
  Description of Artificial Sequence: Synthetic oligonucleotide
agaaaugggccaggcugcg

SEQ ID NO: 2747325 - RNA, 19 nt, Artificial Sequence
  Description of Artificial Sequence: Synthetic oligonucleotide
caggagguggcuguaggcc

SEQ ID NO: 2747326 - RNA, 19 nt, Artificial Sequence
  Description of Artificial Sequence: Synthetic oligonucleotide
gaggccacgcaaguaacac

SEQ ID NO: 2747327 - RNA, 19 nt, Artificial Sequence
  Description of Artificial Sequence: Synthetic oligonucleotide
cugugcgauuaagagcugg

SEQ ID NO: 2747328 - RNA, 19 nt, Artificial Sequence
  Description of Artificial Sequence: Synthetic oligonucleotide
ggccacgcaaguaacacag

SEQ ID NO: 2747329 - RNA, 19 nt, Artificial Sequence
  Description of Artificial Sequence: Synthetic oligonucleotide
aagucacugugggcagggc

SEQ ID NO: 2747330 - RNA, 19 nt, Artificial Sequence
  Description of Artificial Sequence: Synthetic oligonucleotide
cagcuugacgguugaggcc

SEQ ID NO: 2747331 - RNA, 19 nt, Artificial Sequence
  Description of Artificial Sequence: Synthetic oligonucleotide
gcauaggcaagcuaacauc

SEQ ID NO: 2747332 - RNA, 19 nt, Artificial Sequence
  Description of Artificial Sequence: Synthetic oligonucleotide
aacgcacagccaggucugc

SEQ ID NO: 2747333 - RNA, 19 nt, Artificial Sequence
  Description of Artificial Sequence: Synthetic oligonucleotide
gacgguugaggccacgcaa

SEQ ID NO: 2747334 - RNA, 19 nt, Artificial Sequence
  Description of Artificial Sequence: Synthetic oligonucleotide
ggcagcuugacgguugagg

SEQ ID NO: 2747335 - RNA, 19 nt, Artificial Sequence
  Description of Artificial Sequence: Synthetic oligonucleotide
guaacacaggagguggcug

SEQ ID NO: 2747336 - RNA, 19 nt, Artificial Sequence
  Description of Artificial Sequence: Synthetic oligonucleotide
aggauugaagucaggcuca

SEQ ID NO: 2747337 - RNA, 19 nt, Artificial Sequence
  Description of Artificial Sequence: Synthetic oligonucleotide
aguuugucauugaggcuuc

SEQ ID NO: 2747338 - RNA, 19 nt, Artificial Sequence
  Description of Artificial Sequence: Synthetic oligonucleotide
gaacgcacagccaggucug

SEQ ID NO: 2747339 - RNA, 19 nt, Artificial Sequence
  Description of Artificial Sequence: Synthetic oligonucleotide
cuggcucagucccuggcag

SEQ ID NO: 2747340 - RNA, 19 nt, Artificial Sequence
  Description of Artificial Sequence: Synthetic oligonucleotide
gcaguggguaaccaagagc

SEQ ID NO: 2747341 - RNA, 19 nt, Artificial Sequence
  Description of Artificial Sequence: Synthetic oligonucleotide
uugacgguugaggccacgc

SEQ ID NO: 2747342 - RNA, 19 nt, Artificial Sequence
  Description of Artificial Sequence: Synthetic oligonucleotide
aggggccaggcccuggauc

SEQ ID NO: 2747343 - RNA, 19 nt, Artificial Sequence
  Description of Artificial Sequence: Synthetic oligonucleotide
aaguugacagucggcccug

SEQ ID NO: 2747344 - RNA, 19 nt, Artificial Sequence
  Description of Artificial Sequence: Synthetic oligonucleotide
gcaaguaacacaggaggug

SEQ ID NO: 2747345 - RNA, 19 nt, Artificial Sequence
  Description of Artificial Sequence: Synthetic oligonucleotide
uagcgggugaggucauaag

SEQ ID NO: 2747346 - RNA, 19 nt, Artificial Sequence
  Description of Artificial Sequence: Synthetic oligonucleotide
gaagucaggcucauuggaa

SEQ ID NO: 2747347 - RNA, 19 nt, Artificial Sequence
  Description of Artificial Sequence: Synthetic oligonucleotide
gacagucggcccugggcag

SEQ ID NO: 2747348 - RNA, 19 nt, Artificial Sequence
  Description of Artificial Sequence: Synthetic oligonucleotide
uaguucugggucagccgca

SEQ ID NO: 2747349 - RNA, 19 nt, Artificial Sequence
  Description of Artificial Sequence: Synthetic oligonucleotide
gaucuccugugcgauuaag

SEQ ID NO: 2747350 - RNA, 19 nt, Artificial Sequence
  Description of Artificial Sequence: Synthetic oligonucleotide
uugaggcuucgccacacuu

SEQ ID NO: 2747351 - RNA, 19 nt, Artificial Sequence
  Description of Artificial Sequence: Synthetic oligonucleotide
uccagguagcgggugaggu

SEQ ID NO: 2747352 - RNA, 19 nt, Artificial Sequence
  Description of Artificial Sequence: Synthetic oligonucleotide
uaguucagauaggucccag

SEQ ID NO: 2747353 - RNA, 19 nt, Artificial Sequence
  Description of Artificial Sequence: Synthetic oligonucleotide
aagcugcggaguuggugcu

SEQ ID NO: 2747354 - RNA, 19 nt, Artificial Sequence
  Description of Artificial Sequence: Synthetic oligonucleotide
agagcuggcacugcaggga

SEQ ID NO: 2747355 - RNA, 19 nt, Artificial Sequence
  Description of Artificial Sequence: Synthetic oligonucleotide
guucugcuguggcagcuug

SEQ ID NO: 2747356 - RNA, 19 nt, Artificial Sequence
  Description of Artificial Sequence: Synthetic oligonucleotide
cagguaguucagauagguc

SEQ ID NO: 2747357 - RNA, 19 nt, Artificial Sequence
  Description of Artificial Sequence: Synthetic oligonucleotide
cugaauggaggggccaggc

SEQ ID NO: 2747358 - RNA, 19 nt, Artificial Sequence
  Description of Artificial Sequence: Synthetic oligonucleotide
guugacagucggcccuggg

SEQ ID NO: 2747359 - RNA, 19 nt, Artificial Sequence
  Description of Artificial Sequence: Synthetic oligonucleotide
caagagcugccaugacacc

SEQ ID NO: 2747360 - RNA, 19 nt, Artificial Sequence
  Description of Artificial Sequence: Synthetic oligonucleotide
  modified_base (6)..(6): a, c, u, g, unknown or other
cagccngaagucauccauc

SEQ ID NO: 2747361 - RNA, 19 nt, Artificial Sequence
  Description of Artificial Sequence: Synthetic oligonucleotide
ugccacagcaccgugcaua

SEQ ID NO: 2747362 - RNA, 19 nt, Artificial Sequence
  Description of Artificial Sequence: Synthetic oligonucleotide
gguacagaaaugggccagg

SEQ ID NO: 2747363 - RNA, 19 nt, Artificial Sequence
  Description of Artificial Sequence: Synthetic oligonucleotide
gauaggucccagccaagcu

SEQ ID NO: 2747364 - RNA, 19 nt, Artificial Sequence
  Description of Artificial Sequence: Synthetic oligonucleotide
uucugcuguggcagcuuga

SEQ ID NO: 2747365 - RNA, 19 nt, Artificial Sequence
  Description of Artificial Sequence: Synthetic oligonucleotide
acugcagggaggugccaca

SEQ ID NO: 2747366 - RNA, 19 nt, Artificial Sequence
  Description of Artificial Sequence: Synthetic oligonucleotide
acgguugaggccacgcaag

SEQ ID NO: 2747367 - RNA, 19 nt, Artificial Sequence
  Description of Artificial Sequence: Synthetic oligonucleotide
uguaggccucauaguucug

SEQ ID NO: 2747368 - RNA, 19 nt, Artificial Sequence
  Description of Artificial Sequence: Synthetic oligonucleotide
ggcaguggguaaccaagag

SEQ ID NO: 2747369 - RNA, 19 nt, Artificial Sequence
  Description of Artificial Sequence: Synthetic oligonucleotide
aucuccugugcgauuaaga

SEQ ID NO: 2747370 - RNA, 19 nt, Artificial Sequence
  Description of Artificial Sequence: Synthetic oligonucleotide
cugguacagaaaugggcca

SEQ ID NO: 2747371 - RNA, 19 nt, Artificial Sequence
  Description of Artificial Sequence: Synthetic oligonucleotide
cugggcaggguuucucgac

SEQ ID NO: 2747372 - RNA, 19 nt, Artificial Sequence
  Description of Artificial Sequence: Synthetic oligonucleotide
  modified_base (9)..(9): a, c, u, g, unknown or other
cagcagccngaagucaucc

SEQ ID NO: 2747373 - RNA, 19 nt, Artificial Sequence
  Description of Artificial Sequence: Synthetic oligonucleotide
cuguaggccucauaguucu

SEQ ID NO: 2747374 - RNA, 19 nt, Artificial Sequence
  Description of Artificial Sequence: Synthetic oligonucleotide
ugacaccugcaaugcugcc

SEQ ID NO: 2747375 - RNA, 19 nt, Artificial Sequence
  Description of Artificial Sequence: Synthetic oligonucleotide
cagguagcgggugagguca

SEQ ID NO: 2747376 - RNA, 19 nt, Artificial Sequence
  Description of Artificial Sequence: Synthetic oligonucleotide
uuggugcuccagguagcgg

SEQ ID NO: 2747377 - RNA, 19 nt, Artificial Sequence
  Description of Artificial Sequence: Synthetic oligonucleotide
uggcuguaggccucauagu

SEQ ID NO: 2747378 - RNA, 19 nt, Artificial Sequence
  Description of Artificial Sequence: Synthetic oligonucleotide
  modified_base (2)..(2): a, c, u, g, unknown or other
cngaagucauccaucuucu

SEQ ID NO: 2747379 - RNA, 19 nt, Artificial Sequence
  Description of Artificial Sequence: Synthetic oligonucleotide
aggccacgcaaguaacaca

SEQ ID NO: 2747380 - RNA, 19 nt, Artificial Sequence
  Description of Artificial Sequence: Synthetic oligonucleotide
ccgcaguuugucauugagg

SEQ ID NO: 2747381 - RNA, 19 nt, Artificial Sequence
  Description of Artificial Sequence: Synthetic oligonucleotide
ccaaguugacagucggccc

SEQ ID NO: 2747382 - RNA, 19 nt, Artificial Sequence
  Description of Artificial Sequence: Synthetic oligonucleotide
aggcccuggaucuccugug

SEQ ID NO: 2747383 - RNA, 19 nt, Artificial Sequence
  Description of Artificial Sequence: Synthetic oligonucleotide
cauugaggcuucgccacac

SEQ ID NO: 2747384 - RNA, 19 nt, Artificial Sequence
  Description of Artificial Sequence: Synthetic oligonucleotide
ucccagccaagcugcggag

SEQ ID NO: 2747385 - RNA, 19 nt, Artificial Sequence
  Description of Artificial Sequence: Synthetic oligonucleotide
agcaccgugcauaggcaag

SEQ ID NO: 2747386 - RNA, 19 nt, Artificial Sequence
  Description of Artificial Sequence: Synthetic oligonucleotide
auugaggcuucgccacacu

SEQ ID NO: 2747387 - RNA, 19 nt, Artificial Sequence
  Description of Artificial Sequence: Synthetic oligonucleotide
gccgcaguuugucauugag

SEQ ID NO: 2747388 - RNA, 19 nt, Artificial Sequence
  Description of Artificial Sequence: Synthetic oligonucleotide
  modified_base (13)..(13): a, c, u, g, unknown or other
ccuucagcagccngaaguc

SEQ ID NO: 2747389 - RNA, 19 nt, Artificial Sequence
  Description of Artificial Sequence: Synthetic oligonucleotide
cugcuguggcagcuugacg

SEQ ID NO: 2747390 - RNA, 19 nt, Artificial Sequence
  Description of Artificial Sequence: Synthetic oligonucleotide
uggggcaguggguaaccaa

SEQ ID NO: 2747391 - RNA, 19 nt, Artificial Sequence
  Description of Artificial Sequence: Synthetic oligonucleotide
cagauaggucccagccaag

SEQ ID NO: 2747392 - RNA, 19 nt, Artificial Sequence
  Description of Artificial Sequence: Synthetic oligonucleotide
  modified_base (8)..(8): a, c, u, g, unknown or other
agcagccngaagucaucca

SEQ ID NO: 2747393 - RNA, 19 nt, Artificial Sequence
  Description of Artificial Sequence: Synthetic oligonucleotide
ggaggaagucacugugggc

SEQ ID NO: 2747394 - RNA, 19 nt, Artificial Sequence
  Description of Artificial Sequence: Synthetic oligonucleotide
gcggaguuggugcuccagg

SEQ ID NO: 2747395 - RNA, 19 nt, Artificial Sequence
  Description of Artificial Sequence: Synthetic oligonucleotide
ucagccgcaguuugucauu

SEQ ID NO: 2747396 - RNA, 19 nt, Artificial Sequence
  Description of Artificial Sequence: Synthetic oligonucleotide
aggccucauaguucugggu

SEQ ID NO: 2747397 - RNA, 19 nt, Artificial Sequence
  Description of Artificial Sequence: Synthetic oligonucleotide
caaguugacagucggcccu

SEQ ID NO: 2747398 - RNA, 19 nt, Artificial Sequence
  Description of Artificial Sequence: Synthetic oligonucleotide
ggugaggucauaaguuuuc

SEQ ID NO: 2747399 - RNA, 19 nt, Artificial Sequence
  Description of Artificial Sequence: Synthetic oligonucleotide
ugcggaguuggugcuccag

SEQ ID NO: 2747400 - RNA, 19 nt, Artificial Sequence
  Description of Artificial Sequence: Synthetic oligonucleotide
uaguucugcuguggcagcu

SEQ ID NO: 2747401 - RNA, 19 nt, Artificial Sequence
  Description of Artificial Sequence: Synthetic oligonucleotide
caggucugcagcuccuuca

SEQ ID NO: 2747402 - RNA, 19 nt, Artificial Sequence
  Description of Artificial Sequence: Synthetic oligonucleotide
caucuucuggaggaaguca

SEQ ID NO: 2747403 - RNA, 19 nt, Artificial Sequence
  Description of Artificial Sequence: Synthetic oligonucleotide
ucagucccuggcagaggcu

SEQ ID NO: 2747404 - RNA, 19 nt, Artificial Sequence
  Description of Artificial Sequence: Synthetic oligonucleotide
gccacagcaccgugcauag

SEQ ID NO: 2747405 - RNA, 19 nt, Artificial Sequence
  Description of Artificial Sequence: Synthetic oligonucleotide
gccaugacaccugcaaugc

SEQ ID NO: 2747406 - RNA, 19 nt, Artificial Sequence
  Description of Artificial Sequence: Synthetic oligonucleotide
gcagggaggugccacagca

SEQ ID NO: 2747407 - RNA, 19 nt, Artificial Sequence
  Description of Artificial Sequence: Synthetic oligonucleotide
guuugucauugaggcuucg

SEQ ID NO: 2747408 - RNA, 19 nt, Artificial Sequence
  Description of Artificial Sequence: Synthetic oligonucleotide
caguuugucauugaggcuu

SEQ ID NO: 2747409 - RNA, 19 nt, Artificial Sequence
  Description of Artificial Sequence: Synthetic oligonucleotide
gcgauuaagagcuggcacu

SEQ ID NO: 2747410 - RNA, 19 nt, Artificial Sequence
  Description of Artificial Sequence: Synthetic oligonucleotide
aguggguaaccaagagcug

SEQ ID NO: 2747411 - RNA, 19 nt, Artificial Sequence
  Description of Artificial Sequence: Synthetic oligonucleotide
ggagacugguacagaaaug

SEQ ID NO: 2747412 - RNA, 19 nt, Artificial Sequence
  Description of Artificial Sequence: Synthetic oligonucleotide
acagucggcccugggcagg

SEQ ID NO: 2747413 - RNA, 19 nt, Artificial Sequence
  Description of Artificial Sequence: Synthetic oligonucleotide
uggcucagucccuggcaga

SEQ ID NO: 2747414 - RNA, 19 nt, Artificial Sequence
  Description of Artificial Sequence: Synthetic oligonucleotide
acacaggagguggcuguag

SEQ ID NO: 2747415 - RNA, 19 nt, Artificial Sequence
  Description of Artificial Sequence: Synthetic oligonucleotide
cagggaggugccacagcac

SEQ ID NO: 2747416 - RNA, 19 nt, Artificial Sequence
  Description of Artificial Sequence: Synthetic oligonucleotide
caggcugcgucguaguucu

SEQ ID NO: 2747417 - RNA, 19 nt, Artificial Sequence
  Description of Artificial Sequence: Synthetic oligonucleotide
gugcauaggcaagcuaaca

SEQ ID NO: 2747418 - RNA, 19 nt, Artificial Sequence
  Description of Artificial Sequence: Synthetic oligonucleotide
cagcaggcccuggagacug

SEQ ID NO: 2747419 - RNA, 19 nt, Artificial Sequence
  Description of Artificial Sequence: Synthetic oligonucleotide
aguugacagucggcccugg

SEQ ID NO: 2747420 - RNA, 19 nt, Artificial Sequence
  Description of Artificial Sequence: Synthetic oligonucleotide
gugcgauuaagagcuggca

SEQ ID NO: 2747421 - RNA, 19 nt, Artificial Sequence
  Description of Artificial Sequence: Synthetic oligonucleotide
cucauaguucugggucagc

SEQ ID NO: 2747422 - RNA, 19 nt, Artificial Sequence
  Description of Artificial Sequence: Synthetic oligonucleotide
guaguucagauagguccca

SEQ ID NO: 2747423 - RNA, 19 nt, Artificial Sequence
  Description of Artificial Sequence: Synthetic oligonucleotide
cugugggcagggccagggg

SEQ ID NO: 2747424 - RNA, 19 nt, Artificial Sequence
  Description of Artificial Sequence: Synthetic oligonucleotide
acagcaccgugcauaggca

SEQ ID NO: 2747425 - RNA, 19 nt, Artificial Sequence
  Description of Artificial Sequence: Synthetic oligonucleotide
gaggcuggggcagugggua

SEQ ID NO: 2747426 - RNA, 19 nt, Artificial Sequence
  Description of Artificial Sequence: Synthetic oligonucleotide
cuucgccacacuuccaagu

SEQ ID NO: 2747427 - RNA, 19 nt, Artificial Sequence
  Description of Artificial Sequence: Synthetic oligonucleotide
cacugcagggaggugccac

SEQ ID NO: 2747428 - RNA, 19 nt, Artificial Sequence
  Description of Artificial Sequence: Synthetic oligonucleotide
cugcgucguaguucugcug

SEQ ID NO: 2747429 - RNA, 19 nt, Artificial Sequence
  Description of Artificial Sequence: Synthetic oligonucleotide
ggaagucacugugggcagg

SEQ ID NO: 2747430 - RNA, 19 nt, Artificial Sequence
  Description of Artificial Sequence: Synthetic oligonucleotide
ccgugcauaggcaagcuaa

SEQ ID NO: 2747431 - RNA, 19 nt, Artificial Sequence
  Description of Artificial Sequence: Synthetic oligonucleotide
gcuucgccacacuuccaag

SEQ ID NO: 2747432 - RNA, 19 nt, Artificial Sequence
  Description of Artificial Sequence: Synthetic oligonucleotide
cuugacgguugaggccacg

SEQ ID NO: 2747433 - RNA, 19 nt, Artificial Sequence
  Description of Artificial Sequence: Synthetic oligonucleotide
  modified_base (12)..(12): a, c, u, g, unknown or other
cuucagcagccngaaguca

SEQ ID NO: 2747434 - RNA, 19 nt, Artificial Sequence
  Description of Artificial Sequence: Synthetic oligonucleotide
cugaacgcacagccagguc

SEQ ID NO: 2747435 - RNA, 19 nt, Artificial Sequence
  Description of Artificial Sequence: Synthetic oligonucleotide
ggucauaaguuuucugaau

SEQ ID NO: 2747436 - RNA, 19 nt, Artificial Sequence
  Description of Artificial Sequence: Synthetic oligonucleotide
cccagcaggcccuggagac

SEQ ID NO: 2747437 - RNA, 19 nt, Artificial Sequence
  Description of Artificial Sequence: Synthetic oligonucleotide
gucccuggcagaggcuggg

SEQ ID NO: 2747438 - RNA, 19 nt, Artificial Sequence
  Description of Artificial Sequence: Synthetic oligonucleotide
guagcgggugaggucauaa

SEQ ID NO: 2747439 - RNA, 19 nt, Artificial Sequence
  Description of Artificial Sequence: Synthetic oligonucleotide
ucccuggcagaggcugggg

SEQ ID NO: 2747440 - RNA, 19 nt, Artificial Sequence
  Description of Artificial Sequence: Synthetic oligonucleotide
gggcaggguuucucgaccc

SEQ ID NO: 2747441 - RNA, 19 nt, Artificial Sequence
  Description of Artificial Sequence: Synthetic oligonucleotide
ccacgcaaguaacacagga

SEQ ID NO: 2747442 - RNA, 19 nt, Artificial Sequence
  Description of Artificial Sequence: Synthetic oligonucleotide
gcccuggaucuccugugcg

SEQ ID NO: 2747443 - RNA, 19 nt, Artificial Sequence
  Description of Artificial Sequence: Synthetic oligonucleotide
ggcugcgucguaguucugc

SEQ ID NO: 2747444 - RNA, 19 nt, Artificial Sequence
  Description of Artificial Sequence: Synthetic oligonucleotide
accgugcauaggcaagcua

SEQ ID NO: 2747445 - RNA, 19 nt, Artificial Sequence
  Description of Artificial Sequence: Synthetic oligonucleotide
ucggcccugggcaggguuu

SEQ ID NO: 2747446 - RNA, 19 nt, Artificial Sequence
  Description of Artificial Sequence: Synthetic oligonucleotide
gcuguaggccucauaguuc

SEQ ID NO: 2747447 - RNA, 19 nt, Artificial Sequence
  Description of Artificial Sequence: Synthetic oligonucleotide
  modified_base (7)..(7): a, c, u, g, unknown or other
gcagccngaagucauccau

SEQ ID NO: 2747448 - RNA, 19 nt, Artificial Sequence
  Description of Artificial Sequence: Synthetic oligonucleotide
ggcuucgccacacuuccaa

SEQ ID NO: 2747449 - RNA, 19 nt, Artificial Sequence
  Description of Artificial Sequence: Synthetic oligonucleotide
ggcugaacgcacagccagg

SEQ ID NO: 2747450 - RNA, 19 nt, Artificial Sequence
  Description of Artificial Sequence: Synthetic oligonucleotide
cccagguaguucagauagg

SEQ ID NO: 2747451 - RNA, 19 nt, Artificial Sequence
  Description of Artificial Sequence: Synthetic oligonucleotide
agcugcggaguuggugcuc

SEQ ID NO: 2747452 - RNA, 19 nt, Artificial Sequence
  Description of Artificial Sequence: Synthetic oligonucleotide
gucagccgcaguuugucau

SEQ ID NO: 2747453 - RNA, 19 nt, Artificial Sequence
  Description of Artificial Sequence: Synthetic oligonucleotide
cccugggcaggguuucucg

SEQ ID NO: 2747454 - RNA, 19 nt, Artificial Sequence
  Description of Artificial Sequence: Synthetic oligonucleotide
cagccgcaguuugucauug

SEQ ID NO: 2747455 - RNA, 19 nt, Artificial Sequence
  Description of Artificial Sequence: Synthetic oligonucleotide
ccuggagacugguacagaa

SEQ ID NO: 2747456 - RNA, 19 nt, Artificial Sequence
  Description of Artificial Sequence: Synthetic oligonucleotide
ccgaggaggauugaaguca

SEQ ID NO: 2747457 - RNA, 19 nt, Artificial Sequence
  Description of Artificial Sequence: Synthetic oligonucleotide
guggcagcuugacgguuga

SEQ ID NO: 2747458 - RNA, 19 nt, Artificial Sequence
  Description of Artificial Sequence: Synthetic oligonucleotide
cgauuaagagcuggcacug

SEQ ID NO: 2747459 - RNA, 19 nt, Artificial Sequence
  Description of Artificial Sequence: Synthetic oligonucleotide
ggcacugcagggaggugcc

SEQ ID NO: 2747460 - RNA, 19 nt, Artificial Sequence
  Description of Artificial Sequence: Synthetic oligonucleotide
ggcccuggaucuccugugc

SEQ ID NO: 2747461 - RNA, 19 nt, Artificial Sequence
  Description of Artificial Sequence: Synthetic oligonucleotide
agccgcaguuugucauuga

SEQ ID NO: 2747462 - RNA, 19 nt, Artificial Sequence
  Description of Artificial Sequence: Synthetic oligonucleotide
caggggcccaggcuggcuc

SEQ ID NO: 2747463 - RNA, 19 nt, Artificial Sequence
  Description of Artificial Sequence: Synthetic oligonucleotide
uggaggggccaggcccugg

SEQ ID NO: 2747464 - RNA, 19 nt, Artificial Sequence
  Description of Artificial Sequence: Synthetic oligonucleotide
cgugcauaggcaagcuaac

SEQ ID NO: 2747465 - RNA, 19 nt, Artificial Sequence
  Description of Artificial Sequence: Synthetic oligonucleotide
ggcaggguuucucgacccc

SEQ ID NO: 2747466 - RNA, 19 nt, Artificial Sequence
  Description of Artificial Sequence: Synthetic oligonucleotide
gcaccgugcauaggcaagc

SEQ ID NO: 2747467 - RNA, 19 nt, Artificial Sequence
  Description of Artificial Sequence: Synthetic oligonucleotide
gcugcggaguuggugcucc

SEQ ID NO: 2747468 - RNA, 19 nt, Artificial Sequence
  Description of Artificial Sequence: Synthetic oligonucleotide
agcuggcacugcagggagg

SEQ ID NO: 2747469 - RNA, 19 nt, Artificial Sequence
  Description of Artificial Sequence: Synthetic oligonucleotide
agaggcuggggcagugggu

SEQ ID NO: 2747470 - RNA, 19 nt, Artificial Sequence
  Description of Artificial Sequence: Synthetic oligonucleotide
ggcuggcucagucccuggc

SEQ ID NO: 2747471 - RNA, 19 nt, Artificial Sequence
  Description of Artificial Sequence: Synthetic oligonucleotide
gcuggcucagucccuggca

SEQ ID NO: 2747472 - RNA, 19 nt, Artificial Sequence
  Description of Artificial Sequence: Synthetic oligonucleotide
cagcaccgugcauaggcaa

SEQ ID NO: 2747473 - RNA, 19 nt, Artificial Sequence
  Description of Artificial Sequence: Synthetic oligonucleotide
ggucccagccaagcugcgg

SEQ ID NO: 2747474 - RNA, 19 nt, Artificial Sequence
  Description of Artificial Sequence: Synthetic oligonucleotide
aguucugcuguggcagcuu

SEQ ID NO: 2747475 - RNA, 19 nt, Artificial Sequence
  Description of Artificial Sequence: Synthetic oligonucleotide
cagucggcccugggcaggg

SEQ ID NO: 2747476 - RNA, 19 nt, Artificial Sequence
  Description of Artificial Sequence: Synthetic oligonucleotide
ccucauaguucugggucag

SEQ ID NO: 2747477 - RNA, 19 nt, Artificial Sequence
  Description of Artificial Sequence: Synthetic oligonucleotide
cgcacagccaggucugcag

SEQ ID NO: 2747478 - RNA, 19 nt, Artificial Sequence
  Description of Artificial Sequence: Synthetic oligonucleotide
ccccaaccgaggaggauug

SEQ ID NO: 2747479 - RNA, 19 nt, Artificial Sequence
  Description of Artificial Sequence: Synthetic oligonucleotide
ccaagcugcggaguuggug

SEQ ID NO: 2747480 - RNA, 19 nt, Artificial Sequence
  Description of Artificial Sequence: Synthetic oligonucleotide
cagggccaggggcccaggc

SEQ ID NO: 2747481 - RNA, 19 nt, Artificial Sequence
  Description of Artificial Sequence: Synthetic oligonucleotide
cagccaagcugcggaguug

SEQ ID NO: 2747482 - RNA, 19 nt, Artificial Sequence
  Description of Artificial Sequence: Synthetic oligonucleotide
ccaucuucuggaggaaguc

SEQ ID NO: 2747483 - RNA, 19 nt, Artificial Sequence
  Description of Artificial Sequence: Synthetic oligonucleotide
ggucagccgcaguuuguca

SEQ ID NO: 2747484 - RNA, 19 nt, Artificial Sequence
  Description of Artificial Sequence: Synthetic oligonucleotide
ccagguagcgggugagguc

SEQ ID NO: 2747485 - RNA, 19 nt, Artificial Sequence
  Description of Artificial Sequence: Synthetic oligonucleotide
ggcccuggagacugguaca

SEQ ID NO: 2747486 - RNA, 19 nt, Artificial Sequence
  Description of Artificial Sequence: Synthetic oligonucleotide
ggggccaggcccuggaucu

SEQ ID NO: 2747487 - RNA, 19 nt, Artificial Sequence
  Description of Artificial Sequence: Synthetic oligonucleotide
gguaaccaagagcugccau

SEQ ID NO: 2747488 - RNA, 19 nt, Artificial Sequence
  Description of Artificial Sequence: Synthetic oligonucleotide
gcgucguaguucugcugug

SEQ ID NO: 2747489 - RNA, 19 nt, Artificial Sequence
  Description of Artificial Sequence: Synthetic oligonucleotide
gccacgcaaguaacacagg

SEQ ID NO: 2747490 - RNA, 19 nt, Artificial Sequence
  Description of Artificial Sequence: Synthetic oligonucleotide
gcuccagguagcgggugag

SEQ ID NO: 2747491 - RNA, 19 nt, Artificial Sequence
  Description of Artificial Sequence: Synthetic oligonucleotide
aggucccagccaagcugcg

SEQ ID NO: 2747492 - RNA, 19 nt, Artificial Sequence
  Description of Artificial Sequence: Synthetic oligonucleotide
acgcacagccaggucugca

SEQ ID NO: 2747493 - RNA, 19 nt, Artificial Sequence
  Description of Artificial Sequence: Synthetic oligonucleotide
caccugcaaugcugcccag

SEQ ID NO: 2747494 - RNA, 19 nt, Artificial Sequence
  Description of Artificial Sequence: Synthetic oligonucleotide
cacagccaggucugcagcu

SEQ ID NO: 2747495 - RNA, 19 nt, Artificial Sequence
  Description of Artificial Sequence: Synthetic oligonucleotide
ugggccaggcugcgucgua

SEQ ID NO: 2747496 - RNA, 19 nt, Artificial Sequence
  Description of Artificial Sequence: Synthetic oligonucleotide
aggcuggggcaguggguaa

SEQ ID NO: 2747497 - RNA, 19 nt, Artificial Sequence
  Description of Artificial Sequence: Synthetic oligonucleotide
cgccacacuuccaaguuga

SEQ ID NO: 2747498 - RNA, 19 nt, Artificial Sequence
  Description of Artificial Sequence: Synthetic oligonucleotide
cgucguaguucugcugugg

SEQ ID NO: 2747499 - RNA, 19 nt, Artificial Sequence
  Description of Artificial Sequence: Synthetic oligonucleotide
augggccaggcugcgucgu

SEQ ID NO: 2747500 - RNA, 19 nt, Artificial Sequence
  Description of Artificial Sequence: Synthetic oligonucleotide
ccaggcugcgucguaguuc

SEQ ID NO: 2747501 - RNA, 19 nt, Artificial Sequence
  Description of Artificial Sequence: Synthetic oligonucleotide
cauccaucuucuggaggaa

SEQ ID NO: 2747502 - RNA, 19 nt, Artificial Sequence
  Description of Artificial Sequence: Synthetic oligonucleotide
ccuuggcugaacgcacagc

SEQ ID NO: 2747503 - RNA, 19 nt, Artificial Sequence
  Description of Artificial Sequence: Synthetic oligonucleotide
gcucagucccuggcagagg

SEQ ID NO: 2747504 - RNA, 19 nt, Artificial Sequence
  Description of Artificial Sequence: Synthetic oligonucleotide
gugcuccagguagcgggug

SEQ ID NO: 2747505 - RNA, 19 nt, Artificial Sequence
  Description of Artificial Sequence: Synthetic oligonucleotide
ccagguaguucagauaggu

SEQ ID NO: 2747506 - RNA, 19 nt, Artificial Sequence
  Description of Artificial Sequence: Synthetic oligonucleotide
ggcccaggcuggcucaguc

SEQ ID NO: 2747507 - RNA, 19 nt, Artificial Sequence
  Description of Artificial Sequence: Synthetic oligonucleotide
gaaaugggccaggcugcgu

SEQ ID NO: 2747508 - RNA, 19 nt, Artificial Sequence
  Description of Artificial Sequence: Synthetic oligonucleotide
gggccaggcugcgucguag

SEQ ID NO: 2747509 - RNA, 19 nt, Artificial Sequence
  Description of Artificial Sequence: Synthetic oligonucleotide
gcugcgucguaguucugcu

SEQ ID NO: 2747510 - RNA, 19 nt, Artificial Sequence
  Description of Artificial Sequence: Synthetic oligonucleotide
cugccaugacaccugcaau

SEQ ID NO: 2747511 - RNA, 19 nt, Artificial Sequence
  Description of Artificial Sequence: Synthetic oligonucleotide
ccacacuuccaaguugaca

SEQ ID NO: 2747512 - RNA, 19 nt, Artificial Sequence
  Description of Artificial Sequence: Synthetic oligonucleotide
gggcaguggguaaccaaga

SEQ ID NO: 2747513 - RNA, 19 nt, Artificial Sequence
  Description of Artificial Sequence: Synthetic oligonucleotide
ggaggggccaggcccugga

SEQ ID NO: 2747514 - RNA, 19 nt, Artificial Sequence
  Description of Artificial Sequence: Synthetic oligonucleotide
ggagguggcuguaggccuc

SEQ ID NO: 2747515 - RNA, 19 nt, Artificial Sequence
  Description of Artificial Sequence: Synthetic oligonucleotide
ccaggucugcagcuccuuc

SEQ ID NO: 2747516 - RNA, 19 nt, Artificial Sequence
  Description of Artificial Sequence: Synthetic oligonucleotide
ggccaggcccuggaucucc

SEQ ID NO: 2747517 - RNA, 19 nt, Artificial Sequence
  Description of Artificial Sequence: Synthetic oligonucleotide
cccuggaucuccugugcga

SEQ ID NO: 2747518 - RNA, 19 nt, Artificial Sequence
  Description of Artificial Sequence: Synthetic oligonucleotide
ggguaaccaagagcugcca

SEQ ID NO: 2747519 - RNA, 19 nt, Artificial Sequence
  Description of Artificial Sequence: Synthetic oligonucleotide
ggccaggggcccaggcugg

SEQ ID NO: 2747520 - RNA, 19 nt, Artificial Sequence
  Description of Artificial Sequence: Synthetic oligonucleotide
agcugccaugacaccugca

SEQ ID NO: 2747521 - RNA, 19 nt, Artificial Sequence
  Description of Artificial Sequence: Synthetic oligonucleotide
gguugaggccacgcaagua

SEQ ID NO: 2747522 - RNA, 19 nt, Artificial Sequence
  Description of Artificial Sequence: Synthetic oligonucleotide
gcuggcacugcagggaggu

SEQ ID NO: 2747523 - RNA, 19 nt, Artificial Sequence
  Description of Artificial Sequence: Synthetic oligonucleotide
gcugaacgcacagccaggu

SEQ ID NO: 2747524 - RNA, 19 nt, Artificial Sequence
  Description of Artificial Sequence: Synthetic oligonucleotide
gauugaagucaggcucauu

SEQ ID NO: 2747525 - RNA, 19 nt, Artificial Sequence
  Description of Artificial Sequence: Synthetic oligonucleotide
ccugggcaggguuucucga

SEQ ID NO: 2747526 - RNA, 19 nt, Artificial Sequence
  Description of Artificial Sequence: Synthetic oligonucleotide
ggaucuccugugcgauuaa

SEQ ID NO: 2747527 - RNA, 19 nt, Artificial Sequence
  Description of Artificial Sequence: Synthetic oligonucleotide
ccugugcgauuaagagcug

SEQ ID NO: 2747528 - RNA, 19 nt, Artificial Sequence
  Description of Artificial Sequence: Synthetic oligonucleotide
ggaggugccacagcaccgu

SEQ ID NO: 2747529 - RNA, 19 nt, Artificial Sequence
  Description of Artificial Sequence: Synthetic oligonucleotide
ggccccagguaguucagau

SEQ ID NO: 2747530 - RNA, 19 nt, Artificial Sequence
  Description of Artificial Sequence: Synthetic oligonucleotide
cgcaaguaacacaggaggu

SEQ ID NO: 2747531 - RNA, 19 nt, Artificial Sequence
  Description of Artificial Sequence: Synthetic oligonucleotide
cuggggcaguggguaacca

SEQ ID NO: 2747532 - RNA, 19 nt, Artificial Sequence
  Description of Artificial Sequence: Synthetic oligonucleotide
ccaaccgaggaggauugaa

SEQ ID NO: 2747533 - RNA, 19 nt, Artificial Sequence
  Description of Artificial Sequence: Synthetic oligonucleotide
gcgggugaggucauaaguu

SEQ ID NO: 2747534 - RNA, 19 nt, Artificial Sequence
  Description of Artificial Sequence: Synthetic oligonucleotide
aggcuucgccacacuucca

SEQ ID NO: 2747535 - RNA, 19 nt, Artificial Sequence
  Description of Artificial Sequence: Synthetic oligonucleotide
caggcccuggagacuggua

SEQ ID NO: 2747536 - RNA, 19 nt, Artificial Sequence
  Description of Artificial Sequence: Synthetic oligonucleotide
gccacacuuccaaguugac

SEQ ID NO: 2747537 - RNA, 19 nt, Artificial Sequence
  Description of Artificial Sequence: Synthetic oligonucleotide
gccccagguaguucagaua

SEQ ID NO: 2747538 - RNA, 19 nt, Artificial Sequence
  Description of Artificial Sequence: Synthetic oligonucleotide
guucugggucagccgcagu

SEQ ID NO: 2747539 - RNA, 19 nt, Artificial Sequence
  Description of Artificial Sequence: Synthetic oligonucleotide
cugcggaguuggugcucca

SEQ ID NO: 2747540 - RNA, 19 nt, Artificial Sequence
  Description of Artificial Sequence: Synthetic oligonucleotide
gggugaggucauaaguuuu

SEQ ID NO: 2747541 - RNA, 19 nt, Artificial Sequence
  Description of Artificial Sequence: Synthetic oligonucleotide
ccaggcccuggaucuccug

SEQ ID NO: 2747542 - RNA, 19 nt, Artificial Sequence
  Description of Artificial Sequence: Synthetic oligonucleotide
agguagcgggugaggucau

SEQ ID NO: 2747543 - RNA, 19 nt, Artificial Sequence
  Description of Artificial Sequence: Synthetic oligonucleotide
gaggggccaggcccuggau

SEQ ID NO: 2747544 - RNA, 19 nt, Artificial Sequence
  Description of Artificial Sequence: Synthetic oligonucleotide
ggugcuccagguagcgggu

SEQ ID NO: 2747545 - RNA, 19 nt, Artificial Sequence
  Description of Artificial Sequence: Synthetic oligonucleotide
cuggaucuccugugcgauu

SEQ ID NO: 2747546 - RNA, 19 nt, Artificial Sequence
  Description of Artificial Sequence: Synthetic oligonucleotide
ggauugaagucaggcucau

SEQ ID NO: 2747547 - RNA, 19 nt, Artificial Sequence
  Description of Artificial Sequence: Synthetic oligonucleotide
caccgugcauaggcaagcu

SEQ ID NO: 2747548 - RNA, 19 nt, Artificial Sequence
  Description of Artificial Sequence: Synthetic oligonucleotide
ccacagcaccgugcauagg

SEQ ID NO: 2747549 - RNA, 19 nt, Artificial Sequence
  Description of Artificial Sequence: Synthetic oligonucleotide
gucggcccugggcaggguu

SEQ ID NO: 2747550 - RNA, 19 nt, Artificial Sequence
  Description of Artificial Sequence: Synthetic oligonucleotide
gcuugacgguugaggccac

SEQ ID NO: 2747551 - RNA, 19 nt, Artificial Sequence
  Description of Artificial Sequence: Synthetic oligonucleotide
agucggcccugggcagggu

SEQ ID NO: 2747552 - RNA, 19 nt, Artificial Sequence
  Description of Artificial Sequence: Synthetic oligonucleotide
  modified_base (4)..(4): a, c, u, g, unknown or other
gccngaagucauccaucuu

SEQ ID NO: 2747553 - RNA, 19 nt, Artificial Sequence
  Description of Artificial Sequence: Synthetic oligonucleotide
ggccaggcugcgucguagu

SEQ ID NO: 2747554 - RNA, 19 nt, Artificial Sequence
  Description of Artificial Sequence: Synthetic oligonucleotide
ccagccaagcugcggaguu

SEQ ID NO: 2747555 - RNA, 19 nt, Artificial Sequence
  Description of Artificial Sequence: Synthetic oligonucleotide
aggcugcgucguaguucug

SEQ ID NO: 2747556 - RNA, 19 nt, Artificial Sequence
  Description of Artificial Sequence: Synthetic oligonucleotide
gggccccagguaguucaga

SEQ ID NO: 2747557 - RNA, 19 nt, Artificial Sequence
  Description of Artificial Sequence: Synthetic oligonucleotide
gccaggggcccaggcuggc

SEQ ID NO: 2747558 - RNA, 19 nt, Artificial Sequence
  Description of Artificial Sequence: Synthetic oligonucleotide
gguagcgggugaggucaua

SEQ ID NO: 2747559 - RNA, 19 nt, Artificial Sequence
  Description of Artificial Sequence: Synthetic oligonucleotide
gugccacagcaccgugcau

SEQ ID NO: 2747560 - RNA, 19 nt, Artificial Sequence
  Description of Artificial Sequence: Synthetic oligonucleotide
cuguggcagcuugacgguu

SEQ ID NO: 2747561 - RNA, 19 nt, Artificial Sequence
  Description of Artificial Sequence: Synthetic oligonucleotide
gcacugcagggaggugcca

SEQ ID NO: 2747562 - RNA, 19 nt, Artificial Sequence
  Description of Artificial Sequence: Synthetic oligonucleotide
gccaggcugcgucguaguu

SEQ ID NO: 2747563 - RNA, 19 nt, Artificial Sequence
  Description of Artificial Sequence: Synthetic oligonucleotide
ccaggcuggcucagucccu

SEQ ID NO: 2747564 - RNA, 19 nt, Artificial Sequence
  Description of Artificial Sequence: Synthetic oligonucleotide
cgguugaggccacgcaagu

SEQ ID NO: 2747565 - RNA, 19 nt, Artificial Sequence
  Description of Artificial Sequence: Synthetic oligonucleotide
cccaaccgaggaggauuga

SEQ ID NO: 2747566 - RNA, 19 nt, Artificial Sequence
  Description of Artificial Sequence: Synthetic oligonucleotide
cggcccugggcaggguuuc

SEQ ID NO: 2747567 - RNA, 19 nt, Artificial Sequence
  Description of Artificial Sequence: Synthetic oligonucleotide
cccagccaagcugcggagu

SEQ ID NO: 2747568 - RNA, 19 nt, Artificial Sequence
  Description of Artificial Sequence: Synthetic oligonucleotide
gggcagggccaggggccca

SEQ ID NO: 2747569 - RNA, 19 nt, Artificial Sequence
  Description of Artificial Sequence: Synthetic oligonucleotide
gccaggcccuggaucuccu

SEQ ID NO: 2747570 - RNA, 19 nt, Artificial Sequence
  Description of Artificial Sequence: Synthetic oligonucleotide
gccaagcugcggaguuggu

SEQ ID NO: 2747571 - RNA, 19 nt, Artificial Sequence
  Description of Artificial Sequence: Synthetic oligonucleotide
ggcccugggcaggguuucu

SEQ ID NO: 2747572 - RNA, 19 nt, Artificial Sequence
  Description of Artificial Sequence: Synthetic oligonucleotide
gggcccaggcuggcucagu

SEQ ID NO: 2747573 - RNA, 19 nt, Artificial Sequence
  Description of Artificial Sequence: Synthetic oligonucleotide
  modified_base (1)..(1): a, c, u, g, unknown or other
ngaagucauccaucuucug

SEQ ID NO: 2747574 - RNA, 19 nt, Artificial Sequence
  Description of Artificial Sequence: Synthetic oligonucleotide
aaacuuuaaccaaucaucc

SEQ ID NO: 2747575 - RNA, 19 nt, Artificial Sequence
  Description of Artificial Sequence: Synthetic oligonucleotide
uccagaaugaucaugugag

SEQ ID NO: 2747576 - RNA, 19 nt, Artificial Sequence
  Description of Artificial Sequence: Synthetic oligonucleotide
uuacaaaugagguugaagu

SEQ ID NO: 2747577 - RNA, 19 nt, Artificial Sequence
  Description of Artificial Sequence: Synthetic oligonucleotide
agaaggugcucucagauac

SEQ ID NO: 2747578 - RNA, 19 nt, Artificial Sequence
  Description of Artificial Sequence: Synthetic oligonucleotide
uuucuuacaaaugagguug

SEQ ID NO: 2747579 - RNA, 19 nt, Artificial Sequence
  Description of Artificial Sequence: Synthetic oligonucleotide
aacuuuaaccaaucauccc

SEQ ID NO: 2747580 - RNA, 19 nt, Artificial Sequence
  Description of Artificial Sequence: Synthetic oligonucleotide
aauacgagacuaaaggaac

SEQ ID NO: 2747581 - RNA, 19 nt, Artificial Sequence
  Description of Artificial Sequence: Synthetic oligonucleotide
uguacuucuuucgagaagg

SEQ ID NO: 2747582 - RNA, 19 nt, Artificial Sequence
  Description of Artificial Sequence: Synthetic oligonucleotide
agacuaaaggaacaccucc

SEQ ID NO: 2747583 - RNA, 19 nt, Artificial Sequence
  Description of Artificial Sequence: Synthetic oligonucleotide
auccauagucgcuagaggc

SEQ ID NO: 2747584 - RNA, 19 nt, Artificial Sequence
  Description of Artificial Sequence: Synthetic oligonucleotide
caaacuuuaaccaaucauc

SEQ ID NO: 2747585 - RNA, 19 nt, Artificial Sequence
  Description of Artificial Sequence: Synthetic oligonucleotide
aggucaugcgucuacagcc

SEQ ID NO: 2747586 - RNA, 19 nt, Artificial Sequence
  Description of Artificial Sequence: Synthetic oligonucleotide
acuucuuucgagaaggugc

SEQ ID NO: 2747587 - RNA, 19 nt, Artificial Sequence
  Description of Artificial Sequence: Synthetic oligonucleotide
acuuuaaccaaucauccca

SEQ ID NO: 2747588 - RNA, 19 nt, Artificial Sequence
  Description of Artificial Sequence: Synthetic oligonucleotide
gaucaugugaguuucuuac

SEQ ID NO: 2747589 - RNA, 19 nt, Artificial Sequence
  Description of Artificial Sequence: Synthetic oligonucleotide
agaggaaucuaccugccgg

SEQ ID NO: 2747590 - RNA, 19 nt, Artificial Sequence
  Description of Artificial Sequence: Synthetic oligonucleotide
auucaugcgaauacgagac

SEQ ID NO: 2747591 - RNA, 19 nt, Artificial Sequence
  Description of Artificial Sequence: Synthetic oligonucleotide
uuaaccaaucaucccagcc

SEQ ID NO: 2747592 - RNA, 19 nt, Artificial Sequence
  Description of Artificial Sequence: Synthetic oligonucleotide
uuugcgaaugaucuucuug

SEQ ID NO: 2747593 - RNA, 19 nt, Artificial Sequence
  Description of Artificial Sequence: Synthetic oligonucleotide
uugaagucaaaaucaaaac

SEQ ID NO: 2747594 - RNA, 19 nt, Artificial Sequence
  Description of Artificial Sequence: Synthetic oligonucleotide
ugaauuguuccucugucac

SEQ ID NO: 2747595 - RNA, 19 nt, Artificial Sequence
  Description of Artificial Sequence: Synthetic oligonucleotide
uaaccaaucaucccagcca

SEQ ID NO: 2747596 - RNA, 19 nt, Artificial Sequence
  Description of Artificial Sequence: Synthetic oligonucleotide
gcgaauacgagacuaaagg

SEQ ID NO: 2747597 - RNA, 19 nt, Artificial Sequence
  Description of Artificial Sequence: Synthetic oligonucleotide
cugauucccacagagaucc

SEQ ID NO: 2747598 - RNA, 19 nt, Artificial Sequence
  Description of Artificial Sequence: Synthetic oligonucleotide
aauuguuccucugucaccu

SEQ ID NO: 2747599 - RNA, 19 nt, Artificial Sequence
  Description of Artificial Sequence: Synthetic oligonucleotide
ucauucaugcgaauacgag

SEQ ID NO: 2747600 - RNA, 19 nt, Artificial Sequence
  Description of Artificial Sequence: Synthetic oligonucleotide
caugucugcacccaugugc

SEQ ID NO: 2747601 - RNA, 19 nt, Artificial Sequence
  Description of Artificial Sequence: Synthetic oligonucleotide
uguugcugcgugucgaugg

SEQ ID NO: 2747602 - RNA, 19 nt, Artificial Sequence
  Description of Artificial Sequence: Synthetic oligonucleotide
ucuacagccagucauucau

SEQ ID NO: 2747603 - RNA, 19 nt, Artificial Sequence
  Description of Artificial Sequence: Synthetic oligonucleotide
ugugaguuucuuacaaaug

SEQ ID NO: 2747604 - RNA, 19 nt, Artificial Sequence
  Description of Artificial Sequence: Synthetic oligonucleotide
acaaacuuuaaccaaucau

SEQ ID NO: 2747605 - RNA, 19 nt, Artificial Sequence
  Description of Artificial Sequence: Synthetic oligonucleotide
aaggugcucucagauaccc

SEQ ID NO: 2747606 - RNA, 19 nt, Artificial Sequence
  Description of Artificial Sequence: Synthetic oligonucleotide
aaacaaacuuuaaccaauc

SEQ ID NO: 2747607 - RNA, 19 nt, Artificial Sequence
  Description of Artificial Sequence: Synthetic oligonucleotide
ucagauacccacaggcuug

SEQ ID NO: 2747608 - RNA, 19 nt, Artificial Sequence
  Description of Artificial Sequence: Synthetic oligonucleotide
uccugauucccacagagau

SEQ ID NO: 2747609 - RNA, 19 nt, Artificial Sequence
  Description of Artificial Sequence: Synthetic oligonucleotide
ucucaaguggcccacucug

SEQ ID NO: 2747610 - RNA, 19 nt, Artificial Sequence
  Description of Artificial Sequence: Synthetic oligonucleotide
gugaguuucuuacaaauga

SEQ ID NO: 2747611 - RNA, 19 nt, Artificial Sequence
  Description of Artificial Sequence: Synthetic oligonucleotide
ugcgaauacgagacuaaag

SEQ ID NO: 2747612 - RNA, 19 nt, Artificial Sequence
  Description of Artificial Sequence: Synthetic oligonucleotide
cuaaaggaacaccuccucg

SEQ ID NO: 2747613 - RNA, 19 nt, Artificial Sequence
  Description of Artificial Sequence: Synthetic oligonucleotide
ugugaauuguuccucuguc

SEQ ID NO: 2747614 - RNA, 19 nt, Artificial Sequence
  Description of Artificial Sequence: Synthetic oligonucleotide
acaaaugagguugaaguca

SEQ ID NO: 2747615 - RNA, 19 nt, Artificial Sequence
  Description of Artificial Sequence: Synthetic oligonucleotide
guugaagucaaaaucaaaa

SEQ ID NO: 2747616 - RNA, 19 nt, Artificial Sequence
  Description of Artificial Sequence: Synthetic oligonucleotide
gagguugaagucaaaauca

SEQ ID NO: 2747617 - RNA, 19 nt, Artificial Sequence
  Description of Artificial Sequence: Synthetic oligonucleotide
auauucugaagcucaccuc

SEQ ID NO: 2747618 - RNA, 19 nt, Artificial Sequence
  Description of Artificial Sequence: Synthetic oligonucleotide
gauccauagucgcuagagg

SEQ ID NO: 2747619 - RNA, 19 nt, Artificial Sequence
  Description of Artificial Sequence: Synthetic oligonucleotide
aaugagguugaagucaaaa

SEQ ID NO: 2747620 - RNA, 19 nt, Artificial Sequence
  Description of Artificial Sequence: Synthetic oligonucleotide
gaagacuguaggucaugcg

SEQ ID NO: 2747621 - RNA, 19 nt, Artificial Sequence
  Description of Artificial Sequence: Synthetic oligonucleotide
uacaaaugagguugaaguc

SEQ ID NO: 2747622 - RNA, 19 nt, Artificial Sequence
  Description of Artificial Sequence: Synthetic oligonucleotide
uucgagaaggugcucucag

SEQ ID NO: 2747623 - RNA, 19 nt, Artificial Sequence
  Description of Artificial Sequence: Synthetic oligonucleotide
uccauagucgcuagaggca

SEQ ID NO: 2747624 - RNA, 19 nt, Artificial Sequence
  Description of Artificial Sequence: Synthetic oligonucleotide
gaaucuaccugccggacga

SEQ ID NO: 2747625 - RNA, 19 nt, Artificial Sequence
  Description of Artificial Sequence: Synthetic oligonucleotide
uucaugucugcacccaugu

SEQ ID NO: 2747626 - RNA, 19 nt, Artificial Sequence
  Description of Artificial Sequence: Synthetic oligonucleotide
augugaguuucuuacaaau

SEQ ID NO: 2747627 - RNA, 19 nt, Artificial Sequence
  Description of Artificial Sequence: Synthetic oligonucleotide
agagcccuuauucaugucu

SEQ ID NO: 2747628 - RNA, 19 nt, Artificial Sequence
  Description of Artificial Sequence: Synthetic oligonucleotide
gaauacgagacuaaaggaa

SEQ ID NO: 2747629 - RNA, 19 nt, Artificial Sequence
  Description of Artificial Sequence: Synthetic oligonucleotide
agauccauagucgcuagag

SEQ ID NO: 2747630 - RNA, 19 nt, Artificial Sequence
  Description of Artificial Sequence: Synthetic oligonucleotide
agaaugaucaugugaguuu

SEQ ID NO: 2747631 - RNA, 19 nt, Artificial Sequence
  Description of Artificial Sequence: Synthetic oligonucleotide
acccaugugcucuuugggg

SEQ ID NO: 2747632 - RNA, 19 nt, Artificial Sequence
  Description of Artificial Sequence: Synthetic oligonucleotide
acgacuuugcgaaugaucu

SEQ ID NO: 2747633 - RNA, 19 nt, Artificial Sequence
  Description of Artificial Sequence: Synthetic oligonucleotide
gacugaagacuguagguca

SEQ ID NO: 2747634 - RNA, 19 nt, Artificial Sequence
  Description of Artificial Sequence: Synthetic oligonucleotide
caggacugaagacuguagg

SEQ ID NO: 2747635 - RNA, 19 nt, Artificial Sequence
  Description of Artificial Sequence: Synthetic oligonucleotide
cacagagauccauagucgc

SEQ ID NO: 2747636 - RNA, 19 nt, Artificial Sequence
  Description of Artificial Sequence: Synthetic oligonucleotide
aagcucaccucccuguacu

SEQ ID NO: 2747637 - RNA, 19 nt, Artificial Sequence
  Description of Artificial Sequence: Synthetic oligonucleotide
agucauucaugcgaauacg

SEQ ID NO: 2747638 - RNA, 19 nt, Artificial Sequence
  Description of Artificial Sequence: Synthetic oligonucleotide
ugcgucuacagccagucau

SEQ ID NO: 2747639 - RNA, 19 nt, Artificial Sequence
  Description of Artificial Sequence: Synthetic oligonucleotide
aaguggcccacucuguaca

SEQ ID NO: 2747640 - RNA, 19 nt, Artificial Sequence
  Description of Artificial Sequence: Synthetic oligonucleotide
acaguagagcccuuauuca

SEQ ID NO: 2747641 - RNA, 19 nt, Artificial Sequence
  Description of Artificial Sequence: Synthetic oligonucleotide
uucccacagagauccauag

SEQ ID NO: 2747642 - RNA, 19 nt, Artificial Sequence
  Description of Artificial Sequence: Synthetic oligonucleotide
cagucauucaugcgaauac

SEQ ID NO: 2747643 - RNA, 19 nt, Artificial Sequence
  Description of Artificial Sequence: Synthetic oligonucleotide
acgagacuaaaggaacacc

SEQ ID NO: 2747644 - RNA, 19 nt, Artificial Sequence
  Description of Artificial Sequence: Synthetic oligonucleotide
cauucaugcgaauacgaga

SEQ ID NO: 2747645 - RNA, 19 nt, Artificial Sequence
  Description of Artificial Sequence: Synthetic oligonucleotide
gaaugaucaugugaguuuc

SEQ ID NO: 2747646 - RNA, 19 nt, Artificial Sequence
  Description of Artificial Sequence: Synthetic oligonucleotide
gacuuugcgaaugaucuuc

SEQ ID NO: 2747647 - RNA, 19 nt, Artificial Sequence
  Description of Artificial Sequence: Synthetic oligonucleotide
agucgcuagaggcaggacu

SEQ ID NO: 2747648 - RNA, 19 nt, Artificial Sequence
  Description of Artificial Sequence: Synthetic oligonucleotide
uuuaaccaaucaucccagc

SEQ ID NO: 2747649 - RNA, 19 nt, Artificial Sequence
  Description of Artificial Sequence: Synthetic oligonucleotide
ucgucugugaauuguuccu

SEQ ID NO: 2747650 - RNA, 19 nt, Artificial Sequence
  Description of Artificial Sequence: Synthetic oligonucleotide
ucuuucgagaaggugcucu

SEQ ID NO: 2747651 - RNA, 19 nt, Artificial Sequence
  Description of Artificial Sequence: Synthetic oligonucleotide
caggauauucugaagcuca

SEQ ID NO: 2747652 - RNA, 19 nt, Artificial Sequence
  Description of Artificial Sequence: Synthetic oligonucleotide
cuguacauggguaugccca

SEQ ID NO: 2747653 - RNA, 19 nt, Artificial Sequence
  Description of Artificial Sequence: Synthetic oligonucleotide
uuuggggcuugcuugcucu

SEQ ID NO: 2747654 - RNA, 19 nt, Artificial Sequence
  Description of Artificial Sequence: Synthetic oligonucleotide
uucuuacaaaugagguuga

SEQ ID NO: 2747655 - RNA, 19 nt, Artificial Sequence
  Description of Artificial Sequence: Synthetic oligonucleotide
aaggaacaccuccucgugu

SEQ ID NO: 2747656 - RNA, 19 nt, Artificial Sequence
  Description of Artificial Sequence: Synthetic oligonucleotide
uacauggguaugcccacug

SEQ ID NO: 2747657 - RNA, 19 nt, Artificial Sequence
  Description of Artificial Sequence: Synthetic oligonucleotide
cuagaggcaggacugaaga

SEQ ID NO: 2747658 - RNA, 19 nt, Artificial Sequence
  Description of Artificial Sequence: Synthetic oligonucleotide
agcccuuauucaugucugc

SEQ ID NO: 2747659 - RNA, 19 nt, Artificial Sequence
  Description of Artificial Sequence: Synthetic oligonucleotide
agucaaaaucaaaacaaaa

SEQ ID NO: 2747660 - RNA, 19 nt, Artificial Sequence
  Description of Artificial Sequence: Synthetic oligonucleotide
ugccggacgacuuugcgaa

SEQ ID NO: 2747661 - RNA, 19 nt, Artificial Sequence
  Description of Artificial Sequence: Synthetic oligonucleotide
ucugugaauuguuccucug

SEQ ID NO: 2747662 - RNA, 19 nt, Artificial Sequence
  Description of Artificial Sequence: Synthetic oligonucleotide
uguacauggguaugcccac

SEQ ID NO: 2747663 - RNA, 19 nt, Artificial Sequence
  Description of Artificial Sequence: Synthetic oligonucleotide
uggguaugcccacugugga

SEQ ID NO: 2747664 - RNA, 19 nt, Artificial Sequence
  Description of Artificial Sequence: Synthetic oligonucleotide
uuauucaugucugcaccca

SEQ ID NO: 2747665 - RNA, 19 nt, Artificial Sequence
  Description of Artificial Sequence: Synthetic oligonucleotide
augcccacuguggagaggg

SEQ ID NO: 2747666 - RNA, 19 nt, Artificial Sequence
  Description of Artificial Sequence: Synthetic oligonucleotide
auggguaugcccacugugg

SEQ ID NO: 2747667 - RNA, 19 nt, Artificial Sequence
  Description of Artificial Sequence: Synthetic oligonucleotide
ucuccaggauauucugaag

SEQ ID NO: 2747668 - RNA, 19 nt, Artificial Sequence
  Description of Artificial Sequence: Synthetic oligonucleotide
aagaagcaaacaaacuuua

SEQ ID NO: 2747669 - RNA, 19 nt, Artificial Sequence
  Description of Artificial Sequence: Synthetic oligonucleotide
uggagagggcagcuccucg

SEQ ID NO: 2747670 - RNA, 19 nt, Artificial Sequence
  Description of Artificial Sequence: Synthetic oligonucleotide
agagauccauagucgcuag

SEQ ID NO: 2747671 - RNA, 19 nt, Artificial Sequence
  Description of Artificial Sequence: Synthetic oligonucleotide
aucaugugaguuucuuaca

SEQ ID NO: 2747672 - RNA, 19 nt, Artificial Sequence
  Description of Artificial Sequence: Synthetic oligonucleotide
agacuguaggucaugcguc

SEQ ID NO: 2747673 - RNA, 19 nt, Artificial Sequence
  Description of Artificial Sequence: Synthetic oligonucleotide
ugcugcgugucgauggcgc

SEQ ID NO: 2747674 - RNA, 19 nt, Artificial Sequence
  Description of Artificial Sequence: Synthetic oligonucleotide
uacgagacuaaaggaacac

SEQ ID NO: 2747675 - RNA, 19 nt, Artificial Sequence
  Description of Artificial Sequence: Synthetic oligonucleotide
ucccuguacuucuuucgag

SEQ ID NO: 2747676 - RNA, 19 nt, Artificial Sequence
  Description of Artificial Sequence: Synthetic oligonucleotide
cauggguaugcccacugug

SEQ ID NO: 2747677 - RNA, 19 nt, Artificial Sequence
  Description of Artificial Sequence: Synthetic oligonucleotide
cuguggagagggcagcucc

SEQ ID NO: 2747678 - RNA, 19 nt, Artificial Sequence
  Description of Artificial Sequence: Synthetic oligonucleotide
gaggcaggacugaagacug

SEQ ID NO: 2747679 - RNA, 19 nt, Artificial Sequence
  Description of Artificial Sequence: Synthetic oligonucleotide
ucaugcgaauacgagacua

SEQ ID NO: 2747680 - RNA, 19 nt, Artificial Sequence
  Description of Artificial Sequence: Synthetic oligonucleotide
ccuuauucaugucugcacc

SEQ ID NO: 2747681 - RNA, 19 nt, Artificial Sequence
  Description of Artificial Sequence: Synthetic oligonucleotide
cuugguuccuugccagccg

SEQ ID NO: 2747682 - RNA, 19 nt, Artificial Sequence
  Description of Artificial Sequence: Synthetic oligonucleotide
ugaucaugugaguuucuua

SEQ ID NO: 2747683 - RNA, 19 nt, Artificial Sequence
  Description of Artificial Sequence: Synthetic oligonucleotide
uacuucuuucgagaaggug

SEQ ID NO: 2747684 - RNA, 19 nt, Artificial Sequence
  Description of Artificial Sequence: Synthetic oligonucleotide
aacaccuccucguguugcu

SEQ ID NO: 2747685 - RNA, 19 nt, Artificial Sequence
  Description of Artificial Sequence: Synthetic oligonucleotide
ggugcucucagauacccac

SEQ ID NO: 2747686 - RNA, 19 nt, Artificial Sequence
  Description of Artificial Sequence: Synthetic oligonucleotide
gccagaggaaucuaccugc

SEQ ID NO: 2747687 - RNA, 19 nt, Artificial Sequence
  Description of Artificial Sequence: Synthetic oligonucleotide
gugucgauggcgccagagg

SEQ ID NO: 2747688 - RNA, 19 nt, Artificial Sequence
  Description of Artificial Sequence: Synthetic oligonucleotide
uauucaugucugcacccau

SEQ ID NO: 2747689 - RNA, 19 nt, Artificial Sequence
  Description of Artificial Sequence: Synthetic oligonucleotide
guaggucaugcgucuacag

SEQ ID NO: 2747690 - RNA, 19 nt, Artificial Sequence
  Description of Artificial Sequence: Synthetic oligonucleotide
ucaaguggcccacucugua

SEQ ID NO: 2747691 - RNA, 19 nt, Artificial Sequence
  Description of Artificial Sequence: Synthetic oligonucleotide
aguagagcccuuauucaug

SEQ ID NO: 2747692 - RNA, 19 nt, Artificial Sequence
  Description of Artificial Sequence: Synthetic oligonucleotide
gaggaaucuaccugccgga

SEQ ID NO: 2747693 - RNA, 19 nt, Artificial Sequence
  Description of Artificial Sequence: Synthetic oligonucleotide
gacgacuuugcgaaugauc

SEQ ID NO: 2747694 - RNA, 19 nt, Artificial Sequence
  Description of Artificial Sequence: Synthetic oligonucleotide
uguaggucaugcgucuaca

SEQ ID NO: 2747695 - RNA, 19 nt, Artificial Sequence
  Description of Artificial Sequence: Synthetic oligonucleotide
gugaauuguuccucuguca

SEQ ID NO: 2747696 - RNA, 19 nt, Artificial Sequence
  Description of Artificial Sequence: Synthetic oligonucleotide
gucgcuagaggcaggacug

SEQ ID NO: 2747697 - RNA, 19 nt, Artificial Sequence
  Description of Artificial Sequence: Synthetic oligonucleotide
ugcgaaugaucuucuuggu

SEQ ID NO: 2747698 - RNA, 19 nt, Artificial Sequence
  Description of Artificial Sequence: Synthetic oligonucleotide
cuguacuucuuucgagaag

SEQ ID NO: 2747699 - RNA, 19 nt, Artificial Sequence
  Description of Artificial Sequence: Synthetic oligonucleotide
ggaaucuaccugccggacg

SEQ ID NO: 2747700 - RNA, 19 nt, Artificial Sequence
  Description of Artificial Sequence: Synthetic oligonucleotide
gagacuaaaggaacaccuc

SEQ ID NO: 2747701 - RNA, 19 nt, Artificial Sequence
  Description of Artificial Sequence: Synthetic oligonucleotide
aggcuugguuccuugccag

SEQ ID NO: 2747702 - RNA, 19 nt, Artificial Sequence
  Description of Artificial Sequence: Synthetic oligonucleotide
cacccaugugcucuuuggg

SEQ ID NO: 2747703 - RNA, 19 nt, Artificial Sequence
  Description of Artificial Sequence: Synthetic oligonucleotide
ucaugucugcacccaugug

SEQ ID NO: 2747704 - RNA, 19 nt, Artificial Sequence
  Description of Artificial Sequence: Synthetic oligonucleotide
uucaugcgaauacgagacu

SEQ ID NO: 2747705 - RNA, 19 nt, Artificial Sequence
  Description of Artificial Sequence: Synthetic oligonucleotide
ccacagagauccauagucg

SEQ ID NO: 2747706 - RNA, 19 nt, Artificial Sequence
  Description of Artificial Sequence: Synthetic oligonucleotide
uugguuccuugccagccgu

SEQ ID NO: 2747707 - RNA, 19 nt, Artificial Sequence
  Description of Artificial Sequence: Synthetic oligonucleotide
cagccagucauucaugcga

SEQ ID NO: 2747708 - RNA, 19 nt, Artificial Sequence
  Description of Artificial Sequence: Synthetic oligonucleotide
cucucccucacuccucucc

SEQ ID NO: 2747709 - RNA, 19 nt, Artificial Sequence
  Description of Artificial Sequence: Synthetic oligonucleotide
cuugcuugcucucccucac

SEQ ID NO: 2747710 - RNA, 19 nt, Artificial Sequence
  Description of Artificial Sequence: Synthetic oligonucleotide
ucuaccugccggacgacuu

SEQ ID NO: 2747711 - RNA, 19 nt, Artificial Sequence
  Description of Artificial Sequence: Synthetic oligonucleotide
cagaggaaucuaccugccg

SEQ ID NO: 2747712 - RNA, 19 nt, Artificial Sequence
  Description of Artificial Sequence: Synthetic oligonucleotide
cuuucgagaaggugcucuc

SEQ ID NO: 2747713 - RNA, 19 nt, Artificial Sequence
  Description of Artificial Sequence: Synthetic oligonucleotide
ugcccuguucgucugugaa

SEQ ID NO: 2747714 - RNA, 19 nt, Artificial Sequence
  Description of Artificial Sequence: Synthetic oligonucleotide
ucgagaaggugcucucaga

SEQ ID NO: 2747715 - RNA, 19 nt, Artificial Sequence
  Description of Artificial Sequence: Synthetic oligonucleotide
gaagcucaccucccuguac

SEQ ID NO: 2747716 - RNA, 19 nt, Artificial Sequence
  Description of Artificial Sequence: Synthetic oligonucleotide
gaacaccuccucguguugc

SEQ ID NO: 2747717 - RNA, 19 nt, Artificial Sequence
  Description of Artificial Sequence: Synthetic oligonucleotide
aggaaucuaccugccggac

SEQ ID NO: 2747718 - RNA, 19 nt, Artificial Sequence
  Description of Artificial Sequence: Synthetic oligonucleotide
cauagucgcuagaggcagg

SEQ ID NO: 2747719 - RNA, 19 nt, Artificial Sequence
  Description of Artificial Sequence: Synthetic oligonucleotide
aggaacaccuccucguguu

SEQ ID NO: 2747720 - RNA, 19 nt, Artificial Sequence
  Description of Artificial Sequence: Synthetic oligonucleotide
aaugaucaugugaguuucu

SEQ ID NO: 2747721 - RNA, 19 nt, Artificial Sequence
  Description of Artificial Sequence: Synthetic oligonucleotide
aaucuaccugccggacgac

SEQ ID NO: 2747722 - RNA, 19 nt, Artificial Sequence
  Description of Artificial Sequence: Synthetic oligonucleotide
ugcucucccucacuccucu

SEQ ID NO: 2747723 - RNA, 19 nt, Artificial Sequence
  Description of Artificial Sequence: Synthetic oligonucleotide
gucauucaugcgaauacga

SEQ ID NO: 2747724 - RNA, 19 nt, Artificial Sequence
  Description of Artificial Sequence: Synthetic oligonucleotide
uuucgagaaggugcucuca

SEQ ID NO: 2747725 - RNA, 19 nt, Artificial Sequence
  Description of Artificial Sequence: Synthetic oligonucleotide
auacgagacuaaaggaaca

SEQ ID NO: 2747726 - RNA, 19 nt, Artificial Sequence
  Description of Artificial Sequence: Synthetic oligonucleotide
ucccacagagauccauagu

SEQ ID NO: 2747727 - RNA, 19 nt, Artificial Sequence
  Description of Artificial Sequence: Synthetic oligonucleotide
ugcacccaugugcucuuug

SEQ ID NO: 2747728 - RNA, 19 nt, Artificial Sequence
  Description of Artificial Sequence: Synthetic oligonucleotide
guuucuuacaaaugagguu

SEQ ID NO: 2747729 - RNA, 19 nt, Artificial Sequence
  Description of Artificial Sequence: Synthetic oligonucleotide
guugcugcgugucgauggc

SEQ ID NO: 2747730 - RNA, 19 nt, Artificial Sequence
  Description of Artificial Sequence: Synthetic oligonucleotide
ugucgcucucaaguggccc

SEQ ID NO: 2747731 - RNA, 19 nt, Artificial Sequence
  Description of Artificial Sequence: Synthetic oligonucleotide
cucguguugcugcgugucg

SEQ ID NO: 2747732 - RNA, 19 nt, Artificial Sequence
  Description of Artificial Sequence: Synthetic oligonucleotide
cuguaggucaugcgucuac

SEQ ID NO: 2747733 - RNA, 19 nt, Artificial Sequence
  Description of Artificial Sequence: Synthetic oligonucleotide
cucucccuucuucuugcgg

SEQ ID NO: 2747734 - RNA, 19 nt, Artificial Sequence
  Description of Artificial Sequence: Synthetic oligonucleotide
caccuccucguguugcugc

SEQ ID NO: 2747735 - RNA, 19 nt, Artificial Sequence
  Description of Artificial Sequence: Synthetic oligonucleotide
guaugcccacuguggagag

SEQ ID NO: 2747736 - RNA, 19 nt, Artificial Sequence
  Description of Artificial Sequence: Synthetic oligonucleotide
auagucgcuagaggcagga

SEQ ID NO: 2747737 - RNA, 19 nt, Artificial Sequence
  Description of Artificial Sequence: Synthetic oligonucleotide
auucaugucugcacccaug

SEQ ID NO: 2747738 - RNA, 19 nt, Artificial Sequence
  Description of Artificial Sequence: Synthetic oligonucleotide
uuguccugauucccacaga

SEQ ID NO: 2747739 - RNA, 19 nt, Artificial Sequence
  Description of Artificial Sequence: Synthetic oligonucleotide
gaaggugcucucagauacc

SEQ ID NO: 2747740 - RNA, 19 nt, Artificial Sequence
  Description of Artificial Sequence: Synthetic oligonucleotide
ggcugucgcucucaagugg

SEQ ID NO: 2747741 - RNA, 19 nt, Artificial Sequence
  Description of Artificial Sequence: Synthetic oligonucleotide
acagagauccauagucgcu

SEQ ID NO: 2747742 - RNA, 19 nt, Artificial Sequence
  Description of Artificial Sequence: Synthetic oligonucleotide
gcacccaugugcucuuugg

SEQ ID NO: 2747743 - RNA, 19 nt, Artificial Sequence
  Description of Artificial Sequence: Synthetic oligonucleotide
caugugaguuucuuacaaa

SEQ ID NO: 2747744 - RNA, 19 nt, Artificial Sequence
  Description of Artificial Sequence: Synthetic oligonucleotide
gucaugcgucuacagccag

SEQ ID NO: 2747745 - RNA, 19 nt, Artificial Sequence
  Description of Artificial Sequence: Synthetic oligonucleotide
ucuuacaaaugagguugaa

SEQ ID NO: 2747746 - RNA, 19 nt, Artificial Sequence
  Description of Artificial Sequence: Synthetic oligonucleotide
gcgaaugaucuucuuggug

SEQ ID NO: 2747747 - RNA, 19 nt, Artificial Sequence
  Description of Artificial Sequence: Synthetic oligonucleotide
guagagcccuuauucaugu

SEQ ID NO: 2747748 - RNA, 19 nt, Artificial Sequence
  Description of Artificial Sequence: Synthetic oligonucleotide
acauggguaugcccacugu

SEQ ID NO: 2747749 - RNA, 19 nt, Artificial Sequence
  Description of Artificial Sequence: Synthetic oligonucleotide
cuucuuucgagaaggugcu

SEQ ID NO: 2747750 - RNA, 19 nt, Artificial Sequence
  Description of Artificial Sequence: Synthetic oligonucleotide
ugcgugucgauggcgccag

SEQ ID NO: 2747751 - RNA, 19 nt, Artificial Sequence
  Description of Artificial Sequence: Synthetic oligonucleotide
gacuaaaggaacaccuccu

SEQ ID NO: 2747752 - RNA, 19 nt, Artificial Sequence
  Description of Artificial Sequence: Synthetic oligonucleotide
ucguguugcugcgugucga

SEQ ID NO: 2747753 - RNA, 19 nt, Artificial Sequence
  Description of Artificial Sequence: Synthetic oligonucleotide
caugcgaauacgagacuaa

SEQ ID NO: 2747754 - RNA, 19 nt, Artificial Sequence
  Description of Artificial Sequence: Synthetic oligonucleotide
agaagcaaacaaacuuuaa

SEQ ID NO: 2747755 - RNA, 19 nt, Artificial Sequence
  Description of Artificial Sequence: Synthetic oligonucleotide
ucuugcggccuuuguccug

SEQ ID NO: 2747756 - RNA, 19 nt, Artificial Sequence
  Description of Artificial Sequence: Synthetic oligonucleotide
ucgauggcgccagaggaau

SEQ ID NO: 2747757 - RNA, 19 nt, Artificial Sequence
  Description of Artificial Sequence: Synthetic oligonucleotide
gagaaggugcucucagaua

SEQ ID NO: 2747758 - RNA, 19 nt, Artificial Sequence
  Description of Artificial Sequence: Synthetic oligonucleotide
ccucccuguacuucuuucg

SEQ ID NO: 2747759 - RNA, 19 nt, Artificial Sequence
  Description of Artificial Sequence: Synthetic oligonucleotide
ggacugaagacuguagguc

SEQ ID NO: 2747760 - RNA, 19 nt, Artificial Sequence
  Description of Artificial Sequence: Synthetic oligonucleotide
agguugaagucaaaaucaa

SEQ ID NO: 2747761 - RNA, 19 nt, Artificial Sequence
  Description of Artificial Sequence: Synthetic oligonucleotide
uugcugcgugucgauggcg

SEQ ID NO: 2747762 - RNA, 19 nt, Artificial Sequence
  Description of Artificial Sequence: Synthetic oligonucleotide
gacuguaggucaugcgucu

SEQ ID NO: 2747763 - RNA, 19 nt, Artificial Sequence
  Description of Artificial Sequence: Synthetic oligonucleotide
augaucaugugaguuucuu

SEQ ID NO: 2747764 - RNA, 19 nt, Artificial Sequence
  Description of Artificial Sequence: Synthetic oligonucleotide
cccuuauucaugucugcac

SEQ ID NO: 2747765 - RNA, 19 nt, Artificial Sequence
  Description of Artificial Sequence: Synthetic oligonucleotide
uggcgccagaggaaucuac

SEQ ID NO: 2747766 - RNA, 19 nt, Artificial Sequence
  Description of Artificial Sequence: Synthetic oligonucleotide
gguaugcccacuguggaga

SEQ ID NO: 2747767 - RNA, 19 nt, Artificial Sequence
  Description of Artificial Sequence: Synthetic oligonucleotide
ggauauucugaagcucacc

SEQ ID NO: 2747768 - RNA, 19 nt, Artificial Sequence
  Description of Artificial Sequence: Synthetic oligonucleotide
gguuccuugccagccgugg

SEQ ID NO: 2747769 - RNA, 19 nt, Artificial Sequence
  Description of Artificial Sequence: Synthetic oligonucleotide
gucgcucucaaguggccca

SEQ ID NO: 2747770 - RNA, 19 nt, Artificial Sequence
  Description of Artificial Sequence: Synthetic oligonucleotide
auguugcccuguucgucug

SEQ ID NO: 2747771 - RNA, 19 nt, Artificial Sequence
  Description of Artificial Sequence: Synthetic oligonucleotide
uguugcccuguucgucugu

SEQ ID NO: 2747772 - RNA, 19 nt, Artificial Sequence
  Description of Artificial Sequence: Synthetic oligonucleotide
ugguuccuugccagccgug

SEQ ID NO: 2747773 - RNA, 19 nt, Artificial Sequence
  Description of Artificial Sequence: Synthetic oligonucleotide
guucgucugugaauuguuc

SEQ ID NO: 2747774 - RNA, 19 nt, Artificial Sequence
  Description of Artificial Sequence: Synthetic oligonucleotide
cuccucguguugcugcgug

SEQ ID NO: 2747775 - RNA, 19 nt, Artificial Sequence
  Description of Artificial Sequence: Synthetic oligonucleotide
cucccuguacuucuuucga

SEQ ID NO: 2747776 - RNA, 19 nt, Artificial Sequence
  Description of Artificial Sequence: Synthetic oligonucleotide
augcgaauacgagacuaaa

SEQ ID NO: 2747777 - RNA, 19 nt, Artificial Sequence
  Description of Artificial Sequence: Synthetic oligonucleotide
ggguaugcccacuguggag

SEQ ID NO: 2747778 - RNA, 19 nt, Artificial Sequence
  Description of Artificial Sequence: Synthetic oligonucleotide
cuuuggggcuugcuugcuc

SEQ ID NO: 2747779 - RNA, 19 nt, Artificial Sequence
  Description of Artificial Sequence: Synthetic oligonucleotide
gauggcgccagaggaaucu

SEQ ID NO: 2747780 - RNA, 19 nt, Artificial Sequence
  Description of Artificial Sequence: Synthetic oligonucleotide
gucuacagccagucauuca

SEQ ID NO: 2747781 - RNA, 19 nt, Artificial Sequence
  Description of Artificial Sequence: Synthetic oligonucleotide
uggggcuugcuugcucucc

SEQ ID NO: 2747782 - RNA, 19 nt, Artificial Sequence
  Description of Artificial Sequence: Synthetic oligonucleotide
gagauccauagucgcuaga

SEQ ID NO: 2747783 - RNA, 19 nt, Artificial Sequence
  Description of Artificial Sequence: Synthetic oligonucleotide
caggcuugguuccuugcca

SEQ ID NO: 2747784 - RNA, 19 nt, Artificial Sequence
  Description of Artificial Sequence: Synthetic oligonucleotide
ggggcugucgcucucaagu

SEQ ID NO: 2747785 - RNA, 19 nt, Artificial Sequence
  Description of Artificial Sequence: Synthetic oligonucleotide
acugaagacuguaggucau

SEQ ID NO: 2747786 - RNA, 19 nt, Artificial Sequence
  Description of Artificial Sequence: Synthetic oligonucleotide
cgaauacgagacuaaagga

SEQ ID NO: 2747787 - RNA, 19 nt, Artificial Sequence
  Description of Artificial Sequence: Synthetic oligonucleotide
ccauagucgcuagaggcag

SEQ ID NO: 2747788 - RNA, 19 nt, Artificial Sequence
  Description of Artificial Sequence: Synthetic oligonucleotide
ugauucccacagagaucca

SEQ ID NO: 2747789 - RNA, 19 nt, Artificial Sequence
  Description of Artificial Sequence: Synthetic oligonucleotide
gcuugguuccuugccagcc

SEQ ID NO: 2747790 - RNA, 19 nt, Artificial Sequence
  Description of Artificial Sequence: Synthetic oligonucleotide
gcucucagauacccacagg

SEQ ID NO: 2747791 - RNA, 19 nt, Artificial Sequence
  Description of Artificial Sequence: Synthetic oligonucleotide
ccagaggaaucuaccugcc

SEQ ID NO: 2747792 - RNA, 19 nt, Artificial Sequence
  Description of Artificial Sequence: Synthetic oligonucleotide
guugcccuguucgucugug

SEQ ID NO: 2747793 - RNA, 19 nt, Artificial Sequence
  Description of Artificial Sequence: Synthetic oligonucleotide
uccucguguugcugcgugu

SEQ ID NO: 2747794 - RNA, 19 nt, Artificial Sequence
  Description of Artificial Sequence: Synthetic oligonucleotide
gcugucgcucucaaguggc

SEQ ID NO: 2747795 - RNA, 19 nt, Artificial Sequence
  Description of Artificial Sequence: Synthetic oligonucleotide
gcuagaggcaggacugaag

SEQ ID NO: 2747796 - RNA, 19 nt, Artificial Sequence
  Description of Artificial Sequence: Synthetic oligonucleotide
cugccggacgacuuugcga

SEQ ID NO: 2747797 - RNA, 19 nt, Artificial Sequence
  Description of Artificial Sequence: Synthetic oligonucleotide
ucugcacccaugugcucuu

SEQ ID NO: 2747798 - RNA, 19 nt, Artificial Sequence
  Description of Artificial Sequence: Synthetic oligonucleotide
cagagauccauagucgcua

SEQ ID NO: 2747799 - RNA, 19 nt, Artificial Sequence
  Description of Artificial Sequence: Synthetic oligonucleotide
uugcccuguucgucuguga

SEQ ID NO: 2747800 - RNA, 19 nt, Artificial Sequence
  Description of Artificial Sequence: Synthetic oligonucleotide
aaaugagguugaagucaaa

SEQ ID NO: 2747801 - RNA, 19 nt, Artificial Sequence
  Description of Artificial Sequence: Synthetic oligonucleotide
auucccacagagauccaua

SEQ ID NO: 2747802 - RNA, 19 nt, Artificial Sequence
  Description of Artificial Sequence: Synthetic oligonucleotide
cucagauacccacaggcuu

SEQ ID NO: 2747803 - RNA, 19 nt, Artificial Sequence
  Description of Artificial Sequence: Synthetic oligonucleotide
cugaagcucaccucccugu

SEQ ID NO: 2747804 - RNA, 19 nt, Artificial Sequence
  Description of Artificial Sequence: Synthetic oligonucleotide
ggcgccagaggaaucuacc

SEQ ID NO: 2747805 - RNA, 19 nt, Artificial Sequence
  Description of Artificial Sequence: Synthetic oligonucleotide
ggaacaccuccucguguug

SEQ ID NO: 2747806 - RNA, 19 nt, Artificial Sequence
  Description of Artificial Sequence: Synthetic oligonucleotide
uagagcccuuauucauguc

SEQ ID NO: 2747807 - RNA, 19 nt, Artificial Sequence
  Description of Artificial Sequence: Synthetic oligonucleotide
ugugcucuuuggggcuugc

SEQ ID NO: 2747808 - RNA, 19 nt, Artificial Sequence
  Description of Artificial Sequence: Synthetic oligonucleotide
gguugaagucaaaaucaaa

SEQ ID NO: 2747809 - RNA, 19 nt, Artificial Sequence
  Description of Artificial Sequence: Synthetic oligonucleotide
accugccggacgacuuugc

SEQ ID NO: 2747810 - RNA, 19 nt, Artificial Sequence
  Description of Artificial Sequence: Synthetic oligonucleotide
aucuaccugccggacgacu

SEQ ID NO: 2747811 - RNA, 19 nt, Artificial Sequence
  Description of Artificial Sequence: Synthetic oligonucleotide
agccagucauucaugcgaa

SEQ ID NO: 2747812 - RNA, 19 nt, Artificial Sequence
  Description of Artificial Sequence: Synthetic oligonucleotide
caguagagcccuuauucau

SEQ ID NO: 2747813 - RNA, 19 nt, Artificial Sequence
  Description of Artificial Sequence: Synthetic oligonucleotide
ggggcuugcuugcucuccc

SEQ ID NO: 2747814 - RNA, 19 nt, Artificial Sequence
  Description of Artificial Sequence: Synthetic oligonucleotide
augcgucuacagccaguca

SEQ ID NO: 2747815 - RNA, 19 nt, Artificial Sequence
  Description of Artificial Sequence: Synthetic oligonucleotide
gauucccacagagauccau

SEQ ID NO: 2747816 - RNA, 19 nt, Artificial Sequence
  Description of Artificial Sequence: Synthetic oligonucleotide
ucgcuagaggcaggacuga

SEQ ID NO: 2747817 - RNA, 19 nt, Artificial Sequence
  Description of Artificial Sequence: Synthetic oligonucleotide
ugucugcacccaugugcuc

SEQ ID NO: 2747818 - RNA, 19 nt, Artificial Sequence
  Description of Artificial Sequence: Synthetic oligonucleotide
gggcugucgcucucaagug

SEQ ID NO: 2747819 - RNA, 19 nt, Artificial Sequence
  Description of Artificial Sequence: Synthetic oligonucleotide
ugcccacuguggagagggc

SEQ ID NO: 2747820 - RNA, 19 nt, Artificial Sequence
  Description of Artificial Sequence: Synthetic oligonucleotide
cgagacuaaaggaacaccu

SEQ ID NO: 2747821 - RNA, 19 nt, Artificial Sequence
  Description of Artificial Sequence: Synthetic oligonucleotide
ccugccggacgacuuugcg

SEQ ID NO: 2747822 - RNA, 19 nt, Artificial Sequence
  Description of Artificial Sequence: Synthetic oligonucleotide
ccugcucuccaggauauuc

SEQ ID NO: 2747823 - RNA, 19 nt, Artificial Sequence
  Description of Artificial Sequence: Synthetic oligonucleotide
guguugcugcgugucgaug

SEQ ID NO: 2747824 - RNA, 19 nt, Artificial Sequence
  Description of Artificial Sequence: Synthetic oligonucleotide
ucgcucucaaguggcccac

SEQ ID NO: 2747825 - RNA, 19 nt, Artificial Sequence
  Description of Artificial Sequence: Synthetic oligonucleotide
acaccuccucguguugcug

SEQ ID NO: 2747826 - RNA, 19 nt, Artificial Sequence
  Description of Artificial Sequence: Synthetic oligonucleotide
uagucgcuagaggcaggac

SEQ ID NO: 2747827 - RNA, 19 nt, Artificial Sequence
  Description of Artificial Sequence: Synthetic oligonucleotide
ggucaugcgucuacagcca

SEQ ID NO: 2747828 - RNA, 19 nt, Artificial Sequence
  Description of Artificial Sequence: Synthetic oligonucleotide
gucgauggcgccagaggaa

SEQ ID NO: 2747829 - RNA, 19 nt, Artificial Sequence
  Description of Artificial Sequence: Synthetic oligonucleotide
cucaaguggcccacucugu

SEQ ID NO: 2747830 - RNA, 19 nt, Artificial Sequence
  Description of Artificial Sequence: Synthetic oligonucleotide
gcugcgugucgauggcgcc

SEQ ID NO: 2747831 - RNA, 19 nt, Artificial Sequence
  Description of Artificial Sequence: Synthetic oligonucleotide
cuguucgucugugaauugu

SEQ ID NO: 2747832 - RNA, 19 nt, Artificial Sequence
  Description of Artificial Sequence: Synthetic oligonucleotide
augugcucuuuggggcuug

SEQ ID NO: 2747833 - RNA, 19 nt, Artificial Sequence
  Description of Artificial Sequence: Synthetic oligonucleotide
accaaucaucccagccaca

SEQ ID NO: 2747834 - RNA, 19 nt, Artificial Sequence
  Description of Artificial Sequence: Synthetic oligonucleotide
gcccuuauucaugucugca

SEQ ID NO: 2747835 - RNA, 19 nt, Artificial Sequence
  Description of Artificial Sequence: Synthetic oligonucleotide
cgccagaggaaucuaccug

SEQ ID NO: 2747836 - RNA, 19 nt, Artificial Sequence
  Description of Artificial Sequence: Synthetic oligonucleotide
ccuguucgucugugaauug

SEQ ID NO: 2747837 - RNA, 19 nt, Artificial Sequence
  Description of Artificial Sequence: Synthetic oligonucleotide
ggcuugcuugcucucccuc

SEQ ID NO: 2747838 - RNA, 19 nt, Artificial Sequence
  Description of Artificial Sequence: Synthetic oligonucleotide
aggugcucucagauaccca

SEQ ID NO: 2747839 - RNA, 19 nt, Artificial Sequence
  Description of Artificial Sequence: Synthetic oligonucleotide
cucgaggcuccgcagcucu

SEQ ID NO: 2747840 - RNA, 19 nt, Artificial Sequence
  Description of Artificial Sequence: Synthetic oligonucleotide
cccacucuguacaugggua

SEQ ID NO: 2747841 - RNA, 19 nt, Artificial Sequence
  Description of Artificial Sequence: Synthetic oligonucleotide
agccacaguagagcccuua

SEQ ID NO: 2747842 - RNA, 19 nt, Artificial Sequence
  Description of Artificial Sequence: Synthetic oligonucleotide
ccggacgacuuugcgaaug

SEQ ID NO: 2747843 - RNA, 19 nt, Artificial Sequence
  Description of Artificial Sequence: Synthetic oligonucleotide
ucgaggcuccgcagcucuu

SEQ ID NO: 2747844 - RNA, 19 nt, Artificial Sequence
  Description of Artificial Sequence: Synthetic oligonucleotide
cugcgugucgauggcgcca

SEQ ID NO: 2747845 - RNA, 19 nt, Artificial Sequence
  Description of Artificial Sequence: Synthetic oligonucleotide
ggcaggacugaagacugua

SEQ ID NO: 2747846 - RNA, 19 nt, Artificial Sequence
  Description of Artificial Sequence: Synthetic oligonucleotide
ggcccacucuguacauggg

SEQ ID NO: 2747847 - RNA, 19 nt, Artificial Sequence
  Description of Artificial Sequence: Synthetic oligonucleotide
guacuucuuucgagaaggu

SEQ ID NO: 2747848 - RNA, 19 nt, Artificial Sequence
  Description of Artificial Sequence: Synthetic oligonucleotide
ccagucauucaugcgaaua

SEQ ID NO: 2747849 - RNA, 19 nt, Artificial Sequence
  Description of Artificial Sequence: Synthetic oligonucleotide
ccucugucaccugcucucc

SEQ ID NO: 2747850 - RNA, 19 nt, Artificial Sequence
  Description of Artificial Sequence: Synthetic oligonucleotide
ccucguguugcugcguguc

SEQ ID NO: 2747851 - RNA, 19 nt, Artificial Sequence
  Description of Artificial Sequence: Synthetic oligonucleotide
aggcaggacugaagacugu

SEQ ID NO: 2747852 - RNA, 19 nt, Artificial Sequence
  Description of Artificial Sequence: Synthetic oligonucleotide
caccugcucuccaggauau

SEQ ID NO: 2747853 - RNA, 19 nt, Artificial Sequence
  Description of Artificial Sequence: Synthetic oligonucleotide
cgucugugaauuguuccuc

SEQ ID NO: 2747854 - RNA, 19 nt, Artificial Sequence
  Description of Artificial Sequence: Synthetic oligonucleotide
guacauggguaugcccacu

SEQ ID NO: 2747855 - RNA, 19 nt, Artificial Sequence
  Description of Artificial Sequence: Synthetic oligonucleotide
gcgccagaggaaucuaccu

SEQ ID NO: 2747856 - RNA, 19 nt, Artificial Sequence
  Description of Artificial Sequence: Synthetic oligonucleotide
auggcgccagaggaaucua

SEQ ID NO: 2747857 - RNA, 19 nt, Artificial Sequence
  Description of Artificial Sequence: Synthetic oligonucleotide
gcucaccucccuguacuuc

SEQ ID NO: 2747858 - RNA, 19 nt, Artificial Sequence
  Description of Artificial Sequence: Synthetic oligonucleotide
ccagaaugaucaugugagu

SEQ ID NO: 2747859 - RNA, 19 nt, Artificial Sequence
  Description of Artificial Sequence: Synthetic oligonucleotide
cgucuacagccagucauuc

SEQ ID NO: 2747860 - RNA, 19 nt, Artificial Sequence
  Description of Artificial Sequence: Synthetic oligonucleotide
gccacaguagagcccuuau

SEQ ID NO: 2747861 - RNA, 19 nt, Artificial Sequence
  Description of Artificial Sequence: Synthetic oligonucleotide
cuaccugccggacgacuuu

SEQ ID NO: 2747862 - RNA, 19 nt, Artificial Sequence
  Description of Artificial Sequence: Synthetic oligonucleotide
ccaugugcucuuuggggcu

SEQ ID NO: 2747863 - RNA, 19 nt, Artificial Sequence
  Description of Artificial Sequence: Synthetic oligonucleotide
uugcggccuuuguccugau

SEQ ID NO: 2747864 - RNA, 19 nt, Artificial Sequence
  Description of Artificial Sequence: Synthetic oligonucleotide
ccacucuguacauggguau

SEQ ID NO: 2747865 - RNA, 19 nt, Artificial Sequence
  Description of Artificial Sequence: Synthetic oligonucleotide
cacuguggagagggcagcu

SEQ ID NO: 2747866 - RNA, 19 nt, Artificial Sequence
  Description of Artificial Sequence: Synthetic oligonucleotide
cggacgacuuugcgaauga

SEQ ID NO: 2747867 - RNA, 19 nt, Artificial Sequence
  Description of Artificial Sequence: Synthetic oligonucleotide
accugcucuccaggauauu

SEQ ID NO: 2747868 - RNA, 19 nt, Artificial Sequence
  Description of Artificial Sequence: Synthetic oligonucleotide
cccuguucgucugugaauu

SEQ ID NO: 2747869 - RNA, 19 nt, Artificial Sequence
  Description of Artificial Sequence: Synthetic oligonucleotide
gcccuguucgucugugaau

SEQ ID NO: 2747870 - RNA, 19 nt, Artificial Sequence
  Description of Artificial Sequence: Synthetic oligonucleotide
cgauggcgccagaggaauc

SEQ ID NO: 2747871 - RNA, 19 nt, Artificial Sequence
  Description of Artificial Sequence: Synthetic oligonucleotide
gugcucuuuggggcuugcu

SEQ ID NO: 2747872 - RNA, 19 nt, Artificial Sequence
  Description of Artificial Sequence: Synthetic oligonucleotide
gggcuugcuugcucucccu

SEQ ID NO: 2747873 - RNA, 19 nt, Artificial Sequence
  Description of Artificial Sequence: Synthetic oligonucleotide
cgaggcuccgcagcucuuc

SEQ ID NO: 2747874 - RNA, 19 nt, Artificial Sequence
  Description of Artificial Sequence: Synthetic oligonucleotide
gcgucuacagccagucauu

SEQ ID NO: 2747875 - RNA, 19 nt, Artificial Sequence
  Description of Artificial Sequence: Synthetic oligonucleotide
cucacuccucucccuucuu

SEQ ID NO: 2747876 - RNA, 19 nt, Artificial Sequence
  Description of Artificial Sequence: Synthetic oligonucleotide
gccagucauucaugcgaau

SEQ ID NO: 2747877 - RNA, 19 nt, Artificial Sequence
  Description of Artificial Sequence: Synthetic oligonucleotide
cgcuagaggcaggacugaa

SEQ ID NO: 2747878 - RNA, 19 nt, Artificial Sequence
  Description of Artificial Sequence: Synthetic oligonucleotide
cguguugcugcgugucgau

SEQ ID NO: 2747879 - RNA, 19 nt, Artificial Sequence
  Description of Artificial Sequence: Synthetic oligonucleotide
cgacuuugcgaaugaucuu

SEQ ID NO: 2747880 - RNA, 19 nt, Artificial Sequence
  Description of Artificial Sequence: Synthetic oligonucleotide
gcgugucgauggcgccaga

SEQ ID NO: 2747881 - RNA, 19 nt, Artificial Sequence
  Description of Artificial Sequence: Synthetic oligonucleotide
gccggacgacuuugcgaau

SEQ ID NO: 2747882 - RNA, 19 nt, Artificial Sequence
  Description of Artificial Sequence: Synthetic oligonucleotide
cugcacccaugugcucuuu

SEQ ID NO: 2747883 - RNA, 19 nt, Artificial Sequence
  Description of Artificial Sequence: Synthetic oligonucleotide
cgcucucaaguggcccacu

SEQ ID NO: 2747884 - RNA, 19 nt, Artificial Sequence
  Description of Artificial Sequence: Synthetic oligonucleotide
gaaguuuugaauuuuaagc

SEQ ID NO: 2747885 - RNA, 19 nt, Artificial Sequence
  Description of Artificial Sequence: Synthetic oligonucleotide
ucaaaauuuaaauucacag

SEQ ID NO: 2747886 - RNA, 19 nt, Artificial Sequence
  Description of Artificial Sequence: Synthetic oligonucleotide
aauauuucuuauaugagac

SEQ ID NO: 2747887 - RNA, 19 nt, Artificial Sequence
  Description of Artificial Sequence: Synthetic oligonucleotide
aacaauacaaggcaauuuc

SEQ ID NO: 2747888 - RNA, 19 nt, Artificial Sequence
  Description of Artificial Sequence: Synthetic oligonucleotide
auauaaaccaguuuauugg

SEQ ID NO: 2747889 - RNA, 19 nt, Artificial Sequence
  Description of Artificial Sequence: Synthetic oligonucleotide
uuugaaauacaauacauga

SEQ ID NO: 2747890 - RNA, 19 nt, Artificial Sequence
  Description of Artificial Sequence: Synthetic oligonucleotide
ugaaauacaauacaugaca

SEQ ID NO: 2747891 - RNA, 19 nt, Artificial Sequence
  Description of Artificial Sequence: Synthetic oligonucleotide
uuucacuuaauauaaacag

SEQ ID NO: 2747892 - RNA, 19 nt, Artificial Sequence
  Description of Artificial Sequence: Synthetic oligonucleotide
cauuauaaacaauacaagg

SEQ ID NO: 2747893 - RNA, 19 nt, Artificial Sequence
  Description of Artificial Sequence: Synthetic oligonucleotide
uccauuauaaacaauacaa

SEQ ID NO: 2747894 - RNA, 19 nt, Artificial Sequence
  Description of Artificial Sequence: Synthetic oligonucleotide
ucacuuaauauaaacagag

SEQ ID NO: 2747895 - RNA, 19 nt, Artificial Sequence
  Description of Artificial Sequence: Synthetic oligonucleotide
ucuuauaugagacagcaga

SEQ ID NO: 2747896 - RNA, 19 nt, Artificial Sequence
  Description of Artificial Sequence: Synthetic oligonucleotide
uuuuacuacauauaaacca

SEQ ID NO: 2747897 - RNA, 19 nt, Artificial Sequence
  Description of Artificial Sequence: Synthetic oligonucleotide
aauauaaacagaggaaggg

SEQ ID NO: 2747898 - RNA, 19 nt, Artificial Sequence
  Description of Artificial Sequence: Synthetic oligonucleotide
uuaauauaaacagaggaag

SEQ ID NO: 2747899 - RNA, 19 nt, Artificial Sequence
  Description of Artificial Sequence: Synthetic oligonucleotide
uuuacuacauauaaaccag

SEQ ID NO: 2747900 - RNA, 19 nt, Artificial Sequence
  Description of Artificial Sequence: Synthetic oligonucleotide
aaauauuucuuauaugaga

SEQ ID NO: 2747901 - RNA, 19 nt, Artificial Sequence
  Description of Artificial Sequence: Synthetic oligonucleotide
uuuauuucacuuaauauaa

SEQ ID NO: 2747902 - RNA, 19 nt, Artificial Sequence
  Description of Artificial Sequence: Synthetic oligonucleotide
aaguuuugaauuuuaagcu

SEQ ID NO: 2747903 - RNA, 19 nt, Artificial Sequence
  Description of Artificial Sequence: Synthetic oligonucleotide
uuauauaguuacaugaucu

SEQ ID NO: 2747904 - RNA, 19 nt, Artificial Sequence
  Description of Artificial Sequence: Synthetic oligonucleotide
uaauauaaacagaggaagg

SEQ ID NO: 2747905 - RNA, 19 nt, Artificial Sequence
  Description of Artificial Sequence: Synthetic oligonucleotide
acuuaauauaaacagagga

SEQ ID NO: 2747906 - RNA, 19 nt, Artificial Sequence
  Description of Artificial Sequence: Synthetic oligonucleotide
aaacuuggaacaugaaaac

SEQ ID NO: 2747907 - RNA, 19 nt, Artificial Sequence
  Description of Artificial Sequence: Synthetic oligonucleotide
uuuuauuucacuuaauaua

SEQ ID NO: 2747908 - RNA, 19 nt, Artificial Sequence
  Description of Artificial Sequence: Synthetic oligonucleotide
ugaauuuuaagcuuuguuc

SEQ ID NO: 2747909 - RNA, 19 nt, Artificial Sequence
  Description of Artificial Sequence: Synthetic oligonucleotide
uauaugagacagcagauug

SEQ ID NO: 2747910 - RNA, 19 nt, Artificial Sequence
  Description of Artificial Sequence: Synthetic oligonucleotide
uuugagacgaaaauucaag

SEQ ID NO: 2747911 - RNA, 19 nt, Artificial Sequence
  Description of Artificial Sequence: Synthetic oligonucleotide
augaaaacugcauuaguac

SEQ ID NO: 2747912 - RNA, 19 nt, Artificial Sequence
  Description of Artificial Sequence: Synthetic oligonucleotide
acaaaagcaccauugaauc

SEQ ID NO: 2747913 - RNA, 19 nt, Artificial Sequence
  Description of Artificial Sequence: Synthetic oligonucleotide
ugaaucauggaggagauag

SEQ ID NO: 2747914 - RNA, 19 nt, Artificial Sequence
  Description of Artificial Sequence: Synthetic oligonucleotide
uuuucauacaguacaauac

SEQ ID NO: 2747915 - RNA, 19 nt, Artificial Sequence
  Description of Artificial Sequence: Synthetic oligonucleotide
gaaacugacaggcuuaaag

SEQ ID NO: 2747916 - RNA, 19 nt, Artificial Sequence
  Description of Artificial Sequence: Synthetic oligonucleotide
uuaugguccauuauaaaca

SEQ ID NO: 2747917 - RNA, 19 nt, Artificial Sequence
  Description of Artificial Sequence: Synthetic oligonucleotide
aacacuaaagcaguuacag

SEQ ID NO: 2747918 - RNA, 19 nt, Artificial Sequence
  Description of Artificial Sequence: Synthetic oligonucleotide
uacaguacaauacagucac

SEQ ID NO: 2747919 - RNA, 19 nt, Artificial Sequence
  Description of Artificial Sequence: Synthetic oligonucleotide
aaaacuuggaacaugaaaa

SEQ ID NO: 2747920 - RNA, 19 nt, Artificial Sequence
  Description of Artificial Sequence: Synthetic oligonucleotide
aauacaauacaugacaaaa

SEQ ID NO: 2747921 - RNA, 19 nt, Artificial Sequence
  Description of Artificial Sequence: Synthetic oligonucleotide
uuagcauaccacaaaagca

SEQ ID NO: 2747922 - RNA, 19 nt, Artificial Sequence
  Description of Artificial Sequence: Synthetic oligonucleotide
caaauagugauuuggaaac

SEQ ID NO: 2747923 - RNA, 19 nt, Artificial Sequence
  Description of Artificial Sequence: Synthetic oligonucleotide
aaugcuggcaaauagugau

SEQ ID NO: 2747924 - RNA, 19 nt, Artificial Sequence
  Description of Artificial Sequence: Synthetic oligonucleotide
ucuuaagaaaguauuuuca

SEQ ID NO: 2747925 - RNA, 19 nt, Artificial Sequence
  Description of Artificial Sequence: Synthetic oligonucleotide
aaaguauuuucaugucuac

SEQ ID NO: 2747926 - RNA, 19 nt, Artificial Sequence
  Description of Artificial Sequence: Synthetic oligonucleotide
gaauuuuaagcuuuguuca

SEQ ID NO: 2747927 - RNA, 19 nt, Artificial Sequence
  Description of Artificial Sequence: Synthetic oligonucleotide
accacaggaguuuaggacc

SEQ ID NO: 2747928 - RNA, 19 nt, Artificial Sequence
  Description of Artificial Sequence: Synthetic oligonucleotide
uuaagcuuuguucagcaug

SEQ ID NO: 2747929 - RNA, 19 nt, Artificial Sequence
  Description of Artificial Sequence: Synthetic oligonucleotide
aauacaaggcaauuucuga

SEQ ID NO: 2747930 - RNA, 19 nt, Artificial Sequence
  Description of Artificial Sequence: Synthetic oligonucleotide
uuaacacuaaagcaguuac

SEQ ID NO: 2747931 - RNA, 19 nt, Artificial Sequence
  Description of Artificial Sequence: Synthetic oligonucleotide
uacaauacagucacaacug

SEQ ID NO: 2747932 - RNA, 19 nt, Artificial Sequence
  Description of Artificial Sequence: Synthetic oligonucleotide
aauuuuaagcuuuguucag

SEQ ID NO: 2747933 - RNA, 19 nt, Artificial Sequence
  Description of Artificial Sequence: Synthetic oligonucleotide
auuggauugucagugauac

SEQ ID NO: 2747934 - RNA, 19 nt, Artificial Sequence
  Description of Artificial Sequence: Synthetic oligonucleotide
acccuguuaacacuaaagc

SEQ ID NO: 2747935 - RNA, 19 nt, Artificial Sequence
  Description of Artificial Sequence: Synthetic oligonucleotide
guuagcauaccacaaaagc

SEQ ID NO: 2747936 - RNA, 19 nt, Artificial Sequence
  Description of Artificial Sequence: Synthetic oligonucleotide
uuaagaaaguauuuucaug

SEQ ID NO: 2747937 - RNA, 19 nt, Artificial Sequence
  Description of Artificial Sequence: Synthetic oligonucleotide
aaacugacaggcuuaaaga

SEQ ID NO: 2747938 - RNA, 19 nt, Artificial Sequence
  Description of Artificial Sequence: Synthetic oligonucleotide
uauuucacuuaauauaaac

SEQ ID NO: 2747939 - RNA, 19 nt, Artificial Sequence
  Description of Artificial Sequence: Synthetic oligonucleotide
aagaaaguauuuucauguc

SEQ ID NO: 2747940 - RNA, 19 nt, Artificial Sequence
  Description of Artificial Sequence: Synthetic oligonucleotide
cuaacugugaacaugcauc

SEQ ID NO: 2747941 - RNA, 19 nt, Artificial Sequence
  Description of Artificial Sequence: Synthetic oligonucleotide
uacuuugagacgaaaauuc

SEQ ID NO: 2747942 - RNA, 19 nt, Artificial Sequence
  Description of Artificial Sequence: Synthetic oligonucleotide
auacaaggcaauuucugac

SEQ ID NO: 2747943 - RNA, 19 nt, Artificial Sequence
  Description of Artificial Sequence: Synthetic oligonucleotide
aaaauauuucuuauaugag

SEQ ID NO: 2747944 - RNA, 19 nt, Artificial Sequence
  Description of Artificial Sequence: Synthetic oligonucleotide
gauuuggaaacugacaggc

SEQ ID NO: 2747945 - RNA, 19 nt, Artificial Sequence
  Description of Artificial Sequence: Synthetic oligonucleotide
aaaccaguuuauuggauug

SEQ ID NO: 2747946 - RNA, 19 nt, Artificial Sequence
  Description of Artificial Sequence: Synthetic oligonucleotide
ucaaugcuggcaaauagug

SEQ ID NO: 2747947 - RNA, 19 nt, Artificial Sequence
  Description of Artificial Sequence: Synthetic oligonucleotide
aguuacaugaucucuuaag

SEQ ID NO: 2747948 - RNA, 19 nt, Artificial Sequence
  Description of Artificial Sequence: Synthetic oligonucleotide
ugagacagcagauugaaau

SEQ ID NO: 2747949 - RNA, 19 nt, Artificial Sequence
  Description of Artificial Sequence: Synthetic oligonucleotide
gucagugauacuuugagac

SEQ ID NO: 2747950 - RNA, 19 nt, Artificial Sequence
  Description of Artificial Sequence: Synthetic oligonucleotide
aaccuuugaaauacaauac

SEQ ID NO: 2747951 - RNA, 19 nt, Artificial Sequence
  Description of Artificial Sequence: Synthetic oligonucleotide
augagaaccuuugaaauac

SEQ ID NO: 2747952 - RNA, 19 nt, Artificial Sequence
  Description of Artificial Sequence: Synthetic oligonucleotide
guuaugguccauuauaaac

SEQ ID NO: 2747953 - RNA, 19 nt, Artificial Sequence
  Description of Artificial Sequence: Synthetic oligonucleotide
cauacaguacaauacaguc

SEQ ID NO: 2747954 - RNA, 19 nt, Artificial Sequence
  Description of Artificial Sequence: Synthetic oligonucleotide
uucauacaguacaauacag

SEQ ID NO: 2747955 - RNA, 19 nt, Artificial Sequence
  Description of Artificial Sequence: Synthetic oligonucleotide
uagcauaccacaaaagcac

SEQ ID NO: 2747956 - RNA, 19 nt, Artificial Sequence
  Description of Artificial Sequence: Synthetic oligonucleotide
ucauggaggagauagcacc

SEQ ID NO: 2747957 - RNA, 19 nt, Artificial Sequence
  Description of Artificial Sequence: Synthetic oligonucleotide
agcagauugaaaugacccc

SEQ ID NO: 2747958 - RNA, 19 nt, Artificial Sequence
  Description of Artificial Sequence: Synthetic oligonucleotide
uuucuuauaugagacagca

SEQ ID NO: 2747959 - RNA, 19 nt, Artificial Sequence
  Description of Artificial Sequence: Synthetic oligonucleotide
gaaccuuugaaauacaaua

SEQ ID NO: 2747960 - RNA, 19 nt, Artificial Sequence
  Description of Artificial Sequence: Synthetic oligonucleotide
uauaaaccaguuuauugga

SEQ ID NO: 2747961 - RNA, 19 nt, Artificial Sequence
  Description of Artificial Sequence: Synthetic oligonucleotide
augucuacuugucuucucc

SEQ ID NO: 2747962 - RNA, 19 nt, Artificial Sequence
  Description of Artificial Sequence: Synthetic oligonucleotide
uguguuaugguccauuaua

SEQ ID NO: 2747963 - RNA, 19 nt, Artificial Sequence
  Description of Artificial Sequence: Synthetic oligonucleotide
uugaaauacaauacaugac

SEQ ID NO: 2747964 - RNA, 19 nt, Artificial Sequence
  Description of Artificial Sequence: Synthetic oligonucleotide
aguacaauacagucacaac

SEQ ID NO: 2747965 - RNA, 19 nt, Artificial Sequence
  Description of Artificial Sequence: Synthetic oligonucleotide
aacaugaaaacugcauuag

SEQ ID NO: 2747966 - RNA, 19 nt, Artificial Sequence
  Description of Artificial Sequence: Synthetic oligonucleotide
uaaacagaggaagggaggg

SEQ ID NO: 2747967 - RNA, 19 nt, Artificial Sequence
  Description of Artificial Sequence: Synthetic oligonucleotide
caccauugaaucauggagg

SEQ ID NO: 2747968 - RNA, 19 nt, Artificial Sequence
  Description of Artificial Sequence: Synthetic oligonucleotide
ugaaaacugcauuaguacu

SEQ ID NO: 2747969 - RNA, 19 nt, Artificial Sequence
  Description of Artificial Sequence: Synthetic oligonucleotide
cuuggaacaugaaaacugc

SEQ ID NO: 2747970 - RNA, 19 nt, Artificial Sequence
  Description of Artificial Sequence: Synthetic oligonucleotide
ucuucucccucaaugcugg

SEQ ID NO: 2747971 - RNA, 19 nt, Artificial Sequence
  Description of Artificial Sequence: Synthetic oligonucleotide
guuuauuggauugucagug

SEQ ID NO: 2747972 - RNA, 19 nt, Artificial Sequence
  Description of Artificial Sequence: Synthetic oligonucleotide
ugguccauuauaaacaaua

SEQ ID NO: 2747973 - RNA, 19 nt, Artificial Sequence
  Description of Artificial Sequence: Synthetic oligonucleotide
aguauuuucaugucuacuu

SEQ ID NO: 2747974 - RNA, 19 nt, Artificial Sequence
  Description of Artificial Sequence: Synthetic oligonucleotide
ucagugauacuuugagacg

SEQ ID NO: 2747975 - RNA, 19 nt, Artificial Sequence
  Description of Artificial Sequence: Synthetic oligonucleotide
auuuuaagcuuuguucagc

SEQ ID NO: 2747976 - RNA, 19 nt, Artificial Sequence
  Description of Artificial Sequence: Synthetic oligonucleotide
gucacaacugaugagaacc

SEQ ID NO: 2747977 - RNA, 19 nt, Artificial Sequence
  Description of Artificial Sequence: Synthetic oligonucleotide
uuuuaagcuuuguucagca

SEQ ID NO: 2747978 - RNA, 19 nt, Artificial Sequence
  Description of Artificial Sequence: Synthetic oligonucleotide
uacccuguuaacacuaaag

SEQ ID NO: 2747979 - RNA, 19 nt, Artificial Sequence
  Description of Artificial Sequence: Synthetic oligonucleotide
uaccacaaaagcaccauug

SEQ ID NO: 2747980 - RNA, 19 nt, Artificial Sequence
  Description of Artificial Sequence: Synthetic oligonucleotide
ugauuuggaaacugacagg

SEQ ID NO: 2747981 - RNA, 19 nt, Artificial Sequence
  Description of Artificial Sequence: Synthetic oligonucleotide
uaguacuguguuauggucc

SEQ ID NO: 2747982 - RNA, 19 nt, Artificial Sequence
  Description of Artificial Sequence: Synthetic oligonucleotide
cagcagauugaaaugaccc

SEQ ID NO: 2747983 - RNA, 19 nt, Artificial Sequence
  Description of Artificial Sequence: Synthetic oligonucleotide
aauagugauuuggaaacug

SEQ ID NO: 2747984 - RNA, 19 nt, Artificial Sequence
  Description of Artificial Sequence: Synthetic oligonucleotide
cuuaauauaaacagaggaa

SEQ ID NO: 2747985 - RNA, 19 nt, Artificial Sequence
  Description of Artificial Sequence: Synthetic oligonucleotide
aaauacaauacaugacaaa

SEQ ID NO: 2747986 - RNA, 19 nt, Artificial Sequence
  Description of Artificial Sequence: Synthetic oligonucleotide
caguuuauuggauugucag

SEQ ID NO: 2747987 - RNA, 19 nt, Artificial Sequence
  Description of Artificial Sequence: Synthetic oligonucleotide
aaaagcaccauugaaucau

SEQ ID NO: 2747988 - RNA, 19 nt, Artificial Sequence
  Description of Artificial Sequence: Synthetic oligonucleotide
agaaaguauuuucaugucu

SEQ ID NO: 2747989 - RNA, 19 nt, Artificial Sequence
  Description of Artificial Sequence: Synthetic oligonucleotide
aauucacaguuauauaguu

SEQ ID NO: 2747990 - RNA, 19 nt, Artificial Sequence
  Description of Artificial Sequence: Synthetic oligonucleotide
cuucuuuucauacaguaca

SEQ ID NO: 2747991 - RNA, 19 nt, Artificial Sequence
  Description of Artificial Sequence: Synthetic oligonucleotide
ccuguuaacacuaaagcag

SEQ ID NO: 2747992 - RNA, 19 nt, Artificial Sequence
  Description of Artificial Sequence: Synthetic oligonucleotide
uuuaggaccuaacugugaa

SEQ ID NO: 2747993 - RNA, 19 nt, Artificial Sequence
  Description of Artificial Sequence: Synthetic oligonucleotide
ugaugagaaccuuugaaau

SEQ ID NO: 2747994 - RNA, 19 nt, Artificial Sequence
  Description of Artificial Sequence: Synthetic oligonucleotide
gaaaacugcauuaguacug

SEQ ID NO: 2747995 - RNA, 19 nt, Artificial Sequence
  Description of Artificial Sequence: Synthetic oligonucleotide
cugacuucuuuucauacag

SEQ ID NO: 2747996 - RNA, 19 nt, Artificial Sequence
  Description of Artificial Sequence: Synthetic oligonucleotide
acaguuauauaguuacaug

SEQ ID NO: 2747997 - RNA, 19 nt, Artificial Sequence
  Description of Artificial Sequence: Synthetic oligonucleotide
uuuugaauuuuaagcuuug

SEQ ID NO: 2747998 - RNA, 19 nt, Artificial Sequence
  Description of Artificial Sequence: Synthetic oligonucleotide
auuaguacuguguuauggu

SEQ ID NO: 2747999 - RNA, 19 nt, Artificial Sequence
  Description of Artificial Sequence: Synthetic oligonucleotide
uauaguuacaugaucucuu

SEQ ID NO: 2748000 - RNA, 19 nt, Artificial Sequence
  Description of Artificial Sequence: Synthetic oligonucleotide
caguuauauaguuacauga

SEQ ID NO: 2748001 - RNA, 19 nt, Artificial Sequence
  Description of Artificial Sequence: Synthetic oligonucleotide
aaucauggaggagauagca

SEQ ID NO: 2748002 - RNA, 19 nt, Artificial Sequence
  Description of Artificial Sequence: Synthetic oligonucleotide
ugugcaguuagcauaccac

SEQ ID NO: 2748003 - RNA, 19 nt, Artificial Sequence
  Description of Artificial Sequence: Synthetic oligonucleotide
aacugacaggcuuaaagaa

SEQ ID NO: 2748004 - RNA, 19 nt, Artificial Sequence
  Description of Artificial Sequence: Synthetic oligonucleotide
cauuaguacuguguuaugg

SEQ ID NO: 2748005 - RNA, 19 nt, Artificial Sequence
  Description of Artificial Sequence: Synthetic oligonucleotide
uauauaguuacaugaucuc

SEQ ID NO: 2748006 - RNA, 19 nt, Artificial Sequence
  Description of Artificial Sequence: Synthetic oligonucleotide
aaauucacaguuauauagu

SEQ ID NO: 2748007 - RNA, 19 nt, Artificial Sequence
  Description of Artificial Sequence: Synthetic oligonucleotide
uuuggaaacugacaggcuu

SEQ ID NO: 2748008 - RNA, 19 nt, Artificial Sequence
  Description of Artificial Sequence: Synthetic oligonucleotide
cuugucuucucccucaaug

SEQ ID NO: 2748009 - RNA, 19 nt, Artificial Sequence
  Description of Artificial Sequence: Synthetic oligonucleotide
cucuuaagaaaguauuuuc

SEQ ID NO: 2748010 - RNA, 19 nt, Artificial Sequence
  Description of Artificial Sequence: Synthetic oligonucleotide
cacuuaauauaaacagagg

SEQ ID NO: 2748011 - RNA, 19 nt, Artificial Sequence
  Description of Artificial Sequence: Synthetic oligonucleotide
guuacaugaucucuuaaga

SEQ ID NO: 2748012 - RNA, 19 nt, Artificial Sequence
  Description of Artificial Sequence: Synthetic oligonucleotide
uauuuucaugucuacuugu

SEQ ID NO: 2748013 - RNA, 19 nt, Artificial Sequence
  Description of Artificial Sequence: Synthetic oligonucleotide
gagacgaaaauucaaguua

SEQ ID NO: 2748014 - RNA, 19 nt, Artificial Sequence
  Description of Artificial Sequence: Synthetic oligonucleotide
uugaauuuuaagcuuuguu

SEQ ID NO: 2748015 - RNA, 19 nt, Artificial Sequence
  Description of Artificial Sequence: Synthetic oligonucleotide
cuuuguucagcaugugugc

SEQ ID NO: 2748016 - RNA, 19 nt, Artificial Sequence
  Description of Artificial Sequence: Synthetic oligonucleotide
guuauauaguuacaugauc

SEQ ID NO: 2748017 - RNA, 19 nt, Artificial Sequence
  Description of Artificial Sequence: Synthetic oligonucleotide
ugaacaugcaucacugaaa

SEQ ID NO: 2748018 - RNA, 19 nt, Artificial Sequence
  Description of Artificial Sequence: Synthetic oligonucleotide
ugauacuuugagacgaaaa

SEQ ID NO: 2748019 - RNA, 19 nt, Artificial Sequence
  Description of Artificial Sequence: Synthetic oligonucleotide
acaugaucucuuaagaaag

SEQ ID NO: 2748020 - RNA, 19 nt, Artificial Sequence
  Description of Artificial Sequence: Synthetic oligonucleotide
uuuucaugucuacuugucu

SEQ ID NO: 2748021 - RNA, 19 nt, Artificial Sequence
  Description of Artificial Sequence: Synthetic oligonucleotide
acuuggaacaugaaaacug

SEQ ID NO: 2748022 - RNA, 19 nt, Artificial Sequence
  Description of Artificial Sequence: Synthetic oligonucleotide
uuacaugaucucuuaagaa

SEQ ID NO: 2748023 - RNA, 19 nt, Artificial Sequence
  Description of Artificial Sequence: Synthetic oligonucleotide
uugagacgaaaauucaagu

SEQ ID NO: 2748024 - RNA, 19 nt, Artificial Sequence
  Description of Artificial Sequence: Synthetic oligonucleotide
cuggcaaauagugauuugg

SEQ ID NO: 2748025 - RNA, 19 nt, Artificial Sequence
  Description of Artificial Sequence: Synthetic oligonucleotide
ugaucucuuaagaaaguau

SEQ ID NO: 2748026 - RNA, 19 nt, Artificial Sequence
  Description of Artificial Sequence: Synthetic oligonucleotide
uggaacaugaaaacugcau

SEQ ID NO: 2748027 - RNA, 19 nt, Artificial Sequence
  Description of Artificial Sequence: Synthetic oligonucleotide
uugucuucucccucaaugc

SEQ ID NO: 2748028 - RNA, 19 nt, Artificial Sequence
  Description of Artificial Sequence: Synthetic oligonucleotide
gaggagauagcaccacagg

SEQ ID NO: 2748029 - RNA, 19 nt, Artificial Sequence
  Description of Artificial Sequence: Synthetic oligonucleotide
guauuuucaugucuacuug

SEQ ID NO: 2748030 - RNA, 19 nt, Artificial Sequence
  Description of Artificial Sequence: Synthetic oligonucleotide
uaggaccuaacugugaaca

SEQ ID NO: 2748031 - RNA, 19 nt, Artificial Sequence
  Description of Artificial Sequence: Synthetic oligonucleotide
uggauugucagugauacuu

SEQ ID NO: 2748032 - RNA, 19 nt, Artificial Sequence
  Description of Artificial Sequence: Synthetic oligonucleotide
uuaaauucacaguuauaua

SEQ ID NO: 2748033 - RNA, 19 nt, Artificial Sequence
  Description of Artificial Sequence: Synthetic oligonucleotide
ugcauuaguacuguguuau

SEQ ID NO: 2748034 - RNA, 19 nt, Artificial Sequence
  Description of Artificial Sequence: Synthetic oligonucleotide
acugaugagaaccuuugaa

SEQ ID NO: 2748035 - RNA, 19 nt, Artificial Sequence
  Description of Artificial Sequence: Synthetic oligonucleotide
auuucuuauaugagacagc

SEQ ID NO: 2748036 - RNA, 19 nt, Artificial Sequence
  Description of Artificial Sequence: Synthetic oligonucleotide
uacaaggcaauuucugacu

SEQ ID NO: 2748037 - RNA, 19 nt, Artificial Sequence
  Description of Artificial Sequence: Synthetic oligonucleotide
uaugguccauuauaaacaa

SEQ ID NO: 2748038 - RNA, 19 nt, Artificial Sequence
  Description of Artificial Sequence: Synthetic oligonucleotide
ugagacgaaaauucaaguu

SEQ ID NO: 2748039 - RNA, 19 nt, Artificial Sequence
  Description of Artificial Sequence: Synthetic oligonucleotide
uuuauuggauugucaguga

SEQ ID NO: 2748040 - RNA, 19 nt, Artificial Sequence
  Description of Artificial Sequence: Synthetic oligonucleotide
gaacaugcaucacugaaaa

SEQ ID NO: 2748041 - RNA, 19 nt, Artificial Sequence
  Description of Artificial Sequence: Synthetic oligonucleotide
gaguuuaggaccuaacugu

SEQ ID NO: 2748042 - RNA, 19 nt, Artificial Sequence
  Description of Artificial Sequence: Synthetic oligonucleotide
gaccuaacugugaacaugc

SEQ ID NO: 2748043 - RNA, 19 nt, Artificial Sequence
  Description of Artificial Sequence: Synthetic oligonucleotide
guacaauacagucacaacu

SEQ ID NO: 2748044 - RNA, 19 nt, Artificial Sequence
  Description of Artificial Sequence: Synthetic oligonucleotide
aguuuugaauuuuaagcuu

SEQ ID NO: 2748045 - RNA, 19 nt, Artificial Sequence
  Description of Artificial Sequence: Synthetic oligonucleotide
uuacuacauauaaaccagu

SEQ ID NO: 2748046 - RNA, 19 nt, Artificial Sequence
  Description of Artificial Sequence: Synthetic oligonucleotide
ggaguuuaggaccuaacug

SEQ ID NO: 2748047 - RNA, 19 nt, Artificial Sequence
  Description of Artificial Sequence: Synthetic oligonucleotide
aguuuauuggauugucagu

SEQ ID NO: 2748048 - RNA, 19 nt, Artificial Sequence
  Description of Artificial Sequence: Synthetic oligonucleotide
aggagauagcaccacagga

SEQ ID NO: 2748049 - RNA, 19 nt, Artificial Sequence
  Description of Artificial Sequence: Synthetic oligonucleotide
uuaguacuguguuaugguc

SEQ ID NO: 2748050 - RNA, 19 nt, Artificial Sequence
  Description of Artificial Sequence: Synthetic oligonucleotide
gaacaugaaaacugcauua

SEQ ID NO: 2748051 - RNA, 19 nt, Artificial Sequence
  Description of Artificial Sequence: Synthetic oligonucleotide
uggcaaauagugauuugga

SEQ ID NO: 2748052 - RNA, 19 nt, Artificial Sequence
  Description of Artificial Sequence: Synthetic oligonucleotide
aggaguuuaggaccuaacu

SEQ ID NO: 2748053 - RNA, 19 nt, Artificial Sequence
  Description of Artificial Sequence: Synthetic oligonucleotide
aguacuguguuauggucca

SEQ ID NO: 2748054 - RNA, 19 nt, Artificial Sequence
  Description of Artificial Sequence: Synthetic oligonucleotide
gauacuuugagacgaaaau

SEQ ID NO: 2748055 - RNA, 19 nt, Artificial Sequence
  Description of Artificial Sequence: Synthetic oligonucleotide
ucugacuucuuuucauaca

SEQ ID NO: 2748056 - RNA, 19 nt, Artificial Sequence
  Description of Artificial Sequence: Synthetic oligonucleotide
accauugaaucauggagga

SEQ ID NO: 2748057 - RNA, 19 nt, Artificial Sequence
  Description of Artificial Sequence: Synthetic oligonucleotide
auauaaacagaggaaggga

SEQ ID NO: 2748058 - RNA, 19 nt, Artificial Sequence
  Description of Artificial Sequence: Synthetic oligonucleotide
acagucacaacugaugaga

SEQ ID NO: 2748059 - RNA, 19 nt, Artificial Sequence
  Description of Artificial Sequence: Synthetic oligonucleotide
acagcagauugaaaugacc

SEQ ID NO: 2748060 - RNA, 19 nt, Artificial Sequence
  Description of Artificial Sequence: Synthetic oligonucleotide
uaaaccaguuuauuggauu

SEQ ID NO: 2748061 - RNA, 19 nt, Artificial Sequence
  Description of Artificial Sequence: Synthetic oligonucleotide
cugugaacaugcaucacug

SEQ ID NO: 2748062 - RNA, 19 nt, Artificial Sequence
  Description of Artificial Sequence: Synthetic oligonucleotide
gcaccauugaaucauggag

SEQ ID NO: 2748063 - RNA, 19 nt, Artificial Sequence
  Description of Artificial Sequence: Synthetic oligonucleotide
agucacaacugaugagaac

SEQ ID NO: 2748064 - RNA, 19 nt, Artificial Sequence
  Description of Artificial Sequence: Synthetic oligonucleotide
cauugaaucauggaggaga

SEQ ID NO: 2748065 - RNA, 19 nt, Artificial Sequence
  Description of Artificial Sequence: Synthetic oligonucleotide
uuauuggauugucagugau

SEQ ID NO: 2748066 - RNA, 19 nt, Artificial Sequence
  Description of Artificial Sequence: Synthetic oligonucleotide
acugcauuaguacuguguu

SEQ ID NO: 2748067 - RNA, 19 nt, Artificial Sequence
  Description of Artificial Sequence: Synthetic oligonucleotide
uucuuauaugagacagcag

SEQ ID NO: 2748068 - RNA, 19 nt, Artificial Sequence
  Description of Artificial Sequence: Synthetic oligonucleotide
uucugacuucuuuucauac

SEQ ID NO: 2748069 - RNA, 19 nt, Artificial Sequence
  Description of Artificial Sequence: Synthetic oligonucleotide
auauaguuacaugaucucu

SEQ ID NO: 2748070 - RNA, 19 nt, Artificial Sequence
  Description of Artificial Sequence: Synthetic oligonucleotide
uaugagacagcagauugaa

SEQ ID NO: 2748071 - RNA, 19 nt, Artificial Sequence
  Description of Artificial Sequence: Synthetic oligonucleotide
uucuuuucauacaguacaa

SEQ ID NO: 2748072 - RNA, 19 nt, Artificial Sequence
  Description of Artificial Sequence: Synthetic oligonucleotide
uacuacauauaaaccaguu

SEQ ID NO: 2748073 - RNA, 19 nt, Artificial Sequence
  Description of Artificial Sequence: Synthetic oligonucleotide
auuuucaugucuacuuguc

SEQ ID NO: 2748074 - RNA, 19 nt, Artificial Sequence
  Description of Artificial Sequence: Synthetic oligonucleotide
caugaaaacugcauuagua

SEQ ID NO: 2748075 - RNA, 19 nt, Artificial Sequence
  Description of Artificial Sequence: Synthetic oligonucleotide
aaacaauacaaggcaauuu

SEQ ID NO: 2748076 - RNA, 19 nt, Artificial Sequence
  Description of Artificial Sequence: Synthetic oligonucleotide
gaaauacaauacaugacaa

SEQ ID NO: 2748077 - RNA, 19 nt, Artificial Sequence
  Description of Artificial Sequence: Synthetic oligonucleotide
gaaaguauuuucaugucua

SEQ ID NO: 2748078 - RNA, 19 nt, Artificial Sequence
  Description of Artificial Sequence: Synthetic oligonucleotide
acuacauauaaaccaguuu

SEQ ID NO: 2748079 - RNA, 19 nt, Artificial Sequence
  Description of Artificial Sequence: Synthetic oligonucleotide
aacugcauuaguacugugu

SEQ ID NO: 2748080 - RNA, 19 nt, Artificial Sequence
  Description of Artificial Sequence: Synthetic oligonucleotide
caacugaugagaaccuuug

SEQ ID NO: 2748081 - RNA, 19 nt, Artificial Sequence
  Description of Artificial Sequence: Synthetic oligonucleotide
ccauuauaaacaauacaag

SEQ ID NO: 2748082 - RNA, 19 nt, Artificial Sequence
  Description of Artificial Sequence: Synthetic oligonucleotide
agcauaccacaaaagcacc

SEQ ID NO: 2748083 - RNA, 19 nt, Artificial Sequence
  Description of Artificial Sequence: Synthetic oligonucleotide
ugcaguuagcauaccacaa

SEQ ID NO: 2748084 - RNA, 19 nt, Artificial Sequence
  Description of Artificial Sequence: Synthetic oligonucleotide
uuguucagcaugugugcag

SEQ ID NO: 2748085 - RNA, 19 nt, Artificial Sequence
  Description of Artificial Sequence: Synthetic oligonucleotide
ugucuucucccucaaugcu

SEQ ID NO: 2748086 - RNA, 19 nt, Artificial Sequence
  Description of Artificial Sequence: Synthetic oligonucleotide
gacuucuuuucauacagua

SEQ ID NO: 2748087 - RNA, 19 nt, Artificial Sequence
  Description of Artificial Sequence: Synthetic oligonucleotide
aaauagugauuuggaaacu

SEQ ID NO: 2748088 - RNA, 19 nt, Artificial Sequence
  Description of Artificial Sequence: Synthetic oligonucleotide
ucuacuugucuucucccuc

SEQ ID NO: 2748089 - RNA, 19 nt, Artificial Sequence
  Description of Artificial Sequence: Synthetic oligonucleotide
acaccuuguacccuguuaa

SEQ ID NO: 2748090 - RNA, 19 nt, Artificial Sequence
  Description of Artificial Sequence: Synthetic oligonucleotide
ucucccucaaugcuggcaa

SEQ ID NO: 2748091 - RNA, 19 nt, Artificial Sequence
  Description of Artificial Sequence: Synthetic oligonucleotide
acaugaaaacugcauuagu

SEQ ID NO: 2748092 - RNA, 19 nt, Artificial Sequence
  Description of Artificial Sequence: Synthetic oligonucleotide
uucaugucuacuugucuuc

SEQ ID NO: 2748093 - RNA, 19 nt, Artificial Sequence
  Description of Artificial Sequence: Synthetic oligonucleotide
ugucuacuugucuucuccc

SEQ ID NO: 2748094 - RNA, 19 nt, Artificial Sequence
  Description of Artificial Sequence: Synthetic oligonucleotide
acaauacagucacaacuga

SEQ ID NO: 2748095 - RNA, 19 nt, Artificial Sequence
  Description of Artificial Sequence: Synthetic oligonucleotide
accacaaaagcaccauuga

SEQ ID NO: 2748096 - RNA, 19 nt, Artificial Sequence
  Description of Artificial Sequence: Synthetic oligonucleotide
gaugagaaccuuugaaaua

SEQ ID NO: 2748097 - RNA, 19 nt, Artificial Sequence
  Description of Artificial Sequence: Synthetic oligonucleotide
augugugcaguuagcauac

SEQ ID NO: 2748098 - RNA, 19 nt, Artificial Sequence
  Description of Artificial Sequence: Synthetic oligonucleotide
ucacaacugaugagaaccu

SEQ ID NO: 2748099 - RNA, 19 nt, Artificial Sequence
  Description of Artificial Sequence: Synthetic oligonucleotide
uguuaugguccauuauaaa

SEQ ID NO: 2748100 - RNA, 19 nt, Artificial Sequence
  Description of Artificial Sequence: Synthetic oligonucleotide
aguuauauaguuacaugau

SEQ ID NO: 2748101 - RNA, 19 nt, Artificial Sequence
  Description of Artificial Sequence: Synthetic oligonucleotide
uaaacaauacaaggcaauu

SEQ ID NO: 2748102 - RNA, 19 nt, Artificial Sequence
  Description of Artificial Sequence: Synthetic oligonucleotide
caccacaggaguuuaggac

SEQ ID NO: 2748103 - RNA, 19 nt, Artificial Sequence
  Description of Artificial Sequence: Synthetic oligonucleotide
uauuggauugucagugaua

SEQ ID NO: 2748104 - RNA, 19 nt, Artificial Sequence
  Description of Artificial Sequence: Synthetic oligonucleotide
aacagaggaagggagggaa

SEQ ID NO: 2748105 - RNA, 19 nt, Artificial Sequence
  Description of Artificial Sequence: Synthetic oligonucleotide
cugaugagaaccuuugaaa

SEQ ID NO: 2748106 - RNA, 19 nt, Artificial Sequence
  Description of Artificial Sequence: Synthetic oligonucleotide
ucacaguuauauaguuaca

SEQ ID NO: 2748107 - RNA, 19 nt, Artificial Sequence
  Description of Artificial Sequence: Synthetic oligonucleotide
auaaacaauacaaggcaau

SEQ ID NO: 2748108 - RNA, 19 nt, Artificial Sequence
  Description of Artificial Sequence: Synthetic oligonucleotide
agugauuuggaaacugaca

SEQ ID NO: 2748109 - RNA, 19 nt, Artificial Sequence
  Description of Artificial Sequence: Synthetic oligonucleotide
gcaaauagugauuuggaaa

SEQ ID NO: 2748110 - RNA, 19 nt, Artificial Sequence
  Description of Artificial Sequence: Synthetic oligonucleotide
cacuaaagcaguuacagau

SEQ ID NO: 2748111 - RNA, 19 nt, Artificial Sequence
  Description of Artificial Sequence: Synthetic oligonucleotide
uuugaauuuuaagcuuugu

SEQ ID NO: 2748112 - RNA, 19 nt, Artificial Sequence
  Description of Artificial Sequence: Synthetic oligonucleotide
aacaccuuguacccuguua

SEQ ID NO: 2748113 - RNA, 19 nt, Artificial Sequence
  Description of Artificial Sequence: Synthetic oligonucleotide
accaguuuauuggauuguc

SEQ ID NO: 2748114 - RNA, 19 nt, Artificial Sequence
  Description of Artificial Sequence: Synthetic oligonucleotide
ccccucaaaauuuaaauuc

SEQ ID NO: 2748115 - RNA, 19 nt, Artificial Sequence
  Description of Artificial Sequence: Synthetic oligonucleotide
auaguuacaugaucucuua

SEQ ID NO: 2748116 - RNA, 19 nt, Artificial Sequence
  Description of Artificial Sequence: Synthetic oligonucleotide
uuucugacuucuuuucaua

SEQ ID NO: 2748117 - RNA, 19 nt, Artificial Sequence
  Description of Artificial Sequence: Synthetic oligonucleotide
ggagauagcaccacaggag

SEQ ID NO: 2748118 - RNA, 19 nt, Artificial Sequence
  Description of Artificial Sequence: Synthetic oligonucleotide
agcaccauugaaucaugga

SEQ ID NO: 2748119 - RNA, 19 nt, Artificial Sequence
  Description of Artificial Sequence: Synthetic oligonucleotide
agcuuuguucagcaugugu

SEQ ID NO: 2748120 - RNA, 19 nt, Artificial Sequence
  Description of Artificial Sequence: Synthetic oligonucleotide
agcaccacaggaguuuagg

SEQ ID NO: 2748121 - RNA, 19 nt, Artificial Sequence
  Description of Artificial Sequence: Synthetic oligonucleotide
aguuagcauaccacaaaag

SEQ ID NO: 2748122 - RNA, 19 nt, Artificial Sequence
  Description of Artificial Sequence: Synthetic oligonucleotide
aaacugcauuaguacugug

SEQ ID NO: 2748123 - RNA, 19 nt, Artificial Sequence
  Description of Artificial Sequence: Synthetic oligonucleotide
ugagaaccuuugaaauaca

SEQ ID NO: 2748124 - RNA, 19 nt, Artificial Sequence
  Description of Artificial Sequence: Synthetic oligonucleotide
acgaaaauucaaguuauuu

SEQ ID NO: 2748125 - RNA, 19 nt, Artificial Sequence
  Description of Artificial Sequence: Synthetic oligonucleotide
uuauaugagacagcagauu

SEQ ID NO: 2748126 - RNA, 19 nt, Artificial Sequence
  Description of Artificial Sequence: Synthetic oligonucleotide
uuguacccuguuaacacua

SEQ ID NO: 2748127 - RNA, 19 nt, Artificial Sequence
  Description of Artificial Sequence: Synthetic oligonucleotide
aucauggaggagauagcac

SEQ ID NO: 2748128 - RNA, 19 nt, Artificial Sequence
  Description of Artificial Sequence: Synthetic oligonucleotide
ugugaacaugcaucacuga

SEQ ID NO: 2748129 - RNA, 19 nt, Artificial Sequence
  Description of Artificial Sequence: Synthetic oligonucleotide
auacuuugagacgaaaauu

SEQ ID NO: 2748130 - RNA, 19 nt, Artificial Sequence
  Description of Artificial Sequence: Synthetic oligonucleotide
aagcaccauugaaucaugg

SEQ ID NO: 2748131 - RNA, 19 nt, Artificial Sequence
  Description of Artificial Sequence: Synthetic oligonucleotide
acacuaaagcaguuacaga

SEQ ID NO: 2748132 - RNA, 19 nt, Artificial Sequence
  Description of Artificial Sequence: Synthetic oligonucleotide
gugaacaugcaucacugaa

SEQ ID NO: 2748133 - RNA, 19 nt, Artificial Sequence
  Description of Artificial Sequence: Synthetic oligonucleotide
cuuugagacgaaaauucaa

SEQ ID NO: 2748134 - RNA, 19 nt, Artificial Sequence
  Description of Artificial Sequence: Synthetic oligonucleotide
gcuuuguucagcaugugug

SEQ ID NO: 2748135 - RNA, 19 nt, Artificial Sequence
  Description of Artificial Sequence: Synthetic oligonucleotide
uggaggagauagcaccaca

SEQ ID NO: 2748136 - RNA, 19 nt, Artificial Sequence
  Description of Artificial Sequence: Synthetic oligonucleotide
aguuuaggaccuaacugug

SEQ ID NO: 2748137 - RNA, 19 nt, Artificial Sequence
  Description of Artificial Sequence: Synthetic oligonucleotide
uuaggaccuaacugugaac

SEQ ID NO: 2748138 - RNA, 19 nt, Artificial Sequence
  Description of Artificial Sequence: Synthetic oligonucleotide
agacgaaaauucaaguuau

SEQ ID NO: 2748139 - RNA, 19 nt, Artificial Sequence
  Description of Artificial Sequence: Synthetic oligonucleotide
ugacuucuuuucauacagu

SEQ ID NO: 2748140 - RNA, 19 nt, Artificial Sequence
  Description of Artificial Sequence: Synthetic oligonucleotide
uguucagcaugugugcagu

SEQ ID NO: 2748141 - RNA, 19 nt, Artificial Sequence
  Description of Artificial Sequence: Synthetic oligonucleotide
uaguuacaugaucucuuaa

SEQ ID NO: 2748142 - RNA, 19 nt, Artificial Sequence
  Description of Artificial Sequence: Synthetic oligonucleotide
auagugauuuggaaacuga

SEQ ID NO: 2748143 - RNA, 19 nt, Artificial Sequence
  Description of Artificial Sequence: Synthetic oligonucleotide
gagauagcaccacaggagu

SEQ ID NO: 2748144 - RNA, 19 nt, Artificial Sequence
  Description of Artificial Sequence: Synthetic oligonucleotide
acaaggcaauuucugacuu

SEQ ID NO: 2748145 - RNA, 19 nt, Artificial Sequence
  Description of Artificial Sequence: Synthetic oligonucleotide
gugcaguuagcauaccaca

SEQ ID NO: 2748146 - RNA, 19 nt, Artificial Sequence
  Description of Artificial Sequence: Synthetic oligonucleotide
gaaucauggaggagauagc

SEQ ID NO: 2748147 - RNA, 19 nt, Artificial Sequence
  Description of Artificial Sequence: Synthetic oligonucleotide
aaagcaccauugaaucaug

SEQ ID NO: 2748148 - RNA, 19 nt, Artificial Sequence
  Description of Artificial Sequence: Synthetic oligonucleotide
aaccaguuuauuggauugu

SEQ ID NO: 2748149 - RNA, 19 nt, Artificial Sequence
  Description of Artificial Sequence: Synthetic oligonucleotide
cacaaaagcaccauugaau

SEQ ID NO: 2748150 - RNA, 19 nt, Artificial Sequence
  Description of Artificial Sequence: Synthetic oligonucleotide
acuuugagacgaaaauuca

SEQ ID NO: 2748151 - RNA, 19 nt, Artificial Sequence
  Description of Artificial Sequence: Synthetic oligonucleotide
uguuaacacuaaagcaguu

SEQ ID NO: 2748152 - RNA, 19 nt, Artificial Sequence
  Description of Artificial Sequence: Synthetic oligonucleotide
uuuaagcuuuguucagcau

SEQ ID NO: 2748153 - RNA, 19 nt, Artificial Sequence
  Description of Artificial Sequence: Synthetic oligonucleotide
acuguguuaugguccauua

SEQ ID NO: 2748154 - RNA, 19 nt, Artificial Sequence
  Description of Artificial Sequence: Synthetic oligonucleotide
ccuuguacccuguuaacac

SEQ ID NO: 2748155 - RNA, 19 nt, Artificial Sequence
  Description of Artificial Sequence: Synthetic oligonucleotide
caaaagcaccauugaauca

SEQ ID NO: 2748156 - RNA, 19 nt, Artificial Sequence
  Description of Artificial Sequence: Synthetic oligonucleotide
agcaugugugcaguuagca

SEQ ID NO: 2748157 - RNA, 19 nt, Artificial Sequence
  Description of Artificial Sequence: Synthetic oligonucleotide
uguacccuguuaacacuaa

SEQ ID NO: 2748158 - RNA, 19 nt, Artificial Sequence
  Description of Artificial Sequence: Synthetic oligonucleotide
agaaccuuugaaauacaau

SEQ ID NO: 2748159 - RNA, 19 nt, Artificial Sequence
  Description of Artificial Sequence: Synthetic oligonucleotide
ucaugucuacuugucuucu

SEQ ID NO: 2748160 - RNA, 19 nt, Artificial Sequence
  Description of Artificial Sequence: Synthetic oligonucleotide
aaacagaggaagggaggga

SEQ ID NO: 2748161 - RNA, 19 nt, Artificial Sequence
  Description of Artificial Sequence: Synthetic oligonucleotide
gaucucuuaagaaaguauu

SEQ ID NO: 2748162 - RNA, 19 nt, Artificial Sequence
  Description of Artificial Sequence: Synthetic oligonucleotide
cagugauacuuugagacga

SEQ ID NO: 2748163 - RNA, 19 nt, Artificial Sequence
  Description of Artificial Sequence: Synthetic oligonucleotide
gacagcagauugaaaugac

SEQ ID NO: 2748164 - RNA, 19 nt, Artificial Sequence
  Description of Artificial Sequence: Synthetic oligonucleotide
uaaagcaguuacagauuuu

SEQ ID NO: 2748165 - RNA, 19 nt, Artificial Sequence
  Description of Artificial Sequence: Synthetic oligonucleotide
auaugagacagcagauuga

SEQ ID NO: 2748166 - RNA, 19 nt, Artificial Sequence
  Description of Artificial Sequence: Synthetic oligonucleotide
accuuguacccuguuaaca

SEQ ID NO: 2748167 - RNA, 19 nt, Artificial Sequence
  Description of Artificial Sequence: Synthetic oligonucleotide
auugaaucauggaggagau

SEQ ID NO: 2748168 - RNA, 19 nt, Artificial Sequence
  Description of Artificial Sequence: Synthetic oligonucleotide
auggaggagauagcaccac

SEQ ID NO: 2748169 - RNA, 19 nt, Artificial Sequence
  Description of Artificial Sequence: Synthetic oligonucleotide
cauggaggagauagcacca

SEQ ID NO: 2748170 - RNA, 19 nt, Artificial Sequence
  Description of Artificial Sequence: Synthetic oligonucleotide
guuaacacuaaagcaguua

SEQ ID NO: 2748171 - RNA, 19 nt, Artificial Sequence
  Description of Artificial Sequence: Synthetic oligonucleotide
cuguuaacacuaaagcagu

SEQ ID NO: 2748172 - RNA, 19 nt, Artificial Sequence
  Description of Artificial Sequence: Synthetic oligonucleotide
cuacuugucuucucccuca

SEQ ID NO: 2748173 - RNA, 19 nt, Artificial Sequence
  Description of Artificial Sequence: Synthetic oligonucleotide
cuuauaugagacagcagau

SEQ ID NO: 2748174 - RNA, 19 nt, Artificial Sequence
  Description of Artificial Sequence: Synthetic oligonucleotide
caguacaauacagucacaa

SEQ ID NO: 2748175 - RNA, 19 nt, Artificial Sequence
  Description of Artificial Sequence: Synthetic oligonucleotide
ugcuggcaaauagugauuu

SEQ ID NO: 2748176 - RNA, 19 nt, Artificial Sequence
  Description of Artificial Sequence: Synthetic oligonucleotide
guguuaugguccauuauaa

SEQ ID NO: 2748177 - RNA, 19 nt, Artificial Sequence
  Description of Artificial Sequence: Synthetic oligonucleotide
gguccauuauaaacaauac

SEQ ID NO: 2748178 - RNA, 19 nt, Artificial Sequence
  Description of Artificial Sequence: Synthetic oligonucleotide
augaucucuuaagaaagua

SEQ ID NO: 2748179 - RNA, 19 nt, Artificial Sequence
  Description of Artificial Sequence: Synthetic oligonucleotide
caggaguuuaggaccuaac

SEQ ID NO: 2748180 - RNA, 19 nt, Artificial Sequence
  Description of Artificial Sequence: Synthetic oligonucleotide
ggaggagauagcaccacag

SEQ ID NO: 2748181 - RNA, 19 nt, Artificial Sequence
  Description of Artificial Sequence: Synthetic oligonucleotide
caaugcuggcaaauaguga

SEQ ID NO: 2748182 - RNA, 19 nt, Artificial Sequence
  Description of Artificial Sequence: Synthetic oligonucleotide
gagaaccuuugaaauacaa

SEQ ID NO: 2748183 - RNA, 19 nt, Artificial Sequence
  Description of Artificial Sequence: Synthetic oligonucleotide
caaggcaauuucugacuuc

SEQ ID NO: 2748184 - RNA, 19 nt, Artificial Sequence
  Description of Artificial Sequence: Synthetic oligonucleotide
auaccacaaaagcaccauu

SEQ ID NO: 2748185 - RNA, 19 nt, Artificial Sequence
  Description of Artificial Sequence: Synthetic oligonucleotide
ccucaaugcuggcaaauag

SEQ ID NO: 2748186 - RNA, 19 nt, Artificial Sequence
  Description of Artificial Sequence: Synthetic oligonucleotide
acuaaagcaguuacagauu

SEQ ID NO: 2748187 - RNA, 19 nt, Artificial Sequence
  Description of Artificial Sequence: Synthetic oligonucleotide
gugugcaguuagcauacca

SEQ ID NO: 2748188 - RNA, 19 nt, Artificial Sequence
  Description of Artificial Sequence: Synthetic oligonucleotide
auaaaccaguuuauuggau

SEQ ID NO: 2748189 - RNA, 19 nt, Artificial Sequence
  Description of Artificial Sequence: Synthetic oligonucleotide
acaacugaugagaaccuuu

SEQ ID NO: 2748190 - RNA, 19 nt, Artificial Sequence
  Description of Artificial Sequence: Synthetic oligonucleotide
cucaaugcuggcaaauagu

SEQ ID NO: 2748191 - RNA, 19 nt, Artificial Sequence
  Description of Artificial Sequence: Synthetic oligonucleotide
cagcaugugugcaguuagc

SEQ ID NO: 2748192 - RNA, 19 nt, Artificial Sequence
  Description of Artificial Sequence: Synthetic oligonucleotide
uucagcaugugugcaguua

SEQ ID NO: 2748193 - RNA, 19 nt, Artificial Sequence
  Description of Artificial Sequence: Synthetic oligonucleotide
uagcaccacaggaguuuag

SEQ ID NO: 2748194 - RNA, 19 nt, Artificial Sequence
  Description of Artificial Sequence: Synthetic oligonucleotide
ggcaaauagugauuuggaa

SEQ ID NO: 2748195 - RNA, 19 nt, Artificial Sequence
  Description of Artificial Sequence: Synthetic oligonucleotide
caugucuacuugucuucuc

SEQ ID NO: 2748196 - RNA, 19 nt, Artificial Sequence
  Description of Artificial Sequence: Synthetic oligonucleotide
uggaaacugacaggcuuaa

SEQ ID NO: 2748197 - RNA, 19 nt, Artificial Sequence
  Description of Artificial Sequence: Synthetic oligonucleotide
cuaaagcaguuacagauuu

SEQ ID NO: 2748198 - RNA, 19 nt, Artificial Sequence
  Description of Artificial Sequence: Synthetic oligonucleotide
auucacaguuauauaguua

SEQ ID NO: 2748199 - RNA, 19 nt, Artificial Sequence
  Description of Artificial Sequence: Synthetic oligonucleotide
uuggauugucagugauacu

SEQ ID NO: 2748200 - RNA, 19 nt, Artificial Sequence
  Description of Artificial Sequence: Synthetic oligonucleotide
guuuugaauuuuaagcuuu

SEQ ID NO: 2748201 - RNA, 19 nt, Artificial Sequence
  Description of Artificial Sequence: Synthetic oligonucleotide
caccuuguacccuguuaac

SEQ ID NO: 2748202 - RNA, 19 nt, Artificial Sequence
  Description of Artificial Sequence: Synthetic oligonucleotide
ggaccuaacugugaacaug

SEQ ID NO: 2748203 - RNA, 19 nt, Artificial Sequence
  Description of Artificial Sequence: Synthetic oligonucleotide
aggaccuaacugugaacau

SEQ ID NO: 2748204 - RNA, 19 nt, Artificial Sequence
  Description of Artificial Sequence: Synthetic oligonucleotide
cccuguuaacacuaaagca

SEQ ID NO: 2748205 - RNA, 19 nt, Artificial Sequence
  Description of Artificial Sequence: Synthetic oligonucleotide
cccucaaaauuuaaauuca

SEQ ID NO: 2748206 - RNA, 19 nt, Artificial Sequence
  Description of Artificial Sequence: Synthetic oligonucleotide
auuuggaaacugacaggcu

SEQ ID NO: 2748207 - RNA, 19 nt, Artificial Sequence
  Description of Artificial Sequence: Synthetic oligonucleotide
aaacaccuuguacccuguu

SEQ ID NO: 2748208 - RNA, 19 nt, Artificial Sequence
  Description of Artificial Sequence: Synthetic oligonucleotide
uacuguguuaugguccauu

SEQ ID NO: 2748209 - RNA, 19 nt, Artificial Sequence
  Description of Artificial Sequence: Synthetic oligonucleotide
acagaggaagggagggaag

SEQ ID NO: 2748210 - RNA, 19 nt, Artificial Sequence
  Description of Artificial Sequence: Synthetic oligonucleotide
ggaacaugaaaacugcauu

SEQ ID NO: 2748211 - RNA, 19 nt, Artificial Sequence
  Description of Artificial Sequence: Synthetic oligonucleotide
guuuaggaccuaacuguga

SEQ ID NO: 2748212 - RNA, 19 nt, Artificial Sequence
  Description of Artificial Sequence: Synthetic oligonucleotide
aagcuuuguucagcaugug

SEQ ID NO: 2748213 - RNA, 19 nt, Artificial Sequence
  Description of Artificial Sequence: Synthetic oligonucleotide
caugaucucuuaagaaagu

SEQ ID NO: 2748214 - RNA, 19 nt, Artificial Sequence
  Description of Artificial Sequence: Synthetic oligonucleotide
cacaguuauauaguuacau

SEQ ID NO: 2748215 - RNA, 19 nt, Artificial Sequence
  Description of Artificial Sequence: Synthetic oligonucleotide
gauagcaccacaggaguuu

SEQ ID NO: 2748216 - RNA, 19 nt, Artificial Sequence
  Description of Artificial Sequence: Synthetic oligonucleotide
cagucacaacugaugagaa

SEQ ID NO: 2748217 - RNA, 19 nt, Artificial Sequence
  Description of Artificial Sequence: Synthetic oligonucleotide
cuuguacccuguuaacacu

SEQ ID NO: 2748218 - RNA, 19 nt, Artificial Sequence
  Description of Artificial Sequence: Synthetic oligonucleotide
gcaguuagcauaccacaaa

SEQ ID NO: 2748219 - RNA, 19 nt, Artificial Sequence
  Description of Artificial Sequence: Synthetic oligonucleotide
acaggaguuuaggaccuaa

SEQ ID NO: 2748220 - RNA, 19 nt, Artificial Sequence
  Description of Artificial Sequence: Synthetic oligonucleotide
ugugugcaguuagcauacc

SEQ ID NO: 2748221 - RNA, 19 nt, Artificial Sequence
  Description of Artificial Sequence: Synthetic oligonucleotide
ucccucaaugcuggcaaau

SEQ ID NO: 2748222 - RNA, 19 nt, Artificial Sequence
  Description of Artificial Sequence: Synthetic oligonucleotide
gcauuaguacuguguuaug

SEQ ID NO: 2748223 - RNA, 19 nt, Artificial Sequence
  Description of Artificial Sequence: Synthetic oligonucleotide
gucuacuugucuucucccu

SEQ ID NO: 2748224 - RNA, 19 nt, Artificial Sequence
  Description of Artificial Sequence: Synthetic oligonucleotide
ccuuugaaauacaauacau

SEQ ID NO: 2748225 - RNA, 19 nt, Artificial Sequence
  Description of Artificial Sequence: Synthetic oligonucleotide
agugauacuuugagacgaa

SEQ ID NO: 2748226 - RNA, 19 nt, Artificial Sequence
  Description of Artificial Sequence: Synthetic oligonucleotide
gcuggcaaauagugauuug

SEQ ID NO: 2748227 - RNA, 19 nt, Artificial Sequence
  Description of Artificial Sequence: Synthetic oligonucleotide
agggaaguuuugaauuuua

SEQ ID NO: 2748228 - RNA, 19 nt, Artificial Sequence
  Description of Artificial Sequence: Synthetic oligonucleotide
acuugucuucucccucaau

SEQ ID NO: 2748229 - RNA, 19 nt, Artificial Sequence
  Description of Artificial Sequence: Synthetic oligonucleotide
gcaauuucugacuucuuuu

SEQ ID NO: 2748230 - RNA, 19 nt, Artificial Sequence
  Description of Artificial Sequence: Synthetic oligonucleotide
guacccuguuaacacuaaa

SEQ ID NO: 2748231 - RNA, 19 nt, Artificial Sequence
  Description of Artificial Sequence: Synthetic oligonucleotide
auagcaccacaggaguuua

SEQ ID NO: 2748232 - RNA, 19 nt, Artificial Sequence
  Description of Artificial Sequence: Synthetic oligonucleotide
gggagggaaguuuugaauu

SEQ ID NO: 2748233 - RNA, 19 nt, Artificial Sequence
  Description of Artificial Sequence: Synthetic oligonucleotide
ccaguuuauuggauuguca

SEQ ID NO: 2748234 - RNA, 19 nt, Artificial Sequence
  Description of Artificial Sequence: Synthetic oligonucleotide
agaggaagggagggaaguu

SEQ ID NO: 2748235 - RNA, 19 nt, Artificial Sequence
  Description of Artificial Sequence: Synthetic oligonucleotide
cugcauuaguacuguguua

SEQ ID NO: 2748236 - RNA, 19 nt, Artificial Sequence
  Description of Artificial Sequence: Synthetic oligonucleotide
cuucucccucaaugcuggc

SEQ ID NO: 2748237 - RNA, 19 nt, Artificial Sequence
  Description of Artificial Sequence: Synthetic oligonucleotide
gcaccacaggaguuuagga

SEQ ID NO: 2748238 - RNA, 19 nt, Artificial Sequence
  Description of Artificial Sequence: Synthetic oligonucleotide
agauagcaccacaggaguu

SEQ ID NO: 2748239 - RNA, 19 nt, Artificial Sequence
  Description of Artificial Sequence: Synthetic oligonucleotide
ggcaauuucugacuucuuu

SEQ ID NO: 2748240 - RNA, 19 nt, Artificial Sequence
  Description of Artificial Sequence: Synthetic oligonucleotide
ggaagggagggaaguuuug

SEQ ID NO: 2748241 - RNA, 19 nt, Artificial Sequence
  Description of Artificial Sequence: Synthetic oligonucleotide
gugauacuuugagacgaaa

SEQ ID NO: 2748242 - RNA, 19 nt, Artificial Sequence
  Description of Artificial Sequence: Synthetic oligonucleotide
acaguacaauacagucaca

SEQ ID NO: 2748243 - RNA, 19 nt, Artificial Sequence
  Description of Artificial Sequence: Synthetic oligonucleotide
cauaccacaaaagcaccau

SEQ ID NO: 2748244 - RNA, 19 nt, Artificial Sequence
  Description of Artificial Sequence: Synthetic oligonucleotide
cgaaaauucaaguuauuuu

SEQ ID NO: 2748245 - RNA, 19 nt, Artificial Sequence
  Description of Artificial Sequence: Synthetic oligonucleotide
gcauaccacaaaagcacca

SEQ ID NO: 2748246 - RNA, 19 nt, Artificial Sequence
  Description of Artificial Sequence: Synthetic oligonucleotide
gaggaagggagggaaguuu

SEQ ID NO: 2748247 - RNA, 19 nt, Artificial Sequence
  Description of Artificial Sequence: Synthetic oligonucleotide
ggagggaaguuuugaauuu

SEQ ID NO: 2748248 - RNA, 19 nt, Artificial Sequence
  Description of Artificial Sequence: Synthetic oligonucleotide
accuaacugugaacaugca

SEQ ID NO: 2748249 - RNA, 19 nt, Artificial Sequence
  Description of Artificial Sequence: Synthetic oligonucleotide
augagacagcagauugaaa

SEQ ID NO: 2748250 - RNA, 19 nt, Artificial Sequence
  Description of Artificial Sequence: Synthetic oligonucleotide
augguccauuauaaacaau

SEQ ID NO: 2748251 - RNA, 19 nt, Artificial Sequence
  Description of Artificial Sequence: Synthetic oligonucleotide
gagggaaguuuugaauuuu

SEQ ID NO: 2748252 - RNA, 19 nt, Artificial Sequence
  Description of Artificial Sequence: Synthetic oligonucleotide
augcuggcaaauagugauu

SEQ ID NO: 2748253 - RNA, 19 nt, Artificial Sequence
  Description of Artificial Sequence: Synthetic oligonucleotide
ccauugaaucauggaggag

SEQ ID NO: 2748254 - RNA, 19 nt, Artificial Sequence
  Description of Artificial Sequence: Synthetic oligonucleotide
gacgaaaauucaaguuauu

SEQ ID NO: 2748255 - RNA, 19 nt, Artificial Sequence
  Description of Artificial Sequence: Synthetic oligonucleotide
cuguguuaugguccauuau

SEQ ID NO: 2748256 - RNA, 19 nt, Artificial Sequence
  Description of Artificial Sequence: Synthetic oligonucleotide
gcaugugugcaguuagcau

SEQ ID NO: 2748257 - RNA, 19 nt, Artificial Sequence
  Description of Artificial Sequence: Synthetic oligonucleotide
ccuaacugugaacaugcau

SEQ ID NO: 2748258 - RNA, 19 nt, Artificial Sequence
  Description of Artificial Sequence: Synthetic oligonucleotide
ggauugucagugauacuuu

SEQ ID NO: 2748259 - RNA, 19 nt, Artificial Sequence
  Description of Artificial Sequence: Synthetic oligonucleotide
ccacaggaguuuaggaccu

SEQ ID NO: 2748260 - RNA, 19 nt, Artificial Sequence
  Description of Artificial Sequence: Synthetic oligonucleotide
ggaaacugacaggcuuaaa

SEQ ID NO: 2748261 - RNA, 19 nt, Artificial Sequence
  Description of Artificial Sequence: Synthetic oligonucleotide
cacaacugaugagaaccuu

SEQ ID NO: 2748262 - RNA, 19 nt, Artificial Sequence
  Description of Artificial Sequence: Synthetic oligonucleotide
cacaggaguuuaggaccua

SEQ ID NO: 2748263 - RNA, 19 nt, Artificial Sequence
  Description of Artificial Sequence: Synthetic oligonucleotide
cccucaaugcuggcaaaua

SEQ ID NO: 2748264 - RNA, 19 nt, Artificial Sequence
  Description of Artificial Sequence: Synthetic oligonucleotide
aaaguaaugucaaggaagc

SEQ ID NO: 2748265 - RNA, 19 nt, Artificial Sequence
  Description of Artificial Sequence: Synthetic oligonucleotide
aauacaaacacuugcuuca

SEQ ID NO: 2748266 - RNA, 19 nt, Artificial Sequence
  Description of Artificial Sequence: Synthetic oligonucleotide
aagagcagcaauccuaagg

SEQ ID NO: 2748267 - RNA, 19 nt, Artificial Sequence
  Description of Artificial Sequence: Synthetic oligonucleotide
aauccuaagguccagcagu

SEQ ID NO: 2748268 - RNA, 19 nt, Artificial Sequence
  Description of Artificial Sequence: Synthetic oligonucleotide
aaacacuugcuucagcaag

SEQ ID NO: 2748269 - RNA, 19 nt, Artificial Sequence
  Description of Artificial Sequence: Synthetic oligonucleotide
uguggaucuccacauaagg

SEQ ID NO: 2748270 - RNA, 19 nt, Artificial Sequence
  Description of Artificial Sequence: Synthetic oligonucleotide
auuuguaucagucuaucca

SEQ ID NO: 2748271 - RNA, 19 nt, Artificial Sequence
  Description of Artificial Sequence: Synthetic oligonucleotide
aaggaagcaaggaagcugc

SEQ ID NO: 2748272 - RNA, 19 nt, Artificial Sequence
  Description of Artificial Sequence: Synthetic oligonucleotide
uguuacagagaaagcaggg

SEQ ID NO: 2748273 - RNA, 19 nt, Artificial Sequence
  Description of Artificial Sequence: Synthetic oligonucleotide
uuacagagaaagcaggggc

SEQ ID NO: 2748274 - RNA, 19 nt, Artificial Sequence
  Description of Artificial Sequence: Synthetic oligonucleotide
acuuguucgauccacagca

SEQ ID NO: 2748275 - RNA, 19 nt, Artificial Sequence
  Description of Artificial Sequence: Synthetic oligonucleotide
aauucuguggauucgcaga

SEQ ID NO: 2748276 - RNA, 19 nt, Artificial Sequence
  Description of Artificial Sequence: Synthetic oligonucleotide
aucggguuuauacagaaug

SEQ ID NO: 2748277 - RNA, 19 nt, Artificial Sequence
  Description of Artificial Sequence: Synthetic oligonucleotide
guagacaaaggagagacgg

SEQ ID NO: 2748278 - RNA, 19 nt, Artificial Sequence
  Description of Artificial Sequence: Synthetic oligonucleotide
ucuguggauucgcagaagg

SEQ ID NO: 2748279 - RNA, 19 nt, Artificial Sequence
  Description of Artificial Sequence: Synthetic oligonucleotide
uguucgauccacagcaagg

SEQ ID NO: 2748280 - RNA, 19 nt, Artificial Sequence
  Description of Artificial Sequence: Synthetic oligonucleotide
ugaggcucgaguuugucgg

SEQ ID NO: 2748281 - RNA, 19 nt, Artificial Sequence
  Description of Artificial Sequence: Synthetic oligonucleotide
aaggguaucucuguuacag
